United States Patent Application Publication US 2005/0228172 A9 - sequence listing, part 139

SEQ ID NO: 656740 - DNA, 551 bp, Homo sapiens
tgaggcaggaggatcctttgagcccaggaagtaaaggtggcagtgagccatatatatggtgccactgcactccagactgggaaaygaagcaagaccctgtctctaaaaatgaaaaaataaagaaaataaagatatcagtggtttctagaggttcacagacacagatttgagtaggtgaagcacaagagattgcctagagtggtgaaactattctgtatgatactgcaatggtggatagatgatattatgcatttatcaaaacccataaaagtctagagcacaaaaacttaaccgtaatgtatgaaaatttttaaaaaattatttaggaggttaggagatcccagatacaaggtaaactgtgactatacaaccatccaatcttcaacaaggccaacaaaaacaagcaacaaggaaaggacactctattcaataaatggtgctgggataactggttagtatgcagaagattgaaactggatccctacctttcaccagatacaaaaattaactgaggatgaattaaagactcaaatgtacgctctcaaactata

SEQ ID NO: 656741 - DNA, 642 bp, Homo sapiens
tgcatactgcatgattatattacattctggaaaaagcaaacttatagagagggtaaagatatcatttgaaagcagcctgggcaagatggcaagaccctggctctacaaaaaaaattaaaaattagctgggcatggtggtgcacacctgtagtcccagctacttgggaggctgaggcaggaggatcctttgagcccaggaagtaaaggtggcagtgagccatatatatggtgccactgcactccagactgggaaacgaagcaagaccctgtctctaaaaatgaaaaaataaagaaaataaagatatcagtggtttctagaggttcacagacacagatttgagtaggtgaagcacaagagattkcctagagtggtgaaactattctgtatgatactgcaatggtggatagatgatattatgcatttatcaaaacccataaaagtctagagcacaaaaacttaaccgtaatgtatgaaaatttttaaaaaattatttaggaggttaggagatcccagatacaaggtaaactgtgactatacaaccatccaatcttcaacaaggccaacaaaaacaagcaacaaggaaaggacactctattcaataaatggtgctgggataactggttagtatgcagaagattgaa

SEQ ID NO: 656742 - DNA, 642 bp, Homo sapiens
tgcatactgcatgattatattacattctggaaaaagcaaacttatagagagggtaaagatatcatttgaaagcagcctgggcaagatggcaagaccctggctctacaaaaaaaattaaaaattagctgggcatggtggtgcacacctgtagtcccagctacttgggaggctgaggcaggaggatcctttgagcccaggaagtaaaggtggcagtgagccatatatatggtgccactgcactccagactgggaaacgaagcaagaccctgtctctaaaaatgaaaaaataaagaaaataaagatatcagtggtttctagaggttcacagacacagatttgagtaggtgaagcacaagagattgcctagagtggtgaaactattctgtatgatactgcaatggtggatagatgatattatgcatttatcaaaacccataaaagtctagagcacaaaaacttaaccgtaatgtatgmaaatttttaaaaaattatttaggaggttaggagatcccagatacaaggtaaactgtgactatacaaccatccaatcttcaacaaggccaacaaaaacaagcaacaaggaaaggacactctattcaataaatggtgctgggataactggttagtatgcagaagattgaa

SEQ ID NO: 656743 - DNA, 642 bp, Homo sapiens
tgcatactgcatgattatattacattctggaaaaagcaaacttatagagagggtaaagatatcatttgaaagcagcctgggcaagatggcaagaccctggctctacaaaaaaaattaaaaattagctgggcatggtggtgcacacctgtagtcccagctacttgggaggctgaggcaggaggatcctttgagcccaggaagtaaaggtggcagtgagccatatatatggtgccactgcactccagactgggaaacgaagcaagaccctgtctctaaaaatgaaaaaataaagaaaataaagatatcagtggtttctagaggttcacagacacagatttgagtaggtgaagcacaagagattgcctagagtggtgaaactattctgtatgatactgcaatggtggatagatgatattatgcatttatcaaaacccataaaagtctagagcacaaaaacttaaccgtaatgtatgaaaatttttaaaaaattatttaggaggttaggagatcccagatacaaggtaaactgtgactatacaaccatccaatcttcaacaaggccaasaaaaacaagcaacaaggaaaggacactctattcaataaatggtgctgggataactggttagtatgcagaagattgaa

SEQ ID NO: 656744 - DNA, 585 bp, Homo sapiens
gtccacatgactgtgtgtccctgtgatgcccatatctttcgcataatatagaaaagacatttttgtctatgcctaaaatgttggggcctacagatttctggcattctccaatgaatctkgtccaattaaaggcaaaagggaaccttccgatctgaaatcttttctctttccctcttgcctcaggtatctttgtgacaggcctgggcctttctgacctttaacctagcaaaggtctttattctattattattattattattattattattattatcatccctggctaactctttctttcagttgctgtgtatatgttgacttgtttgaggtctgtcttccccacaagaatgtacagctgtgacattttcagtattttattttcccgagtgtttccagccctgagcatattgcctggcacatgccaagctcagtaaatacctgtagaatcaggctttaaattatgtcttcattgacaataagtcaaagactctatcctttctgacctgcaccttctttattgtaaaatgagaatattagatcataggtttttgtgaggaataagtatatgttggaaattttgcttat

SEQ ID NO: 656745 - DNA, 452 bp, Homo sapiens
taaaaccatcggaactcataagaactcattcactatcatgagaacagcaacatgggggtaactgcctccatgattcaattacctcccactgggtccctcccacccacaatacatggggattctgggaactatagttcaagatgagatttgggttgtgaaaacagccaaccatatcactgatatttaataataatttcaatatcagcacgtttttcaatgcccaccatgtctattagtacaaacaaatacagacatggtctttgcagaaaataattgttttatttaaaaaaaaaaaacagttttctggataagtgaaaaaagaaaagttatttgtaatcaaaactaaatagaacacaatyaaattgcaaaacttcatcaacaagaaaattatagaatatgtaagatctttcaacagctaaagacctggttctgtgcattgcaatatgaagtgg

SEQ ID NO: 656746 - DNA, 589 bp, Homo sapiens
aaaactattgcttctgaggcttttattttggggtgttgttttctgagtcctaacatcatcttcccagaatctttgccttcctttcattctttgtctcttgtcattcattcttctcagaacagccagtgtgatgtcttaacaaataaataaaataaggtttatgttattttcttgcttagcttttccagtagtttcttcgcactttagaccaaaataaataaatgagcatrtttttcaaaaacccaatcatcattccataagctataaaaccatccttgatctagcccttatctacttttcaaacctcacttattttacttctttctgtttaaacatgctaagtttgctcctggctcggaaactatgcagttatttctttgggcaaatgttttcctgctttgagagaggaaaaaaaaattctctaccatcttaggttttgaaattgtagtcatggattaaatcgacagaagacaaattaagagaaaagtcatacacatttaattgcttttattttacacacatggggactacacagaaagaaagacaaaacccaaagaagcagttggactgggagcttatataccattct

SEQ ID NO: 656747 - DNA, 553 bp, Homo sapiens
tggaaaacatattcaaagaaataaatcaagaaaacttccttaatcttgctagagaggtagacatccagatacaggaaacctagaggacacctatgagatacaaaacgaacatcatcaaggtatatagtcaccagatggttcaaggtcaatgccaaagaaaaaagtcttaaaggcagctagaagaaaatatcagattacatacaaaggaaaccccatcaggctaacaacagatttctcatcagatactttataagccagaagagattgggggtctattttgagcatttttaaagaaaagacattccaaccaagaaatttcatagcccaccaaactaagattcrtaagtgaaaaagaaataaatattttctagtcaagcaagtgctaagggaatttgttaccactagatcagccttacaagagattcttaaaggaattctaaacatgaaaatgaaagaacatatcaatattaacgtaatataacaggtctaaattcctcatctaaaagacatagaattgcaagatggatttaaaaactccatctgctgtattcaa

SEQ ID NO: 656748 - DNA, 564 bp, Homo sapiens
gcagttggggcattcacagtatttggggtgtctcccaggtcctgcaagagcagtctgcttccttcagaggatgtgtgggtcctctcaggattgctggtttgttcttgcagttgatctggagctaaaattcatgatgtgagcctctgcaggctgctctgtctgtcygagtcagagctgcaatctccataccttcatttaaattcagaagctacacgtcttccaactagtctcatcgtgcatagacttgacccgcccattgagtatgttccacactccgtacctggtgtacgaaatgtgtggcatgtacacacatggattttagcaggatacatggctaagaagcactgctagtccagaatgtgaatccatatgtgtagtatgaatacaaagttaactggtaacagtgaaaaaaaagagttttgaaaagacaggatttttgactaattgatcctaaaaacaaatttatgaaacaactataatatgaacaatatatataactttttggaatttaaaaaggctatttattcatataatcacatttttaaaaaataaaatatcacatat

SEQ ID NO: 656749 - DNA, 561 bp, Homo sapiens
ccattctttatcatggtagtctaagccattatcatctttaccttgggctgctgaaatttccttctgtttgcccatccatcattcttttaccaaaaattctatattctacacaaaagcaagaatcagtttgctttcgtgtagaatatagaacttcataagcaagctgacttgcttacaaaatgcaaattagatcatgttgcttccctggtgaacatcctcccattactttccattataactagaataaaatccacaacctttaccattgcctagaagccctgcactatctggctcatccccacctctgtgatctcatctcctwctgctctaaccattgctcaacgcattttagcaatattgaccttctttttctttcctggatatcaccaggacccttttccttagagggagtttacatcccagtttccctgagtggtccaggtttttgcctgttgttctgatgtcctattcacttttgcatttgcacttgagcatttgtctcagactcatcttttgttttaaaactaaggcttattaattgttgcattaaaataagccaaa

SEQ ID NO: 656750 - DNA, 592 bp, Homo sapiens
atggaggcagggaatgagaagttttcctgaccctccctcccttaactccacccccaggtctctgcctgcacgcccctcccctcctccagcttggcactggctgctcctgcgtgctgggaggtgcccccctctcccgtgcccgcccgaagaaccaggcgccccagtgccctctccgggagaaagcgtgcccctgtcggcgagcctgttgccaacgtatggttccragttcccaagagcagaggccagctggaaggggttttcagtttgactttggcctttctcacggtctcctcgctcttcgcctgcttagcaggggcctctgctgcggtgacagccaaggccacagccacccacgcaggacccgttcactttcccctccgagcttacttgtctttctaccctaaggggctgctgcggccagagcagcctatctgagcagtaagttaggtggcctttagttgggcttctctcttctggggtgcctccagcagcctgtccccctggctggtgtcatcagatcagctctctttgcacatttagacactgcaaggaggccagctggtgttaatctagttttatcagaaattctcac

SEQ ID NO: 656751 - DNA, 604 bp, Homo sapiens
ggtaggtagttagagactgcagattaaaaagtggaagtcctattgcagttttagaattgaactgtgttgcatttgtttatactctggttagtcttagatgcttattctctaatttgttttaatcacagttttctaaagaagcagcttttcctttcaaccatccagtaatgttcagaaagttcatggggatctttgtcagtagaggagttagcaaagtagcattatcattttgttgcacagtggaaaaaccttccccagttatcaaaaagcagtttccttaatgagctatcaaaactattatacctcatcacatggtgtcctttatgggtgggctgttatgtttggcaaagaagtgtggcgtaccacatttgtttgaagaaacctttccctctctggaagaaacatgtaatcttggtacagcactgtggaaaattgtgctgaggtttcattgttgaatattccagaatgggacttttttatttagaagactgctacatcttcaygtaccatcttcatgtgaatttctttggaagctcctgacaaattagaagttgttcctctaactatgtcttaatcatgaggtatgttggttaacaatggggca

SEQ ID NO: 656752 - DNA, 632 bp, Homo sapiens
tctcatggtaaaatagctgacttttcctagagtgaatgaactgagatactaagacaaaagctgaaatgcytcttatgactaagtcttagaagtcacagactgtcacttctgccctgttgtactggtcacacaagggcagccttgacacattagaagagggaactgtaaaagggcatgagtacatggaggggaggatcattggaggccatttttgagactgaataccctagtccaccctatggcccccagtgattcatgttcctcctacttaaaaatatatacttatctccttcctcaaggccaccaagtctcatgccattacagtatcagcttaaagtccaagattgggtcacctaaatcagatctgggtatagctccttgaatattgatcctctagatctggagacctgtgaactatggagacaagttatctgttcctcatacaaccagcacccctaaattacaggaaaggtgtagggtagtagcattccactttcttcagaaagggagagaataggagtcacacagcagtcactggtccatggcagttctgaaatctaaccaggcacatgttgccaagtccttaattcaggctcaatcctgctgccttagaatgattctttaaggttctt

SEQ ID NO: 656753 - DNA, 632 bp, Homo sapiens
tctcatggtaaaatagctgacttttcctagagtgaatgaactgagatactaagacaaaagctgaaatgcttcttatgactaagtcttagaagtcacagactgtcacttctgccctgttgtactggtcacacaagggcagccttgacacattagaagagggaactgtaaaagggcatgagtacatggaggggaggrtcattggaggccatttttgagactgaataccctagtccaccctatggcccccagtgattcatgttcctcctacttaaaaatatatacttatctccttcctcaaggccaccaagtctcatgccattacagtatcagcttaaagtccaagattgggtcacctaaatcagatctgggtatagctccttgaatattgatcctctagatctggagacctgtgaactatggagacaagttatctgttcctcatacaaccagcacccctaaattacaggaaaggtgtagggtagtagcattccactttcttcagaaagggagagaataggagtcacacagcagtcactggtccatggcagttctgaaatctaaccaggcacatgttgccaagtccttaattcaggctcaatcctgctgccttagaatgattctttaaggttctt

SEQ ID NO: 656754 - DNA, 560 bp, Homo sapiens
tggaatttcaataggaaaggtaaagcgaatagaattctgtgcaaaattacagcttgcttttgttgtgtcctcccacctttctttctgaacccattttgtatttcttacctcctctatagcctggtggttcttggccttccttgactacccaagaaaaactrcaacacccctcatctgcactctccctgtccagcttctctgctttattctctgtattgcactccctaccatgatatatttagtgaatacctactatgtgcctaactgaacctggcacacagtatctattctctaaatatttgttgaatgaataaatgactaccatctgcaaataaagagtagcttttccttccactgtaaaattcaaagttttcctctctgctctaatgcaaaccttcatttttctagaagctttgaagcatcagttttatgtaactcaatttcccatggaggtaaataaggcctaagcttcccaaaggaatattttcattttcaaaaaagatctttgtaacccccaaagaggttctattggatggaatatgtcaggagaaatatttttg

SEQ ID NO: 656755 - DNA, 566 bp, Homo sapiens
gccttagtttttccatatgaaaaaaagaaaaaaaaatgaaaagaaaagaagaaaagaaggaaggggagagagaaagagaaagaaagaaagaaaaagaaagaaagaaagaagagaaagaaagaaagaagaaaagaaaagaaaaagaaaagaaggacggagggaggaaggaatgaagattttaaaaatctaatcttagctccttttagaagctaagagggcataatgaaataataccgtataaaagtataaagtaggggccggccatggtggtttaygcctgtaatcccagcactttgggaggccgaggtgggcagatcacttgagatcaggagttagagaccagcctgggcaacacggtgaaaccccatctctactaaaaatacaaaaaattagctgagtgtggtggtgggcgcctgtaatcccagctactagggaggttgaggcaggagaatcgcttgaacctgggaggcggaagttgtggtgagccaagatcacgacactgcactccagcctgggtgacaaaagcgaaactccatctcaaaaaaacccaagaacaataacaaaag

SEQ ID NO: 656756 - DNA, 348 bp, Homo sapiens
acttctgacccacaaaactttaataaataaatttgtrataatttaaggcactaagtttgtggtaaactaacacagccatgttgtgaaaacaaccaaaaccaacttacatttccttttcgttttagtttttcattagtttaatatgcctttcaactactgccatagagttgaatatttttagcattggttttggtagaggtaacttttgtttacctttttaatctatagaatatttgtgagctaaattactaaagctaaattgaaaagaaactttgcttttgtacttgtatttttcttgcaaaaacaacttaaataaggtatttcgactctttaaataaagatttctct

SEQ ID NO: 656757 - DNA, 581 bp, Homo sapiens
tggtcattctgcaccgcaatctgctatggcataacaccattcctagggttttgggcctggtaactgctctatacaccacttatatctgcagtcttatcatggcctaccatggtcaggtgggtccttggcagtcactacttacagcactgcctctagcagttcagttgctttaggattcttgtggctacttccttgttcctcatgagaggtccaggaactttgttctctctttctatgccactctaggatcctgtgaaaattgaatgatgtggtgtctgttctccctatttaacaagcyctttccctcatttaactctcatacagttcttatttggctttcaaaactcatcttagggagcctatgattatcaacagtttcttccatctgatattacttcgctgcaatttcacagcaaatcatgaatattgatattttttctagtaaccccctcatcatcttatattaagtagtatgtttcttatttataattatttgttgtttccttttatgagaatatgagctccctggccaggcgcagtggctcacacctgtaatcccagctatttgagcagccaaggca

SEQ ID NO: 656758 - DNA, 586 bp, Homo sapiens
aatttttatctactcatatcttctattaarttgattaatttttgtatgttgaaccattctgtatgcttgagataaatcccacttggttgtgttgtataatcctttttatatattggtggatttagtttgctagtattttgttgagaatttttgcatgtaagagatattggcttttgtttacttttgatatctttgtgtggttgtggtatcagtgtaattctagcttgatagaatgcgttgcaaatatcactttcttttctattttctgcaagaatttgtgaaggattggtcgtttttaattatacatttggtgtagtaccacagtaaagccattctgtttttactttgtgggagtattttgatgactaagtcattctcttaattgttacaggtttatctaaatttttatttcttcttgagtcagttttcatagttcatgtatttctagaaatttttctactaacaactttatctaatttttgtcatacaattattgttagtatcccttcatgatattttttttatttctgggaaatataattactacctttatttatagattccttattggtttaatattcattta

SEQ ID NO: 656759 - DNA, 588 bp, Homo sapiens
gccatagtaaacatcgctttagaagactgctttatctatacggaaatttaggagaaataaatgatggagaagctataaagattcagaatatgataaaggcagtgatgctacwgaaagtagagaacttaaagccaaaatcaaagaaacagtaatttggtgagaacatgtaacaatgcatgaagtactgcttgagtgacttttacataagggcaggcaggttctgcctacatgttgaaaaaaagctttactggtttccatattgtttctcctggaccctaaagtgagccacggataaaatgacagtaattaggatattcagtaggcattacctgagctgacaactcccacagggaaggtggcaaatgccagggcaaaagctaggaagtgacagtggcctttgcacagtaaattgaaacctttgtgccaggcctctgctgatctcgcggggggaaaaatcactacaaaaactcagaaaactcctttacccattgaagcccatatttgtctcggcaaacactcatcttcctgtctgtgaaccattatccctctctgtctatctttcctcacactttgtccccttcacatgct

SEQ ID NO: 656760 - DNA, 588 bp, Homo sapiens
gccatagtaaacatcgctttagaagactgctttatctatacggaaatttaggagaaataaatgatggagaagctataaagattcagaatatgataaaggcagtgatgctactgaaagtagagaacttaaagccaaaatcaaagaaacagtaatttggtgagaacatgtaacaatscatgaagtactgcttgagtgacttttacataagggcaggcaggttctgcctacatgttgaaaaaaagctttactggtttccatattgtttctcctggaccctaaagtgagccacggataaaatgacagtaattaggatattcagtaggcattacctgagctgacaactcccacagggaaggtggcaaatgccagggcaaaagctaggaagtgacagtggcctttgcacagtaaattgaaacctttgtgccaggcctctgctgatctcgcggggggaaaaatcactacaaaaactcagaaaactcctttacccattgaagcccatatttgtctcggcaaacactcatcttcctgtctgtgaaccattatccctctctgtctatctttcctcacactttgtccccttcacatgct

SEQ ID NO: 656761 - DNA, 616 bp, Homo sapiens
ccaagaaagatgcagtggatgctgctccatagtaagcagaccctcaacatcagctctccgcctctggtttgccctggagccttaggctagaggtccaggcatgcactgggaaactgacctgtgtttcctggcacactatgaatgaagtaccaggcctggatgtgggatgccagagcccttatttaaaatcttcccctattgttgaaaaactccagtggcccccaatctctcccctcatcttcattacaaggaatcttcagcagaaaataaaggaaatgatgcatttcaaggtccaaggaacctcgactcaggcagtttgaaatataaaagacatcaaaaatgtgaataatggcaagtccaggagtggaggaaacttcaggttgatttcatgactcsggctgttctccctctctttcgctttcttcagcaacaacttcattctagcagcaaccagaagaaaaggagagtgtgatttcctgtagctttttcttaggaacaagaaaacttcttagaagtttcctggaggattttccactgcatgtcagtttctgtaaataaagaaggctgcaggaggaaatggatgccaggtagtgactaataatatgcactaccttgt

SEQ ID NO: 656762 - DNA, 616 bp, Homo sapiens
ccaagaaagatgcagtggatgctgctccatagtaagcagaccctcaacatcagctctccgcctctggtttgccctggagccttaggctagaggtccaggcatgcactgggaaactgacctgtgtttcctggcacactatgaatgaagtaccaggcctggatgtgggatgccagagcccttatttaaaatcttcccctattgttgaaaaactccagtggcccccaatctctcccctcatcttcattacaaggaatcttcagcagaaaataaaggaaatgatgcatttcaaggtccaaggaacctcgactcaggcagtttgaaatataaaagacatcaaaaatgtgaataatggcaagtccaggagtggaggaaacttcaggttgatttcatgactccggctgttctccctctctttcgctttcttcagcaacaacttcattctagcagcaaccagaagaaaaggagartgtgatttcctgtagctttttcttaggaacaagaaaacttcttagaagtttcctggaggattttccactgcatgtcagtttctgtaaataaagaaggctgcaggaggaaatggatgccaggtagtgactaataatatgcactaccttgt

SEQ ID NO: 656763 - DNA, 616 bp, Homo sapiens
ccaagaaagatgcagtggatgctgctccatagtaagcagaccctcaacatcagctctccgcctctggtttgccctggagccttaggctagaggtccaggcatgcactgggaaactgacctgtgtttcctggcacactatgaatgaagtaccaggcctggatgtgggatgccagagcccttatttaaaatcttcccctattgttgaaaaactccagtggcccccaatctctcccctcatcttcattacaaggaatcttcagcagaaaataaaggaaatgatgcatttcaaggtccaaggaacctcgactcaggcagtttgaaatataaaagacatcaaaaatgtgaataatggcaagtccaggagtggaggaaacttcaggttgatttcatgactccggctgttctccctctctttcgctttcttcagcaacaacttcattctagcagcaaccagaagaaaaggagagtgtgatttcctgtagctttttcttaggaacaagaaaacttcttagaagtttcctggaggattttccactgcatgtcagtttctgtaaataaagaaggcygcaggaggaaatggatgccaggtagtgactaataatatgcactaccttgt

SEQ ID NO: 656764 - DNA, 581 bp, Homo sapiens
ggtaatttttttgcaaatgagggatggaaacacaaagacttagtgatttgcctgattctatatggctgataattagggtgaccacattatttatcttctaaaccaggatatttttgagaatgaaagggggcagtcttaataactacactggagagcaggtgtaaattgggccaatcctgggccacgtactggtgggatgtattttccaccagtacatgggacagagtatgaactgaagcatagaactccagcccacaaatttgatgttcttccaactatactggatctggyctttcagtccagctgaaactaagaaattcatgtggaaaacagttcttagtccatccaagagtactgtatttaaaataagcctttaatgattgcaaataatatgtttgcaaaattttaacgaatctcagaaaatgttcagtaaaagtcacaggcattgaatccatacaaataagataaactgggctttaattgcaggtaatttagttttatagtgaaaaccaaggggaatatagattcgatcaattctgttttgcacaggaggaatgaaattaggtataggactccatgct

SEQ ID NO: 656765 - DNA, 581 bp, Homo sapiens
ggtaatttttttgcaaatgagggatggaaacacaaagacttagtgatttgcctgattctatatggctgataattagggtgaccacattatttatcttctaaaccaggatatttttgagaatgaaagggggcagtcttaataactacactggagagcaggtgtaaattgggccaatcctgggccacgtactggtgggatgtattttccaccagtacatgggacagagtatgaactgaagcatagaactccagcccacaaatttgatgttcttccaactatactggatctggtctttcagtccagctgaaactaagaaattcatgtggaaaacagttcttagtccatccaagagtactgtatttaaaataagcctttaatgattgcaaataatatgtttgcaaaattttaacgaatctcagaaaatgttcagtaaaagtcacaggcattkaatccatacaaataagataaactgggctttaattgcaggtaatttagttttatagtgaaaaccaaggggaatatagattcgatcaattctgttttgcacaggaggaatgaaattaggtataggactccatgct

SEQ ID NO: 656766 - DNA, 612 bp, Homo sapiens
gcctactgctatcaaaagaggtgtaataaccatgaccagcattgcagggagatttttggtaaagatgcaaaaagtgcatctcagaattgctataaagaaatcaaytctcagggaaaccgttttggtcactgtggtataaatggcacaacatacctaaaatgtcatatctctgatgtcttttgtgggagagttcaatgtgagaatgtgagagacattcctcttctccaagatcattttactttgcagcacactcatatcaatggtgtcacctgctggggtattgactatcatttaaggatgaacatatctgacattggtgaagtgaaagatggtactgtgtgtggcccaggaaagatctgcatccataagaagtgtgtcagtctgtctgtcttgtcacatgtctgccttcctgagacctgcaatatgaaggggatctgcaataacaaacatcactgccactgtggctatgggtggtccccaccctactgccagcacagaggctatgggggcagtattgacagtggcccagcatctgcaaagagaggagtttttttgccgctgattgtgattccttctttgtctgttttgactttcctgtttactgtcgggctt

SEQ ID NO: 656767 - DNA, 449 bp, Homo sapiens
ctctggcttttttttttaactgaaagaggattggtaaaggaagtaaccataatttttwaaaaaatattttaaataaatcctgagcatggtactccccaaagtctctaagctaatgggttagactagaaaatgaacacttggcctctttttttgtactttccctctaactgtctgataggccccaattcccacaacaactttgaactgctcttcagccccacaattcagatctaacaattctgattctgaatttttctttagaccttccctctctttttccacatactaagttggctctgataatgctataaagtagtagcattcctactttgtaataggaatggaaaggaaatctggccatattcaggagctccatgattatgaacccatattacaaagtagtagcattatcagagccaacttagtatgtagaagaagagagggaattc

SEQ ID NO: 656768 - DNA, 565 bp, Homo sapiens
tgaattccagttaagaggtcttgagaaatcgaagtagaaatgtgaagagtaggagttcatttcagccattaaagaatatacttggctgggcacagtggctcacagcggtgcagcacttttggagtccaaggtgggtagatcacctgaagtcaggagtttgagaccagtctggccaacatggtgagaaccctgtctctactaaaaatacaaaaattagctgggcatggtggcgcgtgcctataatcccagctactggggaggctgaggcaggagaatcgcttaaacctgggagacggaggttgcggtgagccgagattgcaccactgcacgccagcctgggcgacagagcaggacaccatctcaaaaaaaaaaaagaatatacttgatgaggaaaataaaaggggagttctttgaaggctaaaatttccccaattctcttcagacatcttcttaagaaygtagcagaagtggggcttagtgaaaagggacctggactgcaagttctgtctctaactttctgtgtgccttggatcaaagaattttacctcttggaccatggtgttct

SEQ ID NO: 656769 - DNA, 293 bp, Homo sapiens
aactcaacagcctcctctgctcatgatgactaatggtggagatgtttactcccttcagggaaggtctcaccccagtgccatgacttgggaagacccacatcagaacataatccaatctctatgccaaaaaaaaaaaaaaaaaatccacacagcaggaatctaattgttgtcttacagaagccctcttgatcactgctttaccagtctgattgtcctccccaacaaaagatacctgaccttgattaayagggagaaaggaaatccttttgaagaggagccagtgaaacaatttt

SEQ ID NO: 656770 - DNA, 634 bp, Homo sapiens
ttgcaaagcacatatctgatgaaacatttgtatccaaaatatagatagaactcttaaaactcaacagtaagaaaaaacaacccattaagtaataagcaaaaaatctgaacatatacttcaccaaagaagatatacagataacaaataagcatatttatggatgctcaacatcacatgtcattagggaattgcaaattaaaaccacaaggagataccaccacacataatctattagaatggctacaatctaaaacaccaacaacaggaaatgatggtagggttgtggagcaacagaaactctctccttcattgctggtgggaatgcaaaatgatacagccaatttggaaggcattttggcagtttcttactaagctaaacattgtcttaccatataatccagttatcacactcctaggtatttacacaaatgtattgaaaacttatgtccacaaaaatctgtgtacatatatctatagccgatttactcataattgataaaaaytgaaagcaacaaagatatccttgaataggtgtaatgctgacatacttttatgtttccaatgttgtaaaaggtgatactatagagattaaaaatatcagtggcttccagagttggcggggcagtgttaaaga

SEQ ID NO: 656771 - DNA, 656 bp, Homo sapiens
ggctccactcctgcagcagacttctgcctggacttccaggcatttccatacatcctctaaaatatagttggaggttcccaaacctcagctcttgccttctgtgcatccacaggcccaacaccatgtggaaactgccaaggcttggggcttgcaccctctgaagcaatgctaagccataccttggccccttttagccactgctaaggctggagtggctgggacatggagcaccaagtcccgaggctgcacaaagcagcaggtccctggcctggcrcacaaaaccatttttccctcttaggcctccaggcctgtgacgggagaagcttcccagtaggtttctgacatgccttggagacattttccccattgtcttggctattaacatttggctcctcattacgtatgtaaatttctgcagccatcttgactttctttccagaaaatgggttttacttttataccacatggtcagactgcaaattttccaaacttttatgttctgatttccttttaaacataagttcctcatctccatctgagaccagctcaacctggacttcattgtacatatcactatcaacattttggtcaaaaccattcagtaagtctctaggaagctccaaactttcccacatcttcctgtcttcttctgagct

SEQ ID NO: 656772 - DNA, 656 bp, Homo sapiens
ggctccactcctgcagcagacttctgcctggacttccaggcatttccatacatcctctaaaatatagttggaggttcccaaacctcagctcttgccttctgtgcatccacaggcccaacaccatgtggaaactgccaaggcttggggcttgcaccctctgaagcaatgctaagccataccttggccccttttagccactgctaaggctggagtggctgggacatggagcaccaagtcccgaggctgcacaaagcagcaggtccctggcctggcgcacaaaaccatttttccctcttaggcctccaggcctgtgacgggagaagcttcccagtaggtttctgacatgccttggagacattttccccattgtcttggctattaacatttggctcctcattacgtatgtaaatttctgcagccatcttgactttcttyccagaaaatgggttttacttttataccacatggtcagactgcaaattttccaaacttttatgttctgatttccttttaaacataagttcctcatctccatctgagaccagctcaacctggacttcattgtacatatcactatcaacattttggtcaaaaccattcagtaagtctctaggaagctccaaactttcccacatcttcctgtcttcttctgagct

SEQ ID NO: 656773 - DNA, 564 bp, Homo sapiens
ttgctggtcaagaggtctccttgtgaacgcactccaccagggccttcagtcttcagtttgacagacagaactaggtggagtcttggcatagcagctgctcaggcacgcatggagaccctgcagccttagatgctaaggctttctagaaaacgtagctgcagctccagcaaagtgggaggttagactcctgtgcatrcccctaggaaagaggatgaatccagggggctgagcagcaacagcccacggaccccacttccacagcacttcacaagataagacccactgacttggaattccagcagctaccagtagtggcactgcacctccctaagaaggagctccctggggttggggtgggccaccaccattgctgttcaggcaccttagtcattccagccttcaggctttggagagtctgagctgacctggggcagaagggatcccccagaacagtacagccactctaccaaaatgtggccagactgctgctttaagcaggtacccaatcctgttcctccttactgagcaggacctcccaactcaggcctcaagccaccccaccta

SEQ ID NO: 656774 - DNA, 578 bp, Homo sapiens
cagatctttgcaacttgctggtcaagaggtctccttgtgaacgcactccaccagggccttcagtcttcagtttgacagacagaactaggtggagtcttggcatagcagctgctcaggcacgcatggagaccctgcagccttagatgctaaggctttctagaaaacgtagctgcagctccagcaaagtgggaggttagactcctgtgcatgcccctaggaaagaggatgaatccagggggctgagcagcaacagcccacggaccccacttccacagcacttcacaagataagacccactgacttggaattccagcagctaccagtagtggcactgcacctccctaagaaggagctccctggggttggggtgggccaccaccattgctgttcaggcaccttagtcaytccagccttcaggctttggagagtctgagctgacctggggcagaagggatcccccagaacagtacagccactctaccaaaatgtggccagactgctgctttaagcaggtacccaatcctgttcctccttactgagcaggacctcccaactcaggcctcaagccaccccaccta

SEQ ID NO: 656775 - DNA, 537 bp, Homo sapiens
gagcattagggcaaatacctaatgcatgtgggtcttaaaacctagatgatgggttgatgggtgcagcaaaccaccatggcacatgtatacctatgtaacaaacctgcacattctgcacatgtatcctagaacttaaaatttaaaaaaaaaaaaccctcttagaaaaaataacattcaggctgggcacggtggctcatgcctgtaatcccagcactttgggaggcyaaggtgggtggatcacctgaggtcaggagttcgagaccagtctggccaaaatggtgaaacccgatctctactaaaaatacaaaaattagccaggcatggtggtgggcacctgtagtcccagcttctcaggaggctgaggaaggataatcgcttgagcctgggaggcagaggttgcagtgagccaagattgggccaccgtactctagtctgggcgagagagcaagaccctgtctcaaaaaaaaaaaaaaaaaaaaaaaaaacacacacacacacacacgcacacaaaaacacttaaatgtattaatcttatcc

SEQ ID NO: 656776 - DNA, 239 bp, Homo sapiens
agagtggagtaggggtgggcttggcatggcaggacyggggctcacagcaaaactcaggagcgatgaacttaagctttggaatccaacagacctggggtcaaatcccaagcctgcatgtgcttgcaagccattgaccctaggtgagtcacttaaggtctctgaacctgagtttcagaggggacagctggactgtctccctcccaggcttgttctgagaatcacatgacgtgacgtgtgta

SEQ ID NO: 656777 - DNA, 575 bp, Homo sapiens
gacaattattcacattatgccactgtaatatcatctccaggagattcctacagcttccttagaaaggagtcttcctttaagagtttaatgacacataaagaaatattggctaattaatcatagagtctctggagacaaaataaatgggaagaacctaactggggaaaaaaaagaaaaagaaaagaaggcttgactgagccactgctgagaaagaggaggaacaaaactagagtggacctccatagactttggaggcggtatgtaccacattatggtgtgctgtttggactcactggccaggtgacttgaacagctgttatctttgaggggtatccagaggaagagaggtctcgytgctgtattgtgctgcagcacaagcagctattccactttatccttgttattgtgcttgtcctgtgatgccatgtcgggggttgtatggagtctatagcagatctcagggagcatatatcatgatggaggtcactaagattagggtcagttcattgaatgtttaatgagagtccagtatgggccaggatttttctaggtgcttgtgggcacaaaagaaatga

SEQ ID NO: 656778 - DNA, 595 bp, Homo sapiens
aagcttcctgggttgtaacacctatgcctgaataggtgtgtaccaaccctgaaacatgtatttcaatacaactttgatgtgctgtacaagctgtaatgatgctatcatataaagtggcatcctgtcaggcttatgcaagacagggctttcagttaactaagatttggtttaccagaagtcctaagtaatttgacaatctttttttgcactctgcttttaagagaaaaagctgtatttaggggtgtccctttatatttggtgtcagctccattctccctcctgacttytcagctttcccatgtatgagctggagaactctaccttcagctctaaaactatttctatataacaagatttctatagtctcaggaggaaaaaaaaagtcttaaacttcaaaaattactcccttcagatggtattattatggaagcaaagtagaccagaaccttctagaaagagctcaacagggctttctgttgtggttctctactgataccagaaggctgggatcttagctaccacacattggtggtttgctatgtgctgagtactatctgagtcatgttatataacactaataacaccaatactaaca

SEQ ID NO: 656779 - DNA, 588 bp, Homo sapiens
ttgaaaccctcatttgatttaaaaactcattttactataaatgtttgacttaattctgtttcactggtttaaaaaaaccccacaaattcatttataccatgttttatttatttttggaataatggagtaaaacatccaatatatgtacgtatttctccatgcctttctgaactttgaaagatccartccctcaagattaatcctaactgactaactgggcctaaattcaaattagacccaaacagtcatttgcttactagaggtcacacacctactctgagttccaaaagaaccggcacatcttcttaactttggaactttcatagctacctgtgtttatgctacctgagctaaccaataggctgtgacctacattggccaatcataacccagcaagcatcgaccacagttcaacaaacaccaactaatcagagtaagcaaatttgaacacttcatttacataagtgaacctgaatagaaactttcccaataaaagacaaaccctccctttattctctggaacacagctttatttttcaacaaagtctgctggatttcaccaaaggctcctgttgccctcatttgcaa

SEQ ID NO: 656780 - DNA, 550 bp, Homo sapiens
gatgaaaagacaagtcataaactaagaaaagtaatttgcagcacatgtaactgacmaaggaccagtatctttaatatataaattacaccaacgaatcagtaagagaaagacaggcaatctgatataaaaatttctgagacttcgacaagcatttcacaaaataaattcaaatggctagtaaatatatgataatgtgctcaattttattgataatcattgaaatgtaaattaaaattgcaatgatataacgttcacattcactaaattcacaaaatttaaaagataaatctaccaatattaactgttgaagtgagtatagatcaatggaaaactataccttgctgagggaactataaattgatacagccattttggaaatactttagtacttgcaaacttgaatatgctccaggtcccagaatttctctttctaggtatattctagagatacgcttgtttataaacaccacaaatgtgcaaaaatgttcctagcagtgttttttgtaatggaaaaatactggtcacagcccaaatgtccattatcatgaga

SEQ ID NO: 656781 - DNA, 550 bp, Homo sapiens
gatgaaaagacaagtcataaactaagaaaagtaatttgcagcacatgtaactgaccaaggaccagtatctttaatatataaattacaccaacgaatcagtaagagaaagacaggcartctgatataaaaatttctgagacttcgacaagcatttcacaaaataaattcaaatggctagtaaatatatgataatgtgctcaattttattgataatcattgaaatgtaaattaaaattgcaatgatataacgttcacattcactaaattcacaaaatttaaaagataaatctaccaatattaactgttgaagtgagtatagatcaatggaaaactataccttgctgagggaactataaattgatacagccattttggaaatactttagtacttgcaaacttgaatatgctccaggtcccagaatttctctttctaggtatattctagagatacgcttgtttataaacaccacaaatgtgcaaaaatgttcctagcagtgttttttgtaatggaaaaatactggtcacagcccaaatgtccattatcatgaga

SEQ ID NO: 656782 - DNA, 550 bp, Homo sapiens
gatgaaaagacaagtcataaactaagaaaagtaatttgcagcacatgtaactgaccaaggaccagtatctttaatatataaattacaccaacgaatcagtaagagaaagacaggcaatctgatataaaaatttctgagacttcgacaagcatttcacaaaataaattcaaatggctagtaaatatatgataatgtgctcaattttattgataatcattgaaatgtaaattaaaattgcaatgatataacgttcacattcactaaattcacaaaatttaaaagataaatctaccaatattaactgttgaagtgagtatagatcaatggaaaactataccttgctgagggaactataaattgatacagccattttggaaatactttagtacttgcaaacttgaatatgctccaggtcccagaatttctctttctaggtatattctagagatackcttgtttataaacaccacaaatgtgcaaaaatgttcctagcagtgttttttgtaatggaaaaatactggtcacagcccaaatgtccattatcatgaga

SEQ ID NO: 656783 - DNA, 576 bp, Homo sapiens
aacccgtaaggaagacatttatataggtaattcattttcagttaccttaaatgaattgctctagatcactcagcaataatgaaaactctamcatctagttttctccaaatctagattgcaaataatagcaatattaaaataaaaacacattatttggtttcagaataaaatttactatgagacaacaacaaaaaatctatgaagtcaagatctttctggttttctcaaacttttatagcctaacagaatttaatttaatgactgtataaatgttttctttctcattcaattagtctaactaaagaaataaaattaataaaattcattacatatatcttggcattaatgatgaaaatcattattttaatgatattttccatcttgtaaaatttttaaaatgagcagtttcaaaaattaacataattcaagctttttttaagtgaagtaaggggactagtgacttgcataacatattaaataccatatatagttacatgtggtaaatgaaaagaattatgctatgtgatggcagagcagcttctaaatttttagctcaataaaagcaaccaagatatg

SEQ ID NO: 656784 - DNA, 631 bp, Homo sapiens
agatttgtttattctgtttattttttcaaacaatgatttcttgatcatttctattgtctttctagtctttatttaattttatttctactctaattgttattattttcatagttttgctacctgtcaacttagtttgttcatctttttttttagttccttgaggtgtgatattaggttgtttaagatctttcttttttcttaacagaggcatttatcaccatgaacttccacatagagctgcttttgcaatattccataagcttttatatattggtttccaattttgtttgtctcagtatattattttattcccttttcagttgtttctttgactcatcggttattcaggagagtattgttttgtgaattttctaatattatcaccttatcgatttttagttataacatggtggtcagaaaagatactcaatatgatttcagtcttcttaaatatgctacggtttgtttgtggtcaaatgtatattctatctggggaatgttctgtgtgtgcatgaaaaggatgtcttttctgctgctattggatggaatgttctctatatgtctgtcaaatccatttgatccrtattgttcaagtctattgcttacttattggttttcggtctggatattc

SEQ ID NO: 656785 - DNA, 632 bp, Homo sapiens
cgaataggtccatatcccaccagtgagcaggctgaggttgaaggactatatgctgtccatgtcacaactgactcacgaactgcagaaggcaaagctttccactgcagaaaggcattcatgacctcatcccaaaggactggcagaggttgacctctataggtgagctttggaggtatctctctggagggtgtttcgttcccttatttgacatccttcttggggctacaactctatcaataaatacacaaacactcaggtcaaacacacagcattgtagatttagagaatttgaaagctggaaggggctttaaagaccatttaatccaacctcattgtyatacagacgaggaaattgggaccaaaagataaatgacttgttgaacagggtctaagtgttttctcttttattctatttgttttttcagctttacatggtttttgtttcatgtcttgcccctaatagactgtgagttcctccaaggaaactatttttgtaatatcatgatctcaaatacacatggcataattttatggacaaggagtctaaaatacagctgttggctgactgatggaatgagtgagcgcatacataaaagaggacattttttaaagggcaagtgagtcgttttgaa

SEQ ID NO: 656786 - DNA, 579 bp, Homo sapiens
ctttgagaaccaatgtaatgattaaggagacaacaggtaagtatgagagtgagaagaagaaatggttcattagcatgctcgcaatgtgtcttccctgatatcctatggcaattattgtctgcacaatatatctggcaattaatcatgtcttgccttttcacagttcttctctttgcctgaatgctatttacatctttttgttgggtctatgcttaagatcgaggcaggacgagaagccagcaatggacaaccagtgggagaaagaggagaggaattcaggcccaggagggagcaggaaagggataattgagcagacagaggatctgcctgtgggaaagcggagttggagctactcttaatacaggaggaagaaagcaaggaagaaaattcatgcagcttttggaaggtacagtatggaaatgacaggcaggcaccagagaagccataggctaacctcacagacaaatgacccaactgccaagacagattaarggagaaggggttcatgtgcactgtgatatcccctgaagaaggaacccaaatcttgtgtggcattttcctttatcctctgcagaagaa

SEQ ID NO: 656787 - DNA, 658 bp, Homo sapiens
tcaatgataagctttctaatatttcttgaaatctcccaccgttattgtgtgtttatctaggtttcttcataggtctctagaaacttgttttatgaatctgggtactcctcggttgggtccatatatatttaaaatagttaggtcttctttttgaattcaacctgttaccatcatgaaatcctcttgtcaattatgctcaaaggcaagggaggagatggcatctaacatgacaataatggaagcaagagtcggggtggggtaattgtcacacacytttaaacgggcagatctcacaaaatctcacttactgtcacacgagcagcaccaagggcccaaatacagaatcttcttgggtccaaataccctctagaagtttcccattggctaggtaaactaattaaaaatttaaaattaattaattaggtaaatgtaatagaataaatgcttataaacttgcaatataatttaggacctattatattaaattattaaataaaataataaaataatagacatttatcaaatgtctgggtcacttccaatttgttaaaattatattatagaaaaacgtttttataaataagtgttcttattaaaaggaaatatttttgtctaatgcaaaggttacttaaagattattcctctttttaaaataacc

SEQ ID NO: 656788 - DNA, 543 bp, Homo sapiens
  misc_feature 221, 222, 223, 224, 225, 226, 227, 228, 229, 230, 231, 232,233, 234, 235, 236, 237, 238, 239, 240, 241, 242, 243, 244,245, 246, 247, 248, 249, 250, 251, 252, 253, 254, 255, 256,257, 258, 259, 260, 261, 262, 263, 264, 265, 266, 267: n = A,T,C or G
  misc_feature 268, 269, 270, 271, 272, 273, 274, 275, 276, 277, 278, 279,280, 281, 282, 283, 284, 285, 286, 287, 288, 289, 290, 291,292, 293, 294, 295, 296, 297, 298, 299, 300, 301, 302, 303,304, 305, 306, 307, 308, 309, 310, 311, 312, 313, 314: n = A,T,C or G
  misc_feature 315, 316, 317, 318, 319, 320: n = A,T,C or G
ttgatggtgacaggtatacataaccaccaccatcaatttctagcaagttctgatattattgaatgaattacaagttrttaaaacatcatggcttgattgtttttgaaccatagcatttccactaaagaggctcttttatctttggacaactgaatcgtccagtgatcacctgtaatgcatcaaatcctagctccgtgattataaacatgggatcttagtannnnnnnnnnnnnnnnnnnnnnnnnnnnnnnnnnnnnnnnnnnnnnnnnnnnnnnnnnnnnnnnnnnnnnnnnnnnnnnnnnnnnnnnnnnnnnnnnnnncttaggggagaatgctcattaatagaatatgttgtgaattctaaacaatggtccaaagtggagattgtagaccaagtcatatattaaatcgattctctatcaaacattttctgtaaagaaccaaatagcaaatattttaggctttgaatactagccgcgtatgatctctgtcacatattctttgttttttgttttattttacacactataaaaatgcaaaaac

SEQ ID NO: 656789 - DNA, 478 bp, Homo sapiens
atggacttccaggtggtgggggctctacccagattcagctgtggggtgattgggtgtatttgcgaccctaacccttctctcgttagaaaataagggcttyggacaagagcattgcttaggttcttctagtgtcaaaatattacgactttaaaaagaaatgatattactaaagagattttgaagagctttgtccttaaaggaaatgaccccaaactactaagatttaaaaataaatgtcactttgtgtggttggtgtctctgcctctggcagtattatcccttttccatggcctctttttggttcactatcatactatgataatttctaatgtgtttcaaaccaagaaaccagacaatcaggattataataactgtaaagtaggtataaattgatcataagtgatggccttacagacttctctagctaatgagggtgagattcaatgcatatgctttgtgatagctgtttcagccgtgg

SEQ ID NO: 656790 - DNA, 367 bp, Homo sapiens
gaattcgggaaggacaccattcacctgggcatcacgagccaccaggttgcccaaaccagaatccttggtaccatctttaacatgtccctctcccacgcaccctccaaccaatcaacagctcggtcctgtctggccagaatcctgcccatcatctcatctccttgcaaaatcctcctcattctccactcagtctgggcatcatgtcttccaggaagcatttcctgacttcttgtgcctgtttctggcaccctcctctgtgccaygatccttttgcagccctcacccttctgctctataattgcatgtttgtctgtttctcccactgggctgcagggtctgtaaggacagaaaacatgtgtgtcttact

SEQ ID NO: 656791 - DNA, 534 bp, Homo sapiens
ccatcatctcatctccttgcaaaatcctcctcattctccactcagtctgggcatcatgtcttccaggaagcatttcctgacttcttgtgcctgtttctggcaccctcctctgtgccatgatccttttgcagccctcacccttctgctctataattgcatgtttgtctgtttctcccactgggctgcagggtctgtaaggacagaaaacatgtgtgtcttactcatcttctatgcccaacatggtgagkgccacttaacaagaattcagtcaacattctatccattcatcttctcacaggaagcgttgtgtctcagagctgtggcttttctttatctttaaaatcttcagggaagagtgtccccacagccttccagaggcttccattttctgcgtggggcatcatatttacatcacaccacccacttgacaggatcatgtactttaggagcatgtatgtggtgcttcataaaatatgcctggctgaaggatttttagaaaattgttcatgacattttcattcatcattcatttag

SEQ ID NO: 656792 - DNA, 569 bp, Homo sapiens
ctcacccttctgctctataattgcatgtttgtctgtttctcccactgggctgcagggtctgtaaggacagaaaacatgtgtgtcttactcatcttctatgcccaacatggtgagggccacttaacaagaattcagtcaacattctatccattcatcttctcacaggaagcgttgtgtctcagagctgtggcttttctttatctttaaaatcttcagggaagagtgtccccacagccttccagaggcttccattttctgcgtggggcatcatatttacatcacaccacccacttgacaggatcatgtactttaggagcatgtatgtggtgcttcataaaatatgcctggctgaaggatttttagaaaattgttcatgacattttcattcatcattcatttaggaaacatgtattgagtgcctactatgtgctgagcactgwattaggacctatggtttccatgaagagtgacacagaaatcaaactatcatccatgtgctttatgtgccaggcattttttgctagaaacatattgaaagtttcatttaatctttgatatgcatctttgag

SEQ ID NO: 656793 - DNA, 478 bp, Homo sapiens
atggacttccaggtggtgggggctctacccagattcagctgtggggtgattgggtgtatttgcgaccctaacccttctctcgttagaaaataagggctttggacaagagcattgcttaggttcttctagtgtcaaaatattacgactttaaaaagaaatgatattactaaagagattttgaagagctttgtccttaaaggaaatgaccccaaactactaagatttaaaaataaatgtcactttgtgtggttggtgtctctgcctctggcagtattatcccttttccatggcctctttttggttyactatcatactatgataatttctaatgtgtttcaaaccaagaaaccagacaatcaggattataataactgtaaagtaggtataaattgatcataagtgatggccttacagacttctctagctaatgagggtgagattcaatgcatatgctttgtgatagctgtttcagccgtgg

SEQ ID NO: 656794 - DNA, 468 bp, Homo sapiens
gtttaaaatctgtgttgtctaaaattaaaagagcaccccttgcctttttgttttccatttgcatggtaggtttttctccatcccttttatttsagcctatgggtgtcactgcatgtgagattggtctcctgaagacagaataacattgggttttgcttctttatctaatcttccactctgtgccttttaattgaagcatttagactgttcactttcaagtgaacatgtattgacatgtgcagatttgatcttgtcatcatgttgttagctggttattatgcagacttgtttgtgtggctgctttatagcatcactggtctgtatacttgtgtttttttttttttttttttttttttttttgtagtggccaggaatggtcttttcctttccatatttagccctcccttcaggactttttgtaaggtaggtctggtggtaaaaaattctctcagcatttgattggctgaa

SEQ ID NO: 656795 - DNA, 608 bp, Homo sapiens
aggcagcaaaaaagggagtaatacatatttccttttttattgattatttgattgtattactttacttcatttctgctgaagaatgttggagtggactttagggttctaatacatttcacaggagacctacgttagtttggagctgaagaagccaaggactgtggagagcatcgaagcctcattagatagagtgactgcctctggagtgcatcctttgacactgctcaacctacatctaaaaagcaataaaggatgctacagtcatgaagatgtctgtggccttttcttcttcttsctttccctccatttccaagagaaagacttgctacttctggatatgccacctccagttcatgggagtggcattacagactcctttaaatgagttgcaaaggcaaaacgttttattaatatgcatatatgtattagtccattctcatgctgctctgaagaaacacctgagaatgggtaatttataaagtaaagaagtttaattgactcacagttctacagggctggcaaggcctcaggaaacgtacaatcatggtggaaggggaggcaaacacgtccttcttcacatggcagcagcaagaagaagaatgagtgcc

SEQ ID NO: 656796 - DNA, 608 bp, Homo sapiens
aggcagcaaaaaagggagtaatacatatttccttttttattgattatttgattgtattactttacttcatttctgctgaagaatgttggagtggactttagggttctaatacatttcacaggagacctacgttagtttggagctgaagaagccaaggactgtggagagcatcgaagcctcattagatagagtgactgcctctggagtgcatcctttgacactgctcaacctacatctaaaaagcaataaaggatgctacagtcatgaagatgtctgtggccttttcttcttcttcctttccctccatttccaagagaaagacttgctacttctggatatgccacctccagttcatgggagtggcattacagactcctttaaatgagttgcaaaggcaaaacgttttattaatatgcatatatgtattagtccattctcatgctgctctgaagaaacacctgagaatgggtaatttataaagtaaagaagtttaattgactcacagttctacagggctgrcaaggcctcaggaaacgtacaatcatggtggaaggggaggcaaacacgtccttcttcacatggcagcagcaagaagaagaatgagtgcc

SEQ ID NO: 656797 - DNA, 678 bp, Homo sapiens
ggcattgccatttattagtttattaactttgggaaaggctttattctttatgaattttagtttcctcatttggaaaatggagagattacctacctaatataattattgtgagaatggggaataataggtcaaacacaaatctctgcttggcatgcattaggtaccactaaatagtgttattcacttacrgcagcagtaaacctggcaggacatcagtttcctaaagcaggtaaaattacatcctggaaaggtgtttggtgctcataaattcaggataaagatttttggatgccttttaaggaaaatttgtttgtttgctttgtttgttaaatccattaatttcacccttgaccactttgaaatcaggcagatcttattttccctgtagcctctgggaagttactggatcttcccgagtctcattttctctgcagtagatagaatggacaaagtagtcctggttttctggtattgctgtgaagattaaataagatgatattcataagccaccttgtacagtatctgcacctttgtggaataaatgtgataattaattctcttctctttcttaaattttaaggatgacattttctgatatttgcttcaaactctgagtgagaccctatgcaggtcccacaggtatgtaagcactaactgtctctcctaagtgactgggcc

SEQ ID NO: 656798 - DNA, 592 bp, Homo sapiens
taaataatctgtatacccatgattcaagtttacctatgtaacaaacctgcacttgtacctctgaacttaaaataaaagttttaacaaaaagaaccaaaagaaaaaagaagaagtagttcatctctccccttgcatacactgaagaaaagctacaagaaagtgaccatstgcagtccaggaagagggctctcagcaatactcaaccatgctgtcaccctgatctcagatttctagcttctagaattgtgagaaaataaatttctgtagaagttataatattttgatatggcaaccagaactgatgaatacaccttatctgaagaaacacatgcaccttcttaagaaacaagctcatacctagattttgagtatgtgagcaattgcaattccaaaatcctgttgtaaattggccctcttaaagcaacaccctccctttaaccctacagtagtcctggctaacttttattcatcctttattgatctgacaacaactcaggtgtcttgaacttatgacattttgttcctaactagtcccttttcgtgaataatcactgataggtcaataaaaagttcagtcttatatactgtatac

SEQ ID NO: 656799 - DNA, 451 bp, Homo sapiens
agggaatagtatagacaataaggaaggaaatagtacttacaaatgactcctaagggactgtgagactgagagggctcacgcctctgtgttcaggatacttagttcatggcttttctctttgactttactaaaagagaatgtctccatacgcgttctaggcatacaagggggtaactcatgatgagaaatggatgtgttattcttgccctctcttttgaggctctctcataacccctctatttctagagacaacaaaaatgytgccagtcctaggcccctgccctgtaggaaggcagaatgtaactgttctttttgtttaacgattaagtccaaatctccaagtgcggcactgcaaagagacgcttcaagtggggagaagcggcgatatcatagagtccagatcttgcctccagagatttgctttaccttcctgattttctggttactaatt

SEQ ID NO: 656800 - DNA, 451 bp, Homo sapiens
agggaatagtatagacaataaggaaggaaatagtacttacaaatgactcctaagggactgtgagactgagagggctcacgcctctgtgttcaggatacttagttcatggcttttctctttgactttactaaaagagaatgtctccatacgcgttctaggcatacaagggggtaactcatgatgagaaatggatgtgttattcttgccctctcttttgaggctctctcataacccctctatttctagagacaacaaaaatgttgccagtcctaggcccctgccctgtaggaaggcagaatgtaactgttctttttgtttaacgattaagtccaaatctccaagtgcggcactgcaaagagacgcttcaagtggggagaagcggcgataycatagagtccagatcttgcctccagagatttgctttaccttcctgattttctggttactaatt

SEQ ID NO: 656801 - DNA, 569 bp, Homo sapiens
ctttaccttcctgattttctggttactaattagcttcaggatacgctgctctcatacttgggctgtagtttggagacaaaatattttcctgccactgtgtaacatagctgaggtaaaaactgaactatgtaaatgactctactaaaagtttagggaaaaaaaacaggaggagtatgacacacacagcaacttgattctagattatttggtttgatccgtaaatgatgggatggggcgtcgcgctccgagcgtgtcccgcggcgggcccctggmgccacactgtggccgcatgtgcatattgcagcctccgcccgtatctgggggccgcagccgccagcgcccggggacccagctgcggcgaaagctgtcgggcgcgcgcttctccgcagctccgcgcccccgccaaaacccagtgagaaattatttgcattcctggagcctgcaggagcgagaaatgagctgtaggagtcggtgggcagcaacggcggcaggcggatggaagagagcaaggggtcgccgttcgtgtcccattcgcccgagtcaaggggcggccccccaaaatcccaacg

SEQ ID NO: 656802 - DNA, 610 bp, Homo sapiens
attagctagacctgcccagcgattccagccctgagaaccagacagaatggaggtatagccgacagctggctgggagggggctgacggtcctcactgccaccaggcttagttggagacagattccccgggctgtagagagacaacagtagaagcaaagagaccagttaggagtctaggtgagaggcagcggcagcctggactaacatggtaacagtggagctattgagagtggtcacatttggaagatgttttgtaggaagtgtcaacaaagtttcttattgattagatgtagggaatgtgagaaagagaaggcggggggaacacgtagattttgggtcaaagcaataaatattccattgacagaattgagacagcaagttggtggaggaggggaacggggtagcaagaagcraatgtttcatattggacattttaagattcctatttgacatttaagagtaactcttgaaaaagcaatggatatatgaagaatcctagactagagatacaaatttgccaatcatcatatagatgtggtatttagagtcaggggactagaaagaacaatgtaagggggaagtacagatagaaaaaggtctaaggctgagcc

SEQ ID NO: 656803 - DNA, 559 bp, Homo sapiens
tgtgttcgctccagtccttgtgtcaaagttcactttgagccactcagagtagcgtgtagagtggtcattcaggactgtgctaacttacacttcattgtatcaaatgggagatccagtaatttatagtctattatttctggagtctggagatgactctgtataagctttgctgaagcagattttattacattagaagagaacctacctggctgcatccaacaccagaagcttttagatgctaagtaaggwggtcatagtaaaggtaacagaatgactctggaacccattacccctaccaagaaggggagtaatgaattccgggttgccctcttttcatttccctttgattttgagtaataaattccctccttacttcccagctgaacaatttgggagtctgtattccctagaaagactgttcacatacccgtcagactaaattaggtgaaatctctttggccttaatgaatgttgaaggattttaaagggctaatggaaattcttctagaagtaacaattcccattctattggtgaggcagttctaaagaaagtccctga

SEQ ID NO: 656804 - DNA, 559 bp, Homo sapiens
tgtgttcgctccagtccttgtgtcaaagttcactttgagccactcagagtagcgtgtagagtggtcattcaggactgtgctaacttacacttcattgtatcaaatgggagatccagtaatttatagtctattatttctggagtctggagatgactctgtataagctttgctgaagcagattttattacattagaagagaacctacctggctgcatccaacaccagaagcttttagatgctaagtaaggaggtcatagtaaaggtaacagaatgactctggaacccattaccccwaccaagaaggggagtaatgaattccgggttgccctcttttcatttccctttgattttgagtaataaattccctccttacttcccagctgaacaatttgggagtctgtattccctagaaagactgttcacatacccgtcagactaaattaggtgaaatctctttggccttaatgaatgttgaaggattttaaagggctaatggaaattcttctagaagtaacaattcccattctattggtgaggcagttctaaagaaagtccctga

SEQ ID NO: 656805 - DNA, 559 bp, Homo sapiens
tgtgttcgctccagtccttgtgtcaaagttcactttgagccactcagagtagcgtgtagagtggtcattcaggactgtgctaacttacacttcattgtatcaaatgggagatccagtaatttatagtctattatttctggagtctggagatgactctgtataagctttgctgaagcagattttattacattagaagagaacctacctggctgcatccaacaccagaagcttttagatgctaagtaaggaggtcatagtaaaggtaacagaatgactctggaacccattacccctmccaagaaggggagtaatgaattccgggttgccctcttttcatttccctttgattttgagtaataaattccctccttacttcccagctgaacaatttgggagtctgtattccctagaaagactgttcacatacccgtcagactaaattaggtgaaatctctttggccttaatgaatgttgaaggattttaaagggctaatggaaattcttctagaagtaacaattcccattctattggtgaggcagttctaaagaaagtccctga

SEQ ID NO: 656806 - DNA, 631 bp, Homo sapiens
cattggttgatccaagcatctgatgttccaccttgacatgtgatgctatctctggaaaaagaaaatgtcgcaggtgttgagaaaaggtacaagtaccaactatcaaagaggagtaagatcccttcccaagacccctttatagtcagtctaatacctttcggtttattygcctagaatgctggacttctataccacataacaagattccacacactgaaacagaaccaacatcattagcttcttaccagtgttctgccatcgagatgcagtctgtcaagagaagcagcacagagtctcatgtcaagagaagtctgcagcagcagaaagacaactaaaaagagagacttcagtggaatttgagtcacctgacattagtcttaaaaaagatatttaaaatacagagaatcccactgatggaggagagaaaaataaccctctttttttctttaaagacaggcattgatatgagcgaaaggaaaagaactggggaagtctttgtatattgagagctcagtttatttttactctctgccaatagaggcaaggtaattctataagcaccatttaactttctcactacaaacaaaatagagtaagtcgtattaacgacttacttgcgctctaaacttcc

SEQ ID NO: 656807 - DNA, 631 bp, Homo sapiens
cattggttgatccaagcatctgatgttccaccttgacatgtgatgctatctctggaaaaagaaaatgtcgcaggtgttgagaaaaggtacaagtaccaactatcaaagaggagtaagatcccttcccaagacccctttatagtcagtctaatacctttcggtttatttgcctagaatgctggacttctataccacataacaagattccacacactgaaacrgaaccaacatcattagcttcttaccagtgttctgccatcgagatgcagtctgtcaagagaagcagcacagagtctcatgtcaagagaagtctgcagcagcagaaagacaactaaaaagagagacttcagtggaatttgagtcacctgacattagtcttaaaaaagatatttaaaatacagagaatcccactgatggaggagagaaaaataaccctctttttttctttaaagacaggcattgatatgagcgaaaggaaaagaactggggaagtctttgtatattgagagctcagtttatttttactctctgccaatagaggcaaggtaattctataagcaccatttaactttctcactacaaacaaaatagagtaagtcgtattaacgacttacttgcgctctaaacttcc

SEQ ID NO: 656808 - DNA, 631 bp, Homo sapiens
cattggttgatccaagcatctgatgttccaccttgacatgtgatgctatctctggaaaaagaaaatgtcgcaggtgttgagaaaaggtacaagtaccaactatcaaagaggagtaagatcccttcccaagacccctttatagtcagtctaatacctttcggtttatttgcctagaatgctggacttctataccacataacaagattccacacactgaaacagaaccaacatcattagcttcttaccagtgttctgccatcgagatgcagtctgtcaagagaagcagcacagagtctcatgtcaagagaagtctgcagcrgcagaaagacaactaaaaagagagacttcagtggaatttgagtcacctgacattagtcttaaaaaagatatttaaaatacagagaatcccactgatggaggagagaaaaataaccctctttttttctttaaagacaggcattgatatgagcgaaaggaaaagaactggggaagtctttgtatattgagagctcagtttatttttactctctgccaatagaggcaaggtaattctataagcaccatttaactttctcactacaaacaaaatagagtaagtcgtattaacgacttacttgcgctctaaacttcc

SEQ ID NO: 656809 - DNA, 592 bp, Homo sapiens
tcaggaagcttttgatggcagaaacatattttcctggtgatgagattggaaggatcttcatataaccatcagatatgttattgtcacttctgaacaatgctttttatagcagattgtttctcaaaaaggaaatagaaatgcgattttaaaatatgaaaaatatgttcaatctcattattaagataaatgcaaatacaaattataagaggacttaacagattggcaaacatcagaaaagtgaacaacctcctccactggcattcttttttttttttttttgagatggagtttcactcttgttgcccaggctagagtgcagtggtacgatctcagctcactgtaacctccaccttccagtttcaagcgattcttctgactcagcctcccgagtagctgggattacaggctcctgccaccacacccgactaatttttgtattttcagtagagatggggtttcaccatgttggccaggcttgtcttaaactcctgacctcatgatcygcccgccttggcctcgggagtataatttgctgtatggagggcaatttgacagtatctgtcagattttataatgtacagagccttgaatt

SEQ ID NO: 656810 - DNA, 594 bp, Homo sapiens
gtactttacaaaaaatttaattgtggcaaaaaattaacaaaatttaccaacttaacaagttttatgtgtgcagagcagatgtgttaaatataatcacattgctgtgtaatgaatctcctgggttyaagtgaccctcctaccagagtttcctgagtaggtggaactataggcgccctataccacattttgtttatctgttcatctgtagaatcaatggacatttggattgcttccacctcttggctattgtgaataatgctgttaatgaacatgggtgtgcaaatatctcttccaagatccagttttgaattcttttggatatgtacccagaactgctggatcagatagtaattctacgcttgatttagcacaaattttgtcaatccaaagagctgaaagctaacatagaactatagtatatttttaaagagtcagttcatatttgtgagctcaacataaacatctgacaaattttccattaaaaaaatttttatgtgttcattgattcacatacatcttagcacgctaattcattattattttaacccctacaaagaagggtagaaaataggaaaaacatgattctattctaga

SEQ ID NO: 656811 - DNA, 559 bp, Homo sapiens
ggtggcagatctgaaactagaagcagatttaccaactctcaattctctattctgtatctttactatgaaacatcatctgaccagggtggaaaaaaataaaaaattcttaaggagcccaaatctgtcaatgaataatgatagtaataatgataatgataatagattacattttggttgctcattatgttccagtccatcccaagtgctttaaatgaatggtctggtttaatccttacctcaacccaggraatgggtattattgtcaccttccattcaccatataaggaaactgaggcttagagaggatgagaagcccttccaaggtcacacagccaaaccatggcagcttgacttcattcctttattcattaactatttattgagtgcttgctgtgtgttctggcgattggccatacagctgtgaagaagaaaaagtctctaccctcgtggagcttatattctggaagctgggctctctatggaacagcacagaatttggagacaaagggcctgcgatctggtttggctctgcctcccactagctagaagccctgggtca

SEQ ID NO: 656812 - DNA, 588 bp, Homo sapiens
taaaattttagatttgtagttagaaatatttaaaataatttaaaatgttgcattctgttattaaatattatcaggcccttcaactgtgtctgactactgaaataagtctattattaaataggtgtagtgctttcttaaaaatattatactcaaacattaattgaaaagcttacatgttaaacacatattcttcttccagcaaaatgaaatgtcaccccgagttaccttgggtcaccaagggtcccagttagctttgtactgatatttggccgtgtcttgtagaactgcatgatgtcatccttttttgtaaccatttgcaactktagtttctatggggaccaaggaacatcctagggcaagaattaaaacagagtcaattgttttggtagaaattcactaggtcaggactgtatcacaaaagagaaatgagggacctgaagagagaactcaccataaagaaaggagtcgggcagggtgaatgagtcaatttagtagtagttcctgaaagtcagaaatgggtcatgtttcaggaacagtgtggcaatctgaacctgaacacttcccatccaattatttcatcaatcattg

SEQ ID NO: 656813 - DNA, 588 bp, Homo sapiens
taaaattttagatttgtagttagaaatatttaaaataatttaaaatgttgcattctgttattaaatattatcaggcccttcaactgtgtctgactactgaaataagtctattattaaataggtgtagtgctttcttaaaaatattatactcaaacattaattgaaaagcttacatgttaaacacatattcttcttccagcaaaatgaaatgtcaccccgagttaccttgggtcaccaagggtcccagttagctttgtactgatatttggccgtgtcttgtagaactgcatgatgtcatccttttttgtaaccatttgcaactgtagtttctatggggaccaaggaacatcctagggcaagaattaaaacagagtcaattgttttggtagaaattcactaggtcaggacygtatcacaaaagagaaatgagggacctgaagagagaactcaccataaagaaaggagtcgggcagggtgaatgagtcaatttagtagtagttcctgaaagtcagaaatgggtcatgtttcaggaacagtgtggcaatctgaacctgaacacttcccatccaattatttcatcaatcattg

SEQ ID NO: 656814 - DNA, 588 bp, Homo sapiens
taaaattttagatttgtagttagaaatatttaaaataatttaaaatgttgcattctgttattaaatattatcaggcccttcaactgtgtctgactactgaaataagtctattattaaataggtgtagtgctttcttaaaaatattatactcaaacattaattgaaaagcttacatgttaaacacatattcttcttccagcaaaatgaaatgtcaccccgagttaccttgggtcaccaagggtcccagttagctttgtactgatatttggccgtgtcttgtagaactgcatgatgtcatccttttttgtaaccatttgcaactgtagtttctatggggaccaaggaacatcctagggcaagaattaaaacagagtcaattgttttggtagaaattcactaggtcaggactgtatcacaraagagaaatgagggacctgaagagagaactcaccataaagaaaggagtcgggcagggtgaatgagtcaatttagtagtagttcctgaaagtcagaaatgggtcatgtttcaggaacagtgtggcaatctgaacctgaacacttcccatccaattatttcatcaatcattg

SEQ ID NO: 656815 - DNA, 587 bp, Homo sapiens
tgttgatcagtgcctaattgaggctaggtggaatcctttttaagtggtttcttttggccctgactgcggtatagacaccacrgaagatgcaagcatgaatgttgtttgccttgaggctgaaagaaaaggatagagttgtaattgggttctttttttttatttttaaaaatctttgcccttgaaatgacgggatccccccagaaaatatccatccaaacccttcaaacaaatggacacacctaagtctaagtgcaatgagaagaaaagaggtactagctcctataagatgcctctcacagataagagtatttcttaatgtgtttcttttctttttttattacagagaggccagatactggctgtttcttttctaagttctgcagaatgggaatgtgatctctaatgaatttttcagtttatgaaagtactattatagaatactaattagggtgtcccatgaggtctgtccttaatagttattactagttactattattactagtttaatcctttttgctttgagatcatcctttttctttctcaattggtatttcttacctctcatttataattttctttttttccaa

SEQ ID NO: 656816 - DNA, 587 bp, Homo sapiens
tgttgatcagtgcctaattgaggctaggtggaatcctttttaagtggtttcttttggccctgactgcggtatagacaccacagaagatgcaagcatgaatgttgtttgccttgaggctgaaagaaaaggatagagttgtaattgggttctttttttttatttttaaaaatctttgcccttgaaatgacgggatccccccagaaaatatccatccaaacccttcaaacaaatggacacacctaagtctaagtgcaatgagaagaaaagaggtactagctcctataagatgcctctcacagataagagtatttcttaatgtgtttcttttctttttttattacagagaggccagatactggctgtttcktttctaagttctgcagaatgggaatgtgatctctaatgaatttttcagtttatgaaagtactattatagaatactaattagggtgtcccatgaggtctgtccttaatagttattactagttactattattactagtttaatcctttttgctttgagatcatcctttttctttctcaattggtatttcttacctctcatttataattttctttttttccaa

SEQ ID NO: 656817 - DNA, 564 bp, Homo sapiens
gctgttcctattcgtccatcttgtctccaccccccattctctttacttcagtcaaaattagacaaagttgtcatggtcaactgtcagaggctggcgcatggrtagtaaaggaatttacccaagacagtaacaagtttagaaagacagatttattagagaaaagggaacagtacgttgcaagggagcaacaggcaagatagtaaaaagaaggctctctgctgtctgcaaagaggcaggagctagagggaaattttataaggtcatgctgcttagtctgaatgcttacagacaagatgcttgggtgcatgtgagctggtgagctcagggcctgtggcaggatactcggggggtgccagtaagctgtttgcagttgaccccatttcttggaacattcactcccacctacccatttgtctgtttctgcaagctaaacctatttgtcaattttattttaactccttagtgccccacaaaagtgaaagggactaacaaactgaaatctaattctgggaatgatctgtggagaaaaaaaatcattctcatacatgatgcattgttgctggt

SEQ ID NO: 656818 - DNA, 611 bp, Homo sapiens
ctattgctagaccctgagaaaataataatgaaggaatactaaatttggaggataagtaataaacttggttaagcattgcatttgaagtctaaataaaaacccaagtaaaaatgatcactkgttggtcagtttcaattgtttagggatcaatataggatctaggctggaaattcaaactcgggggtatgaaagtacaaaatggtataaaacaaaagggcacaggaaattgcctgctgatatgttgagaaaaagaaatagatcaaaaaccgattcttgggtgacattaatctaattttaggaatagactaagaaaaagaagccgacaataggaactaagaaacacagttgccttttccctttccatttctttagccacacataaaatcaaccatcagatgtggctttttctctctggtatccttcatatacagtttcttctttcaggaactactcatatctgtaactttatatacattacctaaccacaggtctctccgtcattcggcgtagctcctttttattccttcaatcccaaaccacacttcatgtttatttcctgctttctcttgaataacatatactgttattataccctacatacattatttata

SEQ ID NO: 656819 - DNA, 611 bp, Homo sapiens
ctattgctagaccctgagaaaataataatgaaggaatactaaatttggaggataagtaataaacttggttaagcattgcatttgaagtctaaataaaaacccaagtaaaaatgatcacttgttggtcagtttcaattgtttagggatcaatataggatctaggctggaaattcaaactcgggggtatgaaagtacaaaatggtataaaacaaaagggcacaggaaattgcctgctgatatgttgagaaaaagaaatagatcaaaaaccgattcttgggtgacattaatctaattttaggaatagactaagaaaaagaagccgacaataggaactaagaaacacagttgccttttccctttccatttctttagccacacataaaatcaaccatcagatgtggctttttctctctggtatccttcatatacagtttcttctttcaggaactactcatatctgtaactttatatacattacctaaccacaggtctctcygtcattcggcgtagctcctttttattccttcaatcccaaaccacacttcatgtttatttcctgctttctcttgaataacatatactgttattataccctacatacattatttata

SEQ ID NO: 656820 - DNA, 427 bp, Homo sapiens
actacttattccagtcagttttcagtattttctgcctctgggaggcctgctggctccaggaacataccatcttacatctgatgggtcaattggaagccactcccagaactattgatttcagagccacatagcagctgctaatcagcactggcttattacatttcaagtgcttctacctctctctccatttacttcaattataagtctcatgcacaggcatctgattggcaagcatacccagaacagtagctgcaagggatctgagaaataaagcttttagctttcyagtttctgctgaatgtggaaagctgattaggagaagagcagcttccatgtggaacaaacactttaccacgtctgctaccttcctccttcctagccttctcttcgcgctttcactacctgggcttgcactgcacagaggatg

SEQ ID NO: 656821 - DNA, 585 bp, Homo sapiens
ccaggggaccacatgtcaggcatttgaagactaccagaagtctctcacctctacccatctagtctctccctaggctacacaggactagtttattcagctcttctccatatggtatggtttggagtccctctcccctttctggatgcccactctagacccaatcctgttggtcaatatattgcccaaaatgtgatgccagttttctaggggtgggaatactgtagtacaataaaatgatcacctcccacatgctacctactctgcctctattaatatgaccagcagyatcccgttgttgtttggatcaccatatttcattaaagacccacaatatacttgctgttttctaaacccttgtgtttttcacatatcctaactatggctttcccattccttacttatgtggttgactttttatatagctcctgatacccaagaagaataaggtcatggtgtagaagttgaggatggaggaaattaatttttttgggtgtggggtgcttcctatatgccaagcacaccatatttacttcttacaactattttcttcttcttcttcttcttcttcttctttttttttttgag

SEQ ID NO: 656822 - DNA, 599 bp, Homo sapiens
tgcttctctaccaacttaacctgtgacatgctgcccagtaacccccaactcagatgtaggatctgagcagctggttgaacacatagctactatcccatgacagcatgtgatggggaagcctgggttctgaaggtgcatgtgtgtgcacgtgtgcaagggcagatgtgggaagcaytctttctgacaggcggatgccacacatactgcgttaggctgcctctcggaggctgaagtctctttcagggcccagctcccagattctgcccgctgcagaaatcatcgcgttataattacaagttaattaaagcagaggagatcaaagccactttagacagattaatgatacagcgagtgccagaaatttcaccattttatgtattaaccacattgtcgtttttattccacatttttcccctcttttgtgtcagccgaaaagcctttcatatcttttctctgcccccatcaatgcatgaggaatttgaagtcctaacagctgtgaggagctgtctgtggagaaggagtccattcaaaggatatcagaaaaaccaatgagccttttagcttctgattaaaatgaagctgccaccgcctaaccctcc

SEQ ID NO: 656823 - DNA, 582 bp, Homo sapiens
tcctgcttcccctacaatctattccaatgtaagcttacatgtcttgcactggcagactaagaggtagaattagttattcttattccttgtaaccaactttgtttctgtttctcttataaaaatttctcctcaaagctgggcacaatacttcatgcctgtaatcccagttacttgtaaaactgagacaggagatttgctagagcccaggagttcaagcctagcctgggcaacataycaagactgtctctaaagaaaagaaaaatttctcctcctctaagaaatcctcttattttactttttatttgtaccaataccctgtttatgtgcactcattcactgaagtcttgaactcctggctcacagtattcctttccaacctaatcccaatcattgtatttgtctgtttcaatattaatgtggatgaccctggcctcttgaaatcttggcctctcaggtccttgagctcttcatctccaaagataatttcctctactccacatcagccattctatctctattattcattttttgcttatgcaatagtaacaaaccaccccaatatttcagtgccttataacaata

SEQ ID NO: 656824 - DNA, 622 bp, Homo sapiens
tgtgacttcattttccacagtttcagttacccagggtcaatcaactgtggcccaaaaatgttaaattgaaaaatttagaaataaacaatttgtaggttgcataccattctgagtaccatcatgaaatatcatgccatcctactctgtcccacccaggagagaaaccatccctttgtccgcagtatctatactgtatataccacccttccactagttacttagtagccatttctattagattggctgtcayggtatcatagtaattgagtccaagtaattcttattttacttaataatagctccaaagcagaaaagtaatgatgctggcaatttggatatgtcaaatagaagttgccaagttctacctttaagtgaaaatgtaaaacttcttgaattggtaaggaaaggaaaaaaatatataccaaggatgctaagatctatgctaagaatgattcttctatccatgaaactgtgaattagaaaaaggaaatttgtgctagttttgctgttgtacctcaaattgcaaagttacagccacagtacatgataaggcttcggatggaaatcacattaaatttttgggcaagagacatgatcagaaacacattcttactgaaggcaa

SEQ ID NO: 656825 - DNA, 622 bp, Homo sapiens
tgtgacttcattttccacagtttcagttacccagggtcaatcaactgtggcccaaaaatgttaaattgaaaaatttagaaataaacaatttgtaggttgcataccattctgagtaccatcatgaaatatcatgccatcctactctgtcccacccaggagagaaaccatccctttgtccgcagtatctatactgtatataccacccttccactagttacttagtagccatttctattagattggctgtcatggtatcatagtaattgagtccaagtaattcttattttacttaataatagctccaaagcagaaaagtaatgatgctggcaatttggatatgtcaaatagaagytgccaagttctacctttaagtgaaaatgtaaaacttcttgaattggtaaggaaaggaaaaaaatatataccaaggatgctaagatctatgctaagaatgattcttctatccatgaaactgtgaattagaaaaaggaaatttgtgctagttttgctgttgtacctcaaattgcaaagttacagccacagtacatgataaggcttcggatggaaatcacattaaatttttgggcaagagacatgatcagaaacacattcttactgaaggcaa

SEQ ID NO: 656826 - DNA, 601 bp, Homo sapiens
tatagctaacctagatttaaaaaatgtgggttcaaggtcactagacttttcactgacacctaacaatttaactggatggctaggtagctggtttctaagaacaagtgtttccctattaaacttaatcagaaaattgcttaattattaggaatatgtgtttcttcatagaaggagattgtgaattctacttcacaaataggttctgttsctgatcaagttagaaacttttttttttaatagtctctcaatttagacagtctttgcaggtctgtcttggtcaaggaagtctatccatctcattacatttttgcattagggtcattgaatttgttacctactcattaacttttaggtttctttatttacactttgcatccagagtcacagttacaagcactatttatataaacactgataatactttgaactggttttctataccagggaagattttcaaagcataatctaaactaacatagtttcagtgttatctactttatataatttatggtcctgggcttctatatttctgtgttctgttctacttagcatgctttgttttaaaaggtaccgcaagaggagcttattaatccgtttaaac

SEQ ID NO: 656827 - DNA, 526 bp, Homo sapiens
tggcatcctccttgtgggggtatgtccttagagtcttgaaaattagctttatgtgtgttataaatttacatcaatgtctttgtgatgtagattttctctgtttctgctcattttcaggtggcactgaccctcctccatgtgactatattcragcatcacctctgtgtgctaatgaacatttcatcacagttcacttctccagtccctgagggatgcacacctgagctccctccagctcccgctcccaccagcagtgctgaaatgaacatcttcataccagaccccttgcagatgtgacctgaacatccagatggggctgcaagttcatcagactctgtcagatgacccagtgttgtcaaaggagagtctccatcattttcctcatttgtgatgttggcccctgaggacagatgggcccatgaatctatctccagggtctggcaaggtccattcacatggtgccacctttggctccaggtctttcatgagggaaagcaaaggcagcttgaagtcaggggggcagtcc

SEQ ID NO: 656828 - DNA, 530 bp, Homo sapiens
gtcagttgccatgacctctgttactgagatggcaaagacaaggaagctcagctcagcctttttcttgtgtgggcatctggacacaggatgctgctgcccattccattcttctctcccattttctggtattttgttgtgaggaaagaccatactataacactcattctacttacaaggttgttagctaatgctgcctgcaaagcagaatagtggaggtcagtaatgttactgtccttttaaaaattattttatttttatatttaagagacagagccttgctctgttacccaggctagagtgcaatggtgcaatcatagctcattataatcttaaactcctgggctcaagggatcctcccacctcagcctcagctaggactactggcatgcaccaccacacccagctattttttttttttttttgtagatacagggcctcactatgttgcctaagctygagtgatcctcccaccttggcctcccaaagtgctgagatttcctgtgtgagccaccatgcccaactgttactat

SEQ ID NO: 656829 - DNA, 608 bp, Homo sapiens
cgacgaggaatcagaaattaaaaataaatcattttttctgcattaaaaaatcacaaacttagctaacactgaaactaaatatttcaagaaaaaggcagtgctgtgtttaaaatgtactatatctgaatgtctggagaaatgacaggttgagatacttgcagactaccccaaagtcactttagcctcttgtgtggctgacgcctcttagacttgtaccccaggacttgactgtggattgcataattttaaaagaaaacgagctataggagttacttccaggaggtacaaatatcgttcctacattagcatcagaagtccagtccatgtttattcataactgacatgcaactgcaatttaacaaatgaagctgcatcctcttatccgctcctgagggttgaaaaggatgtctgagttctccttagggtgtttcaataagtttattcaagaaaatgccagaaatccagaaggactgctttatgatgagcgcatttataatgatcagtaagtggcctttacctagattctcagtgaagaggttcagctgccagacgtgccgccrgactatccgttccatgtcttgcagtgattggaagagatgagaattcgc

SEQ ID NO: 656830 - DNA, 525 bp, Homo sapiens
tctttatagcaacacaagaacagcctaaaacactcttcaggcctcgatttctttaataaaataaggacagtaagagtgcccgctgcrgggcttgaatgggattgttaccacctttccctctgctcctcagagttcagatgtagactcagaagttagatggatcaacccaaatcactagtttcattactgagaaaactcagttgaagaatgcaggtggatttgggggtagaatcgggctttccacttcttcctcctcacaactaacactgtcttgttccatctctctcacccgccaatcccacaaccaattctgctccagtaggcttactcctgggaggaacaaatgattcgtgcatctgggcaggcctcaaggaaatagagatggcagaggggcgagagtcctgcaggagtcctctgcgaagcagtgagcaaggggaggttgagagagaggcctgggagccagtggacatctctttctttctaggtgggaatgtaaggagtgagggaggaaaatgcttcttgaca

SEQ ID NO: 656831 - DNA, 548 bp, Homo sapiens
ccccaatcataactcactgccatcttagacctgctgaatggacaggtctgctctgacagatagattatgaggcacgcaaagaacaaagaacctttctctgaggaatttcataatcactgtgtcttttcttctccttcctttaacatgtgtaatttatcttctcttggaaaggtgcatataaattttaatgcaatttgcttaagaacaattaacaaagtcacaatttgagaatcctatttgtttcccaggagaaagggaaacatctgaactgcatgctgagtamtaaggagacttcaggcccttaaagaggaatttaactagaaggtatccctgatttgtcaggcccttaagacaataaaacatatctgtgtgatcataagacagccccatccttcaacactgactaaaaagccttaggtgacattgaacaagcaggcacatatctcaggacttcaagattagagagatggagccctccatctctagtcaaataaaacactagtcacagaatttctgtaaaggaagagtattaaggacattgtccaatc

SEQ ID NO: 656832 - DNA, 548 bp, Homo sapiens
ccccaatcataactcactgccatcttagacctgctgaatggacaggtctgctctgacagatagattatgaggcacgcaaagaacaaagaacctttctctgaggaatttcataatcactgtgtcttttcttctccttcctttaacatgtgtaatttatcttctcttggaaaggtgcatataaattttaatgcaatttgcttaagaacaattaacaaagtcacaatttgagaatcctatttgtttcccaggagaaagggaaacatctgaactgcatgctgagtactaaggagacttcaggcccttaaagaggaatttaactagaaggtatccctgatttgtcaggcccttaagacaataaaacatatctgtgtgatcataagacagccccatccttcaacactgamtaaaaagccttaggtgacattgaacaagcaggcacatatctcaggacttcaagattagagagatggagccctccatctctagtcaaataaaacactagtcacagaatttctgtaaaggaagagtattaaggacattgtccaatc

SEQ ID NO: 656833 - DNA, 582 bp, Homo sapiens
aattttggttaggaacatatctaggagtagaattgtttcaagcccagtttagtcaatcaaaggcagttgtcttcttcttacaatttcagggaaaggattatgactaatccatctctggtcaggattgtagattttgtccaattatttatagttaggatgtcgattatcctgcccacttaatggactacggaaagttacatttcaatgaataggcacaggcatggaaagaaattgaattatattttcactgtactgaccacaaattaacctaataaccttttcttctttagaattccttattctagttgaccatacgaccatcaaaacagtcctataatcataaactttatccaatagaatcctttatccagtaggatggcttatccaataggatgctttcccttacaatgtgtaacgaatcaattatattttctgaaccactgccccctatctcatctctatttcttttccctccagccatttgtttaattcagatatttgactcaaaattktggtagcctcctatgtcatgcttacccttcaattttcttgaaattatgttttctataatttcacctgata

SEQ ID NO: 656834 - DNA, 564 bp, Homo sapiens
aaagataagaacatggaatagacttaagtaaaacaaaaaagctcccatttttgttgttagatttacgaactttctgcttgcctctactaataaaataaatgtgctttaaaatgttttcaaatcaccaaattggtgactgtgatgacggcagtttttccatgagcctgctcctattgttttaattttaaaaccaagagcaagcatctctttcaagggtgaaatgcccttctgttttgaatcagcttctttgaggtcaagtgacataatggccgagaatcaagacagccactcctggaggcggccaaaccccacccctgtaccctggaagcccctctctggattagcttcaatgcttrttttaatgggcactcaaacagcttcatctgacaagaggagaaatggaagagaaggtgaaagctgcctggaagtgaaagcaggatttgaaattgaaggtgatggtgggatgtgccctgacgtcatgagcaggagagaggggaggaagccggtccccgcagaagaaaggccataatgcttgactgcacatcacagaaatgacaaggccgt

SEQ ID NO: 656835 - DNA, 434 bp, Homo sapiens
gcccgtctttacaaattttgattaatttcactcaaaatctttaagaagaaactattgtttcttccaatatctgtagatttattaattttttagaaggccagggagtatctcttttaccagtgtatatctgtcctccaaacataacataattatattctaagtctctatgatttttggaacatatgcctatcctgttttcccacatttcttcatcctaataggtcccattctttttccttccataaaggggtagtagcataagacttggtgtgagataactatctactgatggtttgatataatagaaatggcatcatattactatatataaagcatacccttactattaatatcmattcatattcttaaaaattcctttgccatttttatcctcagaaggttcacacagattgtttgtacatagaaagtcctag

SEQ ID NO: 656836 - DNA, 571 bp, Homo sapiens
gtgactactgagcacttgaaatgtgtctaataccactgctgcactaaatttttaatttaattttaatgtaaatagctatactactggcaaatctaatatggattttatacctgaggaaacacacctaaaaggttaaagttactagtccaagatcacatggctataaaacttctcagtcatggtacactttctttttctttctatacacacaccgagagagagagagagagagagagagagagagagagagagagagagagagagaaatagtgagagacygatgttgcagcttgagtctgaaggcaggctggaggcagaatggggacttgtctttttctgttaaggtttttgacagattggatgagggccactcacattatgaaggataatccactttacttgaagttgatgatttaaatgttaattttatctaaaaaataccttcaacaggacatctagtctagtgtttgatcaactatttgtgtaccataggttagccaagttgatacataatgttaaccatcccatgctccaaaattgaggactgtttggggatatattatctaaatgc

SEQ ID NO: 656837 - DNA, 542 bp, Homo sapiens
ggagtctcactctgtctcccaggccagagtgcagtggcatgatcttggctcactgcaacctctgcctcctgggtttaagcaattcttgtgcctcagcttcctgagtagctgagattacaggcgcccaccaccatgcccagctaatttttgtatttagtagaaatgggatctcaccatgttggtcaggctggtctcaaactcctgacctcaagtgattcacccccctcatcctcccaaagtgttggcattacaggcataagcctccgtgcccagcctgtgtttttattataaatgagaaaccatatcatgtaagaatgtctccctttcctatggataatataatagttgttaaaatatatctcttttcacaaaaattccrttttgaagatactatccctctattgggggaatgagaaaactgaacatttagttataaaaataacattaactaaattttaccaatcgaacaggagaaatagatgtgactgacaatctctagactttgaagggaaatcgaataattaggtaaatccactttttct

SEQ ID NO: 656838 - DNA, 601 bp, Homo sapiens
gaggaattgtgttcagcaacacaatgcaaaaactacaaatccaggaataggaatccggatcaggaagcttcttactccagaatcttcttttgacatcatcaaagctggagtctgcacagtggagtcaggctgttcattctgccacaatccgactgcctcctaacacccacrtcgctagcagtgacacagtggaatgctgaggcagaaaagttcttcttcgtgaccttgctggccagcaaaaatggcaaatgttaatagacacatggatttttttttctcctttccatcttctccgcagcttttcagtaccactaattggaagaatctctttttctcatagagacgctaaggtggaaggaagtctgggaaatgtagtttttagcatttcagtcattactgtagaagaaaatgcactaagaaagaagtgggaatggaaagtgagtgccaatttatctcagagagtttgagaaagatttcattaacttgaagtcaaaagattcttgatacagacgtctctggcttaacttaggtgaatttctaaatgatggaatctcaaacattgtaacttagtgcaaacacttctacaaaatagaaaaagaat

SEQ ID NO: 656839 - DNA, 522 bp, Homo sapiens
aggattgacaagaagggcattcactttagttctaaaagaaatgatttgtttgtttaygaaaaacaataaaatcatatttttatagaaacccaggcattaagaagtataatacaaataatttgccatctggaagtaatcatggagtccgagaatgctaacaaggtcatggagacactaattttcattcagtatagcactgaggagttccttgtatagtaagtagttccttgtagcagttactacctttctttattcacagataagtaagcaaactcagtcctgtaatagtctccatggaaattcagtgtggattcttgcattgctgtcattcatacagtagaggaaaacatgcttttggtttcctaaagttacataggtgtttcagctgttacttataccaaatgagtttctaggtagtatatgtagctataagtactattttgggttaatgatattgattcattttggttccttaactgttttattaaaacttggaaaattgtccttaaagttaagccagat

SEQ ID NO: 656840 - DNA, 423 bp, Homo sapiens
tgaattctatctacaattataccaagtatattataatatcatttttagcaactttttttctctaacatcattacagagctgccaagtataaagtattgtacacactgaaaaagtttacatttatctgatatgtcttctgcggttgcttagcttcttttgagaatccatgtaaaatttgcatctgctgaggaagaccatgtcacaaatgccagagaaacctcctattagaacacagtagtgacctaggaagagcacattgctaagggtaaagggtttcaaaacaaattggggaaaagataccaacacctcaaatatttcatcctcacattcattcgttaagagaaccttaatatgctagttagtgctttttgtrtttcccccagagaagtattaaaactgtgctccatgaaatctgtgcaccgc

SEQ ID NO: 656841 - DNA, 585 bp, Homo sapiens
aattaagcttgataattacaatagaaattgaacattaacttacagattatccttttctcccccacagcagcaactttaattcttattctttctttctctcactctctctatgtgcacacatatacacaccattaattaactttcaaaaattacttctttaaatagtgaaacaactaagacattttatttggctgatcattagtatctaatgccaaagataattttcacccttgctgaccctaagcagggctaggaaatgacatcctaggttgaagtatgatcatcagaattatttgatgctrtatctcaaactgttttgaaatgctttttaaagtcctgaaatttcaggtaggctgttaaattcctcaaacctagtgtctcatgcaggaaggggaacatcacacactggggcctgttgtcgggtggggggagcagggagggatagcattaggagatatacctaatgtaaatgacgagttaatgggtgcagcacaccaacatggcacatgtatacatgtgtaacaaaccagcatgttgtgcacacgtaccctaaaacttaaagtataataataataaaataaaacc

SEQ ID NO: 656842 - DNA, 440 bp, Homo sapiens
taaggctatacatttctctctagtagcctccaatttttttcaatgacattttttaacagctttattgagataaaattcacataccatacaattcagccatttgaagtgtacaattcatggtgttgagtatattcacagagttatgcagccatcaccacagtcaatgtagtacctgccttgtaaggccatttttgaggattaaatgagataatctaggtaarcagtagacccaatgccagacacttagtgggtgtttctctgctggtttttgttcatgctgctgtggttggtgctggggctggcatcatggaaggctggaaggagtaggtgatgggaccaaatgagaaggaaaagaaacatgtgagacccactgtctgggtgtcctctccagatgggagtgacagactgtcattattagctgctagtggattcttttccgg

SEQ ID NO: 656843 - DNA, 644 bp, Homo sapiens
ctactttacaatcatgagaatgactaaagtaaaaaagacaataacaagtgttgatgaggaggtagagaaaatggaacctttgtgcattgctggtaggaatgtaacatggtgcagctgctgtgaaaaggagtttggtgattcctcaaaaagttgaccatagaattagcatatgacacagtcatttgactcccagatatatactcaaaaggattgaaaactgtcaaatttgtatacagagatgctcatacatcatccttcgttatagccccaaactggaaacatctcaaatgttcatcagctaaagaatggagaaacactcagtgatatatttatatgatggaatattattcagccataaacaggaatgaagtactaatacatgctgcaacatgaatgcaccttgaaaatacaccaagtgggagaagccagacataaaagccacrtattgtataatttcatttatatgaactatctagaataggaaaatccatagagacagattagtagcctccattctttggttgctcaggccaaaagccttggagcaatccttactccattacctattcacatacttcagatctaatgagtcaggacatcctgtttgtaagcacccacccaaaatatacccagcacttccctct

SEQ ID NO: 656844 - DNA, 626 bp, Homo sapiens
ttgataaaatgttgcttgaattgaaataacataggactccagaacataccactatcaccagcatagaggaaatgccaggaagataaggtgggagaaggaagggtgcatatcagccttctagaatgttctgtttctaggcaagttgcttcatgggccttacttcaggacaccatgaggcaggattcagagctagaacagtgagcttggagtgggagctggagtgataatgcaggtgtatctgtctctagcacccttgaccttrcaggggcagtgttgggattcttgttttgctcagcggcactgagtttgtttaaagtcagatggctgcagtttgccttccagctgatttgctttatgtgtgcagaagtaattactgaaattgctgctgataacaaatacatatgtgcacgtcaattgcctttgcccctccaatttggtgaagaatgaacagggttgggggatttaccaatgtggtggcaaatacagttcttccaggggaaacccaactagagtggctgttgggtttttgttttgaccaactagatcaaaggaaaccaagcaagacgggaggcctcttgacatggcatagtgccagttaagaacatttagaaatcctttcggaaata

SEQ ID NO: 656845 - DNA, 424 bp, Homo sapiens
catcgctactaaatctgttggccaggttgtcttcgaattcctgacttcaggtgatccaccgaccttggcctcccaaagtgctggggtgagctttttaattattgttgttaaastacaaagtagagcatagctatgtgggaaatctcaggtggagtcatcaatcctgcctctgtactagtgcagagcagagtactctggtctggatttatgatgagctctgcctcacttctcctctggagtctctctaatataaaggaatgcaattccaaaaccctcagctagaatagctagcctccactttttgtcctagttccaagcctttactgcaaaaacatttaacagtactcttctgtaaacgttgcctcctttctctcttcccaaccttcatttacctgtttttaaaattaccaatgtgaagacatga

SEQ ID NO: 656846 - DNA, 643 bp, Homo sapiens
gacaaacgggtgggagtgggctcatgcccacgacatcaacttgtgtaatatgccagaccattcagaaacagctggtcttataagtgctgaaacaatgattgaaaatacagctaaagcaccagctttgggggaaataattttcaaagatgaagtgtcatcctttgggatgcagtacatccattaagttaagtcctctatatggtgtccccagtaggaaggatacttgtgtctgggaaccaagggatgagagatgtggttccattttccatcatttacaatggctcattgggaaacgttctgcttcctgtatctgagctctgcaaggttgtatatcctggtccccatggagggggtgggacgyatgcccttacaaggaacacaagggtcctgttagactacaagcttcagttggtgtcagggcactttgaactccgtgtccagtgttcagcacatgagaacaagagactattttcatgaaggttattgacgataatcaccagaagaacataggatggcttttgcacagtggaggcagaaagggatgtgtttggaacccaagtgattcagttgtgtgtccttggtactcatccaatgtgactgtaaatggataagagcaaaatccagtgtgagatggatataatta

SEQ ID NO: 656847 - DNA, 598 bp, Homo sapiens
ggcactgggtggatactggtgccttcaactcagattaggatcgtgaagctaccagaaaggaagagaaagtttgaaagtgaaacagatgttttgaagttatggtgccagtgggatcaccaaagtgaaaaccctccatgggcagttagaatactcaaatgagctcaggtcaggggtcctaggtaaagaaacaaatgtaggcattgctgatattacaagaacttcatattaataatgagaagttgaagtcgctatagttaatactgctaaaaataaaaggctsttctcttctaaatattaacccagccttgaatgacctatgtaagttaggggtattcattgcaaataaaaaaaaaaacctcatatgaattaaataggatgatcttagaacattttcctcctaaacattaatcaagaattactggctggcactatggtaattactgtgtacattttctttatggtaaacaattttcatcagcaaggcatgtatatgtgtgtatattttttatctctgccaaactatttcttttggttttattaatcttaacatatgttcccatgacatctcttcttgaaaaagagaaacacaactaactca

SEQ ID NO: 656848 - DNA, 447 bp, Homo sapiens
taagattgtatatgggaaggggataagaggaaagaacacaaatatacaagataaaaaatgacaaagaaaaataaccattgaaacagagaagatttaagtaatgaaaaagtgaataattttgtagaaaaacataatttgtcaaaactgattccaataaagaaaacagaccaagtactatagaagaaatagagaaagtcaactgttacttctcactctcaaaaaaatcagaaggtcaagatgatttcacaggggaattctacagaaacttccaaatccatgtcatcctatttgtataagaacatagaaaaatgatcttccaaacgtttctgacaaaaasaatgaacattaacaacaaaacttgatgtaaaaaatatttttttcctcaaacctaaagactattttcacttacaaatgttgatgcaatagtctaaaataaatattaacact

SEQ ID NO: 656849 - DNA, 522 bp, Homo sapiens
taaagaacagcatatgtatttttcagtattctcaatagaatctcagtatgcacaatttcattcaaggatgaacattttaaactcaaawgtttatttccatggaaaataaagtttggatcagaattttctatacaaccttataagacccacgtctccatatagttataacagtcaacttttcttaaaattatttttggacaactcaactcaacttgaccagtatttttctactaggctaatatatttcaaccataagtgcattcttcattttctcccctcctccctactcacctcccacccaacaaattccctttgtatgtctgcaaggcaaggtactatataatgcagtataattctaaggcagtttgaatatataattcttataacaggaatctagaattattaaccttactttttacaataaaagtaccagtgatgtactaaatttctattcatatgtatgacaaatgtatctaacatgctttaccgttagggggaaacaaagggggaaagacacaatag

SEQ ID NO: 656850 - DNA, 522 bp, Homo sapiens
taaagaacagcatatgtatttttcagtattctcaatagaatctcagtatgcacaatttcattcaaggatgaacattttaaactcaaatgtttatttccatggaaaataaagtttggatcagaattttctatacaaccttataagacccacgtctccatatagttataayagtcaacttttcttaaaattatttttggacaactcaactcaacttgaccagtatttttctactaggctaatatatttcaaccataagtgcattcttcattttctcccctcctccctactcacctcccacccaacaaattccctttgtatgtctgcaaggcaaggtactatataatgcagtataattctaaggcagtttgaatatataattcttataacaggaatctagaattattaaccttactttttacaataaaagtaccagtgatgtactaaatttctattcatatgtatgacaaatgtatctaacatgctttaccgttagggggaaacaaagggggaaagacacaatag

SEQ ID NO: 656851 - DNA, 597 bp, Homo sapiens
gcagtctttcacccctaaatgctccacttttcaccagggagagaatgaaaaacacttcgtttgtgggtgagtcacaaacactacgttttggggcctgtaaacttggaagcagggaggtgctatactctgaagccaatttcattaccagggctagcttacatagccagagattcagtcattgctggagtgagtgaaatatgggctatcctcacaggagattgagaactgggccttttcatcttcagagggaagccaagtgggtgccatcatcctgaggaaggcccctgctccagaggaagctgggctctttctttttcctttggaattgcctggctgtgctgttcatcgaggtgcaaagaccgactgccacatgcacttctsgccagaccacactcgacctcagaagctccttctgctcccaagcaatttacaaaaccctgaaggccgataacatgggccgcctacacatctgacttagagggaaccctcggcatgaacatgtttggccaactctcctaacatttgcttttatgtcaattaggatatttcattttcatattgagctcaaccatggctgggtaacctcatccccaggtg

SEQ ID NO: 656852 - DNA, 581 bp, Homo sapiens
atgaatgtttgcacttgagaaaccttatatttaattagtggaggtagaagacatagacttttgagaatgttttaaagggaagttgagagaattttcaagggtttagaggctaatggtatgggctctttagttttagtttagttttttatttttattgtggaaaaaaaaaacacctctaagaaaagtttataacgtgtatatatatggtgctggttaaaaatagaaaattacactacytggtgaccttccccagtcatacagcattagcactgtgctatgtctatatttgtgtactagggacacatttccctttccttgacattatcaggacaattttttactcattaacctttattagaatcattctagtgatttacggaagaacaaatagaaagggaaagggaaaaacattcctgtgatcacaggaaaagaaccagaagaaggagaaagagggggatgattaaagagaatagatggataggtttttataagaaaacttttttctgaggtggaatgaatggtgctagaaaggaaaaggaggcgtgggctttagaaaggagaaaggatgtactggggaagag

SEQ ID NO: 656853 - DNA, 581 bp, Homo sapiens
atgaatgtttgcacttgagaaaccttatatttaattagtggaggtagaagacatagacttttgagaatgttttaaagggaagttgagagaattttcaagggtttagaggctaatggtatgggctctttagttttagtttagttttttatttttattgtggaaaaaaaaaacacctctaagaaaagtttataacgtgtatatatatggtgctggttaaaaatagaaaattacactacttggtgaccttccccagtcatacagcattagcactgtgctatgtctatatttgtgtactagggacacatttccctttccttgacaktatcaggacaattttttactcattaacctttattagaatcattctagtgatttacggaagaacaaatagaaagggaaagggaaaaacattcctgtgatcacaggaaaagaaccagaagaaggagaaagagggggatgattaaagagaatagatggataggtttttataagaaaacttttttctgaggtggaatgaatggtgctagaaaggaaaaggaggcgtgggctttagaaaggagaaaggatgtactggggaagag

SEQ ID NO: 656854 - DNA, 559 bp, Homo sapiens
cagatactaagacaagtgttagaaatttgaaaagaaacttctttaaaatcacccgtaaaaacttatgtggtaaatgtcctataccttctttcagctgcaactcctctagttaaatatctaacaatataggatcctaaaatcttattttcttatatgagaattgtattttatcaagtcccttttggaggtgtcatctatgaaacctgcaggttttagacatgatggcagctagtgatccacagttgataaaatactgtctcgagcatctcaaaaggatttgtacaccgaatgacttcaggatttctggtgtgttgtgagaaatatggtataaacactgtactaycactcttagcattcaaataaaatggatttcagcagggcgtggtgtctcacacctgtaatcccagcactttgggtggttgaggcagatcacttcagcccattagttcaagagcagcctgggcaacatagtgagaccatctgttgaaaaaaaaaatagccaggcatggtggcatgcacctgtagtcccagctattcaggaagctgaagcaggaagatc

SEQ ID NO: 656855 - DNA, 610 bp, Homo sapiens
caagtcttgtcttacatggatggcagcagtcaaagagggagagcttgtgcaggggaactcctctttttaaaaccatggatctcatgagacttattcactaccatgagaatagcacgggaaagacttgccctcatttcagttatctcccaccagatccctcccacaacatgtgggaattcaagatgagatttgggtggggagtggggacacagccrgacacagccaaaccataccattctgcccctggtgcctcccatatctaatgccctcgcatcttaaatccaatcatggcttcccaacagtcccccggagttttaactcatttcagcattaactcaaaagtccacagtcgaaagtcttatctgagacaaggcaagtcccttccacctatgagcctgtaaaatcaaaagcaggttagttacttcctagatatagtggggatttaggcattgggtaaataatgccattccaaatgggagaaattggtcaaaacttttataaataaagtttcggtgccacaaaagaaatagcacatgaatataaaattttctttttaattctcagcaaggcaatgtacttctatagaagggtgcacccttacagatggagc

SEQ ID NO: 656856 - DNA, 615 bp, Homo sapiens
gttctaaaactacacagatctctcgatgaattggctttgctgctgggttcctctttcttaaaagtatttaatcagcgattttcccagtgccccaggcatttcctgtacgagtgctgctgactgttttacttcctaccaggctgccctcctcctcttggcattcacacttccaactttcagatgagctctattaactcctgttcttccagcctccgcctggctcagccatctgggagccacacaggcattctttccatcccccagctcatagatttccttattgtagaagggcatatgttttcaagtaccttatcattctggctctttcccccgattctctcccagttccaagccattgattgtttttcctccttagttcattttacagctgctgagagatttgagctctcgtgttgcctgtttgcttttgtgtcttttgtcccttatgtcccagtctactcaaggwtacccacagtcacctagataccatttctactctgtgcttttagtgtcctgcttgggaaatggggtgatcactcatcttcagaatgacctcaagaaatgctttggcatgagagatcagggcctgaagacattacgcccccacccaaatca

SEQ ID NO: 656857 - DNA, 620 bp, Homo sapiens
ttttgcattctgtcccactacccattggttttcatgtcaagataatgtcagaaattctttacaattgcttccagaaggagtagccttttgatctagtgcacaggtgtccagtcttttggcttctcagggccacattggaagaagaatgctcctgggccgcacataaaatacactaatgctaacaacagctgatggggttaaaaaaaaaaaaggtttgtgcataattttcatgctacccaccaccacagataggtggaaaagtccttgtartcaaagggctggacacggctgatctagtgtcttgtcgtccgttttggctttctccctgaatccagaatgcaggtagagatgtagagacatgctctcaggacagctgttgagataaaaaaaattcgttgtcatttattcccaagcacagctgtttctcattgcattgaaaaagtctccattcaaactgctgtcacatataaaatctatttatgtaagtctgtatttttctgttgtcttggcctttgtaggcagtagtgtgttttaaccgagcaaactgtccttccaaataatgaagccgaagtcagcctacctacttgccatttttcttccccttccatttttgtaacctc

SEQ ID NO: 656858 - DNA, 620 bp, Homo sapiens
ttttgcattctgtcccactacccattggttttcatgtcaagataatgtcagaaattctttacaattgcttccagaaggagtagccttttgatctagtgcacaggtgtccagtcttttggcttctcagggccacattggaagaagaatgctcctgggccgcacataaaatacactaatgctaacaacagctgatggggttaaaaaaaaaaaaggtttgtgcataattttcatgctacccaccaccacagataggtggaaaagtccttgtaakcaaagggctggacacggctgatctagtgtcttgtcgtccgttttggctttctccctgaatccagaatgcaggtagagatgtagagacatgctctcaggacagctgttgagataaaaaaaattcgttgtcatttattcccaagcacagctgtttctcattgcattgaaaaagtctccattcaaactgctgtcacatataaaatctatttatgtaagtctgtatttttctgttgtcttggcctttgtaggcagtagtgtgttttaaccgagcaaactgtccttccaaataatgaagccgaagtcagcctacctacttgccatttttcttccccttccatttttgtaacctc

SEQ ID NO: 656859 - DNA, 508 bp, Homo sapiens
tttgcaaaattatggagagtgcagactaggagaaaaaggacaggcatagttgtgacaaggagctmttttttctagttctgcattctagaaacagtactgatgagtccaaaaatatagagataaaattttgtcttttttcttgctttaaaaaaaaatgcttctaaatgtctacatacttgcctaagaaaatatttctcaactcctccagaatatttagggttaactaaaaattataaaaacataccacagagctagtccactctttatgcctagggtttacccaaaaggtctgcatgctctggcttggagaccctgaccccatctcaacttgctggttttaagtctacatatttggctgcaaagccctaatgccaggaggaatgcagaactgacgagtccaccccatctacaagctagaaggacatcttgattaaattagtgtcaagggctgtggagagaaaggcacagtgacacaaagggtgttttgaggagccctgtagcgcctgtg

SEQ ID NO: 656860 - DNA, 585 bp, Homo sapiens
actgacgtatagtaagcatacttagtgaaatagaagcattttttaaatttcaaaactgaggaaggtggattttaccttggggaaaaaaaatgagaggtattttaggttcttcaacaggaaagtgccataattaaagtcacagtttaggacagtgatgctgacggtgagggtatgaataggggtagaggtagtaagaatggagaggaaagggaaattaccaaaaacaggtaaaagttttttgaagggtaacttttctctcccagattctaccccctgcccacaccccctccacccacactcatacactctgtgggccgtgttacttctgttcattagacttataggcatagagctcatcaacagggtctacatagagctagtcaggaaggtttacaggttcaagggcagcctggtgagaccagcagcatctcccagagagcccatgcccgtgcagcgtcctaatgagccrcttttgtctagcttccatttgctcttccctcccaactgaatttaatgtctttccatcctctgcctctagttaagttgtaactgctgttattccactgcagccaggcagctgccagg

SEQ ID NO: 656861 - DNA, 442 bp, Homo sapiens
gaattctttcttcaaaccaaaccttacatagaatccctaaatattaaatagaaaaaagagcagggttggcttggttgaaggaggaatagaagactccaagtcctagtagttgggytgtccttttactcacttctcaagggcagcttcagtgccagctctggtctactgcttgaaagccactagcctggccaaatctgttcattttactatggaagaaacaggtccagagaaggggagtggcttttccaaggttgcttgattctgcgccagtgctttttttatacagttgcctctttttgcattttgttgtaaaaaatcagaatcctttacatggcatgaatttttccagtaacacttttgcgtagagctttttagtcttataaatgctatttctgtagtgcagggccatctgttgtcagatgccaggaaggaggaggcatgt

SEQ ID NO: 656862 - DNA, 529 bp, Homo sapiens
ccagcagaggaggaggacaggccacatcacccagtccaacctccaaacccaccagggactcaggtcacagctgctccaccccccagggaagcctgtggtctctgcagatcccaactgcaaccccagaacgtgcccacagacctttgagccccctctcgatggggcacagaggaaagggagagcccagcaggagctgttcactgggaaaacaactcctcatttacaggggttagccccattccttatggaccacagaaggatgccccgtcagcctccagtctgcccacctgcacccagtgcctgagtaagagccttccctgccatcccctatcaaacgtctgctgccccttccacatgcagctcacctggccctggggagccgtcccygacctgccccaggtgaattaggtgctctgggctctcccagcactcttagctgttgtccatgaagaccctgagggtgtcatgtatgctctggaacaagacaagcagcttccatctaggctacaggcggcagcctgctctgatt

SEQ ID NO: 656863 - DNA, 529 bp, Homo sapiens
ccagcagaggaggaggacaggccacatcacccagtccaacctccaaacccaccagggactcaggtcacagctgctccaccccccagggaagcctgtggtctctgcagatcccaactgcaaccccagaacgtgcccacagacctttgagccccctctcgatggggcacagaggaaagggagagcccagcaggagctgttcactgggaaaacaactcctcatttacaggggttagccccattccttatggaccacagaaggatgccccgtcagcctccagtctgcccacctgcacccagtgcctgagtaagagccttccctgccatcccctatcaaacgtctgctgccccttccacatgcagctcacctggccctggggagccgtccccgacctgccccaggtgaattagrtgctctgggctctcccagcactcttagctgttgtccatgaagaccctgagggtgtcatgtatgctctggaacaagacaagcagcttccatctaggctacaggcggcagcctgctctgatt

SEQ ID NO: 656864 - DNA, 529 bp, Homo sapiens
ccagcagaggaggaggacaggccacatcacccagtccaacctccaaacccaccagggactcaggtcacagctgctccaccccccagggaagcctgtggtctctgcagatcccaactgcaaccccagaacgtgcccacagacctttgagccccctctcgatggggcacagaggaaagggagagcccagcaggagctgttcactgggaaaacaactcctcatttacaggggttagccccattccttatggaccacagaaggatgccccgtcagcctccagtctgcccacctgcacccagtgcctgagtaagagccttccctgccatcccctatcaaacgtctgctgccccttccacatgcagctcacctggccctggggagccgtccccgacctgccccaggtgaattaggtgctctgggctctcccagcactcttagctgttgtccatgaagaccctgagggtgtcatgtatgctckggaacaagacaagcagcttccatctaggctacaggcggcagcctgctctgatt

SEQ ID NO: 656865 - DNA, 556 bp, Homo sapiens
aggtccggggaaaggttgggagggaaggagagataaaagactacatattgggtacagtttacactgcttgggtgaaggatgcactaaaatctcagaaatcaccactaaagaacttatccatgtaaccaaaaaccacctgtacccccaaaactattgaaatttttttaaaaagaaaagaaacagtgctaggttgacctttgaccatctgccccagtattaagtttgacagcagcacatcaagcaataccacatccctaaactcaaaagaatatagtctcaaaacataaaaactgaatgattcaacttcaaattatgcaaaccatcttttggagttctttctattttcaaccatttccaactattgaggtaataagtgaccaatgtttactctatattggattaaatattactgttatacrtcttaaatttacttctgaaatctccaagtcatcacatctaccaccctctccccatatcctggttttaacagcatctggctgtaagttccgtgtttatcctatctgtgcccttttgatgttatagacttccaccagcc

SEQ ID NO: 656866 - DNA, 586 bp, Homo sapiens
acttccagtgtcatgttgaaaagcagtggtgagcggggacatccttgccttgtacatgatattagtgggaaagctactagtttctcattattaagtatgatattagttgtgaaatttttgtagatattccttaaaaattaaggatatttccctctcttctttgtttactgggacttttatcatgaatacgtgttgggttttgtcaaatcctatttctgcatttattgatataatcaagttgtttttcatcttaccatattgatattatggattacattaatgaattttcaaatgttgaaccagccttgcatatttgggataaatttcacttggtcgtattgtatattccttttatgtattgttggatttggtttgctaatattttgttgaggacttttgcatctatgttcttaagcaatactggtctatagttttcttttcctgtaatgtatttgtctagttttggtattaggataatgttagcytcatagagtgtattagtattttatctgcttctatctgctgaaagtgatcatagagaattggtgtaatttttctttaaatatttggtagcatttaccagtga

SEQ ID NO: 656867 - DNA, 601 bp, Homo sapiens
agggcacaatgcagccaggttatttgttaaggcataataaaagtgacctttactccagttcacaataagttcctcatttccatctgagacctctgcagcctggccttcactgtccatatcactatgagcattttggtcataatcattcaaccagtmtctagaaagttccaaactttccctcatctttatgtcttcctctgaaaccctccacactctgcctattacccagttccaaagttgcttctacgtgttcagttatcttcatagcagtgcccactcctaggtaccaattttctgtattagtccattattgcattgctataaagaaacacctgagactggataatttatagaaaaggtttaattggctcatgattattcaggctgtacaggaagcatagtggcttctgtttctggggaagcctcagaaagcttccaatcatggtggaaggcaaagggggagtgaggcatcttatgtagtgggagcagaagcaagagagagtgatgggggaagggctgcacacctttaaacaaccagatctttcaagaacttactagcacaagaacagcaccaaggagatggtgctaaaccattcatgtg

SEQ ID NO: 656868 - DNA, 606 bp, Homo sapiens
tccatggccttttataaactttctagttagttttacacacacacacacacacacacacacttcaaggtattaggaaggaagtagataaaactgcttctgaattgcagtgatattttttaggattgtatattttcttttcatttattttttaattgtttatatttatggtatttatggtatacgccatgatgttttgttatatgtatatatcatgaaatggctatatcaagctatttaatgtttgcattgtttcacacataatttttttgtgtgtgataagaacacaaaatctcttttcacagtcttcatatacattatacattggtattaattgtagtcaccaagataaacaacacatctcttgaacttatttttcctttctaaaaaatttgtgtcctttgaccaacatctttccaatctccttccttaagccagcctttgggaaccaccattttmctctctctttgtatactaacttttttacacttcacgtataaatgagatcatcttcctgtggctggtttattttgcttactatagtgtcctctaggttcttccatgttgttgcaaataatgggatattctttttttcttttttaagggtaa

SEQ ID NO: 656869 - DNA, 563 bp, Homo sapiens
ttgcgatattatagagagtgacaatgagccagatgctaaaattgtcaagaaatgaggggaaatgtcctagagtgagtagtagagtagtgggtgatataatttaaagactctagagccagagctagattattagcttaatttcttaccattcttccccatccaaactataaccatgaattaaaacagacatctttttttttttttttttttcctgagatggagtcatgctctgtcgcccaggctggcgtgcagtgccgggatctcggctcactgcaagctccacctcccgggttcacaccattctcctgcctcagcctcccaagtagctgggaccacaggtgtgtgctaccatgccaggctttttttttttttttttttttttgkatttttagtagagacggggtttcaccgtgttaaacaggatggtctctatctcttgacctcgggatctgcccgccttggcctcccaaagtactgggattacaggcgtgagccaccatgcccagccaaaaacagacatcttttgagaatttactgtgaggtaggctcccctgtgccaccag

SEQ ID NO: 656870 - DNA, 563 bp, Homo sapiens
ttgcgatattatagagagtgacaatgagccagatgctaaaattgtcaagaaatgaggggaaatgtcctagagtgagtagtagagtagtgggtgatataatttaaagactctagagccagagctagattattagcttaatttcttaccattcttccccatccaaactataaccatgaattaaaacagacatctttttttttttttttttttcctgagatggagtcatgctctgtcgcccaggctggcgtgcagtgccgggatctcggctcactgcaagctccacctcccgggttcacaccattctcctgcctcagcctcccaagtagctgggaccacaggtgtgtgctaccatgccaggctttttttttttttttttttttttggatttttagtagagacggggtttcaccgtgttaaacaggatggtctckatctcttgacctcgggatctgcccgccttggcctcccaaagtactgggattacaggcgtgagccaccatgcccagccaaaaacagacatcttttgagaatttactgtgaggtaggctcccctgtgccaccag

SEQ ID NO: 656871 - DNA, 605 bp, Homo sapiens
aaaaaaaaaaacaagcacattacttgaagttcagtctcagaaaaatgtttctcaaattttatttcctatttctcaattttcctttaggcaattaaaaagcaaaacatcacttcagaagatacacatttaatctacgttgtagggagcatgtaatttgaatctaaaccccttaaattatctgtccattagcaaaaaacagactttgcactccaaaaactattttgtttaattgaaagtgctcaaaggcaacccttcataagtattcaaattcagtgacttgaattaatttayctctatttaactattctgtcctgggatgcaattgaaagtaacaaagctaataagtaaaggtaatagactactctccacatggattaatatagattaataaattaatccatcttgattaataaagaaagtctatcttagaaatttaagcaaaatgccttattacttttgttcttggcagcaaggatattttaaattatatcctatataatatcctattatgttggtgtttccccctcaattttctaatttgagaaattctaaatttataggaaagttgtaagagtaaggacaattaatgtctatataccaattat

SEQ ID NO: 656872 - DNA, 566 bp, Homo sapiens
atcttctttgatcttgtgccatcttccagataaaatcacagatttaaacacatttgttaagtataatcatcatacagaatttgtcaaagtagaagaagaaaacattttatttcacagttaacttgacgtatagtaacttttaaatattttggcctatgtaactgcggtttttgccttttaaaagtaattgtattatatgcagaacacacatatatgtatgtgtgttgatgcatrtgtgtgtatatatataattatgtatttgtgtgtgtgtgtgtgtgtgtgtgtgtgtctaatgaaatctattgtaaggaatttgttcatgtgattatggaggctgagaagtctcatagtctgctatcacatatggaaacccagaaagtcagtgatgtaattcagttcaagtctgaaggcctaagaaccagaaaccatggatggtgtaagtctcagctcaagcagtcatgcaaacagtgaattcaaccttcatctgctccttttggtaactggtatctatcatattggtgctatcataatactcagacacaactggattttaaaatcctattaca

SEQ ID NO: 656873 - DNA, 299 bp, Homo sapiens
ctatttatctccgcgatagacagtttgctcttcattcacttgtctaatctatctsccagcaaactaatcttctcactgaaaaatgttgagctgttacaatttcaaaactctgaatgtctcacatatttgctgaaattttccagtatcccaggggcctggagaagtctctaagcctttgttttgtatcctaggccttgatactattaataataggaagagctgcattgtattcatagagctgatacaatgcaccaggctttatgttgggtgtgttgccttcactatatgctatttttata

SEQ ID NO: 656874 - DNA, 299 bp, Homo sapiens
ctatttatctccgcgatagacagtttgctcttcattcacttgtctaatctatctcccagcaaactaatcttctcactgaaaaatgttgagctgttacaatttcaaaactctgaatgtctcacatatttgctgaaattttccagtatcccaggggcctggagaagtctctaagcctttgttttgtatcctaggccttgatactattaataataggaagagctgcattgtattcatagagctgatacaatgcacsaggctttatgttgggtgtgttgccttcactatatgctatttttata

SEQ ID NO: 656875 - DNA, 540 bp, Homo sapiens
agtcttcctcacttggtataatactggctgtgggtttgtcatatatggcttttattctgttgagatgtgtttctactctacccagtttcttcaggattttttttttaatcatgaagcaatgttgaattttatcaaatgctttttcagcatcaatttaaatgaccatatggtttttatccttcattctgttgatatgatgtatcacactgatttgagtatgttgaaccatcctagcattcctggcataaacaccacttgatcrtgatgaatgatttttttaaagtgtgttgttgaatattttgttgaggattttttcatcaatgtttatcaggaatattggcttgtagtttccttttttcagtgtgtctttggtttgtaataatggcctcataggatgagtttggaagtatttcctcctcctctattttttagaatactttgagtagaattggtattatttattccttaaatgtttggtaaaattcagcagtgaaaccattgggtcttggactttactttgatgggagactttttattatt

SEQ ID NO: 656876 - DNA, 554 bp, Homo sapiens
aggatgggacctcaggccacccaaacccacagctgctagacaccacactttctagagatcattcttgactccatgcataattgactcaccactgagccccaccctggaaccagggacctgacctagaacatctgaagcgctccctaattccaggaattggttggtgctccaccttggactagaagagcttgacttgcttgatgtgggaaaacccaaaygacctggggaaacagcttcaccaggtgatatgctctaagtcttcaggagcttttttttttggaaggtctctggtatttgcccattaattactaaaagtttcttagctgcagagtagtgtggcaatggtaagaaattaaatgtgttggctttttaaaatgggttctaatatctgcctgtaagaaatcttaattctagggcattagtcacaccatatcagtggtttaaagttgaagaactgtcagatgagaaaagaggaaaaagatatacatagccttaaaatatcattccacataatatttattattacaaagggaaaaataactttacagtggtga

SEQ ID NO: 656877 - DNA, 492 bp, Homo sapiens
tttgttaagtttcttggctcatatccctccttgactttcatttactccacgttcttttctctgtgttaatggttaacagagcatgtactgtaaattagcatttataaaaatcaattacactgcttcataagacagagcagaaacttagattgtcttcaccagatcatttgtatttatctgttaattataaaccttaattgtctctttttatcatattaatttgcacaaattgtacaacttcagagtttagcagtttttaagcccttgaaatacaattattctcttaacattcttttcagaaacatagtattcattaatgattaggttggtaaaaattagcagttctgatmattggccttggcttctccttggatttttttttttttctttccccactaaagtcctggttctcacaattacacatgtctgttggcctcttccggtgcctgagctctgttttaattggacttcatcgcccctgagacttcacag

SEQ ID NO: 656878 - DNA, 526 bp, Homo sapiens
gccagatctgtgaacgttctcccgatggcctggtttcccccagtgctggcttgtaccagctcatgccacagaaatatggtcacgttaccgcccaacgatctctccccatcccatagtttccawccactggggcatttcagcctcttatgccagtgtctggccacatggatggaatcttctgacaaaataggaagctattcctggggattgacaaatgttggctgaacatagccatttattcagctccatggctctaaaccatcacttctgtgaactggaagacaggactgctaccatttcctggactgggttgacaagcaaaggccaaaggggtgagaatgcacctccatggacagcagcttggggtatggatgggagattgacgtggagctccgcatagcaaagagccctttgtgtggcaatctctctgcaggaaaagcactgggtattctcggctgtctcaggctaactgtgatagtctttgcctgctatttttgcttctcaagacccagtgtgaatcaacaaa

SEQ ID NO: 656879 - DNA, 516 bp, Homo sapiens
tgagacttatataaggaatcggcatctctcaggaagaatgggaaggccttcacaaaggaaatgcaaacaggaactgagagtcagtgctccctgacctgtggcactttagttatagcacaaaattttgaatgtggcttctcagttaagacttacctctttattgcacccctcacacaggaaggaggcctcaacagccatgtgcaggctctatcaccctgttcttacttcagggccacagttattagatcaggaagagatacctgatatatctggggcaattagaatttagaagtaagactaaaagttagatcctggttcagtctggcctactgtatyaagagaaatataaacctggaaaataatggggtgacccatcttgtacctacaaggtgaaccaactagtagagaaaaccaatctgcaagcaggagagaataaagccagaatgtggtgagaactggccaggtcctgacagcttttcagtttcttgttgcaatctcttccggattcaggcagtt

SEQ ID NO: 656880 - DNA, 463 bp, Homo sapiens
aataaatcttgttaatagaataaatggaggagatacaggcaggggctgccaagcacagcagagcaggctgtatgctgtacaactccagaagacacgttcrtagaagtgaatggagctttctggaactgtgcagtgtggtggtcctgagtatgagtgatgtctattttagcatagttcataataggaaaaaatggaaaattcaaatgcacttatctataaatgtggtatgttcatacagtggagtactattagagctattaaaagggatcagctgcatctatgtgtatcaaaatctcaaaagtatattgaatgaaaaacagcaagttgcaaaatgatacatgcagcatgatgccatttatagaaagaaaatgtacatacacacaaaaaatcccatatatatatatatatatatatatatatatatatatgctggaaaaatacacaccaaacttaaagctgtctt

SEQ ID NO: 656881 - DNA, 483 bp, Homo sapiens
aacacatagggcaatcaccataggaaaatttttaacatattgccctgccataataatacggtcctgaatttcccttaccactttatcaaccactaactatcctgcacaagtcccgtgttttagtcaaattggtccagaacagtgggtctcaagctcagctgtgcatcagaatcacctggcaggcttgttaaataaagattgctgagcctcatcccagagtttcttattcactaaggctggagtagggcccaagaatttacatttcttgctagttcccaggtgatgttgatgctgctggtccagggactatagtttgagaatcactgatctagaattctcttctttatctgcgtatttattttcctttctatctccatgcttctgcatatttasagtcctatctggaatgcaatcagaatgtattggttaatactatgtaccagacataccagtaggttcttaggctgtagcagtgagcaaaag

SEQ ID NO: 656882 - DNA, 548 bp, Homo sapiens
tttttctacatgttttcaagcacacaaatcaacaccagaaaccactcatccaataaaggctattggaatggattcaagaccttcctgcaaggtgagataaccatgccttacactcacagtttcctgaaggctttaaaatacatgacttcggttgatcgttattataatggtatgagacacatgtggcctgtagaattattactactatcatatcaccattcttattttacagatgagaaagctaaggtgtagagaaagcaaatgacttacccaaggccatgtgctgaagctggaatttggttctcatasaccctctcctctgtgagcaaaatgctgtctgatttgttctgtgcttttgagggcagatttaaaatggttgatacaccctgcagaaagtgggcaatgaatagctttgttatactttgtttataacaattacatgaaggaaactgtttcaacaacttctactccaattttggactctagctaagtttgtattatatatttagtcccacttctatttgcaagcagacttaaattggcataag

SEQ ID NO: 656883 - DNA, 562 bp, Homo sapiens
caacctcattctccttaatcccacacccatctcctgccagtccacagtcctggggcctgttacccaagaggacagagcttccgtgctttggcaggggaatgtgatctcagtccctttttggaggctacccctggggtggatggtggggtgatgtgaaaaggcatggagggcaactcaggaacaaccgctgctgttgtcctcccagcccaagctggcccatgcgtagcctggggccatggcccagaatcagccttgctgcctggtttctcagggtcacttctattcaggaagaatttcccccagstccttccaggtggtcgtgccagtgccggtcacttcaggggaacagagatgcaagacacggaaaagggctataaaagatgatggggtaagtgtccacagcatctctctccccctgctatttgaggagaatgctaaatgtccacaatttaactcttcctacccctcctaaagaggaagtattcttactttctagaaaagacgcgaagtggcccaaacaataaaagaaataacagaggagggaagggaaaagaaagcaggg

SEQ ID NO: 656884 - DNA, 453 bp, Homo sapiens
gcgtagtgcagcactgagttgatggtgcattgagccatttrcctcctgctcagcaccttggacagcaccagcctgttcaaatgcacggcagtcaggtgtaaatgctgggaaatagatggctgtggaagggattatatggtccagtgtgggtactggcatagaaggaataaattatattggacacgtgtattgagagggtcaattaagaaaggagtataagctaactgatacctttagaagtactcctttttttggcatagggtaaaaattattgttacggttctttagacccatgtactctggaaaaataatttttcatagtaaacagagaacagaatttaggaaagttgattctatttttggttcaactcaagagacatgagctcttaaaatacccaaaatcttttagcatatgagttattttaattcatgtgctatcccattcttgaaggt

SEQ ID NO: 656885 - DNA, 540 bp, Homo sapiens
aagcacaaaactaattagtgcaaaactggggtcctgtattcctcacttctcytcattcccacagccttataccaactcttatgttctacatccttcccttccttttcattcccttcacctcctcttcctcttcttcattctcattccttccttctttttcttcttctttaatgtggtagctagattttaatcacatggacaaaagttgttttcaagaatgagaaaaaatatgctaattcaaatgcaactcataagtagaccttctcccttgtcactgagaaaggcttttacttgtacattctgtgtcatcaaaaccttacaatatgtcatagggcttcactcactaattaaggattctgtaaaacataggttgtcatgtgaggatagagcctggaatgtgccatatcttgagataagaactttaggaaaaatgtcttcagtgtataatacaaaataaccacggaaaccacattcttcaatgaatggtcatcttaaccttttattcaccagcagtttttaaccttcttagcctgaagtcat

SEQ ID NO: 656886 - DNA, 540 bp, Homo sapiens
aagcacaaaactaattagtgcaaaactggggtcctgtattcctcacttctcctcattcccacagccttataccaactcttatgttctacatccttcccttccytttcattcccttcacctcctcttcctcttcttcattctcattccttccttctttttcttcttctttaatgtggtagctagattttaatcacatggacaaaagttgttttcaagaatgagaaaaaatatgctaattcaaatgcaactcataagtagaccttctcccttgtcactgagaaaggcttttacttgtacattctgtgtcatcaaaaccttacaatatgtcatagggcttcactcactaattaaggattctgtaaaacataggttgtcatgtgaggatagagcctggaatgtgccatatcttgagataagaactttaggaaaaatgtcttcagtgtataatacaaaataaccacggaaaccacattcttcaatgaatggtcatcttaaccttttattcaccagcagtttttaaccttcttagcctgaagtcat

SEQ ID NO: 656887 - DNA, 590 bp, Homo sapiens
ctagacaaaaatatgaaattctattttacttacctggtaggtatttatatataacctaaactgcaaaaaaggactttatctatgtatatgctaccaacctgagcatctgaaaattgggatcagtaattattcttattttcaatgctgtttgcatgtttgtttttatatgctaattctagcttgactgtcatcttagtccactcattgttgctgtaacagaatacctgagactggtgagactgggtcatttataatgaacagaaatttattagctcacagtttaggaggctgggaagcccaagattgagaggccagcagcttgcaagtgccttcttgcagtgtcagctaatggtagaaggcagaagggcaagagagggtgtgagagagagagagaraaaaaagggggctaaactcattcatttgtaaggaactcattcccacaatatagacccactcctgtgtaacaacattcattcattcatggggacagaaccctcatggtctaatctcctctcagtaagccccacctcccaaggctgttgcattggagatacatgtttctaacacatgctttggaggacacactcaaa

SEQ ID NO: 656888 - DNA, 461 bp, Homo sapiens
tgttgcattggagatacatgtttctaacacatgctttggaggacacactcaaaccacagcattcatctcctggctctccaaatttatgttcttctcacattcaaactacattaattccattccagtatccccaaagtcttaacttgtctatatatcatgtggctkggactcaaggtatgattcatcctatggcaaattactctctagccatgagcctttgaaatcaaacaagtcatttacttctgaaatatgagaataggacagacacagaatagatatttccattccaaaaggaagaaatgggcaaaaaaagaggggtatctgctccacatgagtccaaaacccaacagagcaaacaaaattaaatcttaaagctggagaataatctttttttgacccttcttttgccttctgagtacaccagaggtgggggttggaccctcaatgccacaggcagcctg

SEQ ID NO: 656889 - DNA, 538 bp, Homo sapiens
tcaattaaacgtcttttatttataaattacccagtctcacatagtatctctatagcagtgtgaaaacagatgaacataagtatcatttcaaaaatgcccagtgtactaaagtaatagactttctctatgtaagcatcagtgtggggctattcaggaagatcatcaatacctcacttcctattagttgggaaagccacagtgggagtgtaccttggtggtgggagagaaggggttaccttaggaacagaatacagagtctgcagtccctgaktgggactgtgtgagttaagtggagtaggtggatgcgtaaacagaggaaaggaagaaaacttcctttctttactggtttatctatgctgcttacgtaaatcatgcttgggatttaatttttgctctaaactacatacttactgtgacataagaatactgaggaaacttaaccctttcaagggaaaaatagccattaaatctgtttaaatgttactttgaatgatctcaagttggttcatgggctgtatactgtgtttgtagaattggt

SEQ ID NO: 656890 - DNA, 618 bp, Homo sapiens
tggtatttaaaagaaggaagatataaaatgtttggatgtttcatactgagaatcagtgatgattrttatcctctttccatttccaagggtgaaggacattatcttgagagcattagtagacttcagctgtgaagaaacagccttccgaggcttggaaatgatattggggaaggtataggaccaaatcatgcaggagacattgagggaaagaatcagtaaaaaaaaatgttacataattagagttggtgaatgaagcagatttggagcttgacatagatagaatatgacgagaaaatagcagtctttaaaaatcatagacatagatgggaatgcttactctgacacatggcagaggaaggctaagcaaatcctggcactcactctgaaaaacatgtatgcatatgttaaatggtaacaaaaggagccccctctgtttttcacccagctgcagtggtttgtcattttcaataaaaacttaatgcctctccctgagaatgaatgcgtatcctggttttaaagggataatgtactgggcttatttccagtgtctgacagatcagcaaatacacgtaggcacaactgcctatttgctatttactactatggtaaatggcaagc

SEQ ID NO: 656891 - DNA, 529 bp, Homo sapiens
gcctccctggatgaaattggcaggaacccatatggttagagcagaataagttgcattcatttccaagtttttcagcgtctcatatcctacagtgcaaattgtagagtacttggtggtcctcagtgtccatgggactagagaatgggtgggctggaggcatatttagtttaccttcatttaatccaaaggccagcatgacttttgaaattagtacatttcgccattcacacagccctgactgaggataactrcagaagtagctgagggtaaagaggagagtggggacattttactgttggcacaaaaccaattatcagtctgtttttatccccgttttgttccgagatggactttcataaatgatggaagaacagaattgccctcccaaggattttttaaaaatatgtactgtaattaaagaagaagagaaaaagatggccatttgggcaattgtgtaagttaaggctatgaaagctgtaatttgaaaaactacatcggtggtaatgctgttttaagaggggaaagaaaa

SEQ ID NO: 656892 - DNA, 529 bp, Homo sapiens
gcctccctggatgaaattggcaggaacccatatggttagagcagaataagttgcattcatttccaagtttttcagcgtctcatatcctacagtgcaaattgtagagtacttggtggtcctcagtgtccatgggactagagaatgggtgggctggaggcatatttagtttaccttcatttaatccaaaggccagcatgacttttgaaattagtacatttcgccattcacacagccctgactgaggataactgcagaagtagctgagggtaaagaggagagtggggacattttacygttggcacaaaaccaattatcagtctgtttttatccccgttttgttccgagatggactttcataaatgatggaagaacagaattgccctcccaaggattttttaaaaatatgtactgtaattaaagaagaagagaaaaagatggccatttgggcaattgtgtaagttaaggctatgaaagctgtaatttgaaaaactacatcggtggtaatgctgttttaagaggggaaagaaaa

SEQ ID NO: 656893 - DNA, 554 bp, Homo sapiens
ctctttctccaaaagcctgtcccaaaccatttgcttctctccatttctactattgctaccttagccccctctggtcttgataaatgcaaaaatctcctgagtgcattctatktgaatctttctggttgtaactttttttttttctttttagagacagagtctttctttgtcgcccggtggcatgatctcggctcactgcaacctccgcctcccaggttcaagtgattctcctgcctcagcctcttgagtagctgggaccacaggcacacaccaccaggcctggctaatttttgtatagttagtacagacagggtttcaccatattggtcaggctggtttctaactcctgacctcaggtgatccatctgccttggtctcctagatttctgggatcacaggcgtgagccgctgcacccggctcctgcttgtaacttaaaactttccataattcattgtctatgcaccaacacaagtcatctataaatatgatcacattattcgcttgatgaaaaataacacatagcttctcattgaatttagcacaaaacacacaa

SEQ ID NO: 656894 - DNA, 554 bp, Homo sapiens
ctctttctccaaaagcctgtcccaaaccatttgcttctctccatttctactattgctaccttagccccctctggtcttgataaatgcaaaaatctcctgagtgcattctatttgaatctttctggttgtaactttttttttttctttttagagacagagtctttctttgtcgcccrgtggcatgatctcggctcactgcaacctccgcctcccaggttcaagtgattctcctgcctcagcctcttgagtagctgggaccacaggcacacaccaccaggcctggctaatttttgtatagttagtacagacagggtttcaccatattggtcaggctggtttctaactcctgacctcaggtgatccatctgccttggtctcctagatttctgggatcacaggcgtgagccgctgcacccggctcctgcttgtaacttaaaactttccataattcattgtctatgcaccaacacaagtcatctataaatatgatcacattattcgcttgatgaaaaataacacatagcttctcattgaatttagcacaaaacacacaa

SEQ ID NO: 656895 - DNA, 622 bp, Homo sapiens
acaccaccaggcctggctaatttttgtatagttagtacagacagggtttcaccatattggtcaggctggtttctaactcctgacctcaggtgatccatctgccttggtctcctagatttctgggatcacaggcgtgagccgctgcacccggcycctgcttgtaacttaaaactttccataattcattgtctatgcaccaacacaagtcatctataaatatgatcacattattcgcttgatgaaaaataacacatagcttctcattgaatttagcacaaaacacacaaacgaattcttttttctaccttgtaaaaccctgcaagatctggttctacctatttctttgaactcaatagcaactaactttctcctcaccctctaagcactcatttaatgatatcctttatgttcctaaaacaagtcaacccttttccccactgtagggcctttctgtgagctattcccatcctgggctttctcagtctttgtatggatgacttctaatggtcatttagcttaaatatcactcttcattcaagtcttccatgaccccacattctgaagtagtcatgtagtcctttcactcctgggctctttttctttccccatgacctcacagggg

SEQ ID NO: 656896 - DNA, 622 bp, Homo sapiens
acaccaccaggcctggctaatttttgtatagttagtacagacagggtttcaccatattggtcaggctggtttctaactcctgacctcaggtgatccatctgccttggtctcctagatttctgggatcacaggcgtgagccgctgcacccggctcctgcttgtaacttaaaactttccataattcattgtctatgcaccaacacaagtsatctataaatatgatcacattattcgcttgatgaaaaataacacatagcttctcattgaatttagcacaaaacacacaaacgaattcttttttctaccttgtaaaaccctgcaagatctggttctacctatttctttgaactcaatagcaactaactttctcctcaccctctaagcactcatttaatgatatcctttatgttcctaaaacaagtcaacccttttccccactgtagggcctttctgtgagctattcccatcctgggctttctcagtctttgtatggatgacttctaatggtcatttagcttaaatatcactcttcattcaagtcttccatgaccccacattctgaagtagtcatgtagtcctttcactcctgggctctttttctttccccatgacctcacagggg

SEQ ID NO: 656897 - DNA, 614 bp, Homo sapiens
gcagggtgcggggagagagagagagagagagagacagagagagaaatgcattatttatactcccagtgtttgaaagcttataagattgggagatagtttcatggccatctctgcctgttagacccccagattatttccaaatggaatgatgaggtttgctcatgtgaagaccacctcaccattgcctccacctccattgtctctgttcatactgaaaagaacatcactcagtatttctctctgatttatttctccctaaagactttatgacatagaataagtcctaaatagtccagcttctctcttgttaagataattaatgcataattaaaatgcattccatgagccaatagaaggtaaggcttgggacttactccagtcagaagactcaataggataaaaaaaggttgatttgtttcttggtcctacacaattgtgttctcaaatctttcttcataakttgcaaagattttataaagctctccaatttcacttttgtgtaaaagtaatcttaattttaaaaaagatgtaaaaaatttataactgtgataaaagtctccatatatttcttactaatactatgtgtatatattgagatgttaatttattgatgt

SEQ ID NO: 656898 - DNA, 635 bp, Homo sapiens
tcaaatatttataccaatttgtcagcagcaagtatcagtggcaggtggaaataaagtattatttaggctgagatatccaatttttacttgcttggctactttcttgaaagatgatgctttagaaaatgaaatacaacatttatcattgttttgttgactacaagagatggagtttgctctctttgctgtgacccagttagttcacatagcagggcctttacaacccccatctccaaatccctccaccrcagcacaggagaaatgtttgcaaaccattatttgaaaggcagagcagtgctgttttttaatgcagcattgtgtaatctaccttctgcaagttacagtttgtttcaaagtagtggataataaccattaacgtttttggatttgcatgtggactgcagcatcacatgttactaaatattcagggatgagacgaggagagagagtgtgtgaatggcaggtagaaaacggtaagatggttaatcgagtttcaaagaaatgatagggaagatgtccatctatatttagcccccaccataacattattatttatggaatattttgaaaatgactttcttcattcattgaacaaatatttttttgaacacttcctactggaccccttcacactc

SEQ ID NO: 656899 - DNA, 635 bp, Homo sapiens
tcaaatatttataccaatttgtcagcagcaagtatcagtggcaggtggaaataaagtattatttaggctgagatatccaatttttacttgcttggctactttcttgaaagatgatgctttagaaaatgaaatacaacatttatcattgttttgttgactacaagagatggagtttgctctctttgctgtgacccagttagttcacatagcagggcctttacaacccccatctccaaatccctccaccacagcacaggagaaatgtttgcaaaccattatttgaaaggcagagcagtgctgttttttaatgcagcattgtgtaatctaccttctgcaagttacagtttgtttcaaagtagtggataataaccattaaygtttttggatttgcatgtggactgcagcatcacatgttactaaatattcagggatgagacgaggagagagagtgtgtgaatggcaggtagaaaacggtaagatggttaatcgagtttcaaagaaatgatagggaagatgtccatctatatttagcccccaccataacattattatttatggaatattttgaaaatgactttcttcattcattgaacaaatatttttttgaacacttcctactggaccccttcacactc

SEQ ID NO: 656900 - DNA, 602 bp, Homo sapiens
tttttcgttttttttttttytggtttattttctgattgcagattttgaagcagctaaaataaaccaaaattatagcacagaacatatccaatatttggttaattaatatgtgtaagatgcttacaaagactttatatgtatattatttcatttactcttgtaaaaatcttatgaattagttactgtaccattcacattatacagatgaagacattgagttttagaagcttgtgtacattttttcaaggttatggacgtgatataaaggtggattcaagcttcagactgagaccggtattgtttcaaaatccatatacatatcctaagactctatgctgtcacccttcagcctaatttgagaaagctgtaatctcagatgcattgtctcttttatcatgtttcattcacatgagttcactcgctcaacactcatttatcaagaggatgctatttgcttgttaccagggagagactaatagaagacacaacttctctctccccaaatttatttgtaaaagctaaaatttggtgtgaaatatcaattctgatcatcattaacatcgatttattcaactttgtattatttcatttactgatttaaa

SEQ ID NO: 656901 - DNA, 553 bp, Homo sapiens
caacagttggaaagagccctgggttacaatcttgactcgactggtaatttacttgttgactttggaccattcttttcaccatactttaagagatggggttagactatgtaattttgcagttttaacactttgattttgatgttaagattagcygtctaaaggtgggactaaccttgattactagcaaaggaacatagttaatggtaaagtttactcataaatctcatagtacttttcaagtcaaatttcagccacttggtagagaaatgtttaaaatcaatctgttgtatgtcattgagctggaaggaggccagtctgaatttgtaaaagatccaagatatgcagattttaaaagaaagagaatgttactactactgtctttctcaaataaactaggtataaaaatgtagcaagagtattttaccaaatagattgctacaggcctgtttttcacttcaatatacacagctaataggtaatgcatatcttcatatttgtgcaaatgagtaaaactcaaatatttgcaattttacacatttttgcacattttcta

SEQ ID NO: 656902 - DNA, 590 bp, Homo sapiens
ttgggattaatcttctacagagataagaaaaatgatttttaaccactacaaacataaggaataaaatacacatgccaaaacatttaacatttttactggtgtactcaaaaggagctactttataagtactgaaattattagtttttttgccatatgctgatgtaactttatttagaaaaagtagctctttggatagacacattcaagaagcaaaattagtgctgttggctgaagttcaaagccacactttttagagggcaccaccactggcatcaccaacaacagcttcatcatgagcagaagcatcattttctcagcctttgaagataaaagactagttagcataaggaaggacagtaggctaggaagtgagtctattgtcctaagacatattttattagttagctgtcagactcaacttatatccacatagctggggctttatggcccaaggaccaaggaactccaaggcttgtaaaacacgttccaattaccacaacggtgcacaactgagttgttttacttccttatgccattttrcgacgttgaataactttccatatgtctcacaccaccccccaaccccggca

SEQ ID NO: 656903 - DNA, 381 bp, Homo sapiens
accccggcagtttgaggatcaactaaatgaatagcaaacaactaaacaaagtatgagagttggtgaactgagcatttcaaattcctctatgcttgcaagtagagtctatattgagtcttttcatcacctgtgacctaagaaccaattcctgacaatgcgagatgcctgcgagggcacgagaagaagttctacatctttctccattggtgtttatggttccatttgctcaggtaagggctatttccagaagagttcatgctggaaaaatacaaatggccaaaataagtgattttctcactgatctcacaggtttccrgggatcccctggttcctctgtagtgcagtaggagcgagtctggggacattttggtgtttcctggt

SEQ ID NO: 656904 - DNA, 499 bp, Homo sapiens
ctttgaattctctcatcgccatttgagaaagttcagaagcatatgttgctcttccatcacacaccagtagatggcagcaaaagtccatccttrgctcctaaaagtttgcctctgagttcctgcacaatgcaaagataaaggcagcttttaaaaatataataatctacctccttacctgacacgtcggaagggctgattttccaggtcacacatgtcttattactttcgaaaataatcatgtggaaaggcttttcattgtgtttgctgttacatttctgcacagtggtgactgcgaagccaaaatcaaactaatagcaggggaaaaaaaaaagtgacaacccaagagaagtgcatataatttccgttaagaatgttcctcatgggttttcaaagaagctttcatcaccaaatctgatcagtgaagcagtcttgttcataaataatttatcagtctctcttctctatctcatccttcctaccagtgaaacaagcaaaatgc

SEQ ID NO: 656905 - DNA, 497 bp, Homo sapiens
cttactccttttgctagagggcctttctgttcrgagtttttctttttcaagaaccacagacatttattttattgccactctattctgcagcacagtttttccttgggctaagaatggaattactaacattgcttgttccatactctgaaaatcgctgtcaggtgtgaattaaatgctttatttgaagatttaagctccttctcatcagtcacaaagggaatttttatgaaataatactcattggcactaatataattcttttcattttagactctctgagtgctttgtaacagttttctccctgccatctacatttcaatgactcctaacaccctccatctaagatcgctgacagaaactctaacctaactccttcaactctttcagagctgctttagttgactgcaagttgaaaacatttgaataattgtttatgggtccctagaggaaggaataagacaactttgataatcttctgacatattgtgaattcagaa

SEQ ID NO: 656906 - DNA, 434 bp, Homo sapiens
ccacagacctttggactggcagaaggagctgcccagagaccatgcagaggcactgcttgaacttgcatgaaaccccaaaggcttcagtgttctggggagctacagcaaaatgcaatccttggtgcctaccccccaaggctcagcatcctttcctatgcagctgcagctgctgctgtctgcagggctgaggagtgagcagggcacaggcatgatcacaaaccccgaagagaggctccatcactactgctgagggacagaggtgcatttgagtcagataccccatgccgcctgttcttcccaggactgcctgcctggccattcccacagggggccaaccctgtakctgccattgccccacctgagtgttttgttggtgctctgggagcagttcacccctccctgttacagccagtgcttgggtttaagagccagaa

SEQ ID NO: 656907 - DNA, 596 bp, Homo sapiens
attgccactagttttgggtattaagaagtatttttggttttgcacaatattttacatgaatcttttttttttggaatgaattcctaatgctagatcaaaagtactcatttataaaatgtttattctattaccagaacaaacccaccacattacactcatactagttatataattttgcctacttcactacaaattctccccaaatgaatattataatgaaaataaatcaagatcaatatgagagttttgaaaatgacttagsaacacaaaagatatgaatgccttcagaaacatttagatggcttaaagtattgttttgtagctttttaatttatctgtggctaatattttacccaagattagtgtgtgtgtatatacacacacatatatgcgtatatatgtatatgtacatgtatataatttgtttttcttttctctttttctttgatgctcaattccttggtgtaatttaaataatcttgccctatttacaaaagctttcagattttggtagcccctttgcaatgcttcagtgacagatcccaattgtgtttgagtacaataagaatgtttgtcgtattcttaagactgacatc

SEQ ID NO: 656908 - DNA, 605 bp, Homo sapiens
tgatcatccggtcaaatcctttttgaaacatgctaattacagatctcctggcaaacatatgtggtatttactagatgaagaatccttatttatggaatgcttttagaatgttgtacctgatctgcttaggataaactatgataatcaaacctagactctattaattcatgaagagtagctttgtgaaaaatgtgtaaaatatataacaatgaggatacaaaacggaaatgcgtcaggaccaaacaaactcccttttctgtaagttatgtttctacaagcatctcttggagactatttgttatatgggaactacagtgggtccttatgtgcatgcatggaagaaagaagatttttttctttccacctgtaccttgtgattacttatatcctgtattagtccattttcacactcctataaagtgtgatttacccartcattctagttcaggatcaagggtgatcaggccgcccttgagcctgaagtagaatgattgggtaaataattatctgacttgattttctattaatctttcttaaatgtatgcatagctctcatttatttcaatgtttaatattagaagtgttttagtctttatgtagaggtt

SEQ ID NO: 656909 - DNA, 671 bp, Homo sapiens
gggagggaacttggtgtgcctgaagaactgcaggaaggtcagagtggcaggagctgagggagctaggatgagagtggccagagatgaggcaggctagggaggggggcccagatcatgttaggaccttgcaggacttagaattttattcttcacggggtggaaaacaatagggggatgttgagaggaagagtgactccaaatgacaacatttcaaagccctcagtcccaccaaaacgccctctcacttagtccatcagtcagttggtttcacctaatttttcccctcagtggaattggaggaactgcttcacatcctttcaggtccttgaaggaagaaagtgagtggatattccccctggtccactcctagaatgagtgatctgtaagcagacacaagtttccttcaagtaaaattactstcttctttcagcttgactcttgtgcatccagagtgggtatgagtcctgccccagatcaatgagagaatgaggtgatagatgggcatgtagggattaaacagacaaccatccatacctgtatccctgatttaactcttggcataagctgcaatatgtgaccgtgtgtcttttcctaggcatgtctggtgtcttaaaatacctcataaggtcaacagtcatgtctctgtgcatgtgacgttcctcacagtacct

SEQ ID NO: 656910 - DNA, 622 bp, Homo sapiens
ctgttgcccagagtgtatgcagaagggatcttaaagtcatctaggccatgttccttattagaatcaaaatcagaggggttaaatggcttgtccatcattgcrcagctcttcataaattaaggtagagaattctggagtgatgaatgtttgtgaagagttttcatggtggtaaatacaataaagtgatatgtgtggcatgcaaagaagcaagatattgagtaattctccaaccttctcattaaaaaaaatacacattagacttgttgtaagtcccaggcctgttgtttataagacttatggtacccttatgcaaatcacttcatctcttaggaactcaattttcttaattataaaataaacaatcttagatcaaatgacacctcaattctcttctaaagttaatattcaagcattttctctgggtcacatcaaaggcctgctccacaggctgttgtattagcacagcattatggtgagtccatgaagcatcaagattttcatctttgtgcattttcattgtctacaagcaaaagatgacagattgaaggcctgaattttattttcaaagtcacataaccaggccagagcttaaatgtaatgttgaaaaataaagtagtaatgt

SEQ ID NO: 656911 - DNA, 596 bp, Homo sapiens
ttggaagtcaaatattcactttaacatctttagctatttgtgcttggaaaggcaaaagagtagactattaaaggaaaacacgcccaatttagcgagatgcaaccagcagggaatataatctcacctggatttagcactctgtrtttgagaccctcattgaacactaactagttagctgcatgaattgctgggaatttgcccagaccctgtggtctcccttctgtcatctgttgacagagagattggagggctttttcaaggtgtttggagaagccaaagctttccagatgtttcctcagagcctaactcaagaagcttccactagagttgtcctgcctttatgtgtttcacacaccgtttcaggagaaaacaaacaaacaaataaaccgaatgtaaaatggtgcagttgctttggaaaacagtttggcattccagaaaaagttaaacatagcaatagaatttcttaccatatgacctattaattttacttgtaggtgtataccccccaaaactgaaaacagggacttagatacttgtgtgtttattgctgcattattcccaattgccaaaaggtagaaacaactcaagtgtccatc

SEQ ID NO: 656912 - DNA, 596 bp, Homo sapiens
ttggaagtcaaatattcactttaacatctttagctatttgtgcttggaaaggcaaaagagtagactattaaaggaaaacacgcccaatttagcgagatgcaaccagcagggaatataatctcacctggatttagcactctgtatttgagaccctcattgaacactaactagttagctgcatgaattgctgggaatttgcccagaccctgtggtctcccttctgtcatctgttgacagagagattggagggctttttcaaggtgtttggagaagccaaagctttccagatgtttcctcagagcctaactcaagaagcttccactagagttgtcctgcctttatgtgtttcacacaccgtttcaggagaaaacaaacaaacaaataaaccgaatgtaaaatggtgcagttgctttggaaaacagtttggcattccagaaaaagttaaacatagcaatagaatttcttaccatatgacctattaattttacttgtaggtgtataccccccaaaactgaaaacagggacttagatacttgtrtgtttattgctgcattattcccaattgccaaaaggtagaaacaactcaagtgtccatc

SEQ ID NO: 656913 - DNA, 600 bp, Homo sapiens
gcattgtagagatttaaaatttcctcctgtgtttggaaatgtttacattctgaataagtcacactaaagtggacactagaatttgtttacacaactttctgtattgctaagttacatgacaggagacctttttccccaagaggaggacaatgaagacaaagcrtatgcaagatcaatctttgggttcaggtagtggtggacaggttgaattcttcaggagaagaagtcacaggatgtttggcttccaatgtggagtgtcttcatttgagctaaagtgttgcagccaagcagcagaagccatagtgcttttgctagaacaactctaatgggatatgaccgggtctaattcttagctacataacttccggttttattgctacaatctttaatttctgttcaacaaatcttgctcccctgccagtctttattttccagtgtagtcagtcatcattttaagctttaaatctgattgtattgctcccctatcaaatctcgctggtggcatttctttctggcctaagtcaaaactcctaaggaatttattttctagttctactataataaattatcacaaatgtaatggcttaaaacaaaagaaac

SEQ ID NO: 656914 - DNA, 600 bp, Homo sapiens
gcattgtagagatttaaaatttcctcctgtgtttggaaatgtttacattctgaataagtcacactaaagtggacactagaatttgtttacacaactttctgtattgctaagttacatgacaggagacctttttccccaagaggaggacaatgaagacaaagcatatgcaagatcaatctttgggttcaggtagtggtggacaggttgaattcttcaggagaagaagtcacaggatgtttggcttccaatgtggagtgtcttcatttgagctaaagtgttgcagccaagcagcagaagccatagtgcttttgctagaacaactctaatgggatatgaccgggtctaattcttagctacataacttccggttttattgctacaatctttaatttctgttcaacaaatcttgctcccctgccagtctttattttccagtgtagtcagtcatcattttaagctttaaatctgattgtattgctcccctatcaaatctcgctggtggcatttctttctggcctaagtcaaaactcctaaggmatttattttctagttctactataataaattatcacaaatgtaatggcttaaaacaaaagaaac

SEQ ID NO: 656915 - DNA, 598 bp, Homo sapiens
aaattgattcctcaggggtatattgaagggttccctattagtcagcctgcttttttaacagtcatttttaaggttttcattttcttttaaaaactctatttcatataagccatatttatattaacatttgaataaatgttggtgtacaagaacagagttttcatataccttgtgaaataaaatgttcatacaattatataatcttctgttcatcatgtgaatagggtaaagaatgtaggtataaattccaattctacaactttctaatgaaataacatgggcaggtcctttctataakatttgtttttttatctgtaaacaagagaatgcttctactaagaagaaaaaaagaataaaagattgaacatgcagagaatatatgcacttgggcaagttacgagcctcgttgtgatttggctttctgacctgtgaaacatgggtagtagtatctactttgtagagttgtcatgagggctaaattaattaattatgtgaagcactggtagctgcacctggcatggagtaaggtgtttattatgggccaagcactgtgccagccacttcacatatagcatgtcatctatttgtctcccacaca

SEQ ID NO: 656916 - DNA, 588 bp, Homo sapiens
aataatttgctgctaacaataatcaaagcatgttagctgattttatcattagttcatgcagaagcatattatgaaattaaatgtattgtcttcctaaaggcattcaaagtcaaagaatcacattttttttctgttttactgtttagtctgaatcattcttctttatctctcagcatagataatccattaggcagtcaagagcaaaggaaactttttacttaattttttcatatctccagaatattaggtgcataaaatgcacaggatatacttttgttgattatatggattagtgaatggaataaccaagaaataaaagtagagttcattgtattcattacttcatttgaccctaagtctaatcaaatgtctcttgacttccacttaacagattccctggattaaacactctgctttttcactctgtaaaacattggagtagatagagatattggccccaattcttcacctgttagagaattctggagccactctcttgacatggcccaatgacagattgagtgtrctttccttctctgtgactttggacttggccatatgactttactttggctgatggaatgctag

SEQ ID NO: 656917 - DNA, 535 bp, Homo sapiens
tctcctttgagtcatagtcaagctttctgttctcttttgagtgttcaaatagttgatggctgttaatatttgtttagaaattgctagtaatttttttttggcatctgttgtaaaaccagtttcaattgatgagctttttggacattccacaccaataggagaaaaagagaatattgatatattccatactttttcaaagctggtacacgtagaaycagtttcagtctgtaaagaatttatttatctataagatgaacagagcaaagaaaacttgaaagtaccaaggcacagatgagtcaacaggcaataagtattttcttatgactttgtaccattgctgttcatatcatagtagggcaaggacacattctttcttgaatgtctagtcagaaatgtcaactctgttttcttgccttaacttggaataacttttatcccatcaacaactttagtaatattaactttcatgtctttatctacttggactgaactacaatgatacacataagttgatgtgaagaccttgaatttttat

SEQ ID NO: 656918 - DNA, 535 bp, Homo sapiens
tctcctttgagtcatagtcaagctttctgttctcttttgagtgttcaaatagttgatggctgttaatatttgtttagaaattgctagtaatttttttttggcatctgttgtaaaaccagtttcaattgatgagctttttggacattccacaccaataggagaaaaagagaatattgatatattccatactttttcaaagctggtacacgtagaatcagtttcagtctgtaaagaatttatttatctataagatgaacagagcaaagaaaacttgaaagtaccaaggcacagatgagtcaacaggcaataagtattttcttatgactttgtaccattgctgttcatatcatagtagggcaaggacacattctttcttgaatgtctagtcagaaatgtcaactctgttttcttgccttaacttggaataacttttatcccatcaacaactttagtaatattaactttcatgtctttatctacttggactgaactacartgatacacataagttgatgtgaagaccttgaatttttat

SEQ ID NO: 656919 - DNA, 401 bp, Homo sapiens
tacaggcccatgttttttcttatttatcacactggctctcagtttagacacaattttggtagcaaccatgagttttattacagttagagacttgttgcactaggcactctcaatttcttttccagcagtcaggaagtcatcacaaagctcctgagtttaaatgcagagtggaagatgggaaygaaccactattacttaacttagttcttagatcatgaactcagacattgccaacaatcttccaaattcagtgtacccttgtccccaggttagtggactcttttaggactttacatgaattaagctgagttattaattaaatgccataaggctaactgatggatggttactctttcatgtgacattttggagtctagaaaagatagggattaagataattg

SEQ ID NO: 656920 - DNA, 401 bp, Homo sapiens
tacaggcccatgttttttcttatttatcacactggctctcagtttagacacaattttggtagcaaccatgagttttattacagttagagacttgttgcactaggcactctcaatttcttttccagcagtcaggaagtcatcacaaagctcctgagtttaaatgcagagtggaagatgggaacgaaccactattacttaacttagttcttagatcatgaactcagacattgccaacaatcttccaaattcagtgtacccttgtccccaggttagtggactcttttaggactttacatgaattaagctgagttaytaattaaatgccataaggctaactgatggatggttactctttcatgtgacattttggagtctagaaaagatagggattaagataattg

SEQ ID NO: 656921 - DNA, 611 bp, Homo sapiens
gctattctcactgggctccagtgacatcattttttctccgtgccccaaagccccaggaagtcaagtaacagtatcccactgttgctaatgttctgatgtttgagtgtcttatatttattgttttcctcctttcctccctccttccctccctcccttccttccttccttccttccttccttccttccttccttccttccttccttcctttttttttgggcacggtctcactttgttgcccaggctggagtgcagtggtgtgatcttggctcactgcaacctctgcctcccaagttcaactgagtctcgtgcctcggcctccctgagtagcagcgaccccaagtgcatgccaccatgcctggctcatttgtgtatttttagtagagatggggttttgccatgttggccaggctggtgtcaaactcctgrgctaaagtgatccacctgtcttggcctgctaaagtgctggaattactttggcgtgaaccaccatgcccagccattgtttgttttcttaatcttgtccactacacactcctttgaaccatctgagacaaatcttgttttctgttggaaccctggttgatacctaatgcttgtagagtttcaaaga

SEQ ID NO: 656922 - DNA, 553 bp, Homo sapiens
ttatagacggaagggacttgccttgtctcagatgagacttcgtactgtggacttttgggttaatgctgaaataagactttcggggacggttgggaaggcatgattggttttgaaatgtgaagacatgagatttgggaggggccaggggtgaaattacatggtttggatgaatggaagccgtattagaggctgactactccagtctgccctctggcctgctatgattcatgtcttccccacatgcaaaatttcctcatcctctctcaaggcccargagtttcaactcattagagcatcagctcaaagttcagaatcttgtcatctaaattagctccaagcattgatgaggtttctcaggtgaagttccttaagcacagctcctcaaatacaattcctcttgatctatagacctgaaattataaaaagaacttttatctatcccaccctacacacacacacacacacacacacacacatgcttacacacactcaatatacaatggagacaggcattggaaaatggctgtatacaaccctgtcaaaaaaaaagaaa

SEQ ID NO: 656923 - DNA, 537 bp, Homo sapiens
acatatttttccttctttttgaacaagggactctaaatgtcatgtttgtactgggtcctgaaaattacgtagccagttctgactgcatgtaaagactgtattccttccccttaattccctctgcccctggaaaagtcaaaacacagcaagctgggaaaaaaggagaaatattatagggtgggaacgacaaggcccttcccatcccaatacaacgggacctgatgggaaaaaagagaaaatgtaacatttatgttttgatggttgggaattggacattccartgtttgaattgagactggttttgacctaaagtgatattggtacagtctgttacctaaatgtgagcaaaaaattaatggaaccagccctctacccaggggaaaagggatttattccactaaataaattttaaaggagcaataggggacaaaagtgaagttgcatttttatcatatctcatgagtcatgtttgttcaataccccagttacaaatgaaacataaagttcaaagaagtctgatgtctgatcagacttttg

SEQ ID NO: 656924 - DNA, 520 bp, Homo sapiens
taatggaaccagccctctacccaggggaaaagggatttattccactaaataaattttaaaggagcaataggggacaaaagtgaagttgcatttttatcatatctcatgagtcatgtttgttcaataccccagttacaaatgaaacataaagttcaaagaagtctgatgtctgatcagacttttgtatctgaaaacaaaaaacaaaaaaggaaaaagaaagcttcttttggtttcaaacgcttcagtcacaaaaatcacattgaaaatgattagactccatagctgactttacttcacaaattacccatatgttccagctcatgttacaatttcttttgggagcattaaaatgatttttcaattttctcactcaatttcttctatctctcctgaaaataagagatgatattgtatgataagagcaagtctctttaaattagaccaacttgacttctgycttgcagtcaaagagagatcaaatgtgtttttccccaaacccccccaaacatgtgaaaaattc

SEQ ID NO: 656925 - DNA, 567 bp, Homo sapiens
taagtgtgtatactatagagggagggagatcttcgacaagcaacattaaaacagaaacaaaccgggtgttgttgttttttttaactgttcattttaaaataacaaaaaggaagttataaaacttgttcataggctcccttgcacccttaaactaatttcccccaaaagtgacatcttataaaactgtactacaatatcaaaaccaggaaatcgacattggtaaaatgctgtcagctacactattatctagactacagaatttattttcaccatttttacattcatatgtttatgtgtgtttgtgtgcgtatgtataattctacawaatttttcccacgtatagattcatgaaaccactgctacaaccaaagtacaaatctgttctatcagcacaaaggaactgcttcatgctacccatttatatttgtaccacccatccaccacacattttccctatcctattccctggaacaactagtctgttctccgcctccataattatataaattgtaatcatatcaacctaaccttttgagattgacctttttcactaagaataataccttg

SEQ ID NO: 656926 - DNA, 631 bp, Homo sapiens
cccttctcttaaaatatccctgggtgcttgagaagtgagcagaatctgcttacttggcaaacttttgtatcagcgaagaagataggttgatggtaactctatagtaatggggatccaaagagtttcctttgtttttaataattgctaatttactctagtacasataattgagtcaaccattctcatttgcttgaactcctttaaaacatctgatgagctgttttcaaggagaaaagagaatactgacaagtaaaccatcctctttcctacttaaagagctgaagcctagagtatagtcagggggaaatgaaaactgtgaactcacactactgtttgaacagccattccaattaaaaagcgccctaggatgggtgtggatctggtcaccatgcatggtggacataagacctctgctgggagtgcctgtagagtcattttggcaaggcatcctcccagagccaaccgatcaataggcatctctcacctttttcaaagtacagcaggaactgaagacactgaaaaacagcatccttctcaacaagaccacattaacccaaaccacaacagcaccggtgccagctccagagaaggcagccctcatgaggggacatcagcgatgagcaatgtgatg

SEQ ID NO: 656927 - DNA, 514 bp, Homo sapiens
atacttacacaatactttgagaagtactgaagatacattattatgctaccttcatgtggagttaattatggagggataaaatagtgatagtcctaggtttggggttgagataggaaacatacagttatgtgatgaaataaattccttgtggcaggggattttctgacttgcaaataaagatcatataaaataatgatgactcactcagagatttttttaaaaattgaaatctcttctgagcaatctataccaatgatgaagcagaaacttgttttctttctgatcattctaagtcagttctcaatgctgtttctaattgctaaaagaattaacccttctgatacttctgcccatgtattgtaagttttttctctttttctccttgaagaatatgtttcttaaagaaaatttctttttcctttcttggaattcaaaagttttatcacacrgctaactgtcctgatgataccagaggtcaggtcagcatgcatatgttccttcctatagaagagaa

SEQ ID NO: 656928 - DNA, 534 bp, Homo sapiens
gggtttaaaaaattagaacccaccttggaattgtggatacagtcattttctagccctctcattataccccaactgcacggataatacaaaatgagagcaagaaataagagatagtgaggacacaaccacagtatccactatacaatcctaactggctagtctttttctacatttcaataaattgttgtaagtctacatcatcctttaatccacaaaatgttctaggatctttccaacagctactcccctagattcctcctctacattccatgaacataagcagacttgtagtccttcctcatatttcacggagtaagcagactgtgaaagcaggcttcaaactgtaaatcaaagttaaagtaagaaaakgcaccaccaattataaccaagtatttcatatactagcttatcaaacatagattcctggactcatacactgacatgctacaacactggcattccaaaagggatacacagatagtgagagagggaaaaataagtggctccacatttctgagcacagccagcctgtcc

SEQ ID NO: 656929 - DNA, 551 bp, Homo sapiens
gaatatgtgcattatacttactggttcagcatccctaatccaaaaatctgaaatctgaaatgctccagtgaacatttcctctgagtgccacatcaacactcaaaaaattgtggattttggagcatttggaattttggattttcagaatgtgrtggctttaggctgtcttgaataggaagagagggcctagaaacagttactggaatcccaattcctatctgcaaattcataaataggtgttttcagtgtgaacctcttaaaaaaaaaacaacttagattggtcattctcatcttctgggagagaaaggtgcttttcatgatctcataaagaagcctctaatgaagttcactttcctcctattaggtattgggaaaaacgtattaaacttataacaataaagacttattctttagagaaaatttatcattttgacaaaggtattaaactctttcagtgaaaacaaagttgccttaggtataggttcagaagactgaaaaaaattcaaagttcaggttgagtatccctactttacggttttcctacagattca

SEQ ID NO: 656930 - DNA, 551 bp, Homo sapiens
gaatatgtgcattatacttactggttcagcatccctaatccaaaaatctgaaatctgaaatgctccagtgaacatttcctctgagtgccacatcaacactcaaaaaattgtggattttggagcatttggaattttggattttcagaatgtggtggctttaggctgtcttgaataggaagagagggcctagaaacagttactggaatcccaattcctatctgcaaattcataaataggtgttttcagtgtgaacctcttaaaaaaaaaacaacttagattggtcattctcatcttctgggagagaaaggtgcttttcatgatctcataaagaagcctctaatgaagttcactttcctcctattaggtattgggaaaaacrtattaaacttataacaataaagacttattctttagagaaaatttatcattttgacaaaggtattaaactctttcagtgaaaacaaagttgccttaggtataggttcagaagactgaaaaaaattcaaagttcaggttgagtatccctactttacggttttcctacagattca

SEQ ID NO: 656931 - DNA, 609 bp, Homo sapiens
ttgctccatttcataaaggaaaaagaagtttatataaaggccttgtgatggttttaaaatatcatgaaatccattgcaaaggtgaggtctaattctcttctccttaagtgtgggtggatttagtgacttagaatatggcagaagtatcagcttgtatctcctgagactggatcataaaagacagccttcctacttgttctctctcttccttggatggctcattctgaggaacactaactgctatgtcatgaaaatatagcctgtattaatcagcytggtctctcacaccataggctgtgtgacttaaacaacagaaattgatttttcacagttctggagactgggatgttcaagagcaaggtgctaacctattaagttcctggtgagagttcttttcctggcttacagatagccaccttcttgctgtgtcctctcatgggagagctctgttgtctcttcctctttttataagagcatcagcctgatcatattagggacccatccttaagacttcatttaacctttttcacctcctcacaggccctgtctctaaatacagtcacatttggggttagtatttcaacatataaatttcagggggacacaaag

SEQ ID NO: 656932 - DNA, 576 bp, Homo sapiens
gttcttcagcctttgcactcttggacttacagcagaggtttgctaggggctctcaggcctttggccacagactgaaggctgcactattggcttccctacttttgaggttttgggacttggactggcttccttgcttctcagtatgcagatggcctattgtgggacttcaccttgtgatcgtgtgagtcaatactccttaataaactccccttcatatatatatatatgtgtatatatatatatgtgtgtgtgtgtgtgtgtgtgtatatatatatakagagagagagagagaaccctgattaatactgattttggtaccagaagtgaggtattagtccattctcatgctgctataaagaactgcccaagactgagtaaattatgaaggaaagaggtttaattgactcacagctccgcgaggctggggaggcctcaggaaacttaagactgtggcagaaggggaatgtgatggttaatactgaatgtcaacttgattgaaaaatgcaatgtattgatcctgggtgtgtctgtgaggctgttcccagaggagattaacatttgagtcaatgggctgga

SEQ ID NO: 656933 - DNA, 611 bp, Homo sapiens
gtaagacagacttattttttaaaaaataaataaaagttactctgataggctataagagacaggaatagcattagaagtcttaaaagcatagcatgaggaacaccacaataacacacagaaaacaaggaagatttcaatastatataacatgccccacacagaggcataaaaaattatggcatgttctaagaattatgagcaactcaggtaaaacatgtgaaacactatctaacacttcatcctttcttataaagtaatggcaaaggtgagactttgttcaagaggttggcagaaaagacgttagaaaagcagatctggcacagatcatgtagggccttgtagctacactaagaagtttggaggagatttgggctttatccaggtgatgagaagacactcaaagtgtctgagcagtgaaggcacatgataagtcacatagttagaaagatgagcattatgaccagtgtggaaaatggactgtatgaaaagatactggagctagggaaacaattaaactagccctaataaagatataaataaaaatagcagttgttgccaaggcagtgtaggaggaaaagtggggacaaattcaaaagatatttacagtatag

SEQ ID NO: 656934 - DNA, 611 bp, Homo sapiens
gtaagacagacttattttttaaaaaataaataaaagttactctgataggctataagagacaggaatagcattagaagtcttaaaagcatagcatgaggaacaccacaataacacacagaaaacaaggaagatttcaatagtatataacatgccccacacagaggcataaaaaattatggcatgttctaagaattatgagcaactcaggtaaaacatgtgaaacactatctaacacttcatcctttcttataaagtaatggcaaaggtgagactttgttcaagaggttggcagaaaagacgtyagaaaagcagatctggcacagatcatgtagggccttgtagctacactaagaagtttggaggagatttgggctttatccaggtgatgagaagacactcaaagtgtctgagcagtgaaggcacatgataagtcacatagttagaaagatgagcattatgaccagtgtggaaaatggactgtatgaaaagatactggagctagggaaacaattaaactagccctaataaagatataaataaaaatagcagttgttgccaaggcagtgtaggaggaaaagtggggacaaattcaaaagatatttacagtatag

SEQ ID NO: 656935 - DNA, 584 bp, Homo sapiens
acatatgtaggcaaaagtgattcaggctaagtatgtgttcctttcaaagcactaatttaaagaaataccacttttttttccaaatagcatttagtcacaaaatattttagaaaaataycaattttctgttgtggggaaatcgtttaagggctgggctgaaattcagaggaagacttttgtttcttcttttaaataaaaagtcactttataaaagagaacggatggcttctaacgtatcatatttacccatttcccctccctaattttccatttaccccaaattcgatttgtttccttgctgcctctttaagtccctcccatatcctcagagcagcttaggtgtcttttgtgaattcatttatgctctttgttccattcatcctatttagggcagtaacagtttacaagaagcaaaacacattataagttagtcataattattacactgaaatgcatcctctccctcataatgtagcagaggtgtaatatgacaaaatagaagtttctcaatccaaagctgccatccttatctatgaaccagtaaactgcccttcacagaaggccttggctttttacctttaagg

SEQ ID NO: 656936 - DNA, 643 bp, Homo sapiens
tcctgttcaaaccatgtaataaccacatcaataacttcactgttatactgacagtctgctcctgggcayactgcaggctctgcactactgggttattatatacctggatgctaatgcctcccagagggcctatgctccaactgactctgcccctgcacccccattctccccaacccccacttccaaaacactgccaccaatgccacctgctccactgcctgctttgtcatccctgacaacgtagagcagagggagggcactatgcacacctccactctcacctcccggaccactcagtggctactggggctgtcaatatctatgctggccgtcctcccatgtccactaccccgccatggtcactgatgggtggcatgataagatgccttataatctcaataaagagatactttctcagctgggcgtggtggctcacatctgtaatctcagcactttgggaggcctaggcaggccgactgcttgagcccaggagttttgagatcagtctgggcaacaaagtgagactgcttcactacaaaaaatagaaaaaaaaaaattagctgggcatggtggtgcacacctgtggtcccagctactttgggaggccgagctgggaggattgcttgagcctgggaggttgagg

SEQ ID NO: 656937 - DNA, 643 bp, Homo sapiens
tcctgttcaaaccatgtaataaccacatcaataacttcactgttatactgacagtctgctcctgggcatactgcaggctctgcactactgggttattatatacctggatgctaatgcctcccagagggcctatgctccaactgactctgcccctgcacccccattctccccaacccccacttccaaamcactgccaccaatgccacctgctccactgcctgctttgtcatccctgacaacgtagagcagagggagggcactatgcacacctccactctcacctcccggaccactcagtggctactggggctgtcaatatctatgctggccgtcctcccatgtccactaccccgccatggtcactgatgggtggcatgataagatgccttataatctcaataaagagatactttctcagctgggcgtggtggctcacatctgtaatctcagcactttgggaggcctaggcaggccgactgcttgagcccaggagttttgagatcagtctgggcaacaaagtgagactgcttcactacaaaaaatagaaaaaaaaaaattagctgggcatggtggtgcacacctgtggtcccagctactttgggaggccgagctgggaggattgcttgagcctgggaggttgagg

SEQ ID NO: 656938 - DNA, 643 bp, Homo sapiens
tcctgttcaaaccatgtaataaccacatcaataacttcactgttatactgacagtctgctcctgggcatactgcaggctctgcactactgggttattatatacctggatgctaatgcctcccagagggcctatgctccaactgactctgcccctgcacccccattctccccaacccccacttccaaaacactgccaccaatgccacctgctccactgcctgctttgtcatccctgacaacgtagagcagagggagggcactatgcacacctccactctcacctcccggaccactcagtggctactggggctgtcaatatctatgctggccgtcctcccatgtccactaccccgccatggtcactgatgggtggcatgataagatgccttataatctcaataaagagatactttctcagctgggcgtggtggctcacatctrtaatctcagcactttgggaggcctaggcaggccgactgcttgagcccaggagttttgagatcagtctgggcaacaaagtgagactgcttcactacaaaaaatagaaaaaaaaaaattagctgggcatggtggtgcacacctgtggtcccagctactttgggaggccgagctgggaggattgcttgagcctgggaggttgagg

SEQ ID NO: 656939 - DNA, 592 bp, Homo sapiens
ccaaatttgcagaccttataaatatgagttgaggaaaatcgatcctcttatcctaaggaaggactgatacctagtaaacatgaaataaatacctgctgaatgcrtaaatggatggatgactagctccagtaaagcaagtcaggttatgagtaggttttatttttttttagcatttgctgtatcccctaaacagttatgtaaataaacaattaaaagcccaacaattcagcaagcacccataatccaatggggaaagaagagaagtaggtagaggtagaaatgaaacaatcccagccacgagttgacaaccattgaaattgggtgatggggatgtaggcgttcattatattattctctctactttggtacacacttggcatttttcataatgaagttacattttaaaatggtgggggaggggaatctaagtcattgactagagaaaactgtgtatcttggagtgggcaaacacgttatcacctgtctaggattatggttatctttcaagtctagaacaagattcaaatgctatagctagttccaaaagctaagtaagcttcttcaagatgaaaccccaatagcattagattga

SEQ ID NO: 656940 - DNA, 568 bp, Homo sapiens
atcacaattgcaaggagccatgcaacttcctgcaactagaggtgcttggtgaggaagacagtgaagttgaattgtcataactgaggtaatgataaatggggtgtcattaacaattatgaaatcaggtgaggagctggttttgaggagtgggaaaggtgatggtgagcacagttttggacaygtgagtttcattttctgtgggttggatgttctggtgaatttgcaggcagcttgctgtacaagctgagagaggaggtgaatgattaggatgcttcatcagatttgggactgacccacacagcaacagtgactaaaatcacaggacagaatttgattagggagagggagaaattaaatggccaaagactcgtatcttgagaacactcatatttggggagcaggaactgaagttagtgaagttggagcccgcagagaggtaggaggagatttgtttcatctacttcttaattactttgtgtgcgtatggaaaaactaagcatgtttacagggaaagaggaaaggaccaagaaagagaagaaactaaatatgtaggaaagacagaattatt

SEQ ID NO: 656941 - DNA, 528 bp, Homo sapiens
agacccaggctctcattaagaacatcctttgctcaagaaaatcaaagaataaaaatcatgttctggttttactacttcagtctatctaccagatattcgcgtaaggaaayaacccagctgcacttttttattttgtccctcaccgaggctaacatgcaccttgacctagaggtgaataaaatgcatataaacataaaatccatgcatatgctagtatctgattctggacaagttactggccttaaacccgccacgctcctttgaacaaggatgcaactttaggataagacctactggcaaatgatagctgtgtctgaggttatcctgaaagcagctgcacaagctgagggaggaagacactgttttttaatggtaaatactgcccctcacatacgcaattcaagcctttgttggcaaaatctaagtacaaaagaatttaactcccccaaaagccaaatcacagccattatttttgcaaaacagaagatatcccagtgcaatgtgtaagaaagagaatgcaattaatat

SEQ ID NO: 656942 - DNA, 459 bp, Homo sapiens
gaaagctcttatgaaggaaagcgttgtcaattgattgctcttctggcaaatctgtgaactctgaaggtacatttgcagtgatgcaaaacacttctcatgaaatgttgctaaaatgatttccgttactttagtaagaagctgttcaacattctttaagtattacttgtatgattacacagggaaatttcaacagagaagaattatgtagtatagagtacaattgtaagtctcaaattattgacttggcaaaaataatctrtaattaagattccttagcgaattactatttttgtgcagttttataaaggaaaatgactaagctagggacccctcccctgccccgacaaattaccacttcttcatcctggttatagctcttatcacattgtattatcattgcacatttacctctatcttcaaccacatgtgaaatcctagaattcataggtaatgtcttac

SEQ ID NO: 656943 - DNA, 576 bp, Homo sapiens
gtagaatgatgagtatgcatrtggggagccaagttatatcttttgacaccagattatctccccgctccaagggaacctgttttataagctaaggggctggtttctcccacttggtatctggaaatgtgttaatttgtcatcagtttctagggctgatggaggacaaaaatcatccttccatcctctctagatttgggtgcaaatgttcctgaggctgccttttcttataatcaattaactgggataacattgtgtacataagctccacggtgggttggcattgcctatgcaggtgatatgctttggatatttgtccccacccaaatctcatgttgaactgtaattcccagtgttggaggtggggcctggtgggaggtgttttgatcatgggggtggatcccccatgaatggcttgggacattcccttagtgataagtgagctctcactctgagttcacaggagatctgatcacttaaaagtgggtggcacccccctcccactctctctctcttgctcctgcttttgccatgtgatgtgcctgaaccctcttcaccttctaccatgattgtaagctt

SEQ ID NO: 656944 - DNA, 576 bp, Homo sapiens
gtagaatgatgagtatgcatatggggagccaagttatatcttttgacaccagattatctccccgctccaagggaacctgttttataagctaaggggctggtttctcccacttggtatctggaaatgtgttaatttgtcatcagtttctagggctgatggaggacaaaaatcatccttccaycctctctagatttgggtgcaaatgttcctgaggctgccttttcttataatcaattaactgggataacattgtgtacataagctccacggtgggttggcattgcctatgcaggtgatatgctttggatatttgtccccacccaaatctcatgttgaactgtaattcccagtgttggaggtggggcctggtgggaggtgttttgatcatgggggtggatcccccatgaatggcttgggacattcccttagtgataagtgagctctcactctgagttcacaggagatctgatcacttaaaagtgggtggcacccccctcccactctctctctcttgctcctgcttttgccatgtgatgtgcctgaaccctcttcaccttctaccatgattgtaagctt

SEQ ID NO: 656945 - DNA, 579 bp, Homo sapiens
tctggtatagtctcttcccacactgagtcagaactgatctgtgtgactaatagaatgtggctgaagtgacaatgtgtgatttttcaaggctaggtcataacaggccctgtagcttccaccttggcctccttgagcatttgctctgggggaaaccaggtgccatgttgtgaggtcactcaagytgccctgtggagaggtcgatgtggggaggatcttaggtctcctgtcaacaaccagcaccaacttgccagccatgtaagcgagccaccttggaaatggatcctccaccccagacaagccttcaaacaactgacattttgactgtaacctcaagttagactgagggccagaaatgttaagataagctgctcccaaattcctgacccacagaaactataagagaaaaaaagtatatattgtatgaaaccgctgttttggggatcatttgttatataccagtagataacttgtatagtacccagtacttcattactccaactccctcgatctctgatttccatctgtgttagaccagcgggtagaaagtgaggtcagtgtgtctattcctcagcattcttc

SEQ ID NO: 656946 - DNA, 417 bp, Homo sapiens
gggactggaaaaaagttgaaaaaggaaagagcccattaaagatgaagattttcatagaatgtttagaagacagatttgggggtggtgtgaaaattgctatgaagaggtaccggaggtagattttccatgaaattctcactggtactgactccctccaagtccctcagacctgaataatgtgtttacatattcattatmtatctttcttcttttcagagcacctgcctcccccatcccctgcccctgacaaattgtataagcttcaggccccataagctttaatcttgactggatctatagagaaatgagttgtaaggttgagaaaatttttccaatctctgaaaggcaaaatagatgattgtgtaccttccttgttgcgaagaccttgtctagtaggcctaagagtcatctgaattc

SEQ ID NO: 656947 - DNA, 417 bp, Homo sapiens
gggactggaaaaaagttgaaaaaggaaagagcccattaaagatgaagattttcatagaatgtttagaagacagatttgggggtggtgtgaaaattgctatgaagaggtaccggaggtagattttccatgaaattctcactggtactgactccctccaagtccctcagacctgaataatgtgtttacatattcattatctatctttcttcttttcagagcacctgcctyccccatcccctgcccctgacaaattgtataagcttcaggccccataagctttaatcttgactggatctatagagaaatgagttgtaaggttgagaaaatttttccaatctctgaaaggcaaaatagatgattgtgtaccttccttgttgcgaagaccttgtctagtaggcctaagagtcatctgaattc

SEQ ID NO: 656948 - DNA, 417 bp, Homo sapiens
gggactggaaaaaagttgaaaaaggaaagagcccattaaagatgaagattttcatagaatgtttagaagacagatttgggggtggtgtgaaaattgctatgaagaggtaccggaggtagattttccatgaaattctcactggtactgactccctccaagtccctcagacctgaataatgtgtttacatattcattatctatctttcttcttttcagagcacctgcctcccccatcccctgcccctgmcaaattgtataagcttcaggccccataagctttaatcttgactggatctatagagaaatgagttgtaaggttgagaaaatttttccaatctctgaaaggcaaaatagatgattgtgtaccttccttgttgcgaagaccttgtctagtaggcctaagagtcatctgaattc

SEQ ID NO: 656949 - DNA, 417 bp, Homo sapiens
gggactggaaaaaagttgaaaaaggaaagagcccattaaagatgaagattttcatagaatgtttagaagacagatttgggggtggtgtgaaaattgctatgaagaggtaccggaggtagattttccatgaaattctcactggtactgactccctccaagtccctcagacctgaataatgtgtttacatattcattatctatctttcttcttttcagagcacctgcctcccccatcccctgcccctgacaaattgtataagcttcaggccccataagctttaatcttgactggatctatagagaaatgagttgtaaggttgagaaaatttttccaatctctgaaaggcaaaatagatgattgtgtamcttccttgttgcgaagaccttgtctagtaggcctaagagtcatctgaattc

SEQ ID NO: 656950 - DNA, 371 bp, Homo sapiens
gaaggcatattcagtcagttgtttgtgatggaaaaaaggttgccattatgctagagcagcgctgtctaatagaaccttccacggtgatggaactgttctctatatctgtgctgtccaaagacaatagccattagctgcatgtggctttgggmacttaaaacatggctggttcagctgaggaaccaaatttttaattttattgaaagttgtagttaatttatatctaaatgtaaatcgccaaatgcacacacagggaagggcaattagagatagtgttcccagtagatagtggaagggccccttcccctggggctaaaattaaggtgatacagccagcaatgtatttcctgcagcccctgggcctgaagccc

SEQ ID NO: 656951 - DNA, 535 bp, Homo sapiens
tatttgtttcctctggctgtcttgaacaagtcctcacaaactgggtaacttaaaacaacagaaatttattctgttagagactagcagtttgaaatcaaggcatcagcttggttggtcccttctggagggtctgagcgagaatctgttccatgcttctctcctagtgcctggtggttgctggcaatctttggtatcccttggcttatagacatatcactccaatctctgtctctrttttcacatggaattctctcctgagtgtctgtgtctttatgtggcattctcctctctgtgtgaccaaatttcccatctcaccagttagagttaccctaatccagtatgattcctcttaatttgattacatctacaaataccctatttccaagtaaggccacattctaagattccaggtgggcataaattttaggggacactagtcaacccaatacatgatatgtatgtaaaaatcagtctcactttttaatagacattacagtacttacaaaaatatttttattttatccttattttgttc

SEQ ID NO: 656952 - DNA, 535 bp, Homo sapiens
tatttgtttcctctggctgtcttgaacaagtcctcacaaactgggtaacttaaaacaacagaaatttattctgttagagactagcagtttgaaatcaaggcatcagcttggttggtcccttctggagggtctgagcgagaatctgttccatgcttctctcctagtgcctggtggttgctggcaatctttggtatcccttggcttatagacatatcactccaatctctgtctctattttcacatggaattctctcctgagtgtctgtgtctttatgtggcattctcctctctgtgtgwccaaatttcccatctcaccagttagagttaccctaatccagtatgattcctcttaatttgattacatctacaaataccctatttccaagtaaggccacattctaagattccaggtgggcataaattttaggggacactagtcaacccaatacatgatatgtatgtaaaaatcagtctcactttttaatagacattacagtacttacaaaaatatttttattttatccttattttgttc

SEQ ID NO: 656953 - DNA, 508 bp, Homo sapiens
agatctttctgctttctgacaatccctgctaacattttgcacacagcttcttctacattcstatgcctacttcttccatgaagatttccccaataactccagaaaatctctcccttttctgtcctgttgattcttcctccaaagatatctcaaatttggctcccttcctgttatatctattgcagctaccccagttcatactgcagtcttctctctttgtgattactaaaataactttgtaaataaaggcaattaatttggattaccccagggttccacagatcgaattcggggggtggtatgtgaacttcaaataatacaaaaaatttacatctttatttttcactaacctcaaatggaaatttaacatttcctctcattataaatatagacaacagactgcagtagccctagcagtacatgtgacttggccactgatagataccagatactttcaatcacattatattcattgcagacacctcaacactgcatttctgttcatcca

SEQ ID NO: 656954 - DNA, 500 bp, Homo sapiens
gctaacattttgcacacagcttcttctacattcgtatgcctacttcttccatgaagatttccccaataactccagaaaatctctcccttttctgtcctgttgattcttcctccaaagatatctcaaatttggctcccttcctgttatatctattgcagctaccccagttcatactgcagtcttctctctttgtgattactaaaataactttgtaaataaaggcaattaatttggattaccccagggttccacagatcraattcggggggtggtatgtgaacttcaaataatacaaaaaatttacatctttatttttcactaacctcaaatggaaatttaacatttcctctcattataaatatagacaacagactgcagtagccctagcagtacatgtgacttggccactgatagataccagatactttcaatcacattatattcattgcagacacctcaacactgcatttctgttcatccaccttatgattgtagaccta

SEQ ID NO: 656955 - DNA, 618 bp, Homo sapiens
cttacttgtagaaaacacacattacagtattcagaggtgacaggacatcttttgacaacttattctcaactggctcaggagaaaacaaaattgtttgcaccacacatgcaactcttctgtaactttgagaatatttccagaataaaaatgactttgcaaaagaaaaggaaaagagaaattagagatggtggatatagatacttttttcaaagtcatactgcaaaaaatgtaaacaattgaggccgttgctagaaggggaagtggagggattgagaaaaaaatcaaattttatttaagatggagaaataacaccatgtttgtatgataatggaaatgatgtagagaatcaaaaactgatgatgcaggatagacagaaggtggaagaataaactgctggaggaggtttcttggttagagaggtgggatctactgcacaagtgaaggacttcacttttgatcacagcaaggatctccccagattagcaattgctgaaatcctactatccagcatcctcaccaaaccagaccgggactgagaaccgggaagtaaggagttgtgggggtggcggggyggggcaggtggtactctagacagcttcaatgaaggctaccggactg

SEQ ID NO: 656956 - DNA, 545 bp, Homo sapiens
ccacactcggctaatttttaaattttttttagagataggttctcactatgttgcccaggctgctctcaaactcctgggatcaagygaccttcctgcctcaaaaaaattttatctttgttctcttatgactgggatagcggaagtttagtttttaattctgaattacagattacagttattgactttgcattgccttgtagctcttggctgctctttgtggggttcagggaccagtagaatcaggagcccctgggagcttattaggaatgcagaatttcaggcccctccccagacctactgagaatctgcattttaagaagatgtgactttctgacgagctcagatctctctccagccttccctagggttcatcttgcatctgatacctcctccttcctccagtggctctctaactcctagctcttccaactaaagatgttgttgctatgagtcccatttccattcatcattacactggtagttaatattagtgggaagcttactggctttcttgataaacaacactatcaaaatttgaataagtg

SEQ ID NO: 656957 - DNA, 545 bp, Homo sapiens
ccacactcggctaatttttaaattttttttagagataggttctcactatgttgcccaggctgctctcaaactcctgggatcaagtgaccttcctgcctcaraaaaattttatctttgttctcttatgactgggatagcggaagtttagtttttaattctgaattacagattacagttattgactttgcattgccttgtagctcttggctgctctttgtggggttcagggaccagtagaatcaggagcccctgggagcttattaggaatgcagaatttcaggcccctccccagacctactgagaatctgcattttaagaagatgtgactttctgacgagctcagatctctctccagccttccctagggttcatcttgcatctgatacctcctccttcctccagtggctctctaactcctagctcttccaactaaagatgttgttgctatgagtcccatttccattcatcattacactggtagttaatattagtgggaagcttactggctttcttgataaacaacactatcaaaatttgaataagtg

SEQ ID NO: 656958 - DNA, 604 bp, Homo sapiens
gagaatgactggaaatatggtttcattcaacaccctgaagaagagtttccaggggcttgttttctatgataccataattcatagcctagaattagctcatacactggtgttattatccatgaacctgggagattctttagtggcatgagttcataattgatcattgtataaaatagttcacaaagtttgatgagctaaaaaaaagcaaaaaagctttggagacatatgcagatgtggacatgtttgagggaaactgtttgaaatgtaaattatagttaatactactctgtggtttgataagatgctgggagccaaatatctattttcagaatgtggtgaactaatgcgaatgtcagaaagctactgagggaagaagtgtttttgagcttccaataaaaatattactaactcatatttggaactacttgggcagtattccaacagtsagcagagcacactggacctccaggtttcttgtcttggtctgtccattgtgttaacatccttcccaggtctgctttagctgaagaaagcctacatttcctatctgtgctcctcacagggaatttatgacaacacttaaactaaattgtgccattaatga

SEQ ID NO: 656959 - DNA, 600 bp, Homo sapiens
gtgaaaagtgaaggggaaagaagcagcattctcagggagagcctcagaccacagtgccactctgagcaagtggccaggctgatggagcctgacactaaagattgcccattagagaagtctcggccctagtgtcccagccacatggagtgtcccagagagcgcagctttggtgtgagctctgagggagcaagtcctctttgaggttctctgaaagaagatctaagctgtgcacttcttgggctgccttaattatgcttcaagggtcagaagggtccaactcttgtttgaaccgagactcaatcccagcctgcaaatgactttccctgattgattacaacttgctttaaaagtccagagacttttatctcttaatgaaagatatttaaatgagggtgatttattactttgaggtcgcggtgatcaygaaagtatgactgagtatatgtgattgatatgggccataatgcttcattcattcacaattcagcagaccaaattaaagagatgcgtgtttaagtttcaatcctgccatgactgtgatcttgggcaagtcacttctctctcagcttcagctccctcatgtccaaaataagtgggttg

SEQ ID NO: 656960 - DNA, 582 bp, Homo sapiens
gactaatatatgcacatggcaaaaataaaaatctaacaccacaaaaagtcttatgacgagaaccacaactgccctaccccatgtccccatgcacagagacaatgccttttaacgacttactgttttcgttcttctgacttctgcacctgttaattttccaagactgcagttcttaggtacagcccattgaaattgttttttttaaaaagggaaacaagtaaaagataatagatgtttaccatctgccatgagttcggccgaagagataagtaggaaataatttaaagagaaaccagtttatgtaagagaaaagaactaaaacactaaactattttgctccagaaaccaagwaaccttgtgattttaaacatctgtgtgagttccagtttctccactttgttaaaccagtgaatgctgcaaatgcaaacactgccatatgacatgtcaccatgggatgtggagaactggctaagggtgacaaatcttctgtcctctccatcacttaaggacagaaagtctgccatcatccccagggcctctgtactccgaatataggcactgctgcctgctggatgagctgat

SEQ ID NO: 656961 - DNA, 582 bp, Homo sapiens
gactaatatatgcacatggcaaaaataaaaatctaacaccacaaaaagtcttatgacgagaaccacaactgccctaccccatgtccccatgcacagagacaatgccttttaacgacttactgttttcgttcttctgacttctgcacctgttaattttccaagactgcagttcttaggtacagcccattgaaattgttttttttaaaaagggaaacaagtaaaagataatagatgtttaccatctgccatgagttcggccgaagagataagtaggaaataatttaaagagaaaccagtttatgtaagagaaaagaactaaaacactaaactattttgctccagaaaccaagaaaccttgtgattttaaacatctgtgtgagttccagtttctccactttgttaaaccagtgaatgctgcaaatgcaaacactgccatatgacatgtcaccatgggatgtggagaactggctaagggtgacaaatcttctgtcctctccatcayttaaggacagaaagtctgccatcatccccagggcctctgtactccgaatataggcactgctgcctgctggatgagctgat

SEQ ID NO: 656962 - DNA, 658 bp, Homo sapiens
ttccagctgctggctcctgctggcttccttctaagctcccctcactcacctccaccctgcctgttagtctccagctaagctgtcttttgaaggtaggcagggtagtctcccgctaagctatgttttgaaggtctgcttgggaagcagaggcagtagagggaaatgtgtgtctgttttttaaggaataattcatacacagtccttctctcaaatagctcgaggcacttttctgagatgcactgcgggaagagaacagagtgaccagatcctcagagcatcaataatgcaaagcagcttcttttaactaaggggttgtcaatttgacttcccctagatcagtaagggatcaaaagtcaccagtggctaatagaccttatttgagcagaggatgcagtttcagcccaatccccgctaacggccagccacatcaaacggccaccttggtgctttggtgttctttcacttgccctttgatcagctgcagctgtaaccacacagcrtcccacaggggactcagaacctaactggatgattcttactggtgaaagctggtggagtctgagctgctacagggtgaatcactcatgctcagaggtttctgcaaaccaactttgggaagcccaaatctaactacatttactatttcaaatattaagac

SEQ ID NO: 656963 - DNA, 699 bp, Homo sapiens
tgtcctaagcttatagctagctatgctacattttattttaaattgatttccattatacttctgtgtgtgtgtgggtgtgaggcgcgcgcaacgcagtaaaatatgttttcaccatggtactactaacacaaaagtttgaccgccacagcttttgattttcatgaagaatataagctttcctctacttaaacctcacttttttctttttctctttttctgaagcctccttgtctccaattccccatccacccccaaaatcctcacagccccccaccctgtcacccttactatagaaagaatttctttggctccctttgatttactaatgatttgtctgtccacgtggggttatgaacacaattactccatgtagcaaaaaattaagaccttttcggtattttgtttacgtagcagcatgtagcagaacctcatcattgtaccaaggagttcacaccytgaaactttgaccttggtacaggtttacatcttggtgcaggtttacattgtgcaactgtctcctaggagcaggaactgtctaccagagctactctagggaagccacggcctgcatgtgtggggacaaaggaggaagaaagggaattaggttttatttggatacattcggatgccagcatcaaggcttcatcttggaggcaaggtgcaaatcttaagaggtgaaatgggttttttgtagtgtct

SEQ ID NO: 656964 - DNA, 570 bp, Homo sapiens
atagaccactgtaatagaatagaatccagaaataaactctyacatacttgctcaaatgatttttcacaaggtgctaagactatccaatgggaaaaaggcagtgtttttaataagtggtgtggggaaaattggatatccacatgcaaaaaaaaaaaaaaaatgaagttagacacttacctaactccatatccaaaaatgacctcataacagatcaaagaactaaatacaaaacctaaaactataaactcctgggagagaacacagggggaaccctttgggacactggaattggcaatgatttctcagatatgacaccaaaagcaaaggaaacaaaagaaaatataggtaagttggaaatagttgtgtctcaaaggacacaaggagtgaaaaggcaacccacccaacagtatgaaatatttgaaaatcatatatctgataagagactgatatccagaatatataaagaactcctacaactcaacaacaaaaacacccaattttaaaaatgggcaaagacctgattagcagcgagggtacacaaacagccgataaacgtatgaaaagatgctc

SEQ ID NO: 656965 - DNA, 570 bp, Homo sapiens
atagaccactgtaatagaatagaatccagaaataaactcttacatacttgctcaaatgatttttcacaaggtgctaagactatccaatgggaaaaaggcagtgtttttaataagtggtgtggggaaaattggatatccacatgcaaaaaaaaaaaaaaaatgaagttagacacttacctaactccatatccaaaaatgacctcataacagatcaaagaactaaayacaaaacctaaaactataaactcctgggagagaacacagggggaaccctttgggacactggaattggcaatgatttctcagatatgacaccaaaagcaaaggaaacaaaagaaaatataggtaagttggaaatagttgtgtctcaaaggacacaaggagtgaaaaggcaacccacccaacagtatgaaatatttgaaaatcatatatctgataagagactgatatccagaatatataaagaactcctacaactcaacaacaaaaacacccaattttaaaaatgggcaaagacctgattagcagcgagggtacacaaacagccgataaacgtatgaaaagatgctc

SEQ ID NO: 656966 - DNA, 570 bp, Homo sapiens
atagaccactgtaatagaatagaatccagaaataaactcttacatacttgctcaaatgatttttcacaaggtgctaagactatccaatgggaaaaaggcagtgtttttaataagtggtgtggggaaaattggatatccacatgcaaaaaaaaaaaaaaaatgaagttagacacttacctaactccatatccaaaaatgacctcataacagatcaaagaactaaatacaaaacctaaaactataaactcctgggagagaacacagggggaaccctttgggacactggaattggcaatgatttctcagatatgacaccaaaagcaaaggaaacaaaagaaaatataggtaagttggaaatagttgtgtctcaaaggacacaaggagtgaaaaggcaacccacccaacagtatgaaatrtttgaaaatcatatatctgataagagactgatatccagaatatataaagaactcctacaactcaacaacaaaaacacccaattttaaaaatgggcaaagacctgattagcagcgagggtacacaaacagccgataaacgtatgaaaagatgctc

SEQ ID NO: 656967 - DNA, 570 bp, Homo sapiens
atagaccactgtaatagaatagaatccagaaataaactcttacatacttgctcaaatgatttttcacaaggtgctaagactatccaatgggaaaaaggcagtgtttttaataagtggtgtggggaaaattggatatccacatgcaaaaaaaaaaaaaaaatgaagttagacacttacctaactccatatccaaaaatgacctcataacagatcaaagaactaaatacaaaacctaaaactataaactcctgggagagaacacagggggaaccctttgggacactggaattggcaatgatttctcagatatgacaccaaaagcaaaggaaacaaaagaaaatataggtaagttggaaatagttgtgtctcaaaggacacaaggagtgaaaaggcaacccacccaacagtatgaaatatttgaaaatcatatatctgataagagactgatatccagaatatataaagaactcctacaactcaacaacaaaaacacccaattttaaaaatgggcaaagacctgattagcagcgaggstacacaaacagccgataaacgtatgaaaagatgctc

SEQ ID NO: 656968 - DNA, 501 bp, Homo sapiens
ccttcctgctcagccccgggtcagcttgcttccccccatcccagcatgcacttccagcccaggcattttaaaaccaaacaatccagctccccsaggatgggcagcctcattgcactgggtggttggttacccctctgtctgggtgtgggacactacctggcagtgacctgttgagtagccagtgagaaagctcagagccaggagtcaaactgcacagccactcctgaacctcaggccctccctgatcaaaagagttccttgtatgtattgtattctagatagcttatttcttccactacaaaagaaatgtgcatttattgtagcatttccatccagctcgactctctagacaagtctaggcataattttacatttccgatgccatattggatttgtaactttgaccctccatatgcgtatttaaaatccacactgagacagggactatctctggggactaggatcagggaaataaggctttttatttatacagttttgctt

SEQ ID NO: 656969 - DNA, 501 bp, Homo sapiens
ccttcctgctcagccccgggtcagcttgcttccccccatcccagcatgcacttccagcccaggcattttaaaaccaaacaatccagctcccccaggatgggcagcctcattgcaytgggtggttggttacccctctgtctgggtgtgggacactacctggcagtgacctgttgagtagccagtgagaaagctcagagccaggagtcaaactgcacagccactcctgaacctcaggccctccctgatcaaaagagttccttgtatgtattgtattctagatagcttatttcttccactacaaaagaaatgtgcatttattgtagcatttccatccagctcgactctctagacaagtctaggcataattttacatttccgatgccatattggatttgtaactttgaccctccatatgcgtatttaaaatccacactgagacagggactatctctggggactaggatcagggaaataaggctttttatttatacagttttgctt

SEQ ID NO: 656970 - DNA, 501 bp, Homo sapiens
ccttcctgctcagccccgggtcagcttgcttccccccatcccagcatgcacttccagcccaggcattttaaaaccaaacaatccagctcccccaggatgggcagcctcattgcactgggtggttggttacccctctgtctgggtgtgggacactacctggcagtgacctgttgagtagccartgagaaagctcagagccaggagtcaaactgcacagccactcctgaacctcaggccctccctgatcaaaagagttccttgtatgtattgtattctagatagcttatttcttccactacaaaagaaatgtgcatttattgtagcatttccatccagctcgactctctagacaagtctaggcataattttacatttccgatgccatattggatttgtaactttgaccctccatatgcgtatttaaaatccacactgagacagggactatctctggggactaggatcagggaaataaggctttttatttatacagttttgctt

SEQ ID NO: 656971 - DNA, 586 bp, Homo sapiens
catggatcagtgggaatttgagaggatcacagttggcctgccaatactggcagaaaaatgcaagcctggaaggaaaatggaaatttgatataaactttaaaatttgattatgtgattaagggatatggcaaggtctctttgagattctgggtgggggctgaaaatattttaaggaaaacaactctttcaaagaaaaataacaactcaagccaaccatgcaacaacatttttatggcagtgtaatacccatttgaaaaatatttctttttaactgtttsttttgaaatacacaagaagttacaaaaatagtaagaagttttgttcatcttttacccagcttgctttgatggttacatcttgtagctataacataatatcaaaaccaggaagttgacacttaacagtgtgtgtgtgtatagttccatgccatcttatcctatgtacagattcctataatcaccactgcatcgggatacagaatgaagatctccctcctgccacccctttaaagtcatagccctcccctccaccaactctaatctctggaaacccctaatcttttctccatctctatagttttgtcatt

SEQ ID NO: 656972 - DNA, 586 bp, Homo sapiens
catggatcagtgggaatttgagaggatcacagttggcctgccaatactggcagaaaaatgcaagcctggaaggaaaatggaaatttgatataaactttaaaatttgattatgtgattaagggatatggcaaggtctctttgagattctgggtgggggctgaaaatattttaaggaaaacaactctttcaaagaaaaataacaactcaagccaaccatgcaacaacatttttatggcagtgtaatacccatttgaaaaatatttctttttaactgtttcttttgaaatacacaagaagttacaaaaatagtaagaagttttgttcatcttttacccagcttgctttgatggttacatcttgtagctataacataatatcaaaaccaggaagttgayacttaacagtgtgtgtgtgtatagttccatgccatcttatcctatgtacagattcctataatcaccactgcatcgggatacagaatgaagatctccctcctgccacccctttaaagtcatagccctcccctccaccaactctaatctctggaaacccctaatcttttctccatctctatagttttgtcatt

SEQ ID NO: 656973 - DNA, 548 bp, Homo sapiens
gcattcagtgctttaaaaggtttgtttcttaagaaaaatctacctgtatgcttttatcawagagagattatataaggcggtaagtcttagggctgtctacttagggtccacatgatgcagttaaatgcgttcctgtacttggtatgtgtacatctctcagccttttaatggatttttgctctctcttattttgtcctttttttttttttttttggtttaatatgtgttgctttgggaagatggcttcaaaaatttttgaaatagtgtatagattggaaataagtatgctttgttacagtaagaaaaatgtttagcatttattgagtgctaaccaaaccagacattctccaaagtgttctacgtataactcattttattctcataaccctagtagacagttgaagaaactggggcacaggaagactgggttacttgcctgagctcccacagctagtgagtggcaaggccaggattcaaagtcagggagcatggctagagaaccaactcctacaacttctagtttgtgctgtaaagctggtgccacactg

SEQ ID NO: 656974 - DNA, 548 bp, Homo sapiens
gcattcagtgctttaaaaggtttgtttcttaagaaaaatctacctgtatgcttttatcaaagagagattatataaggcggtaagtcttagggctgtctacttagggtccacatgatgcagttaaatgcgttcctgtacttggtatgtgtacatctctcagccttttaatggatttttgctctctcttattttgtcctttttttttttttttttggtttaatatgtgttgctttgggaagatggcttcaaaaatttttgaaatagtgtrtagattggaaataagtatgctttgttacagtaagaaaaatgtttagcatttattgagtgctaaccaaaccagacattctccaaagtgttctacgtataactcattttattctcataaccctagtagacagttgaagaaactggggcacaggaagactgggttacttgcctgagctcccacagctagtgagtggcaaggccaggattcaaagtcagggagcatggctagagaaccaactcctacaacttctagtttgtgctgtaaagctggtgccacactg

SEQ ID NO: 656975 - DNA, 639 bp, Homo sapiens
atacaatctctaactagaacttcttacaattgagaaatccaatcactcatcatatccgcaggttccacatgggtgcattgaaacaagcttgggttgaaaatgctgggaaggaaattaaaaaaacaagaaaaataatacaaataaaaggaatacagcataacaactatttacaaagcatttacattgcattaggtattataagtaatctagagatttaaagtatataggaggatttgcatatgttacatgcaaatgctacamcattttatatcagagacttaactatctgtgaattttggtatcccaggggtgtcctgaaaccaaggcttcacggatatggagagacaaccgtgctctaataatgtaagttgccaaatattgaatcttattgttttccaggcaatgtaccaagggcttttagtgaatcatcttacttacccttcatcttacttatgcatttttattattaccattttagaaatgaagaaactgaagcacaagaggttaagcaacttgcccaaagtcacacagtatacaagtatgacagccagggtttgaacccaaatagtctgactccaagacacaggctcttaacctgtaggttatatgacatatgattgctacacataggatgtacca

SEQ ID NO: 656976 - DNA, 442 bp, Homo sapiens
gagatgatttccttttgataaatttaartgataaatatttatcccttttaatctaaatttaaagcaaaacatgaccactgtagaataaagtttatccagttatttttttaaaattaccaaatgtgcattgtggacagagttccttttcattcccttcagcaggatgggggagctctgttttctctggcagcctgaggcacccagcagcttgcagttgagaaatgtgctctgttacacaggagaacagtgtggagtttgaagcctgtctggtggcccaatgtgatgccctcatcgatgccctcaacagaagaaaagcccagctgctggcccgcgtcaacaaggagcatgagcacaagctgaaggtgagtgctgcatcatgggaagagcagaaagccaacaagccaggctcccgaggggcatgatggacaggctgggagaattc

SEQ ID NO: 656977 - DNA, 572 bp, Homo sapiens
ctatctcgaatgatttgtttttctgctgttttcagctgattatatctgtcattgcttccaaaaacagccaccagtgccactcacactgtcatgaccactgatacaggcctccacrgctcgctcgctctcctctccccctgccttttccctttcttgtcactcttgttgctactcagatttgtgagaaaagactggccttttatagacatcacttgccaagcacagtacttctttctatctttgttggctaacccatcactcactgtcctgcaggggtaatcttatgttcttccgcttccctttggctgagttctctgagggcctgctttttgctgacaaagagaggagttgtgtgtgtatttttcgggcaactctctctccttgagcaatccaaaaaactaggaatgctggaaagtgagtgtgtacttacgcagtctttataatctactcatgtccctctctgaaagcactgattgcttgaacagatttaatagttctggttctgaggcaagatggaactgagtggtaaagagcccaggttctgtgtcatagaggctggggtgagaggacac

SEQ ID NO: 656978 - DNA, 572 bp, Homo sapiens
ctatctcgaatgatttgtttttctgctgttttcagctgattatatctgtcattgcttccaaaaacagccaccagtgccactcacactgtcatgaccactgatacaggcctccacggctcgctcgctctcctctccccctgccttttccctttcttgtcactcttgttgctactcagatttgtgagaaaagactggccttttatagacatcacttgccaagcacagtacttctttctatctttgttggctaacccatcactcactgtcctgcaggggtaatcttatgttcttccgcttccctttggctgagttctctgagggcctgctttttgctgacaaagagaggagttgtgtgtgtatttttcgggcaactctctctccttgagcaatccaaaaaactaggaatgctggaaagtgagtgtgtacttacrcagtctttataatctactcatgtccctctctgaaagcactgattgcttgaacagatttaatagttctggttctgaggcaagatggaactgagtggtaaagagcccaggttctgtgtcatagaggctggggtgagaggacac

SEQ ID NO: 656979 - DNA, 628 bp, Homo sapiens
ttaaaacaatagggtttatagaaagaaattgggttaagatcacagcacttaaaaagtttaccagtgatacataaaaaacagtattcagtatttgtaaaaattgtaacccagtttggcgtatgttaaatgattaaatgtatcttttcttgcaaaatatttggaatttatttatggaagtgggtattggaaagcttgcagtttgagaattattgtgaagtsgtagagggattgctatctcaaatctggaagtcataataccaggtatagatgggtgtgggcaataatacatgggaactgaggtaacgtgtagatatgaagtatgtctgtatgtgtgcatatacattttgtgtgttcctatggaactaggttcagatgagttaagttttctgtattcatctaaggtttttacacatgaaattgaacaagcaaatgtgaaatttaaattatgttccaattatttcctagtatatcaattactttggaacaaatttgcagtttcaaaataaacattatatcagaactgatagttttgtaaaaatatttataccagtttacaattgttatttgtaggataattcttctaaaataagcaactttgtcattactgaaaaaagaacctccatgtttt

SEQ ID NO: 656980 - DNA, 536 bp, Homo sapiens
tagttttcattttctagaattttatataaatggaaacatactttatgtactcattttggtatggtttctttcactcagagtaattatttaagatttgcctatgatgttccatgtattattttgttttatttttgcggaattaattagttcatggatataccacaatttgtttatccatttgcctattgatgatgaacttctagattgtttcaagttttggctattaaaaatatgcacgcttataaacaagttttgcagagatatatgctttcctttttaggaaagtacctaggagtggaaggcgtgrgtcatgtggtaggtatatgtttaagattttacaaaaatgtcaaattgctttccaaagtgttaataccattttaaattcctaccagcagtgaatacaagttccatttgttccacatacctgccaatacctctgttatgtgcagtctttttaattgtagccattctaataggtatgtagcgatatctcatcatagtattaatttgcatttacctaatttaaaataatgttg

SEQ ID NO: 656981 - DNA, 536 bp, Homo sapiens
tagttttcattttctagaattttatataaatggaaacatactttatgtactcattttggtatggtttctttcactcagagtaattatttaagatttgcctatgatgttccatgtattattttgttttatttttgcggaattaattagttcatggatataccacaatttgtttatccatttgcctattgatgatgaacttctagattgtttcaagttttggctattaaaaatatgcacgcttataaacaagttttgcagagatatatgctttcctttttaggaaagtacctaggagtggaaggcgtgggtcatgtggtaggtatatgtttaagattttacaaaaatgtcaaattgctttccaaagtgttaataccrttttaaattcctaccagcagtgaatacaagttccatttgttccacatacctgccaatacctctgttatgtgcagtctttttaattgtagccattctaataggtatgtagcgatatctcatcatagtattaatttgcatttacctaatttaaaataatgttg

SEQ ID NO: 656982 - DNA, 483 bp, Homo sapiens
ttaataccattttaaattcctaccagcagtgaatacaagttccatttgttccacatacctgccaatacctctgttatgtgcagtctttttaattgtagccattctaataggtatgtagcgatatctcatcatagtattaatttgcatttacctaatttaaaataatgttgagcatattttctttttctttctttcttttaaaaaatgttttaacttttattttatgtttaggagtacatgttcaggtttcttacatatgtaaacttgtgtcatggggttttgttgtacagattatttcatkacccgggtcttaggcctagtatccattaattatttttcctgatcctctccctcccccgaccctccccgccgagaggccccagtgtgtcttgttcccctctatgtgtccacgtgttctcatcatttggctcccatttttaagaacatggtgtatttgttgagcatattttcttatgtttattt

SEQ ID NO: 656983 - DNA, 474 bp, Homo sapiens
ctcttctcaatctcctcgtgtgagtttcagggactgtaccctataatgttgtttcttttcctgactgmagctggtttcctcacatggctgtgctcattagtacacagctactacttgatggtggtatctcttgagtttccactctctgcagctttcttctttcagagacgttgtcctaataaccctcgcctttgcttgccatgttgccagcttagtccttccaaagacagactgctaaggtctacttcggttcttactccctgtgctgtaacctggaaacagtctctagacagtattgtggagcagttgtgatgctcaccttctttgtttgacatctctcaaaaatgtctaatgtccaaaatcctgaaaactcttgctttatatattattttccagttttaaaaaaaaagcctcagaaaataatttaaatcttgtctctgttttctcatcctggctagaagcagaacaaaatgt

SEQ ID NO: 656984 - DNA, 371 bp, Homo sapiens
tccccactccagaactacaaaattagaatccrtaggggtggttctggaaatccgtgctttaccaaactttccagattttcatgcatcctaaagtgtgaatcagcatgggtatatgtacaattttgggagtgattacttagatgatggttgattttggaatttagtgtaatttaagagacatatctttgaaaagaggttacaacaaggaatttatgggtctttaaaaatactctggtttctgtaggaaggcactattgaaacaagagataccaggttgaaggcaattacaatattgtaactgacaaatgattttggcatgaactagattggattcattgatgataaaaaattgtattttttttttaaagatt

SEQ ID NO: 656985 - DNA, 380 bp, Homo sapiens
tcccttccttatactgtgggggtaatgtgtactctaaatacagtcagaatgaaatggcggcatcccaaggaatagaaatgagatatctagctaatcagcaccttgggaatagcrgaagtttgaggaacagtgactacaaaacagatttccttttagagagttggctaggccctacttctctgagagccatcttgccaatttaaacataaagctctaaggggaaataagctatatctttcttgggtgtgaaattcactgaaaagaatattagagcaggacctagacaggtcagtagaaatttgataaaaatgaaggagtaggaaatcttatatagaggaattatattttgcaatgcaaggaagtaaagaaaccctattaaa

SEQ ID NO: 656986 - DNA, 495 bp, Homo sapiens
ctctatgcctatgggacagatcctgcaaaatatccctggacactgcagctcagctgagcttcccttgttggcaatactctgtgcatgtttgctgggagaatttagcactgtctgtctgtatgactctgtgaggagagaacaacaggaagcttatgcctggtctctcctgaactctactgttcacctattcctttgcagattttcatgtgtattattttttytgtaataaactgcaattgtgattacaatagcttacatgagctctgtaggttctttcagcaaatcattgaacttaagaggatcttggggatttccaatacagtggtcttcaaaggagaacactcatacactgagtgggagtcaggagtgcttgagtctaccctgccctctgtcatgaatacaactctgtgggctatgcatccactcactttgctagattccagtttctttatctatataataaatctaaactatatgatttctaagttcaatccc

SEQ ID NO: 656987 - DNA, 495 bp, Homo sapiens
ctctatgcctatgggacagatcctgcaaaatatccctggacactgcagctcagctgagcttcccttgttggcaatactctgtgcatgtttgctgggagaatttagcactgtctgtctgtatgactctgtgaggagagaacaacaggaagcttatgcctggtctctcctgaactctactgttcacctattcctttgcagattttcatgtgtattattttttctgtaataaactgcaattgtgattacaatagcttacatgagctctgtaggttctttcagcaaatcattgaacttaagaggatcttggggatttccaatacagtggtctycaaaggagaacactcatacactgagtgggagtcaggagtgcttgagtctaccctgccctctgtcatgaatacaactctgtgggctatgcatccactcactttgctagattccagtttctttatctatataataaatctaaactatatgatttctaagttcaatccc

SEQ ID NO: 656988 - DNA, 608 bp, Homo sapiens
attgtatgatactaaatatgcaatttacctatgatattcctgggtagcctgtccaagatggcaactctcaaagcctacatctttgaatgcattgaggcatgtcataatacttcagtgccagtagttattgcttttgtttttgtttctttctccttcctaacatctgctattcaaaggttaagtaatcaacaaaatatttcgagctccctataaatatgacaatgtgttgagcactgtgaacaaaggagatatttacctgaagttataattatgcttttccttgttattattagaaagtatrtttaaaatattattttgcctaaatatgaagactgaaaagctttcaaggtattggaaaaaaacttctagcaattttaaaatcccagaaacatatttaagagaataattacatttgatgggtggtaaataatatcctcagaacatagtgtatgttttccagtttcttactgaattgattcttacagttaacagtaagatagaggcaggtacttgcttgttatgtagccatcatgtcttgttaataattattatgttttcacctacaggggcttttcagattcaaggaagcaggaccagtttctacccca

SEQ ID NO: 656989 - DNA, 632 bp, Homo sapiens
aagcttaaatcttagaaggggcctcagccattcactatgacacattaattttttgaattgaatgaagatggttttaaaagaagtttactgaawtagtacttttttgtttgcaagaaaaagatatttttctcatcaactcatatgaggaaatcatgggaatgctagaagtgactgctgctggcctcatatccttccaccttcaccaccagaaaagtttttcccagctcagtgtagaaaaactattggcctggtgcagtggctcatgcctgtaatcccagcactttgagaggccggggtgggaggatcatgaggtcaggagttcgagaccagcctggcaaacatggtgaagccccctctctgctaaaaatacaaaaatttgtcgggcgtggcggtgggttcctgtaaatcccggctactcaggaggccgaggcaggacaatcacttgaacctgggaagtggagcttgcagtgagccgagatcgcacctctgcactccagcctgggcaacagagcaagactacgtgtgaaaaaaaaaagagaaaaaaagctattgccagacttggatcagaatttcattcctaacagtgcttctcaaactttaatgtgcatataatcaccttggagctttttaaa

SEQ ID NO: 656990 - DNA, 632 bp, Homo sapiens
aagcttaaatcttagaaggggcctcagccattcactatgacacattaattttttgaattgaatgaagatggttttaaaagaagtttactgaaatagtacttttttgtttgcaagaaaaagatatttttctcatcaactcatatgaggaaatcatgggaatgctagaagtgactgctgctggcctcatatccttccaccttcaccaccagaaaagtttttcccagctcagtgtagaaaaactattggcctggtrcagtggctcatgcctgtaatcccagcactttgagaggccggggtgggaggatcatgaggtcaggagttcgagaccagcctggcaaacatggtgaagccccctctctgctaaaaatacaaaaatttgtcgggcgtggcggtgggttcctgtaaatcccggctactcaggaggccgaggcaggacaatcacttgaacctgggaagtggagcttgcagtgagccgagatcgcacctctgcactccagcctgggcaacagagcaagactacgtgtgaaaaaaaaaagagaaaaaaagctattgccagacttggatcagaatttcattcctaacagtgcttctcaaactttaatgtgcatataatcaccttggagctttttaaa

SEQ ID NO: 656991 - DNA, 448 bp, Homo sapiens
tgttatcagtccgactttataaggaacttctctgtatacttacttagtagatacactttctaatagcatctaatattactgacactgtgcacatttttacacataacttgcagaagcttaccaaaaactggaataaaaacattgaagaaaaactttgaagaaaaacttcagttgtagaaagcttaagtaacacagtgcattaaaatgytgtgaccctactctataacaggaattctcctaggcactctgcacatattctaattcgtagtatagttgtaaggtatatgtaagtaaccatctccatcataggcaagataacccatttttgctagtttaagtggaaaaaggattcattaaattattacacagaatctttggagaggccaacaattcacattttgatgtaattaaaatcacaccacagttggatatagcaggtacagagatt

SEQ ID NO: 656992 - DNA, 425 bp, Homo sapiens
ggaacttctctgtatacttacttagtagatacactttctaatagcatctaatattactgacactgtgcacatttttacacataacttgcagaagcttaccaaaaactggaataaaaacattgaagaaaaactttgaagaaaaacttcagttgtagaaagcttaagtaacacagtgcattaaaatgttgtgaccctactctataacaggaattctcctaggcactctgcacatattctaattcgtagtrtagttgtaaggtatatgtaagtaaccatctccatcataggcaagataacccatttttgctagtttaagtggaaaaaggattcattaaattattacacagaatctttggagaggccaacaattcacattttgatgtaattaaaatcacaccacagttggatatagcaggtacagagat

SEQ ID NO: 656993 - DNA, 179 bp, Homo sapiens
atattttaaattgcacaccattctgaataccatgatgaaatcttgggccatctgctccatcaagctctggatatgagtcraccctttgtccagtgcatccatcctgtttctacttcccactcattagtcacttagtggtcatctcagttctcagatccactgttggggtatcacagtgc

SEQ ID NO: 656994 - DNA, 525 bp, Homo sapiens
ccactccccataaatattttgcaagttttgtaagttccggtttctccttcaatgcagctgcaaggtcacaagctatgctggatattacgagacctgtcactatttaattaactgtccttgttctgcttctgtaagcttgcttatgaaaatcaagccctttctttgttctaggctcagctttttggatatgaatccactgagccattgtacactttaataaaaatcctcctgtaatacccatttggtctttccggtcctctaattaccgcaacagtacaggaaaatgtggaagcagctttggaactgggtaatgggtggaggttggaacggtttggagggctcagaagaagacagaaagaggagagaaagcttggaactccctcgagacttgttaaatggttgtgacgmaaatgctgatagtgatattgaaagtgaaggctaggctgaggaggtctcaaatggaaatgaggaacttattgggaactggaataaagttcactcttgcttgctatgctttagtaaaga

SEQ ID NO: 656995 - DNA, 540 bp, Homo sapiens
gccaggctggtctcgaactcctgatctcaggtgatcccctcgtctcagcctcccaaaatgctgggattacaggcgtgagccactgcacctggcctgagccaccatgctcagcctaaaatattttgaagaagatgtaatatttaaaaatcagtttcaatttttaaaaaacagaaaatttaaaacttagcacgtagttcttgactacttatcattttatactgttaaatgtcagttcaacctcaggtattctaacttccgaaaacttacatagagagrttaatgagaacaaaagtcatgctcatttctcttatataatatgtataacatgattttccaggtcagttattaatttttgagggacatgtaaaaatagacctggaaatattcactaaatctctgtggttgactagacaactcattgtaaagaaagaaactgagaaagctgttaagcatgcctctaacatctgtatcatgagggtaagcaaaatattttcataactttatttgaatttagtttataaaagcaggccagtgttgaaa

SEQ ID NO: 656996 - DNA, 496 bp, Homo sapiens
agaaaattaataatgcttttggtctgtagaacttagaggagatggtacacgtttattaacaccacatgccaaatctgcttatgtctttttcaaacatagttaatttacaatataaaacttttaatttcttagaatctctagattaacactaagatcaacagattaaaaaaattatcagagacgacttgtatggtctcatatctgagcaataggctaattgactctggatggcatcattggcactgtgatctttagggayatagatatatatttacttaacatatagtgtcagaggggaacaggaggctgaatggctgaatatatatgtctcccttgccaacataccaggcttctccagtcataaacctatagctacagcaacaactgcatcataagcggcatctttgcttaagaagcagcttctcatagacctgctcaattctgtaagaatgttccatgagggaaagagatgatacatagaaaacaacttggctgt

SEQ ID NO: 656997 - DNA, 571 bp, Homo sapiens
ccctgtgattttttttttgtactttcctgcactggttaccttcttactctaaaatcctcttgtcctcaaggcttaacccaagtgcattgttagcacatggagagtttttttttttttttaacagtgattctcttaagcacacagagcttccccactttattatagttatttatgcgcatgaattatttttctcttaagcagcaatccccttagaaacagaatctgcacatgtcagatatacttcattcttttatatctgtagtatggtgctttgctgttaatgagcccttaataaatacttgatgaataaaaatgagctgttgacttaggtgatgcatagtgttctgcagtggtccaygtctggggtggccatcaaagatctgaaacaaatacaccagtaaaacagaatagagggcccagaaaaaaagccacacatctacaaccatctgatcttagataaagttgacaaaaacaagcaatagggaaaggactccctatttggtaaatgaagctgagataactggctagccatatgcagaaaattgaaactggacctcttccttacaccata

SEQ ID NO: 656998 - DNA, 511 bp, Homo sapiens
acctcttccttacaccatataygaaaacccaaggtggattaaagacttaaacgtaaaatctaaaactgtaaaaacccttgaaggaaacctacgaaataccattctggacatcagccctggaaaagatttcatgatgaagaccctaaaaattgcaacaaaaacaaaaattgataaatgggacctaattaaagaggtacacagcaaaggaaattatcaacagagtaaatagacaacccacagaatgggaaaagatacttgcaaactgtgcatccaacaaaggaagaatgtctttagatattaaaatcagacattagatttagttttattagatgttagatatgaatattagatattaatattagaatctttaaggaacttaatcagattaagcaaaatcaacccctttaaaaagtagtcaaaggacacagacatttctcaaaagaagacatatacatggccaaaaaacatattaataaaagttcaacatcactaatcatcagagaaatgcaag

SEQ ID NO: 656999 - DNA, 552 bp, Homo sapiens
cacaactccatgtacacttgaatttttgctttctatctcattccttgtttttaaacttaaaaggtctccctccagcttcattgttatctgtctagatccccgtcaccatccagttcccagtggaaattcctctaaaccatgaacccttcagtgaactacttggttggaagtaatctctcccctctcagaaatctcttgatatttgatttttcttcttttagcttcttgtgcttgtacagtatgtttatcatttcatagcattcttatattaatcacattttaaaaaattataaagtctaatgcaaaacattccttaattttgataaatattatttggttatgcaacatgttactgtaaaggaagccaggtgaagggtatatgaggactttctgtactattktttcaactcttcagtgagttaaaactttaaaaaaaaccttcttaatagaacatgtaattagttattatacttaatttaaatggaatttttgaggtcagccaaaaagatggtgttacataattagaggtatgcaggagtggacaaacaagat

SEQ ID NO: 657000 - DNA, 660 bp, Homo sapiens
ccagaaatgtgtggagaaatacctctcttgttctacttggagagtgagatgcagccttcagaagggaattagtcaagagaagacaagtcgtcatttcaaattttagcttagcaaagagcttttcctggtctcatgttaaacccatttcaatgatagaagctttggggttaatcagcagctccagccttaattatctaaaacaggacaaatcttgttccgaaatcttgttctgaaagcataatgtaagaggttaggaaggtaggtttcaggggaggatgaataagcttattgatgcatggtaattgtccttgcagctatcttgcaaatgaattacactttgcaccctcccacttcctcttcggggcagtttttaaccaacagacagacttattttataaggcttttaaaaattattgcattgctccgtttcaataktagtaggggtttattagccagaggttattgcctgattccatcattcttttaagaaatttctttggagacatatttctccacatttcaagtggttatggtagaattgattatcaagatgccaagtctctcctggttagcaggtgggcatgtgacccaaagctcagccaatcccactcttcctgaaatctgaatatttagtaaagtgatacaagcagaggacatggt

SEQ ID NO: 657001 - DNA, 374 bp, Homo sapiens
tattagctaataggcttgacaaaaccttagtcatgacattccacaatgctcctggcaattamtaggaaccaagcactctacttgccatggtttcttattgcttatcttttcctgtaagggctgttggagctgggaagcatttgagatgtgaggacaatctccaggggctggactagtggccaattagaatgcaaatgactgagaagtatattactgaacctggaagatcagcgactactgcagcactgatgaggagtggcagaagaagaagggaaagaatcactatgtggtagcaaaggaggtgcaagtgaccaagatgtatttaggatatgagttgggataaatgcacagatgtcaaggtgttcaaagacagg

SEQ ID NO: 657002 - DNA, 389 bp, Homo sapiens
tattttgaatgcttactattagctaataggcttgacaaaaccttagtcatgacattccacaatgctcctggcaattactaggaaccaagcactctacttgccatggtttcttattgcttatcttttcctgtaagggctgttggagctgggaagcatttgagatgtgaggacaatctccaggggctggactagtggccaattagaatgcaaatgactgagaagtatattactgaacctggaagatcagcgactactgcagcactgatgaggagtggcagaagaagaagggaaagaatcactatgtggtagcaaaggaggtgcaagtgaccaagatgtatttaggatatgagttgggataaatgcacasatgtcaaggtgttcaaagacag

SEQ ID NO: 657003 - DNA, 532 bp, Homo sapiens
tttagcttttgtctctctttctcagcctagtgaagagtttttccttccccaggctgatttctcttagagaagggaattctaacatttctcacatctcccttgctctattctctttcttcttcccacactgggtgagataaaaatcttcttttggcttataacaaaacctattgtcaatgtccctgggggctggttcttgatatgttgacaggaaagaaggaatttagaaacttttctttggattattttaatggctattttatattatgaatttaagaataaatcatctttgatactgaaagttaaaatatgaaacctacattctcggtaccatccrtcttctctctaattcctatcaactgatttgatgaatgggaagctacaggacaaaaagatttacatggcttgaaaaagttttggaaccatcacagattatccctgattattatattgtatagaatatatatgtaggtcattatgagttaaggggatgatagaaggaattacaaaaggttacttattttatgttggg

SEQ ID NO: 657004 - DNA, 532 bp, Homo sapiens
tttagcttttgtctctctttctcagcctagtgaagagtttttccttccccaggctgatttctcttagagaagggaattctaacatttctcacatctcccttgctctattctctttcttcttcccacactgggtgagataaaaatcttcttttggcttataacaaaacctattgtcaatgtccctgggggctggttcttgatatgttgacaggaaagaaggaatttagaaacttttctttggattattttaatggctattttatattatgaatttaagaataaatcatctttgatactgaaagttaaaatatgaaacctacattctcggtaccatccgtcttctctctaattcctatcaactgatttgatgaatgggaagctacaggacaaaaagatttacatggcttgaaaamgttttggaaccatcacagattatccctgattattatattgtatagaatatatatgtaggtcattatgagttaaggggatgatagaaggaattacaaaaggttacttattttatgttggg

SEQ ID NO: 657005 - DNA, 532 bp, Homo sapiens
gtaaagccatccagtgatgggcttttctttgttgggagcctatttattactgattcattctcattactcattattggtgtgttcatattttttattccttcctgattcagtcttgataagttgtatatgtccagaaatttactcatttcttctactttttaatgtatctttggtcataatagtctctatagtaatcctttgtgttatrtttctgtggtatcaattgtaacatctcttttttcatttctgattttatttatttgggtcttttttgttggttagtctacctcacgatttattgattttgcttatcttttcaaacaatgaactttttgtttcattgatcttctgtattgatattagtctctgttttgtttagttttgccctgatgtttattctttctttcttttttttctaataatttgggatttggtttgttcttacattcctagttccttgagctgcattgttaggttgataacttgaaatatttctacatttttgatataggtgttcattgctataaacttt

SEQ ID NO: 657006 - DNA, 373 bp, Homo sapiens
tgaggactatttttcattttggtataaatattcttgaaccttttttttctggcacataattaaattacttgaaaagaattcgatcatgtgggtcttgctttttagtaggcagaatcagggctgtgtttaggttagggttaatctttccccactactaatgcaagatgagattttttttttttaatctaaggcaggtaaggacagtaatcttgtttagccttgtatgagccgtattccgttccttataatcttttcaggtgaaccttcccacaatctgaatttccatacacaaatgcaatggtcaatattcaagagaatwttgacagggatcctttcagatacatgatattcactctatgtgcagttctttctt

SEQ ID NO: 657007 - DNA, 554 bp, Homo sapiens
atcctactacattttgactagaagctggagtttctacattttttatttttatatatcatagatttaaccttttgtatgtgatatattttgcaaacattttcccccaatttttatttatatttgwctttgcttgaggtgttttatcaatgtaaaactatgttctttttaatttatgtgtagtgaaatttatcaatatactcattttgtattctgtattttgctttatattgtctatttataatagatattttgtattctgtatttgctgtataatattaaactattatgttacctatacattcaggtaatagaagaatactgcatgttttctcttagaacttgggtatgtgaaactttatagaatctgattttatccctttccaaatggctatccagtagtcccaaaatcatttataaaaatatgtttgtccctgttatttgagataattatactgtcctcccattcatccaatgttttaaaattatactaattttaatagtaattcaaacctaatgatctggagataatgttttttatataaaaggtcaagtag

SEQ ID NO: 657008 - DNA, 554 bp, Homo sapiens
atcctactacattttgactagaagctggagtttctacattttttatttttatatatcatagatttaaccttttgtatgtgatatattttgcaaacattttcccccaatttttatttatatttgtctttgcttgaggtgttttatcaatgtaaaactatgttctttttaatttatgtgtagtgaaatttatcaatatactcattttgtattctgtattttgctttatattrtctatttataatagatattttgtattctgtatttgctgtataatattaaactattatgttacctatacattcaggtaatagaagaatactgcatgttttctcttagaacttgggtatgtgaaactttatagaatctgattttatccctttccaaatggctatccagtagtcccaaaatcatttataaaaatatgtttgtccctgttatttgagataattatactgtcctcccattcatccaatgttttaaaattatactaattttaatagtaattcaaacctaatgatctggagataatgttttttatataaaaggtcaagtag

SEQ ID NO: 657009 - DNA, 513 bp, Homo sapiens
aatatttattgttaacatatttatacaaccccaaatgatctacagattaaattgtatccacatcaaaatcccagtagcttttttacagaaatagaaaaaaaatcctgaaattcatatgtaaccacaaaagacccagaatagccaaagtatattgagaaagaaaaacaaagctggagatattacacttgctgatctcaaaatacattacaaaactgcagtaattaaaacattatagtattggcataaatacaggcatacagaccaatagaagagaatagagaacccagaaataaagttgcacatgtgyggtcaacttattttcaagaaaagtgccaagaatactcatcgaggaaagtagtttctttaaaaatggtgttgggaaaacttgatatccacatgcagaagaatgaaattgaaacctcttacactacccacaattatcagctcaaagttgcatgaaagtcttaactaagacttgaaactgtaaagctgtaaatctcctagaaggaaaca

SEQ ID NO: 657010 - DNA, 598 bp, Homo sapiens
atttccattaggaagccttcctgtggctctaagacttggctgatgttcccttatgtatctccgtagttacttcacttaatatgtatcaccataattctcttctcagaaagtttattcagtcaggctgttaggatcaacagctataggagaaaggaaggatgccagattgggaagaagagagggactatggtgccgtcacaacaaggtcagtgagcccttgagagttgtgctgagttgaggtgagggtgtcaggcttctacacacctgttagctatcagctgatcagctatcagccctccaaaaaccaacccagctcatggaggaataactccctcagccttgaaaggggatctgattgacagagttcataacacttactctagatcaactttatattttccactctctagctcaaactcagtaaggctcaaatacaggtaatctattagtatttatttgttaggcaagkctttctagttaaatgcaatctcatcatgtttagcagaagtattacagaaggtttatttcagccttgaattccatctaccccaattcattttgaagttagaaagtgtagtgttaaggtaaaatgaaaata

SEQ ID NO: 657011 - DNA, 390 bp, Homo sapiens
aagcttccaaaaaagttttggagacacctaagaggttctcagaccactctttgagaacttctgagcaagactatcctagagtcctcaaatctcaatagtttacaaaaatgccasctaagtctcagagacttattacaacaaaggtttgtttgcatcttgctctcactgcgtttcatgtggatcagctggggtttttactccatggtgccctcactcggcgacacaggctgcctgagcagccactgtctgggtcttgcccctcactggagaagagcaaaaggatcacagtgataaatgggctagttctaaaaggttctgctgggaagtcacctcactggtttcacacttcattagccagagcaactacttcaaagaggtgacaagcagtgc

SEQ ID NO: 657012 - DNA, 562 bp, Homo sapiens
caattgagagcatattcccgcttccttagatgctcycccaaatcaccacaaagcccaaatcgtataataggttctttcttaacacccttttaccgaggcagcccattcttcctcaaggtgtgtgttcttcctcactgcaaccagaaataattccaacttggttaactacagatgtgttcctggaggtctctgcctgaaggacattgacacttgagaagcttttatttcttgaagagtctatcgaaatcccaaaactctcaggatctggtgacactgaggagacagatattttaccattagtgtttcccttcacccattttttgggaaagatagtacagttgaccctggaacaacacaagtttgaactctgtgcatacatttatacacgggtttttttctacatatattggaaaaagttttggatatttgcaacaatttaaaaaacacagataaactgtatagcctagaaatattgaaaaattaagaaaagtatgtcataatgcataaaatatgtagatactcatcttttatcatttaataccctaaaatatacacaaatata

SEQ ID NO: 657013 - DNA, 580 bp, Homo sapiens
atgttcagctggtctgaacaaaatggtcagatggtagaaatgataagaggtatggcaagagttcctactatctggaaacatggcagtgtagtggcacttcaacctcaaatgatatggcccgctctaggggctaaacataaggatttgtggaaactattaatggctcttaataagatccaaatttgggaaagaataaaaaagcatctagaaggacactctgcaaacttgtctttggatattgcaaaattaaaagaacaaatatttaaagcatcccagacacacctgaccttaatgtcaggaactggagtgcttgaaggagctgcagacagattagcagctagtaacctgttaacatggataaaaacacttggaggctctgtgatttcgatgatgattgtgcttttaatctgtgttgtttgcctttatatagtctgcagatgcagatcctgacttctgagagaagtagctcaccatgataaagccgcctttgcttttattgtcttgcaaaaataaaaagggrgaacatgttgggaacaggcccccaaatctggccataaactggccccaaaaatggccataa

SEQ ID NO: 657014 - DNA, 523 bp, Homo sapiens
gtgaaaccccatctctactaaaatacaaaacttagccaggtgtggtggcatgcacctgtagtcccagctactcggggagctgaggcaggataattgcttgagcccggggggcagaggttgcagtgagccaagatcatgccactgcactccagcctgggtgacagagagaaactccgtctccacaaaaaaataaaaataaaaaagraaaagaaaatgcgtctatcatcttagagaatacatgtatcatcaggaacagcatgttggttgaaatatgaatgttaaaggtacttctggtgagaacttggacagaaatgagaacatggtattagaaactagaagaaagatggaccttgttatacagtggcaaagaaatttgttgaattggattctcatgtttcatggaaagcagaacttataaatgatgaacttggatatttagctgaggagatttctaagcaaaatactgaaggtggcctgatttcttcttgctgctcatagtaaaatatgaaaggagagagataaa

SEQ ID NO: 657015 - DNA, 551 bp, Homo sapiens
tattttatgctaagtattgaaatactttgtagaagttctggattatactatttcctttaaagagcattatgttgttatattctggcagacagttgtatccctggctgattcctttggtcctcaaagttttttttgttttatgttaacactgtgagggtcttccttgtcctactgcacttagcaaaagtttccctctccttgggtttctccgccttgcaccacagtaggggaagtgcagccaatcagaggacagggcaaatagaggcttaactcttgagtttcttccttctcaagaattatagatatatactgctgcttctcaatgcatgaaaatagttgtttcatgttttctcccrttttatagtgttcgtgacagaactgcaggtttggtaccagttactttgcagctagaggttaaagtctttgccaagcggacatttgacttcaaattacaaggttttccattacactttccaagcactgtgattatctgagctttttccatgccttatattacacttgtaatgatcttccgtaaaaagtttctaaac

SEQ ID NO: 657016 - DNA, 627 bp, Homo sapiens
ttgttattgtttgttttcatttccctcagagtccagtctggctcatatctcagcacagggtggtttaccttcmttctggccatggacgcctgttatggcattcacgtctacgggatgaccatgactcctactgcaagtaagatcgggggaaattatttttatgcagctccaattcggagatcttgtcaaaatatcacaattcattttaataccataaatctgagaaacagataaagcaacaattatttcccagtgttctttgctgacatgacattttattgtcagtgcgtcaagttgtgacttctaggggtgagaaaaagaaaaatatttaccagtctaatgtcaaatgtcaggaggaacacttttcccttaatcagtggcatagcagggacttttggcttgaaaatacagaagaagtttagtggttgtgtaatttgcaaaagcaagtttgtcatttctgctgctctgatggcttgatggatagctatctactcaatggttagttagatttgatcatgaaggacaaaatgtcctgcagcctcagagaaactgacagcttaacaagaattcctggaaattatacttcactagtaagtgagtaatctgccagatccttatttaaaatga

SEQ ID NO: 657017 - DNA, 435 bp, Homo sapiens
cctcttggccatcgaggcctccggactgtccggacgcctcccaccccacccgctgctggagccgtcggggcgccccggaacgtggcgggggctgtygcctgatgactttaggctcgcgcctacagcgcgccaaggaggcagaggcccatgtgccgggttccatccctgccgcccccccgctccgtgcctggcacagagaacgtgacaggcaaattctgatccattgaaattatggatttccagccgggcgcggtggctcacgcctgtaatcccaacacttttggaggctgaggcgggtagatcacgaggtcaggagatcgagaccatcctggcgaacacggtgaaaccccgcctctactaaaaatgcaacaaatcagctgggcgtggtggcgggcgcctgtaatcccagctacttgggaggctgaggcaggagaa

SEQ ID NO: 657018 - DNA, 435 bp, Homo sapiens
cctcttggccatcgaggcctccggactgtccggacgcctcccaccccacccgctgctggagccgtcggggcgccccggaacgtggcgggggctgtcgcctgatgactttaggctcgcgcctacagcgcgccaaggaggcagaggcccatgtgccgggttccatccctgccgcccccccgctccgtgcctggcacagagaacgtgacaggcaaattctgatccattgaaattatggatttccagccgggcgcggtggctcacgcctgtaatcccaacacttttggaggctgaggcgggtagatcacgaggtcaggaratcgagaccatcctggcgaacacggtgaaaccccgcctctactaaaaatgcaacaaatcagctgggcgtggtggcgggcgcctgtaatcccagctacttgggaggctgaggcaggagaa

SEQ ID NO: 657019 - DNA, 543 bp, Homo sapiens
atccagggaaaatgtgtcactctcagggcaaagacaatcatctgcttctactggtaccaggaagaatgtcttccaaacaccaaggagggaggggtcatggagaccactgacttattaattttcttccattgctccactgaatcccagaaccaccggacagtgccactgaggatcctgaaagccaagctctacctctttgaagaaaaatttcttgtcacttaccaccctaaagcaatgagaatgagagtgtcctgtggccccagacagcctccattctcagttyacaccataaacatgctgggggaacactaaagggactccctaaaatcgatgccattattttttattttgaaaattttctaccagaaatggaccaggtgctgtggctcatgtctgtaatcccaacactgctggacaccaaggaggcagatcacttgaggtccgtaatttgagaacagcctggcctacataatgaaaccatgtctctactaaatataaaaaaattaagaatcatttgactccagaaggcagaagttgcaatga

SEQ ID NO: 657020 - DNA, 543 bp, Homo sapiens
atccagggaaaatgtgtcactctcagggcaaagacaatcatctgcttctactggtaccaggaagaatgtcttccaaacaccaaggagggaggggtcatggagaccactgacttattaattttcttccattgctccactgaatcccagaaccaccggacagtgccactgaggatcctgaaagccaagctctacctctttgaagaaaaatttcttgtcacttaccaccctaaagcaatgagaatgagagtgtcctgtggccccagacagcctccattctcagtttacaccataaacrtgctgggggaacactaaagggactccctaaaatcgatgccattattttttattttgaaaattttctaccagaaatggaccaggtgctgtggctcatgtctgtaatcccaacactgctggacaccaaggaggcagatcacttgaggtccgtaatttgagaacagcctggcctacataatgaaaccatgtctctactaaatataaaaaaattaagaatcatttgactccagaaggcagaagttgcaatga

SEQ ID NO: 657021 - DNA, 501 bp, Homo sapiens
gagaaagcaggttcctgtttcctcagtggaccctgtatggtgagcagtcctttcccagaggatctgggcaatggtcaaggcctctcatgggcaccatcagaagcctctgagccaccctagctccccaaccccaccactcctcatgagccagctgtcccttccctggatgcctggacccttcccaccaggccacctgagtcacctcacctgaggcaaaccttctgggccagcagtgtatcaagtcccttcagcacagcttgcaaggtctccagatgaggtgtcttcatcagggatcccagagggaggtggaggaaggaccaggcctgcaccatcagcttcagggcctcacagcktctcctgctgacggcctccatgaacatcagagggaagacctccctgggcagctcgtccaggatgaagatggtcaagaactggttcctcagtaggctctgccctgccagctccaggagtctggatggggactggaggctcattctgaca

SEQ ID NO: 657022 - DNA, 524 bp, Homo sapiens
gagaaagcaggttcctgtttcctcagtggaccctgtatggtgagcagtcctttcccagaggatctgggcaatggtcaaggcctctcatgggcaccatcagaagcctctgagccaccctagctccccaaccccaccactcctcatgagccagctgtcccttccctggatgcctggacccttcccaccaggccacctgagtcacctcacctgaggcaaaccttctgggccagcagtgtatcaagtcccttcagcacagcttgcaaggtctccagatgaggtgtcttcatcagggatcccagagggaggtggaggaaggaccaggcctgcaccatcagcttcagggcctcacagcgtctcctgctgacggcctccatgaacatcagagggaagacctccctgggcagctcgtccaggatgaagatggtcaagaactggttcctcagtaggctctgccctgccagctccaggagtctggatggggactggagrctcattctgacaaatctgcaaggaaaaactctaga

SEQ ID NO: 657023 - DNA, 605 bp, Homo sapiens
tggacccacgtgggttcttggatttctttcttcaccgggtcccctgcaagtatacagtagatgcatcaactctagaagagcaaatggtgatgagtgaagacccagaaccgtctcaggcatgcacatggaaagagagagagcggtccctggaagcacaggcctgggggtggttcctgggcacttctgtctcctctaataaaagaggycagtgactttggccacagaatacacatccacttctcatgggttcatatccaaagaacaaactccttcagactcgctggtccatgcactcgagatccccagggtatcttgagttattatgtcaaaaggagagagaaaccagctaacactagtcctaatacttatacgaatacaaagagggatgttttcttcttgctgttccagggaatgtgctgagttaacaccttttttctttttattggagccgctgtggcagggaagacagtggtgaggggcttcctttgagtaaaaagcaggtaaattcagcccctgcttgctccactgtctgcccctccagggcctctgtgtcctgatgcagagtccagcctgttctcaccaggctcgcattccttatgccaaga

SEQ ID NO: 657024 - DNA, 605 bp, Homo sapiens
tggacccacgtgggttcttggatttctttcttcaccgggtcccctgcaagtatacagtagatgcatcaactctagaagagcaaatggtgatgagtgaagacccagaaccgtctcaggcatgcacatggaaagagagagagcggtccctggaagcacaggcctgggggtggttcctgggcacttctgtctcctctaataaaagaggccagtgactttggccacagaatacacatccacttctcatgggttcatatccaaagaacaaactccttcagactcgctggtccatgcactcgagatccccagggtatcttgagttattatgtcaaaaggagagagaaaccagctaacactagtcctaatacttatacgaatacmaagagggatgttttcttcttgctgttccagggaatgtgctgagttaacaccttttttctttttattggagccgctgtggcagggaagacagtggtgaggggcttcctttgagtaaaaagcaggtaaattcagcccctgcttgctccactgtctgcccctccagggcctctgtgtcctgatgcagagtccagcctgttctcaccaggctcgcattccttatgccaaga

SEQ ID NO: 657025 - DNA, 561 bp, Homo sapiens
cgactctttttaaaggtttgggttggtgatgactgggattgagggacaaaggcatagctgtctctttagaaaacctcacaattccttcagggacagagattaacttaaggtgaaggagagaatactccaagtcattactttagaaaaactcaaaacatttggttgaacatgagcaacaactatctckctgaagaagacacatcgaatgtgtctacttctactcttctgagtttagttttcaggcaattttaagccaggatgaattagacaaaaccggaaggttcaaaggaaagagaaatgggtttgttgagggtagatctactacgatggcatggaatgggtagaccagtgaaagacacaatctcaggaaagtggttgttgagttgggagtacagattgcatagtgttttcccctcttgttttgaaaaaactacaggcttcacccactcaagtagatgaaaaatccttcattaaggtggtatagagatgggaggaaagtttgcaagggccaaaggatggagattttgattttctgtgtgttatttttatatcctttactca

SEQ ID NO: 657026 - DNA, 451 bp, Homo sapiens
accatcctggctaacactgtgaaaccccatctctactaaaaatacaattagctgggcgtggtggygggcgcctgtagtcccagctactcgggaggctgaggcaggaaaatcgcttgaacctgagaggcgggggttgcagtgagccgagatcatgccactgcactccagcctgggtgacagagtgagactgtcaaaaaaaaaaaaaaaaagatacaaaatttccagataataagaagcccacacctaggtacactgtatgaaactgcagagtgacaaaggcaaaaagatttttaaatatgttccagttgggaagacggacaattaacaagcaaaattataatttcactagcagtaataagctccatgaggataataaaacacgataatgagacaaagagttttagatagggtggtcaggaaaggccactctgagtaggtgacatctgagtag

SEQ ID NO: 657027 - DNA, 451 bp, Homo sapiens
accatcctggctaacactgtgaaaccccatctctactaaaaatacaattagctgggcgtggtggcgggcgcctgtagtcccagctactcgggaggctgaggcaggaaaatcgcttgaacctgagaggcgggggttgcagtgagccgagatcatgccactgcactccagcctgggygacagagtgagactgtcaaaaaaaaaaaaaaaaagatacaaaatttccagataataagaagcccacacctaggtacactgtatgaaactgcagagtgacaaaggcaaaaagatttttaaatatgttccagttgggaagacggacaattaacaagcaaaattataatttcactagcagtaataagctccatgaggataataaaacacgataatgagacaaagagttttagatagggtggtcaggaaaggccactctgagtaggtgacatctgagtag

SEQ ID NO: 657028 - DNA, 451 bp, Homo sapiens
accatcctggctaacactgtgaaaccccatctctactaaaaatacaattagctgggcgtggtggcgggcgcctgtagtcccagctactcgggaggctgaggcaggaaaatcgcttgaacctgagaggcgggggttgcagtgagccgagatcatgccactgcactccagcctgggtgacagagtgagactgtcaaaaaaaaaaaaaaaaagatacaaaatttccagataataagaagcccacacctaggtacaytgtatgaaactgcagagtgacaaaggcaaaaagatttttaaatatgttccagttgggaagacggacaattaacaagcaaaattataatttcactagcagtaataagctccatgaggataataaaacacgataatgagacaaagagttttagatagggtggtcaggaaaggccactctgagtaggtgacatctgagtag

SEQ ID NO: 657029 - DNA, 508 bp, Homo sapiens
gggctccagccccctgcacgtctcttatttctcacgagagtcagccttgttctcccagcctgaccatcaagcacccctgggcaggactctgagtcccagctctggctctccagcatctggytcagggctgggcacaaagctgtctcctgttaaactgttgaatgacacatatttgtgtttctagttgtgctcagtgaaaggctagggacacataggcagcatcttgctaatctgctcagcaattccatgaggttgtcattcactgattcattcattcattcattcattcattcattcacccatccaacatatttcttgagcaccttctgtgaatcaggcactgcattgggcgctgggatgtggtggggtccatggcttcctgtgagaaatcgaggcacacagtgatgaaggggcttgctcaaggccacacacctggtttgaggtatttaggattcagacccagacctgtctcactcttagtattgagctcctaactgctgtgcaaact

SEQ ID NO: 657030 - DNA, 508 bp, Homo sapiens
gggctccagccccctgcacgtctcttatttctcacgagagtcagccttgttctcccagcctgaccatcaagcacccctgggcaggactctgagtcccagctctggctctccagcatctggctcagggctgggcacaaagctgtctcctgttaaactgttgaatgacacatatttgtgtttctagttgtgctcagtgaaaggctagggacacataggcagcatcttgctaatctgctcagcaattccatgaggttgtcattcactgattcattcattcattcattcattcattcattyacccatccaacatatttcttgagcaccttctgtgaatcaggcactgcattgggcgctgggatgtggtggggtccatggcttcctgtgagaaatcgaggcacacagtgatgaaggggcttgctcaaggccacacacctggtttgaggtatttaggattcagacccagacctgtctcactcttagtattgagctcctaactgctgtgcaaact

SEQ ID NO: 657031 - DNA, 590 bp, Homo sapiens
atcaggtcatcccaactcctctctcccccaagggagctgaccacctcaccagggtcatggggtgagttggctgaggggttcgcgttgcagcaggtgggcttaggtgctcctcccatcttgcatgactggagggaatggagcgcctcgaactgggatgaaggaaagagcacactctctccccttctggctcaatttgctcagcaacagcataatgaagcaatcagtggcatctctgacaggcctggacacgccccagcacacgatggcaaattcaggcctgttctgagttttgtctgacatgaagaaaatgacagaaagcatccttgaagaagaaagatagaatgggagtgggggctcttacgttagacctaaggggatcttccctacaaaaggaattgtccagccccasgataggtgggaaaacctcacttgagagcagattcctgtgaaaagggcagggaattctcaatgggcctttctcatgcaaacccattgtgcaatagaggaactgtccaaaggagctcaccccaccctccaacttcagagctggaagggccttgaaacagaaaatctcttagatcaacaccccc

SEQ ID NO: 657032 - DNA, 628 bp, Homo sapiens
cattaccactataactatactgcttataaatctctgcatttatagaaaataaccttatattcctttcatttaagagctaaagagttgttatgactaggaaagttactacaaccggcccccattgaaagaagaggtgtagactgagcacacccagtatatggaaatccatgattagagaagaaagcctagtatatggaattcagtaacatttattaagattgaatattgtgttgctatttgcatatatacaaacatttgtgcctgtattttgaataaattataattttrctctacatgtataattcttatatcccagatttaagcaacctagctatttttctccataggagcaatatttattgataatcaaaataaagaaatagagtttgcacttcaaagttttatgaatgttgtagtcattcaccatcagtaaacagtttgttttttaaataattgatctaaacaaatcacattagttttgtcaaaatagatcactcgacctggtaagaagtacttatatttctgtgcttttatatgtagatgtttgaagtcttctgaaaatggacttctgctagcacaaccttaaatctctgtaaatatattaaagttggtaaaatgctacacatta

SEQ ID NO: 657033 - DNA, 598 bp, Homo sapiens
caacctggcggattgcaggttaactaaaactatggaaatgaaagtgttaaagagaggaataccatgtcagaattctttacctcaaaggttcaaccctagggctagagactgaaaggatcttaaagcatgaaacttttaaagagcatctaagtgatcactgctttgaaaatagtggatcacaagaaccaggagaagacaggagtcagttcagttaaacagtgcaatagtagagagggaaaccggtctgattccgaaactcgagactgaaggagagaggacatgatcagagacaatgtaaataatgtcaaaaggctcgcaaatgggaattagcaggcactaggggtggaagaragaggggagagtccagtctaactacagctgaagagcccgtggagagctgaggtgtgtggggtggagtgcggctggaaagtgaaggcagggagaccagaactcagcgtcgagaaataaggtgcaaatgggagttgtttcagtcagaaagttacatgctgaaataaggtacttatgaaagatccacctggcagttttagtcttgaaagcaagattaatattaattgctactcataagtgttcatagcca

SEQ ID NO: 657034 - DNA, 625 bp, Homo sapiens
tgataataaaatctttgaatccacctatgacctataagttgtcacttcaagaagtcccgcctttccgtgccaaaccaacatacatcttacatgcattgatttatgtctttgcctctaatttctgtcttctccttaaaatgtatattgcctgtaatttctgtcatcttaaaatgtataaaaccaagctgtcacctgaccaattttggtaagattattcttgggatttcttgaggctgtgttacaggccatgatcactcatatctggctcaaaataaacctcttcaaatattttagagagtttggcttttgtcaacagcatatatatatacacacacacacacacacatatatatacatatataaaaatatatataacatacatatatattatatgtaatatacataataaatataaaaatacatayacatatatgtatatgtacatatacatatataaaaaatattcccttaaccccatgtcactatccatgtataactttatatttgttccattattcagagcaaacttttgtgattttcttcaatttttgagcctcctttctccttagtctacttcacaagatattctgtccaatcactccatcgaagcccctctgtgaaggat

SEQ ID NO: 657035 - DNA, 625 bp, Homo sapiens
tgataataaaatctttgaatccacctatgacctataagttgtcacttcaagaagtcccgcctttccgtgccaaaccaacatacatcttacatgcattgatttatgtctttgcctctaatttctgtcttctccttaaaatgtatattgcctgtaatttctgtcatcttaaaatgtataaaaccaagctgtcacctgaccaattttggtaagattattcttgggatttcttgaggctgtgttacaggccatgatcactcatatctggctcaaaataaacctcttcaaatattttagagagtttggcttttgtcaacagcatatatatatacacacacacacacacacatatatatacatatataaaaatatatataacatacatatatattatatgtaatatacataataaatataaaaatacatacacatatrtgtatatgtacatatacatatataaaaaatattcccttaaccccatgtcactatccatgtataactttatatttgttccattattcagagcaaacttttgtgattttcttcaatttttgagcctcctttctccttagtctacttcacaagatattctgtccaatcactccatcgaagcccctctgtgaaggat

SEQ ID NO: 657036 - DNA, 646 bp, Homo sapiens
caagaggtaaggtcaaaataacaatttatggagaaacctgcatggctttctaaggtagactctgatgtttttaattttcttttcagctggtggttctgttctcttgaaagcattgttgatgtcaataatgcaagattggccttggccaaattgaagagatttcctcccatcctttgttggtcacatttatcacaatgaagatgactttgtacactcttgggaaaatgcaataagaagcattttagtacaagtgcaatcctcatgagtctcttgcatttttgtacaactttgtaagaaaaggtgtttgcattgcaaatactcttgaaggagacagtgccatcctctgaaaaaaatttgaaaggccaggtatatttatagacctgaaagacagagataaagctctacatggaactctgcagcaatgggtatgctgaatggaatgctgaatgcccattataattattattttttttagttgtctatactcaacagttcccctcctataataaaactcactgcatgttaaggtgtcacctgatcctttctatcaccttgtggcaatwggagctagaagaaccagcatgatgccattctggctagcattactgctgtgagtaataaaatggtcttctcttacccagaagtc

SEQ ID NO: 657037 - DNA, 636 bp, Homo sapiens
atttggcaattcatgattaagttactaaattatttgattatcatttcttccatattttttaacattattttgaatttatttctcaagtactttctgaaagaatgttttaaaaatttgccttcatttgacaagtgtgatggttaatattgagtgtcaacttgattggattgaaggatacaaaacattgtttctgtgtgtgtctgtgagggtgttgccaaaggaggttaacatttgagtcagcrgactgggagaggcagatccaccctcaatctgggtgggtacaatcttatcagctgccagcacagctagaaaaaagcaggcacaagaagttgtaaagagcagactttgtgtcttccagccttcacgtttctcctgtgctggatgcttcctgcccttgaacatcagactccaagttcttcagcttttggactatggacttatgccagtgatttgtcaggggctctggggcctttggccacagtctgaaggctgtactttcagcttccctacttttgagcgtttgggtctcagactggctcctcagcttgcagatggcctattgtgggacttcaccttgtgatcatgtgagtcaatgctccttaataaactccccttcatatatacatctatcctatt

SEQ ID NO: 657038 - DNA, 636 bp, Homo sapiens
atttggcaattcatgattaagttactaaattatttgattatcatttcttccatattttttaacattattttgaatttatttctcaagtactttctgaaagaatgttttaaaaatttgccttcatttgacaagtgtgatggttaatattgagtgtcaacttgattggattgaaggatacaaaacattgtttctgtgtgtgtctgtgagggtgttgccaaaggaggttaacatttgagtcagcggactgggagaggcagatccaccctcaatctgggtgggtacaatcttatcagctgccagcacagctagaaaaaagcaggcacaagaagttgtaaagagcagactttgtgtcttccagccttcacgtttctcctgtgctggatgcttcctgcccttgaacatcagactccaagttcttcagcttttggactatggacttatgccagtgatttgtcaggggctctggggcctttggccacagtctgaaggctgtactttcagcttccctacttttgagsgtttgggtctcagactggctcctcagcttgcagatggcctattgtgggacttcaccttgtgatcatgtgagtcaatgctccttaataaactccccttcatatatacatctatcctatt

SEQ ID NO: 657039 - DNA, 576 bp, Homo sapiens
aagtatattttatggacacttacatgattagtaatataaaacattcatagaatggaaggtggcrtatttgggagaatgtttattattttggggagataaagggtggataaagaagatatttacatttatctattgattgcatttaaaatattattaaacattataaaatgctaatatttaagaggtagctaaaagtagatgctaatgctgtagaagtagatgatagtgttcaaattctagttctgccacttgctagctgtgtggccttagaaaagttatggatcctctcagtgactattttatcatttgtaaaggggaacagaaatagtacatacctcatagggttgattgcactctttatcaaaagagtacatgagttaaaacttttaaagtgcttggaatatagcaagactatgttggtatttgagaaataaggtaaaatcaataaacagtagtatgcatttatgttgttaattaaataattctttatagaaatattttaggtgattaacatagtggcacttttaaagcagtgttgtggccaagaacaatctaataaacaaaagaaaagcaagt

SEQ ID NO: 657040 - DNA, 580 bp, Homo sapiens
atctattcatgttcttagcccacatttggatgggatagtttgtttttttcctgttgatctgtttgagttcattgtagattctggattattagttctttgtcagatgtagcgattgtaaagatctttttcccactatrtggcttgttggtttactctgctgactgttcttttgctgtgcaaaagctctttagtttaattaagtcccagcaatttatctttgtttttattccatttgcttttggattcttggtcatgaaattcttgcctaagccaatgtctagaagggtttttccaataatatcttctagaatttttatattttcaggtcttagatttcagtccttaatccatgttgagttgatttttgtataaggtgagagatgaggatgatttcattctcttacctgtggctagccaattatcctgataccatctgttgaaaagtgtgttctttctccactttatgtttttaattgctttgttgaagatcagttggctgtatctgggtttatttctgtgttctctgttctgttccattggtctgtatacctgtttttataccagtaccatgctgtatggg

SEQ ID NO: 657041 - DNA, 496 bp, Homo sapiens
gtttgaaaatatctagtgtgtgaattatcttttcatgctcttaactgtctttacagtgtaaaaaattttaatttaataatgttcagtatatcaatttttattgatcatgcatttggagtatctaaaattcatcaacaaacccaagatcatgttaatttttctaagtcttttatccttctttgtacattttagattcagtttgtaggtacctataaaataggtcgctgggattttgaaagacattgagttctattattaaycaaattgcaaatcattgacatcttaaaaatattgagtccttcaatgcttgaatatggagtagttctcattttatttagaaattgttttattacttctttctcttgtagacttctgcatctatagcctgttcatattatttttgaggatttacacctcagatttttattttaggggtgctatattttatggtatgtttattattacagtttttcaatacaatatatattaaaatacc

SEQ ID NO: 657042 - DNA, 520 bp, Homo sapiens
atgtgcctaggtgcaatgatctttttgcaatgaatttcccaggtgttctttgtgcttcttgtatttggatgtctaggtctagagaaatgccggggaagtttttctcagttattctcccaagtatattttccaaacttttagatttttagatttctcttcttcctctgaaacaccgattattcttaaattaggtcatttaacataatcccagacttcttggaggctttgttaatatcttcttatttttttctttgtctttattggattgggttaattcaaagacctcatcttcaagctctgaatttatttcttctgmttgttcaattctattgcttagactttccagagcattttgcatttctataagtttgtcaaatgtttcctgaagtttttattgtttttttatttgtgctatcaatttccttgaatatttctcctttcacttcttatatcatttttggatttccttacattgggctttgcctttctctggtgcctccctgattagcttaataattat

SEQ ID NO: 657043 - DNA, 408 bp, Homo sapiens
caagatattcaagctgctacttggatttaatgaggatttgaagtaatgggtttggctttctcatatttctggatgccattctcccaaaatgttgactttatttstccattacaaaaattgcatagagtgatgaagttatggcagaacaaagaagaggaaaaacagaatgaagaagactgaatctgacttttgacccaagtcttagggaagtgagattggatcgtaatgtagcaggaggcttaggatctaccctgtggggataaaatagattgtttgcagcttgaagggaggaaaccttaagaaggaaagcctgtgagcatcaggaaaagaatatgtggcttgtaaaagaggtcaaagagattttaattctctaagggaattacctctgttttacttgctatttactat

SEQ ID NO: 657044 - DNA, 657 bp, Homo sapiens
catctattgtttcagaatctggggaggagatagatattaagaaaaaactgttaaaaacttagatatatggcaacaggatggtgtatatcttctgcatgtacagtagcattgtataattggcttacccaggagatttttatcctcctagtgataaacctctgttttacctgttatttaccatttattaagacccaggtctccatgacattagatgttaacttgcagggttttgtgttcaatagaaaaaaaaaattgcaacatttatagtttacattagcttgttctgtatcaaacctatcaatctcattgcaacattcttcatcagcatcrataaatagtgtttcataaatgtgtgctgaacctgttttaccatctcaacagttctcatagtaatgagttaaagaattgtgtataaacacaacaaatgtattttaaagtggtgcagcatccccttcataactgcttcctgggtgagtcttggagtactttgaaaacagtgatagtggttgaggtatgagctctcacagggaacattttgtattttacagagtgttttcaggagaaatatcagtcatgataagaattatgaactctggaacgaaataaaaaatggtgaagacatttttatgttagcattttaaggcctttgaaatagaa

SEQ ID NO: 657045 - DNA, 641 bp, Homo sapiens
ctggtctgaggatttaactcatagcttggctttcaggctttaaactgtctttagcttggaggtggggtttcaccagggacccgcccctatctgcctagccactaggatgcctcctgttactctcaataagactctgaggcataagatttatattagtggtaaatagatataaaaacttaatatttttagaaawcaatactcattcctttataaataaattaatccatgtttatcttatttctctagagagatgtgagttttgcataaaagacataattaatatcccttgtttgaggataatttattatttctctgggcactattatgcttatatctattctctagaaaagcttactgctatcacatgtgaaaagactattgtgcaatttattaaaaggaatagactgtctggttacaatataatctttttaaaagttctattcttctgtaaaatccattagtattcttatttgaataaatgtgacaagtccagagcttaacaatacacagtgcaaagtggtctcacctttaatctacatgagtagtgagatcagagggaaaaaactcctttagtttttgtgaattattctgaaatgacttcttcttgcatgacaatgtgaaattgaattcaacatttaaac

SEQ ID NO: 657046 - DNA, 420 bp, Homo sapiens
taggattaactacaatcctactagcaagaactaatgggtgataaatcatgagtatttatattcttatagtagatgatactgaatatcaacaaatatctggyactgaataaagagagtgctgactctgaaaacatttggaacattttgatgtttctaattaagtctaattaaatatctaagtaaagggactaattactaaagttacaataatcatccttttaaaaaggttatttttctaatgggaaatgtaatcacactcatgaggattaaaacaaaccaagttaccattctttatagtattcataaatttgcctattaaagggtataaacataaaacatgtttatatttgctctcattttttaaaagtctatgaacagaggtattaaaaatagtaacaatgattacttgctttgtgtgaa

SEQ ID NO: 657047 - DNA, 396 bp, Homo sapiens
ctggaagtttacacctctaccttagcttccacttccagcttgcacagagcctgaattactgtcagaagccagaaattagggttttctctcttttctgtgtgtggcccccattaatatatcagagagcttttcaaggcccccaatgaatatctcatttttcagtttttaaaaaatttattggccaatcatatgtttgctccacttgatgttactgcctcatactacyacagtagtcaacaatttcccctgattttttagacaattttttgatgatagaaattttatcactgagggaaatctgagtcagttcaaataaaacaaggcttttcacaggaaattgccagacaggtcaaatagtagtaattctcttgggatgggtctttagggaacacaaat

SEQ ID NO: 657048 - DNA, 586 bp, Homo sapiens
attttattaaatttagaaatcagtgaaatttactgatgatgtcatagaaaatatttgtgaacatttatgtttctttcactctctgtacaacaaattgaccagttcagacatatttctgaagagacacctacataaatacagttacagataaacacaggcccaccaacaacatctcaaaactgacatttgagcagttgcctactaccacacgcacrtgcacatgcagtactccagaaaatttaaaaaaatgtgttattcaagatacactgttttatgttgacagaacagctatcactggaaacttcatgttttgtcaaatagatgataaatctctggaagaaagtttgactagagtggttcacaccactagggtatgcttaaatttaacctgagcttctttttgaaagttagcatgtgatggttaatactgtgtgtcaacttgattggattgaaggatgcaaagtattcttcctgggtgtgtctgtgagggtgttgccaaaggagattaacatttgagtcagtggacttggaaaggcagacccacccttaatctggatgggcacaatataatcagctgccagcaaag

SEQ ID NO: 657049 - DNA, 532 bp, Homo sapiens
atccattttcatattgtcaaacttgaaatagattctagaattatttttctttttttcctttttttacctcaactaaaagccttgtgcatcaactttgtgaatgtcatggagatgagtaattaccaaaatctttctagtgtttccccaacattattgattgggttgagagcatcaggtaaatataaggtgggatcaaatttttaggatattgtattggaagataaatgggaggaagattgaaataagaatataaacgagattttgttaactcatatatgtatttctcagctagaatatgctgttaaattagtgcaagaaattaaagctaaataccattaaaattttaaatataaaattaccatatcatgtagaaatttgacttattggtaaatatacccaaaagaactgaaagtaaagacttaaacagaaatatgtacatmaacatttatagcagcattgtttataatagccaaaaggtggaaataacccaaatgtctatcaggatatgaagagataaacaaaatgtggttta

SEQ ID NO: 657050 - DNA, 612 bp, Homo sapiens
gcaggacaaatcacttccttgtggccatctgagcagcagagggatccctcatgcaaataggataacatttcctggataacactactaaatattaaatatacttaattatttttgcaaattatttttgtaattttaatcaatttaaatttgttggagcttaggggscatattaatgacaaagaatcattaattatcattaattctgagggtggaaaagctcttgagctataatttatttgactcttctagaaaatatcctaggacaaatccaactcttctaagtacaagaagcataataaataataattctttttcttttaagtaacattggccaacactacatgtgatgtaaacttgaaactgtcaaggttagttggaatgtcctacattcaacattcctttttcgtgaccacagcactaagccaaggcattaagaaagacagcctgccttctacaagagtgcatcctagttggggagataatactcgtgaccggaaatagctttacataaaggctgcataaggatgtgaataagtgctgaagaatagaggacttggggaagaaagaggcatgtgtgggacaaaatgatttcttggtcatttcctacttgca

SEQ ID NO: 657051 - DNA, 585 bp, Homo sapiens
cccattcttttatagcagaacaaaatatactaagacactttcacagctaaggagccaccaatggctccaatcccactgagaatagcagccagcccttactttagcagggcttatatctaccagaygtgatcactcattatctctctgatctcatatccaacttttcctcctctaattctctctgtctagtcttcttctgtccccactgtcccttaaatctcttggcctttgcatcttttctctctctgcttggaaactttcactttttctctctgggtatctttatgccttgctccttagcttcttttgtatctttattcaaacaatcacctttttagtgtgaccaggtttgactactttctctaaaattgtgtccacctctggaaactccctattccctttccctcctttattttttcttccttcagcacttagttaccatgatctaacattctatacattttactcatttatcttatctattacctgtcctttccctgaaatgtaagctccatgaaggcggaggtttgtatctattttgttcattcctatatcatcagccccttgaacagtgagcacattgta

SEQ ID NO: 657052 - DNA, 610 bp, Homo sapiens
atggtttaattgttcatagacatctgtctttggagtctattgaaaaataatatcctgggcataatatggcctacagaatttttgacatttttatatctttcacaatcaaggcattgtcaaaaagtcaggtagtgaaactcctaaaaacttatggatacatttagactagaagggaataaaaacctagtaatatatcaatatgcacagctggaaagcagatgttcaattgaatgatctcagtacttaggaaaagctattaaacctgttacttactcaaatgagaaattcccataatttattgttcttatatttgacttacttctttttgctcctttaaattaactctggaattattatttctattattattgttgttgttgaagccaattaccatggaagtttgactccatgcaatacagtacgtgagtgctaagaaatgcccaaggctgctgtcaatcaaattaactggtgmgttacaagttgtttactgtactggaaaatgaagtgataaatgcgtgccaaccagtaaaatgtgacatttagtactggatataccaactttttaaattcatctaccagtgtgccaaaacatagttttaactgaacctcc

SEQ ID NO: 657053 - DNA, 589 bp, Homo sapiens
ttctggcctctgtccatttcatctacactattctctggagaagtttggacattcatgggccctttgtttcctgtggtgagaagtgctggatgtgaaaagcatctggggtgctctctggccggggccataaaactcggcctggaccccagtctctgagttcaggggtacctcaggtattcctctgtcccacatgttccctgcctgcaactctgttgtgagctccacttggcaggactggagcactggtcttgttcagtgctgggttccccaggcacagggtctcacaagtgaacgcttggtacttggtgaatgaatgaaagtatgaaaggttcttctgtgtgtgtgtgtgtgygcacgtgcacgtgcgagagagactcaactttggccctgctttaggcttgttaaaaatttttttagagttggggtcttgctctgtcacccaggctggagtgcagtggtgcaatcacaacttactgcagcctttaactcctggactccagcaatgctcccacctcagcctcccaaagtgctgggattacaggcacaagccactgcacccagccttgctttaggcttttaaaagatctct

SEQ ID NO: 657054 - DNA, 595 bp, Homo sapiens
attgaatgtatcattttatttctacagaaggctcaaaatttagtaaaattccaaatcttttgaaacttgaggctatctcctgaagtccatcatttctaaaagtgaaaaagtaaaatccagtgccctgattatgaaaattttcaaatgtacacaaaaatagaataatatgaactttcatatgtctatcatccagcttcagtaattcttatcaagattttgccacgcctaccttatccctcatccttcttctttttccctttgctgaattattgtagtttctgtgcaattcttagcattttttaatctgtgacttgctgtctttagttttgaaaatgttccgccattacagccatatgtatgtatgtatgtatgtatrtatacatgtatatatatgtatgtgtatatatgtatgtatatatgtgggtatatatatgtatgtatgtatatgtgtgtatgtgtgtgtgtgtgtatatatatagcttctgccccattctctcctttctctcatttgagattccagttgacacatatgagacctctgctcctgtttatttctgttacattgtctctgtatctttgatggatatgttcattt

SEQ ID NO: 657055 - DNA, 593 bp, Homo sapiens
tgagcccaggaggtcaaagctgcagtgagctgtgattgcccccactgtactccagcctgggcaacatagcaagaccctgtctctaaaaataaataaataatcatttgttcatttttttctcatgccttttttcttatttatttatttatttatttatttatttattttaaataagccttagctgaaaaacctccctgaaacatttataatgcaaaatgaaatgaaaccatcattaaatttaggttttgctgctgattagggacatgatgctgggcaagtaattcaacytctttcagtcttaagtttcctcatctggaaaataaagaaggcaggggttggattactgatatataaagttccttgtctaccaaacatccatttttccatgtttctatgatctagatagacagtagaatttatatcctagtgattcactttttttccctcacacatacaaaaaaaaacctaagaaaattcaatgcctgcagtgctcaagacagtatagagtagatattgccaccaagtacaaatggatacacaaatagtatacatatcctattaattgtgatcttctccttacatctgtcatgttt

SEQ ID NO: 657056 - DNA, 589 bp, Homo sapiens
aaataagtatatgtcccctatttttctgtaaacactcattctttgttggagaaagtgtcatcatttaaaaaaaaaaaaaaaaaaagagccttccttcctccctsatactggtttggtcctctcagaggtagaaataatattttcctcagcaaaggtgattttctttccatgaggcctatagacaaccaaattgatttttcaggccaaaaccattttaacgtctatttatcttctcaggatgatgtccctcagcaagtcattttgtcatctctttggtgtgggttttttgtaacagagaagattgtaggccatcatacttaaaaataaataaataaattctatctttcttctttgctgaaagcactattcaacccagcctttaaaacagaaaattctagatattagataaaacactgacatctatgttaaggacaaagtaaaatgttgagggttttttttgtttgtttgtttgtttttactcttcagattggttttccccattagttctttaaaaaaatgactttataggtaaaatttagcaaaggtgagagggggatgttgcaaaaaaaaaaaagctatattaaggatt

SEQ ID NO: 657057 - DNA, 616 bp, Homo sapiens
tttgccacattggcccaatattggtgggtggagagggtggagggagagcagttgctttctagttccattcctctactttgaagccacaggaagatttagataacttcttcacttttagctttctcaggcatgagtcagatattagtcactgtatctaacaattctagggactgttcatgaagctctctgaatgatcccacttaatcctccctcccttgaattcgaaataaggagcacatacctctccaccttgcctccttagcaacaggatatagggtgggaagtttatacaacctcctccaaagcattcctcttcataaaatattctcattttcaaacacccacatttttttaaatcccttactgacagtgaggctctctgagaattttttggccatctactttgaaattcctaaaggatggtctgactcactttgatatctgaaatttactacatcttgatgtcttgaaactttgattctaacatcctattatactgcctaatacattataggaaatcaattgatcaaaaatgaaaagaaacrtaatgcttatgattttcatttttgccctatctttattccagtgttagaaacttccttcacctgtacactga

SEQ ID NO: 657058 - DNA, 564 bp, Homo sapiens
cgtctcaggtaggacagaggctgaagtatatggggttgggccaatattcagatcttcagtttctttcttttcctttctttatttggtgtgaacacattagttctcactgaagaccttcagttcagaaaataggatggtgagttgttatatttaggttttaaaatgccaaaaactctaacctatcaggcaaaagacctatttgtatcatgcacgtaagggaaggaaagaagccctccagggaaaagaaagtgcacaaacaggcccatgagaaggtatgacagcccataattcactgcatctctgttgatatgaacataactgaataacaattatcagggaaaggctaaatagagtgtattacacacacacacacacacacacacacagtactatacagcagcattcaagagtaagacagataccagagttattgacctgaaaagtctctaagacataatactaaatatattacacacacmcagtatatccagacacaacaaggcaatacatttccattaagtttataagcgtgtaaacaaatacatataaaatctagtggaaaat

SEQ ID NO: 657059 - DNA, 619 bp, Homo sapiens
ttttctgcataagcttcatgatgcctgcctaacagagaacagtgaaagacaggttgtgtcagttttcaagctgagacattaagggaatggtaacctccacttctctcctttgggacacttgctgtgtaacccagctgccatgccatgagaaagcataagcagctaaacagggagacttatttggagaaaaagcaggacccccaccaagaatcccagttgaaattccagccaaaatccagcaggaacttgtcagccatatgagtgagaaaataagttccatgacatggagctaagatgaaccattcctgctgagccctgtccacatttcagattgtggcaaaataaatgattgttattgcattaaatcacaaagctttggtggataaataccagaacacctataaacttctatgaaggaaaactcytgacagccatgaaaacaaatataataatgggagccatctaattttctctgaaggtttaacaaaaaaatgctctcatttaaatatattattatattacaaaataagctctcagattataagagtatcactggataggcatttgaaaagagcttgtgttttctgcttggttgggctaaatcatagctatttgtgaa

SEQ ID NO: 657060 - DNA, 619 bp, Homo sapiens
ttttctgcataagcttcatgatgcctgcctaacagagaacagtgaaagacaggttgtgtcagttttcaagctgagacattaagggaatggtaacctccacttctctcctttgggacacttgctgtgtaacccagctgccatgccatgagaaagcataagcagctaaacagggagacttatttggagaaaaagcaggacccccaccaagaatcccagttgaaattccagccaaaatccagcaggaacttgtcagccatatgagtgagaaaataagttccatgacatggagctaagatgaaccattcctgctgagccctgtccacatttcagattgtggcaaaataaatgattgttattgcattaaatcacaaagctttggtggataaataccagaacacctataaacttctatgaaggaaaactcttgacagccatgaaaacaaatataataatgggagccatctaattttctctgaaggtttaacaaaaaaatgctctcatttaaatatattattatattacaarataagctctcagattataagagtatcactggataggcatttgaaaagagcttgtgttttctgcttggttgggctaaatcatagctatttgtgaa

SEQ ID NO: 657061 - DNA, 453 bp, Homo sapiens
aatgtttcggtaagtggtttctgttgatttattaactcccatgaaagcctcatggaaatcccttgccaccaaatatttaatatgttttatgcatgcttacaaaagtcttgtttaccaattctagctttcccacatttttaagatgataaacgatttggarcgcagcatgatgtactcccatttttctccttccacaccatctgttggggaaaagaggactcacactgattgatagttacaggtaaagttgacttggtctctccattacagatctatttgttgttatcttcactcaagtttttaaattttttttgtattaccctttctgtattacctttcgatgtgaagatttaacgagatgaataatgtggaaatgtttgtaatctgtacattacttattcttcattctttatgtagtatatacatatgtgtgtatatatatatagacataca

SEQ ID NO: 657062 - DNA, 495 bp, Homo sapiens
tgtgaatgaaccactgaatcaggacaaatgagaccaggaggttctaaccctgtgttctctatggtcagcagacaacctgcaccagaatcaattgatacttgttaaaatgcagactcctagggaacatcaaatatctactgaatcttaatctctcgggttgttatcagaacctacattytaaaataggctcttcctgaaggaaggttggtaaacaactgctctaagccataatgaatgtaggcttaggagtctgaagactcttggcccccttgtctgagttctgatgagttgtgtgttttcagaatgtcattgtgccctctttagtgacaatcttggagcctgagaccacatgaaagagactgtgagttactttcatttccagtgcctggcacataaggaattcttaatgaatggtgaatagtgaaatgaataaatagatgataatgagagaccacacagtaggacaggtgataaaaaggatggagtaatgaacaa

SEQ ID NO: 657063 - DNA, 495 bp, Homo sapiens
tgtgaatgaaccactgaatcaggacaaatgagaccaggaggttctaaccctgtgttctctatggtcagcagacaacctgcaccagaatcaattgatacttgttaaaatgcagactcctagggaacatcaaatatctactgaatcttaatctctcgggttgttatcagaacctacattctaaaataggctcttcctgaaggaaggttggtaaacaactgctctaagccataatgaatgtaggcttaggagtctgaagactcttggcccccttgtctgagttctgatgagttgtgtgttttcagaatgtcattgtgccctctttagtgacaatcttggagcctgagaccacatgaaagagactgtgagttactttcatttccagtkcctggcacataaggaattcttaatgaatggtgaatagtgaaatgaataaatagatgataatgagagaccacacagtaggacaggtgataaaaaggatggagtaatgaacaa

SEQ ID NO: 657064 - DNA, 495 bp, Homo sapiens
tgtgaatgaaccactgaatcaggacaaatgagaccaggaggttctaaccctgtgttctctatggtcagcagacaacctgcaccagaatcaattgatacttgttaaaatgcagactcctagggaacatcaaatatctactgaatcttaatctctcgggttgttatcagaacctacattctaaaataggctcttcctgaaggaaggttggtaaacaactgctctaagccataatgaatgtaggcttaggagtctgaagactcttggcccccttgtctgagttctgatgagttgtgtgttttcagaatgtcattgtgccctctttagtgacaatcttggagcctgagaccacatgaaagagactgtgagttactttcatttccagtgyctggcacataaggaattcttaatgaatggtgaatagtgaaatgaataaatagatgataatgagagaccacacagtaggacaggtgataaaaaggatggagtaatgaacaa

SEQ ID NO: 657065 - DNA, 586 bp, Homo sapiens
ggaatctatgggttgcaaataaataagataatttaatgactgcatatcctatatcacaagtctagagcttaactcttttaaaacccagyggtttgtgataatttcagttatagtttaaaatgcagtcactatctcacagtaggaagagactgtggatttgaataaagtctttgtttcccatgatctctgaagcttgaatcatcaattgtaaattcatttgcaattctaggatcacatgatttttagaggtctggaagtacctgtcactggtcataccaccgggtaggtagaatctgtgtgtgaaacagagcaggtgctgcccattcagagttagatgaactcactgtatgattctggcaatggaacaaagaaaaaccattgaattaaaatgaaaatattgttaggcattcttgagcccgtgagaaacatacacacacacatgcacacacacacgctggaatggttaaaaacccaggctattctgggtatccattgataatattgggagcaaattttagtcccgtgggcagttcatgaatgtcttacctgatgaatgcctgttgacccacataactgcaaagccagc

SEQ ID NO: 657066 - DNA, 586 bp, Homo sapiens
ggaatctatgggttgcaaataaataagataatttaatgactgcatatcctatatcacaagtctagagcttaactcttttaaaacccagcggtttgtgataatttcagttatagtttaaaatgcagtcactatctcacagtaggaagagactgtggatttgaataaagtctttgtttcccatgatcwctgaagcttgaatcatcaattgtaaattcatttgcaattctaggatcacatgatttttagaggtctggaagtacctgtcactggtcataccaccgggtaggtagaatctgtgtgtgaaacagagcaggtgctgcccattcagagttagatgaactcactgtatgattctggcaatggaacaaagaaaaaccattgaattaaaatgaaaatattgttaggcattcttgagcccgtgagaaacatacacacacacatgcacacacacacgctggaatggttaaaaacccaggctattctgggtatccattgataatattgggagcaaattttagtcccgtgggcagttcatgaatgtcttacctgatgaatgcctgttgacccacataactgcaaagccagc

SEQ ID NO: 657067 - DNA, 528 bp, Homo sapiens
tacttatgtagaactcaaaatttaattatgttgcgtatcrttttccttcaagaattctgaaaaagaaaaaattgttgctttaggcataaaatatattttatttctagcatcttagtttcattcactgatttacttatctgataaacacttatttctctttgtcccttgttaacagcctgtggcaggggatcatgtcctgggacataccaagagagcagcttctagaggactgattatcagagaggaactggaatgtgaaaagacgtctaactaaccattattaatgattcacttgtaattttcactaatggatgacccacatgatttcctcttcaaagaatttgtccaaagccacccatttaaaaaagaaaagaatggaggatggaatctcataagtgatcttaccatttacaaagcacagtgtgattaatcaattctcctttatattttagtgcctaccgtgtttcttaatttgatggagaagccttcttataaacactcttagaaaagctatatgtaattaacttt

SEQ ID NO: 657068 - DNA, 553 bp, Homo sapiens
ttaaaaaccaggcacactcaaaacaagggacacaacttcaagtcaacatttaaaacaatgactagtcaaagagaaatagaaagattccagaaatcaagctgtttcctcccactacactctcctcctaacctcgccaatccaccaaacccattctcaagcartacgtggggcaaaaggtaaggtgacaaagtcctgggaaaattcactaatcacctcaatgaagcaataagtagatggaaaagggaagtagcagccaggaaaatacggtagatcccttgacaagggaatcttcttcactgtagctcaccatttattttttctagccaagagaaagtaagcaaatgcggattctacccaaaatatataaatgacatcaaaaaagctataagaaagatgaacaatccaatagaaagagggggtaaaattcataaacagatgtttccaacaagaagaaataaaactgccaataaaaaatgtaaaaaagaggttcaacctcattagtaaccagcaaaatgcatcaacaacacaatgagattttatttgacacccaaga

SEQ ID NO: 657069 - DNA, 553 bp, Homo sapiens
ttaaaaaccaggcacactcaaaacaagggacacaacttcaagtcaacatttaaaacaatgactagtcaaagagaaatagaaagattccagaaatcaagctgtttcctcccactacactctcctcctaacctcgccaatccaccaaacccattctcaagcagtacgtggggcaaaaggtaaggtgacaaagtcctgggaaaattcactaatcwcctcaatgaagcaataagtagatggaaaagggaagtagcagccaggaaaatacggtagatcccttgacaagggaatcttcttcactgtagctcaccatttattttttctagccaagagaaagtaagcaaatgcggattctacccaaaatatataaatgacatcaaaaaagctataagaaagatgaacaatccaatagaaagagggggtaaaattcataaacagatgtttccaacaagaagaaataaaactgccaataaaaaatgtaaaaaagaggttcaacctcattagtaaccagcaaaatgcatcaacaacacaatgagattttatttgacacccaaga

SEQ ID NO: 657070 - DNA, 553 bp, Homo sapiens
ttaaaaaccaggcacactcaaaacaagggacacaacttcaagtcaacatttaaaacaatgactagtcaaagagaaatagaaagattccagaaatcaagctgtttcctcccactacactctcctcctaacctcgccaatccaccaaacccattctcaagcagtacgtggggcaaaaggtaaggtgacaaagtcctgggaaaattcactaatcacctcaatgaagcaataagtagatggaaaagggaagtagcagccaggaaaatacggtagatcccttgacaagggaatcttcttcactgtagctcaccatttattttttctagccaagagaaagtaagcaaatgcggattctacccaaaatatataaatgacatcaaaaaagctataagaaagatgaacaatccaatagaaagagggggtaaaattcataaacagatgtttccaacaagaagaaataaaactgccaataaaaaatgtaaaaaagaggttcaacctcattagtaaccagcaaaatgcatcaacaacacaatsagattttatttgacacccaaga

SEQ ID NO: 657071 - DNA, 606 bp, Homo sapiens
tgtcatttgccacaacgtggatgaacctggaggacatgctaagtgaaataagccagacatagaaaaacgtttttaaaagtaaaatatacagagttagagagtaaaacagtggtgatgggagggggaattgaagagatgtaggtcagaggatacaaagtatcataccaaataggttgaatgaataactctagagatctaatgtgcaacatcaggagtataggcaayaacattgggctgtatttggaattcttgcaaagtgagattttatctcctcttgccacaaaaacaaacataatggataacaagatgatggatattcacttcatgatagttaatttacttcatgatagtaaccattttgcaatctctatgcatcgcctaatatcatgttgtataccttaaatatacacaataaaatttatttaaaaaaataaagactcagcaccatttattaaatagggtctttatttttttaaataaattttattgtgtatattccctatttaataaatggtgctgggaaaactggctagccatatgtaggaagctgaaactggatcccttccttacaccttatacaaaaatcaattcaagatggattaaaga

SEQ ID NO: 657072 - DNA, 607 bp, Homo sapiens
aggtgccctgaagcagggtgaagcaccctgcttcagctcggcctccgtgagctgcacccactgtctaaccagtcccagtgagatgaaccgggtacctccgttggaaatgcagaaatcagatgccttctgggttgattttgctgggagctacagactgtgctgttcctattcagacagcttgccagccacccaacttattctttaaagaaaagcatgccttatcttttacttctcgacgtgatcttttgtcacatgagattctttgatgttatatttaactttagcatctattgtaggatcagtctcaatgctttcagtcaacttgaatcttatctgtatataacttattsaataaaagacttagtttaagtattctctaccatgaaatttgttcctagaagttgtgaatgagtcatttttatgactgctctaaggcaagcagtctatgactgaacacatttcagcctattatattctatatgaaagatagtaatctcaagaataagagattgtttagactgtataggtctccatatgaatttaacactcttattcagtatggtaatagtccatttccttttttgtttaaatatagattaataaagta

SEQ ID NO: 657073 - DNA, 607 bp, Homo sapiens
aggtgccctgaagcagggtgaagcaccctgcttcagctcggcctccgtgagctgcacccactgtctaaccagtcccagtgagatgaaccgggtacctccgttggaaatgcagaaatcagatgccttctgggttgattttgctgggagctacagactgtgctgttcctattcagacagcttgccagccacccaacttattctttaaagaaaagcatgccttatcttttacttctcgacgtgatcttttgtcacatgagattctttgatgttatatttaactttagcatctattgtaggatcagtctcaatgctttcagtcaacttgaatcttatctgtatataacttattcaataaaagacttagtttaagtattctctaccatgaaatttgttcctagaagttgtgaatgagtcatttttatgactgctctaaggcaagcagtctatgactgaacacatttcagcctattatattctatatgaaagatagtaatctcawgaataagagattgtttagactgtataggtctccatatgaatttaacactcttattcagtatggtaatagtccatttccttttttgtttaaatatagattaataaagta

SEQ ID NO: 657074 - DNA, 463 bp, Homo sapiens
taaacctctttcttttgtaaattgcccaggcttgggtatatctttatcagcagcatgaaaatggactaatacacttagaaaatcatcttcttgtgcccttcaatgtcctccagaacctgaaatttgaatttggttttttggcatcataagtrgcttctatggaaattgtcctgctatgctaaatttagcattagaacagcactgctggggagctttgctatatttgcagccactcattccagactgatagagcaagggatgtgagtaccatttaaacacatgtatgcatccacactgtacacacacgggccatttctgtacatggaacagtgggcagaacagtagaacctgcaaaatagtatgaacctttatacaaggagaacttgtcccatttgtcagaaattaatctttgaattcttatttttatgatttaatatctatctatctatcatcaggttgaatg

SEQ ID NO: 657075 - DNA, 495 bp, Homo sapiens
caaagtatgcagttgaattccagatccaaatatgaccatctgcatatcacttccacatgtgtaatacacaagccttctctgtcaaataaccttaagagtattcctcattttcctccataaaatcttttcctgatgttatgatgttctgatgttatgccaattgcgaaagcagaaaacaaagagtcacccttgacctcaacatccatataattgatatttcttattagtttctatatctattaccaccatatatacatatatgtgtgtgtatatatatgtgtgtgtatatatatatgtgtgtgtatatatatatgtgtgtgtgtrtatatatatatatatatatatatatatatatattgcattagacaaatatacatagatttgaaacattgaacttaggagttgaattgactaaagaatgatttgcaaattggacatcctcccaaaccagattaggctcagagaggctgcagcatagccatgtggtggaggaag

SEQ ID NO: 657076 - DNA, 613 bp, Homo sapiens
aacttaaaatgacaggcttcaaatactaaaattttaaaaatattttataactttttctggtataattttgtctgatttgacactaatattttcagggtgaacaacattaagtgctataccaaagaaaaattttaatggtctaaaaaatgaaagtttatttatcaaacatatcattgtccagtgcaaatttctgagaggactctgcttcatgtaatcaatcaggaaccttctatcttcaactgtgtcactcttccttattcaatacgtgactctcagggtcatcttcggttgaaatttagttaccagataggggccaagggaatacataaaagattgtatgagttgtttttaaaggtaggcttggaatttacttatgtcatttctgccaacattccattgtccagaaccaagtgtttttgctcygcttaataaaagcagactgaaaaataacgtatttttgctctgcataaatgaaagaaaataagatagagaatgataagaacaactttttttgccacagactacccttctttcacaactattcatttgttctcttctcaaatatatattacattctctctctcaccaaagcaggcaaatcaaagttccaccc

SEQ ID NO: 657077 - DNA, 613 bp, Homo sapiens
aacttaaaatgacaggcttcaaatactaaaattttaaaaatattttataactttttctggtataattttgtctgatttgacactaatattttcagggtgaacaacattaagtgctataccaaagaaaaattttaatggtctaaaaaatgaaagtttatttatcaaacatatcattgtccagtgcaaatttctgagaggactctgcttcatgtaatcaatcaggaaccttctatcttcaactgtgtcactcttccttattcaatacgtgactctcagggtcatcttcggttgaaatttagttaccagataggggccaagggaatacataaaagattgtatgagttgtttttaaaggtaggcttggaatttacttatgtcatttctgccaacattccattgtccagaaccaagtgtttttgctctgcttaataaaagcagactgaaaaataacgtattttygctctgcataaatgaaagaaaataagatagagaatgataagaacaactttttttgccacagactacccttctttcacaactattcatttgttctcttctcaaatatatattacattctctctctcaccaaagcaggcaaatcaaagttccaccc

SEQ ID NO: 657078 - DNA, 579 bp, Homo sapiens
acataggaagctcacctcacgtagcctggggaggtcaggagacagccttaggaaaaggcaaaatctaagctaaaatcacctaggttcccttgctacctcttctcacatagcagaaaygtgtctcaattttcagcatcaaaattattctgagttatctctgaatacaatttgctttgtgtgacttaaatgtaaacatgtttgccaacaataagcattttctctgaaatcactctgaccacagaaatgcctaggcatttaatttttatctttgcatgcacagtattttggagagtttctacacaaaatgctcaagtgtttggctttgccttatttgaaacaattcaatgtccatctaaggaatccctgaacaaggcagtttcaaagttccctcagtgactgagcacacccgcccaggagtgtatcatcagcataaagatacacacaacactcagaaccctgccttgtcagctcatttataaagatcataaataacaatggtccaaggattgatccctgaggaacccccataatgacatccattaaatctgacatgacactgtttaataacacaagtggtat

SEQ ID NO: 657079 - DNA, 552 bp, Homo sapiens
tttctttttgatgcagctgggaaaatgcagtgtagggcatccatttgcaaactgtgttctgcataactgtgttttgtagaggtatttcaaagattctgaaaacactgattcaaattttctttgaaaatatatttaaaagtcatcacatacactcaactatggtacacatcacttacgaacactagtgtacagcttgtgcttctagaacaagtttttttccagaccaggaataaaacttcttatgccacctccacgtatatattcaagtttcttcttagtaagttatggttttaaatgattgtagctttatacaggtctttgaattcaagctstgtgcttgactgcacaagtgtagaaatgagtgggtccctggagcttaatttcaagtgaccagacacctctgctcagggagagctcccaccctgtcctgtggctaaccaagtatggaatatcaatgggacagtattgcatataaaggatgacatttcctataaggtttgggtaccctatcattcaaaattcctcatgttgcaagtgacagaagcccaactc

SEQ ID NO: 657080 - DNA, 552 bp, Homo sapiens
ggtggtgggcgcctgtagtcccagctaccgggaggctgaggcaggagaattgtatgaacccgggaggcagagcttgcagtgagctgagattgcgccactgcactccagcctgagtgacagagtgagactccatctcaaaaaaaaaaaaaaaaaagataaytgtctcatagttatgacacagatgctggtttttaaagtttcaaatatagagattttaccaagcccatgggagagaaagatcaacttcacaaacagggctatggggcaggttttccgcaggcatctgaaccaggttggccgagtccctctgctccttggcctcagctctgtgtccctgatcctgctggtatgagcccaccggtggagaagggagacgagggaggaggaagtcccggggtgatctgcttcccccattccccccagactgtttcttacctggagacctgagggaccaaggaactgaggctggagctgcccagagaaatctgaagatttggggttggtgggtggagaagagggtgtggggtgctgcttggaaccaggaggaatgga

SEQ ID NO: 657081 - DNA, 552 bp, Homo sapiens
ggtggtgggcgcctgtagtcccagctaccgggaggctgaggcaggagaattgtatgaacccgggaggcagagcttgcagtgagctgagattgcgccactgcactccagcctgagtgacagagtgagactccatctcaaaaaaaaaaaaaaaaaagataactgtctcatagttatgacacagatgctggtttttaaagtttcaaatatagagattttaccaagcccatgggagagaaagatcaacttcacaaacagggctatggggcaggttttccgcaggcatctgaaccaggttggcygagtccctctgctccttggcctcagctctgtgtccctgatcctgctggtatgagcccaccggtggagaagggagacgagggaggaggaagtcccggggtgatctgcttcccccattccccccagactgtttcttacctggagacctgagggaccaaggaactgaggctggagctgcccagagaaatctgaagatttggggttggtgggtggagaagagggtgtggggtgctgcttggaaccaggaggaatgga

SEQ ID NO: 657082 - DNA, 552 bp, Homo sapiens
ggtggtgggcgcctgtagtcccagctaccgggaggctgaggcaggagaattgtatgaacccgggaggcagagcttgcagtgagctgagattgcgccactgcactccagcctgagtgacagagtgagactccatctcaaaaaaaaaaaaaaaaaagataactgtctcatagttatgacacagatgctggtttttaaagtttcaaatatagagattttaccaagcccatgggagagaaagatcaacttcacaaacagggctatggggcaggttttccgcaggcatctgaaccaggttggccgagtccctctgctccttggcctcagctctgtgtccctgatcctgctggtatgagcccaccggtggagaagggagacgagggaggaggaagtcccggggtgatctgcttcccccattccccccagactgtttcttacctggagaccygagggaccaaggaactgaggctggagctgcccagagaaatctgaagatttggggttggtgggtggagaagagggtgtggggtgctgcttggaaccaggaggaatgga

SEQ ID NO: 657083 - DNA, 454 bp, Homo sapiens
tgccatatttgtatgcaaaaatggcagcacgaggactgtggttttgaccatggacacgccagagtgaacagaagcacactccagtccctgaccagtaacacatcactagtggttaccaccctgtttatgactctgataggtcaacacacagtcaataacttgttgctttgtccttattactatcatggtagacacatggttagattttgaattcttcccccttctcctgagtccttcttctggacacgactgcttcagasaaacgaaaacacagtgaggaggaaacgggaaggcactgatgtgggcccacactttcaattccttattctcgttaataggttacaagggcaccatgcttttcaaaggcaaatgtattcgctaattcagagggacacaggttcatgaatcccatctgtgtgtggaactcacaacaagaacaataacaacgtagaac

SEQ ID NO: 657084 - DNA, 454 bp, Homo sapiens
tgccatatttgtatgcaaaaatggcagcacgaggactgtggttttgaccatggacacgccagagtgaacagaagcacactccagtccctgaccagtaacacatcactagtggttaccaccctgtttatgactctgataggtcaacacacagtcaataacttgttgctttgtccttattactatcatggtagacacatggttagattttgaattcttcccccttctcctgagtccttcttctggacacgactgcttcagacaaacgaaaacacagtgaggaggaaacgggaaggcactgatgtgggcccacactttcaattccttattctcgytaataggttacaagggcaccatgcttttcaaaggcaaatgtattcgctaattcagagggacacaggttcatgaatcccatctgtgtgtggaactcacaacaagaacaataacaacgtagaac

SEQ ID NO: 657085 - DNA, 596 bp, Homo sapiens
tttctaggcactgaattgcttaatctgaaactcttgcacttatttctctgaacacataaactagagtggctgtgtctgtcactataaaaaagatgcagttggtctaaagatgataaaaaatgtgaaggctgttttattttcacagaaggtagaaaaagctggagctaaaatgttaggaacttcatacttcaaattctcattactgtggggagaaccccaaaagtcacataaaattttaataagctctactgtacagcttcaaatgctatatggcaatatgcttccaatacatagttttaggcaaatgcaaataataattatctgaagaacacaattcttaatatctaactaattaggtaaaaayaatgcatttgtaaaataattacatataaatatgtaaaaaattatctgtgtgcaaatatataaaaatataatccaccttttttttttttttttttttttgagatggagtcctgctatatctcccaggctggagtgcagtggcacgatctcggcttactgcaacctccacctcccaggttcaagcgattctcctgcctcagcctcccaagtatctgggactacaggtgcacacc

SEQ ID NO: 657086 - DNA, 543 bp, Homo sapiens
caacattgtaaatcagcacaatttgtagctgggtgaatggaagaaatagttctattcatcacttcctcattttccctaaatctacaatctccagatgtcactactgaattaacagccaacaattccacaacattacctgggagacactggccctttttcttcctcttcctcatcatcactttcattttctgtaaataaattcagagaagcaggtcacattaagcaattcatacttcacatatgaccaaatcactgtccagtcatagcacaaggacataactattctcagtgcaagaataaggattctgacaggaatattctagggtgccctagattaactttggtgagaattagatgaccctgctttccagacccacaggccaaaatctccctctacgtgtagaccataatgccatattccctgcctgagtcaaagttaaacaaaattttttccccaaaaaaatctccaaaaattggtcaaacaattttctaagartgttgctgcaatacggacttatatcaccaggtaacgtggacataaaa

SEQ ID NO: 657087 - DNA, 600 bp, Homo sapiens
tgggttgtctctacgttttggctcttataaataatgctgctatgaatatttgtgtatagatttttgtgtgcacatatgttttcatttctctagggtattacctaggagttaaattggtgaatcatatggtaactctacgtttaaccatttgaggaactgccagactgttttccagggcagctgcaccatgttatactcccacctgcagtgtatgagggtcccaatttctccacatccttgctgatgcttgttattatttcatttcattccatttctttgtcctcaagggctaaggtctggtgatattactcagctccatcttgtaacttattagtaatctccattataaagtccatccctcctgcatggttttctaaatattttatttttcatttctagagtctctaattgrttctttttcacaatagcttatccttatttcatgagtatgattttctccctttggggatataaataatattcacttaaagttttctgtttgctttaataactctttcttttcagaggtgatttactcatttattgagtaggtatttctattttatggtaactttttttagatgtttcatgatgtcttgt

SEQ ID NO: 657088 - DNA, 600 bp, Homo sapiens
tgggttgtctctacgttttggctcttataaataatgctgctatgaatatttgtgtatagatttttgtgtgcacatatgttttcatttctctagggtattacctaggagttaaattggtgaatcatatggtaactctacgtttaaccatttgaggaactgccagactgttttccagggcagctgcaccatgttatactcccacctgcagtgtatgagggtcccaatttctccacatccttgctgatgcttgttattatttcatttcattccatttctttgtcctcaagggctaaggtctggtgatattactcagctccatcttgtaacttattagtaatctccattataaagtccatccctcctgcatggttttctaaatattttatttttcatttctagagtctctaattggttctttttcacaatagcttatccttatttcatgagtatgattttctccctttggggatataaataatattcacttaaagttttctgtttgctttaataactctttcttttcagaggtgatttactcatttattgagtaggtrtttctattttatggtaactttttttagatgtttcatgatgtcttgt

SEQ ID NO: 657089 - DNA, 561 bp, Homo sapiens
tgatctagccagggatgtcaaagcaggcttccttgagaatgtaatgtttcagatgagagctgaagaatggaaaggaataaaccaaatgaagaggggagaatgaatattccagcagtggaaacggtgtattcacaggcctcgtggagggagggggcaggcctgcmtgtttgaaggaggcctggctgagttcacttgctggggtcactcctgccactgggccaccccgggcagcagctactaacctcttttactgcaggtggtcccacgcagactccagacagggttagactcagaggactgcctccctggatgtagcagagaatgtttttacaaaggctctcctttcccacctcggtgggatggtaggtcacttcaaaagaaacctccatgcctgaggtaatatagccttcttctgggctaatggagaaatgaggctcaaattttttgatgtcccatttaaaccttttccaagacaaaagaagacaagaaagagagtttatggatgttgtaagggtgtcctcaatgctactgagaacaagagactgcctgggctgaggttca

SEQ ID NO: 657090 - DNA, 574 bp, Homo sapiens
gtgatctagccagggatgtcaaagcaggcttccttgagaatgtaatgtttcagatgagagctgaagaatggaaaggaataaaccaaatgaagaggggagaatgaatattccagcagtggaaacggtgtattcacaggcctcgtggagggagggggcaggcctgcatgtttgaaggaggcctggctgagttcacttgctggggtcactcctgccactgggccaccccgggcagcagctactaacctcttttacygcaggtggtcccacgcagactccagacagggttagactcagaggactgcctccctggatgtagcagagaatgtttttacaaaggctctcctttcccacctcggtgggatggtaggtcacttcaaaagaaacctccatgcctgaggtaatatagccttcttctgggctaatggagaaatgaggctcaaattttttgatgtcccatttaaaccttttccaagacaaaagaagacaagaaagagagtttatggatgttgtaagggtgtcctcaatgctactgagaacaagagactgcctgggctgaggttcacctcccttgagt

SEQ ID NO: 657091 - DNA, 551 bp, Homo sapiens
tgactgcaccaggactctcttaactctgacacagaattctggacctttcacattggattgagaatgagtgggtaatccatgccttcactttagagatggaggaatcacattacaacggggataaaaaatttgccacaagttacccagacactcaattgaaagagcttttctttgatctgttggtctcagatttataagatgtttaacagtgtaaaaattgcaagttagtctgactaaattggacagattgcaggtaaaagccccgctccctaaatcccaattgatcccctgagccatttgtactacctaaaagtggtattattactttcaagctacatgctcaaaaattatttcccttgggaacacacacctaacccaaacaaaaagattactacttttttttctactcattcaataccctttgtcccagctatcttgtttctttcttcctatgtctyattcaacattatattcacatgctatgatctccccagacccctgcagactattaggttgaaccacatgaaattgccaatattcagctggttttg

SEQ ID NO: 657092 - DNA, 563 bp, Homo sapiens
cagaaatccaggaactatggtattagcataaatataactatatagtgatcgatggaacagagtagacagccctaaaatagacacaaaaatgctatttggaacagtaccatggcatttcaatattgaaagggtaatcttttcaataagtggtcttgggagarctgcctattcacatagacacagataaactttgatgtctacctcatatctatgatgtatatgaaaattaactcaagatagattatagaccataaatataaatgctaaaagcatcaaacattttggagaaaaaatatagtaaatattttgacaaccttggcataggaaagatatccagtgacccaacaggcattaagcttaagagaaacaaatgatataatggactttctcaaattaaaagttttttgtatttaaaaatattgttacaaaactgaaaatgcaaacaactaagctgcaaaagatgtacttgtatatgacaaaacaactcatatccagaatatatagacaacttctccaaagtaataaataatatttgatttaataaataataaaacaatatttga

SEQ ID NO: 657093 - DNA, 600 bp, Homo sapiens
ttgagagaagagaacaagtgagatgtgagaccgatggtttccagaacatgtccaggctgaagagcaggaaggagggtatcaaacagagcatctcaatctccctgtgatagggagatagagtttagaactgagggatgacaaggtgtttagaatttgcaggaaagattataggaaaggggagagcattgcagaaagagagccttggacttctttagagggtttccctcagatcttcagcagacttttcagtgaatctttgtgaggaaagtacttaaggctaagagaagaatttctagataaaagcagggagagaacaatcctcagaattctcacagggctaagaataattcacaattccaacagccagagttgagaaaccccatactgcacagaacattaagtaggatattcacaagggtgttgcytaagtcatggggggcaattagagctggactaaaggctgctctggtcccacatagcaatgcttgcatggaaaacttgaaataatcaaacaattttcaagtaacttaactgcaccccggaacaaatctcaagattagaggaatgcagaaaaatgcagcagccaacaatgaaaaattc

SEQ ID NO: 657094 - DNA, 537 bp, Homo sapiens
tgtatttcaaatatgggctaaaaacctcacaatgcatattctcagtgctagttttagacttttacacatatggaaactaacaattttctgttaraactaatagctgtaaattaaatcatttttaaaccttacaggaaaaaataaaacacatttcgttgatgtttgaaggaagcatagaagttcttaaatccaacctcactacctttagaaattagtaatgattgctgagaacgtagtgcccacctgaagtcccagaacacactgttgacagaggcaaatctctggaccctgacacagttccttttgcacacttccatgtttccctttagcttgaaaaggagtcctttctgttacatatttattttaaatcagtgaaagcaatacatgcttatggaagatctcattagcttttcaaggacaggttccctgttgaacttgtccaggactcatgtgaaggctaatgatgcaagctgagtgtgagggtgccaggtctcacaaagatagttgcaagcttagccaaaattataaaaatgggaa

SEQ ID NO: 657095 - DNA, 547 bp, Homo sapiens
tgtctttattagcagcctgagaacagactaatacaacaggattgtgggaakttctccaggcattcagagcacccaccttcctgaattaggagtagggaaaccaactgcaccaagatctctgcacagaagaggtggggtgattcaggctgctgaaccaggcaagcagaagcttggaatgcctggagatctacctgagcatgtagcagcaaaggcccctgcaccaagacctctacccaggaagagtggggcatatcaagctgctgatccaggcaagttggtgctctgaatgtctggaggtctgtctgagtgtggagtagagagggccattctgtaccatcatctatgtccaggaaggctgggtggctccggcctgctgaaccataagaacaggtgctttaactggctgaagatctggccaggcatgaagtagagaaggcctacctggaccagtagctaacatcagaaagaatagtggtgagtcacgctgctgattcaagtgaataaatgtctggaggcctgcctgggtatggagcagagaaagccctac

SEQ ID NO: 657096 - DNA, 602 bp, Homo sapiens
caaaggacattataaagtgaaataacgtatagaagtggataaaatatttgcaaattatatatctaataggggtttaataatcagaatctacaaggaagacctacaacttagcaacagaaatgcatacaaccatccgggcgyggtggctcaagcctggaatcccagcactttgagaggccgaggcgggtgaatcacttgaggtcgggagattgagatgagcctggcaaacgtggtgaaactccgtctctactaaaagtacaaaaatttgtcgggcgaagtggtgggtatctgtaatcccagctacttgggaggctgaggcaggagaatcgcttaaacctggaaggcggaggttacagtgagcccccgatcgcactattgcactccagcctgggcgacaagagcgaaactccgtctgaataggtgtttctcaaataagttatacaaatgactaataggcacacaaaaaagacgtccaacatttttagccattagggaaattcaaataaaagccacagtgagttgttacttctatttaccaggataattatataattttttaaaaaattaaaaataataaatcttggtgagaatgtggagatatt

SEQ ID NO: 657097 - DNA, 623 bp, Homo sapiens
aatggaggtataggaattgggtaagcattcctgttcaaaaagggagaaattgatcaaaagaaagaagatacaggccccaagcaagtttgaatcctagcaaggcagtcattaaaacttaaagctccaaaataatctcttttgatttcgtgtccgacatccaaggcatactggtacaaggagtggactcccaaggccttgggcaacgtgatttcttagttatagttaaaaatggattatggatatttacaaagctaactcacatctccttgtctgactcactctttcttctttccttccctccctccctcccccttccttccttccttcctttcttttctttcttttcctttttctttcttttttctttctttctctttcttctttctttctttcctttatttatttatttcttctttccttccttccttcctttttttcttcctttcttgcttgcttgcttgctttctctttcttttctttcttataatggctgatcagtaattcatttttagagaaatatgagttgatgtatggatttttaaaattcattgatcagtcaayaagcaaatactttgctatcaactgtgacatgctaagcatattaggtgaatagtacaaaatgt

SEQ ID NO: 657098 - DNA, 569 bp, Homo sapiens
tcttgttggggtatcaatggataattatatgtgacccttaaagatgctagccttactataccataaattatatattaacttaataatagaaacttcagttctcaaactttgtcaattttgtttggcacagagttagccaacaatttaagagcaaaagaagttcatttttgctgttttggatatttttacsgtgaaattcaccaaaggtctcattccattttttgttagttactgacaatggactttggtgtggctttcttaaattttctctaaactcataaacccaaatatggaggaaattttgacttaactaaaattaatccttgtaggcaatcgtgaatcctaattttaattcaccacatctttcctcaaatgtcatttccaatcttatttctgaaaacactttttttttttcacttcccattatattcaggaaactacattgacctctagttacctatagtttactgtccaacccctcagtttaaagttcactgataatccaggacatcgtttttcttactatcctctacctatactggaatgtaactgctcactcttgagtaatc

SEQ ID NO: 657099 - DNA, 502 bp, Homo sapiens
ttaacatggtgtgctagagtcccatctaatagtttttgtgtttcaacaggattcttccttgccagcctccaggatggaagagtaatggagggaactctcyggttattttctctacctgtcctcactctaggaggaaaattgacctctctggttgttgagattgttaggtgactgcaaatcttggggttgcattcatatgctgggcagagtaaatgtattaaaagtaacacttttgtgtttctttttttttttctctccttggtctcttaaacctgctggtatttgtgaggctcacatttgcagcttctgtatctacaatttgatgggaaagtcagtctcctggagggaaatgagagacactaccacattcttcggtttatctgattatctaactgaatataattctaaataaactattactctactcaaatgcaggaaggagaacctattgaaactgttctcttgtcataaaattgccctcgggttcattattgtaattacc

SEQ ID NO: 657100 - DNA, 573 bp, Homo sapiens
agctgggattacagccaaaagccacagtgcctggcttgttactgttttaatccatgagacggaaataggtctccatttatttaaaccatctttgacttagttcatcagtattttgtacttttscacatgtagatcctatacatattttgttagatttttatacttaagtatttttggtgcaattataaatggaattttttatttcaaattccatttgtacatggctggtatataaaaaagcaatcttttgtatattcaccttgctgtactcacttattagtttcaagagtttttttgtttttgtgtttggtagattcttcaagatttttttcatagacaatcatgtcatctgcaaataaagacagtttgtctctccaatttaaatatgtattcattttattttctttttctttcttattgcagtagctaggactttcagtataatgtcgaataggagtgatgagaaggatatccttgccttgatccagatactatagagaaagcattcattctatttgctacttttttgtggaggacttttgtgtctatgttcataaaagatattgggctata

SEQ ID NO: 657101 - DNA, 573 bp, Homo sapiens
agctgggattacagccaaaagccacagtgcctggcttgttactgttttaatccatgagacggaaataggtctccatttatttaaaccatctttgacttagttcatcagtattttgtacttttgcacatgtagatcctatacrtattttgttagatttttatacttaagtatttttggtgcaattataaatggaattttttatttcaaattccatttgtacatggctggtatataaaaaagcaatcttttgtatattcaccttgctgtactcacttattagtttcaagagtttttttgtttttgtgtttggtagattcttcaagatttttttcatagacaatcatgtcatctgcaaataaagacagtttgtctctccaatttaaatatgtattcattttattttctttttctttcttattgcagtagctaggactttcagtataatgtcgaataggagtgatgagaaggatatccttgccttgatccagatactatagagaaagcattcattctatttgctacttttttgtggaggacttttgtgtctatgttcataaaagatattgggctata

SEQ ID NO: 657102 - DNA, 630 bp, Homo sapiens
tctttatgtccatgactatccgatgttcagctcccacttataagttagaacatgtggtatttggttttctattcctgtgttaattwtcttaggataatggcctccagctgcttccatgttgttgcaagggacatcattttattcttttatatggctgcgtagtattcattggtatatatgtatcacattttctttctccaatcccctgttgatgggcacctagttgattccatgtctttgctattgtgaatagtgctgcaattaatatgcaagtgcatgtatctttttgttagaatgatttgctttcctttggatatatacccagtaatgggatgctgggtggaatggtagttctaacttatttgaggaatctccaaactgctttccacaatgaaaacaaatttacattcccaccactgtatataagtgttcctttttttccacagctttacaagcatacatagtttattgacattttaataattgccattttggctgataggaaatatctcattgtgttttgatttatatatctctgataatatcaatatggaacatttttcatatgtttgttggatgcttgtatgtcttatttgaggagcatctgtttatatattttgcctacttatt

SEQ ID NO: 657103 - DNA, 630 bp, Homo sapiens
tctttatgtccatgactatccgatgttcagctcccacttataagttagaacatgtggtatttggttttctattcctgtgttaattttcttaggataatggcctccagctgcttccatgttgttgcaagggacatcattttattcttttatatggctgcgtagtattcattggtatatatgtatcacattttctttctccaatcccctgttgatgggcacctagttgattccatgtctttgctattgtgaatagtgctgcaattaatatgcaagtgcatgtatctttttgktagaatgatttgctttcctttggatatatacccagtaatgggatgctgggtggaatggtagttctaacttatttgaggaatctccaaactgctttccacaatgaaaacaaatttacattcccaccactgtatataagtgttcctttttttccacagctttacaagcatacatagtttattgacattttaataattgccattttggctgataggaaatatctcattgtgttttgatttatatatctctgataatatcaatatggaacatttttcatatgtttgttggatgcttgtatgtcttatttgaggagcatctgtttatatattttgcctacttatt

SEQ ID NO: 657104 - DNA, 607 bp, Homo sapiens
agtgtaagtatttcttgttattgaatagaaatatgctgaaaagtttgttggagcagagtaaattatcaagagttttgcagaaattattattgctgcctttgctgacttttgataacccatcaagtctrtctttctcatacaatgtactatttatgtatgccacctttttatgttgtaaaaaagaaagatagatcacccataaggtttgcgtgtgtatgtgtgtgtgtgtgtatttatatgatagtgttattttttacaaaaagacattattaaaggtacattatgtataattacattacttctatgtgtggaagatagactctaaagtctaatttttgtctcctgatgtgtgtgtaatccccccttgtgtgatggctaaaccagtgtcttgctcttaactagaatatggcatatggcaaaggtgatgggttgtcactctcagtatcacatttctgtatgtgtaatctatcttcctggcaactcccattctcttctgtgatctaaaatttataagaggccattgttttggactgagcttctgcattaggcataacagaccaaaccaaaattgagtcatacatgttaagtgccatgtaatcaaactgta

SEQ ID NO: 657105 - DNA, 494 bp, Homo sapiens
cgttatgtactttttttttcttctgcccccaccatccatgttagaaaagatgtatttatctgagaaasatgttgctttctgtttgtttttctgttctatcttcctagaacactatctggcatagaatgagtacttgtatttgtctgttttcacaatgctataaagatactgcctgagactgggtaatttataaaggaaggaagtttaattgactcacaattctgcatggctggggaggcctcaggaaacttgcaatcatggtggaagttgaaggggaagcaaggcacatcttacgtgctggcaggagacggagtgggaacaggggaaactgccacttttaaaccatcagatcttgtgagaactccctcactatcaggagagagaacaccatggggaaaaccatccccatgatccaatcacctcccagcaggtccctccctcaacatgtagagattacagttctagatgagatttgagtggggacacagagccaa

SEQ ID NO: 657106 - DNA, 494 bp, Homo sapiens
cgttatgtactttttttttcttctgcccccaccatccatgttagaaaagatgtatttatctgagaaacatgttgctttctgtttgtttttctgttctatcttcctagaacactatctggcatagaatgagtacttgtatttgtctgttttcacaatgctataaagatactgcctgagactgggtaatttataaaggaaggaagtttaattgactcacaattctgcatggctggggaggcctcaggaaacttgcaatcatggtggaagttgaaggggaagcaaggcacatcttacrtgctggcaggagacggagtgggaacaggggaaactgccacttttaaaccatcagatcttgtgagaactccctcactatcaggagagagaacaccatggggaaaaccatccccatgatccaatcacctcccagcaggtccctccctcaacatgtagagattacagttctagatgagatttgagtggggacacagagccaa

SEQ ID NO: 657107 - DNA, 494 bp, Homo sapiens
cgttatgtactttttttttcttctgcccccaccatccatgttagaaaagatgtatttatctgagaaacatgttgctttctgtttgtttttctgttctatcttcctagaacactatctggcatagaatgagtacttgtatttgtctgttttcacaatgctataaagatactgcctgagactgggtaatttataaaggaaggaagtttaattgactcacaattctgcatggctggggaggcctcaggaaacttgcaatcatggtggaagttgaaggggaagcaaggcacatcttacgtgctggcaggagacrgagtgggaacaggggaaactgccacttttaaaccatcagatcttgtgagaactccctcactatcaggagagagaacaccatggggaaaaccatccccatgatccaatcacctcccagcaggtccctccctcaacatgtagagattacagttctagatgagatttgagtggggacacagagccaa

SEQ ID NO: 657108 - DNA, 567 bp, Homo sapiens
attacagactaaattcagaagacatattttcctaacaacataattcaaatctaaaaggattaatttgggtctaaacaagctaagggctttttcaggacagtaaaatacccacacatatacacacacaaaatagaataataatctgttcagtataataatattagaatgttatttttattgctttcaaatacatttttaaactaccatatattacaatatatttaaacaagatcttagaaaattcactactgcttactgcttaactatttggatttctaacctctgacctcaactaggaaaattctcgacagattacagattacatttaaacaatgtgtgacttttttgaagcctcctgaggctaacatttcayggggtaatatgtattgctggttttgttttgtttttctgaatgagataaaaataatattaaaaagacaattctagatttgtggtatatctttataattttaaaatgccacctgatgcaaaaataaaaagaaaagaaaatccagtatgagtgtttgaaaccctatttgcttcaaatagaaaggtctattttaaacc

SEQ ID NO: 657109 - DNA, 580 bp, Homo sapiens
tgaactgaaactcacaaagcagaagagaggggacaatttctgtgatattagctcagtagtacaatgaaacttcagagaagggcagctgctcactcgtcgttgacattgtatttagctagctcttctacattatcctgatttgatcattacacaatgtgtacatggatcaaaatactacattgtcccccataaacaggtagaattattatgtttcaattaaaaataaaaattttttaaaaaagatccttcactcttaaatcttcgactagctaaagcatttaaaaaatatatatctaggttctcaaagtatggtgccagatcgacagcataggcatcatcttcacctgggaatttgttagaaatggacattcttaggtccaatcccagatcaactaaatcagaaactttggaagtgggatkcaaccggtatgtttttttgttttacttagttttgttttggcataaaacaacacagactgcttatcttgcagttctgtaggttagaagtctgacatgagtctcacttggctaaaatcaaggtgtccacagggctgcattcctttctagaggctctaggcaa

SEQ ID NO: 657110 - DNA, 590 bp, Homo sapiens
agctttggggaaagaaagataccagaagtgaaaggagaaaggtgccatgtgtgatgaagcagataaagcaaagagacaaagggacacatcccggaagccagatgtgcagatatggaaggaaaacatgctgatcctcaggtcaaaggtgaaagtttgagtcctgcctctgcctctccctggatatttgactttgatctctttgagctggctgcttcacatttggatgtcataggctttttgtgaaactgttatcrgacaacatgtgtgtatgcctagtatgagttatcagagcatttttgagagatgccttaggctgtaatgcaaaaagatatgaaatggctgctctggtaaattagaaagctcacaagatacaccagctgggcagtaagagggttctagctgaagcagaaaatcatgattcttctttcagaagggacacccagggacccctcttgctgccctcctgggcactgaaaggtagcacagaaaagccatagagaaagaagcaccacagtggaaattccatgatgggatggtggtggccacagcaggaaggcattttcaagagctactggagtccccaggcccag

SEQ ID NO: 657111 - DNA, 601 bp, Homo sapiens
gttagctttatacttatgtgtgcttttatgataacaagtatcattctttcatttccatttttagaactcttttaaaaatttttgtaggactgatttggtggtaacaaattcccttagcatttgcttgtctagaaaagacattagttcttctttgtttataaagtttagtttggtgggatgtataattcttggttggcatttatgttttctttcaaaatgttaaaaatagacccccaatctcttctggcttataaggtttcygctgagatgtccaccattagtctgatggtattccctttatgggtaatttggcccttttctctagcttcctttgagattttttttttatttcacatgaatcatgaatagtctgatgactatttgccttgggaatggtcatattgtttagtatctctcagtagtttttatttcttatatataatttcttatatctggatggcaatgtctctaacaagattggggaaattttatttaattatttcctgaaatatgttttccaatttgcttactctttcttcttctttctcaggaatgccagtaagtcataggtttttgttgtttaacataatatcatataata

SEQ ID NO: 657112 - DNA, 601 bp, Homo sapiens
gttagctttatacttatgtgtgcttttatgataacaagtatcattctttcatttccatttttagaactcttttaaaaatttttgtaggactgatttggtggtaacaaattcccttagcatttgcttgtctagaaaagacattagttcttctttgtttataaagtttagtttggtgggatgtataattcttggttggcatttatgttttctttcaaaatgttaaaaatagacccccaatctcttctggcttataaggtttctgctgagatgtccaccattagtctgatggtattccctttatgggtaatttggcccttktctctagcttcctttgagattttttttttatttcacatgaatcatgaatagtctgatgactatttgccttgggaatggtcatattgtttagtatctctcagtagtttttatttcttatatataatttcttatatctggatggcaatgtctctaacaagattggggaaattttatttaattatttcctgaaatatgttttccaatttgcttactctttcttcttctttctcaggaatgccagtaagtcataggtttttgttgtttaacataatatcatataata

SEQ ID NO: 657113 - DNA, 557 bp, Homo sapiens
ttctttgtaatcttgattgtgtagttgctttatagggtctgttagctttatacttatgtgtgcttttatgataacaagtatcattctttcatttccatttttagaactcttttaaaaatttttgtaggactgatttggtggtaacaaattcccttagcatttgcttgtctagaaaagacattagttcttctttgtttataaagtttagtttggtgggatgtataattcttggttggcatttatgttttctttcaaaatgttaaaaatagacccccaatctcttctggcttataaggtttctgctgagatgtccaccattagtctgatggtattccctttatgggtaatttggcccttttctctagcttcctttgagattttttttttatttcacatkaatcatgaatagtctgatgactatttgccttgggaatggtcatattgtttagtatctctcagtagtttttatttcttatatataatttcttatatctggatggcaatgtctctaacaagattggggaaattttatttaattatttcctgaaatatgtttt

SEQ ID NO: 657114 - DNA, 558 bp, Homo sapiens
ctcaccacactgattctttctgactgagcccctctctaccccaaatacaggggaccctaataattaggcaggaatatcattacccctattcagcctgaagaagtttcagaagatggatcttcatccctttgcagcccttagtattaaggattctcttataaaagtgagggggaaatgtcagaggtgtttgaaccagrgcaattccatcttaaacaggagctaggtaaaataaggctgtgatctactggactgcatttccagaaggttaaggcattctaagtcacaggatgagataggaagttggcacaagatacaagtcataaagaccttgctgataaaacagtttgcagcaaagaagtcagccaaaacccgtcaaaatcaagatggtgacaagagtgacctctggttgtcctcactactacacttctgccagcaccatgacactttacaaatgccatggcaacatcaggaggttaccttatatggtctaaaaaggggaggcatgaataatccaccccttgtttagcatatactcaagaaataaccataaaaatgggc

SEQ ID NO: 657115 - DNA, 516 bp, Homo sapiens
tatggcccacaagctaagaagagtttttatatttttaaagggatgtaaaaaagaaaaaaatgcaacagtaaggaacaatatgcaacagagactatatgcacctcataaagtctaaatatttaatatctggcctgttacagaagaaatttgccaatctctattctatatgatcaattatctcctatyctattcacatatatgtggtagcctgtatattacaaaatagctagaagagagtgttggaaataaatttttggtgctgcaaaagaaatagcacttgaacatgaattttctcagcaaggcaattttacttccatagaagggtgtgtctcatggatggagcaatggtgagagcacacctgaacaagggaggggaaggggttcttatccctgacacaggtagcccctgctgctgtgtcattccactattgactagggttggactgcacatctaagctaattcagattggctattttaaagagaacagaggtacgagccagagtggcaggatgagt

SEQ ID NO: 657116 - DNA, 516 bp, Homo sapiens
tatggcccacaagctaagaagagtttttatatttttaaagggatgtaaaaaagaaaaaaatgcaacagtaaggaacaatatgcaacagagactatatgcacctcataaagtctaaatatttaatatctggcctgttacagaagaaatttgccaatctctattctatatgatcaattatctcctattctattcacatatatgtggtagcctgtatattacaaaatagctagaagagagtgttggaaataaatttttggtgctgcaaaagaaatagcactygaacatgaattttctcagcaaggcaattttacttccatagaagggtgtgtctcatggatggagcaatggtgagagcacacctgaacaagggaggggaaggggttcttatccctgacacaggtagcccctgctgctgtgtcattccactattgactagggttggactgcacatctaagctaattcagattggctattttaaagagaacagaggtacgagccagagtggcaggatgagt

SEQ ID NO: 657117 - DNA, 516 bp, Homo sapiens
tatggcccacaagctaagaagagtttttatatttttaaagggatgtaaaaaagaaaaaaatgcaacagtaaggaacaatatgcaacagagactatatgcacctcataaagtctaaatatttaatatctggcctgttacagaagaaatttgccaatctctattctatatgatcaattatctcctattctattcacatatatgtggtagcctgtatattacaaaatagctagaagagagtgttggaaataaatttttggtgctgcaaaagaaatagcacttgaacatgaattttctcagcaaggcaattttacttcyatagaagggtgtgtctcatggatggagcaatggtgagagcacacctgaacaagggaggggaaggggttcttatccctgacacaggtagcccctgctgctgtgtcattccactattgactagggttggactgcacatctaagctaattcagattggctattttaaagagaacagaggtacgagccagagtggcaggatgagt

SEQ ID NO: 657118 - DNA, 481 bp, Homo sapiens
ctctattctatatgatcaattatctcctattctattcacatatatgtggtagcctgtatattacaaaatagctagaagagagtgttggaaataaatttttggtgctgcaaaagaaatagcacttgaacatgaattttctcagcaaggcaattttacttccatagaagggtgtgtctcatggatggagcaatggtgagagcacacctgaacaagggaggggaaggggttcttatccctgacacaggtagcccctgctgctgtgtcattccactattgactagggttggactgcacatctaagctaattcagattggctattttaaagagaacagaggtacragccagagtggcaggatgagtagtttggcgggaacagttacagaacaggtgactcaggatgactaagaccgaacagagcaggtgaccaaggatgatgaagatcagagcaggtgaacaagggtgactaaggtcagagcaggt

SEQ ID NO: 657119 - DNA, 481 bp, Homo sapiens
ctctattctatatgatcaattatctcctattctattcacatatatgtggtagcctgtatattacaaaatagctagaagagagtgttggaaataaatttttggtgctgcaaaagaaatagcacttgaacatgaattttctcagcaaggcaattttacttccatagaagggtgtgtctcatggatggagcaatggtgagagcacacctgaacaagggaggggaaggggttcttatccctgacacaggtagcccctgctgctgtgtcattccactattgactagggttggactgcacatctaagctaattcagattggctattttaaagagaacagaggtacgagccagagtggcaggatgagtagtttggcgggaacagttacakaacaggtgactcaggatgactaagaccgaacagagcaggtgaccaaggatgatgaagatcagagcaggtgaacaagggtgactaaggtcagagcaggt

SEQ ID NO: 657120 - DNA, 615 bp, Homo sapiens
tattctgttgttgttgtatacccttgcaattttggcagcggcccgatgtagtctacttaccacctggtcaaggtcactcgccctgttatcacttgtgtaacagtgggcagctgcctccatttagggtatgactgagcacatgctgggcatttctgacgagactctgagacacatagcctattctgtatgtgtctgttaggtccattttctttaaggtgtagctcaaccgtaatgttttcttattgattttctgtctgaatgatttatccattgtttaaagttgggtactacacttccctattattattgcattgcagtctatctttctcttcagacctactaatatttgctttatatgtttaggtgctctgctaatgggtgcatatatacttacagttcttatgtcttctgggtacactgatatctttatcattacacagattttgtctcattttatagtttttgactaaaaggctatcttacatcatgtaagaatagctactccttctctctttgatttgcattkgcatagaatatcttttccaattcctttgttttcagtctatgtgtgttcttaaagttgaagtcaatatcttgtaggcaacaaatagttgg

SEQ ID NO: 657121 - DNA, 525 bp, Homo sapiens
ttatgttatttttcaagtcaggtggaagatatgatttgataagaagaaatatttgattttatctattttaaactctgagattaggtgcaaaaagattaggattggtatgtattcatgattgattaagcccgttatcatatgacatgcttctctttacttttgattatattttttcttctgaaatytacagagtcagatattgatatgactgctttagctcctttataattactatttgcattgtattgtatatctttgttcatctttttatgtttaagtagtctgtgtctttatatttaaagtggattcaaggtaggcagcaaatagttggctgttgcttgtattgttcattctagcaatgtctgccttttagtagacttcttatactatttacatataatgtaaatgatatgttgggtttatgtctactaccttgctacttttttttaatttgggacttcctttactttccatttttgtagtagaattatatcaaccatgatatgtcttgcttttgtttgactt

SEQ ID NO: 657122 - DNA, 561 bp, Homo sapiens
aatatttgccattgaattctaaaatgtttttgtagaaatgtgcaataccttaatagaactttgaaaatcatacatactgtacttacacattcagattattaatagttgaaaatgaggagtctagcaccatttacagaatcttgaagggacaggcaatttaggccaggtgtaaagatatggaaatcagtccagttactttgataaatgacaacaaataaaggaatggcatgaggccrtgtatttgaggtgtctgcagcaataagaatagattgaaattaatttgtaacaattgaactagtgtgagtgagatattgcatttgcttttctgtatcaaaaaatgtaaagtatacaacagtgagttaaataatttagcaatgacagatgtatcttcctagaatctcagaagcatacatcctctttaatcaaaagtgattcttttagtatcacagttgtactctttacccttaccatatgattcctcttttacagaagctaaatttaatattatttaatatgattggctacctgctcttcaaagatgggactaaattatctgagaac

SEQ ID NO: 657123 - DNA, 598 bp, Homo sapiens
agattgcagtaaagacaggcataagaaattataaaagtattaatttggggaactaataaatgtccatgaaatcttcacaatccacgttcttctgccatggcttcagccagtccctccgtttggggttgctgacttcccacaacactaaatgcaatttcagatagcataatagattttctaattaaatttatatttgaactacttacctttgmtaatgatttcacagcctcttctttctgtaattgagctaatatcacaataacagaagagttttccaaggcctattgaatagcatctctgatgtaattaattcattcaacaaataattatagattgtcttttctgcaccacacagttttatagaccctggagacaaagcaatgggagaaaaaaataataaaaactgtcccatcctcatgtaacttgcatcctaaagctgtgggggtgggtggtgttggcacaagcaattaaaaataaataagtaaaatatgtattatatcagttagtgacatctaactgacatgatatatatatttatgaattaagaggggagaagttgagagacagcaaaaagagaaaaaaagatagtttggtaatg

SEQ ID NO: 657124 - DNA, 545 bp, Homo sapiens
tattaaaacattggaatacaaatctgacaaaaaggaaagtagacactgaagaaaaaccacatagcgttctttacaattctccattcaccagttagctacttccaacctttagcattcttcacctctaacttatttaaaaaaagtaaatgcagtaaactagagctagaattaggttacaaatggatatcattgtgaaataggggaagacattctttgatgtttcattattaactctacttcagatttcaaatacagagttaaataatgccttgtcttggacatcaggttatactggaaataaacttctctaatgggattaacaccccatccttagtacctgatttggaaattaattgcaggtctctgcctaaggtaatgataaaccgaatgtgaaataaaacttccatttaaaggagaaatgtgaaatttgtatgaagtactttctggactcagaaattaatttgagcaaggarctttaactaaaagcattctggtcaaacaggaaggaagaagcaaaggttataaggcaagaggtcaaattgtag

SEQ ID NO: 657125 - DNA, 617 bp, Homo sapiens
tattattattgcattggagtctatctctccctttacatctaatagtatttgctttatatgtctgggtattctggtttgagattcatatatatttgtagttgtatatccccttactgaattgaccccttcatcattatatcatgaccatctttgtctcattttacagtttttgacttaaagtccattttatctgatctaagtatagctactcttgctctcttttgacttccatttgcatggcatataattttttcttctttatttttagtcagtatgtgtccktacaggtgaagtgagtctcctgtaagcagatatagttgtatgtttttaaaatgcattcagccatcttttaattacagaatttaatacatttatattgaaagttatattgataggtacggatttactattgccattttgttcattgttttctggttattttgtaggtctttgtttctttcttcctctcttgtgtttacttttgtggtttcatggttttattccattctttttttcatttgcatatatgctgtaacttttttctttgttgttactctggggcttacataaaaaatcttatagttctaaaggtttattttaagctaataacaatttaa

SEQ ID NO: 657126 - DNA, 531 bp, Homo sapiens
acggatttactattgccattttgttcattgttttctggttattttgtaggtctttgtttctttcttcctctcttgtgtttacttttgtggtttcatggttttattccattctytttttcatttgcatatatgctgtaacttttttctttgttgttactctggggcttacataaaaaatcttatagttctaaaggtttattttaagctaataacaatttaactttgattgcctgcaaatattctagactttgaccctccaacccaatttataattttgttgtcttaattcacatcttttgtatggcttatttcttaaaaacttattgtagctatggttattgttgaccattttgacttttaaccttcatactgtatacaccactacaataatgtagcactctgaatttaattatgagtttacttctacccgtgagtttaaatactttcatggtagtaattaacatcctttcacctcatggtggcaattaacatcctttgaaaccgtcttttaagcatttcttgtacggctgt

SEQ ID NO: 657127 - DNA, 570 bp, Homo sapiens
gtaacagaaacataaaaaaatcacaaatcataagtgaatgtatagtttgatgaattgatgaattaccatatgtatttctttcctatagtaacaaattactacacaattggtggctcataagaaaagaagtttattttctcttagttatggaggacagaaattcaaaatcagtatcactggatcaaaatcaagatgttaacagagccacactccttttakaaactctggagaaaaatctgtttcttgccatttccagcttctggtgtctgtgaggacctgcattttcactctcgtctttaatggtgattgatagtgtattttaatgaagtctagtttgtcattttttcttttttttcttgtattactttattgtttctttgcatgagtcttgtttcccagtttggtagagggttcttaaaatgtaggttcatactttgtatatcctccaagtgcccagaccatccaagccacagagctgttgtatgtgcgtgcactctccctctgctctctttctctctctctctccacacacactcacacacacacacgcactattaccaatcatagatt

SEQ ID NO: 657128 - DNA, 486 bp, Homo sapiens
agggtcagcagtttgcatcttattttatgccagtgatgtcagtttctctggttgttcttggtccttgtggtcatgtttcaatatctgtgcattggatgacataggaatgtattgcaatctttgcagtcttgcttttctgtgattgcccttctacagtaggcaygttcaggaatattgagaagactgttgtggttcctaagcctgtgactgttgaagtcattgtcagcactgcaatgacttcagctgttacaggcttagaaaccacaaggtccatagtggctgctgttgcccaagctggagtcccatgaagagttggaggtaaggtgaaggtttgcttctggattctcagacagcagccctgttacctgcaatgctgacaggtttggctttctccgagtttctgagaggcctttcactacatcatttgatgagtctttgggttggccatactacaaatggctacaatgagctggaaataaacacagg

SEQ ID NO: 657129 - DNA, 595 bp, Homo sapiens
aatatctaattatgatcactaattctgtctctctgcagttccttcttcaattgtcaacatggtatgtttatttgcatgttctgtcaacacctgaaagtttacgaaaagaaaaaatattccctacttgcaaaaaagagttgctagcttttctattattttcaatgatagtacgagtttttcttaatgatcagaatttaccttttttttgtttattcatcatacttaatcacttaccatctacggcccaattttactctccagtatcattttgagggcatattttctttcaattttcatataaattgttaatttcagctctttctgagatactattatgtgacctcccaattaaagaggatctaataccttacatgccaaagccttttccttccagccaaaacaaaactaattaaaatatcrtcctcagtatattgaagttctaataaatcagctcgctacaatatttttacttacctgttttaaaggcacagtatgaggaacaagttgctcaagaggttattcaaaattaaaaatctttttattctctgtgatgccccatatatgattctgcattctactttctgtctttttaaaa

SEQ ID NO: 657130 - DNA, 595 bp, Homo sapiens
aatatctaattatgatcactaattctgtctctctgcagttccttcttcaattgtcaacatggtatgtttatttgcatgttctgtcaacacctgaaagtttacgaaaagaaaaaatattccctacttgcaaaaaagagttgctagcttttctattattttcaatgatagtacgagtttttcttaatgatcagaatttaccttttttttgtttattcatcatacttaatcacttaccatctacggcccaattttactctccagtatcattttgagggcatattttctttcaattttcatataaattgttaatttcagctctttctgagatactattatgtgacctcccaattaaagaggatctaataccttacatgccaaagccttttccttccagccaaaacaaaactaattaaaatatcgtcctcagtatattgaagttctaataaatcagctcgctacaatakttttacttacctgttttaaaggcacagtatgaggaacaagttgctcaagaggttattcaaaattaaaaatctttttattctctgtgatgccccatatatgattctgcattctactttctgtctttttaaaa

SEQ ID NO: 657131 - DNA, 595 bp, Homo sapiens
aatatctaattatgatcactaattctgtctctctgcagttccttcttcaattgtcaacatggtatgtttatttgcatgttctgtcaacacctgaaagtttacgaaaagaaaaaatattccctacttgcaaaaaagagttgctagcttttctattattttcaatgatagtacgagtttttcttaatgatcagaatttaccttttttttgtttattcatcatacttaatcacttaccatctacggcccaattttactctccagtatcattttgagggcatattttctttcaattttcatataaattgttaatttcagctctttctgagatactattatgtgacctcccaattaaagaggatctaataccttacatgccaaagccttttccttccagccaaaacaaaactaattaaaatatcgtcctcagtatattgaagttctaataaatcagctcgctacaatatttttacttacctgttttaaaggcacagtatgaggaacaagttgctcaagaggttattcaaaattaaaaatctttttattctctgtgatgccccatatatgattcygcattctactttctgtctttttaaaa

SEQ ID NO: 657132 - DNA, 591 bp, Homo sapiens
tttttaaatatggtaaatatttgacatttgacttttttaacaaaaataaatatatttggaatgatgaaaactttactttgcacttggcttatttgctatggacaaatttattaattttggtggaggtattgtcaacatttctaacaggtagatgtaaatctttaattggtataaaatctaagaaagtgaaactgcagttgaaagttacaacttccagccaaaactgaaacaagtaaagtttacaaggaacttagctaccacctagtgaatactgtgtttttttgctttgctttaaacaagaaaccaagagttaggaagatggaaaatttactaaaatgggctggagtctttccagtcttctaagagcaagctaaaggcagacttaaatcttayagcttccaaagaggcggtcaagctggtaactctctcaccattacccaaaatagcctttttcacaggcaaatttgaacattactttgagatatttccttccactggaacccatcagccaagttcagaattccagtggacatcacaacccattaagtcaccattagaaattaaattcttctgaaagtggcaaggcagata

SEQ ID NO: 657133 - DNA, 490 bp, Homo sapiens
aatatttccctttatctgctgttcagttactctagtaaatgggcataattctgaagaatgattgggggaattgtttttgtatacatttactgtagcgtggagctcttcttcaagtggacctggcctcttcttgaattgatcgrtgctagatctgattactcactcgtttttagaaactgggtaatagattgtttttattccattatggtggcttttaccaatattttgcttaccacttcttgatttcctttttcctccttgggtgatgtgagtcaagaaataattctgttgggtgcctacagctcttgctccatctagttatcataacagacacctgcgggttaagatctaagctttttgttacatacttgttgcacactgtcaaaattactatagttgcctctgatggctaatgactgctacccatcctcttaaattccaggctcctactgttgtgactgacagtagggagtccatgctttaagcttta

SEQ ID NO: 657134 - DNA, 566 bp, Homo sapiens
gtctagtagttgtgatatacagtgtgccagagattctcatgatcttacctaccatcaacaatgagggactgttgcattgggctagtgagcgatttaatttcaaaatctcattctgagaatctgttctayagaagcaggtctagtattaactgtcctaccttgtattcatccagaagtctctgagatcaggaatggagtgcaaatacttttactgggcaaaagcgatcctaagaaaatctggtagttttctggtagagtgaggaagtgggacaagggaagaagagaaccaataaacagcacattaccaaacaatttgccactgtaggcaattgaagcaatccttcttctggcattctcaatatgccttactctgcttactttttttccttagtgcttatcatagatgagtcatttatttgtatttatgtgtttgtgttttctgctagattgtaagtgtcaagaggaaagtaattcttacctattttattcattgatgcaacctaaggatttatactgtatgtatagttagctgtcctctttttttggccgtaacaaaacaccatgaa

SEQ ID NO: 657135 - DNA, 595 bp, Homo sapiens
acatgcttgttagtatataacagtctatattttagagtatcacttgcaagttaaaaattatacatagataacacttagttgatcactttcatgtgccaggcagttgacaggcattttcacttacttcttttcttccttcccctccctctctctttctttctaattgataaatgaaaattatatatgtttataatgtacaacatgatgttttcatatatgtaaacattgtggaatggctaaatcacatacttattttctgtgatgacaatgcaaaacctactctcttagtgattttcaagtgtataatatattgctattagctataatcscaatgatgtacaatagatcacttgaattttttccttctgtctaattgaaactttgttctttgacgaacttatccctcacccttctccttcccagcctctggtaaccaccattttactttctatttctgtaagtttgacttttttagattccacatattaagtgacatcatttgatatttgtctttctgtgcctggcttatttcacttaatacaatgtccttgaggtgttgctgcaaatgacaggatttttttctttatttagatta

SEQ ID NO: 657136 - DNA, 595 bp, Homo sapiens
acatgcttgttagtatataacagtctatattttagagtatcacttgcaagttaaaaattatacatagataacacttagttgatcactttcatgtgccaggcagttgacaggcattttcacttacttcttttcttccttcccctccctctctctttctttctaattgataaatgaaaattatatatgtttataatgtacaacatgatgttttcatatatgtaaacattgtggaatggctaaatcacatacttattttctgtgatgacaatgcaaaacctactctcttagtgattttcaagtgtataatatattgctattagctataatcgcaatgatgtacaatagrtcacttgaattttttccttctgtctaattgaaactttgttctttgacgaacttatccctcacccttctccttcccagcctctggtaaccaccattttactttctatttctgtaagtttgacttttttagattccacatattaagtgacatcatttgatatttgtctttctgtgcctggcttatttcacttaatacaatgtccttgaggtgttgctgcaaatgacaggatttttttctttatttagatta

SEQ ID NO: 657137 - DNA, 641 bp, Homo sapiens
attttaatgataatttttcaaatatgatgtataataatgatagtacattttagtttgcatttgcctcagcagcactgtggatgaacatcttttcagatttttattagtcacacatattttaattctaaaaattgcatgttcatcactttaatttctgaatgtttatcatattttctttattaatgtatgaaagttctctagacttcaaaaatattaaacaatacaaatgtttgaaacatttattgcaaacctaaatttacagctgattgaatttttgcttatgtaaacttccaaccagatggagacagaacattaacaatgcctcagatgacttcctcactcctcccaacaaaacgyctaaagctaacctcttttataacctctatcgcctttgattaattttgcctgtgtttgaactttgtataaatgggattataaaatatataccctttctatgtgtgttgattactttgatttgacattatgactgaaatttattctagttattgcgtgtgtcattatacatttttattactaacaatctttattatttcttccattatttaagcatacgactgtttatacattgtactgttgctggatatttgggtagtttctcatttttggctaatacaaaaaaa

SEQ ID NO: 657138 - DNA, 446 bp, Homo sapiens
ggaggcaggttgtccctaagcagttcccagcttgactttttcctttagcttagtgattttggggccccaagatttattttcctttcacattagagacatattgaatggctttgaccaacatgctgatagtgatacggacaatgaaagccaggctgaggtggtctcagatagagattaggaattttttgggaggtggaataaaggtgactcctgctatgctttagcaaagagactggtggcacttcatccttgccctagagatctgcgamacattgaactagagagagattatttaaggtatctggctgaagaaatttctaagcagcaagatgttcaagaaaaagcagagcataaaagtttggaaaatttgcagcctgattatgtgataggagagaaattcaactcagctgcataaatttggataagttatgatgagctgaatgtta

SEQ ID NO: 657139 - DNA, 435 bp, Homo sapiens
ttaccaataccaggctgtattggttactagagccttgtattacagtttaaagtcaggtaatgtgatgtcttcagccttgtttttttgcttagaattgcattggctatttgggctctttttgattctgtatgaattttaagattgttttttctaattctgaaaaaaatgatgttgttaatttgatrggaattgtgttaaatctgttgattgctttgggcagtatggctatttaaattatattgattcttccaatttatgagcacgcaatgtttttccatttgtttgtgtcaattataatttctttcatcagtgtttggaagttctccttgcaaaaatctttcatctctttgattaaatatattcctaggtattttattttttcttatagtaaatgaaattatgttcttgctttgtttctcagcttgaatgttattg

SEQ ID NO: 657140 - DNA, 566 bp, Homo sapiens
cactgcaacttctgcctctcaggttcaagtgatcctcccacctcagcctcctgagtagctgggactacaggtacacgccaccacgcccagctaattttttgtatttcttggtagatacggggttttgccatgttgcctaggctggtctcgaactcctggcctcacgtgatctgcccatatcagcctaccaaagtgctggaattacaggcgtgagccacagcacccagcccaagaatctgtgttgtggggaaataacaaccaccagtagctttttctcttcttccacaaaagttcaagcccattaataagatgatgctgtgcttccagagagatagwaaagaaaaagttctcgagagtaagagaggagacaaacaggagagattcttgggaagtgcaaagggatggagggtggggggtgctgcacattcctctctgccctatcttcgggacagagttgcaaaggaactgatatctggctttccaagaagtgattcggggtagtggctataagtaggggtgagcgcaggttgtggagagggtaaaaagaggaatctctgtgcaggtca

SEQ ID NO: 657141 - DNA, 546 bp, Homo sapiens
catcttaaaatttatattttattattatcatggctaaagatacatgaatgcaaatattgacttttggtgtatttcctttgaccttagaagagttgaagttcaaatccctgtatgactttgtacaaaggctgttggtgacttctgaggtgctcacgtagcagctgactctccatacataaggagtgtcttccctgctacagcttgagagttcccagctggttagagaaataaacatacccaggaktcgggagttggcaggtccattatggctaaatatattcccaggcttaaatgagatgttgctttgaacatctgtcttccttgccaacaaaaggataacatggaagtaaggcaacgaaagagtgggtggtctttttccaaattattggcattttcaaaaaattttcctcacagtctcgaaagccaaatatgtccctggagagaggagtcttgggtctacatggactagtaaagctagaacaatggattgatggtttctgaggagagctatgatcttacatttggtattagaatcacttggttcag

SEQ ID NO: 657142 - DNA, 519 bp, Homo sapiens
gagagaaagcctgactgggcatgtatgcaaaatagaatttatccttgccaatgccacccgtggcaaacgaggctttaaagaggagaattagggcttgcgcagcttcacttgcaagttggcatgcagtattttgtttagaaaaagggaggacaggaactatagaataaaaatactctttttctttgtgcctgcattttatgttacagaaagcttcctactagtgatataaagctagsattaattttccatccaaaaagaatcaattgtctgaggctacgtgcacaaaaatgaggtttttttgcctcctcctggaaagctcacccgggataaactgcaccctccagtcagttacacagtagatgaaaggactctgctatgctggaagaatgaaaaggataattattctatgtcaatttcattctgtctttttaaaataagtgatattttctggccacatttggggtctgtgagcttcctttggttatatgtagagtatgccacattagagaattcacagac

SEQ ID NO: 657143 - DNA, 223 bp, Homo sapiens
gaattcattgtctccactggcctccagagcttgttctcagccttttygtcttcctgtactctcccttctgtcaatgataccactcaggctccaagctagaagacacagggtcatccttaataactccttttccctcacctcttactatgcagtttctcatctacacttactaacattattataaaaatatatttaaggttggttccttttctgcatctccact

SEQ ID NO: 657144 - DNA, 607 bp, Homo sapiens
tgcctttttttttttcttgagatggagttttgttcttgttgcccaggctggagtgtagtggcacaatttcagctcattgcaacctccgcctcccgggtccaagggattcccctgtctcagcctcccatgtagctgggattacagacacccgccaccatgctgagctaatttttgtagttttagtagagacggggtttcaccatgttggccaagctggtctcgaactcctgacctcaggtgatctgcccacctcggcctcccaaagygcagggattacaggcataagccaccgtgcccagcctaaatttgccctttctaagacttgctataagcactctttctatataggtcctgttatttgactttatgggatctcctacctattgatctctgcattaaccctacctgtgagacgctgtgtctttacctttctcttgaatttggcttagattttactgcccattgttccaatatcactcttgctcactcccttgtcagtcttctttagttgcacctgaactgatgagtggttcctaactgctgctgcacattactgggaaacttcctcagaacacaaatgtcctggccaaccatcaggtttatggag

SEQ ID NO: 657145 - DNA, 430 bp, Homo sapiens
ctgatctcttgcccatatcaataattttatcactactactattagttgggtggctttggggagttaatgaagattacgggatgagtgctaaagattttgatgatgtgcgttgtctgtttactctgctgactgttcttttttgctgtgaaaaagctctttagttcaattaagtcccagcaatttatctttgtatttattgcatttgcttttgggttcttggtcatgaaatccttgcctaagccaatgtctagaagggtttttccaatgttatcttctagaattttcatagtttcaagtcttagatttaagtycttaatccatcttgagtagatttttgtgtaaggtgagagataaggatccagtttcattctcctacgtggctagccaattatcccagcaccatttgttgaaaacggtgtcctttccccac

SEQ ID NO: 657146 - DNA, 585 bp, Homo sapiens
tggctggtatacaatatactcagcaaatatttgttaagtggacaaatgaatcagtgaatgaatggtgagtctgaagttacaggagaaaaaaggaatttattattaattttaacatgaatatgatctatcagttttattcacattgtcactaatttttcatgtgcttattcttgtgtgtgtttgtgtgttgtagttctatgaaaatttaccatatatatagattggtgtgaccgttgccacagtcacgatacacagttccatcataaggattccccatgctggcctttcatagccatagtcatctctctccttcccttcctcttctctaatcattggtaatcactaatctgttctccatctcyatttttaaaaatccagcttattgaggtataattgacatacaaataactgcacatatttaatgtgtgtaatttgattggtttggacatatgtgaacacccatggcaacatcacgatcaagatataacacctcccaaaatttccttgtgtccttctgttttttattattttttgtggttagaacacttaacacaaaatcaccctcttaacaaattttgaagtgta

SEQ ID NO: 657147 - DNA, 567 bp, Homo sapiens
gtacaatactatattaattaatacttattaatacagcataacggaaactttatacccattaaacaagtccctgttttctcctcccctcaacttctggcaaccgctattgtattctttgcttctatgagtttgactattatcaaatagtaaaactatcaaatagtccatcatacaagtggaatcatgcagtatttgtccttctgtgactgtcttatttaatgtcttcaaggttcatccatattgtcccacatgacaggatttccttctttttttttaaaggctaatattctattatatatgtaccatatattcttaatccattcctttgtcaatggacacttgtttccatatcttgcctattgtgcataatgccacaatgaacatgagagtacagatatgtttgaaattctgatttcaattattttggatatatacccagaagtatattcctggatcatatggtaattttgtttgtaatcttttgygaaacctctgtactgtttttcatagctgttacaccattcccaccagtgatgtacaaagttttctatttttctacatctttgc

SEQ ID NO: 657148 - DNA, 503 bp, Homo sapiens
aaaacacaccgctggtcctggaataactcagaggtttagtggactctggagccacagtaacgggcatctggtagtcaaccttttcctgtaatgaggagttattaaatattcacatcaggaattgaggctttagtccgccctcaactggtcttccaacctgttacctattatgcctcacactttatatacccccgaatacaacaagaagaaacttgtgaatgttctataaaacctgctactgacatcagggtgggtctttgaggcttatggttatcctaataaaacgaaggaatgtgtaacagactgtagccggcagaccaccaactactttattgtttaaacacaaaagcaaaactttggtaaacctactatacctgaggcacagygtgtggctgtttcttaacccttgaagactgttatgtacccaacttcagctgacatctctatgtttcttgtttccctccatgtgaggagtttactaagttacatgcttagacaagaaa

SEQ ID NO: 657149 - DNA, 504 bp, Homo sapiens
tagttaatattttcatgctatggtttcaatcagggtagaaacattttatttttcatataaaatttgccaatgttacagtttattaaggagaaatccagaatgtaattccacagtcttatgaaacttaccttgcatacagaaactattcctttctgtgtgacacaagaataatccctctcaaacttagacttgggcctggggctccygagtcaaatgagagaatacagttccttcacctccacttcagagcattatgctgctgattttctaagaatgttggtgaactcatatttgtctgctgcagtggtctccaacctttttggcactaggaactggtttcatggaaaaccattttttcatggaaggggaggagatgctttcaggatgaaactgttctacctcacataattagatattagattctcataaggaatgtgtgacctagatcccttaaatccgctgttcaggatagggtttgtgctcctgtgagaatgtagtgctgcc

SEQ ID NO: 657150 - DNA, 524 bp, Homo sapiens
tcttcccttgggttgggctgagataaaagcactatcttatgttcaaagatcacataatgtagggtaaaggagaataacttcatttacaccatgagaacacagtgtataggtgccgtaagggacatgtgtactggtggacatgggtacagggagggagaatttaaatcctcatggtggttccagaaagattacactgaagaagggtctgcatgtgcaatggccagccagtgcctgggaggggctgcatgctcastgtgtttattggagttgtatgcatgctcacctgaggcgttcttaccttaccagtcaaaagttcctagaaggtcatatataccagttaaagtctgccatgttgcctcctaatgcacatgcttgagcccactcgcccaactcctgagatcttatcgggaagctgcggatcacaactttcaggttttttctactgggagactgccttcccctggggccacctgtgaccaattattattttagagaaacagtgtaacaaccacctgaccatcact

SEQ ID NO: 657151 - DNA, 578 bp, Homo sapiens
ctgttctatttctttaacagagacagggctattcagattttctgtttcttcttgtgtcagatttttacatgttgtatttttcaagaaatgtgtccaatttatctaagttgttgaatttattggcataatgttatgcacaatatttccttattattctattaataactatrtgatctgtggcataaaatgtaagcaaatacttaccataaatcctgccttaagcaaattataggctgtgaagcatatagcattcttgcctttcccagaggggtccacttcagttgttttacacagtccttctgaagcaggacttacatgcctttctttatggcatataagccctgggtccgggttgggggaaagtgtggggatccaccatctcatctcatggctgccctagacatggcttctgttcctaagttcctattaaaggtttctttctgagaaaacggatttgtcagcctctttcttcaacatctcagctaccttaattttggggggtaggtttgcatagacctgctgtctatggaacatccacaaattttgatttttaaaattattattcaggctaaaatatc

SEQ ID NO: 657152 - DNA, 530 bp, Homo sapiens
aatcaccctcatgcacacatttcctgggccataaaatatccttacagatcattttgagttagtttttcagggttgagctaattcagtggaatgaggggttgtctttctctgccaaggcctacccttatgtcagggagagaggggtgggtagagaaaaacacagggacaggcaggaggggaggagggcccttgtctctttgcctgccgtgggaccagcacatttaaattccttggtgctgttagtgaatcattaagttgttacgaattttggatgtgcgtgtttgyctgcccttctgaaactcccgccttaccctctcttctgtctcccacttctttttaaaaaggtcagcagaaatcacaaagtcaaggaagagtcttggtttttgtccttttggtggattaacccaatcacattgtgacatttgtctgagtcattaggaaatctacattccaaggtctataaaatcccatccatgcctcagcagggagaggagaatgcagagttgccaaacttcacactctcccaatcc

SEQ ID NO: 657153 - DNA, 582 bp, Homo sapiens
tttcctcatggggagatatgattgcataaaatattcgacttctacctgaaatgtatcatgaggtagtctttcaacaaagactgttagttcgacaatggataagcagtgtttgagaaaataaactctgcatggacaaaaagctttcagtttcttgcttatattctgtcttcttgggagaccaaagagctctcatgaactcatgaaatttgaacctcaaagattcgtctaattgagctatttctgtttccacattttattcccagtggccagtttcacacctataacatttaagagacttggaaaacctgggagatattttcagcctgtcaggacgcctttttttttcccctcttcctttgacttttaaaaaggagctattcactctcactctaatttttgcaccaagcrgcccatctcttagttttttcagatcctcacaggggatttaaatgatgaaatccaattctccataagcaaagatatttcttaggcttttagaagtggaagagacttggaggacattcagtctttcccatttaaacggcttcaacccaggaaaggatccaggtagagggagaagga

SEQ ID NO: 657154 - DNA, 612 bp, Homo sapiens
gaaagcttttcaaacctaaagaagtatgtaaatatctagttatgcaaatattaaaggtttccattagattcaattctaataactatcacaagacatattataatcaaactgccaaaaaacaaagacaaagagaggaccctgaaagcagcaagagaaaagaaacaaataacatgtaaaggaggtccaatatagytagcagcccactgctcagcagaaatcttacaggccaggagaaagtaggacgatacattcaaagtgctgaatggggaaaataaaaaaacccctaaccaagaatactctacccaacaactctgcccttcaaaatgaagtagagataaacactttcccagacaaacaaaagctaaaggagttcatcaccaccatatctgtcttacaagaaatgctaaagagagttcttcaagctaaagaaaaggacacaaataagtaacacaaaaacatatgaaagtataaaactcatggtaaaatatgcagtcaaattaagaaaaacccatactgtaatggtggtatgtaaatcatttatatctttgttatgaaggtgaaaagacaaaactattaataataaatacaataacttgttaaggatatgcaata

SEQ ID NO: 657155 - DNA, 612 bp, Homo sapiens
ttgtatagctgcagtcctgtgtatatgtatgtgtgcataccaaaacttataaaagtgttatttttagaagtacaaagtggtcaattacatatatatatatatatatatatatatatatattctctagcatgtgcattgtgactagtatttaaaatacatcctcctatcatgttaggagagttccctaaaattaagtaagaaagattttcaaagaagatagtgcatagatagcactcaatgcatatttgctgaaaaagttattaaataaagacacgaaaaatcaarcaacactctgtatttgcatcctatttgacgcatctcttcttgctcctgctccagcaatgtaaaaatatgcctgcttcccctttgccttctgccataattttacactttgccttctgccatgtttgtaagcatagaagcagaagccgctattcttcctgtacaccctccagaatcatgagccaatgaatccccttttctttataaattaccctgtctcaggtatttctttatagcagtgcaagaacagactaatacagatgctaacataaggtaatgactttcaccacaagtgaggtataaactcaagcaaagcagccagtgtggtct

SEQ ID NO: 657156 - DNA, 612 bp, Homo sapiens
ttgtatagctgcagtcctgtgtatatgtatgtgtgcataccaaaacttataaaagtgttatttttagaagtacaaagtggtcaattacatatatatatatatatatatatatatatatattctctagcatgtgcattgtgactagtatttaaaatacatcctcctatcatgttaggagagttccctaaaattaagtaagaaagattttcaaagaagatagtgcatagatagcactcaatgcatatttgctgaaaaagttattaaataaagacacgaaaaatcaaacaacactctgtatttgcatcctatttgacgcatctcttcttgctcctgctccagcaatgtaaaaatatgcctgcttcccctttrccttctgccataattttacactttgccttctgccatgtttgtaagcatagaagcagaagccgctattcttcctgtacaccctccagaatcatgagccaatgaatccccttttctttataaattaccctgtctcaggtatttctttatagcagtgcaagaacagactaatacagatgctaacataaggtaatgactttcaccacaagtgaggtataaactcaagcaaagcagccagtgtggtct

SEQ ID NO: 657157 - DNA, 584 bp, Homo sapiens
tatttcaggtgtgcgtgtgtctgtgtrtaactagattatgaaatgaaatgatcatataggccacatggactaaggccaaaatattttgctatccactgcgctgcactagatggaggttagaatggattttgaacaccaatccaccaatattcatcataaaccccgtgaagatgaatttatattcaaactaactatatccattttctatgactgctggaatgttggagcaacacaactttgctatcttacagttctgtaattaagaagtccaaaatgggtctcactaggctgaactgcaaatgttgttaaggctgcacttcttcaagtgcctctagggggaatccatttttttccctttccatgttttaaggctgcccttgttcattggctcatagtcctcttcttccatcttcaaagccagcaacttcgggccaggtctttctcggattgccatatctctgttcttttctacctctgatcttccccttttaagaatccttgtaattacctggggtctacgtggataatcctagataatctccctattttaaagtcagctgattagcaaccttaactctatgtca

SEQ ID NO: 657158 - DNA, 584 bp, Homo sapiens
tatttcaggtgtgcgtgtgtctgtgtgtaactagattatgaaatgaaatgatcatataggccacatggactaaggccaaaatattttgctatccactgcgctgcactagatggaggttagaatggattttgaacaccaatccaccaatattcatcataaaccccgtgaagatgaatttatattcaaactaactatatccattttctatgactgctggaatgttggagcaacacaactttgctatcttacagttctgtaattaagaagtccaaaatgggtctcactaggctgaactgcamatgttgttaaggctgcacttcttcaagtgcctctagggggaatccatttttttccctttccatgttttaaggctgcccttgttcattggctcatagtcctcttcttccatcttcaaagccagcaacttcgggccaggtctttctcggattgccatatctctgttcttttctacctctgatcttccccttttaagaatccttgtaattacctggggtctacgtggataatcctagataatctccctattttaaagtcagctgattagcaaccttaactctatgtca

SEQ ID NO: 657159 - DNA, 496 bp, Homo sapiens
gcacaacattttcttttttacctctgcagccccaaagcctggcacttattaggggatcaataaatacttattttatgagataaaggaataattattgaaatcatatggaaatttgattaataaaatcctgcctctatagagtattactgagatgtctttcagttattacatacttgttgtatctgagactattaggattttgaggggaatgcccttttcaaaaggccaactggagctgacacaaatttagaactggattgaacaaatacaacacatgtcttgaacattacttggttcattcagggaatgcaagatrcagaataatttaggcagatgcaaaaaaataaaaagtcaatacattttagaagaactagatatcctagggcctgattatgcatagtattaaccaagatggggacttgatgtggcaggaaaatcactaatatggtcaactcttataaaaggcacagctataagaagccagctgggtgattac

SEQ ID NO: 657160 - DNA, 581 bp, Homo sapiens
ccagctgggtgattactacattgaagagtattctctagaacataattccaaaatataattagggtgctgattttttaaatgatttataattgtgacttatcttattggctattattattcccttttaaataaccacttacaaaggctagtaattattttgtgcaagaaccggagtaaagaacttggtttcactttcatttattatttacttttttgtaagtgtttacgtattataaaacaacctccaaaagagttattgtgcaataattatttgggttttatatgtaacactgtattaatattgggaaggcaatattctgtttctactcagctgaaaaaacccttctaccattaatctgtatgatatatttagcccacattgggaatgacctgtcaggaaattgtttacgtaaattcttttgtctcttgccttaagaaagagaccaaattgatcatctgtgtattgtattatattgcaytggagaaagaagtctacaaaaaatatacaggctattaaattctgaggttacatgcaatcgatggtttctaatgctgatgattttgatagaatagatatgtcc

SEQ ID NO: 657161 - DNA, 495 bp, Homo sapiens
ctaatgctgatgattttgatagaatagatatgtccaagtcatcatactatgcttgggatagaatctaaaagctctccatcgtaaaccagtgtcttgcaaactgcagccttcagatcatctgcttcagagttacctgaagtacttatttaaaatgccccaattcagatataatgaattagaatctctgggggtgacacccatgcattgcattatgatcaaacaccccaccccatatgaggtacttaattatgtacagtaaaaatgactttaagttatatagtttaaaaacaactactataagccaatgtactagagatgggaagctacatgttcaagggagcataaagataaactaaaaatgacattaatatccatcatttatttcttcttttgttatgaaaasctttgactatgttcctgtcctatgacctaacaaaagagcaagtgggggtcaagtgggaatcacagaggcagggaggggacaagaagagatac

SEQ ID NO: 657162 - DNA, 606 bp, Homo sapiens
tctcacttataaatgagagctaaatgatgagcacacatggacacatagaggggaaaaacacacactggggcttatcagaaggtggatggtaggaggatggagaggttcagaaaaattaactaatggctactaggcttaatacttgagtgaggaaataatctgtacaacaacaaacccacaagtttacctatrcaacaaacctgcacatgtgcccctgagcttagagttgaaaacatatgttttgaaaagataatttaattacatggcctaattttatgtgctgggtatggtagctcccagatgtaatcctagagctttaggaggttaggtggaaggatcacttgagctaaggagttcaagattactccagcctgggtgagagagcgagaccttgtctaaaagaaaaaaaaaaagcaagaaagaaaataaaagatgagaaaagaaaattaaaaaaaaaagacagatggaaacagtatgccccaaatgacctagatattgtgggaaaatcaaagaaaaagacacattcacatgaagatacatggataatagaatgaataaaaatgtaccaaagtcttaatagtagttatctttgggtagtgattttat

SEQ ID NO: 657163 - DNA, 416 bp, Homo sapiens
ctgggactacaggcacatgccaccatgcccagctaatgttttattttttgcagagatggggtctcgccatgttgccctggttggtctcaaacttctgggctcaagggatcatmctgtcttggcctcccaaagtgctgggattacaggtgtgagccactgttcctggccacttactagctttttaatttcctcttttgcacttgctagcccattttccatacaggagccagactgatactttttaaatgtaaataggatattatcactattcctgtttatacaatcttgatactttcttatttcttttaaaataaaagtcagattttttttgagtattagaagactaatggtttggttcctgtttatttctccaatatcttccaaatccttttctcttacagtttactatgatcagc

SEQ ID NO: 657164 - DNA, 577 bp, Homo sapiens
ggggtttgttgtgcagattatttcatcgcccaggtattatgcatattacccattagttatttttcctgaacctttcactgattccactatccaccctccaattagcccctstatgctgttcccctatatgtatccatgtgtgctcatcatttagctgccatttataagtgagaacatgtggtatttggtttcccgtgttagtttgctaaggataagggcctccagctccatgcatgtccatgcaaaggacatgatctcattcttttttaaggctgcatagtattccatggtatatatgtaccacattttctttatccagtctatcattgatgggcatttaagttgattccatgtctttgctattgtgaatagtgttgcagtgaacatatgtgtgcatgtttctttataatagaataatttatattcctttgcatatatacccaataatgggattgctaggttcaatggtttttctgtttttaggtctttaagaaaccacaacactgtcttccacaatggttgaactaatttatacccctcactgacagtgtataagtgttcccttttcttcacaact

SEQ ID NO: 657165 - DNA, 577 bp, Homo sapiens
gagaaatgagttattgctactaacctgttcctatttttgctctcaattaagtcatgctcagttaatttatgaaatgaaaacttttcagctttatattcctcagtcctcatgttaagtgcttattaaatcacattctgttcacttcctggatgcttctctcattcatctgctgctcatttcactgctactgacccaggtcttccttagcattcctcagccttcacaaaatttgcttccccttgcctctaatcatcctacccactttaatccctggagcaccctcgcaatctgttccctcatatctccacacrtttgattgtagtgcttccctgtccatcatgcttgtaactgttcattacccatcaaatatgtgcaggcagcatggcctattatcagttccaacctgactttcttagattcctccttatcgcagcatacttgcaactacccaccttttggtctagccctgctccacctctagaatttctatcatggtactttatccttttcatgctttgtgttttcagttgttattttcttggaatttttgtcctcccaaagtctggctgtcaaaagc

SEQ ID NO: 657166 - DNA, 577 bp, Homo sapiens
gagaaatgagttattgctactaacctgttcctatttttgctctcaattaagtcatgctcagttaatttatgaaatgaaaacttttcagctttatattcctcagtcctcatgttaagtgcttattaaatcacattctgttcacttcctggatgcttctctcattcatctgctgctcatttcactgctactgacccaggtcttccttagcattcctcagccttcacaaaatttgcttccccttgcctctaatcatcctacccactttaatccctggagcaccctcgcaatctgttccctcatatctccacacatttgattgtagtgcttccctgtccatcatgcttgtaactgttcattacccatcaaatatgtgcaggcagcatggcctattatcagttccaacctgactttcttagattcctccttatcgcagcatacttgcaactacccaccttttggtctagccctgctccacctctagaatttctatcatggtactttatccttttcatgctttgtgttttyagttgttattttcttggaatttttgtcctcccaaagtctggctgtcaaaagc

SEQ ID NO: 657167 - DNA, 425 bp, Homo sapiens
cttttcatgctttgtgttttcagttgttattttcttggaatttttgtcctcccaaagtctggctgtcaaaagcacctccttctttcctggctcaaatattactttttcctgtaactttgccagattcttttagttaaaataaatcctccccctttcatatttctgtaatacttagagcattcatagtctaccatagaatacacatagttctgtgtacatctrcatcccctacttgattataagccagacaggaaccatctattatttagcttagaataagtcaaagtgccaagtaaagtgccctgcacatagatattgatctattgatcaccctgtgctatttaagctctactaatttagtttgatgtaatcatctgatccactttttagaaacccagtttaattgccccaaatgctaacagatt

SEQ ID NO: 657168 - DNA, 432 bp, Homo sapiens
ggtactttatccttttcatgctttgtgttttcagttgttattttcttggaatttttgtcctcccaaagtctggctgtcaaaagcacctccttctttcctggctcaaatattactttttcctgtaactttgccagattcttttagttaaaataaatcctccccctttcatatttctgtaatacttagagcattcatagtctaccatagaatacacatagttctgtgtacatctacatcccctacttgattataagccagacaggaaccatctattatttagcttagaataagtcaaagtgccaagtaaagtgccctgcacatagatattgatctattgatcaccctgtgctatttaagctctactaatttagtttgatgtaatcatcwgatccactttttagaaacccagtttaattgccccaaatgctaaca

SEQ ID NO: 657169 - DNA, 592 bp, Homo sapiens
atttatgctctgtgttccttccactgggccattatatgaattttctatcatttttattcyctatctcattgattcaacaatcttaatgaacagccttcacaacaatccaatttgtccgcaagcatttgcccctataagagaactgtaatttgctgctaaccctagtcataaagaagctcaagctagttttattcaacaccaccaagtgctagtgatgcagatcctcaaccttctctggggttcacaagtctcttgtgtcattgctgggaatgttacacagatgcaggcatctcttacctgggcattctagggatgatgtggtagctgctgtcgaaagagatttgcaccaggactgaggagcaagttgtcagctttgccctgagatatggggattcaaattactcacaggccatcagtcaacaccaaccatgctgcatcctcagttctagtcaccacagacttctctctttcatcatttttcctctgacttctagtctggcaggagaagctgagtaggggacattggccctttctgttgcctcagggtataacctttgaaacccaggaaaagacctctcctctgcttcctgcc

SEQ ID NO: 657170 - DNA, 592 bp, Homo sapiens
atttatgctctgtgttccttccactgggccattatatgaattttctatcatttttattctctatctcattgattcaacaatcttaatgaacagccttcacaacaatccaatttgtccgcaagcatttgcccctataagagaactgtaatttgctgctaaccctagtcataaagaagctcaagctagttttattcaacaccaccaagtgctagtgatgcagatcctcaaccttctctggggttcacaagtctcttgtgtcattgctgggaatgttacacagatgcaggcatctcttacctgggcattctagggatgatgtggtagctgctgtcraaagagatttgcaccaggactgaggagcaagttgtcagctttgccctgagatatggggattcaaattactcacaggccatcagtcaacaccaaccatgctgcatcctcagttctagtcaccacagacttctctctttcatcatttttcctctgacttctagtctggcaggagaagctgagtaggggacattggccctttctgttgcctcagggtataacctttgaaacccaggaaaagacctctcctctgcttcctgcc

SEQ ID NO: 657171 - DNA, 471 bp, Homo sapiens
tcctctgtgcaagaaaatgtgaacaggagtgatatgggtttttgcagaaagaattagcataaaaggtctgagtctgcttggcttaraaagacctgtgtgcaagattggccctcagctggaattggggagcttgaatttcaggaagggtctcacatttcctgataaggatggctcacagcacctaaactgtttgtgcaaagaataaggcttatgctgaacccatgaaccctttctgggagtccagaatttgggtacatgcaggacagaggatgcctattgtgatcatccctcagtaaaaactctaggcattgagtctgtcttgtgaacttccccagtagatgacatttcacacattgttacgatttggcactggaggaatgaagcacatcctgtgttactgcactggataaggactcggaatcttgtacctgttttcctccaaaaaactttgtcccatgtaccttttccttt

SEQ ID NO: 657172 - DNA, 500 bp, Homo sapiens
attatctacagatgatacaattgtatgcttgtgaatctttaaaatcctagggaatcagaaaaaaaaaagaaaccacaaaataattcactcatctaactgctacaaaatttgtatactaaaactccagtagctttcctatataaaaactataaccaattcaaaaatagtataaggaaagatcctatataccaataccaacactcacgtrcacacaaatacatacatacaaccaagtaacaaacaagaagtggtggggaaaacaacatcacaattttcttagggacgtgaaaaatataaataaatggatatatatatatacatatatatatatacaccttattatttgttaagaatactcaatagtaaatatttccatttcccataaattaatctaaatatttagtgaaatatcatttagaataacaactttttgtaaagagaccaactatttttacagtttaactgaaaaaaaagtaaatatgtgatgataatacccagaa

SEQ ID NO: 657173 - DNA, 583 bp, Homo sapiens
gaggaacctggtgggaggtaattgaatcatgggagcaagtcttttccatgctgttctcatgacagtgaataagtctcaagagatctgatgattttaaaaatgggagtttccctgcacaatctctcactctctgcctactgccatctatgtaagatgtgacttgttcctccttgccttcaccatgattgtgaggtctccccaaccccatggaactataagtttattaaacctctttctttkgtaaattgcccagtcactgatatgtctttatcagcagcgtgaaaatggactaatacagggtccaagatcagaagtcaaagatattttagtgtatatttttatgtggcttgatattcttaccttggggatacattaatttttaaaattacaaatctaggtagttttttaaaagaaattgaatcaagcagctaactaaggagaccctcacattaaattatggttctcagcttcatccaggaataatgtcccagtccacaacttccctcttctatctcttctataggatgacccttctgattacattacccatcattaatccagaaaacagagcaaaggtgacata

SEQ ID NO: 657174 - DNA, 589 bp, Homo sapiens
aagcaaatgagtatgactgaactccaacaaaaacttacttatggacagtaaaaatttaatttaaaacaattttgtgtgtcatgaaaaattagtactatggtttgaatgcgtcctctgaagttcatgtgttggaaatttaatccccattgcaaaagtgttgagaagtgggacctttaaaaagtgattaggtaatgagggctctgccttcatgaatggattaatgttgctatcattggagtgcatttattatcacaagagtaggtttgtcataaaagcgagtttggctgtctcttgctccctctcagtgtgatgtcttcctcwtttcctccatgttatgatacagtaagaaggccctcgccagatgtggctcttgattttgggcttcccagcctccagaaccatgagccaaataaattcctgttcattataagttactcagtctatgctattttattatagtggcaaaaaacgaagataattagtcttcttttcaatcttttaaaaatacaaaatccattcttagctcactggctttacaaaacaggtggcaggctggattttgactcctgtatttcaaattccactgatc

SEQ ID NO: 657175 - DNA, 589 bp, Homo sapiens
aagcaaatgagtatgactgaactccaacaaaaacttacttatggacagtaaaaatttaatttaaaacaattttgtgtgtcatgaaaaattagtactatggtttgaatgcgtcctctgaagttcatgtgttggaaatttaatccccattgcaaaagtgttgagaagtgggacctttaaaaagtgattaggtaatgagggctctgccttcatgaatggattaatgttgctatcattggagtgcatttattatcacaagagtaggtttgtcataaaagcgagtttggctgtctcttgctccctctcagtgtgatgtcttcctcayttcctccatgttatgatacagtaagaaggccctcgccagatgtggctcttgattttgggcttcccagcctccagaaccatgagccaaataaattcctgttcattataagttactcagtctatgctattttattatagtggcaaaaaacgaagataattagtcttcttttcaatcttttaaaaatacaaaatccattcttagctcactggctttacaaaacaggtggcaggctggattttgactcctgtatttcaaattccactgatc

SEQ ID NO: 657176 - DNA, 589 bp, Homo sapiens
aagcaaatgagtatgactgaactccaacaaaaacttacttatggacagtaaaaatttaatttaaaacaattttgtgtgtcatgaaaaattagtactatggtttgaatgcgtcctctgaagttcatgtgttggaaatttaatccccattgcaaaagtgttgagaagtgggacctttaaaaagtgattaggtaatgagggctctgccttcatgaatggattaatgttgctatcattggagtgcatttattatcacaagagtaggtttgtcataaaagcgagtttggctgtctcttgctccctctcagtgtgatgtcttcctcatttcctccatgttatgatacagtaagaaggccctcgccagaygtggctcttgattttgggcttcccagcctccagaaccatgagccaaataaattcctgttcattataagttactcagtctatgctattttattatagtggcaaaaaacgaagataattagtcttcttttcaatcttttaaaaatacaaaatccattcttagctcactggctttacaaaacaggtggcaggctggattttgactcctgtatttcaaattccactgatc

SEQ ID NO: 657177 - DNA, 560 bp, Homo sapiens
actctggggtcagagaaaaggacttgattactcacagcacagtgggcagtatgagcttcatgttcacaccaatctcccttctccatcaccaccctcctcttagttgtatgcaagtgatattaaggcrtcccaggtggatactgcacccacagtggatttgtgtcacagctgaggaacctggagcttaggaaattccatcctttaaaggagattgctagaatacctcctaatcatttgcctcaagggaaatatttttattatcctagccagaagaaagtctaccttctgttgtagggtaagacactacattttccaaggttgtttgctatacaaacatttttgaaaatacagtccataataaaaattgatgcaatatgtgcagaaatgccaagaaaattgtctcccaaaagatacaaagagaaaaatgacataatctctgccttacatcaatctagagaaggtaataataaaatcaaaatgtaactataaaacactatatagatttttataggtgggtaaaagaccacgaagctacaggaacagatagaggaagaaaccaa

SEQ ID NO: 657178 - DNA, 626 bp, Homo sapiens
ttggttactagactactatactgttcttttgatggtgttatgtttctttgatcgtttctgtctgtttcttgacatcttgcattgctgactttactgactgacttcaagaaagaaacatcctcaccaatcagcttgactagggattttgagaccctctcagacattttctatgkatgcacttgatttatacctttgtttcctcttacgatggggattaaatttttaagatttgatgtattttctcaatctcacaaagccaagccagatgctcagagcctcacatttgttttcccttggaaagagcctcaaagttctcaggtttgtgtttttttctttcagtcccacagagtggaactggctatttatgaggcatgctttcactcgctgtccatggggaagcattggggagttcacttggtggaggggggcatgaggcacacatagcatttggagtgcccttgggtcaattaggaatatccataggtgagacaccccaagtgacttataggtgggctccttgatgatggagtatgtggagaagatattagggcctctcttccctgatcctagtctctcccaacaactcagctatgccaatcatctccattttctgggtgaggtaaaaa

SEQ ID NO: 657179 - DNA, 626 bp, Homo sapiens
ttggttactagactactatactgttcttttgatggtgttatgtttctttgatcgtttctgtctgtttcttgacatcttgcattgctgactttactgactgacttcaagaaagaaacatcctcaccaatcagcttgactagggattttgagaccctctcagacattttctatggatgcacttgatttatacctttgtttcctcttacgatggkgattaaatttttaagatttgatgtattttctcaatctcacaaagccaagccagatgctcagagcctcacatttgttttcccttggaaagagcctcaaagttctcaggtttgtgtttttttctttcagtcccacagagtggaactggctatttatgaggcatgctttcactcgctgtccatggggaagcattggggagttcacttggtggaggggggcatgaggcacacatagcatttggagtgcccttgggtcaattaggaatatccataggtgagacaccccaagtgacttataggtgggctccttgatgatggagtatgtggagaagatattagggcctctcttccctgatcctagtctctcccaacaactcagctatgccaatcatctccattttctgggtgaggtaaaaa

SEQ ID NO: 657180 - DNA, 649 bp, Homo sapiens
tatttccatctgagacctcatcaggctggccttcactgtccatatcactattaacatttcagtcacaaccatttaactggtctctaagaagtaccaaactttccccatcttgctgtcttcttctgtgttggggaaaccagccccacaccacccggcaggttccccaagtccggcagagacaaaggagttagaaagagacagaataagtgtttaaaaggctggtccaggggactggagtgtcagaggcttgctcacggcccagagctctttggctttgcctaatttattggtttacaagctctttgttcttagggcagatgggaggggtaggaagggatgaggaaaaggattaatcagtgaaggagaacttatgagtcattcaacaagatgtatagcagtagtggtttctgtgaatttccttgagcaaaggcatgtgcctaaactacttaatatctttaacttatcaagactgaaatggataggagtaggtttcagatggagccaagatgtttgattatactccactgcttcaagggagtgttatctccctgagcaacctgtggaatgctgctgagcrgttatgatctcggggcagaaagacatgaaggcaataaggagagctttctcctcagaggccacccatggctcc

SEQ ID NO: 657181 - DNA, 626 bp, Homo sapiens
ttggttactagactactatactgttcttttgatggtgttatgtttctttgatcgtttctgtctgtttcttgacatcttgcattgctgactttactgactgacttcaagaaagaaacatcctcaccaatcagcttgactagggattttgagaccctctcagacattttctatggatgcacttgatttatacctttgtttcctcttacgatggggattaaatttttaagatttgatgtattttctcaatctcacaaagccaagccagatgctcagagcctcacatttgttttcccttggaaagagcctcaaagttctcaggtttgtgtttttttctttcagtcccacagagtrgaactggctatttatgaggcatgctttcactcgctgtccatggggaagcattggggagttcacttggtggaggggggcatgaggcacacatagcatttggagtgcccttgggtcaattaggaatatccataggtgagacaccccaagtgacttataggtgggctccttgatgatggagtatgtggagaagatattagggcctctcttccctgatcctagtctctcccaacaactcagctatgccaatcatctccattttctgggtgaggtaaaaa

SEQ ID NO: 657182 - DNA, 607 bp, Homo sapiens
tgaatgcttacaccttcttttttttttaattcttcttcttcttcttttttwttgagacagagtctcactcttttcgcccaggctggagtccaatggcacaatcttggctcactgcaacctccccctaccgggtttaagtgattctcctgcctcagcctccagagcagttgggattaggggcacctgccaccatactcgctaatttatttatttatttatttatttatttatttatttatttatttatttatttttttagtagagacagggtttcaccatgtgggccaggttggtctccaactcctgacctcaggtgatctgcctgccttggcctcccaaagtgctgggattacaggtgtgagccaccacactcagccacttataccttcttgaccttaacatacactagtctctgcctggaaagacatccccatacccccaggtcttctggctaattctcatttattctgagatgctacagaatgtgtattgtcttgccaagcttcgcatctcacatccattgcacttgtctgttactcatctgccttcttcacttgactgtgagcatcttgaagaatgggactgtgctgttacctttttattctca

SEQ ID NO: 657183 - DNA, 607 bp, Homo sapiens
tgaatgcttacaccttcttttttttttaattcttcttcttcttcttttttattgagacagagtctcactcttttcgcccaggctggagtccaatggcacaatcttggctcactgcaacctccccctaccgggtttaagtgattctcctgcctcagcctccagagcagttgggattaggggcacctgccaccatactcgctaatttatttatttatttatttatttatttatttatttatttatttatttatttttttagtagagacagggtttcaccatgtgggccaggttggtctccaactcctgacctcaggtgatctgcctgccttggcctcccaaagtgctgggattacaggtgtgagccaccacactcagccacttataccttcttgaccttaacatacactagtctctgcctggaaagacatccccatacccccaggtcttctggctaattctcatttattctgagaygctacagaatgtgtattgtcttgccaagcttcgcatctcacatccattgcacttgtctgttactcatctgccttcttcacttgactgtgagcatcttgaagaatgggactgtgctgttacctttttattctca

SEQ ID NO: 657184 - DNA, 574 bp, Homo sapiens
taaatccaggtactacgattactcccctaatttttggttcttatgaagatgcttttttgtgtggatagttgttgaatttggtgttcctgttgcggagaccatcgctggagggttctattcggccgtcttgctccatctcctgaagcctgacttttttgagcatgccctaacagtatgtccatatttgtttaaattgttatgacatctaaatagttttcaactgaggtcaaatatttttaaggataagctggtctgtaatgactagagtggccacatagttcatcactcaaatctgaacagtatcaaaggtgaaaagaggcactaactgggtatgatgctggggccacagatgtcagaccgaacaataatttcwccaacaaagcaaatgagaatctcctgcaaaagtcctggaatcatgtcctttgatttgcctttggagaggaaagacaaagcagagtagagaaagaaaaatggagaggcaggaagaaaaagagaaaggagaagaggcaaagtgagaggagacaagaaaagggctggactcattttagcatgatatctgattgatgaagtccta

SEQ ID NO: 657185 - DNA, 556 bp, Homo sapiens
tattgtggttagtaccagctacaaaattttcaggaccaagtgcaaaacgagtatgtggccccttgttcgaaattattgagaatctcaagacgatgtgaagggtatcagtaccaaaatggagtcacttatgtcaacctaaaaccacagagagaatggctctccaaagaaatgaatttctttggaaataaactaacaaaaatgacagcagaacattaagacaagtatgtgatccttccaagtctgggaactttctaaacatgggaccctgtgtggttgcataggttgtactcctgtgaaactagccctgattgttttatttgcaaactaccagagtgtgctgaaaagaaaaccagcatgaaggaaaacctgagcattactctcaggaataaaattaaatatgggacaaatgtacgcccatsgatgcttcataatgtctttgtaatgtgctaataccttctaatgagtacagaggtcattagtaaaggaaataagtcaagaaattaaaaaaacccatccaagcatgatctgctggtatgtgcaatgcaaatggacttta

SEQ ID NO: 657186 - DNA, 609 bp, Homo sapiens
aaatcctgaatttaacaggaacaaatgtatcccaattaccacattagctaatactctggaaaaacaagctcagcaaggaaacaatttcaactttgcttaagtaagaagataaagcaaaagtacaggaaaggatgtctgttgagtcatgaacttaccttctcagcttagttccctgtgttctttcccagagcttgctgaaaaacagcctctctcccgtgttacagagaagcctgactatagagaaggaaggcttttctgtcaactccttccacttttagacagtcagatgctgaatccattttctcagttatgagcatttatctggasatgctcacacacttcaaaaatagcatcttcatttaacaaatgggaaaactgaggcaccctggtgaaccctcctacactaccctgtagtgcaagctttaagcactattttacttctttttagacggaatttttctcagttctatggtgaggctgaatcaatagatcaacaagcacttatctgacacttactaaatttccttttataaatgtagcgaagaatacagtgggactcaccattggaaggaagggattttaagccttcctgcacagagacctcttggg

SEQ ID NO: 657187 - DNA, 607 bp, Homo sapiens
tgatagatcatggatatatgatcttcaaatattcccttccattctatgcattatcttttcactttctgttttaaattttagattcgggggtacatgtgcaggtttgttacatgagttagctgcatgatgctgaggctgggcttctaatgatcccgtcacccaagtagtgaacatggtacccaataggtagtttttcagcccttcccttcctccttccttcccttcctgcttttggagtctccagtgtctaatcrcacctttgtgtccatgtgtatccaatgcttagctcccacttccaagtgtgaatataaggtatttggttttctgttacttaggatttgcttaggataatggcttctagctacatccatgtcttggcaaaggacatgattttgttcttttatggctgtgtagtattccatggcgtataagtaccacattttctttatctaatccactgctgatgggcacctgggttgattctatgtctttgctattgtcttttcactttcttttttaattattatttcaataggttttgggagaacaagtggtacttgattacatggatgagttctttactggtggtttctgagattttggtgca

SEQ ID NO: 657188 - DNA, 579 bp, Homo sapiens
gtttccttcactgtgtggaagctttttaacataaggtgatctcattcatccatttttgctttggctgcctttgcttgtgggatattactcaagaaatctttgcccagttcaatgtactagagagtttcaccaatgttttcttgtagtagttttatattttgaggtsttagatttaagtctttaatccattttagtttgatttttgtatatgacaagagataggggactagtttcattcttctgcatatggatatccagttttcccagcatcatttattgaagagaccatcccttctccagcatatgttcttggcacttttgttgaaaatgatttcactataaatgtataaatttatttctgagttatctattttgttccatggtctatatatctgtttttatgccagtaccatgctgttttggtaactgtagctctgtagtataatttgaagttagataatgtgattcctccagttttgttctgtttgctcaggatagctttggtgattctgggtcttttgtggttccatataaattttaggattactttttctatttctgtgaagaatgtcattggta

SEQ ID NO: 657189 - DNA, 579 bp, Homo sapiens
gtttccttcactgtgtggaagctttttaacataaggtgatctcattcatccatttttgctttggctgcctttgcttgtgggatattactcaagaaatctttgcccagttcaatgtactagagagtttcaccaatgttttcttgtagtagttttatattttgaggtgttagatttaagtctttaatccattttagtttgatttttgtatatgacaagagataggggactagttycattcttctgcatatggatatccagttttcccagcatcatttattgaagagaccatcccttctccagcatatgttcttggcacttttgttgaaaatgatttcactataaatgtataaatttatttctgagttatctattttgttccatggtctatatatctgtttttatgccagtaccatgctgttttggtaactgtagctctgtagtataatttgaagttagataatgtgattcctccagttttgttctgtttgctcaggatagctttggtgattctgggtcttttgtggttccatataaattttaggattactttttctatttctgtgaagaatgtcattggta

SEQ ID NO: 657190 - DNA, 578 bp, Homo sapiens
tggaaaagttctgtaatccaaagatagcattatgattagtggcagtgaatatgatattttctctttgggcaatcagtggcttagttagaacagtggataattcatgggcaacacaagatggttctgttaataacttggggttaagctcaagctttagaatggaaatgtgctacaaagcagttttggtatgggcacataagtgttgttgggaccatcacctccatcagagatggtgattttgggtaaaattgccaaagttgaggtggttcacaaaggtctttgtgtaaatgcagacaaatggtgtatcaccgtaaagggaaactcatatcaatgggcctgacttgactcccttttgaggggtccaaacagcttcyaatttatgtaatttacgtcttttatttaaaatccatttcctcagtacagttgtatcatgcatggtaattgtaggattgctaatttttaaagagcttcctttgatagagtgaggaaaagccctgtatacaccagggagagtgtgaattggtacaacttctttcaaaaatgattttgcaatatctggccaaatgtaaaatgcaaaa

SEQ ID NO: 657191 - DNA, 541 bp, Homo sapiens
ttcataagtaatctaggtaaattaatttttacaaaacgtaattaggttaatataacaataagtggttgtaaaacaaatgtatatataataatttagaatctacagttaaattaaatcatagatattcattaaatgttwgggtcacctagctttttaaaacaattacaggaaaatatttttctaaaaaacaatatgttcttattaaaagggaatagtttgtctaattcaaaggttatttaaaggttatttataaaacaaggtaaaatgaaccagtaaataagaaagatgtaaagaaagataagtacaaagtaatacttttggtaagaaaggttaaaaggaaaataattttacatgagaaggaatcgtgtggtaaaatttttgtcttaaaacaaaataattggttatttaagaaagagggatgtttaggataaaacaggaagtccaagggtgtcataaatggtttgtataagtcataataaggtttgtaaaaagacaatttatggaaaaaacactttatgtaatcaagctggttataattaaa

SEQ ID NO: 657192 - DNA, 432 bp, Homo sapiens
ttgcagcctatctaaatggactccccgtagggaaaagcaatcacatttcagaaggtcttttgtttgtttgtttgccttgtggtaactggcttaacaaatagattttatattttattgaaataatttctacatcattgttattaagtttttttatttgcctagaaaagctgaaattaaaaagttgagtttattacatccatgtaattttctgtattgcttttaaagtatttgtgttaagttatagrgctttgactcctcagtctaaaagggacaccaagtcctgctaaatcttaaacactgacagcagttaaggtctcatcctcagatccaagagaagatgacaatcaaaataagccaaattcatgagacacagggtcagaaattaaaactaacccctgtagacccgaggactattgcagaagaggtgggagc

SEQ ID NO: 657193 - DNA, 599 bp, Homo sapiens
taggctgcaggtttctaggaatttatttactttatttaggatttctcatttattgacatatagttgctcataatagtctctaatgatcctttcaatttctgtgttttggttttaatatctcctttttcatctgattttatttatttaggtcttttttctttctttcttacagtggccaaaggtttgttgattttctttatcttttcaaaaaaccaacgttttgtttcattgattgatatgatttggttgtgtttccacccaaatctcagcttgaattgtaactctcataatccccatgtgtcatgggagggacccagtgggaggtaattgaatcatgggggctgttccccccatcctgttcttgtgatagtgagttctcatgagatctgatggttttataagcatctggtgattcccctgctggtacccctctgtctcctgctaccatgtgaagaaggacgtgtttgcttccccttccaccatgaatgtaagtttcctgaggccttcccagccatgcagaactgtgagtcagttaaacctcttttttcttttgaaatyacccagtctcgggtatgtctttacagcaatgtgagaatgga

SEQ ID NO: 657194 - DNA, 497 bp, Homo sapiens
gaattcttttatcagttctaggagctttctaggggagtctttagggtttcaagataaacaatcatattgtcagcaaacagtgacagtttgacttcctctttaccaatttggatgcccttatttctttctctggtctgatcagtctggctaggacttccagtaccatgctgaagaagagtggtgagaatgggcatccttgtcctgttccagttstcagagggaatgctttcaacttttccccattcggcattatgttggctgtgggtttgtcatagatggcttttattacattaaggtatgtcccttgaatgccgattttaccgagagttttaatcataaagcaatgctggattttgtctaatgctttttctgcatctattaagatgatcatgtgatttttgtttttattcctgtttatgtggtgtatcacatttattgactcatgtatgttaaatcatccctgcatccctggtatgaaacccactcgatcgaggtgg

SEQ ID NO: 657195 - DNA, 522 bp, Homo sapiens
tcttttgtcccacggggtgttcccttgatgtagtactctccccctttctctatggatgtggcttcctgtgagccaaactgcaatgattgttgtctcgcttcttggtccagccaacccagcaagtctgcccagctccaggctggtactgggggttgactgcacagagtcctatgatgtgaaccatctgtgggtctctcagtcatggataccagcgcctgttctgctggaagtggtggagggtgcaatggactccatgagggtccttagctttggtggtttaatgctctatttttgtgctggttggccttctgccaggaggtggcactttccagaaagyatcagctgtagtagtgtggtgagggattggcagagggtggggccctagaacccccaagattatatgccctttgtcttccactacaagtgcagatatggaaggatcatcaggtgggggtggggctaggcatgtctgagctcagactctccctgggcgggtcttgctgtggctgctataggggatgg

SEQ ID NO: 657196 - DNA, 566 bp, Homo sapiens
accatgtattttcaaataacttatcttcaagcttactaattcttctgcctgatcaagtctgctattaagggactctgatgcttttttcagtacatcaattgcatttttgagcttcataatttcttcttgattgtttttattacataaatctctttgttatatttatctaatagaactctgaattccttctctgtattatcttgaatttcattgagcatcctcaaaacagctactttggattccatatcttaaaagtcacgtatctctgtctatcagagattgacctcctgatgscttatttagtttatttgattaggttatgttttcctggatggtcttgatgcttgtggatatttatccacatctaggaattgaagaattaggtatttattgtagtctttgcagacatgttcatgcctgtccttctggggaaggctttccaagtattcaaagagacttgggtgttatgatctaagtttttggtcactagagccatatctggattagggattatcccaagcccaacaatgctgtggctcttgcagactcatagaggtactactgcc

SEQ ID NO: 657197 - DNA, 593 bp, Homo sapiens
tggaatttggaacactggcacagagctaggaggctgcagatgaacacttaggttatttgttatataaatgtttccaaagcacagctaactcttgcctatgtttccttatctcaaaaaaatctctttcctgtagtgctaataagtaggaactggtagaaatatcccattcatgtcacagagcagtatccatggggggtctgctgggaagcattcaggcagtcacggaagtgggcacagctcacgtgcacaagtgtagaagtcagttgctaattcaggactgtggatttgctgtatagtgctcaacagaccatcagaagataggcagtcgggagactgctctctccttctcctgatatgttttatrccttcctccctttaacacatttaaagtaatgcctatcacctgaaagaactaagtgtcaactattcttacggttttatagctttagttgaatatgtcaaaattaatggagagaaaataagtgagtctatgtatctctgattaaagcataattatgatgcctttagcccagtgtccagtcatgttacatgtcatgctgcagaaatcatggtcagcattattccattttctc

SEQ ID NO: 657198 - DNA, 559 bp, Homo sapiens
tgggttaccaggcagagatacttttctcttactttcccccaaatgaatggaatctctttctctacgctgagctgcctggagctgggggaggggtgatgcaaacaccatcactgggattgcactgggtcagacctgtaaccagcacagcactgtgtctcatctaaggcccttggtgaccactgcctggctacagcctatgttcattcaaggtccaagggctctacaaccagcaggtggtgaatccagctaggcttgygttcttcccttaggatggcaagatcccccccagccctaggagggtccagagatgccatcccagaaccaaggcctggagttgggaactttcagaagctaccttgtgctctattttgctacagctgagctggcacccaagctacaaaacaaagtgtttcccagtcttctcttccttttcctcaagcagaggagtttttccttgtggccactactggctaggcatgtggtaagtactgcctggctaccactgatattcactcaaatcccaagggctcttcagtcaacttgtggtaaatgctgccag

SEQ ID NO: 657199 - DNA, 365 bp, Homo sapiens
gaattcctgacctcaagtaatccgccctcctctgccacccaaagtgttgggattacaagtgtgagccaccacatccagcctaataactcttagatttacctttttgaggctattttctagattttgtaggcatgctttatttttttctattcttttttcttttatctcctctgactgtgtatttcaaattgcttgtcttcaagcttagtaattctttcttctgcttgatcaattctgctggtaagagactctgatgcattcctcagtatgtccattgcagttttcaaccccagcatttctacttgattctttctaattatttcaatcacgttgttaamcgtatctgataggatttttaattcctt

SEQ ID NO: 657200 - DNA, 300 bp, Homo sapiens
tttgcatgcattttcagacatgtttacatgcattttatttgacaaattgggcctgtgtttttccagctgttaagtttgaggcaataagccagattgttgctgactctggaagagagtctcaagctgagatgcaggcttataattcggttcacttatttctggcctgctgaggagctattcttttctaaytaattttcatattaaaaaaataaaatgaaagattcaactgtccatgaaattgagtgcaaaaatattagaaaacttttacttaataggaaaaaacaaagtaaatgaaggtta

SEQ ID NO: 657201 - DNA, 589 bp, Homo sapiens
acatgattcataccaggtttgcgtcacagacctgaatactacattggacaatttctccaaggaatttgtcagtttttctgataagcctgtggatcaaatagcggttgaggaaaaattgcagaaactgcaggtactaaacggtgtccagacatgatagacatttaaaaaaaaaaatcagtgttaattacagtgtgattaatcagtgtcctctgtcagaaattccastggtattcagatgactcttaggtaattaaagctctgaccagtcataataaatgagaatgtccttctttagtggacaaatccatttataattggaattgaccctcacttggtgggccctcagggacagttttacccactagactgtagcaccttgaaaggcctgtatgttacttctttatgtaacttcaaaatctatcctagtacttggctgttagttggatgaatgaatgattgagtgaatgcttcttgtgtagcccattaggataacgactgataaactgtacatcgttcacctagatttattctagttcaaagtagctactgcagtacatcaaattccttttcagtctagagttttaaaatt

SEQ ID NO: 657202 - DNA, 195 bp, Homo sapiens
ctaacaacacaataaaaaatggacagtggatatgcaaaagcagttcgcagaaggcaggactcrtatgtccaatgaacatatgaagagtagctcaggccaggtgctctggctcatgcctgtaatctcagcactttgggaggctgaggcaggaggattgcttgagcccaggagttccagaccagcctgagcagcata

SEQ ID NO: 657203 - DNA, 583 bp, Homo sapiens
atggctttaggcttctgctgctctgctctcgattcattctccaaagagatttattaggtcaaagggcataaatatttttaggacttaaaattactttcctaattggttacatcaatttatggtactacccaaggaatamaggtcctgatattactgggtttggatttagggatttccattttaatttggtagggattaatttagtaaaggagttcatttaataaagttaatttaattaatttagtgaaaaaataccatgcttcttttaatttgcttctttttgataattagtaaaattgactacttttgtgtgtttgttaatacttgttcttttgttaattgttttgttagtttttattcagttatcagctgagatcttaatgggattcttatcaacttatctgagttcttgacatagttcttgttgtaaatataactcctggtatgttgtttgttgttaattctggtgatgtattacatataaaatttatttataaagaatttttaatttttttgagacagagtctcactcggtcacccaggctggagtgcagtggtgtgatctcggctcactgcaacctcc

SEQ ID NO: 657204 - DNA, 583 bp, Homo sapiens
atggctttaggcttctgctgctctgctctcgattcattctccaaagagatttattaggtcaaagggcataaatatttttaggacttaaaattactttcctaattggttacatcaatttatggtactacccaaggaatacaggtcctgatattactgggtttggatttagggatttccattttaatttggtagggattaatttagtaaaggagttcatttaataaagttaatttaattaatttagtgaaaaaataccatgcttcttttaatttgcttctttttgataattagtaaaattgactacttttgtgtgtttgttaatacttgttcttttgttaattgttttgttagtttttattcagttatcagctgagatcttaatgggattcttatcaacttatctgagttcttgacatagttcttgttgtaaatataacwcctggtatgttgtttgttgttaattctggtgatgtattacatataaaatttatttataaagaatttttaatttttttgagacagagtctcactcggtcacccaggctggagtgcagtggtgtgatctcggctcactgcaacctcc

SEQ ID NO: 657205 - DNA, 580 bp, Homo sapiens
ccccacctcatcctctggggtactgccatctaattccttcttgggtttgacccttgaattatagagaaaccattagctaactgctgccaccactacccccaagacaaaatgaggaactaagactgaccgctaaacacaaagccttagctaactggggagctaggaggtcagtgaagaggaatagaattttttcttccaccgggtgtagtgctcacgcctgtaatcttagcacttcgggaggctgaagtgggtggatcacctgaagtcaggagttcaagaccagcttggccaacatggtgaaaccccatctctactaaaaatacaaaaattatccagccatggtggtagatgcctataakcccagctactcaggaggctgagggaggagaattgcttgaacctgggaggcagaggttgcagtgagccaagattgcctcattgcactccagactgagtgacaagagtgaaattccatctcagaaaaaaagaaaagaaaagaaaaatatatttttttctttttttcctatagcagaaagggaaaaaaaaagcctcattcgattatcatcatttgatgatcgtt

SEQ ID NO: 657206 - DNA, 461 bp, Homo sapiens
gacaacacggaggtcattagtaatcttgaggagactgttttcagaggacagaggagtgacaaggaagggtgtaaggggagataagaagtatacatgaccctttcaggaagtttgactgtgaattaggtataaaaggcagtgaaaacaagagtattttttttaagagatggagacttayggattttttcatgattttgagaaagaacagcggagaggagattgaagactcaacaagatgacaggataattgttagagagaggtgaggagatgggaggagatgagatttccttcaagatggaggaatgggctcaagtcagtgaagagacaagttccattttaaccagaaaaatgaaatgccggttacgatgaatttccaggtttgcaggtgagaagttggggtgtttctatctggtgttctccagactttccttgaggccaccaagcaatgatggggaatggc

SEQ ID NO: 657207 - DNA, 461 bp, Homo sapiens
gacaacacggaggtcattagtaatcttgaggagactgttttcagaggacagaggagtgacaaggaagggtgtaaggggagataagaagtatacatgaccctttcaggaagtttgactgtgaattaggtataaaaggcagtgaaaacaagagtattttttttaagagatggagacttacggattttttcatgattttgagaaagaacagcggagaggagattraagactcaacaagatgacaggataattgttagagagaggtgaggagatgggaggagatgagatttccttcaagatggaggaatgggctcaagtcagtgaagagacaagttccattttaaccagaaaaatgaaatgccggttacgatgaatttccaggtttgcaggtgagaagttggggtgtttctatctggtgttctccagactttccttgaggccaccaagcaatgatggggaatggc

SEQ ID NO: 657208 - DNA, 583 bp, Homo sapiens
gcatgttccagacattcatgctgaataaacagaacaagcagagatggtaacagctctgacacaaactttcacaggaatacaaatttgtaaaactgccatttaaaatccccttgtgtttgttccattaactgagcatactttgctccaccaaacatccaagactaaaacggtacctaaatggggcacagattagattttccctcagcacctgaggctagtggaagcccgggtagcttgcttttacattgcttgacctagttcgaggatcatagtactgtttagtaagggcagaatcgctggtcccactaaaaatctggaaacaaggccctggtctcaattggcttgtgcatttattgagccctgtggtgtctgtgccaggtgctaatggaatcatggctcttgtgcctcatgatggtgttccaagctccttttttaagtttgaagacccacttatacatggaaatattatggatccctgtgggattaaaacacgatctatttytagcatttattgatttaataaatatacattgaaagaatcaattatgagtttaacaacactttaaatttgcatcttataatc

SEQ ID NO: 657209 - DNA, 553 bp, Homo sapiens
tccttttttaagtttgaagacccacttatacatggaaatattatggatccctgtgggattaaaacacgatctatttttagcatttattgatttaataaatatacattgaaagaatcaattatgagtttaacaacactttaaatttgcatcttataatccaaacaacatttacatatatttgaatatatatatatgccttaataaaattatttatctattccacagaccacagatccagggttctcttgcaatatttccttagccattgctccaggagtcctcagtctgtaatttaggaatcattactatagagtatacaaaaasgaatactcccttttgttttggtttgtgcctttacagaccttatttctaaaatgactgcagtcagggaagactaaagagagcgagctgatggaagactagtggaagccatggcagagggggtggagagaaagccaacagaatgggagagatgataaggaagaacaattgtaggagttggtgactgccccagctgtgggtgtgaggtagagcgagggcctcaatgagatgt

SEQ ID NO: 657210 - DNA, 563 bp, Homo sapiens
gtaagtattatgaagacagctaaaattttttgagcccttaccaggtgccagccattgtgataagtattgtatgagcacatctcatttaatcctcacaacaaccctattacataaatacttgcattatcctcactttatagatgaaacaacttgaatacaaagagacctgtggcttctgtggagtcctcaggaagcttacaatcattgcwgaaggttaaagtgaaggagaaagcacatcacatggccagagcaggagcaagaggaagggaaggtatctctgggcattatgaagaaaggtgagagaacaagggcttcaatccatgttgtctaaacacaaagtttaagctcttaattattatagtattcttcttctcctaatggttctagtttaatcaacttcttcccctaaaattaagtttctaggcaataaaagtaatgaacgtatgccataatctgaaaaagattcagaaatgtgtaaggattatgtaaaagtgtcataagagcccagctggtccccacggggattccttaatctaacaaggcagacaactgacttgttagca

SEQ ID NO: 657211 - DNA, 523 bp, Homo sapiens
ggaaggactttgtcctggggtttgaggaccagcttagccacagaagaacagaacggccagtccctgactcccagacagcatctctggacccacccaggcccgaggggaactcactgcctttaagggaaggacacagacctggctggctttcccacttgttgattgtacagtcaaaagccctagagtgaacataggcaatagccaggtagtggttacagaggtcccttgatgagacccagtgctctgctggcttcagttctgacccaatgcagtcccagtggtggtgrccacagaagtgctgacatcatcctacttgttgctccaggtggctcagcacagagagagagagagactgtttgtttatgagaaagtaagggaagagaaaaagagtctctgcctgataatctggagaattcttccaaatcttatccaagactgccaaggtggtacctctacgagtttgcaagaaccacagcattaatgggcttatggatcaagtcccttcaaatacctagaaagcctt

SEQ ID NO: 657212 - DNA, 435 bp, Homo sapiens
atttttaagtgtgacaattttttagcctctcctttccagagcttgccaatggacaaaatccatttgggaaccctaggaaggaagatatctcctccaaataaagcaaaggtttctcagcctcagcactgctgacattttggactggaaaatcctttgttgtgggttcctgtctcatgcattgtagaatgtgtggcagcatccccagcctttacccattacatgccagtagcatccattcagtaatgaccatcaaaaatacctctacacattgcaaatgtwtaggatttggagaggtcaaaaccatcctggggtaagaaccactggaataaaccagcacatttttgtccaatgtgtgggaagtaacccactccccacctcaccctcccttaggtggtttgtgcattctcacattctgaaatgctctgtcatgtgttg

SEQ ID NO: 657213 - DNA, 559 bp, Homo sapiens
gattagcctgaaatgattggctggctgtcacagaaatggatagccaggatgggtccattatcctgcacagatagtgtgcatggcaatcagcaccgtgggaagaagaggcatcctcttttccacagttcagaataggaatgggagtttgtgttattctctcctccccatattacctcattttgattgtgatgctcatggcttcttgctctatggagaacaagggtattgccrgaaaagatactttcgaaacctattaaaatatggaggacagtcacctggacaatccatggttcttagtcatctcgtggacaggggaatctttgaatttttgtgtgtcctccccaatgccttattcaacagggctacaagccaggatgtccaggggcaaacctgctcttccacttactagctctgtgaccttggggaaatctcagagtctcttcagcctctgagatcattcagcattgctgtttggattaaatgaattttacatgtcagcacttaccccagcgcttagaacatggcgtaataagtattagaggaggaaagagatggaata

SEQ ID NO: 657214 - DNA, 361 bp, Homo sapiens
aatgtcacacagcagctcatagagtctgaactggggactaaactaggatctgtatgacttgatagccaaggtcttctgactgtgctgtgttcagtgagcagggaaacaatgtctgtcaatcacttggagtgattgcaacactctcacaatggccaagatttggaaacaacctaggtatacatcagcagatgactagataaagaaaatgtggtacttatacacaatggagtatgatttagccataaagatgaatgagatcctctcatttgcaacaacatgrataaaactggaagtcgttatgtttagtgaaataagccagtcacagaaagacaaacttggcatgctcttacttatttgtggg

SEQ ID NO: 657215 - DNA, 456 bp, Homo sapiens
gcagggtagtaatctcctctttgcctcttgttcactggtatgagtagcccaaagggccaagaggcagtytccggttccaacttaatgaaattattattctatctctggagaaggggatcttcttttgggaactaagacctccaaagtagcagaccccaagttgcacgaatgaaggcaaagctttgttattggatcctggttggcgggggaacagtgataaaagtcactatcacatattccttttggctcccagactcattagtctgcctgtaaaaaaaaaaaaaaaaaaaaaaaggctatcatgtattacatattggctcagagcatattctgcatcttggagggtgttaccccagtcctgaaatgtgcttttatccaacaacgttataagcaagtgttcaactgcccattctatcgctatattaggtcaaattctttcgagtgatgaagtatgta

SEQ ID NO: 657216 - DNA, 456 bp, Homo sapiens
gcagggtagtaatctcctctttgcctcttgttcactggtatgagtagcccaaagggccaagaggcagtctccggttccaacttaatgaaattattattctatctctggagaaggggatyttcttttgggaactaagacctccaaagtagcagaccccaagttgcacgaatgaaggcaaagctttgttattggatcctggttggcgggggaacagtgataaaagtcactatcacatattccttttggctcccagactcattagtctgcctgtaaaaaaaaaaaaaaaaaaaaaaaggctatcatgtattacatattggctcagagcatattctgcatcttggagggtgttaccccagtcctgaaatgtgcttttatccaacaacgttataagcaagtgttcaactgcccattctatcgctatattaggtcaaattctttcgagtgatgaagtatgta

SEQ ID NO: 657217 - DNA, 456 bp, Homo sapiens
gcagggtagtaatctcctctttgcctcttgttcactggtatgagtagcccaaagggccaagaggcagtctccggttccaacttaatgaaattattattctatctctggagaaggggatcttyttttgggaactaagacctccaaagtagcagaccccaagttgcacgaatgaaggcaaagctttgttattggatcctggttggcgggggaacagtgataaaagtcactatcacatattccttttggctcccagactcattagtctgcctgtaaaaaaaaaaaaaaaaaaaaaaaggctatcatgtattacatattggctcagagcatattctgcatcttggagggtgttaccccagtcctgaaatgtgcttttatccaacaacgttataagcaagtgttcaactgcccattctatcgctatattaggtcaaattctttcgagtgatgaagtatgta

SEQ ID NO: 657218 - DNA, 570 bp, Homo sapiens
agccattacaatgcagcaagcattttaggtccagttcattttcagccaaaaagaacccttggggcataaagattctaatatctgaagataaaggcaaagagaaaagaggactcttccccasgtgtagtcccaaggttaggaagcttctgagtcacattagccagctcctggcaggatgttatctaaagagcccctcctgaccccacccccccggttccacgttaaatgtcgtctttcccaacaaaacctctccattgagtgaggctctctggagaaacgtgcctctaataatcacataagaagcttggcagacaaatgtgtggccactgaatccactagtaaaggagaatatccaataattgaaaggagattttaaaaactcacaggagcctttagctgcttcctcacagctggtagtcaggtagccaggagctttctcaggtcacctaggcagcatcctgtgggaacccaggtgctgtcccctgcccactctcccccaagtcaacaatccctgaggaagtgtcctttgttagcctgtcccatggcttaatttttgcacaaaataccagc

SEQ ID NO: 657219 - DNA, 570 bp, Homo sapiens
agccattacaatgcagcaagcattttaggtccagttcattttcagccaaaaagaacccttggggcataaagattctaatatctgaagataaaggcaaagagaaaagaggactcttccccaggtgtagtcccaaggttaggaagcttctgagtcacattagccagctcctggcaggatgttatctaaagagcccctcctgaccccacccccccggttccacgttaaatgtcgtctttcccaacaaaacctctccattgagtgaggctctctggagaaacgtgcctctaataatcacataagaagcttggcagacaaatgtgtggccactgaatccactagtaaaggagaatatccaataattgaaaggagattttaaaaactcacaggagcctttagctgcttcctcacagctggtastcaggtagccaggagctttctcaggtcacctaggcagcatcctgtgggaacccaggtgctgtcccctgcccactctcccccaagtcaacaatccctgaggaagtgtcctttgttagcctgtcccatggcttaatttttgcacaaaataccagc

SEQ ID NO: 657220 - DNA, 570 bp, Homo sapiens
agccattacaatgcagcaagcattttaggtccagttcattttcagccaaaaagaacccttggggcataaagattctaatatctgaagataaaggcaaagagaaaagaggactcttccccaggtgtagtcccaaggttaggaagcttctgagtcacattagccagctcctggcaggatgttatctaaagagcccctcctgaccccacccccccggttccacgttaaatgtcgtctttcccaacaaaacctctccattgagtgaggctctctggagaaacgtgcctctaataatcacataagaagcttggcagacaaatgtgtggccactgaatccactagtaaaggagaatatccaataattgaaaggagattttaaaaactcacaggagcctttagctgcttcctcacagctggtagtcaggtagccaggagctttctcaggtcacctaggcagcatcctgtgggaacccaggtgctgtcccctgcccactctcccccaagtcaacaatccctgaggaagtgtccttygttagcctgtcccatggcttaatttttgcacaaaataccagc

SEQ ID NO: 657221 - DNA, 564 bp, Homo sapiens
acatttgagcttaagcctttcccagggaaataaatcactgtgaaaagatatacttggaaacccgatttggccttttttctcttttacttgaatatcccttcagaggtatagaagaaagttcacatcacaaaagctgcatttagaaagcattaactcggaggccagattcgaagagaagaaaaaatttacagttaaggattaagccactaagagctggaataagaacctggctttgggtaggatcttctctgcaaaggtccaggttagttcttaatacaacagcatgtgacaccactcaagctgggactcctagcagatggctcagtatcttccaaggtggcccatggacctactayggtattaaggtttacgaatgaaaaatgcccctgctttggtttctagcataaatcactgaggatacttctttaattatttttctttttggatatgacagatttttgtttcaggaaaaaaaaaatgaagatttgcatgaagcagaagccaagagagtggaatggactgtatttgttatcactgttatttgtttgctggtggtagggagtg

SEQ ID NO: 657222 - DNA, 480 bp, Homo sapiens
gctctagaaatagtggcttctcttgctgaatttggtattcctaattccacagtgccttttctttacctcttctagtagttaaccacgtgttagtagttaaccacgtgttagtagttaataatttttacattaacttttccctgttcaaattactggtgtggtttctgccttctcactataccctgacagatatgctcaatataagtaaacagaagaagaaattccaaaacaccaagcattcacttcatgtagtacgaagatgagtctttgggaaaattatgactagaaaattgtttggcrgtttggagacaagagttaaaaggcaagtcttggcctttacaactcaagcatccattaagctgcccctcaccttctgtttaaatcaatgggccacaggtaaaatggatccctctcagacttatgaatagaggtagtgtgattttaggtgtcaacttgactggattatgcaaaacctagaga

SEQ ID NO: 657223 - DNA, 579 bp, Homo sapiens
agcagtcctcccacttcagcctctcaagtagctgagactacaggaacatgccaccattcccagctaatttttaattttcttttttttaagagaggtgktcttgttatgttgcccaggccaacctcaaactcctgcctcaaggaatcctcccacctcaaccttccaaactgctgggattacaggtgtgacccaccatgcctggcctgttatctcttgttatttcttcctgttgtcttccctgatcctggaatagtgactgtataattagatctcaataaatagatattaagcaaagtgatatattttctgacatgccaagtaaaaataatatcttcaaattatcacaatctgtcactataaaatatcagttttgatcatgaagattagtaacaaaggattatgaaaggccatgaggaaattatggggagtgatgtaaatgttcactcttatttggagtgatggtttcatgggtataggggtatgtcataatttatcagattgtacacttaaaatttgtgttatgtattggatgtcaatagaacattaacaaagctgttaatagggcagaaagtattgtgg

SEQ ID NO: 657224 - DNA, 579 bp, Homo sapiens
agcagtcctcccacttcagcctctcaagtagctgagactacaggaacatgccaccattcccagctaatttttaattttcttttttttaagagaggtgttcttgytatgttgcccaggccaacctcaaactcctgcctcaaggaatcctcccacctcaaccttccaaactgctgggattacaggtgtgacccaccatgcctggcctgttatctcttgttatttcttcctgttgtcttccctgatcctggaatagtgactgtataattagatctcaataaatagatattaagcaaagtgatatattttctgacatgccaagtaaaaataatatcttcaaattatcacaatctgtcactataaaatatcagttttgatcatgaagattagtaacaaaggattatgaaaggccatgaggaaattatggggagtgatgtaaatgttcactcttatttggagtgatggtttcatgggtataggggtatgtcataatttatcagattgtacacttaaaatttgtgttatgtattggatgtcaatagaacattaacaaagctgttaatagggcagaaagtattgtgg

SEQ ID NO: 657225 - DNA, 545 bp, Homo sapiens
taagaaatacttggcttaaaagtagaaataagagcaagttttagaatagaaatatttttgcttctgatcctgcaaccatcattcatttttcacccactcccatctcaactcacactcacacaaacacacacacacactaataaaaaacacagatgcctcaggtaaccattccctaacttttgtgcattcttccaaaggttgtttgtgtccgtgtaagyaaacagcatatatgtacttattttctataaaagacgttttgtgaactatgctctctgtcttgcttttttcacctgaaaatacacctttaagatctttgtataccagcacatagaatgattcattcatcttttaatctgcatatttaactggataaacagacagattgacagtaacagatagataacgcacatatgaaataaaaattcaaataattcctatcggtgggcatgttattgtattacaaactaatgtgtatttgctaaatgtaaaatgatgttcagctttgtacattgctcgtttcttgaatgtgggaaatacttgtagag

SEQ ID NO: 657226 - DNA, 538 bp, Homo sapiens
gtttaaactgatggagacttagcttgatatttaaaagaggcatttttaaaataaatcatatctgatttagacatctttgcaggaaagtactttgaattaaaaattatcattctgttatagatttttcatagattctacttggttgcatattctacaagaatataatcattatttttgttaagaaatacgtatttcttgtcaagaaaactgattgctcagaaatactgtattgaaaaccttccaagaaatgttcatcaatttcagttattgttgtcagagcctggtaataatattgaccatttgactgaacatgggcttcattagtggttttatttacttatttatttatttattttgttacatcttcatcttccatttccaatgtgaccattcattgtagcccaattacaggctttttatttactatgaagtcagagtctcattaatccrttaataaaccaatatcgactttattttctgcaggcttgtgatgcttcagaagtcattgttacttcattttcaaaatgagttctgataa

SEQ ID NO: 657227 - DNA, 518 bp, Homo sapiens
attttgaggattaagtgagacacatgtaaagcacctaaaattgtattctgttcatagatatacttgcagatatttttctcatgtattatcacttgcaaatgtttttttaaaaggaaatagaaacttactatatttaaaccacattaaaataggtcctcttgctaatatttctaaaattttaaatcttttattaaagatggtcttcccaaattcaattttttaaaagaccctcaaccccagtttcttacygaattaaaacgcagtctagttttctgaagacatataggtgggagaaagtcaagggttggagaatgtttaatggaaactggcaagcaaattattaacttgtgggccttctttaaaaagaacaatatgtgcatattttgttgaccaaatacaactctttctgtgcaaatgcttcataacttggttgtagagaagacatgaatctgaaaactccttttttgcttttatactaaagctggatttaaacattataatgatttgaattattcaat

SEQ ID NO: 657228 - DNA, 381 bp, Homo sapiens
gtcattaggcataaagtaagtaattggtaaagccaggtggtatcatagtagaactgagacttgaagcctctatgrcatactaccttcttgaaatgtacgcaatcctgttgtcttaaagaggcatagggacacagggattatgaccacatttgaaacattcaccagatgggtgatgaatgatttattcatcttgtattataaatttaaacataatttaatcactctcaccattatcagttgtgcatgctaatttattgtataattttatgtaaaatgcatgagcatcttttgtatgaaaatcctaaatatctccatatattaacataatttaatgttttatttgtatgcatttcgtgtccaacttgatgacaagttgaaaat

SEQ ID NO: 657229 - DNA, 537 bp, Homo sapiens
agatgtcagtttctacaacaaatacataggaagtctaaataattgtgaagcctaaaataagtgtgatgaatgtgtgaattgcccctaacctaggaaggaagagaattgtgaattcgtatgactatgtgagaatattaatatcgtaatcaatgttaagtttgatttgtatgctggttatacataactagccttagaaggtcagtcatgaaaaaggttgtacttgccagaaacctttttagtcaagacatcataaaaggacaagaagtgaaaaatacttaaattatacattgtatgtaatgacattgaactggmaggagataggctaatgtatcttttggatattgaatctcagtgatccccaggctggatattagtaagatttgaatatcattcagttgaacaattttccttcaaaattttgcttaaatgaatttaatttccttaattaaagttactaaatataaaatcatttgatagccaaaaggtcagatgcttgctttattttaagaagtgcaaaactgttcaacttgaatgatt

SEQ ID NO: 657230 - DNA, 517 bp, Homo sapiens
ccatcaatatgttgcttttcttgaaatgaatatctaactcagagaggtttgtatctagcaagctgtgatcttaacacaagctagaaggctaaaatcaatgcagccctcccttacttaagccatgaattagctgtatggcaacataaatattaaagttgttaatcacttacatagccccatgatcttttattagggcttcttattgtcagaaggttttactactgactgtttggaggatgattttcttctttgcaagtttcaaaggcattgaaagagagaatttcatgtaactgcatgagatrtgtgtggtatttctatgctagagaagataggatctcctgaataaatacattaagtatcaggcaatgaaggggtaaagccaaatttactgtaatcacagttctttctaaagtcatatagcctctataaatgagataataaagtaactcacattggttccttctgttccctggagtttaaagtgtattaatggctactggattcagaaaaaataaat

SEQ ID NO: 657231 - DNA, 617 bp, Homo sapiens
ttcgctgtttaaatgttctgtggtggttccttcttgcctgttggatgtttctcagagaaaaagtacaatgccctttaactttcagtggtatgaaactactcaagattctctaaacatgcaatgtattttcatattgctatagattcctcaaaatcaaagtgtttcatcacaaaaatccttgaccttgtgctcttcccaaactttccttttccaatgcacatacacatatatgcactcatatacaagattatgtttctatttagtgaaatgtgctaaatcattcattggagttcaaactctgtattatcttctcaggcatggctatsctgcccaaatgccccaggcaagaggggcaattttttctttggagatatgtttatatgatattaatcaccacaaagtttagccacttcataattcgtgcttttggggggtaaggactttgcctaacttactgtgcatcagactttgcagtaggacatagggtttttactggatgagtaaataagttaatgtgatcaatgtatatatttaagatacagaacaaaaaccttttacctctagatggagaaaacgatttaaaaaaaccccacactagattgagttaaagaaaaata

SEQ ID NO: 657232 - DNA, 617 bp, Homo sapiens
ttcgctgtttaaatgttctgtggtggttccttcttgcctgttggatgtttctcagagaaaaagtacaatgccctttaactttcagtggtatgaaactactcaagattctctaaacatgcaatgtattttcatattgctatagattcctcaaaatcaaagtgtttcatcacaaaaatccttgaccttgtgctcttcccaaactttccttttccaatgcacatacacatatatgcactcatatacaagattatgtttctatttagtgaaatgtgctaaatcattcattggagttcaaactctgtattatcttctcaggcatggctatgctgcccaaatgccccaggcaagaggggcarttttttctttggagatatgtttatatgatattaatcaccacaaagtttagccacttcataattcgtgcttttggggggtaaggactttgcctaacttactgtgcatcagactttgcagtaggacatagggtttttactggatgagtaaataagttaatgtgatcaatgtatatatttaagatacagaacaaaaaccttttacctctagatggagaaaacgatttaaaaaaaccccacactagattgagttaaagaaaaata

SEQ ID NO: 657233 - DNA, 519 bp, Homo sapiens
tgcaaactgcccaatgcagaacagagttgagactatggaaaataaggttgaggagaagagactttgaactgtcccattttagaaaaggaacaatttctcaamctctatctttatgaatgattgatacattgttaaaaagtctgtgagtattagctaatgatatctggacttgtgcataggtaatcaccgagctgtctggaggtggtctggagcacacgtggggtacccacctgtgattatggcatctagctacctaaattgatatattaaggtaggtctctctttgatataaagtgaataaaataaaatgtttaattgactataaatgttctttgttgctgataacatttttttcatttattctatgaacaaaataagaggtttattaccataattatatgaatttaaaaaatgatttattttaaatcctaactctcttagttcaaaggtaaaacaattcaatgtgagtgtctataagccatcttagcaggaatctccttacagccacaatcttgagta

SEQ ID NO: 657234 - DNA, 628 bp, Homo sapiens
ttccactccatgaaaacacattaattcattaactcattagttgattcattcattaatccattaatacagtaatccctatgaccacagccctcatgatccagtcactttgtttttttttttgagatggagtctcgctctgtcctctgtcacccaggctggtgcagtggcaccatctcagctcactgcaagctccacctcctgggttcatgccattctcctgactcagcctcctgagtagctgggactacaggcgccctccaccacacccagctaattttttgtgtttttagtagagacggggtttcgtgttagccagaatggtctcgatctcctgaccttgtcatccgcccgcctcagcctcccaaagcactggattataggcatragccaccacacccagccaatccagtcaccttttaaaggcccccaccttacagtactgccacactggggactaagtttaatatgagatttgaagggggcaaacattcaaaccatagtgccatgcactcattatgttgtctccactggttccatggattacagtaatattcagtctcatcactgcttttccagatgaacatcctagcacagaacaggtgccactttacatgccacacacttacac

SEQ ID NO: 657235 - DNA, 413 bp, Homo sapiens
tatgacattattattatttatatttctcaactattataaagttcaatgatacgcacagagtagaagttaataagttaatgttgataagccatacaaattccagtcactctaagtaaatggtagaaatgtttttccttcattatgttaactacaaaatcatccctttataatttcttctgacctaaattttaaacttaaatattaacttaaatcagttaagttcatggtatcttaaaactcattacaaatgtaaacatatatttgaaatttcagtgaggtctatttcatggttttatgtacctatgtggagcttactatwgatgatgacataaatattaactgacatagaacatttaaaattaaataaaacctgtagatattctgtcatatcacattattcaacaaagttttct

SEQ ID NO: 657236 - DNA, 650 bp, Homo sapiens
tcattcagccagcttgtccagtgtttttccaactgctccttttttgattatttaaaaaaaamccccacaaaacctaagaaagtcacaacgaaaaaagagaactacaggccaacatccctgaagaacatagatgcaacaatttttaaccaaatactattgaaccaaatcaagcagcatatcaacaagttaatttagcacaatcaaataggcttcattcctgggaggcaagtttggttcaacatacacaaatcaataaatatgattcaccacatgagcagatttaaaaacaaaaaacatatgatcatctcaatatacaaagaaaaagcttttgatcaaatttattcatgataaaaatcctcaagaaactaggcaccaaagggacatacctcaaaataataagagccatttatacaaactcacagccaatttcataccaaatgacaaaagctagaagaattccccttgagaaatggaacaaaacaagcatgcccactctcacttctcctattcagcatagtactgaaagtcctagccacagcaatctggcaagagaaataaataaaaggcattcaaataggaaaaataaacataaataaaaaagtcactctcttcactatcagagtctagacctagaaaatcctacagactcc

SEQ ID NO: 657237 - DNA, 526 bp, Homo sapiens
agagcattttggagatttctcaaagaacgtaaaacagatctaccattcatcccagcaatcccattcatggggttatatcaaaagataatatatcatgctaccaaaaagacacatgcattcatatgctcaacactgctctcttcacaataataaagccatagaatcaatctaggtgcccatcaatggtggattggataagaaaatgtggtacttatacaccatgaaatacaacgcagctgtaaaaaaaagaatgaaatcacatcctttgcagcaacaatggatgcagctrggggccattatcctaagcaagttgatgcaggagagcagaaaaccaaataccacatgttctcacttataagtgggaggtaaacattgggtctttataaagatagcaacaatagatactgaggacttctagagggggatgggagggaggaaagggttaaaaaatttattgggtactatgctcagtacctcagtagcaggatcaggcatatcccaaacctcagcattttacaatgcaccc

SEQ ID NO: 657238 - DNA, 526 bp, Homo sapiens
agagcattttggagatttctcaaagaacgtaaaacagatctaccattcatcccagcaatcccattcatggggttatatcaaaagataatatatcatgctaccaaaaagacacatgcattcatatgctcaacactgctctcttcacaataataaagccatagaatcaatctaggtgcccatcaatggtggattggataagaaaatgtggtacttatacaccatgaaatacaacgcagctgtaaaaaaaagaatgaaatcacatcctttgcagcaacaatggatgcagctaggggccattatcctaagcaagttratgcaggagagcagaaaaccaaataccacatgttctcacttataagtgggaggtaaacattgggtctttataaagatagcaacaatagatactgaggacttctagagggggatgggagggaggaaagggttaaaaaatttattgggtactatgctcagtacctcagtagcaggatcaggcatatcccaaacctcagcattttacaatgcaccc

SEQ ID NO: 657239 - DNA, 521 bp, Homo sapiens
taacttagagaggttatgtaaataattaacctttgaaaataatacttgcaatgtgaacatacatatcaataaaaataattaccagattctattcacctttagccaaagattgcagtgggtaatttagaaaacattcaaaatatttgcatatcattcagagtattacattttctcaggttctcggtattaataggccaagacaacaaagcttctatatcagtgtgtaaagaggcacagtgattatttaattgacaagcagtaacaacctcttcattagaaaaacaatactaagctttatttgttgattttattgcttaggacaataagctgatttcytaagttgtcagtgttagaccttaaattgtaaaaggaattttccaacaaaaatcagacaaggaagaagaggtattgctataaaaatagaaggtttttaatgagtttgtttatctattcatcaatatgtggtctttacaaaagagtaaaacataggcatataaaaacaacttattttgtgtgtgaaa

SEQ ID NO: 657240 - DNA, 564 bp, Homo sapiens
gaatacaataattttccaattctgggaagatgattttgtttctcctttagatacagttctaatacaaaaccatagtggaaaaacagtcaagacagatttgcaatctaatgggtcagtaggaataaaggtttaatgggagcacattattaaaacaagacatcttatcacagtattacaggcacagagtaaaagcataaagtcacattcagtcattcctcattcattcaacagagaaaatgcctgtcccacagagcttacattagaaagaaaacaaacaaaaacaggcaattaaaacacacatacacacacacacacacacacacacacacacgagggaagttagatgtgttgaatagggataacttccatgaaaaataatakagctgtaaaaaaaagagagattttaaggagctgaattttgacatacatcatccagagaagcctcactgagatgctttagaagccatgtgaaagaagtgctgggtgtgccttatagacatctggggaagcagcatgtgaggctcttagaggaacaggtgaaaagtctccaaggcaggaatatac

SEQ ID NO: 657241 - DNA, 383 bp, Homo sapiens
agtccccattttttatgtacatagttactatattcttagaattccaggatatattagacagtgttgttgcttttctctttctctctgaaagcagtcttctcttgacttttgagtctttcagtgttccttcttatttcaattcctggtcttcattttattctttatcaccagatcttcttccatttactcctgaaatgaaagcatttcctacaacactctactcagcttcctgtttgaaatatatgggcattcccctatttattatttgcaatcccatgccataacttctcacaaatatatcaaaatttacactttargcctcatctcctttgggaattctagaccatcactgatacctgctataaaatatctttctaagcatg

SEQ ID NO: 657242 - DNA, 466 bp, Homo sapiens
atttttaaagctttagtattttctttattttctactcttgtcaaatacctttattaagacttcattaaactaactgatacgttgcaaagttaccaatttgactttgcttaaaaacatcatggaagattgaatgattacatgtcacaactcaattacccacctgtatatctctttcagatcacacacacacacacacacacactctctctctgtgtctctctctgtctcttttcttcacttaaccacaatacacatttataaaccacttagtctaaatattaactcagagatcatgaaaaccaagtcaagattaagatcacgtctttgattatagtatagaccagtaaaattctcttccacagtttcttaaactgtcacctcttttcacaaatatctatgcctgctaagacytaatacagttagtaagctcctaccataccctaggtttgcagcacggtttgcatgc

SEQ ID NO: 657243 - DNA, 591 bp, Homo sapiens
acattggcaacacatgtcacgggtttctgcaccacctgtgtatgcacgttggtggttggcgcataactcaaattcacaaatagtgatttctgagtgtgctcagagatgatgttttctaagctcacgtgtagttgttccacataatatcctgcaccccaccttctgtaattgcagtctgccacttgctgcacctgctgtatgaagcatctctccaccactgctggttccttcctgccaatgacgacacgaatgccaagtgtactgtttctcagcattcttcaagctatatgactcctgctctcaggtcccactttgatcctcgagcagtgatgctgctgcctggttgtggccttgggtcactcggtctcaaatgaaagagctccacttctttgactgcacatactgtcttcatgtgtgtgtgcaacccttgaggcagggcttggagacttgtgccatgctttcctctccattcctcgcctgttccccaaaatcataaccactgctgagtctaacaactttttcccttttgtaaatcagttcttacaaactgacacctgwgggggccactccatgcactattttattaggcat

SEQ ID NO: 657244 - DNA, 593 bp, Homo sapiens
ctggtctcaaactcctgacttcaggtgatctgcctgccttagcctcccaaagtgctgggattacaggcataagccaccgcgcctggcctagcaatttctttcaaaacgaaatgtactcttactatattatccagcaatcatggtccttggtatttacccaaatwagtagaaaacacatacacgcaaagacctgcacatcaagtttacagccactttattcataattgccaagacttagaagtaaccaaggtattcttcagtaaattagtgtgtaagtaaacagtgttacaactacacaatggaatattattcagaactaaaaagaaataagctcttaagccattcaaagacatgagaacttcaatgcatattagtaaataaaaaagtcaatctggaaaggctacatacagtgtgtttctaactatgtgacattctggaaaagacaaaatcaaggagactattttgtgtttggtataagcatcatgagagaggacatcatgctcatcactgtactgttagcatatagtgctgtatgacatggtatatgtgcctaacacattttataagtgatttattcctctcatagctgttgt

SEQ ID NO: 657245 - DNA, 610 bp, Homo sapiens
ctttctgctactccttggtgaccctacttgagtatatgtggtggtgggatggagaggatgagactttgccattttgtcaggcttctccagggaactgagactcaggcattctctcaacttggttaaccccaggtatctcagggttttgttgttctctaactcatgattagtggattaggggaggggagtaatagagtctaactcttaagtaatttgtatctcttgttattctccttgctcttgggaaagaggccatagattttgacatggaaatcgaccttttagttttttgtgtyctcccttctctgggactatgaagacagaatttcctacagcttaaatctgagaaaagggagtgggagtaggaaataagtagggagaggtaagaacatgggtaaatacaacaaaaggatatgtgtctacaactctatactgaaaagcttttcatagatacactattttaaagtgtatctatgtgactacatggtattatttgtttatactacattttatatacttcatagtttttcaattgaaaagcagctacttttattcttttcattaccaataatgctataataaatgggcaaatacgttattcacatgtgtg

SEQ ID NO: 657246 - DNA, 567 bp, Homo sapiens
cacatgtatacctatgtaacaaaactgcacgttctgcacaagtaccccagaacttaaagtataattaaaaagaaaaaagaaaaaataataaagtgaatttaacatgtgaactgtttacttgagcacctagaggccattacagggttattattggccttgtttcaatattgtggtatttaaaggaatagggagatttgagaaagggaacacaaacaggaggaggctggttcatggagcagtcagaacacacagcatttcttaagttctctgtcttatttgggcatggtttctggtactcccaagaaattacaatagtgacactaaagatcactgatcacaggccaccataacagaataataatttaaaaagtgtcatattatgagaattaccaaaatatgacacagagacatratgtgagcatatagtgttggcaaaatgatgccaagagatttgcttgatgcaggattaccatagaccttcaatttgcaaaaataattaaaaattaaaaaattaaaaaagtattctatgctaagtgtaggaaagtgcaataaaatgaagtatgcttg

SEQ ID NO: 657247 - DNA, 465 bp, Homo sapiens
agccaatctgatttcatatattgccccacccacttatcttcatgtatgttattctgaaggaaacaccacatatcattccatttcttctgaaaattattctgcatatcttatgacactacatacaatgaattcttttttaacaataccaccaaaccattaggacaacaatttcttatatcagaagatatacagttaagttttttatagtattaggatccaaataacatccttaaattgtagtggttgatcttggtcttccctctttcacttacagattccccttacatagcttctctctcttattttctctctctcctctaatttttgttagttatttttcaaataatttttcaaacatgttttcaattttttttcaaatatattctctctcattttctctactmtggtgactacaattacatgtatgttagataacttgaagtagtcccattgctaactgatgcc

SEQ ID NO: 657248 - DNA, 477 bp, Homo sapiens
cttcatcttggcaaaaaaaaaaaaaaaaaaaaaaaagcagaaggtttttgttgttgttttttagatttaatttattttgtagttagcaacatgaccatgttattttaaggtacctgaatattgttctgtgactaagttcaggtgatttttcttaaatttggctttttagaaaccactggatattgaaaactctggtctattttaataggaaaagaatctgtatcaagagaggtattagcagagatgtgaaagagaaagaagaatcaggaagaggagaaaagtaagacagaaagaaattttgtgcctttaagatgacaacaatgagataaattgacaaattatatatgtatatgtacatatatttttaaactatattttccaaacacaagctatttaatagaattaccttcaacaatagwtgattaaaaacaaagtggtacaaactgaattaattctatattccatatatagtgtgta

SEQ ID NO: 657249 - DNA, 633 bp, Homo sapiens
atgagactgcctagggagaaaggacagagtcaaaatactaatgtgtagtacagtatgaatgtcattttctagcccaactataggaagtagacttcattcttcatagaaataaagacacttctggaagaaatttaaggtgtcatcattctttagaatctatttacaactcagagattcagcattgttgctttgagacacaggtgaatgatagaagccattgattgctgaaaagggtgattctgttcatttatgtatgagtttcagcatcacagtgaacatggaaaataatcctgtagcatttaaagggttcgtattgcagtttgggtggcactgggaactgacccttaaggcaggaaggcaaatagtgyttccatggagatcagcaatgaattgtgtcctcagaagaaagaacatgggccaatgaagatggccatgagcaaatgtaagataagtctcgacttctcaaaatgttaggtaagatttcctcctcatgaatatttggaagcttgtggtatttgacatgatgacttcatttttattctcagactcctgaggctgatggacattaattttctacaaatatttggtaaaaacttgatctgttttatctttacagtcctataatgaatacat

SEQ ID NO: 657250 - DNA, 633 bp, Homo sapiens
atgagactgcctagggagaaaggacagagtcaaaatactaatgtgtagtacagtatgaatgtcattttctagcccaactataggaagtagacttcattcttcatagaaataaagacacttctggaagaaatttaaggtgtcatcattctttagaatctatttacaactcagagattcagcattgttgctttgagacacaggtgaatgatagaagccattgattgctgaaaagggtgattctgttcatttatgtatgagtttcagcatcacagtgaacatggaaaataatcctgtagcatttaaagggttcgtattgcagtttgggtggcactgggaactgacccttaaggcaggaaggcaaatagtgcttccawggagatcagcaatgaattgtgtcctcagaagaaagaacatgggccaatgaagatggccatgagcaaatgtaagataagtctcgacttctcaaaatgttaggtaagatttcctcctcatgaatatttggaagcttgtggtatttgacatgatgacttcatttttattctcagactcctgaggctgatggacattaattttctacaaatatttggtaaaaacttgatctgttttatctttacagtcctataatgaatacat

SEQ ID NO: 657251 - DNA, 633 bp, Homo sapiens
atgagactgcctagggagaaaggacagagtcaaaatactaatgtgtagtacagtatgaatgtcattttctagcccaactataggaagtagacttcattcttcatagaaataaagacacttctggaagaaatttaaggtgtcatcattctttagaatctatttacaactcagagattcagcattgttgctttgagacacaggtgaatgatagaagccattgattgctgaaaagggtgattctgttcatttatgtatgagtttcagcatcacagtgaacatggaaaataatcctgtagcatttaaagggttcgtattgcagtttgggtggcactgggaactgacccttaaggcaggaaggcaaatagtgcttccatggagatcagcaatgaattgtgtcctcagaagaaagaacatgggccaatgaagatggccatgagcaaatgtaagataagtctcgacttctcaaaatgttaggtaagatttcctcctcatgaayatttggaagcttgtggtatttgacatgatgacttcatttttattctcagactcctgaggctgatggacattaattttctacaaatatttggtaaaaacttgatctgttttatctttacagtcctataatgaatacat

SEQ ID NO: 657252 - DNA, 571 bp, Homo sapiens
tttaatattcttctaatttacttccctcattatagtaagtatcattagctggaatttcacaaactcagacctttaagataattatatatgagctagtctgaactttattttggaattacttctaagaaaacaatgtgctaagaaaatacaagcagggtatagatacaattttatagactatatttagattatgaaagaacacattatttaagtgtcttacagttttcaattacacttcacttatacaaaagataaatactacctatatacaaaagaaccaaggtcctggatgaaaggagaaacagatgctgtgcagccaaaatagaagccacgtatctttatgtttatgtcacctctttagataattaacacaaaaygttccacacaattatatccagtactgtctcttagtgtcccagttacataaagtagaagataccatagcacaatggctaggaatactgctagaagcagatgaagctacagaagaaaagaatccttactggtaggcagacaccaagttgggggatcataaaataggtaaacagcttacgtatgaatccgaggtgta

SEQ ID NO: 657253 - DNA, 602 bp, Homo sapiens
tgtcccagttacataaagtagaagataccatagcacaatggctrggaatactgctagaagcagatgaagctacagaagaaaagaatccttactggtaggcagacaccaagttgggggatcataaaataggtaaacagcttacgtatgaatccgaggtgtagtcatttagtactattaatgtagagaaaaacaaatctagaaacataaccagtcatttatttgacaacaggccacatatttctttcatggtaatgaataatgactaaaaacagaattttgtattttaaaaagtgatttgcatgcacacccagggcagatgactagaatccattcgactggatgctgcagtttcgctgccagcttttgaaaagtttttaggattatcactacatgtgttatctcttgtaatctttaagaaaaatctctactgcagttgtaatggttgctttctgttgcaaatatatatatatgtatatatgtatatgtgtgtgtatatatatatgtatatatgtatatgtgtgtgtatatatatatatcactcaattacataattgtgtgtatacatcactcaattattatatatgtagatatataatagattt

SEQ ID NO: 657254 - DNA, 600 bp, Homo sapiens
ttcctttctatggccaagtagtattccatagtatatatataccatagcttctttatccactcagtgattgatgggcatttgggctgattccatgtttttgtaattgtgaattgtgctgctataaacatgcatgtgcaagtacttttttcatatgatgacttcttttcccctgggtagatacctagtagtggtattgctggatcaaatggtaggtttacttttagttctttaaggaatctccacactgttttctgcagtggttgtactggtttacattcccactggcagtgtacaagtgttcctttttcaccatattcatgccaatatctgttatttttgattttttggttatggctattcttgcaggaagagggtagtattacattgtgattttgatttgtatttctctgacaatgagtgatgttgagcattttttcatatatttgttgtccatttgtatatcttcttttgagaattgcctatttatgtytttagctcacattttgatgggattgtttgatttttttctggctgattttttgagttccttgtagactatggatattagtcctttgtcagatacatattttgtgaagatct

SEQ ID NO: 657255 - DNA, 645 bp, Homo sapiens
ttgtctcaacaaatattgattctctaataatgtctcccaaatatgaactggaaaggatttataatgtagtatatgattaattttgaaagaactataaagaaaatacatcaaaaatcattatttctccaagtatttgagaatggaggtatttttatttaaaaatgaatttgaatggcaaaagaaaggctagaaatctcaaattagaaaaaaaagaagagatgatcccaacatgggatatatgaagtttttggcaactttggggacacttcaagacataatgagcaagacaaagcaagtttgaccaaactcatacgaatgtaagacttcatgtctttggaagagagcaaattttttaataygaaacaaagatacattaatgactacacttcaaaaaattgtttgaaatcttttacaagtgtatgtatggctaaatcgaagaactcttgacctagaagagatcttaatgaacttacatattgaaaaagaaaatttaagcttaatttatgaaaaactatcaatccttaaaatgttacacaatatacgtagtataaaagaataccaatttaaacatataacttgaagatagatattaaaaaggtagagaaatatatttttgatatttaaacttcaactttaattttaggg

SEQ ID NO: 657256 - DNA, 645 bp, Homo sapiens
ttgtctcaacaaatattgattctctaataatgtctcccaaatatgaactggaaaggatttataatgtagtatatgattaattttgaaagaactataaagaaaatacatcaaaaatcattatttctccaagtatttgagaatggaggtatttttatttaaaaatgaatttgaatggcaaaagaaaggctagaaatctcaaattagaaaaaaaagaagagatgatcccaacatgggatatatgaagtttttggcaactttggggacacttcaagacataatgagcaagacaaagcaagtttgaccaaactcatacgaatgtaagacttcatgtctttggaagagagcaaattttttaatacgaaacaaagatacattaatgactacacttcaaaaaattgtttgaaatcttttacaagtgtatrtatggctaaatcgaagaactcttgacctagaagagatcttaatgaacttacatattgaaaaagaaaatttaagcttaatttatgaaaaactatcaatccttaaaatgttacacaatatacgtagtataaaagaataccaatttaaacatataacttgaagatagatattaaaaaggtagagaaatatatttttgatatttaaacttcaactttaattttaggg

SEQ ID NO: 657257 - DNA, 645 bp, Homo sapiens
ttgtctcaacaaatattgattctctaataatgtctcccaaatatgaactggaaaggatttataatgtagtatatgattaattttgaaagaactataaagaaaatacatcaaaaatcattatttctccaagtatttgagaatggaggtatttttatttaaaaatgaatttgaatggcaaaagaaaggctagaaatctcaaattagaaaaaaaagaagagatgatcccaacatgggatatatgaagtttttggcaactttggggacacttcaagacataatgagcaagacaaagcaagtttgaccaaactcatacgaatgtaagacttcatgtctttggaagagagcaaattttttaatacgaaacaaagatacattaatgactacacttcaaaaaattgtttgaaatcttttacaagtgtatgtatggctaaatcgaagaactcttgacctagaagagatcttaatgaayttacatattgaaaaagaaaatttaagcttaatttatgaaaaactatcaatccttaaaatgttacacaatatacgtagtataaaagaataccaatttaaacatataacttgaagatagatattaaaaaggtagagaaatatatttttgatatttaaacttcaactttaattttaggg

SEQ ID NO: 657258 - DNA, 564 bp, Homo sapiens
ttgcaaaataagttcaggaagcatctcttaaaacattttgctttggatttgcagccagcaaaataatggagtgcmcacaatgccctcctaggataatctcaatggctttagtgagcatcaagcttatttactgccacagatcatttatgttgtgcttgttatacaaattctttcctttcttttagcctatctacatcctactcatctttcaagaccccactcaaatcctgcctccaccattaagcgtgcccattaagcttttcttgacaattccaatctcatcatttacagtgtttagattacttttcgcctatttttcctctccgtttttttttttttctttccaatgtttatcttaggctcaaaggttatatgtgcaggtttgtttcatggctaaattatgtgtcataggggattggtgtacagataattttgtcacccaggtatcagcataatatccaacaggtaattttttaaaaaattttatttcaatggcttttgggagcaggtggcttttggttacatggaaaagctcttcagtggcgatttctaagattttggtga

SEQ ID NO: 657259 - DNA, 564 bp, Homo sapiens
ttgcaaaataagttcaggaagcatctcttaaaacattttgctttggatttgcagccagcaaaataatggagtgcacacaatgccctcctaggataatctcaatggctttagtgagcatcaagcttatttacygccacagatcatttatgttgtgcttgttatacaaattctttcctttcttttagcctatctacatcctactcatctttcaagaccccactcaaatcctgcctccaccattaagcgtgcccattaagcttttcttgacaattccaatctcatcatttacagtgtttagattacttttcgcctatttttcctctccgtttttttttttttctttccaatgtttatcttaggctcaaaggttatatgtgcaggtttgtttcatggctaaattatgtgtcataggggattggtgtacagataattttgtcacccaggtatcagcataatatccaacaggtaattttttaaaaaattttatttcaatggcttttgggagcaggtggcttttggttacatggaaaagctcttcagtggcgatttctaagattttggtga

SEQ ID NO: 657260 - DNA, 564 bp, Homo sapiens
ttgcaaaataagttcaggaagcatctcttaaaacattttgctttggatttgcagccagcaaaataatggagtgcacacaatgccctcctaggataatctcaatggctttagtgagcatcaagcttatttactrccacagatcatttatgttgtgcttgttatacaaattctttcctttcttttagcctatctacatcctactcatctttcaagaccccactcaaatcctgcctccaccattaagcgtgcccattaagcttttcttgacaattccaatctcatcatttacagtgtttagattacttttcgcctatttttcctctccgtttttttttttttctttccaatgtttatcttaggctcaaaggttatatgtgcaggtttgtttcatggctaaattatgtgtcataggggattggtgtacagataattttgtcacccaggtatcagcataatatccaacaggtaattttttaaaaaattttatttcaatggcttttgggagcaggtggcttttggttacatggaaaagctcttcagtggcgatttctaagattttggtga

SEQ ID NO: 657261 - DNA, 647 bp, Homo sapiens
tccgataaatacattaatcagtttaaattgatgtaaaatttgacaagacatataattaaaaacccatcaaaaatcacatacaatacaaataatacttcctcttcaaatatagccaacattatttatrtaaccatacaccaatgcctatttatattcagctgacattcattggaaattaaccgtgaagcaggattttcacaattaatgtaacatcatataagaagatgatgatgtccagtggagtaatgtcatgtagttgagataaagagattaaaggtgaaaacttatttaatgttatgaagtaataaatggtgggataagacttcaaatttaatcattttgttcagtgctactaccttcacactacacaatgctttatactatacaactgataaaaaaagaaggagatctgggaagggaaaccaaagtttaaccttttgacaaaagacaaggtgcaagaaagaaaggaaaggaaggcggctcattttcaagaaaaatcaagagatagagctaatctgtgaaattgttatgtgtccttgtatatgccacccccaccgcccaccacacgtacacacaaaagcttcttgataccacctggagtactttttgccccgtcctgacatacataatctgtgtcagaaatttcc

SEQ ID NO: 657262 - DNA, 647 bp, Homo sapiens
tccgataaatacattaatcagtttaaattgatgtaaaatttgacaagacatataattaaaaacccatcaaaaatcacatacaatacaaataatacttcctcttcaaatatagccaacattatttatgtaaccatacaccaatgcctatttatattcagctgacattcattggaaattaaccgtgaagcaggattttcacaattaatgtaacatcatataagaagatgatgatgtccagtggagtaatgtcatgtagttgagataaagagattaaaggtgaaaacttatttaatgttatgaagtaataaatggtgggataagacttcaaatttaatcattttgttcagtgctactaccttcacactacacaatgctttatactatacaactgataaaaaaagaaggagatctgggaarggaaaccaaagtttaaccttttgacaaaagacaaggtgcaagaaagaaaggaaaggaaggcggctcattttcaagaaaaatcaagagatagagctaatctgtgaaattgttatgtgtccttgtatatgccacccccaccgcccaccacacgtacacacaaaagcttcttgataccacctggagtactttttgccccgtcctgacatacataatctgtgtcagaaatttcc

SEQ ID NO: 657263 - DNA, 585 bp, Homo sapiens
ctgtcttgtttgctgttctatctctagtggcaggaaggtggaagtgcaggaaataagaaaggaaggcaggggaggagagagagaagaagggagaaatgaagtgaatgagtggaaatgtggcctatagtggcaagggactatgaaaaagatttttgtaccagtaaagtagaaatcagggcccaaatatctaagacrgcttgctaaattgtagaaatggttgacgactggaacactgttctgtcaaacccaagcttgctagactaattggttctgttacagagaaaataagttccactggaagtagaaataaataaggacagcatctttgagagacttttcctgagcattctatttaaagtgaaaaccaatgaagaatatagaaattctatctcaaaatgataaccatagcagaaataatattaactatatgtatgacgtaaataactgtattgaagatgatggggtatttcaaccatagcagaaataatattaactatatgtatgatggaaataactgtattgaagatgatggggtatttcatcaattcatttaccatccgatacatattgtccatcatgattcag

SEQ ID NO: 657264 - DNA, 589 bp, Homo sapiens
ttccataaagacctaaagggtataggctctagtgactcagaagaaagactaaattatccatgaaactagaaattcgttttggttctaagtatcacattgatcatcaaagtcaaatggactagaacatatctcttaattgtaattgatttcaaaaatagttgaccctcagactttcttcatctcacaatccaacattaccattctattacaytgattgtgatattcttatgcaatcccagatttctcttattttcttacttcttacatccaacccaccgtaaaatgttgttgattatacccccaaatctatagaatcactccaacatgacccaaatctgggtcatcataatctttctctactattgggatagacttaacaagtcaccgtgttttcactcttgtcactttgtaatcaattattccttgagcagccagagtgaacttgaacttttataaatgaaaatgcttcctggaagcataaaggaaaatttgctccattggacaagagctggtcaagcttcctcgtgtgtcacaattgctaccatgccattggccaacacatgcgtgagtccaagcccaaaacagacag

SEQ ID NO: 657265 - DNA, 589 bp, Homo sapiens
ttccataaagacctaaagggtataggctctagtgactcagaagaaagactaaattatccatgaaactagaaattcgttttggttctaagtatcacattgatcatcaaagtcaaatggactagaacatatctcttaattgtaattgatttcaaaaatagttgaccctcagactttcttcatctcacaatccaacattaccattctattacattgattgtgatattcttatgcaatcccagatttctcttattttcttacttcttacrtccaacccaccgtaaaatgttgttgattatacccccaaatctatagaatcactccaacatgacccaaatctgggtcatcataatctttctctactattgggatagacttaacaagtcaccgtgttttcactcttgtcactttgtaatcaattattccttgagcagccagagtgaacttgaacttttataaatgaaaatgcttcctggaagcataaaggaaaatttgctccattggacaagagctggtcaagcttcctcgtgtgtcacaattgctaccatgccattggccaacacatgcgtgagtccaagcccaaaacagacag

SEQ ID NO: 657266 - DNA, 315 bp, Homo sapiens
tcttctttgggtttcttttaacatgtcaagtttgtttgaatgttaggacccttatgctagctcagggattggtaaactacagcttgagagccaaatcaagcccactgcctgatttcgtaaataacattttgttggaacacggcagcacrcacttatttttgtatgtttgatggctaattttgtgctacaacagcagaattgagtggttgtgacagatactgtcccgtcacaaaatatttcctatcttgctctttatagaaatagtttgccagcgtctgcgatggctggcccctctatctgtagtgcagttccctc

SEQ ID NO: 657267 - DNA, 595 bp, Homo sapiens
tttgaggtcttgtatttaaatctctaatatattttgagttgatttttgtatatgctaagaggtagaagtctaatttcattcttctgcatctgaagatacagttttcccagcaacaatttatttaagagtatattatttcccccaatgcatcttctctgttgaaactcttttggctgtaaataatgcagatttacttctrggttctctattctgcttcattggtttatgtgcctgtttttaaaccaatatcatgttgttttgattactacagctttgtactatgttttcaagttagatattgtgatgcctctggctttgtactttttgcttagtattgctttggttattcagggtcttttttggttctatacaaattttaggactttttttctatttctgtgaagaatgtcactggtattttgatagtaactgcattaaatctgtagattgctttgggtagtattatcactttaacaatatttttttttaatcgctaagcataggaggtctttccatttgtttcttccctcttcaatttctttcattaatgtgtcatagtttttgttgtagaggtcttttacctccttatttaaat

SEQ ID NO: 657268 - DNA, 542 bp, Homo sapiens
ttctattcattattatatgtattttggtaattaattgtgttttctcagtcattgttcatttcatttaagttgaaaaaataattggcataaatttatttatagtatttaatttttaatccctacagagtatgaaatggtatccctgtcttcattcccaatattggtaacttgtattctccttttttttaaatcttgaactatctagctagacktttatatatatatatacttgttaaatttttcaaagaattaccttttttattgacttttctatagcatgagtcatttctattttttttgttcattacctatttttttccttgagtgagtttaatttgatatttttttgtacttcccaaagatgaaagtttgtatctttgactttaggttattattctttctaatataagaaagaatttatcgagtcacaagttctgaaataaagcactgctttaactgtgttccactaattttgatgtgttgcgcttttattattatttggttaaaaaatacttgctaattgctcataagttctttagaaa

SEQ ID NO: 657269 - DNA, 541 bp, Homo sapiens
ttgtatataatgtatacattaatttcatacatatgtgtgtatatacatatatgcagacacacatatatgcacatatgcatatattgatttttctttatctaaaagtacatagtatgaatgtctatatatattttatatcatatacatgyaattatttaaatttctaaataaataatgtatcaataatattttacactatgtatatttcctaagagttaagttgactcacttttctacttctataaattgacgacctttataatgaatttacacttttacagactgatgattttaggaacaacttacaatttataggtatatgttatttttaatctttcatcttcatctctagttatgatgtcaaataaataagttactgacttaaacttcttgccttctaatttaaagtattataaacttaaaatgtttctcactacacagacacatatttaaggatacagaggaaagtcttgcttatagtgaacattctttcaattgaaatatagattctccatttttaacagtaagtaaaatgatattc

SEQ ID NO: 657270 - DNA, 541 bp, Homo sapiens
ttgtatataatgtatacattaatttcatacatatgtgtgtatatacatatatgcagacacacatatatgcacatatgcatatattgatttttctttatctaaaagtacatagtatgaatgtctatatatattttatatcatatacatgtaattatttaaatttctaaataaataatgtatcaataatattttacactatgtatatttcctaagagttaagttgactcactttyctacttctataaattgacgacctttataatgaatttacacttttacagactgatgattttaggaacaacttacaatttataggtatatgttatttttaatctttcatcttcatctctagttatgatgtcaaataaataagttactgacttaaacttcttgccttctaatttaaagtattataaacttaaaatgtttctcactacacagacacatatttaaggatacagaggaaagtcttgcttatagtgaacattctttcaattgaaatatagattctccatttttaacagtaagtaaaatgatattc

SEQ ID NO: 657271 - DNA, 541 bp, Homo sapiens
ttgtatataatgtatacattaatttcatacatatgtgtgtatatacatatatgcagacacacatatatgcacatatgcatatattgatttttctttatctaaaagtacatagtatgaatgtctatatatattttatatcatatacatgtaattatttaaatttctaaataaataatgtatcaataatattttacactatgtatatttcctaagagttaagttgactcacttttctacttctataaattgacgacctttataatgaatttacacttttacagactgatgattttaggaacaacttacaatttataggtatatgttatttttaatctttcatyttcatctctagttatgatgtcaaataaataagttactgacttaaacttcttgccttctaatttaaagtattataaacttaaaatgtttctcactacacagacacatatttaaggatacagaggaaagtcttgcttatagtgaacattctttcaattgaaatatagattctccatttttaacagtaagtaaaatgatattc

SEQ ID NO: 657272 - DNA, 541 bp, Homo sapiens
ttgtatataatgtatacattaatttcatacatatgtgtgtatatacatatatgcagacacacatatatgcacatatgcatatattgatttttctttatctaaaagtacatagtatgaatgtctatatatattttatatcatatacatgtaattatttaaatttctaaataaataatgtatcaataatattttacactatgtatatttcctaagagttaagttgactcacttttctacttctataaattgacgacctttataatgaatttacacttttacagactgatgattttaggaacaacttacaatttataggtatatgttatttttaatctttcatcttcatctcyagttatgatgtcaaataaataagttactgacttaaacttcttgccttctaatttaaagtattataaacttaaaatgtttctcactacacagacacatatttaaggatacagaggaaagtcttgcttatagtgaacattctttcaattgaaatatagattctccatttttaacagtaagtaaaatgatattc

SEQ ID NO: 657273 - DNA, 493 bp, Homo sapiens
gatagggaacaaaatttctttatttgctaaatctgggtagcaggtacataagttttctctatagttaagattttctacaatgatttattttattttattttatatttattttgtataattttcttaagggcgggaggccgggggcgaaacaacaggggcgggcaggaaggcgaggggaggaaggggtggatggaggaggaggaggaagaaggaggaaagagaccccggggcgagtggggaacggcrgagggcgggcgagagagggcgcaggctgccgctgctccggctactgcctctgctggtcttaaaatgatatcctatacaatgagtttttttaaattcatgagccatcacattgaggaaatgcagttatctcttgactgaataagttgtggcagcagaggaagaagctgtctaaggtctcctgactggagagcacttccactagaaatcctatggcctgaaccctaattcctctctggagaagcaccaa

SEQ ID NO: 657274 - DNA, 493 bp, Homo sapiens
gatagggaacaaaatttctttatttgctaaatctgggtagcaggtacataagttttctctatagttaagattttctacaatgatttattttattttattttatatttattttgtataattttcttaagggcgggaggccgggggcgaaacaacaggggcgggcaggaaggcgaggggaggaaggggtggatggaggaggaggaggaagaaggaggaaagagaccccggggcgagtggggaacggcggagggcgggcgagagagggcgcaggctgccgctgctccggctactgcctctgctggtcttaaaatgatatcctatacaatgagtttttttaaattcatgagccatcacattgaggaaatgcagttatctcttgactgaataagttgtggcagcagaggaagaagctgtctaaggtctcctgactggagagcacttccmctagaaatcctatggcctgaaccctaattcctctctggagaagcaccaa

SEQ ID NO: 657275 - DNA, 493 bp, Homo sapiens
gatagggaacaaaatttctttatttgctaaatctgggtagcaggtacataagttttctctatagttaagattttctacaatgatttattttattttattttatatttattttgtataattttcttaagggcgggaggccgggggcgaaacaacaggggcgggcaggaaggcgaggggaggaaggggtggatggaggaggaggaggaagaaggaggaaagagaccccggggcgagtggggaacggcggagggcgggcgagagagggcgcaggctgccgctgctccggctactgcctctgctggtcttaaaatgatatcctatacaatgagtttttttaaattcatgagccatcacattgaggaaatgcagttatctcttgactgaataagttgtggcagcagaggaagaagctgtctaaggtctcctgactggagagcacttccactagaaatcctatgscctgaaccctaattcctctctggagaagcaccaa

SEQ ID NO: 657276 - DNA, 559 bp, Homo sapiens
ccatcacacccgctaattttttgtattgacctgctggccaggctggtctcaaactcctgaccttagatgatccacccgcttaggcctcccgaagtgctgggattacaggtgtgagctaccacgtcaggcccgcaaatttaattcttggtttctcttgaacccacatttgaatgctttccttacaagtttttaatttttacactgcacctggagttgatgaagagcaagtaagcccccaaattggggcttagcttgtgatatggtttggttctgtgtccccacccaaatattattcaaattgtaatctccagtgttggaggaggggcctggtggtaggtgattcaatcacaggggtggacttsccccttgctgttctcataatagtgagtgagttctcatgagatctggttgtttgaaagcatgtagtacttcccccttcgctctctttctcctgctctcaccacgtgagatgtgcctgcttccccttccaccataattgtaggtttcccgaggcttccccagccatgcttcttcctctaaagcctgcagaacagtgagt

SEQ ID NO: 657277 - DNA, 559 bp, Homo sapiens
ccatcacacccgctaattttttgtattgacctgctggccaggctggtctcaaactcctgaccttagatgatccacccgcttaggcctcccgaagtgctgggattacaggtgtgagctaccacgtcaggcccgcaaatttaattcttggtttctcttgaacccacatttgaatgctttccttacaagtttttaatttttacactgcacctggagttgatgaagagcaagtaagcccccaaattggggcttagcttgtgatatggtttggttctgtgtccccacccaaatattattcaaattgtaatctccagtgttggaggaggggcctggtggtaggtgattcaatcacaggggtggacttgccccttgctgttctcataatagtgagtgagttctcatgagatctggttgtttgaaagcrtgtagtacttcccccttcgctctctttctcctgctctcaccacgtgagatgtgcctgcttccccttccaccataattgtaggtttcccgaggcttccccagccatgcttcttcctctaaagcctgcagaacagtgagt

SEQ ID NO: 657278 - DNA, 448 bp, Homo sapiens
aaggtttttttttaatgtttttaaagaataaactcaaacatatcctgtttaaaagaaaaaaaaaaacgggaagcctggaagttaaattaaaccctgtttttgatcctagtaacaagaaaattattgaatttttagctgctgtctctaactttattttgtatcttttatgtttctgtttgtattactaccagtgaagaccagaaaatgtgactgctgtcagaamgactctagtatcaaactctgtggtgtcagagctgatgacagaatctactgacaaagaatattatgtttgtggctatgtgaaataacaaagatttctcttagctaaagttcactccttgaaaaagacaatgaaggccaggtgcggtggctcacgcctgtaatcccagcactttggggggccaaggtgggcggatcacctgaggttgcgagtttgagaccagcctga

SEQ ID NO: 657279 - DNA, 538 bp, Homo sapiens
aatttccaccatgcagagaaagaaattgaggtatctcacagaggtagggtgcctaactcacagccacacggcaaattgtgggcaaaattagaatcagaatcccagccaactaatctgtgattatggaatcaatctgccaaatgrtgcaagatgtaattaaataaacgcctatgcacatggcactgtgcatttagtaggcgctcaataaatttcatggaatgagtgaatgaaaacaaaatgcaaaacaaatatgttacactatgaccttaaccaagtgtgctatactaagttcctaaagaaagaagattagaactggcatacacaggaaaaacctagagggatactatctatatctaatgtcagttctgcctcctttcctgagaacaagatccgtttgcccatcaatccaagcagattcatccttcttccagttactgagcgaacttacacaagtgagcttttttttatgccatgttaagggttggctacttctctcccctgaaacttcagggaagtaggaggaagtccagagaccacc

SEQ ID NO: 657280 - DNA, 538 bp, Homo sapiens
aatttccaccatgcagagaaagaaattgaggtatctcacagaggtagggtgcctaactcacagccacacggcaaattgtgggcaaaattagaatcagaatcccagccaactaatctgtgattatggaatcaatctgccaaatgatgcaagatgtaattaaataaacgcctatgcacatggcactgtgcatttagtaggcgctcaataaatttcatggaatgagtgaatgaaaacaaaatgcaaaacaaatatgttacactatgaccttaaccaagtgtgctatactaagttcctaaagaaagaagattagaactggcatacacaggaaaaacctagagggatactatctatatctaatgtcagttctgcctcctttcctgagaacaagatccgtttgcccatcaatccaagcagattcatccttcttccagttactgagcgaacttacacaagtgagcttttttttaygccatgttaagggttggctacttctctcccctgaaacttcagggaagtaggaggaagtccagagaccacc

SEQ ID NO: 657281 - DNA, 634 bp, Homo sapiens
ctcttcctggtaatccagagaattctcctggatcttgtccaagaccattaaggcagtacctctatgagtgtgcaagaaccacaggcttactgggttttgggtgccctctaaaacagatacagcttagatcacaacactcaagttctttcaaataactggaaagccttcccaagaagaacaggtacaaaccagcctagacagtgaagactataatgaaaacctaacttttcaatgctgagacaccaaagaacatctgctggcatcaacaccattcagaaaaacacaacctcaccaaatgaactaaataaggcaccaaagaccaatccagaagaaacagatatgtgacctttcagacacagaattcaaaataattttcaggaaactcaaagaaattcaagataacacagggaaggaattcagaattctatcagacgaatttaacaaagagattaaaataattaaaatgaatcaagaagaaattctggagctaaaraatgcaactggcatactgaagaatggatcagagtcttttaatagcagaattggtcaagccgaagaattagtgagcttgaagacaggctatttgaaaacacaaagaagaaacaaaacgaaaaaaaaaaaaagaataaaaaac

SEQ ID NO: 657282 - DNA, 614 bp, Homo sapiens
acagggctcaccacgtcttccacagcataaacttgttgctctcagtggagttgtgtggttaattatttccaatggacttgagtagaagaagtcagctaccagggaggttggaaatggcagagcaacaagatggaaagagctaggtcttccttgaatggctgcttgcaggcaattatcattctagtgagacttgtacttccattatgcttcagacaaatattttttcatgtttctttgctaataaagttaactaggacacagagcattaaagcaattgtcttcatctgttttgtgttgctgtaacagaatacctgagactgggtaattttgtaaagagaagaggtttatttggctcatgtttctgcagactgggaaattcaagggcatggcctggcttctggtgaaactttcagtttgcatcagaacatggtggagaaagtcaaaggggaagcatgcaaagaacacatgcaaagaaacacaacctgaggggcatcgtggctttacaacaacccactcttgcaggaactaatcaatttctgctggaaccaatccmgtctcgccagagcaagaacttgctagcatgagaatggcaccaagtcattcatgagggatct

SEQ ID NO: 657283 - DNA, 532 bp, Homo sapiens
tcagatgaaacctgagaccagagattcattttcttgtaaaatgctttctccaaaagatttttttaaaaaaggggggaaatgttaaaggagaatatcttgggcccccaaaatcactaaagaaaactcaagctgggaactgcttagggcaaacttgcctcccattctattcaaagtcactcctctgctcactgagacaggtgcgtatctgattgcctcctttggaaagactaatgagaaactcaaaagaatataaccatttatgtatcacccatctgtgacctggaagctccctctctgcttccagtcttcctgcctttgcttcaagttatcccacctttccagaccgaaccaatgtacttctaacatatattgattgacgtctcatgtctccttcaatgcataaaaccaagttgtgctctgaccaccttgggcacatgtctcaggacttcctgaggctgtgtcacgagcaagttctcaaccttggcaaaataaactttytaaattaactgagacctgtctcaacttttcgggg

SEQ ID NO: 657284 - DNA, 604 bp, Homo sapiens
ctacatcatcatcaacaacaacaacaacaacaacaacaaagatttcttccagtataccttgcctgtgaaacccaaygcaggaatttagccacaaataaagatcccatgcagagtcttggccctctgaaagcacccagaagtgaagccaatagaccattctcaacttacaccaaagtcaaactcagggaaataaggtagataaaaacaaaaagccccatccaaaagacagcaattcaaaatgataaaggaatgccagcactttcagatgagaaagaatcagcctgagaacaatgccaatttaaaaagtcagggtcctcttacctccaaatgatggtactaactccctagaaatagttcttaacctaattgaaatgacatccatagaatttagaatctagatggcaaggaagacattcaggagaaagttgaaacctgatatggtttggatattttgtcctctccaaatctcatgttgacatgtgacctccaatattggaggtgaatctagttaaaggttttgggtcatgggggcagatccctcatgaatggcttggtacttttctcacagtaatgagtatgttctcactctgagttcacacaagat

SEQ ID NO: 657285 - DNA, 604 bp, Homo sapiens
ctacatcatcatcaacaacaacaacaacaacaacaacaaagatttcttccagtataccttgcctgtgaaacccaatgcaggaatttagccacaaataaagatcccatgcagagtcttggccctctgaaagcacccagaagtgaagccaatagaccattctcaacttacaccaaagtcaaactcagggaaataargtagataaaaacaaaaagccccatccaaaagacagcaattcaaaatgataaaggaatgccagcactttcagatgagaaagaatcagcctgagaacaatgccaatttaaaaagtcagggtcctcttacctccaaatgatggtactaactccctagaaatagttcttaacctaattgaaatgacatccatagaatttagaatctagatggcaaggaagacattcaggagaaagttgaaacctgatatggtttggatattttgtcctctccaaatctcatgttgacatgtgacctccaatattggaggtgaatctagttaaaggttttgggtcatgggggcagatccctcatgaatggcttggtacttttctcacagtaatgagtatgttctcactctgagttcacacaagat

SEQ ID NO: 657286 - DNA, 512 bp, Homo sapiens
attgtttaatttcatgtatttgtatagtttccaaagtccccttttgtatgatttctagttttatttcrtagtgatatgagaagatactttaaattatttttatttagttttaaaaatttgttgggactcgttttgttgcctgacatggtctatcacggagaatgtccatgtgctgttggaaagaatgtatactctgtagctgttgactagaatgttttgtaaatgtctgttaggtccatttggtctaaaaatcagtttaagtccaatgattctttgttaattttctgtctagatgatctatctaatgttgagagtgggatgttgaaatccccaaataatatttcagtctatttccttatttagacctgatatttattttgtgaatctgggtgctcaggtgttgggtacatatatatttagaattgttatatatttttgctagattgatcattttatctttatttaataaccattctatagacttttactggttttaacataaaatctattta

SEQ ID NO: 657287 - DNA, 372 bp, Homo sapiens
gaattctttctttgtgttatcttgaatttctttgagtttcttcaacagagcggttttgaattatctgactgaaaagtcacgtatctctgttttttcaggactggtccctggtggcttttttagctcatttggtaggatcatttttttcccagatagtgttgacactggtagatgttcttcagttctgggcattragacattagttatttattatagtcttcactgtctgggcttgtgtgtacccatccttcttgggaaggctttccagatatttgaaagacttgggtgttgtgatctaatctttatctgctttaaaggggggcacccaaagcctagtaatgctgttgttcttgcagacatgtataggtacca

SEQ ID NO: 657288 - DNA, 635 bp, Homo sapiens
tgaaaatgcatgatgaatcaaaaaaagcgtaagttcttcgggctggagtataagatgccttagaggataaaacaggaaatgaatctggaaagatggcttaggatcacatcataatgaaaatggaatcaggaataggagaggaaaacaagaaatttaccaaagccactgagttggaaagtaacaagaaaaatgtagcacttcatatttcacagaacacttaacgtgmattttctcactttttcctaatacagacctatgcagtaggcactcctgcagtgggttaaatactggccctccaaaagatctgtccacttgggaacctcagaatgtgactttatttggaataacggtctttgcagatgtaattaaggtaaggatcttgagaagagattatcctggattagggtggaccctgaatacaatgacatgtgtcttaacaagagaaaaaaaaggagagacttggagacacagagggagaggcacgggaggaagggaaagcagagactggagtgatgcatctgcaagccaaggaacaccgagatccccacccgccggaagctgagagaggcctgaaagagagtcgccctcagatctccacaggaaccacccttgcacatacctttgtttcagacttc

SEQ ID NO: 657289 - DNA, 516 bp, Homo sapiens
agtgtgaatcaaagcaaaatgggtgccaccaaaatatcgaaatgtgatttgtgctgcaaaaatagtcatggaagatggtctgtgagatgatttagagctgaataatgtgttcggtgcaaaatatattaagtatgtatgtcaaaaattagagaatgtcaatttgcagcttcttcatgaaaactgaaaaaaaataaaagtagagttttggtctcccatgtcagctggaattgaacatcaatataaagcattatcctaacaaacatctgctggctcagagtttgagtctgtagagaaggatcattgctccaagccaggtcttaacatccattggtttttctgcccttagcacaacaaattggtcaactccgtaatagtggacaatcacattatctactttaatgagagatttatgaaaaaatttagttacaaactatgacacagttgagatgccctgaatkataagccataaggagtaggacaactaagaagcaaaattaggacttaataacattttct

SEQ ID NO: 657290 - DNA, 645 bp, Homo sapiens
tctagcctcctctctagttgatacttgtgtaacatacaagggattaaaacttttgtttgttttcattgatcactaagcaaacacaaaaaaattaaagaaagtttaaactatccatttctaccaccaagtgataaccactactgttattttggtatagtgtctccttgtytatgcatgtaacacagacggaaataaacatactgtcaatattgttttgtaaactttttcacttaatatttaatggacattgtcattggtaaaacttgtttctatagaagagttttctttaaaacaattattggctgggtgcagtggctcatgcttataatctcggcactttgggaagccagagtgggaggatcatttgatcccaggagtttgagaccactctgggcaacacagcaagaccctagttctactaaaataaaaaattagccaggcatggtggcactcacctttatagtcctagctaactgggaggctgaggtgggagaatcgcttgagtccaggaggtcgaggctgtggtgagctatgattgcacaattgcactcccgcctgggtgacagagtgcaaaaaaaaattataaaaaattgttgaggtataatttacatacaacaaatacacccattttaagtgtatggtttg

SEQ ID NO: 657291 - DNA, 494 bp, Homo sapiens
gaatctaattccagtttgtgtgctccatttgtattctttgctaaaattattttaactaagaactcactgataaatgaggtgatagggattctcagtctccactttcccttatacaatcccttctcccactttataaaacacaaactctcagccatctgcatgcatcccatggcagtcaaagggggtaattcttggttttttttgatgttattttcaaatgagattatatatttgtcctagwgatatacttacagaattgaaagaaaatcatgttcattatgcaattttaaacttgtgtttcattactggaccccaccactgtaatgtgttatcaattaacattttctttttctttctctttttttaagccagagtctcactctgtcacccaggctggagtgcagtggtgtgatctcggctccctgcaacctccacctcctgggttcaagcgattctcctgcttcggcctcctgagtagctgggagtacaggcat

SEQ ID NO: 657292 - DNA, 590 bp, Homo sapiens
aattgactggtaaaacaatgtggcctacagttttctttgtgggaagttttagaatatgaattaaattcctttaacagatctgtgtttatttagattttaaatttcttctcttagttttggtaattttctttatttcaacttttattttagattcagagggtacatgtgcagatttgttacatgagtatattgtgtgatgctgaagtgtgggatatgaatgatcctsttgcccaggtagtgactatagtgcccaacagtttttcaaccctctaccacctccagtagtacccagtgtctattgttgccatctttatgtccatgagtgcccaattatttagctcccacttataagtgagaacatttgatatttggttttctgttcctgcattaattcacttaagttaatggcctccagctgcattcatgttgctccaaaggagatgatgtcattcctttttatggatatatagtattccatggtgtatatgtaccacattttctttatccaatccaccattgatgggcatctagattgactccatgtctttgctgttgtaaatagtgctgcaatgaacatataagtgcatgtg

SEQ ID NO: 657293 - DNA, 624 bp, Homo sapiens
tattaatttgtagctcattttttcccatttaactgtgtctagtgaacatctttccatgttaaaaaatgttgatttctgcgtcatttttataattgcaatgtgttctatttaaggagtcttccatcactttttttccgggctctttttgggggtgggggtgagggaccagctcacgtttaatgatgacactttaaaattgtacaagtattttcacagttgcccactacaaatttagcctcttaaaatgacaggaaaacaccaaccaatcgcaggttaaataagtttaccccttcagttctgatttgcaatatccaatattcttttgaaatatgaaacagactggtaaaggccaacagtaaatttctgccctcttgacagagttggagagttcagtccaggttctattatggtttaattttataagtgaagagatggagattcagaaaatttaaataacttctaatagatcacatgtcaatgagtgagaaaatgtaggscttttaattccatatgtggttttttcttttatattattgcagtaagaacacataacatgagacctaccttcttagcaaattttgaagtgtaaaatccattatgattgactataggtacgatgttgta

SEQ ID NO: 657294 - DNA, 581 bp, Homo sapiens
atcatatgaaaagatactcgacatcatatgtcaccagagaactgcaaactaaaaccacaatgagataccactacacatctattagaagagctgaaatgcaaaacactgacaacacccaatgaaggaaagcatacagarcaacaggaactcccatttgttgctgataggaatgcaaaatgctacagctactttggaaaagaatttggtagtttcttacaaaactaaatatagtcttaacaaacaatccagcgactttactccttattcttcagtcaaattagctgagaatttatgtccacacataaacctgcacactaatggatatagcagctttatttataattgccaaagcctggaagcaaccaaaatgccctttaacaggtaaatggataaagaaaccatgacacatccagacaaggaaatattatgcaacaagaagaaatgagctacatgccatgaaatatatggaggaatcttcaaagcgtatgctaagagaaaaaaggcggtttgaaaaggctacattaatgtatgattaatcaatgtatgataaaaggctgaataggtaggacacagggaataag

SEQ ID NO: 657295 - DNA, 649 bp, Homo sapiens
ttaatatttattgaataaactaataatgatcattttatacatgaaaataagaagttgaatcggtaaattgttaaagtttatacagctggaatggcataggaagagaatcttatttcctgctgtctcttagtagtggacattctataataggctatggtgcagtgtagcattataagaaatttatatcatcattgccatgatgttagggaaatcaaagcaatttccatgaagacagtcaaagtttctgtcaattgggatgtaataaaaacttaatttgcagtcaacataataatcattcatacatgtcaggttaaaatatatgattttttttctaaaatggtaactttaaataataccttctaaattgatttttcattttcacttacaacctttatgaatcaaaataaagttccaatcattatgacttaagagtgctaggttaccacatctattgttatttgcaatgayaggcttttccctgtaggctcctatgctactgttagtttctgaaatcatcaattaaaatgtgtctgaacaggagaaattaattgaaatgcccagaattttgtgacctgaggattgaataatgtagtgccatgtatcaataaataaatatttgaagcttctgtggatagaagtattacactaa

SEQ ID NO: 657296 - DNA, 649 bp, Homo sapiens
ttaatatttattgaataaactaataatgatcattttatacatgaaaataagaagttgaatcggtaaattgttaaagtttatacagctggaatggcataggaagagaatcttatttcctgctgtctcttagtagtggacattctataataggctatggtgcagtgtagcattataagaaatttatatcatcattgccatgatgttagggaaatcaaagcaatttccatgaagacagtcaaagtttctgtcaattgggatgtaataaaaacttaatttgcagtcaacataataatcattcatacatgtcaggttaaaatatatgattttttttctaaaatggtaactttaaataataccttctaaattgatttttcattttcacttacaacctttatgaatcaaaataaagttccaatcattatgacttaagagtgctaggttaccacatctattgttatttgcaatgataggcttttccctgtaggctcctatgctactgttagtttctgaaatcatcaattaaaatgtgtctgaacaggagaaattaattgaaatgcccwgaattttgtgacctgaggattgaataatgtagtgccatgtatcaataaataaatatttgaagcttctgtggatagaagtattacactaa

SEQ ID NO: 657297 - DNA, 575 bp, Homo sapiens
gctatgtgctaatggtggataaaggagaaggcaggctgtgatactaaattgggtgtttaaaataagcctcactgagaagatgagatttgagcatagatttggaaaagattaaaactttgccaagtgtacatctggaagaagtgtgttctaggcagagggaacagtaggcacagaagacaaaaggcaggagcctgcctggcatgccattgttatttttttccagtgattactgccctcttctytgttacttgagttctctactcatgatcttgtctcaggtcttcaatctttattctgttcattcttccttgagtgcactcctcaggatatttctataattcatatataaaaccctgtcatatctttgctcaaatgtaacatcagtgaggcctttcctggccacagtatttaaaattgcaacttggtctttcttccctgctttaattttgtcaatactactcagcaaaatccattatactgtattatttattttatctgttgattgtctatcatcttagggttgatctccatgagtgcagggaattcgtctattttgtttactgcactatccccag

SEQ ID NO: 657298 - DNA, 443 bp, Homo sapiens
agtccagaaagcttgtctgtagctcccccacaatcagattgcagtgtttctaggaagctcttcaaatgtgctatgctcaggtctataatagaaaaaaattttttgagatatctatgagtattaatggctctaccattcagatatgaaggttgaaattcaaaatatgactactgtcaccttgaaagttaatctatatgcctctgccttcctctgctatcagaatgcactacatttcaaacctatttctctgataaccttataaacattaaacttttaccactggaaatacagaaatgttttcttaactataaaagtagcagtctttttccttcttagttattttctattgcttatttctgttacttttcaaagacaacttaaaatttgaacacttattaaacagtctgataatcctaatrcatttattttaatagccaaattgc

SEQ ID NO: 657299 - DNA, 556 bp, Homo sapiens
agaaaaaagggaaaatatgtttcttaaagagccaaacactagcaattaatcttcaaatattattatattgattttctgggaaagaaaatcaaagggaaaatgtaaggcaaatcaatcccttcccaatactttttaattccatatttattaggcaatttctctgttttgtttacatattgtaaaatcttctaacttcatatttgtaatatgggcaaaattatgaacawttaaaaatagacattgatggtctggatattcacatacttcaattacccagagagtaatagaaattgaaaaggagattttaaaaatattttatgtgtataagaatagattttaccttttttgctgttttccttgtcaagacaaacattgggagaattttgaataacaattcacagacagattactgtttattataacttcaaaatataattgacacaaaagatgtacaagtctcactcaggttatatatttatttaaaggtatctaatcactaaattaacttattagaatcattataataactggatcctcattgggtggaggctgatac

SEQ ID NO: 657300 - DNA, 558 bp, Homo sapiens
gccactcagtttgcttccaacactcctttccagccactcactggagctaccttggcaagtactctaggagtatgggaaaatgaaaagaacaaactcttacaccaaactctggagttgggcaacatggcttctcccctttctaggtcccgtggcagccatcttgctattactcaccttcaggcactgtatttttaacctccttgttaaatttgttccctctagaatcgaggccgtcaagctacagatggtcttacaagtagaacaccaaatgcgctcaactaacaacttctaccatggtcccctggactgacccgctggcyctttcactggcctaaagagttcccctctggaggacactacaactgcagggccccttcttcaccccatccagtggaagtagctagagtggtaatcacccagttactaacagcacttggggtgtcctgtttagaggggggattgagaggtgaagccagctggacttcctgggtcaagtgggaacttggagaacttttctgtctagctaaatgtttgtaaatgcaccaatcagcactctgt

SEQ ID NO: 657301 - DNA, 558 bp, Homo sapiens
gccactcagtttgcttccaacactcctttccagccactcactggagctaccttggcaagtactctaggagtatgggaaaatgaaaagaacaaactcttacaccaaactctggagttgggcaacatggcttctcccctttctaggtcccgtggcagccatcttgctattactcaccttcaggcactgtatttttaacctccttgttaaatttgttccctctagaatcgaggccgtcaagctacagatggtcttacaagtagaacaccaaatgcgctcaactaacaacttctaccatggtcccctggactgacccgctggccctttcactggcctaaagagttcccctctggaggacaytacaactgcagggccccttcttcaccccatccagtggaagtagctagagtggtaatcacccagttactaacagcacttggggtgtcctgtttagaggggggattgagaggtgaagccagctggacttcctgggtcaagtgggaacttggagaacttttctgtctagctaaatgtttgtaaatgcaccaatcagcactctgt

SEQ ID NO: 657302 - DNA, 556 bp, Homo sapiens
caatggagtctatgtgttcaagtgaaagacagagtttcacatttttcactttaaatcaaaagctagaaatcattaagcttagtgaagaaggcatgtcgaaagacaacactggccaaaagctagacctcttgtgctaaaagttagccaatttgtgactataaaggaaaaggtattgaaggaaattagaagtgttactccagtgaccacacaaatgacaagcaagtagaagagccttgttgctgatagggaacaagttttagtagtttggataaaagaataaaacagcccatagccttcctcccttaagcaaaagcctaatccagaggaagaccctaaatctctgaaattccacaaaggctcagagaggtaagaaagctgcagaataaaaatttaaagctctcagaggtgggttcatgaggtttaagtaaatargccattttcataacatgaaagtgcaaggtgaagcagcaagtgctgatgtagaaactgctgcaagttatccagaagatctagctaagaatggtgatgaaggtagctgcactcaatgacagatttt

SEQ ID NO: 657303 - DNA, 596 bp, Homo sapiens
ggctgtacttaaacatcagtaaaggctgtacttattggggtattaagcaaggctttcaaattttgccaatggatcttggtagtttggtgaatacattcaacgtttggtagtttataagtctatcccaggttatacttttaaggagaattcagtagctcattagcacccctccaatgtctcctgtctgcacacagcaatgtgtatgcagactttctggcagtgaagtgtcatgccatgccctgcactttgaggttgaacttctggaacacagagctgggatggggtagaatagagcagccccaracaacaattccactgtacttcactatttttattgaggctcagtaggttttcttaaatttgtgtatcttatttatcatataatatcatataatacttaaatggttatctttgaaaatttgtccattttgtcattgcttttggggaaaagaatttgtcaattttttcaatttgccattctataaatcctatattattttttaaagctgtttcagactgatattgtgtttttctatattgtttcctggtatgaaatagaagtgttctttgtaatttatcagtcatatttaaattcc

SEQ ID NO: 657304 - DNA, 489 bp, Homo sapiens
aaacaagtcatctacttcatcccaggccctgcttctgacaaacacaagctaaactcaaagtgttagttgttatagaagaattttgagggaaggtagaggacctgaatagtgaagaaaatatcagatatcatataatttcgaccagaatttcaagaaaatgggaaaacatttgttttaatcacacctaagataaattagcaataatgtatttttttctatttttattttttattttattttgtttcaagttttattttagattcaagggatacgtgtgcaggtttcttacatgggtatattgcaaaatgctgaaatttgaagtacaaatgatcccatcacccaggtactgagcgtaataccccacagtttttcaacccttgccccttcctctcgccccacctctagtagtctccartttctattgttgccatttttatgtccacgagtacctgatgtttggatcccatttctaagtgagaacatggtatt

SEQ ID NO: 657305 - DNA, 435 bp, Homo sapiens
cctaactgagaatctatttcctgccaacaccagcatcttgcacattgccctaatgtgccaggggaagccaattgcactgtgtccaggaggtgctgaattttagatagattttattttttcaaattaacccattcttgcctctttgagcaagttgtattctaatgaatgcaaactcatccaccttggtcagctttttgtggggtaccaccttgatccactctttcacatgacttttcccatgagcrgttgcagtccacaggcattcctccttcctgctgcaggccctatgtcctacatgatggtcaaccagtcatcttctatttcatatctatactcaagattctcaattcatccttcctcccgaaatcccagctcatcttatatgtcacatctatactaaagattcgtgcttcctctccaaatctcttaacacct

SEQ ID NO: 657306 - DNA, 560 bp, Homo sapiens
ggacaggtggagataatcgaatcatcagggtggtttcccccatackgttcttgtggtagagaataagtctcacaaagtctgatggttttataaatgggagttcccctgcagaagctctctcttgcctactgccatgtaagacaagtcttacttccccttcaatttccaccatgattgtgaggccttcctagtcatgtggaattgtgagtcaattaaacctcctgcctttataaatcacccagtctcaggtatgtctttattagcagcgtaagaacagactaatacacaaagcttccacttttctagtccaatatatcacttgtgacacaatgtaactatgtggtaaaaacctaatctttcacaaatcagcccacattctttatcctaatcttttcccacaggctgtatgctcctaattgtggtctgctatggcctctacctctcctagaccattaaatctctggcagaattagatttattttcaatatttgttgattaactgtttgaataaaaaatatttgcttggctaaaatcttatccctaagtcacacagctaacat

SEQ ID NO: 657307 - DNA, 561 bp, Homo sapiens
ttcctacgcattcaggctagtccttggtattatcaatttttaaattattagccactcaatactcacagaggactatctcattgtggttttaatttgcataccctaataactaataatgttgagaatatttttatttgcttattcataattcatatatcttctttgtgaaatgccaaatcagtattttacacattttttttcaaaattgaattgaytgtcttttcatttgtcagcattctttatatattttggatacacccttttgttagataatgtattgtattttccccaagtctgtcttttaacagtgtatgttttcttttgtttctttacaacagcaaaatattttaattttgaaaataacagtaactactttttataaaagtatgttgatacatagttttttataaaactatgttgataatttgatgtatcatatctaggaaacttgtctaatataatgtttttctctcgaagttcaattaagtttgcttttacatttagattttttatctattttatgtccagtttttgtgtattatgagaggcaatggacttcct

SEQ ID NO: 657308 - DNA, 603 bp, Homo sapiens
cactgtgcctgcctacatttattttttaaaggctctgagacctggatggagctggaggccattatcctcagcaaaccaacacagaaacagaaaaacaaatactgtacgttctcacttataaatgagagctaaatgatgagaccacatgaacacatagaaggggaaaacacacattggggtctttcagagggtggaggttgrgaagagggaaagaattaggaaaactaactaatgggtaccaggcttaatatttgggagatgaaataatatgtacaacaaaccctcatgacacaagattacctatgtgagaaacctgcacatgtgcccccaaactttaaagttaaaaacagctctgagaaattaaacagttataaaattttaatttatgtgaagcattaaaattacacatatgcattttcatacttaaggtacctgcttacttagtgctacaaagaatgttcggtggagtatgataattttaggggagtgagagttaataaaagatgatggagacaagaactactttagaagtgaaaataacctgactggtttactgattagatgttagaggggaaaatgagagagcaatacatcacaaatatg

SEQ ID NO: 657309 - DNA, 612 bp, Homo sapiens
gaaatacgtttattgtataaaaatgaacagtagttaattgcactgactgcaattaaaaatgaaatcacccataatgtcattgtcccagagatgatagcttattattcctgaagatatttttctagatttttctctctcagcatcactgttatcttctgtctaaaaatgtctacttagacaaaagatatatataataaggatatatgtatatttacatataaatatatatttagactatataattacaaaagttaacacctctttcataaaattggcttcacattctacataatactttccaaagtattttttaacttaatatgtactttatctgaytgaatattcatacagtatgcctttcaaaggctgctaggataggaagaaaattatataccagggatatccacttcctaaaaacactagggatgccagaatctttagagctgtttgcttcttagtcttattgacttggaaagagcagatgatacgactccagagctcattgaatagcacacattgaatgaggtatattctgtttagtcttcttcaaagcttctcatcttttggggaaaaaaaagctgacattaaattttataaaaacttgtaagtata

SEQ ID NO: 657310 - DNA, 524 bp, Homo sapiens
ttctccatgaagagttccagtagctctccatgcccatcctgtttactgtgtctctttcaatcttgaagtgttgcctcacccctggaccttctcagggtagcagccctagcttctgtgacaatctggatgtctcccagatcttatttgctgaactttcaaagtggaaggaaaagagatctcagtcctcgtgccctactttaagcatcaactcctaagggcaactccaatctgctgtgtttgcagattgtggataccttgaacttactgcatgccctatgtatccctaggtgckctttctcgactgtcttgtggtcattgatatttcagtagaagagaggctcatttcctcatcccctgtctatggaagattcctccttttgcaattgcagcagggatgaaaacaaaattaatttactttctctggtgaaggacttctcgcttttttgaaatttagttcactgggcatcttcatgtgctcagctctaaaattatccagtttgttttggttgttatggtgagaatga

SEQ ID NO: 657311 - DNA, 518 bp, Homo sapiens
tgaagagttccagtagctctccatgcccatcctgtttactgtgtctctttcaatcttgaagtgttgcctcacccctggaccttctcagggtagcagccctagcttctgtgacaatctggatgtctcccagatcttatttgctgaactttcaaagtggaaggaaaagagatctcagtcctcgtgccctactttaagcatcaactcctaagggcaactccaatctgctgtgtttgcagattgtggataccttgaacttactgcatgccctatgtatccctaggtgctctttctcgactgtcttgtggtcattgatatttcagtagaagagaggctcatttcctcatcccctgtctatggaagattcctccttttgcaattgcagcagggatgaaarcaaaattaatttactttctctggtgaaggacttctcgcttttttgaaatttagttcactgggcatcttcatgtgctcagctctaaaattatccagtttgttttggttgttatggtgagaatgac

SEQ ID NO: 657312 - DNA, 454 bp, Homo sapiens
tttcattttacgaaacaggatataataccgagcaaatatcaattatgtacartatggcagtgtttgcttaattaatgttcctgagaagtgcccccacattactattttagttgcatgtgttactttgagacaaggcggtaattgacatattatgttttgtagatttataaacaaatagcaaaactgccaaactattgtcagtctattgaaaacggtacgtagtgattttcttttcattcttaaaaatatttctgaaaaaccaagaggccacactctttcaggaaatttcatattatttatgtcattatatttacattacatttgtaagtctgcaaaatgataatatattatttttatttaatttaggtctcccctcctcagtcttttcttgtggcatattgtaatggacttattattaaaataagaaggctgattataatagaaaatttttagt

SEQ ID NO: 657313 - DNA, 454 bp, Homo sapiens
tttcattttacgaaacaggatataataccgagcaaatatcaattatgtacagtatggcagtgtttgcttaattaatgttcctgagaagtgcccccacattactattttagttgcatgtgttactttgagacaaggcrgtaattgacatattatgttttgtagatttataaacaaatagcaaaactgccaaactattgtcagtctattgaaaacggtacgtagtgattttcttttcattcttaaaaatatttctgaaaaaccaagaggccacactctttcaggaaatttcatattatttatgtcattatatttacattacatttgtaagtctgcaaaatgataatatattatttttatttaatttaggtctcccctcctcagtcttttcttgtggcatattgtaatggacttattattaaaataagaaggctgattataatagaaaatttttagt

SEQ ID NO: 657314 - DNA, 621 bp, Homo sapiens
ttttaaacattccattttatttttctctctcatatctttccttaagcttttatatgtgatcatgttttattattgtgctctcttttccagttttagtcttatttcttaaataattaaaaaatttctaatccattcctaaatgttatcagctacctttgtaaatcttttttattctaatcacataatttctgagcttttctaattttgatttatcctataaattaatttttttctttttcacttgaaatattagagtatcatctttattgtgggtgtttacattgggcataactttattgtctggagaagtgttattattctgaatttttttgccttttaatgttgcataagattcaaatgcaaaaattattrcacagagcataagcgtaatcattttgtgctgtcacgtataagtgggattaattttctttcttcttagacagatagaggggtcagggtagattaacttacttcacagatgtagagttctctcatctactgattttgagaagtgttaaaaaataacacatgtcttagatgcttcaaaaccttgtgtctgttttcctctacttttcgatctggattttatcgtttctttattgtctctgtcctactaaaatg

SEQ ID NO: 657315 - DNA, 629 bp, Homo sapiens
agcgccatatgcagacacatgtccttcccagaccctgaaggaatatgattcattctctctaattatgtcctcctagcactgtgtacataactctataatggcattatattgtcttagagttattggttatgtgtctcttttgtccactagtctatgagcttcatgaaaagaaagcttagctctttgttagttgtatctcgatcatttacaacagttcatgggacatagcagccaaaacataagtgtttgctaaatgaaaatgaggtcatttaccttttttagtcttggttttcttatgattaaaattacatcatggatctggccttttaactttacaggatttcagtgagagtcaaatgagacatgattatgattaataaaataattccaaatattcagttataataacatctaattgggcattcaatacagaatatttcaaaagtagcatgctattcattgtcacaacatgcacttgcactgttctgtcttatatgatttagtacgttaggtacagggctaaactttggctcatatmtcttgtagtggtcatccattccataacgtcaaccttcggttattccaaacacatttttgcttttggagaaattctgtcattagtaagatat

SEQ ID NO: 657316 - DNA, 629 bp, Homo sapiens
agcgccatatgcagacacatgtccttcccagaccctgaaggaatatgattcattctctctaattatgtcctcctagcactgtgtacataactctataatggcattatattgtcttagagttattggttatgtgtctcttttgtccactagtctatgagcttcatgaaaagaaagcttagctctttgttagttgtatctcgatcatttacaacagttcatgggacatagcagccaaaacataagtgtttgctaaatgaaaatgaggtcatttaccttttttagtcttggttttcttatgattaaaattacatcatggatctggccttttaactttacaggatttcagtgagagtcaaatgagacatgattatgattaataaaataattccaaatattcagttataataacatctaattgggcattcaatacagaatatttcaaaagtagcatgctattcattgtcacaacatgcacttgcactgttctgtcttatatgatttagtacgttaggtacagggctaaactttggctcatatctcttgtagtggtcatccattccataacgtcaaccttcrgttattccaaacacatttttgcttttggagaaattctgtcattagtaagatat

SEQ ID NO: 657317 - DNA, 560 bp, Homo sapiens
aagcttgaattgcacaaaagatgtaacaaaacgcagcaggtggtacagaaatcaggggaagtgattagagaggagactattggaatcttaagcacagggatctatgttaggtgttttaacacacattgtcacaattaaaggaattgctgaacatcaatcaaagagaattgaagacttacaagatttaattcatagtgaagcaggttgaaacatcattgcataayattattctaacagtgcttatcagactaagcgtaaacaaagaggaaagacatggaaggggtgatctggataaaaacagccatacaatataggacagcttgcaatggtaacttaaaggtaagagaggcctagaccactaaggcgccactgacctcagaaaagccatcaactggactcaattgtacatatgaaatgatgagaaatatcataagtggaaaagttgcagctagtgagaagttgccaaaaattggatctagtcattgagatatatttgtgatggattcaccttgactggttatactgatcagaaagtgatttccaagtagcaaagcagatca

SEQ ID NO: 657318 - DNA, 560 bp, Homo sapiens
aagcttgaattgcacaaaagatgtaacaaaacgcagcaggtggtacagaaatcaggggaagtgattagagaggagactattggaatcttaagcacagggatctatgttaggtgttttaacacacattgtcacaattaaaggaattgctgaacatcaatcaaagagaattgaagacttacaagatttaattcatagtgaagcaggttgaaacatcattgcataacattattctaacagtgcttatcagactaagcgtaaacaaagaggaaagacatggaaggggtgatctggataaaaacagccatacaatataggacagcttgcaatggtaacttaaaggtaagagaggccyagaccactaaggcgccactgacctcagaaaagccatcaactggactcaattgtacatatgaaatgatgagaaatatcataagtggaaaagttgcagctagtgagaagttgccaaaaattggatctagtcattgagatatatttgtgatggattcaccttgactggttatactgatcagaaagtgatttccaagtagcaaagcagatca

SEQ ID NO: 657319 - DNA, 596 bp, Homo sapiens
aattatttttgtacaatgacattctcaaacagaaatgttgcatacttgaatctaagacaatttaatcacygtagcttttaatgacaaggcctcaaccttctcctatttgattgttagtgtacatttctttgctatgtttaccttctattttctttgagaaaaaaagacagcgatagtcttaaatggtaatagtgctgcagttgttactaattaaaaagttagagattaggaagatgagttgttttacactaagagtgaagttaaggaaaccaatcaaaaacatgtaaaaagactggctaggtgtggtggctcaggcctgtaatcccagcacttacaaagcctgaggtgggaggatcacttgagccaggagttcaagaccagcctgaccaacacggtgaaaccctatctctactaaaaacacaaaaattagccgaacatggtggcacccacctgtaattccagctactcaggtggctgaggcacaagaatcatgtgagcctgggaggcagaggttgcagtgagccgagattgcaccactgcagtctagcctgggtgaaagaacaagactctaatttcaattagaatcaaggagaata

SEQ ID NO: 657320 - DNA, 596 bp, Homo sapiens
aattatttttgtacaatgacattctcaaacagaaatgttgcatacttgaatctaagacaatttaatcactgtagcttttaatgacaaggcctcaaccttctcctatttgattgttagtgtacatttctttgctatgtttaccttctattttctttgagaaaaaaagacagcgatagtcttaaatggtaatagtgctgcagttgttactaattaaaaagttagagattaggaagatgagttgttttacactaagagtgaagttaaggaaaccaatcaaaaacatgtaaaaagactggctaggtgtggtggctcaggcctgtaatcccagcacttacaaagcctgaggtgggaggatcacttgagccaggagttcaagaccagcctgaccaacacggtgaaacccyatctctactaaaaacacaaaaattagccgaacatggtggcacccacctgtaattccagctactcaggtggctgaggcacaagaatcatgtgagcctgggaggcagaggttgcagtgagccgagattgcaccactgcagtctagcctgggtgaaagaacaagactctaatttcaattagaatcaaggagaata

SEQ ID NO: 657321 - DNA, 596 bp, Homo sapiens
aattatttttgtacaatgacattctcaaacagaaatgttgcatacttgaatctaagacaatttaatcactgtagcttttaatgacaaggcctcaaccttctcctatttgattgttagtgtacatttctttgctatgtttaccttctattttctttgagaaaaaaagacagcgatagtcttaaatggtaatagtgctgcagttgttactaattaaaaagttagagattaggaagatgagttgttttacactaagagtgaagttaaggaaaccaatcaaaaacatgtaaaaagactggctaggtgtggtggctcaggcctgtaatcccagcacttacaaagcctgaggtgggaggatcacttgagccaggagttcaagaccagcctgaccaacacggtgaaaccctatctctactaaaaacacaaaaattagccgaacatggtggcacccacctgtaattccagctactcaggtggctgaggcacragaatcatgtgagcctgggaggcagaggttgcagtgagccgagattgcaccactgcagtctagcctgggtgaaagaacaagactctaatttcaattagaatcaaggagaata

SEQ ID NO: 657322 - DNA, 636 bp, Homo sapiens
actcatccacaagtttgttagtagtttgccccaaatgcacacctataaaagtggcaaggcccagatttgaacctgggaaaacaggtttttaactatttcattgcaactacctccgacatcagtgtacctaatttatatttttcccctgaagttaaaaattgatggtatgtttagagttaaccttctgggctaaattcctgttgttttaaaacattcttttttcaacaactccccaaatattcaaagaggagagtatcagagttagttttgatataaaaatacartcattttaccattgctatttctcatgatcttactatcactcttcaaaccctgaaaattctcctgaaaactgagtagacattattgcaagttttcatggtacccataatgttataaaattattgaaaatttaaatcataaatgtgtaaaattccaacattcctgttaaatgactaagactagttaaatcaagtctcattcagagaaaaatataataatcaaatgtgaatgattgagctggtaataaagacctccactgcgtccaagtttttaacacctgaaagaaaattattatctaatttagcattaatgctgacaagagatggcataaagttgttcacattagacaggccg

SEQ ID NO: 657323 - DNA, 579 bp, Homo sapiens
aactaacatgctttgataaagaaccattttatattctgtgccatacttcccttccttcaaatacagtttcacagctagaacgctgattcaattctcagacctcaggccctgtctataaacatcgccttgtttattcattcaacacatatctattgattacctcctctgtgcaggtatgtgcttgtttttgtgaatacaaaatcaaatatatagtaatcaactccttgtgggtacttaaagtctacttrgtcaatttgtcttaagactcctatgttcttatgtgcatatttgggtcaaagtgaatatcctaaattacggttttgaccacattatattctgaaaataagcctgtaatgtttgcccgtctccaaaaagaaacaattttttaaatcaatattctaaaccctcttctatctcttccttgtcttgccatttgattctgtttttgaaaacaggatgctccattttacccattacttagtatcagtaactacagtaactattgttttggagttttcttcttaaactcaaagtagttccacatttaattctgacaagaaaaagtctgactcattcatt

SEQ ID NO: 657324 - DNA, 570 bp, Homo sapiens
atatcatactgtgctagtaactttaatttcrtagtatagactgtacttcttgatctctttattacaatttcttaactctgcagacgtaaggagatcagaatgttagatattatccaagagttattaattagatactaattgcctttacagaagagtcatcaccaaacttttgacactaatgtagcattccattgaatttatttcagtaagttcacttatgtctgccttctgaactaccttaggacttgctattaataatgaatgcattaattttctactcatgctagagaaaagatcttccaccatcccacttatcttactaaagtggaggtttggaatgttaagaacaatccatgctgcagaaagtagtcctggattgtgccagttaatggcacatgggaaacatggaaaaaccacacagaatccctatacagtcacctgtagagcctcttgtttacataataagctttacttagagagacagccgagctggttggtctcacaaaagggaggatgattcttttattagaattatcacttttttttgcagtgcatttattcattcatcat

SEQ ID NO: 657325 - DNA, 576 bp, Homo sapiens
atatcatactgtgctagtaactttaatttcatagtatagactgtacttcttgatctctttattacaatttcttaactctgcagacgtaaggagatcagaatgttagatattatccaagagttattaattagatactaattgcctttacagaagagtcatcaccaaacttttgacactaatgtagcattccattgaatttatttcagtaagttcacttatgtctgccttctgaactaccttaggacttgctattaataatgaatgcattaattttctactcatgctagagaaaagatcttccaccatcccacttatcttactaaagtggaggtttggaatgwtaagaacaatccatgctgcagaaagtagtcctggattgtgccagttaatggcacatgggaaacatggaaaaaccacacagaatccctatacagtcacctgtagagcctcttgtttacataataagctttacttagagagacagccgagctggttggtctcacaaaagggaggatgattcttttattagaattatcacttttttttgcagtgcatttattcattcatcatatgtct

SEQ ID NO: 657326 - DNA, 576 bp, Homo sapiens
atatcatactgtgctagtaactttaatttcatagtatagactgtacttcttgatctctttattacaatttcttaactctgcagacgtaaggagatcagaatgttagatattatccaagagttattaattagatactaattgcctttacagaagagtcatcaccaaacttttgacactaatgtagcattccattgaatttatttcagtaagttcacttatgtctgccttctgaactaccttaggacttgctattaataatgaatgcattaattttctactcatgctagagaaaagatcttccaccatcccacttatcttactaaagtggaggtttggaatgttaagaacaatccatgctgcagaaagtagtcctggattgtgccagttaatggcacatgggaaacatggaaaaaccacacagaatccctatacagtcacctgtagagcctcttgtttacataataagctttacttagagagacagccgagctggttggtctcacaaaagggaggatgattcttttattagaattatcacttttttttgcaktgcatttattcattcatcatatgtct

SEQ ID NO: 657327 - DNA, 584 bp, Homo sapiens
cttttgttcagagaagcaaattctaggatgtcccctggggtatgttgagttctatctgtagctaaactttatactgtagagcgaaaacagatatttatgatgattcttatatagaaaaaagactttgtgattactgtagtatacttagaaaattatatttaggaagcttttcagtaaaggtttaaacaaagattgttaagcttgaaagaatagttcttatactgacaatgtaattaagccacgtattcctccttaaatattttaatgaarttctaccacacacaggcatttaaagctactttccatcttccttattttccatctccagtcaccaggtcctgttatgtttgccttagtaatatttttcagattcgtcacttttttctagatgataatgctttaattcaggccatcatggtctctcacctagacttttgcaaggctttctgactagtctgtcactggactccccttaccccatcctttttatccaaaaacaaatttggaatgggttgccgctcttatagttaagaatgtgttttggctcctccttgccagagtccagctgcccagcatgtcctgga

SEQ ID NO: 657328 - DNA, 471 bp, Homo sapiens
gaagttccttatttgaagaagaaaaataaaagactactcatttgcattttttagtccagcttcttttattaaaacacaaactaccggaccatgtaaaggtgttaagttctattttgaactttattgggaaactgtatgacaggctcaggtagaagtgcagctacctacaattcagactctgaaacaatcaagacaagtcacagggaatttaatggggactgggcagccacagatgggcagaggatcactgcttargccatcggggtctcagagaacagttcagcaagaacccagaatgtaaaggtacacctccctgttacttttaaaatttctttctaataaggattataaaacaagtacctcagataacaatgcattaaaaagaccaagaaatgcatttagaatgaaaaaaaaaataccactataaaagtataagtgcacaatggaaatttattctcatgttcatttgaa

SEQ ID NO: 657329 - DNA, 548 bp, Homo sapiens
tttctgaatcctctgagccaagttatttgctctgaatttatcaatggatgacacaaagaaggagttcaagataagaaaaagtagtataagctccttgttaaccattctaacggcattatccactctctgacatatatttcaactatttgtgttccgtgaaggcaagaggtacatggttattattttttcattgcccagaagagagctttgcatatacagaaagagctcagcaaatatctaggtcaatttaaaggcctcgtacactgtcagcccatcaggatatttctgcctaaaaaatttccctcaaatattttaaaccgtagaaattaaggtgcaggaaaaggtaggaacatttcccatttgagatactgctacccacgagcatatggactgctttattcctgccaaaatattcttttgctttatgttttgatacagtcttagaggaaaacatgaagtaaacaagtgaacaaacaaaaaaatcccacaaaatctgagagaacaagtaatagtggagagtaraaatgggaggcagtgtcaataaaaaa

SEQ ID NO: 657330 - DNA, 404 bp, Homo sapiens
tatgtgcttttgttgctttgataatgtttagagattaaagctcttagtaaagcttagtatcatttccaaaaaaatcactggtttaattaataaaagtagtagtgacaatgaggtggtttacatgtctcaaaatttatttgcaaatattctcctcttcaaatgatgtcaaatggttttactattaaaaaaaagtctaaaagagagtcaaccattaatttttttcaggcaatcatcatgtgttcctttcagctatgtcaacattcccaaaagcccaatcaaggkgcagtctttccaaagtttccagtctttatcagctaagtgatatccttgacctccttaaaagtctatgaactctcaagaagtaagctgaggtgctgaagatagccggcacccaaacgttagag

SEQ ID NO: 657331 - DNA, 597 bp, Homo sapiens
tgtaatcatggctcactgcagccttgacctcctgggctcaagcaatcctcatgcctcagcctctggagtagctggaactatagacacacaccaccacacccagttaattaaaaaaaacatttttttgtagatacagggtctcagtaggttgctcaggctggtctcaaactcttgggctcaagtgatcctcctgccttggctttccaaaataccgagattacaggcatgaaccactgtacatagtctcagacctttgctatggatgcatccaacccactctcatcttctctttcgtatcttaagattgtatgccttctcacagtctcactgagtcacagtggatgctcagtgcctctgcttttttcctcagggtgatgccctagggaaaaaaatgctcaagtttatgtgccttctcccagtcttgcagaggcaagctggctgattgtgcaggckcccaagccatctgcaaaggctcacactcactgtgcattgggaggaagactggaggggatgagagggaaatgcacagggatccagtcacagagtgtgtgtgaaggtgagccatgacaaacattggaagtcctcatggggacattt

SEQ ID NO: 657332 - DNA, 613 bp, Homo sapiens
ctgtgcaattggcatagaccttacttggttattggacaattaaatgaaataggtatttaaagctcccagcacttagagaagttgtggtcttcttactaccagcagctcagccacctccaataagttcactattacaactactgccagctgactgaccgtgagaaatccaggtaactctctgagcctcagtttccttttcagtaaaagaaagataatgtctatttcacagggttgtgaagacaatgaaatgctaacacctaaaaagtgctaggaacatggcatgtactcaacaaattttagttcaaaatcttttcstcctttcccgtcttcttaaaaatatcaagaactcttcagaccctgttgatattcccaggccagtagttcatgctgatcttgagattagattacagcctggaggggcatcttaaatgcactttaaattagacctgattcatttccagaaaagattcacacactactaccaggcttgctagatctgaacccatctttaggctacagaggaagcaagaaatgtgtgtagcacatgaatattctatccatgagcagatctttctccttttccttcagggactctgcatacccaatgtccaat

SEQ ID NO: 657333 - DNA, 563 bp, Homo sapiens
tggctacataaaatgagttaaggaggcccttctcctcaatttcttgaaatagtttcagtaggaacactaccagctcttctttatatatatgatagaatttggctatgactctatctggtcctgggtgttttttggttggtagacattttattactgattcaattttggtattcattattcatcttttcagggattcaacttcttggttyaatcttgggaggttgtatatgtccaggaaactatccatttattctgagttttctggtatgtgtgcatagagatattcatagtagtctgtgagggatttttttatttttgtgaggtcagtagtaatatcccctttatcatttctgattgtgtttatttggatcttctctctttttgcctttattaatcaagctagtggtctatatatcttattaatttttcaaaaactcactcttggacttgttgaggagtttgttatgtattgtttttcatatctcaatttccttcacttcagttccaattttggttatgtcttgtcttctgctagctttgggattggtttgttcttgtttctc

SEQ ID NO: 657334 - DNA, 563 bp, Homo sapiens
tggctacataaaatgagttaaggaggcccttctcctcaatttcttgaaatagtttcagtaggaacactaccagctcttctttatatatatgatagaatttggctatgactctatctggtcctgggtgttttttggttggtagacattttattactgattcaattttggtattcattattcatcttttcagggattcaacttcttggttcaatcttgggaggttgtatatgtccaggaaactatccatttattctgagttttctggtatgtgtgcatagagatattcatagtagtctgtgagggatttttttatttttgtgaggtcagtagtaatatcccctttatcatttctgattgtgtttatttggatcttctctctttttgcctttattaatcaagctagtggtctatatatcttattaatttttcaaaaactcactcttggacttgttgaggagtttgttatgtattgtttttcayatctcaatttccttcacttcagttccaattttggttatgtcttgtcttctgctagctttgggattggtttgttcttgtttctc

SEQ ID NO: 657335 - DNA, 617 bp, Homo sapiens
tttcataataattgatattaatctatactatatctctgcatctatattatgtggtatcttcctaygagttatttttacaatttataagccctaagacgggttttttcctaagtggcattttttttcaaatccaaataatatacaggcaattcttgaaaatctgctgaaaattataagaacacaatgacatttatacctattaagaaggcaaagattaggtaataagaatgaataaaagcaattcatttattcaatatgtattgagtccctactctatgctaggtgctgagaaaagagttgtaattaaaataaacaaaaaaactgtcttcatggaattcatattccagtgggagaaagatgggtaataactaagtatatagtgtagtattattggaaggcagtaagtgatacagagcaaagaaagcagggaaggtggacagggaaatttagggcctgggttgagttataaacttaattagggtggtcagggaagttactgaaacagtgacacttgggcatttgaaagatgggagggaagaagccatggggaatctgggcaatcataaagatctcaaggtaggaatgtgtctcaaggagcatcacagaggtcagagtgg

SEQ ID NO: 657336 - DNA, 600 bp, Homo sapiens
tctccctcatttattagagcttagatctttagtacacagtctattaatccactcaaaaccccatgattatcctaggtgttattaatatttaaaaatgggaatttctttgaaaacccagcccttcaatttaatcatcaagtgatcttttgttcttcttaccaaaggatttgctttttccccctcatccattaattatagtatattctcttggttcaggaaagataaactttaggtaagaaaatttctatctacttctaaaattttcattataaatgaatcttgaattttaattacctggttgttttttgttctttgttgaaatattattatatattttcattttcctagaataaaacaggcttgaytattactctagatataacattatacctagtacatagctgtttatgactcagtaagagaatacctggtgtagaaaagcatctcacaaatatgtgtactgacatattctagattctaagtaatatttttacaaaattatattattagttttgtatgcctttacacaaaataaatttcactggatacatacatacctttctcatatgtatgtcatattcgactactactaagaaatat

SEQ ID NO: 657337 - DNA, 600 bp, Homo sapiens
tctccctcatttattagagcttagatctttagtacacagtctattaatccactcaaaaccccatgattatcctaggtgttattaatatttaaaaatgggaatttctttgaaaacccagcccttcaatttaatcatcaagtgatcttttgttcttcttaccaaaggatttgctttttccccctcatccattaattatagtatattctcttggttcaggaaagataaactttaggtaagaaaatttctatctacttctaaaattttcattataaatgaatcttgaattttaattacctggttgttttttgttctttgttgaaatattattatatattttcattttcctagaataaaacaggcttgactattactctagatataacattatacctagtacatagctgtttatgactcagtaagagaatacctggtrtagaaaagcatctcacaaatatgtgtactgacatattctagattctaagtaatatttttacaaaattatattattagttttgtatgcctttacacaaaataaatttcactggatacatacatacctttctcatatgtatgtcatattcgactactactaagaaatat

SEQ ID NO: 657338 - DNA, 600 bp, Homo sapiens
tctccctcatttattagagcttagatctttagtacacagtctattaatccactcaaaaccccatgattatcctaggtgttattaatatttaaaaatgggaatttctttgaaaacccagcccttcaatttaatcatcaagtgatcttttgttcttcttaccaaaggatttgctttttccccctcatccattaattatagtatattctcttggttcaggaaagataaactttaggtaagaaaatttctatctacttctaaaattttcattataaatgaatcttgaattttaattacctggttgttttttgttctttgttgaaatattattatatattttcattttcctagaataaaacaggcttgactattactctagatataacattatacctagtacatagctgtttatgactcagtaagagaatacctggtgtagaaaagcatctcacaaatatgtrtactgacatattctagattctaagtaatatttttacaaaattatattattagttttgtatgcctttacacaaaataaatttcactggatacatacatacctttctcatatgtatgtcatattcgactactactaagaaatat

SEQ ID NO: 657339 - DNA, 600 bp, Homo sapiens
tctccctcatttattagagcttagatctttagtacacagtctattaatccactcaaaaccccatgattatcctaggtgttattaatatttaaaaatgggaatttctttgaaaacccagcccttcaatttaatcatcaagtgatcttttgttcttcttaccaaaggatttgctttttccccctcatccattaattatagtatattctcttggttcaggaaagataaactttaggtaagaaaatttctatctacttctaaaattttcattataaatgaatcttgaattttaattacctggttgttttttgttctttgttgaaatattattatatattttcattttcctagaataaaacaggcttgactattactctagatataacattatacctagtacatagctgtttatgactcagtaagagaatacctggtgtagaaaagcatctcacaaatatgtgtactgacatattctagattctaagtaatatttttacaaaattatattattagttttgtatgcctttacacaaaataaatttcactggatacatacatacctttctcatatgtrtgtcatattcgactactactaagaaatat

SEQ ID NO: 657340 - DNA, 562 bp, Homo sapiens
aacagttacaaacctttatatttgtgagaaataagccaatttgtgtaagtaaagtcataggagatgagactataaaatgtaaataattcattttccttcttcatctccccttctttcttttttctctccttttgttcctcctccttttcgtgattctctcctcctccttattttcctcctccttcttcttagtgtctgcaaattcaaattattagattattattatcaagagagtactaaaatattccattagcttgatataccttcaggataaacctgcacccagtgaactttgtttagacagaaagtcattaaacaagtgtgactatattagatatagaaaccaagtttaaattggttcagaacaaaagagaatctttctctctctctctctctctctctctcacacacacacacaccccaaaaagtaaaacccrgaaaatcaaattttattataagcataaagaactccaggtcaaaaatgtgggctttgcttttactttgccagatacagcaacagaaaaatcatcaggcttcactctgaattgtgcatgtctaactg

SEQ ID NO: 657341 - DNA, 548 bp, Homo sapiens
gtcagtacatttgatttatcattctatttatatacatattctttttttctgatatatttaagggaggaaaagaaaaaagtctgctccaatatctaatcagggttatgtgttgtaattagttacccaaaacatatttttaagaataaaaaattattggcagtgaggattgggtgtggcttatttcaattcaattttaaataatttggttttataagatgaaggaattcaaaggcagtttgatgaataaattaattcaaatattggacttccttttcatgatttttaaatgcgtacttacatataattaattcatttgtatctatgaaatcacaatattgtaaatatattattaaattttccatttactgtacaactaagtgattttgagtagtaagcaaaagagtgtcgtgtacaactgctatagtagtctctattttgtagcaatgaggttggatcagaagataataaaatagaaacaggtgcgcttactagaaagcagcatgacaccrtgggaagtgtggcttgttggcaaagaaaaagaagaatgt

SEQ ID NO: 657342 - DNA, 506 bp, Homo sapiens
taaacaaatacagacatataattttcaagaacaagcattataaaatatgcattttgttaaagtartttatatattcaatatcttttaattgcgggcatttacattcaaggttagtgttgatacatgtggatttgatcctaattagtgttgaagttacaatgctgaaatagacaactagataagtagtgttatcctactcaagggaagccatttaattaaaacatatttaaaagcgatggaataaattagcttttcatgatgctgattaaatatgggtatttttaaaaatatatattaaaaaaagaaattattgtagtgtgtttttcagctctgtcaggtcgattatgtacttttctataccggctattttgtctgtcagctcttgcattgttttatcatgatttttagcttccttggattgaatttcaatgtactctgatagcttagtaatctttgtccctatccatattctgaattctatttctgttatttccaccatatccttg

SEQ ID NO: 657343 - DNA, 506 bp, Homo sapiens
taaacaaatacagacatataattttcaagaacaagcattataaaatatgcattttgttaaagtagtttatatawtcaatatcttttaattgcgggcatttacattcaaggttagtgttgatacatgtggatttgatcctaattagtgttgaagttacaatgctgaaatagacaactagataagtagtgttatcctactcaagggaagccatttaattaaaacatatttaaaagcgatggaataaattagcttttcatgatgctgattaaatatgggtatttttaaaaatatatattaaaaaaagaaattattgtagtgtgtttttcagctctgtcaggtcgattatgtacttttctataccggctattttgtctgtcagctcttgcattgttttatcatgatttttagcttccttggattgaatttcaatgtactctgatagcttagtaatctttgtccctatccatattctgaattctatttctgttatttccaccatatccttg

SEQ ID NO: 657344 - DNA, 506 bp, Homo sapiens
taaacaaatacagacatataattttcaagaacaagcattataaaatatgcattttgttaaagtagtttatatattcaatatcttttaattgcgggcatttacattcaaggttagtgttgatacatgtggatttgatcctaattagtgttgaagttacaatgctgaaatagacaactagataagtagtgttatcctactcaagggaagccatttaattaaaacatatttaaaagcgatggaataaattagcttttcatgatgctgattaaatatrggtatttttaaaaatatatattaaaaaaagaaattattgtagtgtgtttttcagctctgtcaggtcgattatgtacttttctataccggctattttgtctgtcagctcttgcattgttttatcatgatttttagcttccttggattgaatttcaatgtactctgatagcttagtaatctttgtccctatccatattctgaattctatttctgttatttccaccatatccttg

SEQ ID NO: 657345 - DNA, 506 bp, Homo sapiens
taaacaaatacagacatataattttcaagaacaagcattataaaatatgcattttgttaaagtagtttatatattcaatatcttttaattgcgggcatttacattcaaggttagtgttgatacatgtggatttgatcctaattagtgttgaagttacaatgctgaaatagacaactagataagtagtgttatcctactcaagggaagccatttaattaaaacatatttaaaagcgatggaataaattagcttttcatgatgctgattaaatatgggtatttttaaaaatatatattaaaaaaagaaattattgtagtgtgtttttcagctctgtcagktcgattatgtacttttctataccggctattttgtctgtcagctcttgcattgttttatcatgatttttagcttccttggattgaatttcaatgtactctgatagcttagtaatctttgtccctatccatattctgaattctatttctgttatttccaccatatccttg

SEQ ID NO: 657346 - DNA, 592 bp, Homo sapiens
tcatctttgatggcacatggcaacatttgccacccacaaacctaggatagccagttaatgtctcagtcttcattgccacrtttggtcttgcccagaggggacaaattttattcttcctcttcacacaatcatgtttcatagggcaagttaaaaaacaatgtgaagcatttgaaagttataagaccagcaacaggaaagcgaggaaaacctgctgcctgtcatgaaaaacatgaagccattttgccaagttaacaaagaacgaagaggtgcaatgttgcaatggggaaggcaaatgtatgatttcttttctgcttaactctgtgcaagcttttcccttagctctgtgcatgtctttcctttcttatatgacttcaggctagtcatttcacttattcatacatggcttgcagagagtaccacctcccaacctcctactcctacctcccaggctacaggcatgccagttgctaatgctccgagatctccccagcctggcccagactcccacacgatgagatgtcctctgtgcaatttgtacagcacctttctcaagcatggagacattgcacgacccagcagtgaacaatgaggc

SEQ ID NO: 657347 - DNA, 458 bp, Homo sapiens
gttacttaaatgattgatggcctccagtacgtcaacccttcctctcattctaggacatcagtttatttctgagttcatttacttcactaccaaactcaaaccccatcattagccatcttagtgaattcttgcatttcrttttctctcatctgtctttgccaagttaccagactgtcaagggtgaccagaagtagctctgtaactagaagttttgaagatatgtttatgtgttctaaagcaaatacactctgtaaaatagtaactgatacttcacagacatatagtataatacttctagtcagtcagttctatcatagcacatattacccaaatgctctagaatcttcagtttcccaacatcccacactcttcagtcttattaaatgacctaatccacctgtgaaatttaaataacctcattttcgctcccttaatttcctatttccctttttaaaata

SEQ ID NO: 657348 - DNA, 602 bp, Homo sapiens
acttctggtcccaagaatttcagataaagaatattcatccaatactaactgctcccccaataccccaatccatcagattgcttgtacatatagggtcatacaagaagctgacagctctcatttgcataaaacawgatccataaaatgaggacctatatagcaccaacctcaagccaaaatcagtccagacccaacacttgatccttattttagcagaatgaccaatctttataaagatttgctctcaaattttaagcatcctttctttcagccaggaaagttgattttaatctttcagtcctgaaaatttaactgttcctagttaaaaaaaatcaggattttatgtcatctatggatactgagttcagagagaaagattaagtgcagcccttgctagtcttagaatgtcagaaatcaaaattactttgatagaattcaccaaatggattacatggcaatggtacttgcatgcattttacaggtgacagagcaattctgtaaaactcttaaaactgtccatcaggctggacttaggttgaattaatgtggtggttgggatggcacaggcctgcaatagaagacaagtgcaaagccatgctgtt

SEQ ID NO: 657349 - DNA, 407 bp, Homo sapiens
cccaggagaaagagctgagctgcaatgaggaccaaatccatttatttttatgtctcaatgaaaatactggatagtttgtraatcacacatgctctgatcgcattccttttaagaatacacagcagatttattcacataggggaagcaattgatcagcctccctgcacagagattcttagatgaatgtggctgttcggtttcttactaaattaggagctgcagagcaagtgtgaccagagatggggtgctgagaaggcacaggtattatgtggaaaatttggcgtgcgtaccataaggactatgcagttgagaaacaacgttcatgtctggtcagttttaatttctgaacatggcttacaatctccagttcaaccacatgttgtcctccaattaaaccataccatgta

SEQ ID NO: 657350 - DNA, 526 bp, Homo sapiens
ttaaaggcatcaagcaaaggtaaattatgtaacatgccctggtgacctgttcagggtatctcaatcctattagaaacaaattcatgtcagatctaacaacttcataccaaatgtcctaatgtttaacacaaaacacagaccttatttatcatggtgtagtggaaacagccctggaatcagagtctgaacaactgagtcattgcctctttctggctgtgggcatatctcaagtcactgaaattctgtgagtctacgtctcttcatccaacagaactatatcagcatagtctttttttttccttgaaagaactgtgtacaatagtttaattttactgtcattactattattcttaaatacaagaacacactcagcacttcytaggaaaggggccctttgctggtaatgtgaaaaacagaggcatattgtgtggtctctgccattaaggagctgagcatttcatagagagaaagagaaatatccaaaactagacctaaattgataaaataacattattgccacatatta

SEQ ID NO: 657351 - DNA, 479 bp, Homo sapiens
atgtctttgcccagaatttatgccattctttcttaaaataaatgttctaaatgttcaagaaatgtaaagttttagtggaaagagttctgacgtagtaaggttttagtggcaaatttgccattaattatgtgacctttgacatgtcacttaatctaactcagacgtggcatcctgatctgtggaactaggagatctccaaggtctctctttcttgctttcaaatgcaatgattctcactcatttctttagagtattttaaytgaagtatatattacatgatattataggctatagtgtcatgtgctcctcgagtattagtgataagaaaaatattaatgataattctaactttatgactatcgagctttcaagcttttataactgaaagtcatggatatttctttctctttctacaactgagaacaaattctctacactaaaaagatgttgcaacagactggtaatgaaacaaaagtcat

SEQ ID NO: 657352 - DNA, 415 bp, Homo sapiens
agaggtagtgaaaattgtttacaaaggtgtgggctcaggaaatcactggcaatagtaaagtgtcccaatgctagttgtctctagacttcatgagtcaaggagggagtttattataaattgagggagacagtcgggtagagttgattataaattgagggagtckggtagatttcactactgtgagagaaggcatataatcagctcaaggcaaccttcaagggagggagtcaagaaaatacatacctgacttcattcttctccctctcatgtcttactagggcttcctattgactggatgtcactgaaagccagaaggcacaagatcctactgatgtaatccatgcaggttagcctcacagggccagacaggagaagggagatgaatcaagtgtgccttgggaagagcaaatagaag

SEQ ID NO: 657353 - DNA, 587 bp, Homo sapiens
tcctgctgcaaaattgcatattctgtgccattcaagcctagagctctatgaactagtgtgatttcagttttttgctgattatagagcattgctatctaatacctgggattctcagtaaacatccattttctctggaagctagtttccctgtatcatttcaattgatctttagctttcttaggaagaacgtcttcaattaattcttgagagttcatgttttttttttctttttctttcctgtgctctatttaacattttcacttttttttaaacagacgtatttagttttgggtgcaggcaacagattcattttaactcatgtcaccaccaattgttctgtcaatccatggtccaacaaaaattamcattaagactgattctgatagttgattaacaggtctctccttagcgagcaaggcaaccatcaacagcagagccactttagagtctcctgggaaagtgtgaacatgacagtaaacagcctacatcaaagacatttcaattccacaacaagcctttctgtttcgggtaagtgatatacacccaaacaaaacattaatcagaagacctatttcatctccctgggg

SEQ ID NO: 657354 - DNA, 594 bp, Homo sapiens
tctgctgactatatttaaaatattataattattttaaataaattttaatagatgactcccacaacttttaatttgtaatccctttatttttgttaactttaaaacatgtaattttactgtgattactttgttagttcattgctagtgttttcaatttccaaatgtagaaatgtttaatttctaatattaattgttgttaattcttaatttaatatcattgtgatattctgtatgttactgtgtccttaacatatgtaacatacatacatatatatacacatatatacatatatacatacatatatacacatatatacatacatatatacatgtatacacatatatacatacatatatacacatatacatatatacacatatacacacacatatatgtatatatatacacacacatatrtatgtatatatatacacacacatatatatgtatatatatacacacacacatatatatgtatgtgtgtgtgtgtatgtgtatatatatatatataaaatgacctgaattaaagaagaagcagtggagtcggaggaaagaggacatatttaaaaatcagagaggaagagtcaataatt

SEQ ID NO: 657355 - DNA, 594 bp, Homo sapiens
tctgctgactatatttaaaatattataattattttaaataaattttaatagatgactcccacaacttttaatttgtaatccctttatttttgttaactttaaaacatgtaattttactgtgattactttgttagttcattgctagtgttttcaatttccaaatgtagaaatgtttaatttctaatattaattgttgttaattcttaatttaatatcattgtgatattctgtatgttactgtgtccttaacatatgtaacatacatacatatatatacacatatatacatatatacatacatatatacacatatatacatacatatatacatgtatacacatatatacatacatatatacacatatacatatatacacatatacacacacatatatgtatatatatacacacacatatatatgtatatatatacacacacatatatatgtatatatatacacacacacatatatatrtatgtgtgtgtgtgtatgtgtatatatatatatataaaatgacctgaattaaagaagaagcagtggagtcggaggaaagaggacatatttaaaaatcagagaggaagagtcaataatt

SEQ ID NO: 657356 - DNA, 574 bp, Homo sapiens
gattatgatactggaaacttttgtctttttctttaaaaaagaaatatctgttagtggaaggcattagaaaccagtaattatagcactactaaggaagtgaccttacaggttgtcagacctgttaaggtggatttgcataaagtgaagctcatttagcacttgattgtatacagtcctatagtgttctttaaggtttcacatggctggtcttcccaaaatagttagaaacaattcaagagaaaaatttattttgcttcactgttcctaaacacttccaagtctgtcactcactaaacccagtgcagttggactaaccacacaataatactgaacttcggtttccttttcrtcaaatgacaataattatacttgccttgactaattcataggatcattctgaggcttacttgagatatcagatgtctaactttttcataagttgtaaagccctatatagatattaaatattattattgtgataactgacacctataagtagtttttcatttatctagcattaatacaatgaggtcacaagccaaacagttggttctcacagtattttatttgtggt

SEQ ID NO: 657357 - DNA, 580 bp, Homo sapiens
ataccacggcagtggaacacgccacaatgcaagaggaggccacagaaagcaaaaggaggataattgtccactcttaattggtggagttgtgatcctgaaagagtggcatcaagccttggtgcctttttttctctttgcccttctaccttttggctcccagwttagtcacagaaattcaaaataaagcaactaaaactcagctgctttctgactggacaaccagaaagggaagtcccagggaactggaaagtaacagagacatagcacagaaagaacctcaggaaagctacccaataaaatttcttagaaatacctgggttcactcaagctggcatgtatgggtcgaatcagcataccaaagccttttgaaatggaaatagatcactacccacagtggtgcatatgtgaggtgggtatgaatagcaccacaaaggctttgaaaacataactaccataggaaccacagctcacagaagttggttgggacttgcagaatgaacctaaccatgtaaatcgcttactgacataaaaatattaatattcaaataaggtcgaggttgacattctcatatttaaaatg

SEQ ID NO: 657358 - DNA, 593 bp, Homo sapiens
gctaaatgagagaaattgagggaaaaagtgtgtgctatgaatgttcattgttataaaattctaggaaatgcaaactaatcaatagacagaaaatagatgaatagttgcctgagatgcagagggtggtggtcagggaggggcagaaagaaagacatgagggaacttttgttttatatatatatatatatatgcttattttcctgtggtgataatttcatgggtgtataacataccaaaacttayaaaaatgtacacactaagtatgtgcagtgtattgcacaagtacacctcaataaagttgttatataaagaatatacgtctgaagtcagttatatctagatttaaagctcatcacgttcactcatgtgctatgtgcttttggacaagttatttaactgttcatttttattttaaattgattcttttagaatcccttcaaacttcacagaagtgatgtgaatgtaagtaacaacttgtctgagatgggtaaaagagagagctccaatgctgatgaagttgtacaaactccatcctccccatttgtaaccactaatttgcaaaggggctgagaagtttgctgcaggggacacat

SEQ ID NO: 657359 - DNA, 363 bp, Homo sapiens
ctgcttaccagatccttctgggtcttcccttttcctctcacagaagatgtctccttctgagggtatccatagaaacagggacacatgtgtgggatgtgcttaaggtatacatgtgtacttgagtgaaggagaaaagattcgatcctagctcttaaatgcagggcttcagatgccagatatgataggataaaaattaccacttacctatgagaaggaaatggagttacggctacaactattaaaggaagagaacccacaatgagatgtgattctcattaaattatatatcttasaaagtatggaaggtctcttatttgtagtataagttgtaatattttattatgtataagattgaaccagcag

SEQ ID NO: 657360 - DNA, 557 bp, Homo sapiens
gtattggaggctaaggagatactctggcttctgatttacctagaagagagggcagaagtagcatcagatgtggaaggagaaaccaagtatcaaagcakaaacagacactctggaggggagatcttcacagctgcacaggaaggaagactcagtctttatgcttcattaatttttttttcatataagactatgccacaatgatagttatagaactcaataccactgctaactccaaagacacttgggtttttaacctttcctaattattctaaagcccatatcctagcccagtgcctcttactcctaatgtgtacacaaataacctggagatcttattagaataagaattccgattctgaaattctaggttggactgagtattgatagtttccaactgatatcagtgctgtaagtacaagcactccctctgcagtagcatggtactgcatcacaatttggcagggccaggaaacagtaaagtccaataaacagcctttatttttatctttccctcataagacattaaaaaaaaatactgtccaaagtgcagtcacagt

SEQ ID NO: 657361 - DNA, 593 bp, Homo sapiens
gctaaatgagagaaattgagggaaaaagtgtgtgctatgaatgttcattgttataaaattctaggaaatgcaaactaatcaatagacagaaaatagatgaatagttgcctgagatgcagagggtggtggtcagggaggggcagaaagaaagacatgagggaacttttgttttatatatatatatatatatgcttattttcctgtggtgataatttcatgggtgtataacataccaaaacttataaaaatgtacacactaagtatgtgcagtgtattgcacaagtacacctcaataaagttgttatataaagaatatacgtctgaagtcagttatatctagatttaaagctcatcacgttcactcatgtgctatgtgcttttggacaagttatttaactgttcatttttattttaaattgattcttttagaatcccttcaaacttcacagaagtgatgtgaatgtaagtaacaacttgtctkagatgggtaaaagagagagctccaatgctgatgaagttgtacaaactccatcctccccatttgtaaccactaatttgcaaaggggctgagaagtttgctgcaggggacacat

SEQ ID NO: 657362 - DNA, 557 bp, Homo sapiens
aattttccaagtagaaaaaatagtctgtataaagattgatatcacatattattctggatcccacccacatcaggcaaactcaagtagggataaatcaaggagaattcaataaagtgtgggcagagtatagtgggtatcagggatagtgcatcatacctattacctacctgttaccagccctgggccttaaggagtgaggggagatagcagttaactagaacccaaaagaaatgaacccataggaaagacttaacctggagaggagctatgtactttgagaaatgcaaaagagaccagaataaacagaargacagttgggggaatactatacagatcctcacttcattttctcccaccactctcatgccttagtctcatacagccgtaacccaagtattgcataagcaagcctgtggaagtggcccaattatgttagaagataggaggcagagtgcaagggagagatgtagtctgaacgggcagacaaaaaatatctggctatatgtataataactgtgtgcatatatgtgtgtatatatatgtgcatacatgtgcac

SEQ ID NO: 657363 - DNA, 415 bp, Homo sapiens
agaaggggttgatagtcagatacaagtaaatatgtattcattttctatctcagttattcagttatttacttgatgaacatgtattaaacacaaattaggtgccctggatacagataaataacaagctcagaaactagtgaaaattagatatatatttgtccttaggtgaaaacatattttctcaaaaactaattcttcaagctgtgggtcctttttgttttttatgagtcaggcttggcatatgggtttggaggtcactgcagaggaacaaaagcatttattgtccaaagtgatatcctgagaaaataatcttgaaactacagatgctgagggayacaaataaccacactttaggggcttttagcagagtagtaccaataattaatggttagagacgttcttgtaagacagtgat

SEQ ID NO: 657364 - DNA, 458 bp, Homo sapiens
cttaccagacagtacaatacaagaaacaactcttttgctagtcctcaaagaagttaaataattaaaaccccttttctaattcctttatgattagagaaaataccttataaataaatgagtaaataaatagcatctcaaatatgaagattacttggttacttgtttgtaactcctttcactattggcctcatcattccgactcatgaactgttttgctctcttctgggattgtttcctaaagaggtgggatgcttcagagaagaaacatagaatttcctaagtgttagcacccgtcttgttccaggaagcaatgatatgcttagagctctctttgaacagggagctgtctgaatcatatggtatccatgttgctgatgcaataggatcaggaaaaacgacagccgtcagttgttgattaagtctgwtaagttatccaggctaatgaggtggaggctttt

SEQ ID NO: 657365 - DNA, 532 bp, Homo sapiens
cctgtccaacatgatgaaaccctgtctctactaaaaacacaaaaattagctgggcatgatggcaggcacctgtaatcccagctactcaggaggctgagacaggagaatcacttgaacctgggargcggaggttgcaatgagctgagatcacgccactgaactccagcctgggcgacagagcaagactctgtcccaaaaaaaaaaaaaaaaggaacctgcccaaatgtttcctcatcaaaccacctgatgcgttaaatatgtattatttattacctgccctctccaacacacacacatttgaatgtaaactctatgaaaacaagcaccagggccaggattagccttttgtaggcacaaaatttaagtgggtactgagaaacagagtaatcaagctcaatcatattttaatgcaatattttacaaatcaaaattgatgccaaaaaatcgatcatgaaagaaaatcaaaatgtaaacaaagacagatggttgtgtgtgttactgccctgcgttattgtgcaatgggaacagtttc

SEQ ID NO: 657366 - DNA, 532 bp, Homo sapiens
cctgtccaacatgatgaaaccctgtctctactaaaaacacaaaaattagctgggcatgatggcaggcacctgtaatcccagctactcaggaggctgagacaggagaatcacttgaacctgggaggcggaggttgcaatgagctgagatcacgccactgaactccagcctgggcgacagagcaagactctgtcycaaaaaaaaaaaaaaaaggaacctgcccaaatgtttcctcatcaaaccacctgatgcgttaaatatgtattatttattacctgccctctccaacacacacacatttgaatgtaaactctatgaaaacaagcaccagggccaggattagccttttgtaggcacaaaatttaagtgggtactgagaaacagagtaatcaagctcaatcatattttaatgcaatattttacaaatcaaaattgatgccaaaaaatcgatcatgaaagaaaatcaaaatgtaaacaaagacagatggttgtgtgtgttactgccctgcgttattgtgcaatgggaacagtttc

SEQ ID NO: 657367 - DNA, 532 bp, Homo sapiens
cctgtccaacatgatgaaaccctgtctctactaaaaacacaaaaattagctgggcatgatggcaggcacctgtaatcccagctactcaggaggctgagacaggagaatcacttgaacctgggaggcggaggttgcaatgagctgagatcacgccactgaactccagcctgggcgacagagcaagactctgtcccaaaaaaaaaaaaaaaaggaacctgcccaaatgtttcctcatcaaaccacctgatgcgttaaatatgtattatttattacctgccctctccaacacacacacatttgaatgtaaactctatgaaaacaagcaccagggccaggattagcmttttgtaggcacaaaatttaagtgggtactgagaaacagagtaatcaagctcaatcatattttaatgcaatattttacaaatcaaaattgatgccaaaaaatcgatcatgaaagaaaatcaaaatgtaaacaaagacagatggttgtgtgtgttactgccctgcgttattgtgcaatgggaacagtttc

SEQ ID NO: 657368 - DNA, 555 bp, Homo sapiens
gggcttgtcatagttggctcttattattttgaggaatgctccttcagtgtttagtttgttaagggtttttatcatgaagggatgttggattttattggaagacttccctgaatctattgacatgatcatatgatttttgtttttaactttatgtggtaaatcacatttattgatttgcatatgttgaaccaggctcgcatcccaggaataaagcttacttgattatgatgaattaactttttgatatactgatgaattcagttcaccagtgttttcttgagaatatatgtgtctatgtccattagggatattggcttgtaattttcttttttggttgtgcctttttcagcttttggtatcagggtgatgctagcttcatagaatgaattacagaagcatctctttctctagtttttggaataatttcagcagaattggtttcaamactttttgtgtatctggcagaattcacttgtgaattcattttgtctagggcttttttattttctgattcataagtttttttatattactgattcaatacatgatctcaat

SEQ ID NO: 657369 - DNA, 633 bp, Homo sapiens
aaaatagtatctacttaaaatatttacaatttaaatttattaaacacagaacctatgttcacttatgtttgctacatatttccatgatatcaaaagcgtgttgttatatattcatgagggattccaaatcatattattaggatgttaggcaayttgtaagaagctaaccacatttttacagtaaaatacactgaactataaaattactcataattctatatgaactggtttaaattttttaataaccaaaaattagacgttatggtgttttgtactacttaatcttacagtatacattctcttaataatttagaaaattactaaaacgagtgaattattacaataaacatgagcaaaatttatcttaaagaaaatgaacctaagctcattatctatctaaaactttgaattattaatacattgtatgttttaaaattcatgcattaattttattttaggcaattttatacagttgggtaaatcacattaatgttgtgtggttttcttactgcactttttaatatgacagaattttttatattatctcattttatctttacagtaattatactacttaggtgaaatattttctcaagatgtatagaaactctggcacttcaattgtccaaagtc

SEQ ID NO: 657370 - DNA, 633 bp, Homo sapiens
aaaatagtatctacttaaaatatttacaatttaaatttattaaacacagaacctatgttcacttatgtttgctacatatttccatgatatcaaaagcgtgttgttatatattcatgagggattccaaatcatattattaggatgttaggcaatttgtaagaagctaaccacatttttacagtaaaayacactgaactataaaattactcataattctatatgaactggtttaaattttttaataaccaaaaattagacgttatggtgttttgtactacttaatcttacagtatacattctcttaataatttagaaaattactaaaacgagtgaattattacaataaacatgagcaaaatttatcttaaagaaaatgaacctaagctcattatctatctaaaactttgaattattaatacattgtatgttttaaaattcatgcattaattttattttaggcaattttatacagttgggtaaatcacattaatgttgtgtggttttcttactgcactttttaatatgacagaattttttatattatctcattttatctttacagtaattatactacttaggtgaaatattttctcaagatgtatagaaactctggcacttcaattgtccaaagtc

SEQ ID NO: 657371 - DNA, 633 bp, Homo sapiens
aaaatagtatctacttaaaatatttacaatttaaatttattaaacacagaacctatgttcacttatgtttgctacatatttccatgatatcaaaagcgtgttgttatatattcatgagggattccaaatcatattattaggatgttaggcaatttgtaagaagctaaccacatttttacagtaaaatacactgaactataaaattactcataattctatatgarctggtttaaattttttaataaccaaaaattagacgttatggtgttttgtactacttaatcttacagtatacattctcttaataatttagaaaattactaaaacgagtgaattattacaataaacatgagcaaaatttatcttaaagaaaatgaacctaagctcattatctatctaaaactttgaattattaatacattgtatgttttaaaattcatgcattaattttattttaggcaattttatacagttgggtaaatcacattaatgttgtgtggttttcttactgcactttttaatatgacagaattttttatattatctcattttatctttacagtaattatactacttaggtgaaatattttctcaagatgtatagaaactctggcacttcaattgtccaaagtc

SEQ ID NO: 657372 - DNA, 589 bp, Homo sapiens
cacaaacagtaggtaagtagatgccgttctcgaatgccatgctaaatgtagtaatcaatattctttaacacaaacaaacaacaaaaaaacattttccataaaactcttggcaattgctttgtggcatttttaaagtaggaaagtattttgcggtagccttaatttcttccttatttagaacacttactttcagacttaaattctgatttaagaatgagaatttttataaattatatgtgtcaattaattttaaaattaaatttaaaattatggttccattttggaatgttaattcattttcaaaattatttttttttcacagaaagtcacgcaacttagacttctttcagcaactttgacttttgcytctgttcaattttctatgaacacaattataattgtttctgttacagccttcatatttgtcatctttctgattattattctcatgtacatttttctctaaattaggtcaaacttttcaaccttgtcttgtacattacttgttataatagcagatcaatatttacaatactgttttttcctgtactatttctaattctattttaaattattctattatgtattc

SEQ ID NO: 657373 - DNA, 565 bp, Homo sapiens
tcaatccatcattcccaacccagctggggagctgtgactttgaagcaagcccctgactggctccatgtatgtccacaactgtccactcttctccccatgggccctagagttgtcctgcacatttgtggggtctgggtccttagagtcacgaagcaaaaacaaagatcttaagcccttttccttttctctctatcccttttttagtgtgggtggtttttctctgggtatccaagcaatagggaaggaattaccattttaaagttcaaccttcctgcatccaaggtggctttagaggaacaacctgttagtagctggtaatggtaagagctaacaagtattgagtgcttactgtaggccaggtactgttctgaaaacttagaaatgaattagctcatttaagcttctgttaaatactactaakgtcctcattttatacgacgagatcgggcagaaaggttaagtttctaaaaaaataattaaaaaccttccatggagtaattaaaatttaaatcccataaaatgacaaagtctgagagtagagtacattttttacttctgtttattc

SEQ ID NO: 657374 - DNA, 572 bp, Homo sapiens
tttcttaaggtaactttccaaggtggttagggataagcagacatttcttgagctcatccaaggacctaatagagcaaaaatgtctctgtcattatctgtacttgattttcatctctaggagcaggaggatcaattcagtcgttgacattttccaacctactgtgcagggaaaggggaattcagagaaaacatcgtcttcttaaagaggarcactggaagtcacagatatcaattttgtttatatcatctcagcctgcacttcataatatgatcacatctaagtgaaagggaacctggacaataatgttctataactgagtcatcatgggccccattaaaactgttactgaaaggaagaataacaaagggtgaagttaagacaatatcaaaaagaagaacctatgacaatttcacaataccccagtagatccatggagaaaatgctttcatagatgatttaccctaagagaaaggagaccatttagagaacaagcacgcttcatttaaaaaattatgaaagaagaaaaatgaatatagaagatgatcacatgagatagaaaataaactgacaa

SEQ ID NO: 657375 - DNA, 567 bp, Homo sapiens
gaattcagccaagccagtttagtaccttgagacttttccagacaaaaggtatgagtccgtgtttgcattgatcaaacacttcagaagggcaggcttcatgagcataaaacccatttcgacacacttctctccaatagcaacacagaacaagccaagatttgtcagctaagaaagcatcttgttggagcaatgactgatgtcagtctcgtctccgtatagamcagccttccctatctcatcaaatctcgtgaaacttcctgagctcgtcttgaaataagaaaaaaaatcccttgttcttggagagagcaaagcgatgtaaaatgcagaggactctgacaagtctttttcaagtcaaagacatcccccatctcaaatcgactgaatctctagccttttctacataaacttggagtaagtgaggagctaaggatgacagatatagtttttgaaagccttttatctaatactgaacatgtatttcttctagtccccttttacattttaaaagaaaaaaaaccaatgttgattacttagcatttatttccttagtctggaacactctctgta

SEQ ID NO: 657376 - DNA, 630 bp, Homo sapiens
tcttttctaatttgtataccttttatttctttctcctttctgatagttctggctagcacttccagtactgtattgaataggaatgatgaaggtgaacatccttgcttttttccagtttctagaagcaacacttctaacttttgcccatccaggatgatgttggctgtggctttgtcatagatgactcattttttgaggtatactccatctatacctatattgttgagggtttttatcataaacagatgttggattttatcaaatgcttattctgcatctaatgagatgatcatagggtttttgttctcagttccatttatgtggtgaatcatgtttattgatttgtctattttgaaccattcaagcacccctggaataaagcccacttgatcatgatgaattatctttttgatgtgttgttagcttcagtttgctagaattttgttgagtatttttacatctgtgttgatcagggataaggatttgtagttttcttttgtgttctttttaaaattttccttgttaattttactgcacagtattattttaatgatgaataaagtgttgagctggacatgtgtaccttgttcctcatgttasaatgaaactgtttaatatgtcatgattatt

SEQ ID NO: 657377 - DNA, 560 bp, Homo sapiens
atgtcaactgcaaacagaaacaatttaacttcttcctttccaattttcatgccttttatttctttcttttgcctaattgctctggctaggacatccagtactatgttgaatagaagttctgagagtgggcacccttgtatgaagtttcccacaacatctcttatctttttattagctatatattaatacggatgtttcttcttcatcaggagtttgaaaaatatgtcttttctctatattgttcttaatcagtcttcctagaagtatttcaatttcaaaaagtagcaacaactgtgggagttcagtcaggctggtgggaaaaattttaaagatagttttaagaaatcgacacaaaccttcatggaaggctgggggtgttgtatagcttcagtaatagatctgaatgaaggcggcctaatccttccttgagtaaayagcttaaagtaggtgcaaaggaatgtaagggagtttatctaaataacttgtttactcatgtggtcctgaagccaacctttgatcattcacaggcaggatggctctctctcgggggagggtgacca

SEQ ID NO: 657378 - DNA, 397 bp, Homo sapiens
tctctaacaactgtcttcagtgaaacrctcccaccttgtggatttttaggttattgaaattaaccagtcttctgggtgcagcacaccaacatggcacatgtatacatatgtaacaaacctgcactttgtgcacatgtaccctaaaacttaaagtataataaaaaataaaataaaaagctacacaaattaaaaaaaaaagaaatcaacctaattcctagattaccacctcttgattcaaatgctttaaatctaggcttttcatctgagtctttctttttagttattctgtttatcttcaaaacactcctgctttgaatcattcaaaatctacctccctccctctgtttgactaccatcaatttttttgctcattcctaatgcattaatctattagctg

SEQ ID NO: 657379 - DNA, 594 bp, Homo sapiens
atggaatggtgattatcagaggctagtagttgggggtagacatggaaaaggtagatgttgataaaagggttcaaagtttcagttagacaaagtttcagtgaactattgcacagaatggtgactgtaataaataacaaggtattgtatgtttcaaaatgactaacagagtagattttaaatgttttcaccacaaaaaagatatgtatgtcaataagatagacctaatctttccacaatttaaacatgtatcaaaacattacattgtaccccataaatagatacaattattatttgtcaatttaaaatttttcactaatttatattgttattgttgcaccaactcctttccaccaggcagattctcataaagactattttctcttttacatgaagcatttcctacacacctcttaatcacggtagcattgacrtcattccaccagattctatctccagtgttaaaataatcaagaacccagaaatctccaccagggggcaaccaatgcgtatcaaagtttcccactttcctttagatttacttatgggtaacttatgggaaaaaatacttaagtacttccctttttaaagaaaaaa

SEQ ID NO: 657380 - DNA, 613 bp, Homo sapiens
acaagcactaaataaatgaacaagtgaataaatggatattgtctcatttttagaacagagtactgaatggatcatgaacactatctggtatgtcacgtaggtaatttacaagggctacamtttcagctcagatttaccttttcctggatacaggtcttgataggtctcttgatgtcatttcacttcagattcttctttagaaaacttggacaatagcatttgctgtcttgtccaaattgttactaagaatcaagagagatatctgacatgaaatgacattggaaaacattaaacaccattgaaataatgctagccaatatggttattattagaaaccaattacattttcaacttaaaaatagtaatacttattgcagactcaaatgtgcttattctaaaacaagtaaatgtttgcctatggtctgagattctaatccacggagttcattctaatccacattcaacactatcatgtaccagtgggcctcataacccacctagccctgtgatttttcaggttcacttttctaaacttgtgaattaaatatttattttcttagttcagaagaggaaaaaaactcttgtaattgttgcccatttcaggagaaatctt

SEQ ID NO: 657381 - DNA, 613 bp, Homo sapiens
acaagcactaaataaatgaacaagtgaataaatggatattgtctcatttttagaacagagtactgaatggatcatgaacactatctggtatgtcacgtaggtaatttacaagggctacactttcagctcagatttaccttttcctggatacaggtcttgataggtctcttgatgtcatttcacttcagattcttctttagaaaacttggacaatagcatttgctgtcttgtccaaattgttactaagaatcaagagagatatctgacatgaaatgacattggaaaacattaaacacsattgaaataatgctagccaatatggttattattagaaaccaattacattttcaacttaaaaatagtaatacttattgcagactcaaatgtgcttattctaaaacaagtaaatgtttgcctatggtctgagattctaatccacggagttcattctaatccacattcaacactatcatgtaccagtgggcctcataacccacctagccctgtgatttttcaggttcacttttctaaacttgtgaattaaatatttattttcttagttcagaagaggaaaaaaactcttgtaattgttgcccatttcaggagaaatctt

SEQ ID NO: 657382 - DNA, 564 bp, Homo sapiens
gtttctattgaatagaatagaacaaaagaaatgagatgccacttctgagattagattataagatactgtgaatttcwtcttgtgccctctccctctctctctttctcttgccctctcatttgaatgaagccaaccggcatgctgtcagtggcccagtgtaagtcctgttacaagaaattgatgattacctgtagccaaccctaagtgaagaactgaggtcctcagtcctacaaatggagagaaactgaatctagctaagaaccatgtgagtgagctgggaagaagatccaccctcagttgaaatttaagatgacatattgagcagacatactgagacacactgaaagtaagagagcaggaggaaacaaaaccagggtcatacaaagaacacaactgattttgagattctcacataagtattacaccttcagtgagcacgtgtactagaaatttaaaaaataaataaaataaaccttcaaagtgagctagcaaataaatttccctatggtctcagctctgagtggagagagaaaatgttccctgtggagtttatagccagaatcc

SEQ ID NO: 657383 - DNA, 508 bp, Homo sapiens
agacctttcagaaattcctataagcttgggttctgtgcccacactctagactgtcaggctaagatctctgatataaaacagacctcttctgatttttgtctagctgcttttctaatatctattcaccaagctcttccaataatagcataaggccctaattaatattaaacttttatcattataatacataggatgtcttctgttttcctgatcaaattctgactactattaaaatataaagaattgtccagaaatatataaaaaaagaatcacacattgatcttctttaaatgaaaatataacaattgtatggactaggatgattacagttgttcagttctgactgttatttgaagaaaaaagcartaagaagcctcagcaacttaacagaaggagctgccatttactaggagaaaagattgtggatgagagtgtagcaaaggtcagaattctgtgaagcttgagatgtttattataatgaattatcttttatactcactacaatttc

SEQ ID NO: 657384 - DNA, 604 bp, Homo sapiens
aagcttgtttcaatagttagagcaatctacaaatgtaattcattacattaactaattaaaggagctaaatcacatcaccaccacaataatgcagaaaaccacatttgatacaactcaatattcatgtctgcctaacaaacatctcatgatactaggaaaagaggaagggatatattattttcatgtataaagcactaaccattgtagcatgccaatatactcaaaattcaatgaaattcctatcaaaatcttagcattcctcttagtcctcaacaaagcatttctaaaatgtgtatagaagaccaaagggccaaaagagtcaacttctgaagaagcgcaaaaagaaagttgaggaaatcttaaaacatgttattgagcttaaagttgcaaaaataaactcatgtaccataattsatgagtagaaaaatagactagtggaataacataaaaataaaaacaatgcttacataaaatgttgtaactgatttggatgtcattagaaatcagtaagtaaatagatggacaatgtaatgaaagatgctaggcaaataatgtggtagggagaataatggccctcaaagatgcccatgcctaaccctggaac

SEQ ID NO: 657385 - DNA, 612 bp, Homo sapiens
attaagaggaaaatcacatggaaagttatatattatatatctattatatataatattatatatctattatatattatatattgtayatctattacatatatattatatatgtattatatatattatatatctattatatatataatattatatattatatatcatttccaaattccccagcgttcatatttgtcagtgcaagtaaagagccttactgctgatgaggtttgaggtatgaccatttggccagaatttatgaactctacatgtcgcttgatgtgtgcctcagggtatacttttttttttttttgagacggagtcttgctctgtcacccaggctggagtgcagcggtgcgatctcagctcaccgcaagctccgtctcccgggttcacgccattctcctgcctgagcctcctgagtcgctgggactacaggcgcccgccactatgccctgctaattttttgtatttttagtacagacggggtttcaccgtgttagccaggatggtctcgatctcctgacctcgtgatccacccgcctcggcctcccaaagtgctggaattacaggtgtgagccaccacgcccggccagggtacacttttaagcagag

SEQ ID NO: 657386 - DNA, 612 bp, Homo sapiens
attaagaggaaaatcacatggaaagttatatattatatatctattatatataatattatatatctattatatattatatattgtacatctattacatatatattatatatgtattatatatattatatatytattatatatataatattatatattatatatcatttccaaattccccagcgttcatatttgtcagtgcaagtaaagagccttactgctgatgaggtttgaggtatgaccatttggccagaatttatgaactctacatgtcgcttgatgtgtgcctcagggtatacttttttttttttttgagacggagtcttgctctgtcacccaggctggagtgcagcggtgcgatctcagctcaccgcaagctccgtctcccgggttcacgccattctcctgcctgagcctcctgagtcgctgggactacaggcgcccgccactatgccctgctaattttttgtatttttagtacagacggggtttcaccgtgttagccaggatggtctcgatctcctgacctcgtgatccacccgcctcggcctcccaaagtgctggaattacaggtgtgagccaccacgcccggccagggtacacttttaagcagag

SEQ ID NO: 657387 - DNA, 612 bp, Homo sapiens
attaagaggaaaatcacatggaaagttatatattatatatctattatatataatattatatatctattatatattatatattgtacatctattacatatatattatatatgtattatatatattatatatctattatatatataatattatatattatatatcatttccaaattccccagcgttcatatttgtcagtgcaagtaaagagccttactgctgatgaggtttgaggtatgaccatttggccagaatttatgaactctacatgtcgcttgatgtgtgcctcagggtatacttttttttttttttgagacggagtcttgctctgtcrcccaggctggagtgcagcggtgcgatctcagctcaccgcaagctccgtctcccgggttcacgccattctcctgcctgagcctcctgagtcgctgggactacaggcgcccgccactatgccctgctaattttttgtatttttagtacagacggggtttcaccgtgttagccaggatggtctcgatctcctgacctcgtgatccacccgcctcggcctcccaaagtgctggaattacaggtgtgagccaccacgcccggccagggtacacttttaagcagag

SEQ ID NO: 657388 - DNA, 612 bp, Homo sapiens
attaagaggaaaatcacatggaaagttatatattatatatctattatatataatattatatatctattatatattatatattgtacatctattacatatatattatatatgtattatatatattatatatctattatatatataatattatatattatatatcatttccaaattccccagcgttcatatttgtcagtgcaagtaaagagccttactgctgatgaggtttgaggtatgaccatttggccagaatttatgaactctacatgtcgcttgatgtgtgcctcagggtatacttttttttttttttgagacggagtcttgctctgtcacccaggctggagtgcagcggtgcgatctcagctcaccgcaagctccgtctcccgggttcacgccattctcctgcctgagcctcctgagtmgctgggactacaggcgcccgccactatgccctgctaattttttgtatttttagtacagacggggtttcaccgtgttagccaggatggtctcgatctcctgacctcgtgatccacccgcctcggcctcccaaagtgctggaattacaggtgtgagccaccacgcccggccagggtacacttttaagcagag

SEQ ID NO: 657389 - DNA, 539 bp, Homo sapiens
atgaccacctgtgcccagccccctattattattattttaaataatagctttattaaaatattcacataccattcactttatttattgaaatctgcaattcagtaggttttagaatattcacagagctgtgcatcgatcaccacagtcacttttagaacctttcattaccctatagagaaatccataccccttagccactacctcctactctccccacctacctttgcccccagccttaggcaaccattgattaattttcttgtcactatagatttgcctaatctggacaaatagaattgtacaatatgtgatcttttgtggctytttttccctcttagcacagtgttttcaaagttcctttatgtcatagtgtgtatcaatatttcattccttctatggcagtattccatggtagagacacactgcattttgtttatctgttcatcagttggtggatatttgggttgtttccctgtattccatgtattggtcattatgaataatgctgctatgaagattgttgtacaagtttttgtgtg

SEQ ID NO: 657390 - DNA, 435 bp, Homo sapiens
aagtcacttttcagagtagtaagttagtgacctagtaaccttccctctaatgaccagtagtttttttttctgaataccattatgaactcatagwttattgtttgcatttgatgtatttcaggccattgcagtctttattgttttggatgcttacattgtctcatctaggttaataattatctcttcaagttgactttcatgtctttttgacgtgatcctgttggactttgatggcttccttgctttctggcaaaacagatgttccaggatcaatatactgcaccatacatggagtcagccgtttctctagggaaccttgattccttttagtagagaacacagtttgaggtcttggactgaatgacttttgtgaacctcctctcctgagactacagcctgcatccctgcatatagcccgtttggagctcttgctgg

SEQ ID NO: 657391 - DNA, 434 bp, Homo sapiens
gaattccccctgattttgagtgtgaatgggtacaaaagaccaggggttgttaaccaaaagcctggaacattcaggtgaatggctgttctgcagggaaggagggaaacagcagggggagatggatggtcaaccttcaaaggccttacacagtcccggccaggataatcttcgcctctcccttctrctggggaaaagtctggattgctaagaccagggtctctatagtggcatctccaacactcaggccgagcttcatggctgggttcctgttttttcatttgctcatgcccctcagtggtatcatctgactcagctcctttccctcctgttgggccagtacttacagtgggtctcctgatgaagctgaggtcatgggttcatgagcccaattatcaccatgctgaccgcaccactaacctggctccgtgtagttg

SEQ ID NO: 657392 - DNA, 508 bp, Homo sapiens
gcaatttcataccatccttgaagttagagagagccacatgactcatttagccaatgaactgtgagcagaatgacatgtcacttccagcwgaagctttaagaatctgagagacattcatacgttttccatgtgctgtagccttatacccaaagcctgggtcccaagtgaccatgacaggcagagctccctgttgagccacagagatttagagaatggctgttaacacagcataatccagcccatcctgactaatctgatattaacatgtataataaagaattctatcaatgctgagggaagatgattagttaaggtcctaggttgcaagtctcaaaacctcttctaaggattgtagacaggaaattaaatgacttctagtccctagagttcccaatctcctaccatcccatcctaatatgacagaagtaattcttgagttgcttctgaaaccagagcttccctcagaacccttagcctgccagatggcttcttggagagccctcactca

SEQ ID NO: 657393 - DNA, 508 bp, Homo sapiens
gcaatttcataccatccttgaagttagagagagccacatgactcatttagccaatgaactgtgagcagaatgacatgtcacttccagcagaagctttaagaatctgagagacattcatacrttttccatgtgctgtagccttatacccaaagcctgggtcccaagtgaccatgacaggcagagctccctgttgagccacagagatttagagaatggctgttaacacagcataatccagcccatcctgactaatctgatattaacatgtataataaagaattctatcaatgctgagggaagatgattagttaaggtcctaggttgcaagtctcaaaacctcttctaaggattgtagacaggaaattaaatgacttctagtccctagagttcccaatctcctaccatcccatcctaatatgacagaagtaattcttgagttgcttctgaaaccagagcttccctcagaacccttagcctgccagatggcttcttggagagccctcactca

SEQ ID NO: 657394 - DNA, 425 bp, Homo sapiens
agtgccccagaatggagctagttggaagactgccgtcatagggatgccttagtgaatyaatcaggttttaatttctggctctcaactttgtagatgtaaaagttgatttatcaatatgtgagaaaggatgaatctttctgaaggttatgtcatcacactcactaagcacacagagaataatgtctagaatctgagtgccatgttatcaaattatactgagactcttgcagtcacacgggctgacatgtaagcatcgccatgcctagtacagactctccctgcagatgaaattatatgggatgctaaattataatcagaacaatgtttggtgagccaaaactacaacaagggaagctaattggatgaatttataaaaatatacctcagccaaaatagcttaattcagtctcccttatcataaggat

SEQ ID NO: 657395 - DNA, 583 bp, Homo sapiens
gtgtgtgtgtgtgtgtgtgtgtgtgtgtgtgtgtgtgtgtgtgtgtgttttcaggttgacatgggcctgtccagtttgccataggaatctgaagttctcaccctttggagtttccactaggggttaaagccttggtctaggagactataagtaaaatgaatgacagtgacacttctataatcctgtgtgactttgagaatatgttaagagtggtataacagaaagacaaaagagggctggcgagttgatgacaatgtgcagctatctggactgaccatctccaagttgttgttgaagagagttcacgtttatataaatactacctatctacaaattscatcaagcctaagaaggcgtgaattgtggtttcctgcaagtagaactaggctggggtgcagtagccccagctgtgagttacttctgggctgtgagttacttctgtgaactctgactttggtcatgctactcccattttctgggccttaccttccttgtctcccaaatgcagcactttgtctaaattaacattaagtatccttgtgtctctaaagtctcatgtaaacactttattggactagctaat

SEQ ID NO: 657396 - DNA, 604 bp, Homo sapiens
atgatcacaaggtcccacaataggtcatttgcaggctgaggagcaaggagagccagtctgagttccaaaactgaagaactaggagtctgatgttcgagggcaggaaggacccagcacaagacaaacatgtagactgggagactagcccagtctctcttttcacatttttctgcctgcttatattctagctgtgctggcagctgattagactctgtccacccagattaagggtgggtctgcctttcccagcccattgactcaaatgttaatctcctttggcaacaccctcacagacacacctaggatcaatgctttgtatccttcaatccaatcaagttgacactcagtatcaaccatcacaaacactaacctagtatttaaattattcagtcctaagatgagatcaaggaattttaagacaatcaaattctgagaagtatgttattataaatagatttctaagattcyattatgtaggacaggtccctatcacactgtggcatctaaaaagctaccaagtctcaattttgtatcaggcacctgactaagagctggctatattttgataaaccaatcagaaatggcctcttatctagtagagttt

SEQ ID NO: 657397 - DNA, 604 bp, Homo sapiens
atgatcacaaggtcccacaataggtcatttgcaggctgaggagcaaggagagccagtctgagttccaaaactgaagaactaggagtctgatgttcgagggcaggaaggacccagcacaagacaaacatgtagactgggagactagcccagtctctcttttcacatttttctgcctgcttatattctagctgtgctggcagctgattagactctgtccacccagattaagggtgggtctgcctttcccagcccattgactcaaatgttaatctcctttggcaacaccctcacagacacacctaggatcaatgctttgtatccttcaatccaatcaagttgacactcagtatcaaccatcacaaacactaacctagtatttaaattattcagtcctaagatgagatcaaggaattttaagacaatcaaattctgagaagtatgttattataaatagatttctaagattctattatgtaggacaggtccctatcacactgtggcatctaaaaagytaccaagtctcaattttgtatcaggcacctgactaagagctggctatattttgataaaccaatcagaaatggcctcttatctagtagagttt

SEQ ID NO: 657398 - DNA, 428 bp, Homo sapiens
acctatatttagatttttgacagtttcatacgcaccagcaatctctcttctcaccttctccctactttggctcatcaactgataaagagtgacaggcagagarggtgataagctgacaagatagcaccatgcttgtgcgtgtgtgaatgcatgtgttggtatgaaagagctgccatgtgaagcagattgttttattaatcctacaagaaagtgaccagggttgaggtgtctgagtatcggtggctactgcaaatagctcccattatggcacttgtaggtgtccataccccgttcccacctgcagctctttggccaaggaagagggaagtgctggcgattcatcagtgcactgagatgtgtaagtccaaaaatacctcaggcctgagaacagatgctcagcttagacctgggaaacagaatggttgcta

SEQ ID NO: 657399 - DNA, 634 bp, Homo sapiens
gtccttcctaactgggctgtgggatatctgagtgcataccagtgtattcaatgcttaaagaacgcttttgtggtttcttcagggttccctacagggtatttctctcctacagctctctagcagaggaggtgcatctctatccagatgacaaatgcacactgagaagaaatgcaggaagtcagcctgaagggctcaagtacatggcaataggtggagttgcaagtgaggactcaaccatatgaaatggggctgtgtaaagagtgggagacagcaatgggggtgctgtggctcagggactgggaagaggctcaactatccaatgcgctctaacataaggtcttaatctcagtggggggcttccccagaagcagacattgagaggaaaattcaaaggcaagcagtttacctggatgtttcctgcaataccagcagggaagttgggatgttatataaggaagggaggcagcctataaggcatgcattgttatatcaactaagtggtggacaactgaagcttcatcccatgggagagccaggagaagcagtgtggaacacactgcagagctagctaacctgaggggcaagggacmtggggaactcacacactgtctgctgtcactcactggctgagttt

SEQ ID NO: 657400 - DNA, 583 bp, Homo sapiens
acatgggattctgatttttcaggtgatctgttaatccctgaagtgcatctggaggttagcccatcggttctgcaaatcttcataatttccatagttactgtagtaaccatggttagtayctttcctttgtccagcaggtgggaatttcggtcttttactgctctctgtcagctgtcatgacatgccacatgagttgagtttattcacaggttttccatgtgacccaaagtacattttgtaggttaatttcttggaattcttaccttttgttgggcggtttcctcattcagtcagaatctgcttacatctccacagacacttcaatctttcttatatacctgctcattgacaagcctacatttgccaatatctggttattctattcataaaacaggtttttcatttcactcttacatttgccatgacagtcatgattgatcaactaattccttgcctgtgtactcacagtcatgtgatcagtcactctttatcaaacatctaagtgccaggttcattgctcagtactgtacatatattatctctaattttctcagcaaaacagtataataagtgctgtttcctc

SEQ ID NO: 657401 - DNA, 624 bp, Homo sapiens
tttccttctgcattgattgcatctgtgataccaccttttggtagtacccattactatctattggcaaaataagagcatatatgtgaagatgtcagtaacggaaagaacataaggaaatcatttggtaaacttgactcttatcaagtaaaagtggactgcagaagcctcatttctttacatttagtgtcttgaaatcagactatattggaaacttcataaggagtatgtaaactttgtaacccattattatgtttgttatctcattctctgtagtgattagattaacacctttaatctgaaaatggcctacatgttatctcagatacaaccaggaaatggraagttgaggagattggcccactctgcttttagatgttgttttttgtttagtggaaagggtagagaagaaccccaagatattttaaaatgtagtttcattgtctaatagtctagcgggtagtgacagatactgaaagcaagctgaatccttaaagtgtttttatgatccaagagtgtaggttgctggctgggtcttgagaaaggctcatgtacttggaaatagaaaggcctattggcttctatgaaagtaaaacatttaaatttgaaaccaaagcttatttaggt

SEQ ID NO: 657402 - DNA, 548 bp, Homo sapiens
gatatcctctctagctctaatctcaactcttttctttcacttgtgagacaagttttcttaaaagaatagtttgcacttgctatctccacttcctcacttctcacacgctcctcaatgcttgcagcctggcttccactggaattggttttgtctagggcacaacgatctctatattgactgggttatggcatgcttttcagttcatatcctgctggacttctctgctgcactgggctctgttgatcacttactccttcttgcattctctactaccctggcttccatggcaccattttctccttgtactacatggacttctcttgatcccttaatagcttctcttctcttccccttaaacactagtgttctctatagttatagccttgccyctgtactcctctttctttacacaatctccttcatgagcttatttgtctgtttaatttttgccactataactctgtatttaagagtcccaaatcatatccccaaccctaaccatgcttttgagcttcacattcaaatatcaagcttcataccagacatat

SEQ ID NO: 657403 - DNA, 548 bp, Homo sapiens
gatatcctctctagctctaatctcaactcttttctttcacttgtgagacaagttttcttaaaagaatagtttgcacttgctatctccacttcctcacttctcacacgctcctcaatgcttgcagcctggcttccactggaattggttttgtctagggcacaacgatctctatattgactgggttatggcatgcttttcagttcatatcctgctggacttctctgctgcactgggctctgttgatcacttactccttcttgcattctctactaccctggcttccatggcaccattttctccttgtactacatggacttctcttgatcccttaatagcttctcttctcttccccttaaacactagtgttctctatagttatagccttgcctctgtactcctctttctttacacaatctccttcatgagcttatttgtctrtttaatttttgccactataactctgtatttaagagtcccaaatcatatccccaaccctaaccatgcttttgagcttcacattcaaatatcaagcttcataccagacatat

SEQ ID NO: 657404 - DNA, 548 bp, Homo sapiens
gatatcctctctagctctaatctcaactcttttctttcacttgtgagacaagttttcttaaaagaatagtttgcacttgctatctccacttcctcacttctcacacgctcctcaatgcttgcagcctggcttccactggaattggttttgtctagggcacaacgatctctatattgactgggttatggcatgcttttcagttcatatcctgctggacttctctgctgcactgggctctgttgatcacttactccttcttgcattctctactaccctggcttccatggcaccattttctccttgtactacatggacttctcttgatcccttaatagcttctcttctcttccccttaaacactagtgttctctatagttatagccttgcctctgtactcctctttctttacacaatctccttcatgagcttatttgtctgtttaatttttgccactataactytgtatttaagagtcccaaatcatatccccaaccctaaccatgcttttgagcttcacattcaaatatcaagcttcataccagacatat

SEQ ID NO: 657405 - DNA, 601 bp, Homo sapiens
cacccttgggtatatggaagttgccacgctcggtagcaaacaggggctgcttcagtgtctgtctcctgtcgggttagtgttctatcaagcctgtcaattgcaacttattttgtgttatgagacaagctggcacattgtataaaggtcaagtggaaaactgtcccttctgctacatcgctgtcatcagctactaaaggtcattccacccaatacatggctgtgacggaaaataactttgtttgtctactgtgacatatgaaaaagtccttctgctgtgagctttttggtttctctctactctcaacaggcatcaaattaggtgcgctaaggttatctaagaaaatgattatctaagaaaataatcagttcgcaaatacatttgaacaaaaaaacacaaagagattaaaaagcctatctctagcagatctaaaatacctaaatattttaccrgtgagtataatttaacaaacattcattctgaatgatacataacccaaatatttagcatgcaccatctcatttaattctccaaacaaccctattatcccattttatagatagaaaaaataaagcttagaaagaataatttgtccaagcttat

SEQ ID NO: 657406 - DNA, 627 bp, Homo sapiens
cttgctatgttgctcaggctggtctcaaactcctggactcaagcgatcctcctgccttggcctcccaaagtgttgggattacaggcatgagccactgcaccctactggcatctccattctgatgggaccgtgtcaggcatcttaaactgagtgtatgcaaaacagcccagcctcaccctgacctccaaacttgactctcccccaaggttttctctacctctgagcaacccccaacctcatgcacagccagttgtaaccccaagatacagtcagtccccaaggccctcaaattttgtctcaggtgcatctcttccatttcatttttacttctgctgtactaaaaaataataaaaataacagtaaataaatatatagagatgcttcttaaatgctgggaactgtttcaagcattttgcatatagcaatttatttaactggwttattgttattgttattattactaagccaatccaaaacccaaatttgtaaaaggcagaattgggatttgaacccaaggaatcgggctcagagcccatgggtatgaacaccatcctgtactgccccctgcatgttcccagcctagaaaccaggacagggacccctacagagcacgtagctagcaggagg

SEQ ID NO: 657407 - DNA, 627 bp, Homo sapiens
cttgctatgttgctcaggctggtctcaaactcctggactcaagcgatcctcctgccttggcctcccaaagtgttgggattacaggcatgagccactgcaccctactggcatctccattctgatgggaccgtgtcaggcatcttaaactgagtgtatgcaaaacagcccagcctcaccctgacctccaaacttgactctcccccaaggttttctctacctctgagcaacccccaacctcatgcacagccagttgtaaccccaagatacagtcagtccccaaggccctcaaattttgtctcaggtgcatctcttccatttcatttttacttctgctgtactaaaaaataataaaaataacagtaaataaatatatagagatgcttcttaaatgctgggaactgtttcaagcattttgcatatagcaatttatttaactggattattgttattgttattattamtaagccaatccaaaacccaaatttgtaaaaggcagaattgggatttgaacccaaggaatcgggctcagagcccatgggtatgaacaccatcctgtactgccccctgcatgttcccagcctagaaaccaggacagggacccctacagagcacgtagctagcaggagg

SEQ ID NO: 657408 - DNA, 614 bp, Homo sapiens
taggtgtgagtcaccatgccaagccctattatcgtattttttaaataaaaaaaaatcgttttattagaaaatgttcagtttatgtctccataatattatatttaaatttaaaatatctggtttaaaataaatgytatttgtataacatggagtgcaatggaaaatgagtatgctatatcaaaaagaagtacatcaggggcagaatgtaccgaaacattttggtagcttcaaatgagggtaatctgtgtctgatatgatacattctcaaataagttgatcttgtataagtctatgaaatgccattccaagaaaacagaaaagctttgctgtagtatatgttgtacagtgagcatgcccccaaattcctttgttttatcaactagaggcatattccaaatatattaaagaagtgcaaatattttgttttgatttcactgaaagaactcactgaggtcttttaagtagtaaaataataatctggattatgtcactgcataataagtgaaaagtattaatgagccatgttctctccatggctatatgttacacaataaaaatggcagttagtgctggagcagcactagagtaacgccgtatatggttccccggtgttc

SEQ ID NO: 657409 - DNA, 492 bp, Homo sapiens
gaattcccacagcttgaagggcatctccaggtggaatttggtgccggccttgaaatactcggggtcgactgagcaatgccaccatctggtggtcagacaaagaactaaggaaagcagtggcagctctccatttgtgggtcttaccagttgagcaaccttttaaatctattccaggaggctctacttaaggtacagccatactaaatgttgtaataaagaatgtttcgtaatgagaataaccactctayagtggattaaatatggccacaaattcctggaagcccctcccattaagacatgagtctatttccctatcctttgaatctgggctgggctcttgacttgctttgaagcagaatgcacaggaagagatgctgtgtaacttccaagcctctacctcaattggcctcagagtttgcccctcaccctcttggaagactgccactttgtgaacaagcccgcaccagcctccttcagcatgagattctagtg

SEQ ID NO: 657410 - DNA, 582 bp, Homo sapiens
ttatagctcataaacaaatagcaaagatgcaggatacaatatcaactcataaaatcagttgcatttttacacactagtaattaacaatccataaagaaaattatgaaaacaatttcatttataatagcatcaaaaagaataaactaggaataaagcaaggagatgaaaggcttctacactgaaaactacaaagcattgctgaataaactcaaagaagataaaataagtggaaagacattccatgttcatggaytggtagacttaatattgtaagtgacctacaaattgaatgtaattcctatcaaaatcccaataacattattttcagaaatagaaaaatttatcctaaacttcacatggaatcttaagggacaaatcccaaatagccaaagaaatcttgaaaaagaggaacaaagttgggaaatgtatacctcctgatttcaaaactaactacaaagctacagtaatcaaaagagtgtggtactggcataaggacagacatagagcagtagaatacaatagagaacccagaaaaaaaaatctttacatatatgatcaattttcaacaggtgtaccaaggcc

SEQ ID NO: 657411 - DNA, 538 bp, Homo sapiens
aagcatgcacatatttgtatatagtatgcatacgtgatatagatcataaaatactcatttaatcaaaataacacatctctcgaacatcgtaaggaaaactgtgatattctttaaaggtttttcagagtggttttggagtattgggagccatacatttggaagtttaattttctgtgatataaaaatcaatccaggtccttttcttggatttgtttcttgtagacaaggagttctctggccaaggctgttttattttgaattatacatacgagtattccctgttctcagatgcatcattccaattagaaacttttatagcataaatttgactatgataaagattataaacaaatggttaaggatttcttctacccttttcatgattaaaaaggtctggatagctcctgcaacagctttaagaaaatctccaaggagacaaacttaaagtgatgactgaaggttgtagggaaacctactgttttctctactgggtcaggggctttatamatagttttcaaaaattatcctgtctgccaaa

SEQ ID NO: 657412 - DNA, 569 bp, Homo sapiens
ggtttggagcaacagtgaaagctcacaaaggaaaagttgtggtgagtatgagccrtgggcttgtgctgctgctttggagtatggtgtgcactggaatgttttcaagctcatgtttaggaaagctctttcctaaaggaacatgttagactttcaacgataaggctgttggcattttaaaagcaactaaatgcttaaaattaaagaatgtattttagtgtttaaagctataggaaataaagcctgttttccagaagagcagttaaatattttcaaatatttcaaaaacaactaagaaaagtaaaagctacatcttaaagtggtaaaatattatagtgcttaagactgacttaggggctacttaaaatctgaccagaaaaatgggactattcccataaggatgctaagttaatctgctgtggtttcattgatcctttttacaccgaaaggaaagctgtctttcataataatttttaaacggctaactgcatgattctctgagttcattaatactttttaaagtaaaaacactcattctcaaatagataatctttcagcttcaaagtgctatg

SEQ ID NO: 657413 - DNA, 631 bp, Homo sapiens
cctgccaccatgcccagctaattattattattattattttgtatttttagtagagacggagtttcaccatgttggtcaggctggtctcgagctcctgacctcaggtgatctgcccgccttggtctcccaaagtgacttctatttccttaatattttgttctaggaacagagcggaaagctgccaggtttgggccaacaaagcgaataaagaagctgaaaacataatgggatgtcttccttagagagctaactcctcggcagaccctgtctccccagctgggtaaaagctgwgctttgttgtgctacatcccaacgattctcgattagctttggccttctctccggcataggctaagatcccacagaacattaaattggctatggaaggaatgtccttggacgcatacagactccaagagaatacaacttcccatgcattttaaaagcccaatcacatcactattatcttcactcttggttgctagctattgagaataaaactgtgcttttaaatctagttagtagcatgtgatatactgaacacaggcaggctgatgtcttccctctcacattattataatctaatggtattctgcggtcccacaaaaagaacaaatcttcatcacagcaa

SEQ ID NO: 657414 - DNA, 554 bp, Homo sapiens
caatgtgattttatttgctataccaaagggatattaatggagtcccagagtgcctatactttgtagaaaaaatactttgatacagcattttaagtctgaaagaattttgtaagaatgaatatcaactttataaaatctagttaagcaataaaatattagggccataatcccatgttatgaatgaaaaatatagatgactaaatgccatactgttagtgacagatcaaatttgtgaaattaagatcccttcatttctagtacctctcatattggacatgtccaaaattactctccccaacsaactccaatccaacaccccaaccttacttgctttttcctcttttaacataccaaaaccccaaataacaaaacaaacgaatccctatctcctgtatatcccttctgtcctgtcttctctgctttgctgtggctgttgtctaccagggctgatggacatgaaataatgaacacagaatacctaattaaattatgataagtgctaggataaaattctaaacatagagtaagaaaagctgtggtgttaagaaaacgga

SEQ ID NO: 657415 - DNA, 554 bp, Homo sapiens
caatgtgattttatttgctataccaaagggatattaatggagtcccagagtgcctatactttgtagaaaaaatactttgatacagcattttaagtctgaaagaattttgtaagaatgaatatcaactttataaaatctagttaagcaataaaatattagggccataatcccatgttatgaatgaaaaatatagatgactaaatgccatactgttagtgacagatcaaatttgtgaaattaagatcccttcatttctagtacctctcatattggacatgtccaaaattactctccccaacgaactccaatccaayaccccaaccttacttgctttttcctcttttaacataccaaaaccccaaataacaaaacaaacgaatccctatctcctgtatatcccttctgtcctgtcttctctgctttgctgtggctgttgtctaccagggctgatggacatgaaataatgaacacagaatacctaattaaattatgataagtgctaggataaaattctaaacatagagtaagaaaagctgtggtgttaagaaaacgga

SEQ ID NO: 657416 - DNA, 568 bp, Homo sapiens
gccactcagtttgttatgccagcgctagcaaataaatagttttctagctaggaagtcttactaccagtggctagatcctcagcacccctctcccaaccttccagattgcccgggaatgccttcaggagactccttaagatggacctcagggatgcagatgccttgccttctgcactgcagcctctgaattgcttgctactttcttacttgtgcasagcaagggggcataattacccattggcaagtgcttctggcctctggacttcagggacctagacgttcaaagcctgctggaataaaagaacttcctaaggttcagaacacaacctaacaccagcattcagggaaacaacacaaagacttgtccatgatggttacagccacccaaaaaagccatcttcatatatgtgtagtttcaatagtttccattggtcttctggtgacagtgcattcacccaaacacactagcacactaggtgtaccatccatctccatagaagagtgggacatagccgctgatggattctttgtgaggccaatccaagacccccatatgctattactatat

SEQ ID NO: 657417 - DNA, 576 bp, Homo sapiens
tttcttaaaacttaaatagattcagtctctgatggactattctaacaagactctgcacaggtaatatcctggtcttaggtgtctgccatcttctcatgtagaaaatcttggactgcctttgacagttgtaattacaaatgactattgtttactaattcatctagctacttagaagccacaaactttcatttgtggctatttcatgttctacatagcagtggatcttgcatgttttgtgaacatggcacgtagtcacttgttcaatgaatgcgtgatctgcaattgaggagacaagctsttctagaatcagaaaacagcaattccttgcaagacaaattattcctaagaggaattttcatgtcacttttcacatatagacattaaaataagcttcttcccttgggaatcatttaaaagagaaagcaaatttgaaatattcttaggttttcttatagctaatcaacacatcataggaaaacaaatagtgcttcctagactagcatcacacaaaaagtagttagaacttatgtaatgaactcattatacatctgtttttaaaaggatgaaaccagttcc

SEQ ID NO: 657418 - DNA, 576 bp, Homo sapiens
tttcttaaaacttaaatagattcagtctctgatggactattctaacaagactctgcacaggtaatatcctggtcttaggtgtctgccatcttctcatgtagaaaatcttggactgcctttgacagttgtaattacaaatgactattgtttactaattcatctagctacttagaagccacaaactttcatttgtggctatttcatgttctacatagcagtggatcttgcatgttttgtgaacatggcacgtagtcacttgttcaatgaatgcgtgatctgcaattgaggagacaagctgttctagaatcagaaaacagcaattccttgcaagacaaattattcctaagaggaattttcatgtcacttttcacatatagacattaaaataagcttcttcccttgggaatcatttaaaagagaaagcaaatttgaaatattctkaggttttcttatagctaatcaacacatcataggaaaacaaatagtgcttcctagactagcatcacacaaaaagtagttagaacttatgtaatgaactcattatacatctgtttttaaaaggatgaaaccagttcc

SEQ ID NO: 657419 - DNA, 544 bp, Homo sapiens
agcaactaccacgtacctctggtcgaagtaggtctcctcagcaatacttgttgaaatatttaactttatggaattgtataattacatrttctgaaattcccttgttttaagtttacaatctaatgatttttaataaatttactgagttatgtaaccatcaccataatccagtttgggaactttttatccccccaataggatcctcattctcatttatggttaatccccatttccgtcccaagccctgggccaccagtaatctacttcctgtctctagagatttgatttttgtggatattttatataagtggaaacatacaatgggtttttgtgtctgacttctttcaatgaacacaatgattttgcatcttatccatgttattcacatatcagaagtccactccattttattgttgaataatcttcattgtatgaatgtaccatattttgtttctctattcaccatttcatagacattctggttgtttgcaccttttggctattattaataatgctgttatgaacattgtgtacaaggtttttt

SEQ ID NO: 657420 - DNA, 544 bp, Homo sapiens
agcaactaccacgtacctctggtcgaagtaggtctcctcagcaatacttgttgaaatatttaactttatggaattgtataattacatgttctgaaattcccttgttttaagtttacaatctaatgatttttaataaatttactgagttatgtaaccatcaccataatccagtttgggaactttttatccccccaataggatcctcattctcatttatggttaatccccatttccgtcccaagccctgggccaccastaatctacttcctgtctctagagatttgatttttgtggatattttatataagtggaaacatacaatgggtttttgtgtctgacttctttcaatgaacacaatgattttgcatcttatccatgttattcacatatcagaagtccactccattttattgttgaataatcttcattgtatgaatgtaccatattttgtttctctattcaccatttcatagacattctggttgtttgcaccttttggctattattaataatgctgttatgaacattgtgtacaaggtttttt

SEQ ID NO: 657421 - DNA, 593 bp, Homo sapiens
ggactgaaatgggtgggagtggggttcaggagaagcccagatgtttgattatactccactgcttcaagggagtgttatctccctgagcaacctgtggaatgccgctgagctgttatgctctcagggtataaagacatgaaggcaataaggagacttttctgctcagaggccacccatggcttcccatgggtgtctcatacaggggagaccaactcaagtggcaccctagaaactctttcccacactggccaacagggtgaaacccygtctctactaaaaatacaaaaattagccgggcatggtggcacaagcctgtaatcccagccactgggaggctgaggcaggagaattgcttgaacccaggaggcagatgttgcagtgagccaagctcatactactggactccagcctgggcaacagagcaagactctgtctctaaataaatacataaaataagaggaattttggaaactatttgaaaacatggaaattaaatatatgctccttaatgaccagtgggtcaatgaagaaataaagaaggaaactgaaaaatttgctgaaacaaattataatggaaatagaagacacgaaaa

SEQ ID NO: 657422 - DNA, 593 bp, Homo sapiens
ggactgaaatgggtgggagtggggttcaggagaagcccagatgtttgattatactccactgcttcaagggagtgttatctccctgagcaacctgtggaatgccgctgagctgttatgctctcagggtataaagacatgaaggcaataaggagacttttctgctcagaggccacccatggcttcccatgggtgtctcatacaggggagaccaactcaagtggcaccctagaaactctttcccacactggccaacagggtgaaaccctgtctctactaaaaatacaaaaattagccrggcatggtggcacaagcctgtaatcccagccactgggaggctgaggcaggagaattgcttgaacccaggaggcagatgttgcagtgagccaagctcatactactggactccagcctgggcaacagagcaagactctgtctctaaataaatacataaaataagaggaattttggaaactatttgaaaacatggaaattaaatatatgctccttaatgaccagtgggtcaatgaagaaataaagaaggaaactgaaaaatttgctgaaacaaattataatggaaatagaagacacgaaaa

SEQ ID NO: 657423 - DNA, 550 bp, Homo sapiens
actctaaatacaaaccagttttctatcaaaggtatacctgaacaaatgactcaacgccaagtgaaataagcaccaaggagaccagaaccaagaagcctttcacggctttcaccaaggtctccagagaggaggcaaaagttgcaaccctgcycagatccagaccactccaggcagctcaaataaaggagaattttagtagctgcaaatggggctactgtctggccatattatctagggtttcagcctctcagctggctgactgcacacaaaggcctgacaacccgtatctcccacagacggaagattgcatggcagtttgtaagatgggaagtcaaaagctgtctgtgggaatagacaggattgcaaagtgaaagggtaccccaaaaggtcagagttatgcaaataccaaactaactttttacaaatgtttctatttgttttgtcctgagttaaaagatttgcatttccaagagtctggtttcctgactgggaatcaaatccaggctgtggtggtgaaagcatggaacccaggccctagattagggtggcc

SEQ ID NO: 657424 - DNA, 550 bp, Homo sapiens
actctaaatacaaaccagttttctatcaaaggtatacctgaacaaatgactcaacgccaagtgaaataagcaccaaggagaccagaaccaagaagcctttcacggctttcaccaaggtctccagagaggaggcaaaagttgcaaccctgctcagatccagaccactccaggcagctcaaataaaggagaattttagtagctgcaaatggggctactgtctggccatattatctagggtttcagcctctcagctggctgactgcacacaaaggcctgacaacccgtatctcccacagacggaagattgcatggcagtttrtaagatgggaagtcaaaagctgtctgtgggaatagacaggattgcaaagtgaaagggtaccccaaaaggtcagagttatgcaaataccaaactaactttttacaaatgtttctatttgttttgtcctgagttaaaagatttgcatttccaagagtctggtttcctgactgggaatcaaatccaggctgtggtggtgaaagcatggaacccaggccctagattagggtggcc

SEQ ID NO: 657425 - DNA, 557 bp, Homo sapiens
gctgactattaaaaatacacagctgtgcacttattttataaagaatacaaatattccagccacctgtcaaagagtataacttcaaaagctctgtcactaaatagaaagttttcaaaagcccagtaaagagaaaaggagttaatagatattgaatttgctattccagtaatataacaggaagcataggcaatttattcatcttttagataattcaaaatttatccttgaaataagctagatcatcagagagccacacacttgagtctcattacttttgttcttctctcctgctgtgtgtttttgtgctttggtatcatgacatcaatctatattaagaacatgttactaggtttatggttaaacttaaattttattatcaagggtaattttgtctctctttagaaaatagtttgtttttatcttataaattctaaaatgtaggcatataatatctccccctttctctgacacacacacacacatacacacacacaaaaatcrctgccggaagtttagtattacatttgtgtcccacttctggcaagcataatatgtac

SEQ ID NO: 657426 - DNA, 575 bp, Homo sapiens
ttacttgtgtcttcaggatctgctcgagcccagtcacatatataccacttccatttaatgatggaatgctgctgtgcatgacccactttatgactagatggatcagaaagcacccagttcatgataggcagttctggtcacaaggtgacttaatgayccatagtcaaatgttcagtctccaccaaagcccagtaacaggccaaaagctgtctctcaaaaagatggtagttatctgcagaagatgacagggccttgatccaaattcctatgggcctccactttggttttcctaggggggcttgccaaaggccccaaacagcatccctatctgtcactgacacctcaagcaccattggatctgctggggcatatggcccaactgtcagaacagcttgtacagcagcctggacctgttgcagagccttctcctgttctgggcaacactcaaaactggcagcattacaggtcactcgataaatgggctggagtaacacacccaaatgaggattgtgttgcctccaaaatccaaatagatccactaggcattgtgcttctttcttgcttgtagaaagggc

SEQ ID NO: 657427 - DNA, 575 bp, Homo sapiens
ttacttgtgtcttcaggatctgctcgagcccagtcacatatataccacttccatttaatgatggaatgctgctgtgcatgacccactttatgactagatggatcagaaagcacccagttcatgataggcagttctggtcacaaggtgacttaatgatccatagtcaaatgttcagtctccaccaaagcccagtaacaggccaaaagctgtctctcaaaaagatggtagttatctgcagaagatgacagggccttgatccaaattcctatgggcctccactttggttttcctaggggggcttgccaaaggccccaaacagcatccctatctgtcactgacacctcaagcaccattggatctgctggggcatatggcccaactgtcagaacagcttgtacagcagcctggacctgttgcagagccttctcctgttctgggcaacactcaaaactggcagcattacaggtcactcgataaatgggctggagtaacacacccaaatgaggawtgtgttgcctccaaaatccaaatagatccactaggcattgtgcttctttcttgcttgtagaaagggc

SEQ ID NO: 657428 - DNA, 568 bp, Homo sapiens
tgtgtgcagctcatggagagtgagttgaagcagggtggggcatcacctcacctgggaagcacaaagggttggggaattcccattcctagccaagggaagccatgacagatggtacctggaaaattgggactcctgccctaattctgtgcttttccaatggtcttagcaaacagcacaccaggagattatatcccatgcaagctcagtgggtcccacatccayggagccttgctcactgctagcacagcagtccaagattgaactgtgaggcagcagtgaggctgggggaggggcgtccaccattgctgaagcttgactaggtaaataaagtggccaggaagctcaaactgggtggagcccaccacaggtcaacaaggcctcctgcctctagactccacctctggggccagacatagctgaacaaaaggcagcagacaacttccacagacataaacatccctgtctgacagctatgaagagagcagtggttctcccagcatagagtttgacatctgagaatggacagactgcctcctcaagtggatcctaaacccccgagtagcctaac

SEQ ID NO: 657429 - DNA, 568 bp, Homo sapiens
tgtgtgcagctcatggagagtgagttgaagcagggtggggcatcacctcacctgggaagcacaaagggttggggaattcccattcctagccaagggaagccatgacagatggtacctggaaaattgggactcctgccctaattctgtgcttttccaatggtcttagcaaacagcacaccaggagattatatcccatgcaagctcagtgggtcccacatccacggagccttgctcactgctagcacagcagtccaagattgaactgtgaggcagcagtgaggctgggggaggggcgtccaccattgctgaagcttgactaggtaaataaagtggccaggaagctcaaactgggtggagcccaccacaggtcaacaaggcctcctgcctctagactccacctctggggccagacatagctgaacaaaaggcagcagacaacttccacagacataaacatccctgtctgacagctatgaagagagcagtggttctcccagcrtagagtttgacatctgagaatggacagactgcctcctcaagtggatcctaaacccccgagtagcctaac

SEQ ID NO: 657430 - DNA, 596 bp, Homo sapiens
cttgtcaatgcctggccacccttgactcctgcctgagccgagttctccaatcaytctgtaaattctctgaattactcaatacttttaaaataaattcattctctcatgttacccagtcaattcaatttctatgtttgcaagcaagagtctccaataatgtaataacaaatttcagtcaagcaagacatgaatcaaaattaagacatcaagttttgagaagataggctatatttcaacaattcccttcattttaaattagttgatttttcaaattaaatgcaaatgaagtttaaatatatttaacaacttaattttaaaatatatattaactatatactaatatatagaaatactatagcatttatataaaacagtggctatgtatcttgttatctggttttgtatctgtatttatcttcagaaaggtgtctggaaggatactacaaggccacagtaaccaaaacagcatggtattggtaccaaaacatacatagaccaatggagcagaacagagacctcagaaataataccacacatctacaaccatctgatctttgacaaacctgacaaaaaaaaaagcaatggggaaaggatct

SEQ ID NO: 657431 - DNA, 596 bp, Homo sapiens
cttgtcaatgcctggccacccttgactcctgcctgagccgagttctccaatcattctgtaaattctctgaattactcaatacttttaaaataaattcattctctcatgttacccagtcaattcaatttctatgtttgcaagcaagagtctccaataatgtaataacaaatttcagtcaagcaagacatgaatcaaaattaagacatcaagttttgagaagataggctatatttcaacaattcccttcattttaaattagttgatttttcaaattaaatgcaaatgaagtttaaatatatttaacaacttaattttaaaatatatattaactatatactaatatatagaaatactatagcatttatataaaacartggctatgtatcttgttatctggttttgtatctgtatttatcttcagaaaggtgtctggaaggatactacaaggccacagtaaccaaaacagcatggtattggtaccaaaacatacatagaccaatggagcagaacagagacctcagaaataataccacacatctacaaccatctgatctttgacaaacctgacaaaaaaaaaagcaatggggaaaggatct

SEQ ID NO: 657432 - DNA, 595 bp, Homo sapiens
tttttgccttcagtcactcaattgataaattttttgctatgtacctttgaaagtttatttgttcctcatatttttcaaagaagtctccctgtttttaatcagttttctaaagatgtctgaaatacctttaatcacagtcatgcacacaaggcaactgctcatcaagggtatccagcaaagcatttagacaagcatactatttgcatagaaggattggataatgtatcacattaccaataagcactttctttagagtaaaaccttataatctcaatcaggaaaaatatataacacaattagcaatggggtctatatagaaggtaagaattcctaaggtaattttttcttgawctgtacattcttaaggctctacagatttgtattagttatctgttgctatattaaaattactccaaaatttagtggcttaaaacaataagtgtttactataccacaatccgtgggtcagaatcagaatacacttttgctgtgtcctctgcatgagtctctcacaggcagaaatcaaggtaccaaccaagacatatatctcaaggttagattggaggaggatatacctccattctcacttatgtgg

SEQ ID NO: 657433 - DNA, 622 bp, Homo sapiens
caaggtttgggtttgctttcaaagactgaaaattgtctgaattgcagtgtaggtcttctgatggtttagcagtgtggcatcagtggttgctctaacttgccttacaactttgttatggattagccactttatttagaaatcgcgcttgagggaaacaattgaaattggactggaaatggagtgggcgaagtaaatacacacgttaccagagtgttgagtttgggcactcttaacagtcattattactcagtgtttattgataaatcagacaaaattgccatcttagttttgagtgtctaaattaggtgataatggttattataatttggttattttgcatgactcaagctagtaagtaaatacactctgtaatctcaaccaattttttaatttgttaaatactatcattgtcaacatctyttttcatttgcttcagacttaatgaacaagccagtgaggagattttgaaagtagaacagaaatataacaaactccgccaaccattttttcagaagaggtcagaattgatcgccaaaatcccaaatttttgggtaacaacatttgtcaaccatccacaaggtatgttttggacagggcattgttaaaggataaacagtgtttg

SEQ ID NO: 657434 - DNA, 591 bp, Homo sapiens
taagctagactcatgtcagggaggaggtctttaacttttgttctacttcctcctacataaggctatacaagactatggaaattgatttscttgacccaggattttcttagcttttttgacagtagggtccaattaacttttcttcttcaaaagtggcttctataacattttcaatgacaggaaatacatatctcttagataaccgtacttacctgtttaagttcctttgtgagacacatgaaaggaagcagtttgcatcaatacaattgaaaacctattatgtgaaatacctgttatttgaaataagttatgccttgctttatagcctagtatagaatcaattttgtaagtatctaatgaatatagagaaaaatgtttacttctaatttttggatataaaatcaaggatacagaattatgtgtatgttaattggattaaatattaatgtttttgtctttttattttttaatttatttttacttttagttccggggcacatgtgcagtgtgtgcaggtttgttacataggtagtcatgtgctatagtggtttgctacacctatcaacccagcacctaggtattaagcacagt

SEQ ID NO: 657435 - DNA, 552 bp, Homo sapiens
tctttgccctctctcattttctcaagtccgtatgactcccttttctttcttcagatttcactctgcttataaccagagcttctgtttctggaaaacccagttttattaatacaacacttgtgcatgcacctcatttagagatggttttgagataatagagggaatccacatcccagttaggatcaggaaacaattcaaagttgmgtattagtctatctctctcttaaaattatcttgctaccttgctgtgacaaatttgtcactgtggattttccactacaacctcatgagcgtgtctttctctggaaaccattctcactcactatgactccataacttttcgccatctgtcttctttcctcaggtccatggacctcccaaaattatatttcatgacccacctgcaaaaaacaacaatgcaagagtatctttcatgatgttcttaacaaatatcttcctttctcaaacaccagccgtctctataggcagaaatgtattctatttcattccataggaaatgctgattataacactaattttctttctagttag

SEQ ID NO: 657436 - DNA, 552 bp, Homo sapiens
tctttgccctctctcattttctcaagtccgtatgactcccttttctttcttcagatttcactctgcttataaccagagcttctgtttctggaaaacccagttttattaatacaacacttgtgcatgcacctcatttagagatggttttgagataatagagggaatccacatcccagttaggatcaggaaacaattcaaagttgagtattagtctatctctctcttaaaattatcttgctaccttgctgtgacaaatttgtcactgtggattttccactacaacctcatgagcgtgtctttctctggaaaccattctcactcactatgactccataacttttcgccatctgtcttctttcctcaggtccatggacctcccaaaattatatttcatgacccacctgcaraaaacaacaatgcaagagtatctttcatgatgttcttaacaaatatcttcctttctcaaacaccagccgtctctataggcagaaatgtattctatttcattccataggaaatgctgattataacactaattttctttctagttag

SEQ ID NO: 657437 - DNA, 600 bp, Homo sapiens
gcttaaacacagagcactgggagggatcaagtgacagagaccacaggcatgaagtgatttgtttcatattaaaaaccagatgtttaattacttgacatttccagtcatttacttaatttgagtctctcaagtctcttaaggtaaatgatggagactaaaagttccatctctttaaaatgtatgagtaaaatcctcatgtagggctagaattaagatcagagttattcatgggggtgattcaccactttatagaatatagtaacttctgcaggtttttgggggcattatttaaggacaaattttaascatatttaaaacagccaaggtacatattagctggtattttcatccccttcaaaacaatgtatcatctattgcagcttgggagtctaattgattaacaatattagtggaattttcattgttttctttaaacataaaacatgctttggagtacttaagatttttaccacaccttatttaaaaataattaatcagtaagagttgcttaaaaacataaccaaaaaaaaaagggagcaattctgtactaaaatcattaacacaatatgacatggggaagggaattgacttgagaaggct

SEQ ID NO: 657438 - DNA, 515 bp, Homo sapiens
ggaaacatgtaataaaagggttataatggcattgatactgcagtatttagcaaatgaacgttgcatcatagttccaggagatgttttagaagattatctatcttcaatgttttgagtcaaaatttaatttcatatctaaaaaaattgagttcttttattggaatctaaaatcacaggcactagcatcgagctagagtcttcataatccatgaatattcaaggctgcaaaaaagcatagattagtcacattcttgatggtaarccacaggaactgaatactgatttctcagacaaccagggaatgtattagaatatcaggtaatcattgaattgataggacagtggaagggtaaacttggtaaaatgaccaaaggcaagattttgtactagaagttaggtaataagaacaacggccaaggtcacgttttaagaagactctggtccttcttgtgctcattcaggattcactatccttagagaaaatgcttgattgcctaagcccaagtaaaaaaaag

SEQ ID NO: 657439 - DNA, 618 bp, Homo sapiens
ggtccatcttcacatatggtttaataccattatctcaaaaatggcttagttatcctgggagtgggcttctgataaaaagacaagtttggccccattctctctgtctcaggtgctagcttgcctttccactatattatgactcagtaagaagcctcttgccagatgttggtgtcatcatcttggacttcccagtctacagaactgtgaaccagataagtttctttttattacaaattacccagtctatggtattttgtgatagcagcagaaattgattcaagacaacaatgatgttcctatatgtggttttcttagacttatttggctcatgtttttcctgctttaccttggcattttattgaataatatatctaaaagatctatggaagtatatggagacactcctctttctttgttatagctgcatcataatcaactgtatgtaacattagaccttagttaaaaatttccttattgatagacacatgagtagttttgagtmctagcctattaaatctactaatttattgaataaacattatgtagatttttgcatttttttctaatttatccctggaaaaattcctagaactgatcagaaggtaaatgcacttttgt

SEQ ID NO: 657440 - DNA, 516 bp, Homo sapiens
agacccactgttataaatggacgtctgagaaatcagcgagcaagttcagacagatatgaaaaccttcctgtccaggactggcagtagctttgagctcccaagtgttgaatttgttaccttttccggagggcttgcaaaaaataaattgacaaatgccttcagattcctctaccagaaaagctggctgctcaaagttcgggttagctaaatctgagattttaaaatcaactcttactcaaaacgccatgacggtgccgtttacacaatactcgccttgagagcccagcaagtgtaacatactgtttcatattataagtatataggtatacgcatatttttaatactaccttgactcttgttatagcaaatcaattctgcctggtttagatttatttctgaaaaatggaaaatagagatgtgggtccaatcctagcctrgaaaagctgtcacagtgaaggtaaacttttaatcggctacaggcgaacagtatacagttttacttccagagtaacagct

SEQ ID NO: 657441 - DNA, 577 bp, Homo sapiens
gaattctgtcaaggctggactgtgtaacagccctggcaaatcccagccctcgaggatgctccacacccgaaaccatctaggccagggcttytcagtcaaggcactactgacatttacatcctaattctttgggcggtgggggctgtcctgcgcattgcaggatgtttagcaacatcctctgcctgcacccactagatagatgccaggagcatccacctcccccggttgcgaggaccaaaaatgtctccaggccttgccgaatcttcccagggaggggggcaagatcaccgacccctttgagaacaaccaattctgataatatttgattccagggagttgtacagaaacacaaatcaaactgtactatcctgcaaacttttttttttttaagagaaatagctgcaatacctctgcaacatttgggatttttagctataggaaattctcgtgtttcctacaccaccgtctgtgcagaaagcactgtacacctgaatatggattcctaggaacagaaaaaatttaacatgctgtgaagaccggctactactgtgacagctgcccccaccccgtgtcctca

SEQ ID NO: 657442 - DNA, 382 bp, Homo sapiens
gaagagcaagttcagtaccagtgcytccatcagggccagaggcagaactctgcagcctgcgttccacggggcagagaactcaatggattctattcagagaatctcagagtgagtcaaagttagatgacaccttctggatataatcgaaacttaacagaatgtgggaaaatcgtttttttttctaatgaaacatgtgttagaacatggccctgggacagcagaggctcaccacactccaccagcagaatgattggagacgaggagggggtctagtttaggcaaattactgttatccagaatatggatcaataaaaagaaaatacccaatagaaccggaatcactaaactttatttctgtaaacacccagtagtaaatgtttta

SEQ ID NO: 657443 - DNA, 510 bp, Homo sapiens
gaattctttccagaatacctcattttctagtgacttcctgcctattctaacctgcagctttgggggttatttggctttaacagatgagtcacttacacagctgaggaaatcttcctatacacagtgaaccaagaagggtggaggggaaggctgggtgcagtggctcatgcctgtaatcccagcacttcgggaggctgaggcaggtggatcacgaggtcaaagattgagaccatcctgtcccacatggtgaaaccacgtctctactgaaaatacaaaaattagctgggtgtggcggcaggcgcctgtagtcccagctactcggcaggctgaggcaggagaatcggttgaacrtgggaggcggaggttgcagtgagctgagatcgcaccactgtactccagcctggtgacagagcgagactccatctcaaacaaacaaacaaacaaacaaacaaacaaaaagaaggttgaaggggaaaagtacattgagtttagtttccttgggcaatctgg

SEQ ID NO: 657444 - DNA, 613 bp, Homo sapiens
tatctcacaatattcccctgaaacctgctcatgtaaaaatgcttggcagagcagctacataaatattttcttcctctcgtcctgtccccttccctctcttcttcctccttctccatccctttctgtttttctccctaattatcccatcacctttctcttggtgttctaaaattaatctcttgcctctccttcccctcaacacaatatttcactgattcccatgatatttttgaaaggtgtctgggttgcatgtatttctgtgtcattctcatggccctttctttgcagagtttcacctgccacctggatcatttcctatttttctgcagccacttcagggcggggacccagtatcaygaagctgcaaggtaaaaaggatcaaaccttaactgcctacatgtgctcacaggaacataagtgagtgaggctcaccagcaaccaggaagtgagctgagcctaacatatgggagagatcctgtctcatctgcagggaagagctgctatataggaaagtatctgctcattgctgccatgtgggaatgctggtattgctggactttctgatgttttaggagaaactgctgatctgtgcatgaagtctgatatataaaga

SEQ ID NO: 657445 - DNA, 586 bp, Homo sapiens
agaagtcaggcagcctgtgctctgtttctgcttttacaattcactttctctgtgacttagaccaatatctgtaccactctgatcctgttttctcatctgtaaactagaaagtataaacctggtacaagctccttctcatgggtgccataaggttcacatgggacacagagatggaaaaggagtaacagtgctgtacaacccatcacyctacttggtcattcagcgtcttctgagtgctttcccttgccaggcagtgagagaggtgctggggatacagcaatgggtgaagcagggagcttgtcatggcaacagatgcagaaacacgtcactaaggaatacatgctggacaaggaagacaattctgaaccaaggtgatggatgaaagaaggaagtgtgctaaagtctaatctacatggtgcttcgtgtgcatttcctaggtagctgtggcagtttaaagcctcaggaactagatgaggtgttcaaggtcctattcagtcaggagagtagtatgaccaacccttcacaaggtatgtatgttgctggggtgggtaggtagatgggatccagaaggaccttccagtaaaag

SEQ ID NO: 657446 - DNA, 564 bp, Homo sapiens
atgcagaaacacgtcactaaggaatacatgctggacaaggaagacaattctgaaccaaggtgatggatgaaagaaggaagtgtgctaaagtctaatctacatggtgcttcgtgtgcatttcctaggtagctgtggcagtttaaagcctcaggaactagatgaggtgttcaaggtcctattcagtcaggagagtagtatgaccaacccttcacaaggtatgtatgttgctggggtgggtaggtagatgggatccagaaggaccttccagtaaaagttacatttgagccaccttctaaaagagggataggagttggccaaatgtatgtgggaagggaggatcttttagccaaaagcaatagcctgtcaaagtcatctatgccctgttcagaaatccactgagttaatgggtaaccattagggatggtcatgaatacacctcatctcctcycctttcaagcacatgttaagacagcactatccggctgttttaaagttaggtagagcctgggactggctttggctgatgaaatgtgaatagaagtgacagctgtcatttacgcaagg

SEQ ID NO: 657447 - DNA, 589 bp, Homo sapiens
ttttactacttataaaatagagatctactgaagttaacatgtccaagattctataatgaataagtgggagagctgtgattctctccgagtccatctgacactggagtccacactcctaacctctaggtatgtatttcctcaaattgattgtcgtgagcttctctggagcagagaccatcaatttcgtgatgaatagcaatactaatgcctgacacatagtatggactgagtatatttttgtcgaatgaatgattagttggtcttccattaaaaataatttaataatttagcaacttttattgaaaacaatcgagcattttatcaggcatataaagccattaaagttataaatctttatttaacaagtctagtcaaagctaagaatcattggtgaaaagaacaggaagaacacatgcaagcacacacacacagagacacaaagtgtgcagaggtggctagctggcacattgagcaaatcaatcraggtaaatgagaggctgcatgctcttatagaaagagcattggcctagaattagagaagttttaattgcaggcatttcactcaagtgagtttgtcattgacaagtca

SEQ ID NO: 657448 - DNA, 575 bp, Homo sapiens
aaatgtcaaaggccagaggttatgtaccatgtggctctcagcaaggtcttactctctctccacatatgaagcaggcacagtaactcattttccttttatctcatcattaaacaaatcaaataaagcaatgaatttataattctttattttttcaacctttgtttaacgtttgagggtrcatgtgcaagtttgttacataggtaaacacatgtcacaggggtttgttgtacagattattttatcacccaggtactaagcccagtatctagtagctatcttttctgctcctctccctcctcccaccctcccccgtcaagtagacgccagtgtctcttatttccttctctgtgttcataagctgttatcatttagcccccacttacaagtgaggcatgatatatttggttttctgttcctgtgttagtttgctaaggatgaaatagtctccagctccattcatattctggcaaaagacatgatctctttctttattttttatttttattttttcataagttattggggtacaggtagcatttggttacacgagtaagttctttagtagtaatttgtga

SEQ ID NO: 657449 - DNA, 575 bp, Homo sapiens
aaatgtcaaaggccagaggttatgtaccatgtggctctcagcaaggtcttactctctctccacatatgaagcaggcacagtaactcattttccttttatctcatcattaaacaaatcaaataaagcaatgaatttataattctttattttttcaacctttgtttaacgtttgagggtgcatgtgcaagtttgttacataggtaaacacatgtcacaggggtttgttgtacagattattttatcacccaggtactaagcccagtatctagtagctatcttttctgctcctctccctcctcccaccctcccccgtcaagtagacgccagtgtctcttatttccttctctgtgttcataagctgttatcatttagcccccacttacaagtgaggcatgatatatttggttttctgttcctgtgttagtttgctaaggatgaaatagtctccagctccattcatattctggcaaaagacatgatctctttctttattttttatttttattttttcataarttattggggtacaggtagcatttggttacacgagtaagttctttagtagtaatttgtga

SEQ ID NO: 657450 - DNA, 515 bp, Homo sapiens
aatctgtgtatgagaatctgcatatctgcataaacagtgaagattgacagttcccacatggtgggatgaaaaggaaagtaacaaagttagttaatagtataactggtggtatactatttatttaacatttaaaaactgtgctgttaagagaatgaagaaataaaacataggttgggggaaatatttacaaaacatatgtctgataagggacttttatccaaaatgtaaaaagagctcttaaaactcaacaacaaagacaaacagtacaaatttaaaaatgggcaaaaggtctgaaaagactcctcaccaaagaaaatattaagatgacaaataagcagatgaaaagatactcaacattgcatgttgtagggaaacataaattaaaacgataatgagataccwccacacacctattagtatgcctaagattggaaacaatgacaacagcaaatgctggcaaggatgtgaataaacagggactcttattcactgctagggagaatgcaaaatggttc

SEQ ID NO: 657451 - DNA, 476 bp, Homo sapiens
ttgccgccccagacatgccttcccgcctaattggtacaggacagtgtcttccttcccgcctaattacccctatagaatttaaagcagtagccaatccggtcagcttagaatgtgcattgtgactgacgcaggcagcacccttctgtagaagcaaatatgctttgctgagaaatttcctgtttaagtgctggtttttctttgtggcactgagcacttgtttccaacaagtgtgacagcacaatttatttgcaaaataaaaccagatttgggatgacagtaggctatgtataatctttatttcactgaaatgtgaacactcacatgttttgttttgcaatattagtgcttttgattttggagtaattatttatatcccaatggartttctagtaagacactatttagaatatatacactaaatagcctttctgaagcctccagattcttaacttcaaaatgtatctagctccacagca

SEQ ID NO: 657452 - DNA, 512 bp, Homo sapiens
aaatgttcaaatggaagcaaaactgkttttttctagtaggatgagggaccaaaaaagagaagttatttggacttctgaatagacagaatttgcaaatccataaataagaagtatttttcattgtttccatttgtttacagtttacagagttattaaatagcttttagaatcagaaaactcagagaggtgttctctagagtctagaaaatggattgttttccagtgaagcactttttttttctacagagcgtggtctctagagtctgtcaaacttaggtttaaaactctgctattactgttcgctagttgtacaacctaaagttcagtgcataactgttttctccctcagttccttcatctataaaagagtaataataataccattctcttgggattgtaaaagtgtaacgaaatatgcattaaagagtgcccgtcttatagtaactactcaatatataatattgttattagtaaattcgtgacttttgaacctagctactttcttttcctct

SEQ ID NO: 657453 - DNA, 596 bp, Homo sapiens
agtcgaatgccttctatatgccagtcattgtgttaggcactgggagtatgagaattaataattttagtctgttgacagataatcataataagggctaatgagtaacacaggctcagggttataagaacagagggggtgtcaaggctgtttttcacaggaaataacatttaagttgagacaatgaaattttagggcttagccatgagaaggtggggaaaagcattttgggctgactgaacagcgtgtacagaggtctggaagtgagaagtagtgtactatagcattttctaggagctgaaaggcatttagcaagagtatagcgcataaaggagagagcttgagatgaaacaatttctcagtgtgttgtttgaatacaatgtatactgtcaaaatctaagaattcaagaatcatttaatatatctttatgttttactagtcataaaagcatatacatatatttaaatatggacaagatactgtttagtagtttagaaagtgatttatraggattgcaatcccttgcaataactccacagcccataccttgggaacaactgagctaactcattcagttttgtccattacatcgaagggt

SEQ ID NO: 657454 - DNA, 567 bp, Homo sapiens
tgtgatagaaaccggggcaaaacagaaaataaaacagagttttattttgagagttttttacagcttrtcggctctgagaggacagacatgagaacaaataagtgcccaattctgcatttattttggaaggcagttttatgtgagtttaaatcagtaaagacatagatgtatatttttagttttgattaaaactaaaacaattggtagcccttactcatatttttctatcattaaaacttatctttaaaaaatgtcttcagtcatatttttcccttacttccattcatatttactctttacttctcttgtccttaccagaatgtatgcagtaagttttcatattgtaacacattcaacaaaagttatatgtgaacataatagctgctttctttaaaacggttactttgagaaactgcatacctatttttttttttttttttttgagacggagtttcactcttgttgtccaggctggagtacagtggcacgatcttggctcactgcaatctctgcctcctgggttcaagtgattctactgcctcagtctcctgagtagctgggattaca

SEQ ID NO: 657455 - DNA, 567 bp, Homo sapiens
tgtgatagaaaccggggcaaaacagaaaataaaacagagttttattttgagagttttttacagcttgtyggctctgagaggacagacatgagaacaaataagtgcccaattctgcatttattttggaaggcagttttatgtgagtttaaatcagtaaagacatagatgtatatttttagttttgattaaaactaaaacaattggtagcccttactcatatttttctatcattaaaacttatctttaaaaaatgtcttcagtcatatttttcccttacttccattcatatttactctttacttctcttgtccttaccagaatgtatgcagtaagttttcatattgtaacacattcaacaaaagttatatgtgaacataatagctgctttctttaaaacggttactttgagaaactgcatacctatttttttttttttttttttgagacggagtttcactcttgttgtccaggctggagtacagtggcacgatcttggctcactgcaatctctgcctcctgggttcaagtgattctactgcctcagtctcctgagtagctgggattaca

SEQ ID NO: 657456 - DNA, 567 bp, Homo sapiens
tgtgatagaaaccggggcaaaacagaaaataaaacagagttttattttgagagttttttacagcttgtcggctctgagaggacagacatgagaacaaataagtgcccaattctgcatttattttggaaggcagttttatgtgagtttaaatcagtaaagacatagatgtatatttttagttttgattaaaactaaaacaattggtagcccttaytcatatttttctatcattaaaacttatctttaaaaaatgtcttcagtcatatttttcccttacttccattcatatttactctttacttctcttgtccttaccagaatgtatgcagtaagttttcatattgtaacacattcaacaaaagttatatgtgaacataatagctgctttctttaaaacggttactttgagaaactgcatacctatttttttttttttttttttgagacggagtttcactcttgttgtccaggctggagtacagtggcacgatcttggctcactgcaatctctgcctcctgggttcaagtgattctactgcctcagtctcctgagtagctgggattaca

SEQ ID NO: 657457 - DNA, 535 bp, Homo sapiens
ctcaccccatcatctgttcagagatgttcattttcatgtgaggaatagtaacattcmccagcatgaggttctggtctaatgtttgtagagaaacaccagccagcatcaagcacactgttttgttcagctgtctgttttgttttgtagcaagagttcctcaatgaaggaagcagtatgatttatacccagtgtacaaccccttccttcactacagactgatgatagacggttccttgaccagctgctttgaggagccccgttctaaactatgaagccagccaaccacagatttaaggagaaataagacacatacctctgtctgtagactgaggagttctgtccaaggcacagcatcctgccagtgttgtatgcacactatttcatcctcttcttttacttccagaaagcacaggatactgtcatcttttgtatcacattttatttgtaaaaagcagctgtcttgaagtacttctgatagctcatcactttctgtgtcagaactttgaaaagcaaagacaggacatcgacttccttc

SEQ ID NO: 657458 - DNA, 596 bp, Homo sapiens
ccattattaataactcaaaagaatgagttatgaaagcacagcattatctaaaattaatacactataaatgaaggatgtgttacaaatgtagacttttcctctttctataatttctctcgtcctaatctggaggctstatcctcacttatagcagctggtaagaaatcttggaattttcctgtataaggtaattttattttttctggtaaatagcatttcatatctcacaatctaagttttaacttcttacctatagtgtttctttcctccaaactgtctgtcttccttatctttccctatagatgtgagtgcacatggaaatttatggagtctctcagcattgtagaagagcctctgtttcttctcactggttcctgtcctcctcagcttggtatataactcctgagggctgaatacctggttgctgaaggatccagtccctgccctataaccgaggaagaatttctacttccccttcctgtccagaagtgatattcccaggtatcacctttttctctcctgccctatggacttcagatatatctatctgcctttcactatgacaataaatgtcactgatttgctttaatggtaga

SEQ ID NO: 657459 - DNA, 596 bp, Homo sapiens
ccattattaataactcaaaagaatgagttatgaaagcacagcattatctaaaattaatacactataaatgaaggatgtgttacaaatgtagacttttcctctttctataatttctctcgtcctaatctggaggctctatcctcacttatagcagctggtaagaaatcttggaattttcctgtataaggtaattttattttttctggtaaatagcatttcatatctcacaatctaagttttaacttcttacctatagtgtttctttcctccaaactgtctgtcttccttatctttccctatagatgtgagtgcacatggaaatttatggagtctctcagcattgtagaagagcctctgtttcttctcactggttcctgtcctcctcagcttggtatataactcctgagggctgaatacctggttgctgaaggatccagtccctkccctataaccgaggaagaatttctacttccccttcctgtccagaagtgatattcccaggtatcacctttttctctcctgccctatggacttcagatatatctatctgcctttcactatgacaataaatgtcactgatttgctttaatggtaga

SEQ ID NO: 657460 - DNA, 620 bp, Homo sapiens
caccacacacaaaactaaactcaagatggattaaagacttaaaaccacaaactgtaaaactactagaagaaaaactaaggaaaaaacttcatgatattgatatagacaatgattttttggataagaccccaaaagtacaagcaacaaaagcaaaagtaaacaaaaatgagattgcatcaaacttaaaagctctgtgcaacatatatcraaagaaattgaaattcatatgtcaaagaggtatctgcactcccatgttcacagcaacattattcacaataactgagatataaaatcaatctaaaggtccatcaacagatgcataagtaaagaaagtgtgatatatataaacagtggaatactattcaccctttaaaaaggaggagaggaaatcctgtcctttgtgtcaacatggatacacctggaggacattatgttaagtgaaataagcctggcatagaaaggtatataccatgtgatttcactttcatgtggaatctaaaaaagttgaactcatagaagtagagagtagaataatggttaccagggctggggagtggggtgtttggagtgatgtcggtaaaatgataggagcttttagtaacacaagaggagtaagttta

SEQ ID NO: 657461 - DNA, 620 bp, Homo sapiens
caccacacacaaaactaaactcaagatggattaaagacttaaaaccacaaactgtaaaactactagaagaaaaactaaggaaaaaacttcatgatattgatatagacaatgattttttggataagaccccaaaagtacaagcaacaaaagcaaaagtaaacaaaaatgagattgcatcaaacttaaaagctctgtgcaacatatatcgaaagaaattgaaattcatatgtcaaagaggtatctgcrctcccatgttcacagcaacattattcacaataactgagatataaaatcaatctaaaggtccatcaacagatgcataagtaaagaaagtgtgatatatataaacagtggaatactattcaccctttaaaaaggaggagaggaaatcctgtcctttgtgtcaacatggatacacctggaggacattatgttaagtgaaataagcctggcatagaaaggtatataccatgtgatttcactttcatgtggaatctaaaaaagttgaactcatagaagtagagagtagaataatggttaccagggctggggagtggggtgtttggagtgatgtcggtaaaatgataggagcttttagtaacacaagaggagtaagttta

SEQ ID NO: 657462 - DNA, 526 bp, Homo sapiens
tgcaaattactgtgtggaatctgtgttagtttggaaaagtgtttcagatttaaatgacttgaaattggaaaagagagaatggataggccaaaaaagaatagcatgttcaatgttttgaggcaactcaggaggaataaatatttatgaaacagtgaattactcaggaccactagaacccgtgttagtcaggaagtgggagtgtggggtggcagtgagaccttgaaaagaayacctgagtcagattattagaaaacgaggaattttaagtttttatttaataattgttgagaaattttgggggattgtagaattttggttaaatggctaaaataaattacattttagttgtatatcttcccaactgaaagaaagaaaacgttgtttaaaggcaaaataaacttttttaagttcaggaactatacgttttagccttggtaagtagagtaacttggcatagttcctagcatgttttaggcattgggcatatattcctgattagaaggtcatttgaatttgttaactgaaa

SEQ ID NO: 657463 - DNA, 517 bp, Homo sapiens
tctaaaaacaaatgacaaacaaaacacaatataccaaaacctgtggaatacagcaaaagcagtactcactgggaaatttatagctacaagtgcytacatcaaaaaaagaggaaaaaccaaataatcaatctaacgatgtgtcttaaagaactacacaattgaggacaaaccaaactcaaaactagtaggaggaaaaaaataataaaagatcagagcagaaataaatgaaattgaaacaaaaaatacaaaacaaaagataatttttaaaaaaaaagttgtatttttttgttgggattatatattgtttctttcctttttattatactttaagtcctagggtacatgtgcacaatgtgcaggcttgttacatatgtatacatatgccatgtaggtgtgctgcacccattaactcatcatttatattatgtatatctcctaatgctttccctccccacaacaggccctggtgtgtgatgttccccttcctgtgtccatgtgttctcattgttcagttccc

SEQ ID NO: 657464 - DNA, 430 bp, Homo sapiens
aaatagggcacaactcacagagaggagttaacaaagataaaagcagaaataaatcaagtagaaaatctaacagtaagaagaagaataatagacaaataaaagcaatagctgcttctttgaagagtttattgtaacaaaccacawgtttgcctccataaaaaagtgagaaatcacaaatatacaccttaaagaatgaaaaaagcagcataactacagatatggaaaaatatttcataaatgatgggagattactacatgcaatttttatctattaattcaaaaacaaaaacaagttttgaagaaaatatgaaataacaaaagttactcaatatgactggaaaatcatagaagattaaaaactctctctttaaaaatatatcaacccccaacaactttatttccaagtatttttaaatcatcaaaatgtagt

SEQ ID NO: 657465 - DNA, 632 bp, Homo sapiens
ttcagtgaggaacatagctatgagagtcaacaggtactgtctccagcaagtagaggatgagagcctcgatcatatggtagaatataacagtatccactattaacgtttttccacactttaatgattctttaaaatattattttaggtgttttttttattttgatgtaacctcagattttatgaaatcatcttattgttgtgaatttagattactatataattttagcattacattcatgattcaatcaattctcaaataattttattaacaacgttaggcctctgtttcatatccgagatcatgtggagtggattgggcttctccttgtctgctgaaaatgaaaaataaatgctaataaaatctttgatgtgatagaaaatcatggaaagttctaagttttcaaatccaagtaagcaggcacaaaatacattctaggtgaaayatccagggttgacaaaatgaaagaggctatatcagctccactatgcagaacttgaggcagagttttacaaaaggggtgaccctgtcctggagtggcagctgtggagaccttgtgcaagaagagaattctctaagacactgttgtttttcacataatattatttccagtcaccattattttgaatgccat

SEQ ID NO: 657466 - DNA, 613 bp, Homo sapiens
ttttcttaagagggttgacactcaaatgcctcttattcattaaccatcctatatcacctgtctctagcgccatcccactccttgccaaatcacacatagaagttgatgacaaatttatttctatatattttgagtatcactgaaaagcatagtatggtgttgttttrtgaaagagtgaatgtatagacactgatctcttcttctttgaaattttttgatccagaatttatttatttatatatacatatatttacagacagagtctcactctgtcatccaggctggagggcagcggcatgatcacagctcacttcggcctcaaactcctagactcaagggatcctctcacctcacccttctgagtagctgggactacaggcacatgtcaccacaccagacagtttgttttattttttgtagagatgggttctcactatgttgcccaggctggttttaaactcctaggctcaagtgatcctcttgcctcagcctctcaaagtgctgggatcacaggcatgagccaacacgcttggtccagaatttctaattcatcacataaatgaacaattttattggttacctagatgttacttatgttgttttatgcaacgaa

SEQ ID NO: 657467 - DNA, 546 bp, Homo sapiens
cacaagtgcagatgctggataggcagtcagatatatgtgcatggaacttggtaatawggccccagctggagttataaatttggagcttgtcaacatatatatgattttttttattccatgggatattatgagactttctacaagaatggtatagtttgagaatcaaaaagtgtgtaggacaaaaccctgaggaaattttgtatttaaagtttcaacagaaatggagaatccaggaagggtaaccaataaggataagaggggtataaataaacaatgaaaattacagtaacccagagagtaaactgtttcatggtagaggaagcagtcaacagaatccagttctttcctcagtatgattgaagacattgatgactgaagcaaaagaattcacatcgatcttattgactcaggaataagttgagttgtggagtatatggaaggagaagaagtggagaatcatagctaaaaggagaacatggactgtggaaggaatttttttacgaaaagtactaaattatgtttaaatgataactagaaggatgcacc

SEQ ID NO: 657468 - DNA, 546 bp, Homo sapiens
cacaagtgcagatgctggataggcagtcagatatatgtgcatggaacttggtaatatggccccagctggagttataaatttggagcttgtcaacatatatatgattttttttattccatgggatattatgagactttctacaagaatggtatagtttgagaatcaaaaagtgtgtaggacaaaaccctgaggaaattttgtatttaaagtttcaacagaaatggagaatccaggaagrgtaaccaataaggataagaggggtataaataaacaatgaaaattacagtaacccagagagtaaactgtttcatggtagaggaagcagtcaacagaatccagttctttcctcagtatgattgaagacattgatgactgaagcaaaagaattcacatcgatcttattgactcaggaataagttgagttgtggagtatatggaaggagaagaagtggagaatcatagctaaaaggagaacatggactgtggaaggaatttttttacgaaaagtactaaattatgtttaaatgataactagaaggatgcacc

SEQ ID NO: 657469 - DNA, 590 bp, Homo sapiens
cctcctaaacagaatcttctgggagtgggcatggaggtctgtatttttatcaagagaccctggtgattcttgacatcagacaacttgggaaacatcagagcacaattatgcaaagccatctgaaagaatggcccagagaagcaacaggggcagctacaaacagatggagtgaaaagggaatgcccattcagtgtccacacaagccctctctagatgaaagacagcatcccagtcatctyggtgccactcaggcccatcttttttttttttttttgagatggagtctcactttgtcgcccagcctagagtgtggtggcgcgatcttagctcactacaacctccgcctctcgggttcaagcaattctctgcctcagcctccagagtggctgggattacaggcgccagccaccacgttgggcccatctttaaggcatcctagtccccatattccaatcccaaaagcctgattagaagatgtcatcccatatggagtacttacaggaagaaaatgtgctggcaggcgtgtgcaagatttgggtgccctcagtagaattctcgctgtaaattaattctctttcatgttggatgca

SEQ ID NO: 657470 - DNA, 590 bp, Homo sapiens
cctcctaaacagaatcttctgggagtgggcatggaggtctgtatttttatcaagagaccctggtgattcttgacatcagacaacttgggaaacatcagagcacaattatgcaaagccatctgaaagaatggcccagagaagcaacaggggcagctacaaacagatggagtgaaaagggaatgcccattcagtgtccacacaagccctctctagatgaaagacagcatcccagtcatctcggtgccactcaggcccatcttttttttttttttttgagatggagtctcactttgtcgcccagcctagagtgtggtggcgcgatcttagctcactacaacctccgcctctcgggttcaagcaattctctgcctcagcctccagagtrgctgggattacaggcgccagccaccacgttgggcccatctttaaggcatcctagtccccatattccaatcccaaaagcctgattagaagatgtcatcccatatggagtacttacaggaagaaaatgtgctggcaggcgtgtgcaagatttgggtgccctcagtagaattctcgctgtaaattaattctctttcatgttggatgca

SEQ ID NO: 657471 - DNA, 385 bp, Homo sapiens
gactgaacaacaacaacaacaaaaagcatcagtaagccaacttttagtcagccatgtaactgaagtcttaacatatcactgaagtttgcagaggacagataaagtatttgaacacataatggcgaaaaccttccccaacatgttgaaaactataaaaacctacagacccaagaatctcaatragctccaagcacaagaaacaaggaaaattacctaaggcacataataatcaaattgcttaaaaccagttatatagagaaaatcctaagaaaaagaaagaagatatgctacggtagccaaagaaaaggaaaaaaagatatactacacatagaggaacaaagataagaatgtcagtagctttttaatattaataagaagcaatgga

SEQ ID NO: 657472 - DNA, 385 bp, Homo sapiens
gactgaacaacaacaacaacaaaaagcatcagtaagccaacttttagtcagccatgtaactgaagtcttaacatatcactgaagtttgcagaggacagataaagtatttgaacacataatggcgaaaaccttccccaacatgttgaaaactataaaaacctacagacccaagaatctcaatgagctccaagcacaagaaacaaggaaaattacctaaggcacataataatcaaattgcttaaaaccagttatatagagaaaatcctaagaaaaagaaagaagatatgctacggtagccaaagaaaaggaaaraaagatatactacacatagaggaacaaagataagaatgtcagtagctttttaatattaataagaagcaatgga

SEQ ID NO: 657473 - DNA, 657 bp, Homo sapiens
ctttgctttgttgaagttgaattccttttawgtacaaggattttaattggtattaaaacttccttttttatattattatataatacctttagtctcctaaaccattgattggatcactaaatttcatgttactctccctcccttctctcttccaccattctgtttttgtcagaagtactttttagtgttcagttttgtactcttaaatacttttatttaaagaaaaagaacttttattaccacacttcttgtctttaaatgatatcctttaactccttgcgatcgtagatgatagaatcagtaactctaccttcacttttttctcctttcccaatttttagcatttgtggtacctctgcattagcagagcaaacaacatttcctttccttcctctcaccccaatctccacatctgttgatctgctcatcagttaagtattttccgtttgtaccaacagtactttcaccataatttctgtcatcgtcccttgctttgcgaagacatcctctaatattttattcaagtgagtatcctttcagttctggtatgtttcatgttctttgtcttatatacttgaagaactttctaggcatcacatttctgactttttagtttgaaaatctagaatgttgctctactatctttgtgttgagaaa

SEQ ID NO: 657474 - DNA, 657 bp, Homo sapiens
ctttgctttgttgaagttgaattccttttatgtacaaggattttaattggtattaaaacttccttttttatattattatataatacctttagtctcctaaaccattgattggatcactaaatttcatgttactctccctcccttctctcttccaccattctgtttttgtcagaagtactttttagtgttcagttttgtactcttaaatacttttatttaaagaaaaagaacttttattaccacacttcttgtctttaaatgatatcctttaactccttgcgatcgtagatgatagaatcagtaactctaccttcacttttttctcytttcccaatttttagcatttgtggtacctctgcattagcagagcaaacaacatttcctttccttcctctcaccccaatctccacatctgttgatctgctcatcagttaagtattttccgtttgtaccaacagtactttcaccataatttctgtcatcgtcccttgctttgcgaagacatcctctaatattttattcaagtgagtatcctttcagttctggtatgtttcatgttctttgtcttatatacttgaagaactttctaggcatcacatttctgactttttagtttgaaaatctagaatgttgctctactatctttgtgttgagaaa

SEQ ID NO: 657475 - DNA, 657 bp, Homo sapiens
ctttgctttgttgaagttgaattccttttatgtacaaggattttaattggtattaaaacttccttttttatattattatataatacctttagtctcctaaaccattgattggatcactaaatttcatgttactctccctcccttctctcttccaccattctgtttttgtcagaagtactttttagtgttcagttttgtactcttaaatacttttatttaaagaaaaagaacttttattaccacacttcttgtctttaaatgatatcctttaactccttgcgatcgtagatgatagaatcagtaactctaccttcacttttttctcctttcccaatttttagcatttgtggtacctctgcattagcagagcaaacaacatttcctttccttcctctcaccccaatctccacatctgttgatctgctcatcagttaagtattttccgtttgtaccaacagtactttcaccataatttctgtcatcgtcccttgctttgcgaagacatcctctaatattttattcaagtgagtatcctttcagttctggtatgtttcatgttctttgtcttatatacttgaagaactttctaggyatcacatttctgactttttagtttgaaaatctagaatgttgctctactatctttgtgttgagaaa

SEQ ID NO: 657476 - DNA, 534 bp, Homo sapiens
gtgtcaggtctcccccttcacgtctgtggcggtggaaggaggtgggaggaggtaggagaagctggccccacacaggagaatgtggcttgctgtcttctcccctcccggagctgcccacggctgtggattaagcaggagtggagaggcgctccagactcttcctttcacttcctgcactgacagatcaatttggagtaatttatttataagctggattagtaagtctccatagagtaaacacagtgctcctgaatatagaaatgtagaggaatcccttcccagctgttcccaggctggagctaaatgctttggggatgaggacgtgggagggatgaggaaggtgtgtcacccaggcacactcagggttcctgggccacagcaaacagaaagcaagagccgagccaccccgccaggaacagatgyccaaaaacagtcttcatgaaatccctcctccctccggaatcctgtccccggctccggggtgggctcacagtgactgctctgtgccacagaggacacagagtgctcttacga

SEQ ID NO: 657477 - DNA, 551 bp, Homo sapiens
ttttccttctgccaattattctctcctctctcttgcaacattcatttgcttatggaagagcctcatctgtctactttccatgcctctggatctctttttcatattcttcatctccgtccctgctttttaatgcttatggctcttatcaccttccttaataatatctacaattctcaggtcatttsgtatcaattatcaacactctgtacctcaaactgtacttcaggttgaataatgaatttgtgctttacctctaagccaaatgaattggtctggtttagactggtccctttttctcaatctctgtgatttctaatagtccaggggcattttcaaactctatttcttgtcatcactttaaattattatatttctgaaaactcaaatcccaaattttcattcttgtagctttgtattgctctaaactcagattccctcactcccgctccactattctttaacctcattgaagccttcttacccttgacccactcatcacttcttaccagtgttattaaaataatcccactgccttgaatcatttcccaatt

SEQ ID NO: 657478 - DNA, 551 bp, Homo sapiens
ttttccttctgccaattattctctcctctctcttgcaacattcatttgcttatggaagagcctcatctgtctactttccatgcctctggatctctttttcatattcttcatctccgtccctgctttttaatgcttatggctcttatcaccttccttaataatatctacaattctcaggtcatttcgtatcaattatcaacactctgtacctcaaactgtacttcaggttgaataatgaatttgtgctttacctctaagccaaatgaattggtctggtttagactggtccctttttctcaatctctgtgatttctaatagtccaggggcattttcaaactctatttcttgtcmtcactttaaattattatatttctgaaaactcaaatcccaaattttcattcttgtagctttgtattgctctaaactcagattccctcactcccgctccactattctttaacctcattgaagccttcttacccttgacccactcatcacttcttaccagtgttattaaaataatcccactgccttgaatcatttcccaatt

SEQ ID NO: 657479 - DNA, 591 bp, Homo sapiens
ataccatggttcatgcataagattcattattgttgagatgacagttcttcccaaatttatctacaaattcaacacaatcccagtcgaaatccctgcaggcatttagagaagaaatggaccaagaacagccaaaacactccttaaatataacagggttggaggtcttacactacctgatttcaaggcttgctatatgttagataaatcaagacagcgtggtattggtctaatgacagacacatgaaataatgraatgatagtccacaaacagaacaacacttatatggtcaatttatgttggacacaggtgctagattaattaatagggaaaagggtatactgagacaagtagatgtctgaatagggaaaaaagtgaaccttgactcacacactacataaaaatttatgggaaaaggaaaatgaacctaaacttaaggactaaaactattaaatttatagatgaaaatacaggagaacatctttatgacactgagttgggcaaagatttcttaaacatgacacaaacagtataaatctataaaagaaaaaagttataaaatggacttcataaaattaatgacttttgctctt

SEQ ID NO: 657480 - DNA, 547 bp, Homo sapiens
agctggggttacaggcacatgccaccaagcccagctaattttttttttttttttggtgacacagtcctgctctgtcgcccagcctggaatgcagtggtgcaatcttggctcactgcaacytccacctcctgggttcaagcaattctcctgcctcatcctcctgagtagctgggattataggctcatgccaccatgcctggctaatttttgtatttttagtagagatgaggtttcaccatgttggccagcctggtctcaaactcctgacctcaagtgatccgcccacctcgtcctccaaagttctgggattacaggcatgagccaccgcacctggccagccatcttctttttttactctacatcctttacctggaggatgacatcctctccaaaggcttcaactcacacttctccagccacatctctctcctgcctgctcccaaaacatctccaactcaacctgactgttttgcagtgggagtatgcaaagctactcccaaagtctgagaaagctgagaggccaaagaaagaggctgacatatccaat

SEQ ID NO: 657481 - DNA, 441 bp, Homo sapiens
gctctcctcccctgggcagcagagygcaaacctggggagtggacacacgtagaatgccaggaggagggaggaggcccagccccactgtggccagagggtgtcagaagcacaggacaagcaggaaggaagcctgggagtcacctaggccagccttctcatgcacagagaagtgaacagaggcacagatgaggcagggacttgccagcctctcaaagctgaggtcggaggccaggtgtcctggcccagggttcttgcactgtctgtggtcctgggtgctacaggaagagtccccatggaggcaggagagtccctgacccacctcccaacatagttgggtcctttgagacacagtgctgttgattagggggtagggtaggactgaaggactggattcctccaggcaagagacaggagcagagccctcctcccccttgggttctg

SEQ ID NO: 657482 - DNA, 656 bp, Homo sapiens
tcatctaagatagtggacatcttgggcttttgatattggcatcaaagctcctacaaagtgctctgggacccattgcaatatagtcttccttggaccactctaagcagaggttcttgagagagaaagaagacaaacatgttatgagaataaatcatcattaaggacaaagagactgaaaaagcagaacaatcttgagcaaaggatgaggacaccagtcatctctttctgcaccagcatctctagtgcccaagaacttctggcacatggtattacactttatctttatctttatctttatctttatttttaagggaagggagaggtcaagcatgagaaagactgatgtggaagtaaagaaacctgaattcttgaccccrccctgctactagccagccttctgatatcaggtacacttttatttcatgtatttatcaagcatccagtacctagccaagcatagtactggcacttcaggaacaacacagatgaataagaaataggatctgtttttaagaagcccatggggaagcagacccatacataaaatctaagccacaaaatattgtaggatctactatgtagggtgcttgagggtaggtcccaggggtctccaagaaatgcatgattgatggtaactggtttgcggaggaaaggat

SEQ ID NO: 657483 - DNA, 632 bp, Homo sapiens
aagtcattggttttcaatttgtgtgtgtgtgtgtgaacaaaaagcttcttcacaccaagtcttacttggaagaccctggccccccaatatataacatgataatagtgaagttcatcttgttcacataaaatggggaggccgtgggagcctcagtaccacccacttgccatcccctcagctaaaatcctccacatatataagttcttttacttttctctgactcaagccaaatctttctcccctcgtggcagcttctctctgatcatcccagccacgggggccctgcccgtttctgaactcctaggagtcctactgtgtactcttgtaacatatacagagtttgtaccaatgaacactcacattcactaagtcttgctgaaggccaagtccagtgacatgcactttacatacttatctcatttaatcctcagggcaatcctgggaggtatatactctcactatctccactttactcatgagaaaatagaggctcagagaggttaagcaatttgccagggtcayatagctatgaactagcagcactaggatttaaaccccgagctaacccatttactgtttctacttttgatgtgccattatttgatcttttcaagtatattgtgaactgaatt

SEQ ID NO: 657484 - DNA, 555 bp, Homo sapiens
tgttctcaaaataggaagaattttccagcatgtaatcatccttttgggcattatcagacttttagatatcacaggagtaacttagcatttctacatgtaaagatttttatccattaatttctcataattctataaagcaaaataaaaaatttataaaaagcaatcccaaagcatagaaaataaaatggagcctctgagcttaaatctaaatgttgtcacttggaataattcttttctttgtggtcaagcctaccttggttgccarcttgactcaaaataaaagaactatttcaagtgattttaaaattcagtaactggtatgttcttgccactgcactccagcttggatgacagtgagcctctgtctctgaaaaaaaaaaaaaaaaatcggtaattgggatatatcctacagtcaaaacaactacaaaaaaaaaaaaagaaaagaaaatcttaaactgttttcagaaatcatagtgttggtagtagttttggtattgttattctaaaactgtttcagagacatggtaagatagaaaaaatgggtgggtaattata

SEQ ID NO: 657485 - DNA, 634 bp, Homo sapiens
ttattaatgaagtaaggatcaatatgtacctccatgaataaagaatgtaaaattgactaaatccaccttatttatgtacttttttgtacttatatttatttagttcrtttctagatcattgacatttagttggtggcagtcagttacgtgaggtaggcctttttgtgtaataattgaaagggaattttggtaggtttaataagagtttaatgatgttcttgccccaattgtggaaatctaaatatgtttcttgccatagcaaaaaaaaaaaaaaatttacagatgtgattaatttaagaaacttgacatagagggattatttgaatgtctggatggatccaaatgtaatcacaaaagttgttcaaaaagggaggcaggatggtcagaatcaaaatatttattgagatttttaaatgtaatatttgatgtaatatttagtgttttttcaaggtaaaaaataagtataatgatagaaatcgagaagagagagcgagagagacttgaaaatgctaaatttggctttcaatggggaggaagggcccatgagccaaggaatacaagtgatctctagaagctagaaaaggcagagttggaatcgctcctggggtttccagaaagaacatagccctgttga

SEQ ID NO: 657486 - DNA, 544 bp, Homo sapiens
  misc_feature 160, 164, 165, 166, 167, 168, 169, 170, 171, 172, 173, 174,175, 176, 177, 178, 179, 180, 181, 182, 183, 184, 185, 186,187, 188, 189, 190, 191, 192, 193, 194, 195, 196, 197, 198,199, 200, 201, 202, 203, 204, 205, 206, 207, 208, 209: n = A,T,C or G
  misc_feature 210, 211, 212, 213, 214, 215, 216, 217, 218, 219, 220, 221,222, 223, 224, 225, 226, 227, 228, 229, 230, 231, 232, 233,234, 235, 236, 237, 238, 239, 240, 241, 242, 243, 244, 245,246, 247, 248, 249, 250, 251, 252, 253, 254, 255, 256: n = A,T,C or G
  misc_feature 257, 258, 259, 260, 261, 262, 263: n = A,T,C or G
ccaaggtggcagatcacgaggtcaagagacggagaccatcctggccaacatggtgaaacactgtctctactaaaaatacaaaaattagccgggtatggtggcgtgcacctgtagtcccagctacttgggaggctgaggcaggagaatcacttgaacctgngagnnnnnnnnnnnnnnnnnnnnnnnnnnnnnnnnnnnnnnnnnnnnnnnnnnnnnnnnnnnnnnnnnnnnnnnnnnnnnnnnnnnnnnnnnnnnnnnnnnnngtggtaggagtaaaaaaaatactcaaaaggagtgtatgttgttgccgggggcggggtgtcgagaatgaatacattgggaaatatatatttttttctatcaatatttttgttctacagctagaataggcctatcttttccaaagagaatcwtacatataaaatcctgcatctgcagcaaatactctgaaaactgctttttccctgaaaactgtgttcccaaatctgaatacctttcctccctaaagctgcatttgtagcatttaaatattgatgtttaacag

SEQ ID NO: 657487 - DNA, 589 bp, Homo sapiens
agtacatgggcacaatcttggctcactgcaacctccgcctcccagattcaagcgattctcctgcctcagcctccccagtagctgggattacaggcatgtgccaccacactcagctaatttttgtatttttagtagagacaaggtttcaccatgttggccaggctggtcttgaactcctggcctcagatgatccacccatagtggcctcccaaagtgctgggattacaggtgtgagccaacatgtccagcctctttctatttttagaaggaggaatgaaagctatcctttcttttctttgaaaagcaatactaaaaatatttcaaatgctttgacacttagaagaaaagtagagaaaatggtattkcatatttaaatattattaaacaatgaacatttattgtcatgtataagctgcaagatggagggaggagtaaaaaaagagtaaggtgacttaacactgtcgtaccttcaatggcactaatgatctcatgggagaaaaagagaaaaacttaagaaacagcatagaggtccttttgaaaaacctaagaatttttaaaaattctttgggttaagtaatgaaaggcaagg

SEQ ID NO: 657488 - DNA, 589 bp, Homo sapiens
agtacatgggcacaatcttggctcactgcaacctccgcctcccagattcaagcgattctcctgcctcagcctccccagtagctgggattacaggcatgtgccaccacactcagctaatttttgtatttttagtagagacaaggtttcaccatgttggccaggctggtcttgaactcctggcctcagatgatccacccatagtggcctcccaaagtgctgggattacaggtgtgagccaacatgtccagcctctttctatttttagaaggaggaatgaaagctatcctttcttttctttgaaaagcaatactaaaaatatttcaaatgctttgacacttagaagaaaagtagagaaaatggtattgyatatttaaatattattaaacaatgaacatttattgtcatgtataagctgcaagatggagggaggagtaaaaaaagagtaaggtgacttaacactgtcgtaccttcaatggcactaatgatctcatgggagaaaaagagaaaaacttaagaaacagcatagaggtccttttgaaaaacctaagaatttttaaaaattctttgggttaagtaatgaaaggcaagg

SEQ ID NO: 657489 - DNA, 589 bp, Homo sapiens
agtacatgggcacaatcttggctcactgcaacctccgcctcccagattcaagcgattctcctgcctcagcctccccagtagctgggattacaggcatgtgccaccacactcagctaatttttgtatttttagtagagacaaggtttcaccatgttggccaggctggtcttgaactcctggcctcagatgatccacccatagtggcctcccaaagtgctgggattacaggtgtgagccaacatgtccagcctctttctatttttagaaggaggaatgaaagctatcctttcttttctttgaaaagcaatactaaaaatatttcaaatgctttgacacttagaagaaaagtagagaaaatggtattgcatatttaaatattattaaacaatgaacayttattgtcatgtataagctgcaagatggagggaggagtaaaaaaagagtaaggtgacttaacactgtcgtaccttcaatggcactaatgatctcatgggagaaaaagagaaaaacttaagaaacagcatagaggtccttttgaaaaacctaagaatttttaaaaattctttgggttaagtaatgaaaggcaagg

SEQ ID NO: 657490 - DNA, 607 bp, Homo sapiens
atataggcactcataagttgtcatatataggtggagatttaaagaacagtctgtaatgacgttacatgtagaagtgtaattattaatcctgccttttacatttatgtagtcttttacagtttataggataccttaacatctgttgccttactagacatgtgagttctaactaagactgccatttatttaaccctgaaagtgggtaagttatttgagtttcagcttcagtttataaatatgtcacctactttctgtgtaggtattactagaaaacaataaaagatagtatccctaaggaagattaatttaaattacataactttgtatttaaattcctcatataaaatataagataccaagatcgaaatttattcagatataaactgtactatataccaacatcttttattgttgtatttttattgtaaattatctaattgtttatcttacagattttctggctttattataaaatatattattctttagtttcattcctaacttgcttacccrgccctattgtaaatttggttgttgtatcattttatgtttatagtttctgtgacaacctgtacagtttgatccacctagcaagtatttaattaat

SEQ ID NO: 657491 - DNA, 622 bp, Homo sapiens
aaggacttaaagaatgataactatcatttctcttaaatcttccagatttggaaggatatatatattcagcacattgacaggcaatcccagtagtcctaaattaaaagacattaaaaattagtgaaacttttcctacctttagcctgtgtaatcctggatgaccaagcataaaattaaattgagtagagtataccactgtaacatttcctgaaaggtattctaggctctgagtaatttctttggggtctgaagatcagtttgacatatcctcaagtatcatgagttcattataattaagaaaaagrgagtaaatctggagaatgagccactttcttactactccttgacctcagttctttttttcagagacagggtctcactttgttgcccaggctgccaggctggagtgtagtggcgcaatcgcatctcattgtaacctccaccttctgggctgaagccatcctcctgcctcagcatcctgagtatctggaaccacagcaggtgcacaccaccatgccaagctaattttttaaaaagttttttgtagagatggggtcttactatgttgcccaggctggtctcaaactcctgggcttaagtgatcctcctgcctcagcctccc

SEQ ID NO: 657492 - DNA, 596 bp, Homo sapiens
tgctcactgcagccttgacctcctgggcccaagtgagtctcccacctcagccttttgagtaactgggaccacaggtacgtgccaccacacccgggtaattttttaattgtagagacagggtcttgctatgtgcttaggctggccttgtgaactcctgggctctagtgatccactagcctcagcctcccaaatttatgggattataggcatgagccaccctacctggcctgttccctgaatttttttttctttcaggtgtttgtgcatatgtgtgtgtgtatgggtataacagagagacagagagaaagaaacttttctatcwcactttgcaatcagaagtttgaagtcttatcttttggcttttgtttcagaaatatttcaaatgtagactctctcctttaccacactgtccccttaggcaaggtctttgccattcttctgagactattgcaacagactcccaacttctgactgtgggcccttctcaaaaatgattgtttatgcaataaatctaaacccaagacaactacaacaatacaacaaattctctgcttaaaaacttccaatgtctgccgggcgcggcggctcacgcatgt

SEQ ID NO: 657493 - DNA, 628 bp, Homo sapiens
cctccccacaaagaaaaggatgtagcctgtgacatctttctagttataagcaggagtttaattttttgggaaccacggctacatcacacaatttcttctttgtagagaaagccaaaatacctccctgtatgagagtggcttgattgagaaggggatctgaataaatgggaggatttgaaatatttattcaaaataatctttttgaaaatgagtgaaaaatacaggtatgtaggggtgagcaaaacttcaccctccgaargttcactgaaaatcaacggaaaaaaggcagattaatagaaaagtcaaacttcatcataggtttatgtgacatgggaaccttcacaatgaaggcccagaggtacaggggaaactgtccatttttatgcttaggttcaacaaagtaccaactgccatgtagaactgtgattggataaaaagggtgtcatctaatgctaatagactggggaaacatagcaaggcctctgtgtctagactcttcttggcctctggcaagattctttccttctgggtattccttcctcattctagaggaccctctctggaatgagggagggtcttatgacctacagccaaacaacgtaagacatatactttcttatggctagct

SEQ ID NO: 657494 - DNA, 529 bp, Homo sapiens
cgactcattaggcaacaggaatttttcagatctattatgatcttatgcaaacactgtcgtatatgtggtctgttgttgagtaaaactttgtaatgyggtgcatgactgtagttcaattgcaacacagccatgctctttcttttccatattctctatggctacttttggactatgacagagttgagtatttacaaaagagaccatatggcccacaaatcttaaaatatgtactctcttctcctttacaaaaaaaagcttgctaaacttggcttaatagtttttaaaggctttacatttattattttgtctttatcttcacaacaaacttataaaatatatttgaaatctgccttttgctatgtatcctcttgtagtttaatagttcattagaggaattctgcaggagaaggttcaatatgatgaaacttttcaggccactcttcataagattgactctgtcctgttgttcaaggctactgatgctgatcaaggaatcaagtgaatctcctccacagactgtgaacaagta

SEQ ID NO: 657495 - DNA, 524 bp, Homo sapiens
tgaaatgtcagatgtatttcatatacatatacaattattatgtatcagttaaaaaaatctcaagcctgtctccttttctggctatttaagccatttggaaccattttgggaaggctcccttgctcttttcaaaaacatcccattatagaaaagattttcrtaacctcttggggtgtgtgtgtgtgtgtgtgtgtgtgtgtgtgtgtgtgtgcgtgtgtgacatcattggtcttgacatccaaatcaaattttgggcagggattcatcctgtttctttaggatggcgattaacaccatcctaatgtaagatgttaacattagggaaaactgggtggggggtattcaagaattttctttctttgcaatttttctgtaaatctaaaactgctctaaaagtttatttttaaaaagtcattgcatgatagttcaagatgacacaggtataaaataactctgtctttggggtccatgctgacttctaggtgaatctatttcttcaagaaaccatgtagttttgccagaaa

SEQ ID NO: 657496 - DNA, 524 bp, Homo sapiens
tgaaatgtcagatgtatttcatatacatatacaattattatgtatcagttaaaaaaatctcaagcctgtctccttttctggctatttaagccatttggaaccattttgggaaggctcccttgctcttttcaaaaacatcccattatagaaaagattttcgtaacctcttggggtgtgtgtgtgtgtgtgtgtgtgtgtgtgtgtgtgygtgcgtgtgtgacatcattggtcttgacatccaaatcaaattttgggcagggattcatcctgtttctttaggatggcgattaacaccatcctaatgtaagatgttaacattagggaaaactgggtggggggtattcaagaattttctttctttgcaatttttctgtaaatctaaaactgctctaaaagtttatttttaaaaagtcattgcatgatagttcaagatgacacaggtataaaataactctgtctttggggtccatgctgacttctaggtgaatctatttcttcaagaaaccatgtagttttgccagaaa

SEQ ID NO: 657497 - DNA, 582 bp, Homo sapiens
tgtttcttgtatggaacagatcattgcgctcggttttttttttttttttaattttatccattcagccactctgtgtcttttgattggagagtttagtccatttatattcaatgttattattgataaataaggactcactcctgtcattttgctatgcatttcctggttattttgtggtcttatcttgtttccttccttcctatctttgttttagtgaaggtgattttctctggcggtgtgttttaatttcttgctttttttgtagcygttgtatgtttttagatttgaggttaccataaggcttgcaatactatcttataacccattattttaaactgatgatgacttaaaactgattacataaacaaacatgcaaaatgaaaactaataaatactctacactttaaccttatcctctcactttttaactttttattgtttctctttatgtctggtcctgtctatatcttgaaaagttgtagttattatcttcattggttcatcttttagtctttctactcaaaatatgagtagtttacacaccacaattataatgtatactattctgtgtttttctgttta

SEQ ID NO: 657498 - DNA, 582 bp, Homo sapiens
tgtttcttgtatggaacagatcattgcgctcggttttttttttttttttaattttatccattcagccactctgtgtcttttgattggagagtttagtccatttatattcaatgttattattgataaataaggactcactcctgtcattttgctatgcatttcctggttattttgtggtcttatcttgtttccttccttcctatctttgttttagtgaaggtgattttctctggcggtgtgttttaatttcttgctttttttgtagctgttgtatgtttttagatttgaggttaccataaggcttgcaatactatcttataacccattattttaaactgatgatgacttaaaactgattacataaacaaacatgcaaaatgaaaactaataaatactctacactttaaccttatcctctcactttttaactttttattgtttctstttatgtctggtcctgtctatatcttgaaaagttgtagttattatcttcattggttcatcttttagtctttctactcaaaatatgagtagtttacacaccacaattataatgtatactattctgtgtttttctgttta

SEQ ID NO: 657499 - DNA, 597 bp, Homo sapiens
catgtgtttgacagttcctccttcacacactctctctcttctgccaccttatgaagaaggtgcctgcttccccttcacattccatcatgattctaagtttcctgagctcccccccagccatgtggaactgtgagccaactgaacttctttcctttataaattacccagtctcaggcatttataatagtgtgtaggctgggcatgggggctcacgcctgtaatcccagcactttgggaggccaaggcgggttgatcacaaggtcaggagattgasaccatcctggctaatatggtaaaaccccgtctctactaagaatacaaaaaaattagccgggcgtggtggggggcgcctgtagtcccagctactcggaagactgagggaggaaaatggcgtgaacccgggaggcagagcttgcaatgagctgagatcgggccactgcactccagcctgggtgacagagcgagactccacttaaaaaaaaaaatagtgtgtaaacggacgaataaaccatctatcacttttcacacaaactttcctacctgtactttgtatccaaacctttgcctttttaatctcctgaaagaataaggaattgt

SEQ ID NO: 657500 - DNA, 576 bp, Homo sapiens
tggcagctgctaatagcaaaataaaaaaggtcctgttgttcacaactgaggcacaaaagtacttaggaatgtagggagcagacaccccctccacatttcacttggagccatgyggtctgtgtcaagatggcctgtgtgaagagccaccagttatagttcatgtgggtttccattattctttgggccttcactttgcccaaggcacacagttaatataaccacaagaatgtgaacacttttatttgttctgaaatatgcttttaacctttacagtgggaaaggcccttaatttatctattccttattattttccagccctcatattttctatttcctttctgtgctcctgaaaaacaagatgccatgtctaaaatcctgtgtgcctttgtgcagggcaaagccatgtcctcgtgcacagtcatggggtatggccgagggttatgtaacaagagctgttcctagtgcagttggctcctgcaggagaccatgatgtggcaactacaaagctcatcgcaggtaggctgagcatgaacttgtcaagcaagagccgtggctcggggcagcctcttggtcagc

SEQ ID NO: 657501 - DNA, 556 bp, Homo sapiens
tatacaagactattcattacaatactagcaatagcaaaagactggaaataacccaaatgcccatcaacaagggactagttaaagaaattgtagtccagcgacacactggagctgtcaaaakgtataaggcagatttctgcataccgctaaggagtccaggatacagcaatagaggaaaaagcaaagtacaaaagagtgtgtactgtaaattaccatttggttaagagatgaaagaatatatgctatatgaacacatttacttctgtattcaaaagaaataaagacaaacaaaaactaataaaaagaagaaaaaatatttaccaagtaaaggtcagaataggaaggaagaaatggggaaaaaagtgagatctctcttaataaacatcagtttggaaaatcatggaaacttttatacaattaaaaatatataaataactcagaatacaaaacaaagcaaactctaccatttgaaatcaaatggtacatagctgaaataaatggaactaattatactaagctgaaataaatggaactaattatacacacacattttata

SEQ ID NO: 657502 - DNA, 556 bp, Homo sapiens
tatacaagactattcattacaatactagcaatagcaaaagactggaaataacccaaatgcccatcaacaagggactagttaaagaaattgtagtccagcgacacactggagctgtcaaaatgtataaggcagatttctgcataccgctaaggagtccaggatacagcaatagaggaaaaagcaaagtacaaaagagtgtgtactgtamattaccatttggttaagagatgaaagaatatatgctatatgaacacatttacttctgtattcaaaagaaataaagacaaacaaaaactaataaaaagaagaaaaaatatttaccaagtaaaggtcagaataggaaggaagaaatggggaaaaaagtgagatctctcttaataaacatcagtttggaaaatcatggaaacttttatacaattaaaaatatataaataactcagaatacaaaacaaagcaaactctaccatttgaaatcaaatggtacatagctgaaataaatggaactaattatactaagctgaaataaatggaactaattatacacacacattttata

SEQ ID NO: 657503 - DNA, 541 bp, Homo sapiens
tctttacttttaatatataggtctttatatttgtagtggatttatcatagacaacatatagttaagccttattttttggagtatttagacaattgacatttaaagtgattattaatattgttggattaatatctatcacatctgttactctttacatttattcctcatttttccctagttgtgtcttctactcttrttctgccttatgtaaggattttctataatattattttctttattttctttttatatcagtttgttattgactgagtgtttgtgtgccctcaaaatttatatgttgaaattcagtctccaatgtgtttgtatttggagcttgagcttttgggtggtaactggatgatgaaggtggtgccttcataaatgagattactgcctttgttagaagaagtcagagaggttactctctgctctctgccttgtgaagatataacaagaaggtgtacatctgcaaagataccaggaagtagatcctcaccagatattaaaaaattttggtacctcaaacttggatgccagactc

SEQ ID NO: 657504 - DNA, 541 bp, Homo sapiens
tctttacttttaatatataggtctttatatttgtagtggatttatcatagacaacatatagttaagccttattttttggagtatttagacaattgacatttaaagtgattattaatattgttggattaatatctatcacatctgttactctttacatttattcctcatttttccctagttgtgtcttctactcttgttctgccttatgtaaggattttctataatattattttctttattttctttttatatcagtttgttattgactgartgtttgtgtgccctcaaaatttatatgttgaaattcagtctccaatgtgtttgtatttggagcttgagcttttgggtggtaactggatgatgaaggtggtgccttcataaatgagattactgcctttgttagaagaagtcagagaggttactctctgctctctgccttgtgaagatataacaagaaggtgtacatctgcaaagataccaggaagtagatcctcaccagatattaaaaaattttggtacctcaaacttggatgccagactc

SEQ ID NO: 657505 - DNA, 609 bp, Homo sapiens
acaatttagccacctccaaatttaaaattccaaattagatttactacagattattatcactygtttctttcttttgcttatgttcatattgtggatagattttaattgagaatttcttaagcagtgtcagtggaagcagttttattgtcgtgttgtgtacctcaactattgaaagtatctgctagttttgatcttttgacagaaagagtgtattgttaggcgtagcttttattactaaatcatgaaattatgagttggaagccattattctcctcctagtgagaccatacaactgtgcaattttctgagtccatgacaaaatgctaacctataatcaagtctctttttgtatttcaacctttggatgggatccaagagagtcttatcctgaattctgtgttattacagatagtgatctagctaagttctagccaagtgatctagctagtgtattgaaggcacaaaatatttgaacattaacttttaattttaggagtttattataaaacacagttgtattaactattttgtttctcttgcaaacattagggaaaatgaccaagttttagtttcagtgaatgaaggaatttcatatttttcccttagaaa

SEQ ID NO: 657506 - DNA, 609 bp, Homo sapiens
acaatttagccacctccaaatttaaaattccaaattagatttactacagattattatcactcgtttctttcttttgcttatgttcatattgtggatagattttaattgagaatttcttaagcagtgtcagtggaagcagttttattgtcgtgttgtgtacctcaactattsaaagtatctgctagttttgatcttttgacagaaagagtgtattgttaggcgtagcttttattactaaatcatgaaattatgagttggaagccattattctcctcctagtgagaccatacaactgtgcaattttctgagtccatgacaaaatgctaacctataatcaagtctctttttgtatttcaacctttggatgggatccaagagagtcttatcctgaattctgtgttattacagatagtgatctagctaagttctagccaagtgatctagctagtgtattgaaggcacaaaatatttgaacattaacttttaattttaggagtttattataaaacacagttgtattaactattttgtttctcttgcaaacattagggaaaatgaccaagttttagtttcagtgaatgaaggaatttcatatttttcccttagaaa

SEQ ID NO: 657507 - DNA, 588 bp, Homo sapiens
atcatgaataaatagtgaataacaacattctgtacattagacatttttgtgtcgaattctcagttatgctctggcagggcaaatcacaaaatattttgtgacagtgcttcagcattaaccaagaggactcattcatcacatggacaaacaaaccagtgatgaaaatcccagccctgtttgcttgaccagtgtgatcccaaagagtcaccgtgggcatattagtgttcatcatttacttgagagaactgtcatttgaaaataagttttctgtcaataaatttattaaaataagtggaggtaaatgcacattctatgttacgtgttttagtgtcactatcatgaactgttattactaccaatatgcagacacatacatacacacatgcatacctacatgcctacctacataaaactggtacagagttgtgagtgtcactgtaatgacatgaaattgagctagggccactttgaataaatgtgaaaagttgccttcatgagttataaagtccatctctcagaatggtcrtgaaaatcaataagcattgttaaccaagctttctaagtaatttctgatagaaaatcagacac

SEQ ID NO: 657508 - DNA, 602 bp, Homo sapiens
tgggggttggaatctagagttctgagatatccagtggaatcatgtaaaatatttgacgtatctttattcaagtaatataactatgttttattactaatatacttacagcactatatttgcacttgtaacatcaatcagattagttataattaatatataaatatacttgtaatattctattcatgttaattataatattaattctatgcacttaaataaatattcaaactaattttattgagagtcccaataagtattakgaggttagcagtttgtcagatggagaagagaattaatcaaaattctcactgtctcccatctgttttgaatggcaaagacaagaaatatgttagtgaaaagttaccacacagctgaaactattctcttttaatgtgtgaagtgccaaaaaatttaaattttgacactttcagcaccttgatattactgaaaaccaggtctgcaaccaggaagatattgaaattcatccctacagagcaaggagactaaacaaattaaacaagttctcaaatgtatgtcatttaatttttaattctccagtggcacttgggatatctcaacttttggtaggaatttttttgatg

SEQ ID NO: 657509 - DNA, 599 bp, Homo sapiens
tcccttaaacatctatagttaaaggagcttttgctatctcctaattttgaggagcaaaaaatgtaacaaaatatgaaaagactttaatctgatgtatttacatagtaaaggtgataacagtagcataattttacaatgtaatgatcaacagcactgaaacaataattggcaaatggttccatcagaaaatgatgacaaaatttaaattgagcaataaattcacaattctttcttccctaattggatatgtctgaattgcagtcactgcatactaaaaataatatggtaatggatatgtctttttccggtgataatttaggaaccattcatacttaccagttaacatatgatatatggttgtatgtaatacagcaattttatttaggaaacatgtcatttccaaaagtaagctcataatagtattttctagatgaataaactctagtgtttttgttttgtttttctaaaagcacatgtgtcyaaattctctgcctaattttcctgaccttggagaaaaaaactaaaggcacagatgttatatgtttagaagttgcattataagtgggtagtatattgttttacaaaaatagttttgtgaa

SEQ ID NO: 657510 - DNA, 619 bp, Homo sapiens
catatcaatcacacttcaaaagtgcagactattccttcttagygggcacacccagaacagaaatctattatatattgtgtcatacagcaagtgttaacaaattcagaggattgaaaacatgtggactattttatctgactacaattcagttaagcaaaaaatcaaaagcaaagagaaaataaaacattacccatatgtttggaaatgaagaaacactgcttctggatgtaattgacaggtgcatgaaatggacacattcaacacacaccaatctacctctccttttcctcactgtcttcatgactgacactgttatccacttcattgcctaaggcatcatttttggtcccactgacctcaccttagttcaggctttcaccagtgatttaatttttttgcaacttgtctcttccctctgtggtttatgcttttcctgtctaccacagtgtttttccaaagaaaaaaattatttgatcatataaatcctttatttaaaaattttagaagacctcctcaataccaagaaaatgcattccttgaatagagtctctttcttttcatctttatttccccccaagcgcttatggtcttcttttgtgcatcagctatgctaatccat

SEQ ID NO: 657511 - DNA, 411 bp, Homo sapiens
taagaatgaaaacatttgtaaatcaatggagcatagaacagcttgactcctcaagttagagtttctacaaatttatttttaagtcaaatttattttaatagttaaaagaatgsacaggcctacaaaattacatagaaggttatctgaattctagtagagttagtgaggaggaaattggttattatattagtcaattctcacagtgctataaagaactacctgagactgggtaatttatgaagaaaagaggtttaactgactcagttctacaagctaaacaggaagcatgactgggaagcctcaggaaacttacagtcatggcaaaaggcaaaggggaagcaaggacctacttcacatggtggcagcaaagagagagagagtgaagggggaagtgtcacacacttttaaact

SEQ ID NO: 657512 - DNA, 602 bp, Homo sapiens
tatattattctgggtggcttattgcctgacattaccaaggagcagaaaagcagcaattctaacttgaaatattaggagaaacgttgagagagaatcagagctggaagggacagtgtatagaaatgagggcaacagggtggttggctctcagagtttctactgttcttcctctcctcacatctccatccacactccctcaagctagaccacacccaagaggcaggccaacttagggtaagagcagtgcctggacctagagtatttcaaactgagagaactggagggagaaaactgaagagtagagggaagagaagatagagaatggtaaaaatgatactgcaaccagatctctccgtcctgaagcactccttcyctttacctaaggaacacaagcaagagcctaggtcatccttactctcatagacagtactggtcaagatatttagggatctcacaggaataaaatatgcaaaatcatgagcaaaacaattatgaaagcaagaagacaaatggaataatctattccacattaggtaggagtattaataatcagaaaataagatttttaaatacataaaatttcatcctcaaagaaagcaggg

SEQ ID NO: 657513 - DNA, 647 bp, Homo sapiens
ccctttacctaaggaacacaagcaagagcctaggtcatccttactctcatagacagtactggtcaagatatttagggatctcacaggaataaaatatgcaaaatcatgagcaaaacaattatgaaagcaagaagacaaatggaataatctattccacattaggtaggagtattaataatcagaaaataagatttttaaatacataaaatttcatcctcaaagaaagcagggaggatataagaaacatgatgaagaaaaaagagcattgcagaaaagaaatttatgacaatgggtataaaaatgtaacagttgatataaataactatattactagactaaattgcrgaataggcacaaggcaggcataagtagtttgaaagatgtcatagaggaactctcccagtagaggacacaaaggtaagtaaagtcttaagaggtgtgaaggacaaaataataagtatctgcttagcaggaaacccataaagaagtaaaagaccaaatgcagaaataaaattaaatgaaaaaaataataactgagattttttttttaaattagaaagtaaaaaggacgactgtattagtctgttttcacactcctaataaagacacactcgagactaagaaatttacaaaagaaaagggtttca

SEQ ID NO: 657514 - DNA, 647 bp, Homo sapiens
ccctttacctaaggaacacaagcaagagcctaggtcatccttactctcatagacagtactggtcaagatatttagggatctcacaggaataaaatatgcaaaatcatgagcaaaacaattatgaaagcaagaagacaaatggaataatctattccacattaggtaggagtattaataatcagaaaataagatttttaaatacataaaatttcatcctcaaagaaagcagggaggatataagaaacatgatgaagaaaaaagagcattgcagaaaagaaatttatgacaatgggtataaaaatgtaacagttgatataaataactatattactagactaaattgcagaataggcacaaggcaggcataagtagtttgaaagatgtcatagaggaactctcccagtagaggacacaaaggtaagtaaagtcttaagaggtgtgaaggacaaaataataagtatctgcttagcaggaaacccataaagaagtaaaagaccaaatgcagaaataaaattaaatgaaaaaaataataactgagattttttttttaaattagaaagtaaaaaggaygactgtattagtctgttttcacactcctaataaagacacactcgagactaagaaatttacaaaagaaaagggtttca

SEQ ID NO: 657515 - DNA, 437 bp, Homo sapiens
atatagaaagacccaatttgttggtagcaaaagtcatatataaaagttaaatcagaaagatatcagtcaggtttggagtattaccattttgtaagcagagacagtcactgctgtgtaaaataatggaaagacagagatatcagtctcgaacaagctagggtgtagggttgcaaaactgtgtcttacagcttgctcacattacttttgagtctgcattagatctaatttgtaaataataagaaacagtctaaaaattcaaacagtttcctctgagagaaaagaaactttctaatawgtactgacaccagagaagaatagaacaaagaaaactgaatacagaaaagcacatctatgtatattaatatcctatgtttagtactgctattcttaagggcctatttacctcttagcacatttagattttccggtagaaattg

SEQ ID NO: 657516 - DNA, 569 bp, Homo sapiens
ttgttttatcaaagattaagcttccaaataatgctttagaaactgctatttttagtattttctatgaacagtgttctgtggtagaacactggaagcaggtttacaaggtcatgaatagaaagatctcagtggaaagcatttcatgagaatcttgttaaaaactttttaagtgacttataataatwttacttatttatgggttccaaagcaatgttttgatacatacaatatgtagtgatcaaatcatagtaattagcatatctactatctcaaacatttattatttcattgtgttggaaacattcaatatcccgtctactagctactagaaaatatataatatattgtaaactatagtcatcctacagtgctatagaacactacaatttatccctcctatctgtaattttgtattctctcaaaaatcttgccctattctctccttctcaactacccccccaccaggctctggtaacctctgttctaccctttacatttatgagatcaacctttttagcttccataaatgcatgagatcatgaaatgttcaacttcctgctccttgctta

SEQ ID NO: 657517 - DNA, 569 bp, Homo sapiens
ttgttttatcaaagattaagcttccaaataatgctttagaaactgctatttttagtattttctatgaacagtgttctgtggtagaacactggaagcaggtttacaaggtcatgaatagaaagatctcagtggaaagcatttcatgagaatcttgttaaaaactttttaagtgacttataataattttacttatttatgggktccaaagcaatgttttgatacatacaatatgtagtgatcaaatcatagtaattagcatatctactatctcaaacatttattatttcattgtgttggaaacattcaatatcccgtctactagctactagaaaatatataatatattgtaaactatagtcatcctacagtgctatagaacactacaatttatccctcctatctgtaattttgtattctctcaaaaatcttgccctattctctccttctcaactacccccccaccaggctctggtaacctctgttctaccctttacatttatgagatcaacctttttagcttccataaatgcatgagatcatgaaatgttcaacttcctgctccttgctta

SEQ ID NO: 657518 - DNA, 569 bp, Homo sapiens
ttgttttatcaaagattaagcttccaaataatgctttagaaactgctatttttagtattttctatgaacagtgttctgtggtagaacactggaagcaggtttacaaggtcatgaatagaaagatctcagtggaaagcatttcatgagaatcttgttaaaaactttttaagtgacttataataattttacttatttatgggttccaaagcaatgttttgatacatacaatatgtagtgatcaaatcatagtaattagcatatctactatctcaaacatttattatttcattgtgttggaaacattcaatatcccgtctactagctactagaaaatatataatatattgtaaactatagtcatcctacagtgctatagaacactacaatttatccctcctatctgtaattttgtattctctcaaaaatctygccctattctctccttctcaactacccccccaccaggctctggtaacctctgttctaccctttacatttatgagatcaacctttttagcttccataaatgcatgagatcatgaaatgttcaacttcctgctccttgctta

SEQ ID NO: 657519 - DNA, 213 bp, Homo sapiens
gctgtgactcctgtgcctaatgaataaatcagttctgtcaagtaaaatggaagtgtcgcaacttctcccaactctccatgtcaacccaaacactttctgccataccgatccctgcattccacactcaaggaagtgttggaagcctctggagatagaatacctggtagtggtggygatggtgaaggtgaagacagtggttagctttgtctagct

SEQ ID NO: 657520 - DNA, 598 bp, Homo sapiens
gtaattactaaaccatgttatttctgaaaacccaagtagtttgcccacctatttcagtctgagtgacttgtttcctaataaccaatggcaggattcttggtgaattatacagtcttgggatctgatcatcatttttctagtttctaattcttagcagtaagcctggagggcatcatcgtgggccttattttaattatctttgcctttctagtggttataaartattaatacaggaagatgattttaggaaaggttataaaactagatttatgttcatcctatatttaaaatattgaagaaaaatgatttttaaatttagatcattttaactcattatacttaaataacttttcaagtatatatttttataaacatacattctgtgaatatctaaacatttaaaaagtatctaaaggaaattagtttatataatgtaatattatattcatgtgaacttacattattgaagcaaattataaaaagactaagttacaagttttcatacaagtctaaagatcttcctttctttttttttaatttaggaaaagaaaattgaagttgccataattttaattactatcgttctttatgctatcgt

SEQ ID NO: 657521 - DNA, 545 bp, Homo sapiens
gactggttttgaaatcctgacctcaggttctctgcccgtctcagcctcccaaagtgcaggcatgagccactacacctggcctacactttgttttaatgtaacctcattaaccattttctgaaacaggttttagcaaatactatttcagacaatgtaaatgtgcgtagatgtcagttttttttttccttcttccatcttcagattatcractgattatcagttgagtaattatccatatttgctcagaaatgattattatctgaagcatataaacaagcccttttggatgaaatcctcctttacaaagagagttgtctgatagccgatgtcccatacacatagctaactagtcagtggatgtgctagaatgaggtttcttgtgttgtgtacagaattctcttcctcacatatattcccatgttgatgctgtttgttcatcaagtgttattctgttcccacaacaaaatcactgaatccttgaggacatcaaatctgttctttttcctattctatttccccagatgcatctcagaacacaagactgc

SEQ ID NO: 657522 - DNA, 461 bp, Homo sapiens
attctcttcctcacatatattcccatgttgatgctgtttgttcatcaagtgttattctgttcccacaacaaaatcactgaatccttgaggacatcaaatctgttctttttcctattctatttccccagatgcatctcagaacacaagactgcaacacaaaatcaaaattaacaggaacttaccatactgaatggaaacaattggcatttgtaaagttaatgctttgaaatgtcaattataattaaattcaataaagagtattaagtaccaactwtaacaatgcaccatattcaggatttgggggcaatgaagaagagtaaggtgtacccactccaaccccaggtgttcacagccctattgaggagaaagataggttcctagttatagtaggacagattatacatactatcgtttactatcttttaagttgctttgctgatgtaacctatttccaactgctt

SEQ ID NO: 657523 - DNA, 461 bp, Homo sapiens
attctcttcctcacatatattcccatgttgatgctgtttgttcatcaagtgttattctgttcccacaacaaaatcactgaatccttgaggacatcaaatctgttctttttcctattctatttccccagatgcatctcagaacacaagactgcaacacaaaatcaaaattaacaggaacttaccatactgaatggaaacaattggcatttgtaaagttaatgctttgaaatgtcaattataattaaattcaataaagagtattaagtaccaactttaacaatgcaccatattcaggatttgggggcaatgaagaagagtaaggkgtacccactccaaccccaggtgttcacagccctattgaggagaaagataggttcctagttatagtaggacagattatacatactatcgtttactatcttttaagttgctttgctgatgtaacctatttccaactgctt

SEQ ID NO: 657524 - DNA, 575 bp, Homo sapiens
actatatatgagtacacgcacacacaccttttatctgaacatttcttttttgtatgcaaaaccagttatgttattttgttagagggacaacataaacagaaatgactctctattaaataatytgttacttattctgatgttccttaacttgagctcacttagcagacttgtttctctttttccctttagattctgtgtcattcagaagactagtacaattgacttaggccaaatcatagaattatctgataactaagattcaccaatgtttttcgctatgagttcactcttaaaagcatgcttgattatattgctttttattaatttgtctaattgtatattacatataatcttatgtattaattgattatgggtttataatctctaatattttttctttgggttttaaagttgtttttatgaataaatattctataacataatacagatactgatttcatatttttatcagtattttttgagttgtttagtattttaaatctaatttggctggtaagattgcagttctctcaatatcactttaatatgtcactatgcagagcacagaagtggaa

SEQ ID NO: 657525 - DNA, 575 bp, Homo sapiens
actatatatgagtacacgcacacacaccttttatctgaacatttcttttttgtatgcaaaaccagttatgttattttgttagagggacaacataaacagaaatgactctctattaaataatctgttacttattctgatgttccttaacttgagctcacttagcagacttgtttctctttttccctttagattctgtgtcattcagaagactagtacaattgacttaggccaaatcatagaattatctgataactaagattcaccaatgtttttcgctatgagttcaytcttaaaagcatgcttgattatattgctttttattaatttgtctaattgtatattacatataatcttatgtattaattgattatgggtttataatctctaatattttttctttgggttttaaagttgtttttatgaataaatattctataacataatacagatactgatttcatatttttatcagtattttttgagttgtttagtattttaaatctaatttggctggtaagattgcagttctctcaatatcactttaatatgtcactatgcagagcacagaagtggaa

SEQ ID NO: 657526 - DNA, 552 bp, Homo sapiens
accaaacacctcatgttctcactcataggtgggaattgaacaatgagaacacatggacacaggaagggaaacatcacacaccggggactgttgtggggtggggggagggatagcattaggagatatacctaatgctaaatgatgagttaatgggtgcagcacaccaacatggcacatgtacatatgtaacaaacctgcacattgtgcacatgtaccctaaaacttaaagtataataataataataataaragctttgagactcactcaggaacaacatctgagaagtcagttaacctctttgcatgttagatttcttatctctccaccacaggtttggaatatttacaaggcaaagtttgaggaaatagaatgaatgaaagggagcgtaagaaaacattctgcagattgtgtgtgaagggtaccatttattcagttggacagatagataggaatcagataaggtgctgggtagtactcacaatctctctcataaaagggcagttaagtcaatgaccaatgttcttaagtcaatttaagaaaaagcctgattg

SEQ ID NO: 657527 - DNA, 552 bp, Homo sapiens
accaaacacctcatgttctcactcataggtgggaattgaacaatgagaacacatggacacaggaagggaaacatcacacaccggggactgttgtggggtggggggagggatagcattaggagatatacctaatgctaaatgatgagttaatgggtgcagcacaccaacatggcacatgtacatatgtaacaaacctgcacattgtgcacatgtaccctaaaacttaaagtataataataataataataagagctttgagactcactcaggaacaacatctgagaagtcagttaacctctttgcatgttagatttcttatctctccaccacaggtttggaatatttacaaggcaaagtttgaggaaatagaatgaatgaaagggagcgtaagaaaacattctgcagattgtgtgtgaagggtaccatttattcagttggasagatagataggaatcagataaggtgctgggtagtactcacaatctctctcataaaagggcagttaagtcaatgaccaatgttcttaagtcaatttaagaaaaagcctgattg

SEQ ID NO: 657528 - DNA, 552 bp, Homo sapiens
accaaacacctcatgttctcactcataggtgggaattgaacaatgagaacacatggacacaggaagggaaacatcacacaccggggactgttgtggggtggggggagggatagcattaggagatatacctaatgctaaatgatgagttaatgggtgcagcacaccaacatggcacatgtacatatgtaacaaacctgcacattgtgcacatgtaccctaaaacttaaagtataataataataataataagagctttgagactcactcaggaacaacatctgagaagtcagttaacctctttgcatgttagatttcttatctctccaccacaggtttggaatatttacaaggcaaagtttgaggaaatagaatgaatgaaagggagcgtaagaaaacattctgcagattgtgtgtgaagggtaccatttattcagttggacagatagataggaatcagataaggtgctgggtagtactcasaatctctctcataaaagggcagttaagtcaatgaccaatgttcttaagtcaatttaagaaaaagcctgattg

SEQ ID NO: 657529 - DNA, 547 bp, Homo sapiens
atttaagcagattttgtgattatattcattttacgtatgagaagcttaagctgtagaaagcgtaggcctgacttttattgacaccacagttactaagtagtgacatacagtgttgaacataggtgaattctggctgaagaaccttggttctttacacagaacacacagtctttcartggaatgggctcaagtaatgagattttaggctccagagatacactctgagaaatgtatttttgatgagggaatccattttagaaacctcaaatcacattgtatctgccttctgacctatttgactaaggaattggagcctggcaagtcctgttgggtgaaatttagcccaagaggatgctgaggatcagggccaaaagctttagaaaaggttgcagagcaatgatttgcaggggagggaaagagttgagaacagtggaatcctctccaagtatatgatgggtaaagaaatcagaatttcccaaattttataggtgttctgtcagcaataatgactagaccaaaaatatgtgaaaagagaagactgccactg

SEQ ID NO: 657530 - DNA, 633 bp, Homo sapiens
cagtactcgagacatcataagtatgaataaaacaaaatctatatagaaatgtatgcataataataaastatggttattgatacacaacgtacagtgataagaaaacatagtaataactaacatattaatatatggagtgtttactatatgccataccttggcttaagaggttatgagtgttaaaaaatgtgaagtaggtacgattatgctcactttacgtaaactgaaaggtgcagacttgcctactttcccaagtatacccagctagtaggtgatagagctaggaactgaatctaggcagccagacataagccttgctctttacaaatatattacaaaattcaaagtgtttagaggacactttcatgagcattgtgccattttttcattactcattaaattcttattttcatcagcttaatttgcagataagaaaactaaaattaagaaatccctttgccaaggttacacagctagtatgtggattacaacctgagcccaggtcaaatttctaatcttgtaaatttacaagtcttccaaactctccatggttattaaaaaaatcctttaatttggaaataataattagcaaccatcagctacaagaagccttacttcttgtgaagtgtaggt

SEQ ID NO: 657531 - DNA, 566 bp, Homo sapiens
acatatattttgttaatgtcaatttctaggatgtatatatctacttcaaaatggtggtggtgaatagttcatattgtttaaattctaagacgttatgcattatgtaattagtgttttaaacaataagtgaaggaattaaatgaaaaagtgaattgaagatatttgaataggaagataattgtcatatcactttgaacttgaatttatttgtctctataatgaggaaaacaacatttcaaaattagttgaaaaataattttaaacataattatgtttggttttgtacctgggcagtgggccataatcaaactagaaggaagagtaaaacctttcacttttcattcatgtgcagtactacttccaaagggaacatataacatttatcggaaggatagaattattcatgtttctggttattcgtatttatagcattctatttagcttgygcttttttgatagatgttctactgcacaaatgcatttgaattcatatacaattgtgtaggaaataagaatcttccagtggaactagtgatgtttgtaagaaagatcgttgtatagtattt

SEQ ID NO: 657532 - DNA, 589 bp, Homo sapiens
gtattcatatagaattttagcttatatgttgttagcaattgtatctttattatcaattgtttgatgtaatatcatattttaatatttagtactagccacacattttttggttttgcatatatcatattacgttgggttatattatgtgacactaataactttactttgtagtaaattcctgtattgaataatctaccaagggtcttagattccactgcttttaaacttgcgggactactagaggcrtatttggtatcaaattcatacacaagggtataagacagaaacaatagcttgccaacatgcccttccactcctattccctgcagatctttgaaaatgtctaaaaacatgttttaattgaatcagtggaggaaaatgaatgctcctggcatctagagagtagagaccatggctactgctaattgtcccaaacacatatggcagtcttccaacacagttttcttgcccaaaatataattttttttttttttgtggtggagaaggaggctctagcttgtttattgtatggtgtttagaggctacttaggcttgtaatctttagattccagtaatatgtccttctccc

SEQ ID NO: 657533 - DNA, 466 bp, Homo sapiens
tgaggaattcagtcaataaatatttacttcaattaattcattcaataaatgttaattcagtcaataaatttctctgctagatgaagggaaattcaagtaagaattaaaggtaatctgtatactagaaagattataatctaatgtagaagcagacaaagacttttaaggtaggtttcagaggtgccatgtgaacacagaggacggacggtgtacgctaattatgttttgtcctgacagccatatgtgtctggtgtgtgtttttacatttgagttcaacagcatcaataggtatagatgtgaatgtgtagaargatttccccctattttcccactttgttttgattctctcaatggagactttttttttttttttttttttttttttttcagtaaaatggcttgagccttacagtttgggaagttgcttggcctgccttcctaatatttctgagaatttctggaaact

SEQ ID NO: 657534 - DNA, 590 bp, Homo sapiens
gtagggtttcaaaggattgactccaatttgaaggaagttctaccatgggtaaaatgctatcaaacaccagacatgcttcagagaatcctgaatgaaaagatgagttcattgatgcagcaaacttcattgttttcttattttaagaaatcgccacaggccggtggtggttaacaaccaccatcctgatcagtcagcaaccatcaacatcaaggcaagacacttcagcaaaaagagtacaactcgrtgaaggcttagatgatcattagcatttttttgccttagggtatttttaaattaaggcacgtacattgtttttttagactcaatgctgtatagactgcagtatagtgtaaatgtaatttttatatgcacagggaaaccaaaaaaattcgtggcttgctcttctgcaatatttgcttattgcagtgctctggaaatgaactgcagtatctcagaggtatgcttgtacatgccaactctgtcaagatatctgtactgaaacttcccactgaaatatgacctcctgcttctacacccaggttaacaaacataacatcagtaacaatgaaaacagtatttgtggaacactc

SEQ ID NO: 657535 - DNA, 496 bp, Homo sapiens
cttgacagctgaaagatacctgagattaactgaccataatagtccttgcaatgtatgctcaacacttgaaataaaataattattattaacaaaatttttttgaaaacaattcctaatcatacatttcaaattggtaaacagaggtgaaatagttgaacttactgttatgttccaggaacaaccatgtttactgatgaccacaacataggactccagataaactagtggttctcagaaaacattytgaaaagtgtaatcctctgacaatcagcttaaagtgccgacagcatccatttataattgcagaatattataatacagttgttaatttttaaaaaaattttaacaatagatttgcatagttttaaaaatactacacgtggcttataaaacatacaatcaatgtttaagtatacaaataaaaatatagacaaagcatcataattcttaccacccagcagttagtatcaatagcattagattggtatcaatatac

SEQ ID NO: 657536 - DNA, 610 bp, Homo sapiens
ttccaaccaaccactgttgtaatctatagtgagactagactgtgatattgatcatctgtgtcaatatcattcagtttttctccattagttttactagaggttattcaaattccttagttactttaaagagccaacatttgaattctaggttttcttgattgttgtacatgtgttttctattataatgatttctgtccttgattattccttccttctataccattatatttcaaatgctaattatttttctaatttttaaagcagtgatttgattactgattttattattttctgtttttcctcatgtaggcttttaagactgtaaatgttcctttaggtatactattaactgtatcgcaagacttttgatatgtaatgtttattattattcagtttgaaatactttcttattttcactgtgatttttttttctttgacccaaggattatttagaactttatttctgaagtttcaaacacatgggttttctaattatatttttgttattggctgtagcttaatttcattttgatcaraatttagattctgaatgtcttagttagcacgtgttcctgtaacaaaaataccatagactgggtgtttctaaaca

SEQ ID NO: 657537 - DNA, 574 bp, Homo sapiens
cccctagtttagtgttcgaagtctgagtattttatgttctgtccacatcttgggctgatgatgtagtatttttttctcacctaaaatactttgataagctaacctattttctttgtgtgtcatattgaaataatatgtagttttcttagttttagaatcaaactatgcttactttaataatcaaagaattacttaggttttaaatggtattattttcttctctatgttgatacttgaaggaacattatctctgaaaagtcaaatattcaaagtgtagcttcctttgcatgctaaaacaccacgattatgaatctaagctattcagttctcttcccaggtctgctgcaaccttaggcaatttacttaactgccctatacctaatatttgaactwatggattacaaaggcctaaaagatctcaaaaacttttgttttatattggatcctaaaactttataatcattctatgccatttgcttataaatttgggagttaaacttcctcttatatttaaatatcatgatataatagccaacaatgcacagttagcaatttaacttacaaagttcttgca

SEQ ID NO: 657538 - DNA, 574 bp, Homo sapiens
cccctagtttagtgttcgaagtctgagtattttatgttctgtccacatcttgggctgatgatgtagtatttttttctcacctaaaatactttgataagctaacctattttctttgtgtgtcatattgaaataatatgtagttttcttagttttagaatcaaactatgcttactttaataatcaaagaattacttaggttttaaatggtattattttcttctctatgttgatacttgaaggaacattatctctgaaaagtcaaatattcaaagtgtagcttcctttgcatgctaaaacaccacgattatgaatctaagctattcagttctcttcccaggtctgctgcaaccttaggcaatttacttaactgccctatacctaatatttgaacttatggattacaaaggcctaaaagatctcaaaarcttttgttttatattggatcctaaaactttataatcattctatgccatttgcttataaatttgggagttaaacttcctcttatatttaaatatcatgatataatagccaacaatgcacagttagcaatttaacttacaaagttcttgca

SEQ ID NO: 657539 - DNA, 632 bp, Homo sapiens
ttatgcttttcttatgattaattttggcatcttcatcatgaaatattttccagttcctatgtccagaaaggtattgcttaggttgtctttcargatatttatagttttgggttttacatttgaggctttaattcatcttgagttgatttttgtatatggtgtaaggaagaggtccattttcaatcttctgcatatggctagccagttacttcagtatttattgagtaggaagttctttctgtattgctcgtttttgtcaactttgtcaaaaatcagattgttgtaggtgtgcagccctatttctgggctctctattctgttccattggtttatctgtctggttctatagcagtaccatgctattttcattgctgtagccctgtagtatagtttgaagttgggtaacatgctgcttccagctttgttctttttgcttcagatttccttcaatattcaggctctttttttggttccatataaattttaaaatagactttttaaactctgtgaagaatgtcaatggtagtttgataggaatgatattgaatctgtaaactgttttgggccatatcatcattttaatgatactgattcttctaaactatgaacatggaatgtttttccattggttt

SEQ ID NO: 657540 - DNA, 519 bp, Homo sapiens
ctaatattgctgagcttcttggaaaaaaaaaaaaaaaccatacatccaaaatccctgcatctgcttcctctttttccatttactgtttagatcgttgcattacaaattctattccttattcatccactgagcgagctcttagcaaaacttttacttattttttttttatttttgctatgtcaaaagaatatttctattcttcagggagtatttgatgttgtaaactataacctccttcttgaaataaaaattcccttaacttcctcagtgttaggcttttttgattcttctctttttgtctctctttggatgtttcttctcagcctccttacaaatttacattggtgaactgatccattcataggacattacaatctttgtgctgatgactccattgactgattttgcagagcttgtcactaactcacrtcacttgacttaacacattgtagcatggcattctgtatattaagctttgaaaagatgactgcaaaatatctatatacacttccaatcaga

SEQ ID NO: 657541 - DNA, 575 bp, Homo sapiens
gtacatgacatttggatgtggccactttgacgcagacacaattgatgttgggatccctttgttcagaccttgaaaaattaagtttttacttttttaaaattgtcatgtcatatacctaagaaacatcctcactccactcctgagctacaaattcaccacatccttgactccagcagcactgggatcaaaggtgtggagagaatcttttgagtatagtgtggagaaatgctggccaagggttagagagggaagcaaggggaaagaaataggacatgatttggagacattatgaagttcagagatgtatagtgcacatgtgatgtaattcataagaacagcttcttgaacttttaaaaattatttagcaaacaattttgttacagctgcrtcagaacagctgtatctgttagagatgatcagaaaacagatggtactctcaaaaggttatttaaaaagttaaaggaagaggcttttccatatacgtaggcagggttaagagaagtgacatgggatgctgaaacattcaggatgtagcagccatgcaaatctgttaccactccagctctaaacccaga

SEQ ID NO: 657542 - DNA, 460 bp, Homo sapiens
ttccaggaagcatgtgccctggtcaggcacagaatcagcaaaaaccccactggagacccaaaataccctatatgctctcaccattgcagaatctgttgtgtctgcaggtgcagcctccgggacccaggactttcttctcagggctctgctgagttgggtgggggaggctggaggctgcaaaatgatgacagagcttggggctatgatctggactgggtacccagagctaataggagaagaggacaagcagggggacagaactgagtcaggagacactttagacgatggagggttgggggatggaggtggctagtgaataaaacacttctgaagggtctttgctgcctgtgttgatggccatgatcaattcggatccccagggccagttcagcaaaacctctgycaacaaatagaggatttgtttaatcttttctgaaagagtccgatgttatctaagtga

SEQ ID NO: 657543 - DNA, 468 bp, Homo sapiens
gagtgtcatgtggacaatccatcyggcaccttggatggaccttctcttccattttgcttcagctattcacctgtccctataacttgagctattttgacttggatttgtgtcactggaattgaaagaggtctgatcaattcaatatccagcctcactggctgaacacccaagacctggcatggcctggtctctactcccccagcttcatcttcctggctcacactatgctccagaaacatcagtgcttcctgattttgtgccattgctcatgttattaatctctagctactactcctaatcatcttcattattcatctgtggaattactgatcccagagaagcttcactttttcttccccacaacacctctaccactcagaacatataatgtctctctcccctgtactctcatggcactttgtgtgattgtttcagtcagattccaaccagaaaaatgggaactattct

SEQ ID NO: 657544 - DNA, 497 bp, Homo sapiens
cagcccggagagggctttcttgcaggtgccagaggggctctctgggctgaggagcatcgtaccygccccctctctttgtgcctcttttgggggctgaaatttcctcttagacaaggagatggatagctcagcagtgtgacagagtgttcaaacaatccgtcttgaatagatgaattgcattgctctgtctttttgtaattgtgtctatcagaaggagaggtcaaggcattgattgcttggatggtttgcaagtaacaaaagagagtgaaggagagagcaagggagagagaatgattggattgtagtctgcgagaaaaaatgatcattgattattttatgtgaatatgtggaagatgtattctatgtatgattatcaaatgttgtgcattgaaggttttcaagccatattgtttggcattttattattattatcgtcgttattattgtttgggtgaatcccagtcttaacttacggaaggcagtttaatgcatagatt

SEQ ID NO: 657545 - DNA, 595 bp, Homo sapiens
tgtagtaatattttaaatcggcagataagatagggaagattaatccaacaagatctcctgtcagttttaatacagcaaatggaattttgttgctttatttgttttttatggttccctttcagataaaggcgttatctgaggccaggaaaaagtgacttacaagttaaaaggttataaaacatgatactttgaatttaaacacaattaaaatatattggcaataattcactcatatcaattgaattgaagaattcactgaatggcaaaattgtttatacctaaggaggacagaatttaacaatagatttatagataatattttaaaaataatttttatgtgcagtgagaaatgagtacacatatatattttattagttatggtacattttactggatatagcatgttcttgaaagaatcrggtttaaattgaatttttgatagcttttaaaataaactaaatgaatattaatatattttcccaaagacccagaaccagtaagtggcagagccaatatggaaactcaggtcataaagactgcaaagcttatacatttagttaccaccttatgtgtggtgctctgtctgagtctttca

SEQ ID NO: 657546 - DNA, 577 bp, Homo sapiens
ctgtccatggaaaaattatcttccacgaacccagttcctggtgccaaaatggttggaaactgctgctttatataacaaaattcctcatctgaatgctttttgactttctcttactatcatctattgttctcttttcattgtatttgcaaaaaaaaaaaaaaaaatgtgacatrtactctccaatttcagcttgaattttttcctgagattggagaatttcttgtgttattattttttatttcagtaggtttttgggaaacacgtggtgttgggttacacgaataagttctttagtggtggtttctgagattttggtgcacccatcacctgagcagtgtacactgtacctaatgtacagtcttttattcccttaccccccccccacactttcccccaagtccccaaagttcattgtatcattcttatgcctttgcgtcctcatagctcagctcccagttatgagtgagaacatacaatgtttggttttccattcctgagttacttcacttacaataatagtttccagttccatccaggttgctgcgaatgccattgttttacattttatggctcagta

SEQ ID NO: 657547 - DNA, 577 bp, Homo sapiens
ctgtccatggaaaaattatcttccacgaacccagttcctggtgccaaaatggttggaaactgctgctttatataacaaaattcctcatctgaatgctttttgactttctcttactatcatctattgttctcttttcattgtatttgcaaaaaaaaaaaaaaaaatgtgacatgtactctccaatttcagcttgaattttttcctgagattggagaatttcttgtgttattattttttatttcagtaggtttttgggaaacacgtggtgttgggttacacgaataagttctttagtggtgrtttctgagattttggtgcacccatcacctgagcagtgtacactgtacctaatgtacagtcttttattcccttaccccccccccacactttcccccaagtccccaaagttcattgtatcattcttatgcctttgcgtcctcatagctcagctcccagttatgagtgagaacatacaatgtttggttttccattcctgagttacttcacttacaataatagtttccagttccatccaggttgctgcgaatgccattgttttacattttatggctcagta

SEQ ID NO: 657548 - DNA, 563 bp, Homo sapiens
gaaaaaagaagagctgtcagagttcaatcctttattccctcttatctgaggtctgcatgccagcagatccattgtttggggtctgagtttctaaaaagcaactcagggacatatggtccctaagaggggtccctgctcatctcaaaygaatgaatgaataaatgatttactctacaagcccttacccagagaaataacagatatactctaagaataccctcatggaatgggacgagaggtattttctcaccagcttgactgctaagcttaagtttgccttgtgtattcactgcatggtcttccccaaagatctgcacttcagtgagtgaaccctttgtaaacaacacccctgctgcctgagcccacatccccatccttcgacccccaatcagtatttctctgtgctccacttctttcctacccttcacccgcctgggtcatgcctccatcctttcagagcaccgcaagatagtgcaggatccactgtggtgtggaagtgggtctagcaccagaattgaccagagtcagagaagtaatgaaaagaaaaaggacagagaggcaga

SEQ ID NO: 657549 - DNA, 593 bp, Homo sapiens
ctacttgtatgaaaatcaaagaaaaatgataaatgaacaacttgctatgagggatgacttctacacgacaactctggaattgaaacagacttaacgcaaatgtcccagttttgggggcttcctgcgtctacagttccaggtttctaacggtgcccttgggcactggaaatgcaagggccttctgaatcattaggtaagagaaaagtcattttcaatggaaattatacggtatttcacttacttgtagttctctgaaattggtcagcgctgtgtggtatggataggaattctcaattaagtaaaatatttgagtaaccagaacattccattgccagaccaactttgataatcaaacaggagtttgtmtttctatagagagcacactaggcacaaagcaaagactgagcaaaattattgatttattttagacagaagggttatatctccaagtatgatgtatatcaaatcaatttgtaactgcagccattcaatacctttaagttcttgcagaggtagaagagcttagttcttacatttcctcggtaaaattgccttgatgttctggaatgaggtttctacaaatttaatatatt

SEQ ID NO: 657550 - DNA, 549 bp, Homo sapiens
ggggcatatatgtacgtatattgttttgaggcagagtcccactctgtggcctargctagaatgtagtggcgcgatctcagctcactgcaacctctgcctcccagattcaagcaattctcctgtctcagcctcccgaatagctgggattacaggggccagccaccatgcccggctaattttttttttttttttttgtatttttagtacaaacaacgtttccacatgttggccaggctggttttgaactcctgacctcaaatgatcctcctgccttggcctcccaaattgctaggattacaggcgtgatgtcaccacaccaggctgccccaatgtttttcaccactgtcaccgtcctcccatgcatataatcttgaagcctcagcaatttgagattcttctttcttcctcatcagccacattcagtgagttatcaagtctagtttattcattcttcaaaatattgaatgtctcttttttatcctcatttccttcctctctccaagagcaagttttaccatcttgataaacagacaattgttcttcctgcct

SEQ ID NO: 657551 - DNA, 571 bp, Homo sapiens
atggcttgactcatataaacacccactgacaggcagcattgttattaatactattggtaatattgttcgatactgacctgtaccagggacttaggttataccaccagtcagttagggcagctttctgggattaaggagttatttgaatgggagggcttgctgatgttctttctgactctccgttttcatcctaaaagcaataaataaatcaagtttacctttgggaaaaacctgtattggggcttgatgaggcttcagggaatgccatcctgccctccaaagcaccctatgtgtttattgatgtcagcaatgggggccaaagtgtatccaataatcgagttcagatgctgctcaaggtaagtcagtggcttgaattcattcacgctgaggtgggatcagtaggtcggtcgggaaggatacstaatttgtgtcttatataatgttttagcgaatggggagggtttgggtgcatcatcacacctcagatagcatccaagttgttcttgccctttccttgtgtacttcctgtcatatgttctcctgtgcttccataccccagtacaagttgttt

SEQ ID NO: 657552 - DNA, 552 bp, Homo sapiens
acttaaaataattttttaaagctatacacgtattttaactcaaactacatatatactcatttgttccttcatattttttaaatgtaaaatcaaagtttgctttgttttataatttgtttctttggtccaatggtgacattccattgccattttttgctaaattacatcaataattcatcatctacaattctacatgatttaaagagagtgaaatattttcaaagcaagctaagcaaacattttctaggtttgtatgtattttcccatgttttataaatgtgttgtagatgcttaattttttagagagttgactttattgaatctttccaagccttttaatgtgattttaatcaaatcgataatttttattttgcattcatttatcatcggtttatataatattatatcataaaattacaatagtaatagtaktaatgggaattagcctaccatgctggggcatccatcagtgcattttacagacgaatgaataggttgtgttaatccagcaatttggttaagtggaggtcagtttggttaagagaccaggat

SEQ ID NO: 657553 - DNA, 592 bp, Homo sapiens
tctctagtaaatactgcttgccttggagtcaaatacatcagatattaatataatcactccacaattaacaaagccatcaaaagtagcttgtatatccaacttattctctgtatcgatttctttcacttttggcctgaaaaatctttactcactgaaaagcaaagaatataaagaaaaaaaaaaggtaaagaatccaaggactgtgggamaactgcaaaaggtgtaacctacatgtaatgggaataccagaaggagaagaaagagaaaggaacagaaaaaaatatttaaaacaacaattgaaaatcttcagtgggagtataattagttcaaccattgtggaagacagtgtggtgattcctcaaggatctagaaccagaaatacctttgacccagcaatcttattactgggtatatacccaaagaattataaattgttctactataaagacacatgcacacatatgtttactgcagcactatttacaatagcaaagacttggaaccaacccaaatgcccaccaatgatagattggataaagaaaatgtggcacatatacaccatggaatactatgcattcataaaaaagaatga

SEQ ID NO: 657554 - DNA, 567 bp, Homo sapiens
aggagctcccagatttataaaacaattactactagacctaagaaatgagatagacagcaacacaataatagtgggggacttcaatactccacagacagcactagtcaggtcatcaagacataaggtcaacaaagaaacaatagacttaaactataccctagaacaaatggacttaacagatatttacagaagattctacccaacaactgcagaatatagattcaatgcatcagcacagggaacgtactccaagacagaccatatgataggccacaaaacaagtctcaacaaatttaagaaaatagagattatatcaaatactctctcagaccacagtggaataaaattggaaatcaactctaaaaggaaccctcaaaaccatgcaaatacacagaaattaacctgctcctgaatgatctttgggtcaacaatgaaatcaagatgaaaattaacaaattcattgaactcaacaataatagtgaaacaacctatcaaaacttctgggayacagcaaacgcagtgctaagaggaaaggtcagaagttcagagtgttaaatgcctacatca

SEQ ID NO: 657555 - DNA, 582 bp, Homo sapiens
caataacctgatcaggaacttgggggttcttatttcctattagtgaaaatattcatttgtggaaattctggagacaatgccatgcatttgtcacttttatcccggctggagtggagctggaggcattcagacatatcaatatgcaaccatgaatatcaggacatatatctttcgctgggaaaatgtacaaggggcttcagcctcaaaataaaactcttagccagagggaggacttagtgatctgaggaatgtcttttaagcctgagtctctctggaccaaagggtggaattattacaaggtaaataaatcagtcctgttcctcttctaggatcaggtagctttgagaactttagtgaccccagaaaccttggataaaccattagagcttgactgtaaatctgaaagcaatccttcttctcttttaaaaagaaaacctttgaaaatgatgtcaattatccccsccttaaaataaaattttattttattctataagtgcatgttcattgaagaaaatttgaggacaaaggatgacaaaaagaaggaaattatcataattctataacctaaatagagaaaaccat

SEQ ID NO: 657556 - DNA, 608 bp, Homo sapiens
gatgtccattataattgttatttaacactattctgggagttacagtcaataaaataaaaatgaaacatatgtaaaaaagaaagcaatgaaagccattattctaaatgatatatttatgcacagacaactcaggaggattaaaggaaaaactttaaaattaatgaggtcaataaagaaactacaaactaaataaaaatactttttaaaaattgtccacattgtccatatgccaacaataaccagttgttttaaacaatgtgaaaycataataactatttatataagaatctattcccagtagcctccaaacatataaaataatagaaataacctgaacaagaaagaatgccacattcatgaggacaaattcagtacctgagacatgcaagagaaaatatttaagaagaaataaattacaggttcctagatggaaaaaaggaattctgtaaagatattaaatacttccaaactgagttgcagatgaaactagattctaactacattcccactaagattttaggacagagatttgataaaataatttttaaatgtatgtggaagaatatcacatgatgataacaagtttctaaaaataaagagtactaagg

SEQ ID NO: 657557 - DNA, 608 bp, Homo sapiens
gatgtccattataattgttatttaacactattctgggagttacagtcaataaaataaaaatgaaacatatgtaaaaaagaaagcaatgaaagccattattctaaatgatatatttatgcacagacaactcaggaggattaaaggaaaaactttaaaattaatgaggtcaataaagaaactacaaactaaataaaaatactttttaaaaattgtccacattgtccatatgccaacaataaccagttgttttaaacaatgtgaaaccataataactatttatataagaatctattcccartagcctccaaacatataaaataatagaaataacctgaacaagaaagaatgccacattcatgaggacaaattcagtacctgagacatgcaagagaaaatatttaagaagaaataaattacaggttcctagatggaaaaaaggaattctgtaaagatattaaatacttccaaactgagttgcagatgaaactagattctaactacattcccactaagattttaggacagagatttgataaaataatttttaaatgtatgtggaagaatatcacatgatgataacaagtttctaaaaataaagagtactaagg

SEQ ID NO: 657558 - DNA, 607 bp, Homo sapiens
ctaaaacataaagtataataaaaaaaagaaaaaaataaataaataaataaacttatgtaaaaaaaaaagaaattaagttgttattaactcaaactagattgttttaaatgtagatgttaattgtaatcttccttgcaaccactaatacaacaactcaaaagaatatagtaaaacaaatggcaagggaatttaaatggtacactagaaaatatctacttaacacaaaagaagrcagtgatggaggaatagaagaataaaaaagacataattgactagtaatttgtttaaaaagacatgatatatagaaagcaaatagaaaaaagacataaattttaccttatcagtaattacattaaatttaaatgagttaaacccttcaatagaaagataaaaattggcagaataatgggaaaaatcatgatccaactatgtgctgtctacaagagactcactttggattcaaagacacaaatagatttaaagtaaaaggatagaaaaagatatagcatttaaatagtaaccaacaagagctagggtacctatgctaatgtcaagcaaaatagacttacagacaaaaactattcctagcgatagataaagacatttt

SEQ ID NO: 657559 - DNA, 577 bp, Homo sapiens
cctcctaggtgctaggatagactcaagggaggtgaacctcagccyaggcagtctcttgttctcagtagcattgaggacacccttacaacatccataaactctctttcttgtcttcttttgtcttggaaaaggtttaaatgggacatcaaaaaatttgagcctcatttctccattagcccagaagaaggctatattacctcaggcatggaggtttcttttgaagtgacctaccatcccaccgaggtgggaaaggagagcctttgtaaaaaaattctctgctacatccagggaggcagtcctctgagtctaaccctgtctggagtctgcgtgggaccacctgcagtaaaagaggttagtagctgctgcccggggtggcccagtggcaggagtgaccccagcaagtgaactcagccaggcctccttcaaacatgcaggcctgccccctccctccacgaggcctgtgaatacaccgtttccactgctggaatattcattctcccctcttcatttggtttattcctttccattcttcagctctcatctgaaacattacattctcaaggaagcctgctttgac

SEQ ID NO: 657560 - DNA, 569 bp, Homo sapiens
tgctaggatagactcaagggaggtgaacctcagcccaggcagtctcttgttctcagtagcattgaggacacccttacaacatccataaactctctttcttktcttcttttgtcttggaaaaggtttaaatgggacatcaaaaaatttgagcctcatttctccattagcccagaagaaggctatattacctcaggcatggaggtttcttttgaagtgacctaccatcccaccgaggtgggaaaggagagcctttgtaaaaaaattctctgctacatccagggaggcagtcctctgagtctaaccctgtctggagtctgcgtgggaccacctgcagtaaaagaggttagtagctgctgcccggggtggcccagtggcaggagtgaccccagcaagtgaactcagccaggcctccttcaaacatgcaggcctgccccctccctccacgaggcctgtgaatacaccgtttccactgctggaatattcattctcccctcttcatttggtttattcctttccattcttcagctctcatctgaaacattacattctcaaggaagcctgctttgaca

SEQ ID NO: 657561 - DNA, 577 bp, Homo sapiens
cctcctaggtgctaggatagactcaagggaggtgaacctcagcccaggcagtctcttgttctcagtagcattgaggacacccttacaacatccataaactctctttcttgtcttcttttgtcttggaaaaggtttaaatgggacatcaaaaaatttgagcctcatttctccattagcccagaagaaggctatattacctcaggcatggaggtttcttttgaagtgacctaccatcccaccgaggtgggaaaggagagcctttgtaaaaaaattctctgctacatccagggaggcagtcctctgagtctaaccctgtctggagtctgcgtgggaccacctgcrgtaaaagaggttagtagctgctgcccggggtggcccagtggcaggagtgaccccagcaagtgaactcagccaggcctccttcaaacatgcaggcctgccccctccctccacgaggcctgtgaatacaccgtttccactgctggaatattcattctcccctcttcatttggtttattcctttccattcttcagctctcatctgaaacattacattctcaaggaagcctgctttgac

SEQ ID NO: 657562 - DNA, 603 bp, Homo sapiens
tgggcaacatagtgagaccctatctctacaaaacaacaacagtaataacaacaatgaaattgctatactgacaactcccaaatctttatctgcagcctggactcttcccttgaaccccagatttgtaaattctacttcctkcttgacgaataggcatctcaaatttaacatgtatgaaacctgagctcccgatctctcactgaaacctgctcctcccacagtcaatcccacatcagtaaagggcatctccattctgctcattgctcagactaaaaacttgggtgtcattcttgagccttcttccacctatacccaacataccatacagaagtaaatgctattggctcttccaagtacaactggaatatacccactttccaccatccccagtgctaccagtgccacctaagccaccgtcatcccccacctggcctattgcaagtgtcttctagttaatctctcttcctctgtcacctctaagcatctagagcagttctgttagagcatagatccgatcaggtcactctactcaaaatactcgtaagtcctcctttttcaactaaaaaaaaaaaaaaaaaagtgtctaccatgactccaagaccc

SEQ ID NO: 657563 - DNA, 603 bp, Homo sapiens
tgggcaacatagtgagaccctatctctacaaaacaacaacagtaataacaacaatgaaattgctatactgacaactcccaaatctttatctgcagcctggactcttcccttgaaccccagatttgtaaattctacttcctgcttgacgaataggcatctcaaatttaacatgtatgaaacctgagctcccgatctctcactgaaacctgctcctcccrcagtcaatcccacatcagtaaagggcatctccattctgctcattgctcagactaaaaacttgggtgtcattcttgagccttcttccacctatacccaacataccatacagaagtaaatgctattggctcttccaagtacaactggaatatacccactttccaccatccccagtgctaccagtgccacctaagccaccgtcatcccccacctggcctattgcaagtgtcttctagttaatctctcttcctctgtcacctctaagcatctagagcagttctgttagagcatagatccgatcaggtcactctactcaaaatactcgtaagtcctcctttttcaactaaaaaaaaaaaaaaaaaagtgtctaccatgactccaagaccc

SEQ ID NO: 657564 - DNA, 645 bp, Homo sapiens
taaagcaaacagaaaactttaagtgaatattatttatatccccaaagggagaaaatcrtactcatgaaataaggataagctattgtgaaaaagaaccaattagagactctagaaatgaaaaataaaatatttagaaaaccatgcaggagggatggactttataatggagattactaataagttacaagatggagctgagtaatatcaccagaccttagcccttgaggacaaagaaatggaatgaaatgaaataatagcaagcatcagcaaggatgtggagaaattgggaccctcatacactgcaggtgggagtataacatggtgcagctgccctggaaaacagtctggcagttcctcaaatggttaaacgtagagttaccatatgattcaccaatttaactcctaggtaataccctagagaaatgaaaacatatgtgcacacaaaaatctatacacaaatattcatagcagcattatttataagagccaaaacgtagagacaacccaaatttcgatgaactggtaagtgtataaatagaatggaatttgacaataaaaagaaatggaaataaaatattgatacctgctataaaacattatgctaagtgaatgaagccagtaacaaatgtatgatttgaaatgaaa

SEQ ID NO: 657565 - DNA, 645 bp, Homo sapiens
taaagcaaacagaaaactttaagtgaatattatttatatccccaaagggagaaaatcatactcatgaaataaggataagctattgtgaaaaagaaycaattagagactctagaaatgaaaaataaaatatttagaaaaccatgcaggagggatggactttataatggagattactaataagttacaagatggagctgagtaatatcaccagaccttagcccttgaggacaaagaaatggaatgaaatgaaataatagcaagcatcagcaaggatgtggagaaattgggaccctcatacactgcaggtgggagtataacatggtgcagctgccctggaaaacagtctggcagttcctcaaatggttaaacgtagagttaccatatgattcaccaatttaactcctaggtaataccctagagaaatgaaaacatatgtgcacacaaaaatctatacacaaatattcatagcagcattatttataagagccaaaacgtagagacaacccaaatttcgatgaactggtaagtgtataaatagaatggaatttgacaataaaaagaaatggaaataaaatattgatacctgctataaaacattatgctaagtgaatgaagccagtaacaaatgtatgatttgaaatgaaa

SEQ ID NO: 657566 - DNA, 563 bp, Homo sapiens
gtgtctattcatgtcttttgcccattttttaatggcgttacttgttttttgcttcttcaattgtttaagttctttagagattctggatattagacctgtgtcagatgcatagtttctgaataattcctcccattctgtaggttgcattttttctctgtttgtagtttcttttgctatgcagcagcttttttcctttcttactctttttttttttttttttttttgcaggattgattgggtcccacttgtcgatttttgtttttattgcaagtgcttttgaagactcattcataaattctttcccaaggctgatgtctacaatggtgttttctacgttttcttctagttttcrtatagtttgaggtcttacatttaaatctttgatccatcttgagttaatatttgtatatggtgaaaagtaagggtcttattttattcttctggcttatggctagccagctatcccagcatcatttattgaatagggaatcctttcctcattgcttatttttgttgactttttcaaagatcagatgattgtaggtgtgtgactttatttctgg

SEQ ID NO: 657567 - DNA, 563 bp, Homo sapiens
gtgtctattcatgtcttttgcccattttttaatggcgttacttgttttttgcttcttcaattgtttaagttctttagagattctggatattagacctgtgtcagatgcatagtttctgaataattcctcccattctgtaggttgcattttttctctgtttgtagtttcttttgctatgcagcagcttttttcctttcttactctttttttttttttttttttttgcaggattgattgggtcccacttgtcgatttttgtttttattgcaagtgcttttgaagactcattcataaattctttcccaaggctgatgtctacaatggtgttttctacgttttcttctagttttcgtatagtttgaggtcttacatttaaatctttgatccatcttgagttaatatttgtatatggkgaaaagtaagggtcttattttattcttctggcttatggctagccagctatcccagcatcatttattgaatagggaatcctttcctcattgcttatttttgttgactttttcaaagatcagatgattgtaggtgtgtgactttatttctgg

SEQ ID NO: 657568 - DNA, 575 bp, Homo sapiens
cagtttttccccattcagtataatattagctgtgggtctgttatatatgrctttatatatatatctcattggctatatatacatctcattggctagaactaagtgatatatcatatatatatataatctcatatatatatcatatatatacacatacacacacatacatacatatatatggctttatatatatttatatatgtatatatatatgtatgtatatagatagataaatatatctttttctttttcactctctcctttttttactcctcacttgtatctttctctttccaagaagaaagaaatctcttataggttgtgttggtaacaattactttcaagaggtactaataaaaatcttgatagataatatcttaaatgtataaaaatttatgtctttacataaagataaatccataagttagcagtacaaggctgataatgtggatcgattatgctaaattctttctttttttttttttaactgttgactgtaggcaggaagaaaaaggaagggcaaaggaaaaatacacaatatagctgagtctttctctttttattataaaatcaat

SEQ ID NO: 657569 - DNA, 623 bp, Homo sapiens
gctatataaaggaaaaaacattcaatttagttattcaaatgcaattaagcaagtgacttactaagcagtgaacatgaacagacgaatctttagctccataatcaatcatttcaagcagtcatgtcagttttttagggtgaagtaacagtcttgttttttttgttwtttttttgagacaggatttcactctgttgcccgggctggaatgcagtggtgagattttggctcactgcaacctctgcctcccgagatcaaggcattctcatgtctcagcctcctgagtagctgggactataggtgcgtgccaccacgctgggctaatttttgtattttttgatagagatggggtttcaccatgctggccaggttagtcttgaacttctgacctcaagtgatctgctcaccttggcctctcaaagttctgggattacagatgtgagccactgcgcccagccttttttccctttcttatccgtctgattttagcagtatcagattacctgtcatgacaggctttacactttcctacacgccaccaaaaaagatagcttcttacctaattctggaggacacaacttgcatattggatagtgaggaatttcgagattggaattaagagacaa

SEQ ID NO: 657570 - DNA, 623 bp, Homo sapiens
gctatataaaggaaaaaacattcaatttagttattcaaatgcaattaagcaagtgacttactaagcagtgaacatgaacagacgaatctttagctccataatcaatcatttcaagcagtcatgtcagttttttagggtgaagtaacagtcttgttttttttgttatttttttgagacaggatttcactctgttgcccgggctggaatgcagtggtgagattttggctcactgcaacctctgcctcccgagatcaaggcattctcatgtctcagcctcctgagtagctgggactataggtgcrtgccaccacgctgggctaatttttgtattttttgatagagatggggtttcaccatgctggccaggttagtcttgaacttctgacctcaagtgatctgctcaccttggcctctcaaagttctgggattacagatgtgagccactgcgcccagccttttttccctttcttatccgtctgattttagcagtatcagattacctgtcatgacaggctttacactttcctacacgccaccaaaaaagatagcttcttacctaattctggaggacacaacttgcatattggatagtgaggaatttcgagattggaattaagagacaa

SEQ ID NO: 657571 - DNA, 528 bp, Homo sapiens
ttcttattagtaggcagaacactacaactgagtgtaattctgtggtggaaggaggctcagagggtgctgtaggagtatcctgaaggaaccctaatccaggttggtcagagagggaagcttcccagaaacagtaatgtgtgatgtctgatttgagtctttaatgaccaatccatcagggaggggtgaggcgaaagggtttcaaagcaaaggratgaatgttttcaaagcaccaaatgtaagagaaagcaaggataataataaaagcacttcccttttgctagagagaaggtgtgagaatgaggaaagcatcaaatggaaaaaaaaaagagagagagagagtttgtccattgagtcttactttctatgttgtgtttaaaatatatgggttttatagtaaagactagggtagctattgacataattgctcttagcctcatgctccaggggcccttgctctgggactcatgcttaagaaggcctgcatttcatagtctcaagaggagaaaatgttatgaaagaatacaaggc

SEQ ID NO: 657572 - DNA, 518 bp, Homo sapiens
gcatgtaggaattcagggagactcaaaaccagctttctcaaggatggccctgatgcttgattccttaaaggctctgtggctggttctcgattgcttggtatgataaaagtcacagtttcccacctccagaatgttttaatatctattttgagtgaaactttcatgtagggtggtggttgcagcatctacacaggcagaaggtgagattttgtgtaattatttcaggtttgattgcacataaaaagtttaatatattcaatatttgtagcagaacttggctgaaaacttactttcattataacctggtaaaaggttgtagaggaatagcgaacttccattcacctcaaattgttcagtgattaactttcttcaccaaaaataatttaagagttgttcttgyctaaattggctgaagacactttgcagcagtacatcggattattcctgtttgggaaataggtaacagtacttactccctttgaagactgcaaagttcagatatatgtaagttcacttac

SEQ ID NO: 657573 - DNA, 612 bp, Homo sapiens
ctgtgactgtgttttgtttaagagatataagtgggaagttcctttatgaaccatccctaaagtgtgcctcttttgccttatcttccatattgctgtttggcataagaatgtgaaggctggactttaaacagccactgtcagccattaggagagatccaaactacagtgactttaggaggtggaagcagttcaagtctgtacagaatatgttgtctttgggcttcttttaaggagagaaagagaaacaaccagcaacttctatcaacctggcaaatggtagttactacaacttgtccattgttaacttatggtttggtcacatgctcatgaacttactcctaactgatatgttctagagagcttggtttacctctgctagcctaagagtggtgaacttarttcattcagaaacagcaagaaaatggcatttaacagagcccccgagttcactgtgtgtattctgaaaagactatgaatagaccagactctgaaacaaagctcagaaacatcatgagctgagaacaagactccaagcctgactctctgctttagcctccacccatgcctgttgccactgccatgctctggtttgaggtcacattacttctcagc

SEQ ID NO: 657574 - DNA, 601 bp, Homo sapiens
ggcaatccatattttcaactgctattcttattaaaaggaaaatcaaatttgatgagaacaaaaacttggtaacagtacaataatgtaataaaatactttatctcttaactgttcttatgtttcctatgcagcctagtctgctttcccaagatcataaaacccaacaaatgatcatcttacagtctcgagtatgttaaatgtgtattttttttcttctagaacatccataatgaatctctggatttttctgagtcaaataaacaaaagatgatgttttcacatcacaaaaccacaatggtttgccattttttttcattaaacttctatgtawatgcatagatgtctcaaataatttctgatgtcacaaagaatttctcagggatttctgatgtcttgaagaattacagccccagcactgaggatccaggccattgaactaaagatggacagggtttctcaggagattagagataaagttcagataaagtttgcatcgtcttgaaggaattacacctattttttttgaaaacatattatcacactgcagaaaatgtaaaatgagctgtacccatgagacattgccatgagctaagacaggaac

SEQ ID NO: 657575 - DNA, 595 bp, Homo sapiens
gatcatttcataaaattctttaatctgaaagcagacttgaatattgtatcagtggcatgcaatatggaggtttaattattttctatgtactaacggatattttatattgacatttgagaaamtgacttttggtttaaataacgattactttgaaaaacacaatataaactggcaataacatttggttatttaaactgtctgatcaacaaagaaaggtattgccacatgaacaaaagaggttgcacaaaaatgataatctatttaccacgttgattagagaaaacagttggaagtcaaaaatacatctcttcatcttgagtcactgatgaagaaaataattaaaatttaaaatacaatcacactttgcctctaaaggtatgctttttctgcatggtctgcacatccatgctagaatatgctatcaagagtaggtactcacatgagtatctgaaaggagaaaagataatatttactttaaaaacattttttttcaggtgaatgatgatgccattggaatattcaggattctgagtaatataacctaatattttagaacgaaaccattatgggtttaagcacaagactatcagaattt

SEQ ID NO: 657576 - DNA, 595 bp, Homo sapiens
gatcatttcataaaattctttaatctgaaagcagacttgaatattgtatcagtggcatgcaatatggaggtttaattattttctatgtactaacggatattttatattgacatttgagaaactgacttttggtttaaataacgattactttgaaaaacacaatataaactggcaataacatttggttatttaaactgtctgatcaacaaagaaaggtattgccacatgaacaaaagaggttgcacaaaaatgataatctatttaccacgttgattagagaaaacagttggaagtcaaaaatacatctcttcatcttgagtcactgatgaagaaaataattaaaatttaaaatacaatcacactttgcctctaaaggtatgctttttctgcatggtctgcacatccatgctagaatatgctatcaagagtaggtactcacatgagtatctgaaaggagaaaagataatatttactttaaaaacattttttttcaggtgaatgatgatgccattggaatattcaggattctgagtaatataamctaatattttagaacgaaaccattatgggtttaagcacaagactatcagaattt

SEQ ID NO: 657577 - DNA, 554 bp, Homo sapiens
taaaatggtatttctccatgagctgatatatagaattaagctcaatctaaattttatataaatggaattaataataaaatatatagggattttaagtctgggttctttcactcagcataatgcatttgttatttatttattttgtctcgttttatctatatagttgttgtttatggtaggagggtaaatctggttgctgctacaccatcttgaacagaattagaagtctcttctactggtattttggttttgaaacttctactattttcattgttattttaatctagaaactttcagatgtttaaaattaatttaaaattttgactattctgctaaagtatgataaaatgaaatgctttaaccccaattacccccttctgatttatatgctatgttattatatgcatttgattccattgtttttattatctctccagagtaggtattaytattatatttgtttatatttacccaataagtagatacatttgtgaaggtccttttttgggtatacaattttaaaaatgtctttaccatcccttttaaatataatt

SEQ ID NO: 657578 - DNA, 551 bp, Homo sapiens
aataactagtgatcaccaataggcttgaataggaagttgatgctgagctacccccacccaccactagtgcaccattagctgatacccattctggcctttagagtgctttggccagagctgtcatttcagctacaggaagaatctctaatcaggatttagatcgctatttagtttttaattttgaagtacaatagaatgaatatggtataaatatggataatagtgttcttttggtggtgggagacaaggtctcattctattcctgaggctggagtgcatatagctcatgtgattatagctcactgcagcctccaactcctaggctcaagcaatcctccctcctcagcctcctgagtagctaggactagaagtgcacaccrtcgcacccagctaatttttaaatttttcatagagacaggattttgctaggttttgcaggctggtctcaaactcctggcctcaagcaatcctcccgccttggcctcccaaagttctgggattacacatatgagtcatcatacctggtggataacaggtatgtttttaagagg

SEQ ID NO: 657579 - DNA, 581 bp, Homo sapiens
tgtttttacaatatgaacaattttatttctaatactctttatgcgataaactgcctaaaagactagaaaagtagtttgctgagtcctagaggggataactataatatgaaactaacctgtattatataaggtactgtcctgggccttgacagtaccttatataatacaggttagttttatattatatgttgacaatttccccccgttccttgctttgcaaatctactcgaaattatataacttccctccctaacccctgctgaatatatgtgaattataaaaagtagaagctagccaacaacaacaacaaaaggccataaaaaagtatcaatgattccacccactcacagctactgttattgacactttggtgtaaactcctacatatatcacattttttcccacaaaaatatttttttcactctgcttttttcatttaacacattcctctgtcactacatacatatctgaatggctgcattttgttgtatgtgttcactctatttacacygttctccaacatgtatcacttaggctgtttccaattttgtttctattaaaacagaattggtataaacaac

SEQ ID NO: 657580 - DNA, 550 bp, Homo sapiens
tgaataatgtgttacttttattaatgtcataatgagtgcaatattgccttcaagctcacaaagattgaccacacctaggagcttttgagtcctccatcttcctatgatccacgccatctaggtttggttatctaaggatctagtgtccaaagcaaatacacaactctctgctcatggcaaaaccggtactgctcacttcttctatcagagaacatacacacactgtggccaaggcttaccctaaagagtcgactctgagtaaaccataaaggcatgactataaaggcatccatgagccagaggaccattctttacaccttagataccatgctgcactggcctcttaagtgtcacacaaatcttgatctcttccatgcccagtgattactgtgatcacactgyaattttataacatcttctaactggaatggtgttaggaaatataatttgttagtttgctaggtaaaatattagtgaaaataatacctacacagactaattttttccttggcaaatatattacactatagatataactccaaatgtgatt

SEQ ID NO: 657581 - DNA, 521 bp, Homo sapiens
ccactgcactacagcctgggtgacagaaagaaattctataggaaataaaaaataactactttatgttaaagtattacctaccatggaattttaagtgaaccaatatttaggaacagtctttttctgtaagatctggagtcaaagtaactaaaattcaggattaaggatgcattaaaaggttgcattcatcagagaaactagagaaatacaccccttttaatttccttagtgctacatcttcctagatggcagtcagggagtggggtggtagtttatatatatcagcttaaatccttacaacccttcaagatagaggtagtacttataatagcttttcaggaagaaaagggctccatgaagaaatcaagcaacttaactagggtcagcaatgttggaactgggattamagtgtaattaaaacacttgcttttcccacactttactgttctgggttaactgttgggaacctgattttggtcagcaactttgcctcaataatcctcactgcctcttaaaattcc

SEQ ID NO: 657582 - DNA, 669 bp, Homo sapiens
agttagcaatagaggaaagactgggacaccaaggtcagggttatttctgctatatttcactgttactgataaatgtagcatgtacttcaggttcttgctactgcctctggtagacttttcttgaaaactgccacacaaaaataaacttttacatagaaaaataacaaaacagaaaaacaagaactcctagggttgtgttaaaaaggttgcgttaaaaaggatgaaaaaactatttaaaaggctcctactcagcaaatctgggacagtttgagcattcaaaagaatttaaaaggatgactgcaatggattggaacacattcagtacagcaaaacatgagttcatgatataatcaaaaaatagtaaaaccaaaacttgttacttctggaagctgctaggttaccarctctgtttggaaaactgataaagcaaaaaccaagaccaagcatttatcccaccttccctgtatgaactttatttcaggataaccgaaaagttgatgagaaaatgtttataggagaaaaacagtttataaatacaagaggaatgacacaattagaaaatcactattttatgacacccaatgaaataagggcaataattgctaaaactgttaagttaaaggctatacatttatataaatgtattaaaatgaccttacctgaacctat

SEQ ID NO: 657583 - DNA, 537 bp, Homo sapiens
acactgcctaatagccttgtaacttcttagaacggcagtttcttcttatgtaaaatagggctaaaaagagaccctccctcacagaattgtggtaaggtcaatatgggatactgctcatgaagcacttagcactgtgcytggaaaatactagtggctcaataaatgtttatttgttatcactaacatcatcatcatcaccatcggtcttcccttctttcatcacagactacctatcagcgctgtacctttggtcaatgagatcttttttttttcttggtggaaaatggagatcaagcctttttatataactgcaatcttcaataagatctccaaaccaggtcccaccagccctttgaagttgtcctgaatgttttttcatattgactcaacttccagagctggagacatgggggccccctctgatgtgccccgttctgcccatccttccaggcttacaagcagcatgagcccctctctcttcttctttatctcgtaacaagtggaaatccattttgttccactccagttacactccta

SEQ ID NO: 657584 - DNA, 537 bp, Homo sapiens
atcaggaggattgcttgggcctaggagttcgagatcagcctgggcagcataatgagaatccatctctacaaaaaaaattaaaaataactgggttaggctgggtgcagtggctcacgcctgtaatcccagcactttgggaggccgaggcgggcggatcacraggtcaggagtttgagatcaacctggccaatatagtgaaaccgtgtctctactaaaaatacaaaaaattagctgggcatgttgatgggcatctgtaatcccagctactagggaggctgaggcaggagaattgcttgaacccgggaggcggaggttgtggtgaactgagatcacatcattgcactccagcgcgggcaacagtgcaagactccgttttaaaacaaaacatatcaaaacaaaacaaaacaaaacaaaacaaaacaaaactgagttagagtggggctgtattcttagctacccagaaggctgaggcaggattatcccttgagcccaggaagtggaggctgtagtaacctattatcatgccacttgtactcc

SEQ ID NO: 657585 - DNA, 533 bp, Homo sapiens
tcccttaaaattacattgttgtaaatgttttaaaactttataaaaatgctgacataatatatacatataaatactatatacatatatacaccatatatatatatatakagagagagagagagagctatttatctatctatatatatatacatagtcatctcttggtacatgtgggagattgattcaaggagcctctcgtataccaaaatccgagtatattcaagtctgttagtcagccctgaagaactcacgtatagaagtcagccctctgtatatacacgcgggttttgcatactatgaacactgtagcatcaatctgcagttggttgtaaaacaatccctgtataagtggacttacatggttcaagcccatgatgttcaagggtcaaccgtatatccttttgcaatttgctttcttattaagggctttctacgtgcaaggcaccatgttgggcagtgtggatgaaaagacaagttagataacattttgcattgacattagctaatattgcctcttagaagagcttaaaatg

SEQ ID NO: 657586 - DNA, 554 bp, Homo sapiens
gaccattctgccaaatctttawtgttgaaattatctcttaatgagattgtaaaaaattctttagtgtccctttctgaatttaagcagatgcaacctaaaattacttaaatatttatatttctttcaatggctttaatccgttttgtcacttaattgtataaagctatcttctacaaaatagtactctgatattttgaaataaattgattttttaaaatggacatggataaaaaagctgcagatggggttttatatacagttgtttgctacatagatggaatattgaatccttcacccattaaatgtatcctcaccacagatttgctgcacctgctattttacatctcagtatattttatactgaatatttatggtcctttcaaaataatatggagagacactaaatggtcagaaacagcccaatgctgacatctactggatatacaactggacaaatttactatcaaaagaatgcctatattctactttacactgtaaaggtgtaagaaacaaagcaaaagttactatgtaatacttaataaacatttctactg

SEQ ID NO: 657587 - DNA, 577 bp, Homo sapiens
ggttccagacactggaaccaggcatggtgctgtccaagggctcttccagcaaggaagtagggggaaatatgattatgaggtagaaaccaatagtctcagctacaggattatacatgctgagggcaagggggagagctgtgattcaaatagagtccttttgatagctgaaattattagtaatattgttcttgtgggctgcctatagtggtagaccayagcaaacagagtacaagttatcttgaagaaattcaaattatcttgaagaaattctcaacttcagcctgctgaatggttactgctactgttacctactgctatactcaggcttcacttatttgtcagttttgcctttatattcctggtcaatgaaaatagatacaatgaagattgctggtcacgtctctcaacctgagtccacacacagtaagaaatagcaaggaaccatcttccagtgcagtcagacagaatgaggaaaaatcagccaaatacagctctaccaaatgtgtgtatcctgcctcagagcagggttaaggaaatgggcttttcttattgacggtggtcctgtaaagcgatttat

SEQ ID NO: 657588 - DNA, 606 bp, Homo sapiens
agaactacgtatgttatctttgatcccctctgctgccatccaatcaactacattatctgaatgcttctttaaatgcctgctctttctttgccaataatactgctatagttcaggccattaatatttccatgctagatgacaggaagttttctaacgggtttctctgcctttatgtagtctgaccaccctgaagtccttttccattttayagccagagtgactcttctaaaaatgcatatctgatctaatcattcctctgcttaaaaaccctttaatggcttcctactgctctcaaaataaaacccaactacttaatgtggcctctttcaggccctatatgattcaattcactattacgtgctttttgtctgcttgatctagctgtttctgattgttaaaatctctcattcatatggtgggcttgtcaatttatcttggtaattctagaggttttgttttctataatggaaagctgtattgttaggtaccttaaacttcttggtagtgaccctctatttctattaatacatttgatttaaaagactattttttgtctgatattagtaatgtttcatcagctttctttttgtgtgtatttcgataact

SEQ ID NO: 657589 - DNA, 600 bp, Homo sapiens
ctctgttctgttttgcattgcattatcttacattttttacttttgrgagtatcagaaactattttgcattatgagagaactttggtgtgtaaaaactaactaggtaggaaatatacttttagcaatggctgttggcagttacggggggatacttggctcttttcacatgtggctcagagaagcatgctctttgccaccggaaggtatggagatatcaccaccctccactgaggataaaactcccatcaaaagtgagctaatcacagaataggctgatttgctttgggttgctttgcaatgaaatggatggtaaaagtcattgtactgtcttgttccatagtgtttctctttttggggggatccaggatctggtataaaaatggacccttaatttgaggggatttgttttgccttccagatgtacctacttattaggccctaaaacctgtatgctttaaagagaaacactgacaaatgaaaaatcttacaactactggatcttcttctgcctatttatatgtgttgtgtttgtaatgtttatacataaaagagctctaatgaattggcttaaaagaaacaaaagcttaaatcaaatacttt

SEQ ID NO: 657590 - DNA, 592 bp, Homo sapiens
cctgagttcccttcctcttctcaattccttctttccaccagatgtagtcatctttttgaattcagattatcattcacatgcatttcttttcattttactctatatgtgttaattaagaatatatatacaaatgctttggaaatttttggaatttatatcagtggtattatattctgtatatttttaagctaccagcttttccagggaattataattgttgattctgtaacagtaatttgttcattttcactggtatacggtatcccattatgtaaacatggcacattttatccattattttgttaataggcacttaagttgtttcaatyttattgctattataaatctgctctgagcattctttatatgtgttttcttttctatgttcaagaatttctttgggatatatactcaagaatggaatttcttgctttgttttcttccacatatattaaacagaatttgattatttgcatccttggttaatgatacatcctcatcattagtccatatgtggctgtttttgtttggctagctggtataatcgtctaataagcaccctcgaaaccactactaaacataaaagctagtt

SEQ ID NO: 657591 - DNA, 612 bp, Homo sapiens
ttatttttaattgtttattttcataaaaataatttcatgaacatttacccctacatcacaccatacacaaaaatcaattcaaaatgcatcttattttgagctaaataaaaattttaaaacagcatatcaaaatttgttggatgcagctaatataataatatgagggaaatttatagcagtacatgcttatattagaaaaaaagaaaaaggtctaaaatcaatgacctcagtttcaccttaagaggctagaaaaggaacagtaaagaaaactcaaggctgtgtgtggtggatcacaccwgtaatcccagcactttggaaggctgaggcagggggatcacgaggtcaggagtttaagaccagcctggccaacatagtgaaaccctgtctctactaaaaatacaaaaattagctgggtgtggtggcaggcacctgtagtcccagctactcaggaggctgaggtaggagaatcacttgaacctgtgagacaggggttgcagtgagctgagaccatgccactgcactccagccttggtgacagagtgagactccatcaaaacaaaacaaaacaaaacaaaaaacctcaaaataagatgaagaaagaaataataaaga

SEQ ID NO: 657592 - DNA, 543 bp, Homo sapiens
gaagtaatacacttcacttacactcacacccattgggcagaacttagtcaaatgaccacactttaaactgaagagaagctgagaaatgtattatttattcccagcagccatatgccatgttaaaagttccactacagtggaacaagggtggtatgggtttaaaaggaattctaccagttttctatactacagtcataccacagaatgatatatggttctattaaacaggaatatayagtatacagtatgcaatgaatcatgtggtttctaactatataatggaacatttaacaaaactagaagaatagatgtacaatgtatccttataatggtagttgttttattaacagctttgttaagggttagttaacatacaataaattgcacgtttaaagtatacaatttgatagatgtgtttctatgtgtatatgtatgtatatacatcggtacatatgtagtattgtatcatagtttcatgaaacgtgtatgtatatacacacgtatgtgtatacacacgcatacattccatgaaactgtcatata

SEQ ID NO: 657593 - DNA, 543 bp, Homo sapiens
gaagtaatacacttcacttacactcacacccattgggcagaacttagtcaaatgaccacactttaaactgaagagaagctgagaaatgtattatttattcccagcagccatatgccatgttaaaagttccactacagtggaacaagggtggtatgggtttaaaaggaattctaccagttttctatactacagtcataccacagaatgatatatggttctattaaacaggaatatacagtatacastatgcaatgaatcatgtggtttctaactatataatggaacatttaacaaaactagaagaatagatgtacaatgtatccttataatggtagttgttttattaacagctttgttaagggttagttaacatacaataaattgcacgtttaaagtatacaatttgatagatgtgtttctatgtgtatatgtatgtatatacatcggtacatatgtagtattgtatcatagtttcatgaaacgtgtatgtatatacacacgtatgtgtatacacacgcatacattccatgaaactgtcatata

SEQ ID NO: 657594 - DNA, 543 bp, Homo sapiens
gaagtaatacacttcacttacactcacacccattgggcagaacttagtcaaatgaccacactttaaactgaagagaagctgagaaatgtattatttattcccagcagccatatgccatgttaaaagttccactacagtggaacaagggtggtatgggtttaaaaggaattctaccagttttctatactacagtcataccacagaatgatatatggttctattaaacaggaatatacagtatacagtatgcaatkaatcatgtggtttctaactatataatggaacatttaacaaaactagaagaatagatgtacaatgtatccttataatggtagttgttttattaacagctttgttaagggttagttaacatacaataaattgcacgtttaaagtatacaatttgatagatgtgtttctatgtgtatatgtatgtatatacatcggtacatatgtagtattgtatcatagtttcatgaaacgtgtatgtatatacacacgtatgtgtatacacacgcatacattccatgaaactgtcatata

SEQ ID NO: 657595 - DNA, 563 bp, Homo sapiens
tgatcgtgagcttgaaaagcatggcccaggacagagcataaagtgggaggggctatgagcgggtacagaatcctgcagaacgtgggcatgccagcgaggagacaggctcgcggaggacagaaggagggttccgagagccgcaggcagaagcagggcagggtggtgtcaaagaaaccggggggtatgaagggacaaaggacgagtgtcccctagaagagagaagaaagcccattggatttggagcaggaagaggcccactgagagtggcctggggacagagtgcatgtgaagacagcccaatatcggctgctttttaaaaaatgtggatgagaagaggagagtcgggatagttactagaggagcactgarggtaggggggagtcggttggggggcttggttggtgtttggctgtttacttatttacttatttgcattgggagaaagggatctgatggcatttacagatggagggaaggagccaatagtcaaggacaggctgatgattacaacacatgagaagggctgacaccccatcccaccacttttctccttgtcccaaaca

SEQ ID NO: 657596 - DNA, 563 bp, Homo sapiens
tgatcgtgagcttgaaaagcatggcccaggacagagcataaagtgggaggggctatgagcgggtacagaatcctgcagaacgtgggcatgccagcgaggagacaggctcgcggaggacagaaggagggttccgagagccgcaggcagaagcagggcagggtggtgtcaaagaaaccggggggtatgaagggacaaaggacgagtgtcccctagaagagagaagaaagcccattggatttggagcaggaagaggcccactgagagtggcctggggacagagtgcatgtgaagacagcccaatatcggctgctttttaaaaaatgtggatgagaagaggagagtcgggatagttactagaggagcactgagggtaggggggagtckgttggggggcttggttggtgtttggctgtttacttatttacttatttgcattgggagaaagggatctgatggcatttacagatggagggaaggagccaatagtcaaggacaggctgatgattacaacacatgagaagggctgacaccccatcccaccacttttctccttgtcccaaaca

SEQ ID NO: 657597 - DNA, 599 bp, Homo sapiens
cattccttcatgcacccattcattcacccaaccaagccagcgctcactgcataccaggcactactccaaacactttctgggtaactaactgcatcctcccaacaacttggtgggacgggtactgtgattcaccactttacaggtgagaagacagaggcacagagaggttaagtaactcactcaaggtcacagttggtaaatgacagagccagggtttgaacgccagcagtctggctccagagtttctgtccttaaccacagagggggagtgaccatcctcccctgactccagcccagggttctttctgtgtctcatatcccagtggggacaagactgcagtgcctgtgtctgggatgtggccctagaactctggaaccccagtgtgcctgagtgaggggaaaggagagagggaaggccctgtggatccttttagaggacacgaggtgctgtcctggcccagttccagtcccaactagcgaggagcctgtgccagmttcctgctaggtgccctgctgtttctgcaaactgtgataatctccagaaacagtgaatgatgggctctggctcagtccaactaagcctgctgcaggagatgggg

SEQ ID NO: 657598 - DNA, 557 bp, Homo sapiens
tatgaacacaatgtggcctcaggctgcttaccttcctcctcttacctcrtacccttttgtcctgtatccccttttcctgcctcattaaactcactcttccttgttgcagagaaagctaactgtccaccaacaatctgttccctgctttcacagtacaaagtggtttctgataagtggctgcccaaacaaggattatatttcccagtttcccttgtttctagactagtcctcacccccggactagtgctgtgtgtcatttatgttcaaggaaattaagtcgttatgccagatgagggggtttgctttctccatcttgtttttctcactcattagctgcatgtgaaccctctgaggccctaggtgatggtacagccacaagatgtgaggaacacaggacactaaattgccatgtggaagaaagccactagccaaccaagaacatccacactaggcatttacatgagtgagaaacaaacttgtattgtgttgcagcactgaatctttgaaacttttctgttataacagcattacctcaactaatatacattagcagctca

SEQ ID NO: 657599 - DNA, 557 bp, Homo sapiens
tatgaacacaatgtggcctcaggctgcttaccttcctcctcttacctcatacccttttgtcctgtatccccttttcctgcctcattaaactcactcttccttgttgcagagaaagctaactgtccaccaacaatctgttccctgctttcacagtacaaagtggtttctgataagtggctgcccaaacaaggattatatttcccagtttcccttgtttctagactagtcctcacccccggactagtgctgtgtgtcatttatgttcaaggaaattaagtcgttatgccagatgagggggtttgctttctccatcttgtttttctcactcattagctgcatgtgaaccctctgaggccctaggtgatggtacagccacaagatgtgaggaacacaggacactaaattgccatgtggaagaaagccactagccaaccaagaacatccacactaggcatttacatgagtgagaaacaaacttgtattgtgttgcagcactgaatctttgaaacytttctgttataacagcattacctcaactaatatacattagcagctca

SEQ ID NO: 657600 - DNA, 540 bp, Homo sapiens
atgactcaaaaatgccactttctctacactaytgctatttcccagaattcctcagcctgcacatgctcaattgaaaccccattactcttttcaggaacaaagatgatgggatgatgtggcgacccctggggctctccaggtccctcttccttaatcccctccagtgcatgactagagggacccatgcagtccctaaatgagaactttacagccaggcactgctgacactacttcattatgaagatgcatgggatggctacaagataatgaatgccagtgcttggaaggataaactcggcttctctctgatacaatttaacatcgtatttccctaatttgagcctgatttagtcgctggggtatttgcacgcctcttctatggtgccaatagttaattaaacagatgttgcagagggaatcattaattttagtgttgcagatgggagcggaatgactttgtgaagttaatgtttcagcaaaacaatgggtttctgtcatcagctggtataaaccaagtaaattaagagaacaagtagaata

SEQ ID NO: 657601 - DNA, 584 bp, Homo sapiens
tgctaatctcttgctgcgtctartttataaattaaactttatcataggtatgtagatataggaaaaaacctagtgtatatagggttcagtactacccccgggttcaaacatccactgggggtcttagaacatattctgaaaaataagggaagactactgtatgttcattttctcccctaaaaactatcttcccaaactaatttctgagcatttgcaggaaataagatgagaataaacgttctccctgtaccttcattcattctctgcgctcatgatctttgcccattctctaatatttgaggcaccgagatggatacacacacttatttacactagtcactcccttatgcctggcctgtgagctcccttgagagcaagggtcatgtctcatttatctttggagctccaattttgaatgcagtctctgacactcaatgaatctttgttaaattagctggatgaatatggaatgatatagagatgaataaaacatggtccttacccccaagacatttaaaatctaatagaatagagaacacacataccagaaacaatagaagacagcagtaaaagtgtcacagaga

SEQ ID NO: 657602 - DNA, 585 bp, Homo sapiens
ggtggactgtgttactcctaaaaccaagtgtgttctgccagctcagggattctgggctgcttggatttttgaaacaaacacacactcatcagagggctgtaaacagtgcaggtgatgcctgaacacagctgactgctatcttggtttaaaaatgcagactctggagctggatggttgaatctctattacacccccaatttgtgtgatcttggtcaagttcattgacttctttaggcttcagttccctcatctgtaaaacagtatgagaatagtcgctgtgttctaagattgctttgaagattaacatgagtcggtaatatctataatgcttataagggtgcctggcacacagtaacgatgaataaatgctaattattgtatttactattagtagtaattggacaggcagcaaagaagatccttcaactttctgtctcttaatggtctgaaacttccatctgttactatttaaaagaatttgggtaagtcctcgtacagaaaatgagtctttcttaatttcrgaatgatggtaaaacattgggttttagtcccaccagtattttctacctggaaaggaactgagcc

SEQ ID NO: 657603 - DNA, 483 bp, Homo sapiens
cccccttagctagagacaggcttctaggtggctcgccttctactggtagaacatgtagggttatctgctaaagtgtgggacctgytacattgaagccaatcttctctgagcaggactcaatttatttttttcttaattgcaacacatgaaaattttaggtcaccaagaaacactagtcaaagggtttcattttctgtttatggcctatttattacaattcagaagaaaaatgaccaactagaaaaaaaatatgtaacacgtatcacggactgtcaaatgtctttttttttttagacaaggtctcactctgtgaccaggctagggtgcagcggtgtgatcttggctcactgcagccttgaactcccaggcttaagcaattctcccacctcagccttctgagtagctgggactatggcatgcaccaccacacctgggtaatttttgtatttttttgtagagaccagggtttcgccacgggcccag

SEQ ID NO: 657604 - DNA, 643 bp, Homo sapiens
ggtgttttacacttgtcatcaacttaatatttttatttaagtttagctcttctttaatcatgtttatatcatttgttagcctaagctgataaatattctactggattaccttctagaagtttttaagcatttattttctatctaattttttcagatatcaaataatccctcatatattatacatttcccatgaagtttttatttacattggatgaatttgtagttctttaaccatgtgaaacatttcattatgaaatatttcaataaaaatatgatgtataagttttatcaatatgtttttgttcattcttgcatatattagtttttttggctattaaattttctaagtggaaactttttggtaagatttttctttctggtttaactggctatctgatcgaaaaacaaccaaaatatctccagatggattaaagaattacacacaaaaatacaactttagtgaagtatatccatatgttatcaaatagcttaaaactaacttttgaaaaaaaatcaatgtgactacttaaaaattttgttcagataattrcagggataccagtttgaaataatctaacttaaaatcatacatttatgtacataaaaataaatttggtatcaatgaaaacactaaaaactagaa

SEQ ID NO: 657605 - DNA, 609 bp, Homo sapiens
tttatttccaaattaacagggcaataaaaatcatctcttaaaaatcagggrtatcagtattcatctcttttcatgtaaaaatattaaaaaattagaagtgaaatatcacagaagatattttaaatatgaagacaaataatgaaataaggagaattttaaaagccaaatattttggatcagagtaagaagttagtggtaaaagataaaggttatccaacaacctttcgcaaatgaagccaaaaaagtaggtttgcgcaacactgaataactaaaattacaactcttttatatttcattaaaaaacatgccctttttcaaaaagtcagatcggtttaatcacaccataaaattatttacccaaagttaaggaaaaatagcatgctttcatataagtagaaaatttaaatacacaattgatatttaacgttctctaagcaatgtaaagattgcttttaagccatctaacagagttgtatttattattagggatcaaaaagtgtgtaaattagcacaatatattttatataaaatgaatctgttttctcttataagagtatacaattataattctgaattttgaatttattcttaaacaaataaaaacaactg

SEQ ID NO: 657606 - DNA, 585 bp, Homo sapiens
tccagtgccaaattcctttcttagacactttttccagtataacatgttaatatgtgacccctgcttcacttacagatttttagagatctatcccaggttacttaattcaactccaagacatacttttcttttaaatgcagtgaataaagsgtcagttacttagtcactccggttttatttaatcctactgtcatctgacaatatggtactgatactatttcctatttctagatggttgctagaaatatactgtaatatttattcttgatatatgtttgttactttaacgggaatacataggctataaatagtccccttgcctctcacaagttagacagtcctgcccagaatgccctgctgaagagttgtagcagatcaccctgttcctccttaacctctctgttcctcatatgctcacctataaaatagtgatcatagtaacacccatcttgtgatgatgtagagaggttcaaagaagcgaattaggggaggccaggcatggtggcttatgcctctaattccagcactttgggagtccaatcacttgaagtcaggaatttgagaccagcctggccaacatggtga

SEQ ID NO: 657607 - DNA, 519 bp, Homo sapiens
aaaggcaaatcagggcaaattaccttaagagtttttaagataaatgtttctcttggtgtctctttcttggtcttctgggtaaggttgtatctgaatatgttgaccctaaatgtctgcagacatttttgcagaaatgttaagggtaaaagtgacacagccaatagcaaagaagtgccagaaaatacgtaagcaaactgtgacctctttttacctcttgattgacttttatgttaaataatgaatttaccttatgcttgaaagaatttgaaatagtatttggcagtgaagaatttactcctcccatattttcattcaagagaaatttccaggaggagggttgttggtgggttacctccaactcaaccacttcagagctactacagtggtaatgcatgttgaagaaaagagtcaaactctgtgaaatatttgaagagatttattctgaggcaaatatgagtgacctcggcctgtcacacagcccaggagatcctragaacatgtgccaaggttgttgggcta

SEQ ID NO: 657608 - DNA, 563 bp, Homo sapiens
atagtatggatcttctgaagtattgtgctaaatataaaattcatggtccatccctgaggtcttttatattacagtgtttaagatataaaataaatgtaaagaaaaccaaagaatgatcaatagtgatgaaagttatcactatttctggataaaccatgttctacratagcacataactggtgatagcttggagtcatgcgaagacctctccaagaaaatgaaatgtaaagtgatgacttaaatatggaaaaggaaccatttgattaacaagccaaactatgaagcttcaaagacaagatgttaccttgtgcaaaaccctgacatggggaaaaactgtgtttcaagagtggaaagagccctgtctcgttaggagtgagggtcttgaatggtgcctttgattgtagacagcagagcagagctttagcatcctggagatttgtaattgtactccacaagtaactaaaggatttaaggcaaaggagggaaagaatcttgcttacattacaaaaaataaaaaagaaaaagaagaaataaaaaagaaaaaaatgtaatatatattatta

SEQ ID NO: 657609 - DNA, 563 bp, Homo sapiens
atagtatggatcttctgaagtattgtgctaaatataaaattcatggtccatccctgaggtcttttatattacagtgtttaagatataaaataaatgtaaagaaaaccaaagaatgatcaatagtgatgaaagttatcactatttctggataaaccatgttctacaatagcacataactggtgatagcttggagtcatgcgaagacctctccaagaaaatgaaatgtaaagtgatgacttaaatatggaaaaggaaccatttgattaacaagccaaactatgaagcttcaaagacaagwtgttaccttgtgcaaaaccctgacatggggaaaaactgtgtttcaagagtggaaagagccctgtctcgttaggagtgagggtcttgaatggtgcctttgattgtagacagcagagcagagctttagcatcctggagatttgtaattgtactccacaagtaactaaaggatttaaggcaaaggagggaaagaatcttgcttacattacaaaaaataaaaaagaaaaagaagaaataaaaaagaaaaaaatgtaatatatattatta

SEQ ID NO: 657610 - DNA, 589 bp, Homo sapiens
taccacatttccttatgtcaagcataggaagcttgaaacaacttttaaaaaattttccttgactcaaataattttaaataagaaattctgacaagaaatagtaacacttcatactgtgtatcaccttaattttttttttttgkttgataaggtgtattttagaataatattatgcttttttttaataattggcaaaacttttaaatgttaagaaggaagttcatgttggttggggaaaattacgggagatatatatatatatatatatttaagtaaatattttccccataattgagaatgggacagcgattgcatataactatagtaaggtcatggtggtggtaaggagagagggcatagaggagggagaaatgggcatggaaagcaactgcgccaagtcttttattagtttgcttccaaaatccctatcaagaggtttctgcttcaactggccagtaacttacactgcttatgagttagaatcctaaccaatattacattataaggtagtgttttattttataagaggattaaactatgcatagtgttctgtatcttgctttctttatttgatgattactccctcaca

SEQ ID NO: 657611 - DNA, 589 bp, Homo sapiens
taccacatttccttatgtcaagcataggaagcttgaaacaacttttaaaaaattttccttgactcaaataattttaaataagaaattctgacaagaaatagtaacacttcatactgtgtatcaccttaattttttttttttggttgataaggtgtattttagaataatattatgcttttttttaataattggcaaaacttttaaatgttaagaaggaagttcatgttggttggggaaaattacgggagatakatatatatatatatatttaagtaaatattttccccataattgagaatgggacagcgattgcatataactatagtaaggtcatggtggtggtaaggagagagggcatagaggagggagaaatgggcatggaaagcaactgcgccaagtcttttattagtttgcttccaaaatccctatcaagaggtttctgcttcaactggccagtaacttacactgcttatgagttagaatcctaaccaatattacattataaggtagtgttttattttataagaggattaaactatgcatagtgttctgtatcttgctttctttatttgatgattactccctcaca

SEQ ID NO: 657612 - DNA, 550 bp, Homo sapiens
tttaaaaattgggttgtctttttatcaaggtgtaaaacattctttatatatattttatcatatatgtaattttaaaatattttctcagttggtggcttatcttttccttagcttaattatatctttttttttttttgtcagagtctagagtgcagtggtgcattcttggctgactgcaaccttcgcctcccaggttcaagtgattcttgtgcttcagcctcccgagtcgctgggattaaaggcatgtgccaccatgcctggctaacttttatatttttagtagagatagggtttcaccatgttggccaggctggtcttgagcccctggcttcaagtgatccgcccacctcagcctgacaaaatgctggcattacagatgtgagccaccatgcctggcctaatrgtatcttttaaagagcgaacacttttactcttgatgaagttcgatttattattatttttctattttgaattatacttttggtgtcataactaagaaatctgtacttaacctaaggatacaaatattttttcttatatttttgtctag

SEQ ID NO: 657613 - DNA, 517 bp, Homo sapiens
aaaggcagagcgtggtttcagctcttctctccttatcgcttctctccttcttgttgcccacaacaaggcaagtgggggcgtgtttcagcactgtttgtgttacagctctttcagtcccaccattgagttcttgtcctgtgtccaggaataatgaggtacatggaaaactaggggtgagcaaggcaaagagttgctttattgagtgactatacagctctcaggagatccaaggtgggtagctcctttctacaggcaggtggttctgatgagtacagctgtcagtggcaaggagacccatagtgagcagtcctartcacaggcaagtgatcctgtcaagtttgcagccctcagtgaagaggagaccttcagtgggtagctcatatccacaggcaggtcgtcctgacaattgtgcagctctcagtggagaggagacccagagtgggtagctcctatctgcagacaagtcatcctgatgagtgtgcagttctcagcagagaggagacccagagtgggtagc

SEQ ID NO: 657614 - DNA, 585 bp, Homo sapiens
gagaaatgtgtattcagattatttgcccattttttaatttttttttctttttaaaatttaattgtaaaatttgaatmacttttttgtgctcttctttgttttggtcttgttttgtttgatttggtcttgttttgttccttaaccttttggtgactagtgagtagctattggtagaaagtgggtaattactaaacaaattgcaatgagaaaaaaaagaattaaatagtgtggaacacttgcaaatatgataactaagttttaccaattatgaacaggttaatatttggtttactgtttggaaaataataatgtacaatttacacattggttctaatacagtatttaatctgtatctttgtgtcatatttaataccaccttttccaaattgttccatggaatgtaataggttttatatcaaaaaggggtctgtggcttaataagtctggagaaccataggctcaataaacgggatggagtgttttaactcaagggcttccttgaacctttaatatgtaaatagacattgtaagtgttcaaagcaaggactgtacatgaaaataaaaccctttactttccctaatcat

SEQ ID NO: 657615 - DNA, 609 bp, Homo sapiens
ctagttcctatgaaagtgattctccaggcctccttctctcagcccccttcctaattctcaactcacatgacctaaaggatgggaatgcaataggaagttgactattctgtagacatcccaaagttcagagagggataaaatgttttcaggcacttttgaaatacaaagttcagatttaaatgatctttaataataagaacacaatttacaatctgagaatgtacattatctcaaatggtattattaggcccattgtatttagctgagggaactgagacccaagagattaagtgatgcccccaaagataatacagttaattcatggccaagttcagaataaaacacaggtttcctagctgcaagagtataattatttcattttcttgccccatccatcrctgttaaaaacccttccaatttctctattctataattctgaaaacaatagcaatatgaaacttgtagatttaaaatcaccctgatttctttgtgataattttttgtataggcttttatcaacaggtcttacaatatatagtatacgcaccattatataaaagattagcatgcagtaaatatgacccacaccaagggaaaggcaatggagtg

SEQ ID NO: 657616 - DNA, 642 bp, Homo sapiens
ggtttatacatttcaggacttttctttttgtatttgttataaatttgtgttgacaattggccctttaaatactgctttgtagtaactctatacattgaccctcccttctccaagacatattatttttggtgactgtttatactttcagtttcttggagggactatatcagtgacttctccaggctatgcagcctctgatgttcttcctcagaaggcacagccttgagcatgcacacatttccttgggatgacagtggttttagcagaactcttttgggttgtttgtctgatttatttgtagcggtgtctctcttgttgctatcacacccaactgatagccataactaattttcagttgattgttctattgtttttaataataataataatactctggggaaataaattgcccaacaggctgatccaattaaatgcaatcctctttgcagagataaacattaggtctattctctttcagatgacagcagggctcttctcatctatttctttccctgcttgtctctgttaagtgtctaaacagtttaaggtttagcttccaaatctcatgttgctataagcctccttttaattrcttatcaacaaaacacttatcattttccacaccatgcttaggtctgaatt

SEQ ID NO: 657617 - DNA, 447 bp, Homo sapiens
ttcccctcacaaatttaaaatacctatggtataaattaagagatacaccatttaaaacacttataacggttgaattagcacaataaatgtcatggtgtgttcaaattagacttttgctatcatttgaaaatagttgaagataatcagggcatattgtctaataatatgatttgtttatggtaatctccagcatcttcaaatacaaaaatcatatatagttatatccacaattgaactaactaaatgtaaaccattttaggtcacattgaggtcatcactaagttttagtacatgctgcgctacttaggtattaggaagacatcaaccagcrtgaaatttaagccctagagacaaactagggctatgtattctctttagagcatacccctcaattatttctacttctccacgttttttattaacaaatctcccttgaatttggcagag

SEQ ID NO: 657618 - DNA, 481 bp, Homo sapiens
gctctagataattgctgctttggataatttccagataaaatgcccaaattgacaagacaaatgttttacatgtaaacaagttgcacttacttatctyaggcccccaacaacctgattcatttcagctattggctttttcttttctctatggtcacagttatcacagtatgctctcaggaacatgggggcagagcttcaacgttaaacaggtctttctgttttcctttccactgggagatacctagttcaatgttcctgtaaccagttgtaatatatgccaatctcaaagttaaattctggctctttaggagggagctttcatctgaagacctgggatcttcagattatcactgcgttgtcacttcccctatttaacagctgcttgttttgctttactccagtcctcaacccccagatgaggtagtagagatcccctactgtttcgtggaacaccagcaacacggacacaaaggcaaactcc

SEQ ID NO: 657619 - DNA, 421 bp, Homo sapiens
tgcttcaaatctctgacttcctcttctgctatcagaatgagaaaaatccctgcttctgatggtgcttctgattatattaaacccatccacatagtccacatagcccatccacatagcataatctttctaatttaaggtcatttgattggtaaccttaattacaactgcaaagccctttagccatgtaatatatttatgaaagtatcgccaaggagcaaattacaaaagccaaaattttgtctaccacacatgtagactgaaacatctttatatgtatcttcatggttttcaagaacaaaaatctggaaacaactctaaaacttatcttaaaaaatacaagtaaactgttataaattggcaagctgaaagwttaccagaatttaaaatgaatgagatataactacaaactatacgatgcatc

SEQ ID NO: 657620 - DNA, 581 bp, Homo sapiens
aacaaaatcaacttaaccataatatgctgctttgaaaataccccacaaagagtcagagtacagtttcaggaaaaccatattattgggtgtcagaaagtttggagttgggtgttggccctaacactttctaaatgtgtaaacttggggaagtcctctagcatctaactgcttgtactgcccttgtaatgttttgttattgtattagtccatttcatactgctctgaagaaatacttgagactgggtaatttataaagaaaaagaggtttaatggactcacagtcccacayggctagagaggcctcaaaatcatggcagaaggtgaaggaggagcaaaggtacgtcttatatggtggcaggcaagagagcgtgtgcagggaatctgccctttataaaccatcagatgtcatgagacttattcactatcatgagaacaacacaggaaaaaaccacccccatcatttaattacctctgaccgtagggattatgggagctacaattcaagatgagatttgggtgtggacacagccaaattatatcagttatcaaagttaagctaattttatcaaatgattggctag

SEQ ID NO: 657621 - DNA, 581 bp, Homo sapiens
aacaaaatcaacttaaccataatatgctgctttgaaaataccccacaaagagtcagagtacagtttcaggaaaaccatattattgggtgtcagaaagtttggagttgggtgttggccctaacactttctaaatgtgtaaacttggggaagtcctctagcatctaactgcttgtactgcccttgtaatgttttgttattgtattagtccatttcatactgctctgaagaaatacttgagactgggtaatttataaagaaaaagaggtttaatggactcacagtcccacacggctagagaggcctcaaaatcatggcagaaggtgaaggaggagcaaaggtacgtcttatatggtggcaggcaagagagcgtgtgcagggaatctgccctttataaaccatcagatgtcatgagacttattcactatcatgagaacaacacaggaaaaaaccacccccatcatttaattacctctgaccgtagggattatgggagctacaattcaagatgagatttgggtgtggacacagccaaattatatcasttatcaaagttaagctaattttatcaaatgattggctag

SEQ ID NO: 657622 - DNA, 589 bp, Homo sapiens
actgaaacctattgataagatagctatgccacatttaaagcaaagaaaccccaaaaacagatgaaatataagtcaaagggcaagctctgtttttcttcctattgctttgtgtggggtcatttaatcatggttctaatcactacaatcaaaaatgyacatgacatcacaaaaagtctgcattaatccttccagacacagtatcagataatgtgcttaaaagaaaaaaaaaaaagccctgccagctacttcctgtggcaaacacacacagtgctctgcttatcaaacagctcctttaacgagagaacactcctagttttattaaatcccttttagagcatcatctttttttggactttgtcttttgtcagtggctgtcactagtgagcaaatctccagaaggtgaagagaatgattaggatgagaatctgacttagggcaaaattttagctctgaatgtagaagggctacttttgtgaatgttattttcattgaaaacgtagctatatatttgttttatgtcttaactaaaagcaaggttttctttcctaaagcaatcctttattttaattgttaagccacaagctagttc

SEQ ID NO: 657623 - DNA, 589 bp, Homo sapiens
actgaaacctattgataagatagctatgccacatttaaagcaaagaaaccccaaaaacagatgaaatataagtcaaagggcaagctctgtttttcttcctattgctttgtgtggggtcatttaatcatggttctaatcactacaatcaaaaatgcacatgacatcacaaaaagtctgcattaatccttccagacacagtatcagataatgtgcttaaaagaaaaaaaaaaaagccctgccagctacttcctgtggcaaacacacacagtgctctgcttatcaaacagctcctttaacgagagaacactcctagttttattaaatcccttttagagcatcatctttttttggactttgtcttttgtcagtggctgtcactagtgagcaaatctccagaaggtgaagagaatgattaggatgagaatctgacttagggcaaaaytttagctctgaatgtagaagggctacttttgtgaatgttattttcattgaaaacgtagctatatatttgttttatgtcttaactaaaagcaaggttttctttcctaaagcaatcctttattttaattgttaagccacaagctagttc

SEQ ID NO: 657624 - DNA, 596 bp, Homo sapiens
cactcacaggaggttcaggaaagaaatgatgagagaggaagcaatagacagagtatggttctgatggcccagggcaaagaggagatggatggagacctataaaaaggcttacagaagttggaaaagctataaagagcgattaggcaattggatgtttccatcattttacagacatcatttagaaggaagcaaaggccatttgcccttaaaagagccaaagaatcactggtataagctgagtaatttgggggaggcaaagaagattctcagtgccttccttttctacctaaaaaagaaataatatcgatcaatttgggaagttgataaggctagtcaacacagacgaaataaatgagaacttctcattcatcataatgttatggagattatcagcataatgttactaagattatttttaaaagatagttcttgaaagttatgagaaagaggacatgatgagggagtattgcttactgggataaaccatacactagggactcaagcattaagaaaaaaataaaaacaattgagaactactctcttataaatgtaaaggcccagwgaattcatccacagaaatggtgccgttgaaactg

SEQ ID NO: 657625 - DNA, 641 bp, Homo sapiens
tttgggggccctttatgaatgacataggaatgagcttgaatttccatgtacgttatctgtgacagatactgacttgctgcatgcgtgccacttgttcagctgtatcttgctgcacttgctatcaccagggcaagcagcatgctatgctggtggctgcagagtactctggaggtgcccaggcatctttcatggtcccaagtgattttcacacataaggctgctttcatgtcattccgtacaagggcaatatgtgctcctatatctgacaatgaccaggctgggtattaggacccatatctcagattggaagttgtggctaaactctgagcttaagaagaagaaggcagaagtgccaggcagaaacagctcagaattcagaaggaggatgagaccaaagtccagtttcacaatgagtcctgtataggagtgagggctggagagggagagctgcacctgtgcctcacccctgacctattacatcccagtcctggtagtagcaaaaggattggaggttggtcatctaacrcagggacctagggatgagggtggtctagctgatctcagcaagtggggaggtattggagaatattaagacgtgggggttggggaaggattagtcagaattcttattaaaaatgaat

SEQ ID NO: 657626 - DNA, 622 bp, Homo sapiens
atcaacctttcctctctcaagctccccagaccttgggggctcttcttttggtttattttgttcatatttgctggagatgtgtttgagtttcactgcatctgtcacctactccaaaacatttgggatcctgatatgccattccggtaagattacaattcagtgcaggacctcatacccttataggatgttttctcgcctctggcatatccttagctgggtgctggctttccttgactgagcccagcgtatattgtatacagggatcaaaataycatatgtacctccaaaatatatgcaactattatatatctttttttttaaaaaaagcaaactagaaaaaaatgtataatattcttgcctccatctcatttcatcttccagggtcacattgcagacccagcatttgtggagggcaaagaagcaacatcttaatctcttcctcttgccaaatccagtttatcttttttccttggccagactcctctttattttttggctctcccctatactgtttcctctgtgatactgagaccccagtagtagacttcctagataaattatcagcttgctatgacatggttttggacatgtttattgaaataaaacataaatgcagagaagt

SEQ ID NO: 657627 - DNA, 498 bp, Homo sapiens
atatatgcaactattatatatcwttttttttaaaaaaagcaaactagaaaaaaatgtataatattcttgcctccatctcatttcatcttccagggtcacattgcagacccagcatttgtggagggcaaagaagcaacatcttaatctcttcctcttgccaaatccagtttatcttttttccttggccagactcctctttattttttggctctcccctatactgtttcctctgtgatactgagaccccagtagtagacttcctagataaattatcagcttgctatgacatggttttggacatgtttattgaaataaaacataaatgcagagaagtataggtcatagtaattttgaaacatgctatacgtatcatgaaagagtgtcattagcctattcttcaacagatactgttttagtttaacctatttttatccatctcccctccaagataattcttgtgaactcagaaatgtaatattcttggaaattttttggccc

SEQ ID NO: 657628 - DNA, 528 bp, Homo sapiens
gctgagctgctggggttgacagaagagtaatgcaagcactcccttggctgccccagctggtgtctcactaggttgcatgccctccattccactggctcatagcccagcacagtattagaacttgcccaggaattgcagcctttgtgtcctagatcacctttcaagtttatttagtactccagagcattttggcccatgagagcagggcttgcctaagctcaattttgacygctggggtaggtaattcccttctggctagggctgccctaaatgctcccttcatggttgttggctgagttctgccaggtgaggtgttgcttttggctgtgacaatatgagttccaatgcaaagtcccacaatcactgtgctctctctcccccaagtgtgaagattctccatgccacaccattgttgctggggggtgggggagggatggtatcagctcttcaagactctctttcctaactcttcattgtctctttcagtgatatgaagttaaaaccaggtactgtgatcgctcacctgat

SEQ ID NO: 657629 - DNA, 528 bp, Homo sapiens
gctgagctgctggggttgacagaagagtaatgcaagcactcccttggctgccccagctggtgtctcactaggttgcatgccctccattccactggctcatagcccagcacagtattagaacttgcccaggaattgcagcctttgtgtcctagatcacctttcaagtttatttagtactccagagcattttggcccatgagagcagggcttgcctaagctcaattttgaccgctggggtrggtaattcccttctggctagggctgccctaaatgctcccttcatggttgttggctgagttctgccaggtgaggtgttgcttttggctgtgacaatatgagttccaatgcaaagtcccacaatcactgtgctctctctcccccaagtgtgaagattctccatgccacaccattgttgctggggggtgggggagggatggtatcagctcttcaagactctctttcctaactcttcattgtctctttcagtgatatgaagttaaaaccaggtactgtgatcgctcacctgat

SEQ ID NO: 657630 - DNA, 621 bp, Homo sapiens
catttcctagtaagtgaaattgatcaaatgaaaaggtgaggtgttaatggctgtctggcatcagattggtgactgttagtgttgccactggtcaacctggaaaataagtggttagaaaaaggcttatagtcarccactgagaatttgccaccattgtctcaaacacaaagaagacattatggtagtttcatcactgttggtgaattgctccaggaagcctgtagtttaaaaattataaaggatgtaaattctagtccatgattgaagaagtgctgctgatgtgattaaacagtgtgaacgtgttgcttggtaagaaagatttggaaaatacttatttctgtctaatcaaatgaataattaacttttgaatgaaatgattaaaaatgtcaccctatgacaccgggaaagagaattggaatagcagttattactccaaagttgcttttgcattatctcactcaagtttttttttagtgaagctttaaggtgtgaaacccaagcatctaaaatagctcacctcttgagtgttcttagccataagtcttggtatggaaaatacaatgaagcctttggcagtttaccctgcagtatgtgtaggagttgcttttaaacatacaattg

SEQ ID NO: 657631 - DNA, 621 bp, Homo sapiens
catttcctagtaagtgaaattgatcaaatgaaaaggtgaggtgttaatggctgtctggcatcagattggtgactgttagtgttgccactggtcaacctggaaaataagtggttagaaaaaggcttatagtcagccactgagaatttgccaccattgtctcaaacacaaagaagacattatggtagtttcatcactgttggtgaattgctccaggaagcctgtagtttaaaaattataaaggatgtaaattctagtccatgattgaagaagtgctgctgatgtgattaaacagtgtgaacrtgttgcttggtaagaaagatttggaaaatacttatttctgtctaatcaaatgaataattaacttttgaatgaaatgattaaaaatgtcaccctatgacaccgggaaagagaattggaatagcagttattactccaaagttgcttttgcattatctcactcaagtttttttttagtgaagctttaaggtgtgaaacccaagcatctaaaatagctcacctcttgagtgttcttagccataagtcttggtatggaaaatacaatgaagcctttggcagtttaccctgcagtatgtgtaggagttgcttttaaacatacaattg

SEQ ID NO: 657632 - DNA, 574 bp, Homo sapiens
tggctagagcaggagcaagagaggattggggggaggtgccacacacttttaaacaccagatctcatgagaactcactgactattgtgagaatagcaccaagccatgagggatccatcccatgactcaaacgctsccaccgtgtcccacctccaccactggggattaaatttcaacatgagatttagagaaaacacatattcaaactatatcattctgcccctggtcccttaaatcacatgttcctctcacattaaaaagtacaatcatcccctgccaatagtctcccaaagtcttaattgttccaacattaactcaaaagtcccaagtcccaagtccaaagactcatctggagataaattccttccacctatgagcctgtaaaatcaaaacaagttatttactcccaagatacaatgggagtacaggcactacatcaatattcttgttccaaaagggataaattggccaaaagaaaggggctacaggcctcatgtaagtctgaaacccagtaggggagtcattaaatcttaaagctccaaaataatctccgtcgacaccatgttccacatccaa

SEQ ID NO: 657633 - DNA, 582 bp, Homo sapiens
agtgcctacagcttttccaggtgcaggatgaaaactgctggtggagctaccattctggggtctgggggatggtggccccctccccacagaccactaggactgcctcagaactctgtatggggccttgaactccatattttccttccacactgcctgagtagaggttctctttgaggcctctacccccacagcaggcttctgtctgggcagccaggctttctaatatctagttggaggctatgaagcctccttcactctggcactctgcatgkctgtgggcttaataccacatgaagccaccaaagcttatggcttgtgccctccagagcagtggcctgaactatacctggggccctttgagccacagctggagctgagtggccaggacaagagaaacagccttctgaagtggcacagggcagtgatgcctcagggctggcccatgaagccattcagtcctcctgggtctctgggcctgtgatgggaggggctaacttgaagataccattgtcttggctatcagcacctggctctttttttagtcatgcaaatctctctaacaagtggctactctccagcctg

SEQ ID NO: 657634 - DNA, 561 bp, Homo sapiens
ttttgattcatagcagaaggaaaagtgggagcagtcacatcacayggccagagcaggagcaagggtgggaagaggtgccacacattttcaaacaaccagatcttgcaagaactcactattgcaaggacagcaccaagccatgaaggatccacttccatgatccaatcatctcccacccggccctacctccaacactggggattacatttcaacatgagatttagatgggatacatacccaaacgctatcatttactaaaccaaaataatgaaaaattctagtgtgtaagcaaatgaaaaaaaaaaagcatatacatatcaccagaaatagccagattgaagaatgggcagaggagctctaagagataagatggaaccctccattcccactctcctagaacagccttcaaaactgcatcaaggtcctccagctttctcaaggcattttggcttgtctttgattagtattagaataaagcgcagctgatggtgccaacgaaattttgttgccttgctctgggcatgagcctcattttatacaatgtacaaatacataaatttc

SEQ ID NO: 657635 - DNA, 561 bp, Homo sapiens
ttttgattcatagcagaaggaaaagtgggagcagtcacatcacacggccagagcaggagcaagggtgggaagaggtgccacacattttcaaacaaccagatcttgcaagaactcactattgcaaggacagcaccaagccatgaaggatccacttccatgatccaatcatctcccacccggccctacctccaacactggggattacatttcaacatgagatttagatgggatacatacccaaacgctatcatttactaaaccaaaataatgaaaaattctagtgtgtaagcaaatgaaaaaaaaaaagcatatacatatcaccagaaatagccagattgaagaatgggcagaggagctctaagagataagatggaaccctccattcccactctcctagaacagccttcaaaactgcatcaaggtcctccagctttctcaaggcattttggcttgtctttgattagtattagaataaagcgcagctgatggtgccaaygaaattttgttgccttgctctgggcatgagcctcattttatacaatgtacaaatacataaatttc

SEQ ID NO: 657636 - DNA, 604 bp, Homo sapiens
atagttgtcaaatttggaaaaatttctatgagtttctttcatacgaaagctgtaagatttgaaagaattaatttttggctttatatatttcacatcttgtttttccttcagtcccacatacttgtgtgctggatgctttaggacacatgtgatcgaggggaagatgaagcagaagatcaagaactgattatagttaaaatatcttacttatgctaattctacaaaaacttacaaccatgtagacacattgttagagcccctcccagggtcttagaaggtgtcagtgtaagtgaggggtcctgaaagcttaacttttattctctttattgtaaaatccacatttaacaatakaattaaaatacaaaattatctcaaacttcagactgaaatagacagatgaaatttaacttaataaaagtaaaataaagcaaggtcaaaatatgaatttcacaagcacgttaaaggtcacatgatgaattaggattttagatgacctccattttatcatgaaccaactgtatgatgcaaacatagaaatggctagcacaataatgggccacattaatagaaatagtttccagatcatgggacctaataattcctc

SEQ ID NO: 657637 - DNA, 554 bp, Homo sapiens
gattcaaaatatgtaaatcaataaatgtgatatactacatttaacacaatgaaagataaaaaccatatgatcatctcgatagttgtaaaaaaccctcaccacttgactgtattcartatcccttaatgataaaaactctcaacaaattaggtatagaagaaacatacctcaacataataaaggccatatatgacaagcccacaactaacatcatactcaacaggtgggaagctaaaagcttttctttgaagatgaagaacaagacaagaatgaccacttttgccatttctatttaacatagtactggaagttctagccagagcagttaggcaagaagaaataaaagaaatataaggataaaatccaaatcagaaaagaagaagtaaaattgtctctttttggagaagacataattttgtatataggaaaccctaaagactccaccaaaaaatggttagagccaataaacaaattcagtaaatttgcaggatacaaaataaacacacaaaaattagttgtatttctatacactaacagactatctgaaaaagaaa

SEQ ID NO: 657638 - DNA, 621 bp, Homo sapiens
tagattgtatccagaataagccatttaaactggtaaaaacataccaatccttctcaaaccctttaaacaaattgagcagggaacacttccaagctcatttcgtgagaccgtcattatcctactaccaaagccagacaaggacactacaaaaaaagaaaactataggccgatatatctcatgaacatagattagagaatcctcaataaaatagtaaattgaattcaacagcacattaaaaggatcaagcaccatgatcaagtaagatttattcctggaatgcaaggatgattcaaaatatgtaaatcaataaatgtgatatactacatttaacacaatgaaagataaaaaccatatgatcatctcgatagttgtaaaaaaccctcaccacttgactgtattcaatatcccttaatgataaaaactctcaacaaattaggtatagaagaaacatacctcaacataataaaggccatatatgacaagyccacaactaacatcatactcaacaggtgggaagctaaaagcttttctttgaagatgaagaacaagacaagaatgaccacttttgccatttctatttaacatagtactggaagttctagccagagcagttaggcaag

SEQ ID NO: 657639 - DNA, 648 bp, Homo sapiens
aagaatttgtgtaccaattaaaaaatgtcagctacacccttgtttttatctgtttgctcaagcaagttggattctttgagatcttgaaagaaacacattttcttttcattagtaacagtgcatcagattgttaagtgcaatcaagcaagcgtgcctaatccagaccccaattccggagcacaaatgaacatatgaaggatttttcattaaaaraattaccgtagtaaaatatacataatgtaaaattcaccgtcttaatcattttaaggtgtacagttcagtggcattaagtacattcacactgttgtgcaaccatcaccaccatccacctccagaactttttcatcttcttgaactgaaactttgtaccccttaaacaatagctcctcattcccccatctccctacagcccctgacaaccagtattctactttctgtctctataaatataactcctctaggtacttcgtgtaagtggaatcatatagtatttgtcctttggtgtctggcttatttcacttagcttagtgcctttaaaggtaatccagtaacataagtcagaatttctttcctttttataataacattatttttataataatattctgttgtatgtatataccaccttttatttattcatctgtcaat

SEQ ID NO: 657640 - DNA, 648 bp, Homo sapiens
aagaatttgtgtaccaattaaaaaatgtcagctacacccttgtttttatctgtttgctcaagcaagttggattctttgagatcttgaaagaaacacattttcttttcattagtaacagtgcatcagattgttaagtgcaatcaagcaagcgtgcctaatccagaccccaattccggagcacaaatgaacatatgaaggatttttcattaaaaaaattaccgtagtaaaatatacataatgtaaaattcaccgtcttaatcattttaagrtgtacagttcagtggcattaagtacattcacactgttgtgcaaccatcaccaccatccacctccagaactttttcatcttcttgaactgaaactttgtaccccttaaacaatagctcctcattcccccatctccctacagcccctgacaaccagtattctactttctgtctctataaatataactcctctaggtacttcgtgtaagtggaatcatatagtatttgtcctttggtgtctggcttatttcacttagcttagtgcctttaaaggtaatccagtaacataagtcagaatttctttcctttttataataacattatttttataataatattctgttgtatgtatataccaccttttatttattcatctgtcaat

SEQ ID NO: 657641 - DNA, 648 bp, Homo sapiens
aagaatttgtgtaccaattaaaaaatgtcagctacacccttgtttttatctgtttgctcaagcaagttggattctttgagatcttgaaagaaacacattttcttttcattagtaacagtgcatcagattgttaagtgcaatcaagcaagcgtgcctaatccagaccccaattccggagcacaaatgaacatatgaaggatttttcattaaaaaaattaccgtagtaaaatatacataatgtaaaattcaccgtcttaatcattttaaggtgtacagttcagtggcattaagtacattcacactgttgtgcaaccatcaccaccatccacctccagaactttttcatcttcttgaactgaaactttgtaccccttaaacaatagctcctcattcccccatctccctacagcccctgacaaccagtattctactttctgtctcyataaatataactcctctaggtacttcgtgtaagtggaatcatatagtatttgtcctttggtgtctggcttatttcacttagcttagtgcctttaaaggtaatccagtaacataagtcagaatttctttcctttttataataacattatttttataataatattctgttgtatgtatataccaccttttatttattcatctgtcaat

SEQ ID NO: 657642 - DNA, 450 bp, Homo sapiens
ctgtcctttattgccactgctgtgtcctaagcaggttcacttgacatatacttggaggctcttgatgagcacaattaataaaattctttgattaaaaacaaaaacaaagtcggaagagaaaatcactaccattggcatccatgcactcctggtacattcctgctatatctcccctccaaggctttgctcatcctgtgccttctgsctggtatggcctcttttcctctctcagctttgctaactctgactaattctttgcgattttaagagataatctcctctaggaaggctttcagcttcctccttcttagactcttatctgggctagatggcctttgtccatgttgcatagcaccattttcctttctatggtgggttttctgtactcaattgtgcctctccctcccctcctcctgtctaaggctgggagacatatttcctagaaccagt

SEQ ID NO: 657643 - DNA, 570 bp, Homo sapiens
cttccagttggattctagagcgcacattttcaaccactgtcctttattgccactgctgtgtcctaagcaggttcacttgacatatacttggaggctcttgatgagcacaattaataaaattctttgattaaaaacaaaaacaaagtcggaagagaaaatcactaccattggcatccatgcactcctggtacattcctgctatatctcccctccaaggctttgctcatcctgtgccttctgcctggtatggcctcttttcctctctcagctttgctaactctgactaattctttgcgattttaagagataatctcctctaggaaggctttcagcttcctccttcttagactcttatctgggctagatggcctttgtccatgttgcatagcaccattttcctttctatggtgggttttctgtactcaattgtgcctctccctcccctcctcctgtctaaggctgggagacatatttcctagaaccagttcccttgtatagctctagatttaattttgccaatgagagaaatccaygtgagatttgagagcagaagtgaagtagaggtcactg

SEQ ID NO: 657644 - DNA, 546 bp, Homo sapiens
gagaataatagagaaatactataaacarccataggccaacaaattagattatttagatgaaatggacaaattctctgaaagacaacagtttttggaactgcctcaagaagaaatagaaatttgaataaacctgtaagaagtaaagagattgaattagtaatcaaaaaacttcacacaaagaaaagcctaggaccagatggcttcactggtgaattctaacaaacatttaaagaagagttagcaccaattcttcacaaattctttcaaaaaatagaagagaagggagcattttctaacttatcctattagacggttattacaaactaaaccagacaaagttatcacaagaaaactactttcgaatgtagatgaacaattctcaacaaaaatcctttcccaaagatcaggaacagaacaggatgtccatgatcatcacttctatttaaaattatactggaagttttatctagggcaattaggcaagaaaaagatatacagtagtcaccacttatccggggtacactcaagacacctccagtggatgct

SEQ ID NO: 657645 - DNA, 546 bp, Homo sapiens
gagaataatagagaaatactataaacagccataggccaacaaattagattatttagatgaaatggacaaattctctgaaagacaacagtttttggaactgcctcaagaagaaatagaaatttgaataaacctgtaagaagtaaagagattgaattagtaatcaaaaaacttcacacaaagaaaagcctargaccagatggcttcactggtgaattctaacaaacatttaaagaagagttagcaccaattcttcacaaattctttcaaaaaatagaagagaagggagcattttctaacttatcctattagacggttattacaaactaaaccagacaaagttatcacaagaaaactactttcgaatgtagatgaacaattctcaacaaaaatcctttcccaaagatcaggaacagaacaggatgtccatgatcatcacttctatttaaaattatactggaagttttatctagggcaattaggcaagaaaaagatatacagtagtcaccacttatccggggtacactcaagacacctccagtggatgct

SEQ ID NO: 657646 - DNA, 620 bp, Homo sapiens
ctaaacacaaggtgtcgtttcctattactgtgcctcagatggtgcttcactgggcaactttgtcagaccacacatgagactgggaagtcagaaagaagctttgctttcataaaatctttccttcttcctttgctgatgcctgatattccttagataaaaaataaggttgcttgctttataattaaagctaatagacttgaacgtgtgatataattgagagttaatactcaagagtaaatgtttttatcaagaggtacctgatggttccatgctgggcctgaagggttgaaaaagcatgaagaccctatgtgctaaggagacagagatgtgaaaagaagatgatggcaggccttgagtgttaggacaagaaatttagtcacaggtagaaaaagaggaagattcttacgcaggagagtaacatgattaaatcaatggctgaggtcattttgacagcatagctaatagacaagattgggcacaatgacaaggcagscactttgaaagatgttatcataatccagacaggagagattagaaatattgcagaagtggaaagaagagaggaacaaattgaggacagatggtgaaaaaaagtcgctaccttaaaggtggttccagaa

SEQ ID NO: 657647 - DNA, 488 bp, Homo sapiens
ggattctaaggcagtgcccaggcctccatgcctcctgtctggcactgactataatgtggaaaatggcctggctcttcttacattacctgtgcacttccaaggactccaaaatgtgttttccccaaaggcggtatwtaattttgagaattgcaatcattttttccatgttcttttgaaggctgtaaaataattttagatgcaatagtaattctaggtccttgcttacccttgacctttgaagttttattcaaaacatcacaaacctctcagcccggatgttggcaagttaatgatatattgctgcaggaaagaacttggtcttgtttgcatgaggaactcggaatctttggtatattacctcaacttttttttttaggatacaactgaaatataattttgttagtgtaaaggtaaaagatgaagtattaggaaaaataacaaagcctcccaatgtttttggaactcagtgttattatgctgttgatgta

SEQ ID NO: 657648 - DNA, 488 bp, Homo sapiens
ggattctaaggcagtgcccaggcctccatgcctcctgtctggcactgactataatgtggaaaatggcctggctcttcttacattacctgtgcacttccaaggactccaaaatgtgttttccccaaaggcggtatataattttgagaattgcaatcattttttccatgttcttttgaaggctgtaaaataattttagatgcaatagtaattctaggtccttgcttacccttgacctttgaagttttattcaaaacatcacaaacctctcagcccggatgttggcaagttaatgatatattgctgcaggaaagaacttggtcttgtttgcatgaggaactcggaatctttggtatattacctcaacttttttttttaggatacaactgaaatataattttgttagtgtaaaggtaaaagatgaagtattaggaaaaataacaaagcctcccaatgtttttggaactsagtgttattatgctgttgatgta

SEQ ID NO: 657649 - DNA, 588 bp, Homo sapiens
aacacaaacaattaaaagtactttactaaattatgacaagaaggtgaaccattgagtgcaggtctcagtttttcagttgttcccaagctcaactgtgcattaccatggctgggggagcttgttaaaaatacagatatctaaactcaaactcccaagattctcacttaggtaggtatggtgttaggatttttctgctgcctccttttcatctcaaggttggagagtccccaggctcagatgtcccgttctccagctgtgctttctccctaggtgattttatctggactcagagrtgtaaataccaggtatacacttacacttacatcttcagcctgctcctctccctcacactccagactaacgcatcaacccccgtccaacaactaaaacttaatttgtcttcattccctcccaaatcagtttttcctgtagccttccctaactccaaatatacaactctgtgcttcctgtagctgaggtcaaatttttttctcttacactccatataaaatctgtcagcaaatccccaactttcaaaatataacccaaatctttttactcctcactatggccactccttctaatatg

SEQ ID NO: 657650 - DNA, 610 bp, Homo sapiens
cccattttgaactcttggactacaaaccataaattacccaggtattgctcttgaattattcctcttgaatttaaaggctttctatttccgtggaattggcttggaaaactcagaccaactgagaaggagaaattgtcctgggacaaactgtttttactatatgtcatactgttytcttcttcctgtaaatatcttgttgggcctactgaccagcaaggaaaacataatccaatgcttgtggtcagtactgaatgacttggccctacgtctttgtgtcttttaagaacggtccaatgggtctgtcataacacttcaaacatctgcttctcagtcctagtttatgctttataagccaattcccattggtttaaatagtttctgtgcctttaatatgactgtctatatggattaatagtaatgaacacagtgatgtggtgataatgacaattttctacttagaatttggttaaattcaattgaacttgataaatgttctctgaagtctaggttaagaaaaatagagaaatgaatgtggtagtctggcaatcatcttgctcatgtctggcaatcatcttgctcattgggaaaataagatgtataaaccaaaaaa

SEQ ID NO: 657651 - DNA, 610 bp, Homo sapiens
cccattttgaactcttggactacaaaccataaattacccaggtattgctcttgaattattcctcttgaatttaaaggctttctatttccgtggaattggcttggaaaactcagaccaactgagaaggagaaattgtcctgggacaaactgtttttactatatgtcatactgttttcttcttcctgtaaatatcttgttgggcctactgaccagcaaggaaaacataatccaatgcttgtggtcagtactgaatgacttggccctacgtctttgtgtcttttaagaackgtccaatgggtctgtcataacacttcaaacatctgcttctcagtcctagtttatgctttataagccaattcccattggtttaaatagtttctgtgcctttaatatgactgtctatatggattaatagtaatgaacacagtgatgtggtgataatgacaattttctacttagaatttggttaaattcaattgaacttgataaatgttctctgaagtctaggttaagaaaaatagagaaatgaatgtggtagtctggcaatcatcttgctcatgtctggcaatcatcttgctcattgggaaaataagatgtataaaccaaaaaa

SEQ ID NO: 657652 - DNA, 547 bp, Homo sapiens
ccaggcatggtggtgcattcctgcagtttcagctatgcaggaggttaaggtggtaagatcacttgagcctgggatttcaaggctgcagtgagctataatcacrtctgggaatagccattgcacttcagcctgggcaatatagtgagaccccatctctaaaaaaaaataataattaatcttgacaagagagtagggaagctgacagtttcttctgttgccaaagatagcataggttggcacaatctttctagagggtagtttttcatataaacaacaattttaaaaggcacatatacttttatttagttatttcgctttcagatatttatgtaaagaaaatagttatcaagcaactaataatgtaaatcagttattaggtaattttttgatttataaaaatttgttatcagattaaatagccatctacagaggttttttcaacattaaaaatgatgaaaatctgtgtttgctgacatgaaaaaaggtaattacaaaataagattatgtactaattttgtatttaagtaaatgtttgcaaattcacaca

SEQ ID NO: 657653 - DNA, 547 bp, Homo sapiens
ccaggcatggtggtgcattcctgcagtttcagctatgcaggaggttaaggtggtaagatcacttgagcctgggatttcaaggctgcagtgagctataatcacgtctgggaatagccattgcacttcagcctgggcaatatagtgagaccccatctctaaaaaaaaataataattaatcttgacaagagagtagggaagctgacagtttcttctgttgccaaagatagcataggttggcacaatctttctagagggtagtttttcatataaacaacaattttaaaaggcacatatacttttatttagttatttcgctttcagatatttatgtaaagaaaatagttatcaagcaactaataatgtaaatcagttattaggtaattttttgatttataaaaatttgttatcagattaaatagccatctacagaggttttttcaacattaaaaatgatgaaaatytgtgtttgctgacatgaaaaaaggtaattacaaaataagattatgtactaattttgtatttaagtaaatgtttgcaaattcacaca

SEQ ID NO: 657654 - DNA, 496 bp, Homo sapiens
ctttaattattctaattgcttctctgtgtaccttggagaagtcatctaaatgcattggctttgttttagtcatctgttaaatctgttggataagatgatctaagataccttcttgccctaagacttttatttatacatcaaaactggtgatattgataaaaaggagtttataactttgttcttrttccatatgtccattgtaggataattagcaaatagagatacagaaatatgatgtataatctgaacacccaataataactattgttaatgttactatagtgatggcatataaatcagttttaactctagtgtaaaggttcaaagaaaaaattaaaaatgataatagctataacactttattaatggatatacaatataaaaatatgtaaatcgtgacaccaaaaacataaaatgtttagggggagtagaagtgtagagtttttctacgtgatctaaattaagttgttatcatctaaaaatatactgtttcaac

SEQ ID NO: 657655 - DNA, 695 bp, Homo sapiens
ggcctttcctccgtagaaatggactgtcttacagaagggagaggtaaaggttaggagcaagagcctatgtcagggctgggaaaatagctgggagctgactaggataggacacgtgcttgagtaggacggtttccttcccgaagaaactatcacccagcaactctaggggaggggccctgagtaacagaagctggtatagtctctaacctgttctcccaaataagacagaagaacatatttgagagagatgctgaagaacattgcccccttcttttggcccctcaygaatcagtccggataggttaaataatgttgctgtaataaacaaccttcaggtcttagtggtgcagtactacaaagatgtatgtctcccttagtttgcgcacccatcgtaggatggctaggtgctttgctccatgtcctcctcactcaggatgcaagctgacagaacctccactatctgggaacatcattgatttctcagtcaaggggaaggaaagggcaaatcacacactggctcttaaaggttctacccagaaatgcataagtcatttcattcacatgtcattgtgaatgtgtaaatggtaaagcaagtcacacacatgataatgccattcttcaaggtggcagagaagtacacttctactatttgcccagaagtaagagtgctagaaacatccttcctaagataccta

SEQ ID NO: 657656 - DNA, 695 bp, Homo sapiens
ggcctttcctccgtagaaatggactgtcttacagaagggagaggtaaaggttaggagcaagagcctatgtcagggctgggaaaatagctgggagctgactaggataggacacgtgcttgagtaggacggtttccttcccgaagaaactatcacccagcaactctaggggaggggccctgagtaacagaagctggtatagtctctaacctgttctcccaaataagacagaagaacatatttgagagagatgctgaagaacattgcccccttcttttggcccctcatgaatcagtccggataggttaaataatgttgctgtaataaacaaccttcaggtcttagtggtgcagtactacaaagatgtatgtctcccttagtttgcgcayccatcgtaggatggctaggtgctttgctccatgtcctcctcactcaggatgcaagctgacagaacctccactatctgggaacatcattgatttctcagtcaaggggaaggaaagggcaaatcacacactggctcttaaaggttctacccagaaatgcataagtcatttcattcacatgtcattgtgaatgtgtaaatggtaaagcaagtcacacacatgataatgccattcttcaaggtggcagagaagtacacttctactatttgcccagaagtaagagtgctagaaacatccttcctaagataccta

SEQ ID NO: 657657 - DNA, 695 bp, Homo sapiens
ggcctttcctccgtagaaatggactgtcttacagaagggagaggtaaaggttaggagcaagagcctatgtcagggctgggaaaatagctgggagctgactaggataggacacgtgcttgagtaggacggtttccttcccgaagaaactatcacccagcaactctaggggaggggccctgagtaacagaagctggtatagtctctaacctgttctcccaaataagacagaagaacatatttgagagagatgctgaagaacattgcccccttcttttggcccctcatgaatcagtccggataggttaaataatgttgctgtaataaacaaccttcaggtcttagtggtgcagtactacaaagatgtatgtctcccttagtttgcgcacccatcrtaggatggctaggtgctttgctccatgtcctcctcactcaggatgcaagctgacagaacctccactatctgggaacatcattgatttctcagtcaaggggaaggaaagggcaaatcacacactggctcttaaaggttctacccagaaatgcataagtcatttcattcacatgtcattgtgaatgtgtaaatggtaaagcaagtcacacacatgataatgccattcttcaaggtggcagagaagtacacttctactatttgcccagaagtaagagtgctagaaacatccttcctaagataccta

SEQ ID NO: 657658 - DNA, 597 bp, Homo sapiens
cttgagtgagttaaggcccccaaatgtccatggagtctgacagctagaataggattgctgcattgggggaacactgggcactagcattaatggtggggaagaggtgcacattaaatgtggattaagggtgaatggaagaaaaccaagtgaagacagaggtaagcaactcctccaagaatttttttttttttttgatggattctcgctctgtcgccaggctggagtgcagtggtgtgaccttggctcactgcaaactctgcctcctcggttcaagtgattgtcctgcctcagcctcccgagtagctgggactacargcacgtgccaccacacctggctaatttttgtatttttagtagagacggggtttcaccatgttagctaggatggtgtcaatctcctgacctcttgctgtgcccaccttggcctcccaaagtgctgggattacaggtgtgagccaccgtgcctggccccaagaacttttaccatggggaaaaccaaaacaacagggatgcgaacagttttttttttccttgcaaaatgacacacaggtgtaaacatgtttaaatgctgagagaaaagagtcagtggtgaaagaa

SEQ ID NO: 657659 - DNA, 612 bp, Homo sapiens
ttcatagtttcaggtcttagttttaagtccttaatggatcttgagttgatttttgtataaggtgagagatgaggatccagtttcattctcctgtatgtggctagccaattatcccagcaccatttgttgaaaagagtgtcatttcctcactttatgtttttgtttgtttgtcgaagatcaattggctgtatttggagttatttctgggttctctattctattccattggtctatgtgtttgtttgtttgtttgttttccagtagtatgctgttttggtgaatatggccttatagtatagtttgaaatcaggtagtgtgatgcctcctgatttgttctttttgcttagtcttgctttggctaagcatgctcttttttggttccatatgaattttggaattgttttttcyaattctgtgaagaatgatggcgatattctcatgggggttgcagtgaatttgtacattgcttttggcagtatggccattttcacaatattgattcttcccatccatgagcatgggatgtgtttccatttgtttgtgtcatctgtaatttatttcagcagtgttttgtagttcaccttgtagaggtattttgcctccttggttagg

SEQ ID NO: 657660 - DNA, 612 bp, Homo sapiens
ttcatagtttcaggtcttagttttaagtccttaatggatcttgagttgatttttgtataaggtgagagatgaggatccagtttcattctcctgtatgtggctagccaattatcccagcaccatttgttgaaaagagtgtcatttcctcactttatgtttttgtttgtttgtcgaagatcaattggctgtatttggagttatttctgggttctctattctattccattggtctatgtgtttgtttgtttgtttgttttccagtagtatgctgttttggtgaatatggccttatagtatagtttgaaatcaggtagtgtgatgcctcctgatttgttctttttgcttagtcttgctttggctaagcatgctcttttttggttccatatgaattttggaattgttttttctaattctgtgaagaatgatggcgatattctcatgggggtkgcagtgaatttgtacattgcttttggcagtatggccattttcacaatattgattcttcccatccatgagcatgggatgtgtttccatttgtttgtgtcatctgtaatttatttcagcagtgttttgtagttcaccttgtagaggtattttgcctccttggttagg

SEQ ID NO: 657661 - DNA, 565 bp, Homo sapiens
agaagatttcgcttttctctctttctcttcacctcccttcctacccctctcctcgctctttccttctctttctcactatgaaatcatggcagtgttttctttttttttttttccactcaatgtctattaccattttgtaatgttcaagttgtctcaaatttggcctgtggyagcctttacaagtgagttcctgtgttcttcagacatgtgccccgagcctttcacagctcccttgctttttgacacaagatgttccagacttagacagcactcttctggtcccacacctggaatcagccacttctccgaggttccttttagtggcaaatggtattaaaaaaacaatatatgggcactagatatgctcatctctgctggctgccattgcttttaggccctttcagtcaatagagcaagtaaatatttttaaaaccatgagttcaacaaattactaatatcagaaataaaagaggagccacctatactaaactgttgggaattaaaaagataatcaaggagtactatgaacaattctacggccactgatcgataacctcagtaaaat

SEQ ID NO: 657662 - DNA, 601 bp, Homo sapiens
cctacatcatgttatgttttgaaagggcagcaattaatagaaattgaattggaagactagtcacagggcatggcataaagagtcttatactaaacaactgaagtttatgctgaaacattagaaaccattagatggtattgaaataattcaatttatattttagaaagattactaacagaaatgtggatggatgaagtggaagtggataacctcaaagtccagaaactcactcaatctgttgtaaaaatccagggtagtagtgatgaggctctgagccactagagtagtaaagggaattagagcaagagtagatccacaaatattttagaggtaagataaataggtcttggtaatgaaaagaacatggagaaagagagtttaaaggaacctaggatgatttcagtttttctcacctgaataggtacrtagcattgccactctctaatagtcttcagaacaactatggaggtggtataggtaatttacaaaaacaagctgttttgacttaggtcttcaacagtatagtttgggttgccatagttctttactttccttaatctgttctggttttcaacataatagtaaagttttcagtgtgaga

SEQ ID NO: 657663 - DNA, 622 bp, Homo sapiens
tattaatataaatgagggtccactatgcatgaaggtccactatgttattatttttctaatgatacttatatatttttatttgatatattattaatatatacaaaawttttaaaatatagttgatatgttttatttaaataaagttaaattattttgttctatgtgtatggcagttttataagattagatatatttttgactcaacattaagagatacactactacttgtacatattatatgaaataccagctttcaaacaaaatctcacaattatttagatttaaaacaacaacaaaataagttacagaacacctttagttaaccgctataggcaatacagtaattggtacgttatgaacctacacctatttctggaaggtatataaaactatgataaactttggggtatcatattggttatttattgtgtcatagcaaactactgcacaaatcaatagcttataacagacattcttgcccacaattctttgggacaagaagacttacaggactcaacttatctctactccaccatggttttattagggctgatatgactaaggcaggcattcaagatggcttaactcactgtgcattacctgtgttgtgctggcacaaaat

SEQ ID NO: 657664 - DNA, 622 bp, Homo sapiens
tattaatataaatgagggtccactatgcatgaaggtccactatgttattatttttctaatgatacttatatatttttatttgatatattattaatatatacaaaaattttaaaatatagttgatatgttttatttaaataaagttaaattattttgttctatgtgtatggcagttttataagattagatatatttttgactcaacattaagagatacactactacttgtacatattatatgaaataccagctttcaaacaaaatctcacaattatttagatttaaaacaacaacaaaataagttacagaacacctttagttaaccgctataggcaatacagtaattggtacgttatgaacctacacctatttctggaaggtatataaaactatgataaactttggggtatcatattggttatttattgtgtcatagcaaactactgcacaaatcaatagcttataacmgacattcttgcccacaattctttgggacaagaagacttacaggactcaacttatctctactccaccatggttttattagggctgatatgactaaggcaggcattcaagatggcttaactcactgtgcattacctgtgttgtgctggcacaaaat

SEQ ID NO: 657665 - DNA, 559 bp, Homo sapiens
actcacgaggctgaggtgggaggagcatctgagcccagaaggttgaggctgcaatgaaccatgattgtgtcactgcactccagcctgggtgacagagtgagaccctgtccccaaaaaaaaaaaaaaaacaaaaaaaaaaaaccaataaaagtatattaattacatattaggataatattttagatatatttttagatatatttggtgaaataaaatatattaatattaacattaattttatcagtttctttttaattttttaatgtggctactaraaaattgtaaattatatatgtggctctcattacattcctatggaatggcactgttacagactataagaactgaggaaactctaaggccttgtactcaataaatacgcattaagtgaataaataaattgcaatcagccagggcacattcaatttctgactacatgtatacattaatgatatcttttcacttcaatgttgctattttcataaaacagaatgtactttctgtaccagctagactcaaacattccccaaaatctggccaaaaattttagagtacttcc

SEQ ID NO: 657666 - DNA, 515 bp, Homo sapiens
gtcctttatctgtggaaagagctattctggccacagttactgccaagaaacaaggtgttagaaaaggcctaaagttaagtgcagaactgctgtgttttgatgaatattccgttgttttgagaggaggtagaagcattctcagcttcaggatatttgctcactactcattagtctctctgagaagtagcaaacttcaaaggttaaatatgaaggatgaattgtgtaatgcctagatgtcagtagcggagaaggtatctgagcaaattcaggattttatccctgtctccatgggcctagtgtgaagaacagtcatttgtgtaagtgggtctttgtgtatatggtastgaatcaggtcactgagtcagaaacttagagctgtaaggaaagtgaggtgctctccagtccagtgttctggaatttcttctgcagtggcccccaacagcaggtggcagcctcatccatgattgtattcttaagtgacatggtattactctttctatttgcaatccatttca

SEQ ID NO: 657667 - DNA, 601 bp, Homo sapiens
cactacctgacttaaagaatatgatactatttttttccaattgaaatcccctcaactactcagaattactgctatcccttttatcctttcattaattttcttctagttttctcacatgtgaatctatttctaaatacatttcttyattttgcaagtttttggacttcatataaatgtaaccatattgtatatattcttcttcagcttcttactttttcactaaacaatatgttttgctgatacttacattcatatgtacagtaatagttgatttattttaatgtctatatattattccattgttagaatacaccaggatttatttttacttattttttttgctggaaaattgggtgtcttttttattttttgatataacaaacaatgttgtaatcattttgtatttacttcctagtccactcctgtaagtttctcttgagtacatactagcaatgaagatgctgagtcactgcatatacatactcacaactttattctataatgtaatattctataaagtagctgtatcagtttatactttaaccagtaatggacaagattttctgttacttcccatctttgttaattattacttttagac

SEQ ID NO: 657668 - DNA, 601 bp, Homo sapiens
cactacctgacttaaagaatatgatactatttttttccaattgaaatcccctcaactactcagaattactgctatcccttttatcctttcattaattttcttctagttttctcacatgtgaatctatttctaaatacatttcttcattttgcaagtttttggacttcatataaatgtaaccatattgtatatattcttcttcagcttcttactttttcactaaacaatatgttttgctgatacttacattcatatgtacagtaatagttgatttattttaatgtctatatattattccattgttagaatacaccaggatttatttttacttattttttttgctggaaaattgggtgtcttttttattttttgatataacaaacaatgttgtaatcattttgtatttacttcctagtccactcctgtaagtttctcttgagtacatactagcaatgaagatgctgagtcactgcatatacatactcacaactttattctataawgtaatattctataaagtagctgtatcagtttatactttaaccagtaatggacaagattttctgttacttcccatctttgttaattattacttttagac

SEQ ID NO: 657669 - DNA, 536 bp, Homo sapiens
gtgagctcacttcctggaaatcaccagcatcccatatcccattagcaaggagctcagcactgctccttggataaccaaacctattcccaaatcccatctgtgtgcgtctatctcctggtacccttcctagcatcaattctgtatttgtaggagtccaatcaggagacacaaactactcaaaagtttaaactagaatgagcaagatggctcacacctgtaatcccagcactctgggaggccaaggtgggtggactgctttgagctcaggagtttgagaacagtctgggaaacatggcgaaacctcgtctctacaaaaaacacaaaaatcagctgggtgtggtggcacttacctgtaatcccagctactcgggaggctgaggcaggagmattgcttgagcctggcaggtggaggctgcagtgagcagaggttgtgccactgtactccagcctgggtgacagtgtgagacccggtatcaaaaagaaaaaacatatatatatatatatatatgtaaatttaatataaaaagtattaattt

SEQ ID NO: 657670 - DNA, 556 bp, Homo sapiens
aatttttaaaagctggaatgaatgagcagcaatagcagaaggagaaaagtgagtgagggctctccaagaagccatctggcaggctaagggttctgagggaagctctggtttcagaagcaactcaggaattacttctgtcatattaggatgggatggtaggagattgggaactctagggactagaagtcatttaatttcctgtctacaatccttggaagaaggtttgagacttgcaacctaggaccttaactaatcatcttccctcagmattgatagaattctttattatacatgttaatatcagattagtcaggatgggctggattatgctgtgttaacagccattctctaaatctctgtggctcaactgggagctctgcctgtcatggtcacttgggacccaggctttgggtataaggctacagcacatggaaaacgtatgaatgtctctcagattcttaaagcttctgctggaagtgacatgtcattctgctcaccattcattggctaaatgagtcacgtggctctctctaacttcaaggatggtatgaaattg

SEQ ID NO: 657671 - DNA, 573 bp, Homo sapiens
tggtaggcttttaaactctgtgaatgttggactgtgatgtagacatcatttcaccgcacactctgtaaccaccaaaccttagcagcttattcagtaagcacatacttggctcttaatgagtattgcttaaattgatgaattgaattagtattttaccttctctgttscttagctaagcagaagaatttgtcatttttttaatttagtgactggttctattaaaagttacctttgtctatatcattttgttatactaaagcacaaatgtataaggtcaaaaaacattctcaagattttgtttaaaccacagccctcagttgtgtatatttatctcttgttttcatatgcaagatttctcctgaaatgggcaacaattacaagagtttttttcctcttctgaactaagaaaataaatatttaattcacaagtttagaaaagtgaacctgaaaaatcacagggctaggtgggttatgaggcccactggtacatgatagtgttgaatgtggattagaatgaactccgtggattagaatctcagaccataggcaaacatttacttgttttagaataag

SEQ ID NO: 657672 - DNA, 587 bp, Homo sapiens
tcattataatagacatctcaagcttcacagaattctgacctttgctacactctcatccacaatcttttctcctagtaaatggcagctccttctgttaagttgctgaggcttcttattgcttttttcttcaaataacagtcagaactgaacaactgtaatcatcctagtccatacaattkttatattttcatttaaagaagatcaatgtgtgattctttttttatatatttctggacaattctttatattttaatagtagtcagaatttgatcaggaaaacagaagacatcctatgtattataatgataaaagtttaatattaattagggccttatgctattattggaagagcttggtgaatagatattagaaaagcagctagacaaaatcagaagaggtctgttttatatcagagatcttagcctgacagtctagagtgtgggcacagaacccaagcttataggaatttctgaaaggtctgtaaatcttatccagatggacagtgggagctcataaagaattctgcaagccatcacatctgtcaaacctgctatgtctaatccttaagcctgctttatgtgaagacc

SEQ ID NO: 657673 - DNA, 355 bp, Homo sapiens
aatgacatcaagagacctatcaagacctgtatccaggaaaaggtaaatctgagctgaaattgtagcccttgtaaattacctacgtgacataccagatagtgttcatgatccatttagtattctgttctaaaaatgagacaatatccatttattcacttgttcatttatttagtgtttgttcagcccttactgcatattccaggcactattctgactgtggcaggagtgaacaaacaggcatggttcttacttgcatgtaattacagtcttatagtgaaaacaagtgttaaacaacaaaatctcccaattrttttaaaattatgaacttgattcgatactatgtggccatataatt

SEQ ID NO: 657674 - DNA, 491 bp, Homo sapiens
atgcttaagtattaggattttattctttgcaaaggaaaagcccattgaagctttaaagcaaggacctaagagttaacataatttttttaaggtaccttaaaaattttgctgaatgaagaattcattgaagtgagtcaggaatgtatgattttggacaactgacacaatgcctgaggcaaartttcttcatatggaaattggagacaatgatcatatctaccttagcagattatataatgaattattttcctagggctcctgtaataaagtaccacaaactgggtaacttaagcaacagagatttattgcctcacaattctagaggtgagaagtccagatcaagaagctggcagggctaggctgcctgaaaaggtgctaaggaaggaactgttccagtcctctttctctccttccagtagttccttggcttgtgacagcacagtgtcaattctcatatggcatcctccccgtatgcctctctctatgtccaa

SEQ ID NO: 657675 - DNA, 531 bp, Homo sapiens
ggaggggagccatggtggaagtggccatccagcacaattttcttggtctttactcatagttttgattccttaaaaaaattaaccacattaaaatatgtgtttcataatctacatctaataatacaaatatttaaagtcttttcaagtttgaatacgctacccatgttgctgctacccscattttgtgtgtgtgatttttgtgtgtgtgttagaagctcatgacctttgaaacctgctcttatgagcttgctttgatgatttatttgtccagagaggattttttttcctacctagcattttggactgctatcaacctgagaccactttgaattaaattctcagcttgcaaatttggaagccacacagattgtgtgagttcaggctgaaacctgtttgagagctggattctggctataaactccacagggaacattttctctctccactcagagctgagaccatagggaaatttatttgctagctctctttgaaggtttattttatttatttttttaatttatagtacacgtg

SEQ ID NO: 657676 - DNA, 598 bp, Homo sapiens
ataattttacacaaaaatttgtgtagttccatgtttgtttctatgtatatacagtgaatatccacttttaaccaacctgttggctacctgaatgcaaaagccctggctaattctactcacccaagggtgcatttgttgaatgaatgtgagactaaacaccaggtcctgggctaggtgtattatattcattaaccaatttcaacttaatagcawtcctgtggtattcatataattagcaatcttgtggtattcatataatttacagatatgaaaactgagaatgagaaagtttgagtaactggtcaaaggctacttagctaataaggaactatatcacgattacaaagaaaactcagatctacctaattcacatcaaatgccctttccatattcatggttgcctctccatggttatagttcagtaagtatttcatgctggcctgtttagagaggagctgattatgaatggtggaagggaaggggagacttgataagactgaacgttgcattctcgatgcactccccccgccccccacttccccccacctcactctattacctcacattcacacacagctctccacatctgtctgtgctg

SEQ ID NO: 657677 - DNA, 582 bp, Homo sapiens
tataataaatgtcctattttgttgtggagaattgaaagaccatgatatcacaggttctacagtgaagtcatattctgaatttaaatcatcgtttaccttaagtgcaatggatgttcggacaagaaagaaagtatatgggcctggacaaatcaaggagaacttcaaagaggaggcagcccttgagtttaacctggatgtgaaattgtgctatgtgaaaggaaattcttgaatgagggagttaaaaatgcacatggacttttatgtaagcaaagctcatgaaatacgtgacatacttgcatgttaatgaattgactttgattaattcttattcttgaacttctattttctaacctctcctttgaaatatcctcaaatgaaaaactagaaagaacagacagtagaaagatctcatttggatatccctatgtaaaaaytagagagtgatttcctaaataatcttcattcttaatatatttctaaatgtaaaatgtcttcctaatatatttctaagagctggtgtggtcactgctccacttacaaaaacgaaaagtcaaaggctttgttccctgcacgaggaataga

SEQ ID NO: 657678 - DNA, 582 bp, Homo sapiens
tataataaatgtcctattttgttgtggagaattgaaagaccatgatatcacaggttctacagtgaagtcatattctgaatttaaatcatcgtttaccttaagtgcaatggatgttcggacaagaaagaaagtatatgggcctggacaaatcaaggagaacttcaaagaggaggcagcccttgagtttaacctggatgtgaaattgtgctatgtgaaaggaaattcttgaatgagggagttaaaaatgcacatggacttttatgtaagcaaagctcatgaaatacgtgacatacttgcatgttaatgaattgactttgattaattcttattcttgaacttctattttctaacctctcctttgaaatatcctcaaatgaaaaactagaaagaacagacagtagaaagatctcatttggatatccctatgtaaaaattagagagtgatttcctaaataatcttcatkcttaatatatttctaaatgtaaaatgtcttcctaatatatttctaagagctggtgtggtcactgctccacttacaaaaacgaaaagtcaaaggctttgttccctgcacgaggaataga

SEQ ID NO: 657679 - DNA, 518 bp, Homo sapiens
ttggtgaaacttctcatctcccataggagaatcccagcattatctgcctccttgatggcacaggaggcaatctggcagttacagatatttagaaaccaaagtgacactgaatatctcagcagtcctaccatcccattcagggctctttccactgtacctgctaaataaactgaccctgaataggatgaytatatgaagatcatgatgacaatgacaatgacgatgacaacagtagcatttttgactgctcattctgtgttgtttggtgttctaggaactatatgcattaactaatttcattcttgcaacaaccctgggagttacaattattatcatttccctgttatagcagaggaaactgaggcacaggatgattaagtaatttgcctaagttccacaactctaggaagtgacggagctagaatttgaacccaggtgattttacaccagtacctgtgattctaacctttacgtattttaaacatggaaaggaaactgggctaggtatttgactagaa

SEQ ID NO: 657680 - DNA, 636 bp, Homo sapiens
tttcatattttttaaaaaaaattagcaataggtatagtctcttttagactcaccacatttgttccatctgtaaagggtaaggaaatagaaagtcatgtttaaccttgactatttcaggaaggataccaagccaaactctagagacaattccgtatctccttggacagaagagataaaatgtgttattattcctctgagagaagtttgcaatctggagagacttcgagttaatactcctccagagtattaccttggggaattcaagtaatgtactgttgtttgtaaacaaactggagtctgacctatcatccaagtttctgtgtgcttgggcgagccctgcctgatttccccggctcagctcttcacagctttccccagctggacttcagctctttccctctacaaatggagttcagctgattccaggcaggaagtccctaacctgcttctctccctgccccacctcttgtatctggtcgggcttggtaaggagccagtgttctcactagattaacacatggcagggcctctgtgtaggtcccyacagattctgtgccctgttctcacctgactggcccctggggccatctggaagctggctccagcccctaacctttaagtcctctcttgctacca

SEQ ID NO: 657681 - DNA, 600 bp, Homo sapiens
ttgttgactttctgcaggtttttgtgaatgattactacaatccttaaatctccacctccagctgaacctactactttcagcactggcaatggcttccttctttatgggagattttggtcatcaaaagtagacttcttcagcctgtgcctcacgacctcacaatacatcttcacaggccctcccttcccttccccttgacttccttcctctctgtggtgctctgagcctttctcacatctttgataactttacctcccacctcaaaaaggactttgtcacttcagctatcttttttctctaacaatttccactaacttatcctctacgtmtaaatgagcccaagtatcattagcctgaaaaaagaattataagtttatccctcttttctcactactgtcctctttcttcttgataaggtggttttctggtcaccacaccccattctcccaccctctccctgtttaaccctctggggttgggcttcttcaccactgctttgctgaaagtgctctccagaaggtctccagtagccaactactcatccctcaaaggcttttctatgtcctgggccgtggattcttgcagagatttatgactaca

SEQ ID NO: 657682 - DNA, 412 bp, Homo sapiens
tgaattcctggtttcctctgtagagtcaattcctggttgactcttgatatggttaggctttgtgtccccactcaaatctcatcttgaattataaccccctgtaatccccatgtgtcaagggagagaccaggtggaggtaattggatcatgagggcaatttcccccatgctgtttttgtgatagtsagttctcacaaaatttgatggttttcttttctttttctttttttttttttttgagatggagtttcgctcttgttgcccaggctggagtgcgatggcatgatctcaggtcaccgcaacctccgcctcctgggctcacgcaattcccagcctcagcctcccgagtagctgggatcacaggcatgtgccaccatgcctggctaattttgtatttttagtagagtctgggt

SEQ ID NO: 657683 - DNA, 419 bp, Homo sapiens
tcaattcctggttgactcttgatatggttaggctttgtgtccccactcaaatctcatcttgaattataaccccctgtaatccccatgtgtcaagggagagaccaggtggaggtaattggatcatgagggcaatttcccccatgctgtttttgtgatagtcagttctcacaaaatttgatggttttcttttctttttctttttttttttttttgagatggagtttcgctcttgttgcccaggctggagtgcgatggcatgatctcaggtcaccgcaacctccgcctcctgggctcacgcaattcccagcctcagcctccygagtagctgggatcacaggcatgtgccaccatgcctggctaattttgtatttttagtagagtctgggtttctctacgttggtcaggctggtctcgaactc

SEQ ID NO: 657684 - DNA, 576 bp, Homo sapiens
aaaagttggggaaggtatagtgaggcgtgtctgactctcccctcttcccatgccctgcttcccatcatgactttaactaattttccagttatttgtggggattgctggctccaagttatttttgtgacaaaattggaatctgttcccatggctaaactttgccctgataggtaatccaaggaaagctgtgaaccaaaatttggggtaaagcagtctctatggcagtttttttccttcagtttctaatgagttttcaatgtttatattctagttacaccataaataacgagttttatctcagcaccagcagcttagtaacagcagatttaaagcaggcagaaaagaagagaagatagagacctttcgaagactctacttaactctgtagtgcaggttaaccatttgagctctacatttttcttgttgtaatttgcccatcagtttaaaatgtgcacataaatgggccrtaatatgtaaccagctggaatcccaaagaggatgacaaaatcaggggccagaatgttggaaactgcttttccgctgccatgctggatccctggattgagtaggaaaaga

SEQ ID NO: 657685 - DNA, 587 bp, Homo sapiens
caaatcctcttctcttgtatctttctctctatgtaagtaccaccttctccttaagacatcacagtcaggttcctaatgaggactttatttcaaatgacacttaacccactctcttttgtattactgtttgtattcatgtctaatctctcccacaggattaaaggctttatcttatacatctgtatacaccccacatctcctagcacatattaagtacctaagatatacttgcttaatgaggaaatgaatgaacacttagatcaaacagccaatttattattcagcctttctggactctgagcagaaataacttaggagtggccaattggctgcatcatcaaagtgagcctgttttggcaaaaagatgtccacataccactacagtttctcactgtaatttttgtctctaataaaacaaaatacagattgttctaaggttttagtggagaggacaccagaaaaaaagttgccacatggcaattcccacaggcaaacttccctgcctkttgtggttatttttcattgtctctgtggtatgtcttttacattctttctgaaaatgaaccctgcattccttccctgggccc

SEQ ID NO: 657686 - DNA, 551 bp, Homo sapiens
taccattttgccattttcagctatacattaaatacatttacattgtggggcaatcatattgtttatattttcacttttctgcatattatgctttgacatcttaaattcttcttggctgggagagaatgcccctccggggctagctaatttgtagagatagcaaagagttaggctgggagcatgtctttgatatacagactaacctatccagggccagaactcttctatcaaggaaatatttattcctctgcttttatcattccaatgccaggtaccaggcaactagggaccacccctatagcttagmgcctgctgaaattattcaacctaaccaatcctaaactgtttaccctgctctgcctttcttgtggaaactccaataaaggcttggcccaggtcctccccaccctcctgcctctctgcctcctgactgaaaccgatgctttttcatgtggccctgagtggtccaccatgtctgtgttttcctgaacatctcctgtgtctcttcttgtggatgcacttgactgcatccacgtaaaagaacaaagaac

SEQ ID NO: 657687 - DNA, 627 bp, Homo sapiens
ctgcagtatattcagacaccatcttggattgcaaaaggtggggagggaggagctgaatatctaagcacktactaaaaggtggactgtttaaaccagaaaatattgataccttgttaactgaaatgtttacatcttttctctgagcatctggatagtggattttggcaaggtttaaatcagctataaaaaaaaataaagacgcttgtccctttctcatgtctgctatagcaatcttgggagagaggatagctgcttttcattctatttgtttctgagaaatagatttgaagactttcaaagattagattactgtgttataattatctgagggtccttatacatgttcaaatttttaattctatttgatatcatgatacaatataattataggtttcttcctgcttttattcccacaatcttttctctttctccttcagagaacacatctcagaaagtagactcaaagacacaattaacatgaaccaaaatgttttcctgagagtcagataatttacatcctaacaacttccaaaatgatacatttgtcacagtgaattttgtatttacttcttggggtatatatagctttagctggaacaagaaaaacctccatggagcttatagttt

SEQ ID NO: 657688 - DNA, 584 bp, Homo sapiens
atgtttacctggtggggtgaggacaatgaatcaagaaaactgacccagtctcaccctcacactatcagagcataaccaaccaagcataacagggaggctctacttgtgacctcctttagaaaaaccaatcacagttcaaaatctctcagaatagatcatatataaaagacaacataagcacagatacaaatagctacaaataagttctgtttgaacctagyacaaaatgtagaaggtcgttgctgagaattatcggagaacatggaaataattttaacctcttgaaagagtgctaaccatataaatgtgatataagtggttagttttaaagaaaatattgtctctctttcctgatgttagtaccaaaaaagaattaacctgtagtatatgatggtacgaagtccatcagccatgggttacttatctgcatgaatgttcaacttcatgaattaaatatattcttagatgagatttgtacaactattcaatgagtttaatgagcacacaaaccctgaagacattagataacaactagcaacattaattggaacttaagtgaactgtcttttgccaagagcacagta

SEQ ID NO: 657689 - DNA, 548 bp, Homo sapiens
ataaatatttaatgggcaatggaataaaataaattgaatgtgactactgtagaagatacgttacaatgtaaatggaacacatgtaactgcataaaattttataagcaaattttgaaaaataaggaactaataaggagacagcaatcaacaaatgaagaaagagatatgtaatttagagacataatttatttcacattaataatttttagtagaaatgtggctcatagaatattttaattttatcacatttagcatatgcacagacaattatgaataatttaattgggcatcctgtactattgctaaatttggcaaccctctttgtaagggtgtttttaaaggtaaaatagtagttgaaatgctccaagttttaagaaaaattacccwttaaataaaaagcctccttttaatgtcaagaaaaggttcatctctgccgcatagggccaaatgggttattcccccttgaggcttcttcagggaataccaaacatcacctggggaaggctagggttgaaaatccaattaaatattgagaatgggaaagtttt

SEQ ID NO: 657690 - DNA, 573 bp, Homo sapiens
tttttgagaagagttaactcccttactttgtattaaaaagaactagaatatagaattgagaagtactaaaaatacagttcagaataatatatatatcccatatatattttatatatatatatttatatatattatatatatatwtttttttttcattgcaacctcgacctcctgggctcaggtgaccctcccacctcagcctcccaagtagctggactataggcacacaccaccatgcctggctaatttttgtattttttggtagacacacggtttcagcatgttacacaggctgttcttgaactcctgggctccagtgatctgcccacctcagcatctcaaagtattgggattacaggtgtgagccaccacatccaaccagaatgagatatttttaatgacaaaaatagacactgggagaataaaatgagaaagtatatccctgaaagttctagaaagagatactagagagaatgcaatattcaaaaaattaatcactgagaatgttctagaattaaaacacaaatccttaggttgaagatgtacaacaaacattgaatagaataaataaaa

SEQ ID NO: 657691 - DNA, 564 bp, Homo sapiens
ttgagcagtaatagttttttttattgttgttttgtttctgtttttgagacagagtctcactctgttacccacactggggtacagtggcataatcttygctcactgcaggctccacctcctggcttcaagtgattctcgtgcctcagcctcctgagtaactgggattacaggtttgcaccaccatacccaactaattttttgtatttttagtagagatggggtttcactatgttggccaggctggtcttgaactcctggcctcaagtgatctgctcatctcatcctcccaaggtgatgggattacaggcatgagccactgcgcctggccaataatagtttcttatatgtacaaatacaagaaccttttcagatatgtgtactgtgaatattttctcccggtctgtgtcttacctttgtccttcttaatggttttttttttttttttttgaagaccagaagttttaaattttgattaagttcattttattgtgtttttaattgttagtgcttttagtgtcttaagaaaattttctgtatcccaaggtcttgaatattttttctgtt

SEQ ID NO: 657692 - DNA, 564 bp, Homo sapiens
ttgagcagtaatagttttttttattgttgttttgtttctgtttttgagacagagtctcactctgttacccacactggggtacagtggcataatctttgctcactgcaggctccacctcctggcttcaagtgattctcgtgcctcagcctcctgagtaactgggattacaggtttgcaccaccatacccaactaattttttgtatttttagtagagatggggtttcactatgttggccaggctggtcttgaactcctggcctcaagtgatctgctcatctcatcctcccaaggtgatgggattacaggcatgagccactgygcctggccaataatagtttcttatatgtacaaatacaagaaccttttcagatatgtgtactgtgaatattttctcccggtctgtgtcttacctttgtccttcttaatggttttttttttttttttttgaagaccagaagttttaaattttgattaagttcattttattgtgtttttaattgttagtgcttttagtgtcttaagaaaattttctgtatcccaaggtcttgaatattttttctgtt

SEQ ID NO: 657693 - DNA, 597 bp, Homo sapiens
tattccggaaatctcctgataatatttctatgtgaaattagattaaagatatccacattcaaaactttcatcatctgttggtttcctgttctcctcttttctggagacactgaaattcttccatattagcaaagggagatagtaaataayagaaatataatggcttgatacttaaaatgtgttatgtggatcagcagtgttagcatcatctggcaacgctttagaaatgcagaaactcaggctttataaatccactgagtcagaatgtgattttaacgagattcaccagatgattcttaggcatattaaagtctgagaaacaccaagctaaaacacaggctgcttggagaagagcttcttaaattatcaaaggatattatttgttattcatgacaatcatagactaataccaataatatacaatagaaatcagtataaaatatataatatctattttattagattcaataaacagaatcattataaaaaatcagatcatacattaaaaacaaaaagaatcataaaaactattcattgaaataatgccttttagattattaatattcacatataaaacactaaacatctgttgacttt

SEQ ID NO: 657694 - DNA, 548 bp, Homo sapiens
agggacatctgatagcaatcaccagcctgtttggatagatcatcatagatggcaaatgtacatttgccattatctctaaaatattctcccatagaacagccagaataagaagccaggtactgaagtggggcaacatcagaaatagcagctgaaccacaatagcttacttcatgacatctacatgtgtaagtctcttcaccaactggaaaatsatctcttaactcgttgcaatgtagagacaatatggcttcttctatcagatcattggagtgtataatgattgtgtcaatagcaatttaaattttgccagtctgtcggttgtcaataatcagttcacacggaccacaactaactaacacgaagcaacccaaagccttaatgccagactacttagtttctgcaacaaagtttgaggaataattccaagatttttctaaccaacttgtctataggttttggaatcactggacccacataattaaggacatgatcaagagtatctactacacaacccaacagctccttaccaactggaatgtctacagtgg

SEQ ID NO: 657695 - DNA, 655 bp, Homo sapiens
tgaattactgaagtggtgataaagacaaagtcacaaatcaatgagaaagaaaaatgatgtcaagtgaatacatgaatgaatacatacaaagtaataaaaggtattggaaatggtaaatgtgtggatgaacatgaaaggtattttttccttctaagtttaagagataattgactgaaaaaaataaaatcaatatgactatataaccatatatacaaataaaaaatataaaaacaatattacaagaataggaggagtaaatggaagcatactgctctaaacttcctstattatttggaaatggtgtattactttttgaaagttaccataagttgaatattcgtattgtaaaccatacagcaaccactaaaattactgcaaataggaatagctaataaaccaaaaggagagataaagtggaatattaaaatgtactaacttaatctaaaagaagacagaaaaaggaggaaaaaagaagagaaaacaaatggaacaactacaaataaacaaacctaaaattcatatgaaaccaaaaaagagcccacttagccaaagcaagactaagcaaaaagaacaaatcttgagacatcactttacccaacttcaaactatactacaaggctatagttaccaaaacaggatgatactggaatattaa

SEQ ID NO: 657696 - DNA, 462 bp, Homo sapiens
gaaccataataacagagctaatatttgtatcattgtagttctagacgaagagagatttgaactgaaaaagtactaaaagaaatatggctaaaaactttccaagtttcacaaaaggcataaatctacagatccaagaagctcaactgacctcaaatagggtaaactcaaataaatccacaattatatgtccagggaaatatccttcaggattcaaagggaaaataaagatattctcagatgaatctataaccccattctaatcacaatataaacattagacaaatctcaattgagggacaytggaaaatacctaatcggtactcctcaaaactgttgaagtcatcaaaaacaaggaaactctaagaaactaccatagtcaagtggaccctaagaagacagataatgacaaagcgtattgtagaaacttcagttggatcctgaaatagataaaaggcataaagt

SEQ ID NO: 657697 - DNA, 506 bp, Homo sapiens
ttttacaggactttaattattattgtctggggaaagatgaggaatagagtggaaacatgatatatggacagatacatagatttgatacatagatatatacatagattagatagatgagatcaattgatcaatcaataggtatgtcaggcactgcactatcaactcacaagcatttgatttagttttcctgacactaaatctatttgttcaaaatactcactccctgtaccccactctccatggcaaagtgcacttctgcaccacttcctttgggctgggccgtgtgatttgctttaaccaaaggagtttaaccaaaggtgtgaagtaaccagaagtttgaaacaagtttgtgcaattcagcttgccctcttgcaccctgctcttgccatgygagaatatgaaaaatgtcagctatctccctggagaaggatcacagatgtggagcagagccagctcagacaatcccattccaggtcagtgactcccagctggactgcagatgtgag

SEQ ID NO: 657698 - DNA, 631 bp, Homo sapiens
taatgttatgaatattgtggaagatggggtttaaagacaactttgcagttgttaattatcacacaatttccaaataattatctaaaaaatcttaaattactctgtacttaaaattcttaacatgatagttatgctatagtgtttgtttttcattcttttattatttttaaaatttttgtgggtacatagtaggtgtgtatattatacagtacataagatgttttgatacagtcatgcaatgtgaaataagctgatgatggataatagagtatccaccctttgagcatttatstttttagttacaaacaatccaataaaattaaaataattttaaaattattttaaaatgtacaatttggttattattgactatagttaccctattgtgctacaaaatactaggtcttatttattctattttttttaaacacattaaccgtctccacctctccaccagcccctcactagccttcccagcctctggtatccatccttctactctctatgttcatgagttcaattgttttaatttctagttcccacaaataagggagaatatgtaatgtcggtccttttgtttctggtcaatttcatttaacataatgatctccacttccatccatgttgttgc

SEQ ID NO: 657699 - DNA, 631 bp, Homo sapiens
taatgttatgaatattgtggaagatggggtttaaagacaactttgcagttgttaattatcacacaatttccaaataattatctaaaaaatcttaaattactctgtacttaaaattcttaacatgatagttatgctatagtgtttgtttttcattcttttattatttttaaaatttttgtgggtacatagtaggtgtgtatattatacagtacataagatgttttgatacagtcatgcaatgtgaaataagctgatgatggataatagagtatccaccctttgagcatttatgtttttagttacaaacaatccaataaaattaaaataattttaaaattattttaaaatgtacaatttggttattattgactatagttaccctattgtgctacaaaatactaggtcttatttattctattttttttaaacacattaaccrtctccacctctccaccagcccctcactagccttcccagcctctggtatccatccttctactctctatgttcatgagttcaattgttttaatttctagttcccacaaataagggagaatatgtaatgtcggtccttttgtttctggtcaatttcatttaacataatgatctccacttccatccatgttgttgc

SEQ ID NO: 657700 - DNA, 493 bp, Homo sapiens
ctattgtggctaagctggtatccaagatgcaagacaatatcctccccactcttccctctcctctattcacaagaaggaaggggtcttttttgcagccacgagctgtgcagcctggagttagggcaggggtgatgccagcactctcttggctgctccagctagtttctcagtatttcatatgcccaccagtttactgcctctgcgttttgcttgcycctaatactcacctatgaactgtagtccttatgacctagactgcttttcaaatttacttaaagaccaagagcactttggccctcagtgatgaggtttgtgggcactcaagttcagaccaccggtatctgtgattctcttctggccaggactggtttaaatgttccctctctcagtgagcctcagctgagtttggtctgcttttcctttccgctctaacagaacagcccttagtttatttccccatattctttctctcttcgtttccagagaagttctc

SEQ ID NO: 657701 - DNA, 551 bp, Homo sapiens
cactgttgggggcaggcaaggagtggcgttggcggttctgaatgtcttttttctayctcttctgtgtctcagcaatgtaaagttaaaatggttctgtgagtgctcaccggagttttggttcttatgaaggtgttcttctgtgtagctcattaacttgttaacttgttgtccttgcaggcagggggtggggggcacaatcgggggagctttctgttcggacatcttgttcctcttccacctatgtcagtgtgtgcttttcccaagaatccctcataagttcaaatttttgattttcctttacatgctttaatttgcagtgatagagatgtaattgatatgccaaaatttacaatgtgtgtacttcatgtttttctaaaattatttattacaaattacctcaatgatgcatacactaaaatgggcataattataaatattgtcaatgttctctataccagaaaagaaataaataaatatttatgaaaggttaatgatgttagtaaatcaatcgttttatttggaaatgctactgaaatattttttatttagaa

SEQ ID NO: 657702 - DNA, 551 bp, Homo sapiens
cactgttgggggcaggcaaggagtggcgttggcggttctgaatgtcttttttctacctcttctgtgtctcagcaatgtaaagttaaaatggttctgtgagtgctcaccggagttttggttcttatgaaggtgttcttctgtgtagctcattaacttgttaacttgttgtccttgcaggcagggggtggggggcacaatcgggggagctttctgttcggacatcttgttcctcttccacctatgtcagtgtgtgcttttcccaagaatccctcataagytcaaatttttgattttcctttacatgctttaatttgcagtgatagagatgtaattgatatgccaaaatttacaatgtgtgtacttcatgtttttctaaaattatttattacaaattacctcaatgatgcatacactaaaatgggcataattataaatattgtcaatgttctctataccagaaaagaaataaataaatatttatgaaaggttaatgatgttagtaaatcaatcgttttatttggaaatgctactgaaatattttttatttagaa

SEQ ID NO: 657703 - DNA, 636 bp, Homo sapiens
ccctttctcttgcaaaaataaaaatacagttcaaatacagcaatatatcattaagctgatattgcctttgtaagaagcaaacgttatctatgaaacaataaattatggtatttcttttaggaatccataatataataaatagtaccctatgaggttacttatccatgtatatgtgcatataattaacatatacacatgacgagcacagagatactataaactatttaaccactgagtattatgaccaaaaaatgcatgactatgattgagcacatgaaagatgtttatagactgtgacaaaattattttatatagaatcattatctctagaataatgacatggtgctgaaaattaagtttcccttggatttattttctgatgtgggattttaaatcagctaactaatgagatctcttaatgatgagttctgaaccaaatgaatatagacaaaggagtctagaataggggattaaacacagagatgcacatgccctatctttgtatgaaacagcataaggcatcccattggcctttatcctgtayggcacagaatttgaaaagtcaagtgtggagtgtatttcagcactcagtggcacctagggaggatatttttgtgtagggcaaatagcggagtc

SEQ ID NO: 657704 - DNA, 511 bp, Homo sapiens
tagtgtttaattaaacagacaagatcttaagaggttatctttgaattgttactgtgacagaatttttatgtgaatttttttaaatcaactttttattgtgaagcataattgtttgaggacacaattctatgcatagaagtgacattattattattacacattttagaaagatcacactaatagcagtgtatagcttgaaatattacattaggggaatctggatggcttcagagagggaaattaaaatattcatttagtaattaagtttagagataagtaaayaataagggcaataaaacagtaagattgaggatgattcagaggtaatagagctgaatgacactaaggaagtaaaatctgttatactttgctcttgattggccataagaataaatagactcaaggacgacttccatctctggtttatgcaactagatcaataggattgacatttaacaaagagataatatattgagaagaacagacttgagtaagtaaatattgtattagg

SEQ ID NO: 657705 - DNA, 601 bp, Homo sapiens
gagtagacattaaaatctaatatactatccggtgtatctgtaccagaagtctgaactttcccattatcacatgtaagctataaytgcagtggtgccttaaagggagatacaagagatgctctacttttgccacatcagctcattttgccacattaaaagttgagaagaacaagagactctggcattatttcaaacctgcccttcctcagtacttctggaaagaatcacatagtttcttatctacccacctgaggtctcattaggctattcaggatatccagtaaaaaaaggctttaaaagtaaacctaaaagtataaatgacgcctaactaaatgattagttttctgaaacatccatcatggggtggtacatgtacattttgatatttgttgctattaatattttaatataacaagtgtgacaagctaaaaggaaagccatttttcaatattgtaagttttcatattcttcatgtttactaatttccattacttgtttcttattatcagaattataagaaatataggtttttgtttttgtatcagggattgcatagaagctatcactaatataatgtttccacatgtttacataactaaaa

SEQ ID NO: 657706 - DNA, 599 bp, Homo sapiens
aatacccacatgcttgcttttctagaaaatctaaaaattttaaaaatttgctgttatagtggatttcaatctagattaggcttgaaattggcaatgaatatgccaatgtgcaaaaaaatttgtagtaggcagggcaagacacagatatccctgtgtacttttactaaatatgatgcaaattctactaacagacttaccatrttaatataatctcagaacacataaacatatgactataatctcagaacatataaacaaggcattgcacttggcagcaaaattgtgtgcttatttaccccattacaaaatgcattccagatcacgtagtgaagcatgatgaaaataatgcctaagtgtcatgtggtgggtttcgcacactaaaattgtgtatataactacagtgggtatttttaatgaatgagtaatgaagttcttatacatgcctatatcatctcctccaataaacaggaaaaataaaagtctttgtgaaaatataatttttaaagcaaggaataaacagaaaagtgaaaaaacacaatgtttctaacatattataggtgtaaaaatagagttaaaataatagctttaaggaaaaagaa

SEQ ID NO: 657707 - DNA, 569 bp, Homo sapiens
caagctttctgaggaccctcataaaatatttttataacatattataaaacatatataaatataaattcacaaatataaatgtcgccatatatataactatgtctaagttatatctaagtgttatacacgcacagacacacacacacaataatatgaaggaaaatatataaacttttattataatttcaacattttggctactcacattataccaattccaccttttatcatagaaaatgaatatatttctctggtaatatgttattctatttaaaactaaatccaacttgacatttttatacacaaacctttcaggtatttatgggatgtgctgatctcattatatctggggcagctgccactgaacagcagcaaatgtatatggagccctgactgctaagcaggraattctgccagtctaaatgtactgtacctgatgtccataagccaccatctggacagcaagggcatgtctccagattcttgatattgcagatattaatagccttgtgaactataaaattactaggcagcagaaaaaaatagcccatgggaataggggcagttgg

SEQ ID NO: 657708 - DNA, 575 bp, Homo sapiens
tggctactcacattataccaattccaccttttatcatagaaaatgaatatatttctctggtaatatgttattctatttaaaactaaatccaacttgacatttttatacacaaacctttcaggtatttatgggatgtgctgatctcattatatctggggcagctgccactgaacagcagcaaatgtatatggagccctgactgctaagcaggaaattctgccagtctaaatgtactgtacctgatgtccataagccaccatctggacagcaaggrcatgtctccagattcttgatattgcagatattaatagccttgtgaactataaaattactaggcagcagaaaaaaatagcccatgggaataggggcagttggcaacaatttccaccaaagcatgcttatggaataagtccctatgttcaaataacttctgaatctgagccaagaactgcctcttccttttgccagctaaacactcgcttttcagtctcctcacctgcttcattccccctgggagctatacatgcagtactcaccagctgcccagctggagatggttctattgtgacacagag

SEQ ID NO: 657709 - DNA, 635 bp, Homo sapiens
aaactgtaaaaataaatacatttcttaaacaaaacttatatgatggtgaggatttcttaaacaatctttagtaaaacattctaacagaaaagtaaaacattgttatggtttctcacttaccagttaccatgtgagactattgaatttgggcttataaaaaatggtatcactcagcataacatcctctagattcactcatgtgcattacactcagtgaaataagccagacacagaaagacaaatactgcatgatctcacttacatgtggaatctaaaatagtcaaacacatagaagcayagaatggaatggcaattgccagaagcaagaaccagagggaaatgaggagacattggtcagatggtacaaagttccagttatgcaagttgaatgagttctggagagctaatgtatgacatcaagaccatggttaccaatgatgtattcaaaacttgaaatttgataagacactggatcttaagtattttcaccacaacaacaaaagaaaggaagagagaaaaataaagaaaatggcagctgtgtgatgtgatgggtattgttaatttgcttgattgagctgaccatttcaaaatttgcatatttatcaaaatattaagttgtacactttaagaatata

SEQ ID NO: 657710 - DNA, 606 bp, Homo sapiens
ctggaaaaaaaacccacagttttaatatgagaaactgaaaataacattactcaataaaacttgtaagtaaagttgtataaaagcattatatgtcaaattacatctatcagagaagttaacaaatacaacttttgttttaaggagtatactttcaaaaattgtataagccaagtctaaagacaaaacttcaaataaggattgtgtgagttgatgtaattatatatgaaaggaatattaataaagagaaactttaaactatatattgtttttaaagggaagatacagttctttcagagaaagagcattaatatggtttggctytgtccccacccaaatctcatcttgaattgcaatccccataatccccacatgtcctgggagagatccggtgagagataactgaatcatgggggtgatttcccccatgctgttcttgtgataatgagtgagttctcatgagatctgatcgttgtgtaagcatctgccatttcccctgctggccctcattctctcttgcagccctgtgaaaaggtgccttctaccgtgattgtaagtttcctgaggcttctccagccatgctgaactgtgagtcaattaaccctctta

SEQ ID NO: 657711 - DNA, 578 bp, Homo sapiens
tgaaggtgagaaacctggctcccattatcattkatatatttatttattttctcaattctagaaaaggtacaaaataatttttaacatttctaacacatacttctataaaaacaaattatgcatcagaatcccacatttgtgtacagaattgttgttagtcttagagtgtatatatgtacacatatatataagtatatgtataagtatatatgtatacatgcatgtatatgtatgagacagagtctgagctctttgagacaagggtctggctctttcacccaggctggagtgcaatggcacaacctcagctcactgcaacctccgcatcccaggctcaaaccattctcctacctcagtttcccaagtagcaggaatacaggtatgcaccaacaccccaggctaatttttgtatttttgttggagagagggtttcacaatattttccaggctggtctcaaattcctgggctcaagccatcacctcggcctccgaatgtatggggattacaggcatgagccaccgtgcctggcccaagaattgtttatgcttttcttccccatccttttttaattgcaatt

SEQ ID NO: 657712 - DNA, 578 bp, Homo sapiens
tgaaggtgagaaacctggctcccattatcatttatatatttatttattttctcaattctagaaaaggtacaaaataatttttaacatttctaacacatacttctataaaaacaaattatgcatcagaatcccacatttgtgtacagaattgttgttagtcttagagtgtatatatgtacacatatatataagtatatgtataagtatatatgtatacatgyatgtatatgtatgagacagagtctgagctctttgagacaagggtctggctctttcacccaggctggagtgcaatggcacaacctcagctcactgcaacctccgcatcccaggctcaaaccattctcctacctcagtttcccaagtagcaggaatacaggtatgcaccaacaccccaggctaatttttgtatttttgttggagagagggtttcacaatattttccaggctggtctcaaattcctgggctcaagccatcacctcggcctccgaatgtatggggattacaggcatgagccaccgtgcctggcccaagaattgtttatgcttttcttccccatccttttttaattgcaatt

SEQ ID NO: 657713 - DNA, 601 bp, Homo sapiens
cactatgaggcttcactaataatttcaaatatacacatgaaaagacatgtgtgttagtataagtgtgtaagtgtgttagatctgtgatttgtgtaattatattcaatagtgcagttctttgttttagcttactcaccaacaaaataatccactcatccgggtgagtatartaagaggttagaaaagataaataatctaatttaaaatgggaagaggatttgaatagacatttctccaaaaagatatacaagtgtgtaatgagcacatgaaaagatactcatcgttgttatcgttagcgaaatgcaaagcaaaaccataatgaggtactattttacacccatttgaaaagtataatggaatcacaaagacagacaataacaagtgttggtgaaactgtggagaaattggaaacatttacattcaccgatggaaatgtaaaaatgttatagccactttgaaaaacagttatgaccctgcattactacttataggtatacgccccaggttaaaccaaatctccacacacttatacatacataaggaaaaagcaatgcaactacttatacataaatgttcatagcaacagtattcatagtagtca

SEQ ID NO: 657714 - DNA, 601 bp, Homo sapiens
cactatgaggcttcactaataatttcaaatatacacatgaaaagacatgtgtgttagtataagtgtgtaagtgtgttagatctgtgatttgtgtaattatattcaatagtgcagttctttgttttagcttactcaccaacaaaataatccactcatccgggtgagtataataagaggttagaaaagataaataatctaatttaaaatgggaagaggatttgaatagacatttctccaaaaagatatacaagtgtgtaatgagcacatgaaaagatactcatcgttgttatcgttagcgaaatgcaaagcaaaaccataatgaggtactattttacacccatttgaaaagtataatggaatcacaaagacagacaataacaagtgttggtgaaactgtggagaaattggaaacatttacattcaccgatggaaatgtaaaaatgttatagccactttgaaaaacagttatgaccctgcattactacttataggtatacgccccaggttaaaccaaatytccacacacttatacatacataaggaaaaagcaatgcaactacttatacataaatgttcatagcaacagtattcatagtagtca

SEQ ID NO: 657715 - DNA, 406 bp, Homo sapiens
aatttgaatggactagctgtccttaagtctttttgtgaatagaagatagacattttccccaatagagctataattctgtagttatatattaaaaayataaatgcttcattttgaaataatatccaattttcatcttcctgtctcttacaatttggtacatatacttatacatctgtctgggcatctgttttctgtagaaaatccctttacaatttctttggatacagccatccttccctttggcattgcccaaccttaaaccatatgagaggagatgactaaacccagaatgagatgatgtccatatcaagccacaggaactatatgtcacaaattatcttattcatttaacctttggcaatatattttttgagtgaatgtatctaaatgcaaacttttaaagctg

SEQ ID NO: 657716 - DNA, 324 bp, Homo sapiens
cagtccccaacctttggacactagggactagtttaacggaagaaaatatttccatggaccagggtggtggatggtttggggatgaaactgttctacttcagaagatcatcaggcattagattctgataaggagtgtgcaacttagctctcttacatgctcagttcacagtagggtttgcactcctatgagaatctaatgatgtcactgatctgacaggatgaggagctcaggctatagtgctcactcacccaccactcacctcctrcttggcagcccgctcctaacaggacgcgaaacagtaccatttcacagcccaagggttg

SEQ ID NO: 657717 - DNA, 324 bp, Homo sapiens
cagtccccaacctttggacactagggactagtttaacggaagaaaatatttccatggaccagggtggtggatggtttggggatgaaactgttctacttcagaagatcatcaggcattagattctgataaggagtgtgcaacttagctctcttacatgctcagttcacagtagggtttgcactcctatgagaatctaatgatgtcactgatctgacaggatgaggagctcaggctatagtgctcactcacccaccactcacctcctgcttggcagcccrctcctaacaggacgcgaaacagtaccatttcacagcccaagggttg

SEQ ID NO: 657718 - DNA, 606 bp, Homo sapiens
attattcttttaaatctagtggatgatatgtggttaaagaaattttgagtttagagagagcatctaggaaggagtaatactaggtgttaagagactgggaaaagacgttgaacaccatgttcctgaaatggcacgtagtttgataaagattgactgcaagttttctattgctgcattaacaaattactacaaacttagcacttaaatgaacaaaatattggctgggtggagtgactttaccctgttatcccagtactttggcrggccgatgcaggcagatcacctgaggtcaggagttcaagactagcctggccaacatggtgaaaccccatctctactaaaaatacaaaaaattagtcaggcgtgatggcaggcacctgtaatcccagctacttgggtagctgaggcaggagaattgcttgatcccagaagggggaggttgcagtgagtggagattgcgccatggcactccagcctgggcaacaagagtgagactctgtctcaaaaaacaaaaacacaaaaaacaaaaacaaaaaacaacaaaatattatttcacagattccttgcatcctgtgtctgggatattttatctcaggggatcaaaag

SEQ ID NO: 657719 - DNA, 606 bp, Homo sapiens
attattcttttaaatctagtggatgatatgtggttaaagaaattttgagtttagagagagcatctaggaaggagtaatactaggtgttaagagactgggaaaagacgttgaacaccatgttcctgaaatggcacgtagtttgataaagattgactgcaagttttctattgctgcattaacaaattactacaaacttagcacttaaatgaacaaaatattggctgggtggagtgactttaccctgttatcccagtactttggcaggccgatgcaggcagatcacctgaggtcaggagttcaagactagcctggccaacatggtgaaaccccatctctactaaaaatacaaaaaattagtcrggcgtgatggcaggcacctgtaatcccagctacttgggtagctgaggcaggagaattgcttgatcccagaagggggaggttgcagtgagtggagattgcgccatggcactccagcctgggcaacaagagtgagactctgtctcaaaaaacaaaaacacaaaaaacaaaaacaaaaaacaacaaaatattatttcacagattccttgcatcctgtgtctgggatattttatctcaggggatcaaaag

SEQ ID NO: 657720 - DNA, 501 bp, Homo sapiens
tccaaaacctagcactgggccccaacactcttatgcctgaaatccccaaaatagcttcctcagtcttttacaaccaggaccaggagaaaaagcaaagaagtcagagaaaggaaaggtggaaagaaaagcagcatctctaaatattggctgccttataagtccaccagcccctccaggttgccctcagaattccctcctaggtaactgccattatttctctccccagtgaactgccccttttcatatacaccaaagaagaaatagactggggcacccaacatgggtgtaaagaaaaaaaatcaatgattggtgcaatttaggagaactcctccatctaccttaaagtctcccaayagaaagtcatcaggagttacaagactactaccatcttggaaagaagagtccaggacaaatttgtaaatgggtattcagtgggaagtgactgaacaaaaccattcaacagatttgtcaagcctacatgttatgaaccataaataatcc

SEQ ID NO: 657721 - DNA, 554 bp, Homo sapiens
acagggcaataacattaaagactgggtttacacacaccaaaagaaaaggaaattcagagctgacttccacatcccttcttacaattcatcaccrcaggacgaaatatgcagatgttgttttttttgtgtgtgtgtgagactggaaaaagagcaaaaatttcaaaatcagattaagacaaatgtagtaaaatgtctggttattctttgcactgtgatagttatctttcattttaagttcttaaaatactttgcaacaattagtctccccatttcatagctggggaaattgagatccaggccaataaagtaactcctgctaacacatagaaaatcagaaccacaaattgagttgcaactttttttccacaacctgttacaaaagtcattttcttgatagcatgctcttttcaaaaagaaaatagattcaagcccagttctggggataaatcttaccttgaatttagattctagaacttttatttaaaagtattcaatcagtcaaacagagatgttctaacatcaattgttacaatagtgctttgaaaaatgtatgt

SEQ ID NO: 657722 - DNA, 554 bp, Homo sapiens
acagggcaataacattaaagactgggtttacacacaccaaaagaaaaggaaattcagagctgacttccacatcccttcttacaattcatcaccacaggacgaaatatgcagatgttgttttttttgtgtgtgtgtgagactggaaaaagagcaaaaatttcaaaatcagattaagacaaatgtagtaaaatgtctggttattctttgcactgtgatagttatctttcattttaagttcttaaaatactttgcaacaattagtctccccatttcatagctggggaaattgagatccaggccaataaagtaactcctgctaacacatagaaaatcagaaccacaaattgagttgcaactttttttccacaacctgttacaaaagtcattttcttgatagcatgctcttttcaaaaagaaaatagattcaagcccagttctggggataaatcttascttgaatttagattctagaacttttatttaaaagtattcaatcagtcaaacagagatgttctaacatcaattgttacaatagtgctttgaaaaatgtatgt

SEQ ID NO: 657723 - DNA, 575 bp, Homo sapiens
gccagggcagttgatgaagttctagagagagagagacagggctggacttcttagggaggaagttctcaggcagggaagggttgggcatctaagcaggaatgatgaaccaggtcctttagacagaggtcagcaggcccagcttctgagaggccagtgcatcagaagacacccaaggtgagtcacgaaaagaagacagaagtgatttgttcttggtctccttctgaactcctggtatgtgggtgggctagggctcacaggtgtcagtagccaggagagatagggcctcactcaratcagctttcagttttctgatatcctcacctctggtctcaagctattcagccaatattgcatctttaatggttaagctttggggcaggtggctatttgtaaggctactaattagataaagggactgatttgcaccaggatgcagataatgcgtggaattgtgccaggacccacagctcaggagtttatgaccccctagctgccatggcaaccatgcctattcagttggggaagtctttttgttgtgggataggagtcagtgcatagggcacagcatcagcttc

SEQ ID NO: 657724 - DNA, 511 bp, Homo sapiens
aaaaaggttaaattttctcgagttatataataattaccaagaattctcagtaagatgtgtttytagtagtactactaccttacttagaaaaagtggactttttatttctgtcatggtatatccagtttccttgatactctgattaatgggcataattcaggaaaaatagagaccctcgaacctcctaatccccagccaaatctctgtttggtgtatttctgtgccggctgccccagagaagcgtgactggctttttcattggttctttgctttacttctgagctagaaagtttgcagaaagtttgcagaaagtttagtctgttttcatacaaatctttgcatccatctgtatgactggagtaactccatttcaaatatggatttggaaacaagggagtaggtgagtagggagagacaggatgtcattgcaaagtttttagtttcattttatagttttgtcttcattattttaatgacaattactgctgaaagtcaaacttccaaagaattc

SEQ ID NO: 657725 - DNA, 453 bp, Homo sapiens
ctgcctccgctgggaggcagagctggcagtgagccgagatccaccattgcattccagcctgggaaacagagtgagactccatctcaaaaaaaaaaaaaaaaaaaagatggcacagacccaaagagtgagtggtagcaaggatttttgtgaagagtgaaacagcaaaagcacaaagcttccacagcattgaaggggacccaacaggttgcygctgctggttggtggtggacagcttttattcccttattgtctccgcccatgttttgtttttgtcctatcagagcgcccttttttcaatcgtcactacgattggctacttttaggatcctgctgattgctgcattttacagagtgctgattggtgcattttacagagcactgattggtgcatttttacagagcactgattggtgcattttacaatccccttgttagctacagagcactgattgg

SEQ ID NO: 657726 - DNA, 453 bp, Homo sapiens
ctgcctccgctgggaggcagagctggcagtgagccgagatccaccattgcattccagcctgggaaacagagtgagactccatctcaaaaaaaaaaaaaaaaaaaagatggcacagacccaaagagtgagtggtagcaaggatttttgtgaagagtgaaacagcaaaagcacaaagcttccacagcattgaaggggacccaacaggttgccgctgctggttggtggtggacagcttttattcccttattgtctccgcccatgttttgtttttgtcctatcagagcgcccttttttcaatcgtcactacgattggctacttttaggatcctgctgattgctgcatttyacagagtgctgattggtgcattttacagagcactgattggtgcatttttacagagcactgattggtgcattttacaatccccttgttagctacagagcactgattgg

SEQ ID NO: 657727 - DNA, 562 bp, Homo sapiens
ttaaaatcatcagtttgaactcagaatttttgcagtgttttcaaaaaacacatttttcttagctgtgtccctgaaattgcttaaaggcaataacattttagtaccaataaacactgcttgcaccttgattttggtgtgtaaatactattcctcaccaawggaaattgggctccttggaagaacagttgatttcaggcctgagacaggaaacataaagatgctagaggatattgtgaacaattttttttgtaaatttgaaagccatttgaaacatatcaacccccagggagaaaagtccttgccagcaataaccaaagaaatagaaaatctgaatatttctataaccattaaacaaatttaatcaacattgtaaaacctccccacaaagaaaactaggcccagagagctttataggcaaattctagcaaacatttaagtaaataattattctaatcttacataaactcttccagagaacatttaaaaaaaattcaactcaaattatgggctactgttacaattgcacacccaaaccaaatgaagacagcacaacgaaggagat

SEQ ID NO: 657728 - DNA, 589 bp, Homo sapiens
ctaatttagtttgttttgatcaaaaaaaaaagctagcgattacaaataatgttttatttcaatgaacccaaactgagtgtgaagaagaacaggagcaatttagagaaggaaaaaagcatgagcttcagctttatcttccctttcttcacagtcatccctgaaaccagcgaggaaaataatgaggacatctggaattcagaagagattccagaaggagcagaatatgatgatatgtgggatgttagagaaatcccagagtaagtcaaatgaagccaggaatgtctttaggagtttaagttagctgtgtcatctgataacattttaytttttacaagattcataaagtaacataccacataaaagataaaactacagtgacacacggaaggcatgtgtaattgattatttttttccttctagagcagaaacaaataataaagcataacaccttcctttcagttactatctagcaaaaatgaaaaatatagtcatttccattataaatttatatttaatgtcaatttgttgtataatgtggaactagcagttggagaaagccagcccattaaattgcaagcattcatacaaa

SEQ ID NO: 657729 - DNA, 589 bp, Homo sapiens
ctaatttagtttgttttgatcaaaaaaaaaagctagcgattacaaataatgttttatttcaatgaacccaaactgagtgtgaagaagaacaggagcaatttagagaaggaaaaaagcatgagcttcagctttatcttccctttcttcacagtcatccctgaaaccagcgaggaaaataatgaggacatctggaattcagaagagattccagaaggagcagaatatgatgatatgtgggatgttagagaaatcccagagtaagtcaaatgaagccaggaatgtctttaggagtttaagttagctgtgtcatctgataacattttactttttacaagattcataaagtaacataccacataaaagataaaactacagtgacacacggaaggcatgtgtaattgattatttttttccttctagagcagaaacaaataataaagcataacaccttcctttcagttaytatctagcaaaaatgaaaaatatagtcatttccattataaatttatatttaatgtcaatttgttgtataatgtggaactagcagttggagaaagccagcccattaaattgcaagcattcatacaaa

SEQ ID NO: 657730 - DNA, 602 bp, Homo sapiens
aaacacaaataaatagaaaaacattccatgctcatagattagaagaatgaatattgttaaaatggccatactatagaaagcaatttatakattctgtgctattcctatcaaaccaccaacctcattcttggctgaattagaaaaaaaactattctaaaatacatatgcaaccaaaaaagagcctgaatagccaaagaacaaagcaaaagaacaaagctggaggcatcacactacccaacttcaaactatagaatagggctacagtaaccaaagcagcataacactggtacaaaaacagacatgtagatcaatagaacagaatagaaaactcagaaataaagccacacatctacaaccaactgatcttcaacaaggcaaactaaaacaagtaattaggaaaatggtgttgggataactggctagccacatgcaaaagaaataaactggacccttatttttcattatatataaaaattaaatcaagatgaattaacttaaatgtaagatgaattaacttaaaaatagataaatgaaataaaataattgtaaaatgtaatttcacaatttgaatttaaaaatcctagaagacaatctacaaaata

SEQ ID NO: 657731 - DNA, 570 bp, Homo sapiens
ccaaaagccactcctcagtagcaaaatgccattaaatcctttaggaacacattaatagattaacatttggaaaagtaattacaatgagagttgaagtcaaactaaataaaaaaagaagacatctattacataattctactgaattcttgaaagaaatcaatataataaaatatcagaggaaattcaacgttgagacagttgtttttaaaaggcaatggaacatgtgcacatacatattaccacatggtagagatatttaacacacatatgttagtacttcataaattctgtgtatacttccatatttccaagaatgtaaaataatatattgaaatgaaataaatggcctctatgaacatggtcagagttgatactttagtgccaataaactgaatcttaagccaaattgactgtgttaaaccttataaaaarctaaattttctaaacattgtcccattctttatgaaggttcaaatgtactttcaaataatttgataaaatgggcaacatttttaaccatttgtgatatatctctaaagaaaaggaactggtatagtagaggaagggatt

SEQ ID NO: 657732 - DNA, 629 bp, Homo sapiens
gtctactgttaaagtgagggcattgattggaatggggacatgtgggaggaccctgatgaagctggggacactgagtttgtaaactccgatgaaccttttttgtcagaagaaacagcttctccatccccagtagtggcaacatcctttcccagacccatgctgcgatcagcctttccacctttgtctgagaagataaaccctgcattgcctgaggcaacagtgatggcctcccctgaggcagttgccaggcaagataacgttgattctcctcaggacacacccccaacaaccctgtttgcttctagatctataactagacaaaagttccagcaggcccctgtaggtgagtttgagaatgtgacccatgaggaagtgggctacactsgaaaaggacttcttgagttttctaatgtatataaacagcaatctggagaacagtcatgggaatggatattaagggtttaggataatggtggaaggtgcatagagttggatcaggctgaatttattgatttgggcctgctaagtagggactctgcatttaatattgcagcttggggagttaaaaaaggttctaatagtttacttgcttggttagctaaaatatggattaaatgatggcccactgt

SEQ ID NO: 657733 - DNA, 587 bp, Homo sapiens
aagggacccctcgtaaactgttggtgggaatgtaaattagtacaaacactgtggagaacaatttggagattcctgaaaatctaaattgagttaccatatgatccagcagtcctgctgctgggtatatayccaaaagaaatgaatccagtaaatcgaagagatagctgcactcctacgttttttgcagcactgtttacagtagctaagatttgtatgtaatctaagtatccaccaacagaagaatggatgaagaaaatgtggtgcatatacacaatggattactattcagctatgataaggaatgagatcttgtcatttgcaacagcatggatggaactggaatttatcattttaagtgaaataagtcagacacagaacaaaaaactttccaacaacatggatcaaattggagatcattaccttaagtgaaattagccagtcacagaaagtcaaacatagcatattctcacttattttggggatctaaagatcaaaacaattgaactcatagacatacagaatagaaagaaggctaccagagggtgataagggtagtgggagggtcaggggagggagttggtgatggt

SEQ ID NO: 657734 - DNA, 517 bp, Homo sapiens
atacaaatcatacttatttctagcatttagcatttctaaacaaaggtcctaggagcaacttttaaaatatttctgcacttcagttttcctttctgcaaaatggatcttgctttctttatactttacttctatatttacatataaaatttatatttaaattatagtttacatctgaaaactggttagtctaatctgtaagccatgttaacttttcattttaattcaagcaagtcaatctgtcatttgctggcaggctaatttgttaacaattaattgaatcagatgaaaccactggtatctggtttaaaaaatttgttgwtccattcatattttttgttttccattcattgaatcactattgtgtatcaggtagtgctcaaggtttatgatttaaatgggagagacaaataatgaacaaaataaataattatataattctcgattaagtatttagatagacaaaatgaacccatatttattcttttgaaaacatagtggagtttgcttttatgcccta

SEQ ID NO: 657735 - DNA, 569 bp, Homo sapiens
ggaactgcatataatctataagttgctttgggtagtatggacattttaagaatactaattcttccaatccatgaacgtgggatatctttccattgtgtgtgtgtttcctcttcaatgtctttcctcagtgttttatagttttaattgtagagatctttcacttctttggttaaatttattcctaggtattttattattaattttttagctattgtaaatgagattgctttcttgatgtatcctttttcagattgtttgctgttggcatatagaaatgctgctgatttttgtatgttgattttgtgtcctgcaactttactgaattcttgtattctaacagttttttttgcggagtctttaggactttctaaatataagatcatgtcatctgtaaacagggacaattttacttcttcctttccagtttgagttccccttatttctttctcctgcytaattgttctggctaaggcttccagtgctatgttgaataaaagtggtgaaagtgggcatctttgtcttgtttcagatcttataggaaaggctttcagttcagcatgatgttaact

SEQ ID NO: 657736 - DNA, 569 bp, Homo sapiens
ggaactgcatataatctataagttgctttgggtagtatggacattttaagaatactaattcttccaatccatgaacgtgggatatctttccattgtgtgtgtgtttcctcttcaatgtctttcctcagtgttttatagttttaattgtagagatctttcacttctttggttaaatttattcctaggtattttattattaattttttagctattgtaaatgagattgctttcttgatgtatcctttttcagattgtttgctgttggcatatagaaatgctgctgatttttgtatgttgattttgtgtcctgcaactttactgaattcttgtattctaacagttttttttgcggagtctttaggactttctaaatataagatcatgtcatctgtaaacagggacaattttacttcttcctttccagtttgagttccccttatttctttctcctgcctaattgttctggctaaggcttccagtgctatgttgaataaaagtggtgaaagtgggcatctttgtcttgtttcagatcttatasgaaaggctttcagttcagcatgatgttaact

SEQ ID NO: 657737 - DNA, 585 bp, Homo sapiens
tctgaaagtttctactgtgttcagtgatttggcctacgggaataaaaatgaggacacagcactccgactccattgtccttcctccacctctcccttctttctccatgcccctcaggtgagaaggggtgagcttcccaagtgacttccatcataccatagtctgaattatctctaccctattgtttacagggaaattctatgatcatattattggaaggttgctgaatttagaaatttatttgctttctacacaaaatcttactttcaagactgttttgtcttgatggactcaaaaacaagaatgtggcactgagatttaaactgarcaataacctctgcgttgaggtggctgctgcccttcctaaagcactaaaatctattgctttcataggtggagaaccccaggaaaacaaaatgtacaggatatggatacacatccaaaatacattttaaacatgctatctctgtctattgccttaagcaattggagtattttctccaaaataccattattgtcatcaattcttcattgagatcacctccaacttgtctattaaggataccctcccgcttcctccagaccct

SEQ ID NO: 657738 - DNA, 491 bp, Homo sapiens
tttctgaaaatgccagagacagtcgaatattcttttttctgaaggaagtcacaacattaaaataatcatataagggagtcatcatggctttatccaaggtgatgcatttcagtcataaagtaattctttgttcttctatatcatgtcaaagaaaaataaaaaaggaagaaaataaagaaagggaaacctaagatttattaattaatatctatttgtggaataaattagggttccagacaaatacttgaagtgtaattgtcctgaaaatgtcttaaacctttactgttttatgaattgagtttaatacatactactagcaaattttttcagaagtaaaaatactctaaaatccaatattaagtcagtgatagccaaaaacttatacaaaccaaagattaaggggtgggtgtggtggytcatgtctgttaccagagcactttaggaggccaagatgggcagaccacttgagctcaggatttcaagaccaacct

SEQ ID NO: 657739 - DNA, 533 bp, Homo sapiens
gctacacatgtatattgaatgactactacatcaaacactattctacagctaggaattcggaggaataaaacagaacaggaatcttcccttctctaagggagatgcataataaataagaaaacaaatagacacatgttataatttcaaatttcaatatgtgtatgtattagtccattctcacattgctattaagaactacctgaagggccgaatgtggtggctcatgcctgtaatcatagcactttgggagactgaagcaggtggatcacctgaggtcaggagttcaagaccagcctggcaaacatggtgaaaccccatctctactaaaaatataaaaattaggcatggtggcagacacscataatcccagctactcaggagactgagacaggagaattgcttgcacctaggaggcagaggttgcagtgagcagagatcataccactgcactccaggctggtgacacagcaagactccgtctaaaaaaaaagaaaggtttaattggctcacagttccacaggctgtacagaaac

SEQ ID NO: 657740 - DNA, 630 bp, Homo sapiens
caataaatatactccttttctgttttggccataacaactctgggtgtctcttacaccccactgaatggaatcttaactaatacatctattttagaagtttagcaaaggagcaaagttaatttgcacttaatgttttcgatataatatttttatgcaacattaatgaaaaacagaatgaaaacaataaaacccaaaagaaataaataaatatcctgtcctctcacccacatccaatttccttgtgactaaactttacttttttaaaaatatggaattcattgatagattgtgccctatttaaaaattaattaactgagttcaaataagccctttggcccaactcctattaagaatatttatgatgatttatactctccattkaacagataaattcatgtgagtgttaagacagtattggctgaattaaatctaaaatcactaagtgaatgactttatgtggggactgcagaaagacttaatgtttttttttctttttttttcttggtacaatgttattttctacaactcagaaaaagtctcaaacagcaatcttaatctttaatttcttccccaaatatgtgcaaatataacttggatattttgaaaagaaaaatggggaaagggtggtat

SEQ ID NO: 657741 - DNA, 481 bp, Homo sapiens
aataatcatttactatccctcaaaacaactgcctacttttccccatctcccctctcccctatgaagaaggatayataagtatctctatcttctgggttatttggtaatcgctctcttgtgactcccccttgcttatgcgtattaataaaaatgtatgcctttttttcctgttaatctgtctgtcattaattcaattcagggaaaggttgaaattccttcatttagatgagagagctgctgtgcgcaactgcattagataagtttattgtgtggattttaaagagacgttacagaaagagaaaaaaattagaaattgagagtttgagagtttattcctgtaaattttatatcatatataaaatgtttgcttccccaaattatagtattagcccatattattacttatcaagatgttaaatcaaaacaagttattttagtgtaaatttcaaaccactataatttagcttaacaagttaatcct

SEQ ID NO: 657742 - DNA, 547 bp, Homo sapiens
accagaatttcctaatcctagcaaccctgggggcgctgcagagggccagggcatgtttcatcccttatctgcaactgcataaggcagacaccaccagagcggccattttagaggctcccctgggaatgcattcttttcccagggctgttaattattaatattccttactggggaaagaattcagcgatatttctcttacctgtttttggcaataagagaagtatggctctgttctgcctggctcccagscagtcagacctaatggttatctcccttgtacctggaacatcactgttatcctgttcttttttcaaggtgcccagatttcatattgttcaaacacacatgctttatgaacaatttgtgcagttaatgcaaacatcacagggtcctgaggcgacatacatcctcagtttacgaagatgacaggattaagagattaaagtaaagacaagcataggaaattataagagtattgattggggaagtgataaatgtccatgaaatcttcacaatttattttcttctgtcacggcttcagcaggta

SEQ ID NO: 657743 - DNA, 547 bp, Homo sapiens
accagaatttcctaatcctagcaaccctgggggcgctgcagagggccagggcatgtttcatcccttatctgcaactgcataaggcagacaccaccagagcggccattttagaggctcccctgggaatgcattcttttcccagggctgttaattattaatattccttactggggaaagaattcagcgatatttctcttacctgtttttggcaataagagaagtatggctctgttctgcctggctcccaggcagtcagacctaatggttatctcccttgtacctggaacatcactgttatcctgttcttttttcaaggtgcccagatttcatattgttcaaacacacatgctttatgaacaatttgtgcagttaatgcaaacatcacagggtcctgaggcgacatacatcctcagtttacgaagatgrcaggattaagagattaaagtaaagacaagcataggaaattataagagtattgattggggaagtgataaatgtccatgaaatcttcacaatttattttcttctgtcacggcttcagcaggta

SEQ ID NO: 657744 - DNA, 556 bp, Homo sapiens
tacagagtacaaaaaaattgaaacaatcttgagctgagatcttttagctttggtattccagggccaagtacatcaatttgaacacagtagggactcaataaatacttgttagtttgatttatagcaattattactttagacacaggctatatacactgtttctaaaaataaaragaaagtataaacataaagacagaaaaagcaatgaattacctcactctttttaagtgacgccctttttttcccaaataacattatagtccaatattattaatgagcaatttttgcatttaattgaattttagtaaatgagaacgttctcctggcaacaggatgtctccaacttattcttaatttgatccctgtctgtttcatcctgatgtaaaagacaaatggagattgtgcagaaccctgggttctctactgcttttttctgtaaaaatgcttctcatgcccaaagtttgaaaagcgatggtgcataaccactctttcattctttttagaggtcaaacttagtcctttttagtatggctcagattaaacagagtaacttctt

SEQ ID NO: 657745 - DNA, 591 bp, Homo sapiens
caatattattaatgagcaatttttgcatttaattgaattttagtaaatgagaacgttctcctggcaacaggatgtctccaacttattcttaatttgatccctgtctgtttcatcctgatgtaaaagacaaatggagattgtgcagaaccctgggttctctactgcttttttctgtaaaaatgcttctcatgcccaaagtttgaaaagcgatggtgcataaccactctttcattytttttagaggtcaaacttagtcctttttagtatggctcagattaaacagagtaacttctttttccattatttcttcaagttaaatgatccaggcaccatctcacttcaaggacttattatttctcagaaacataaatgagaattgtgttaccttaactctgctaagaaacagtttggtgttagcgaccagtaattcccttaagtgtcatctcactgtccatgctaaaccctttgtgtaccaggctgaaataagtggagactttgctgatcttcttaccaaggacagagggctatggaggctgatacagcaggcacctcatggaaacaggtataaattctttttcaactgtactttga

SEQ ID NO: 657746 - DNA, 549 bp, Homo sapiens
caggtcttaaagggagaactgttgagtacaattttaacttcatctcatgttactcatattagcttattacaaagaaatgatgttttatttttgaagattaattatttttccagaaatttttacctgtgtccaaactaggttaagacacagttattctgcatatcttgtatcacctacgtgtacttgtcaaaaaatcattagcctatcagtgaatattggatgattcttcatcaccaggatgtacaaaattatttcacacaagactgtatgtgcgtgttttccrtgccctaaagaatgaaaataatatcagcagtgagtggagaaaagcttgtagggactatgaaaatttaagactactatgatctagatatgatatttatctagagattctcattggttctaatccagggggaacctcagaagatttcgatcattttaaactacctaatttctccaacagtgtatattttttgtagatacagtctttctactgtatcataccagtgaggaccgagatgagatagactatgtcaatctcatgtcaatatg

SEQ ID NO: 657747 - DNA, 516 bp, Homo sapiens
gctatgaaatatataagatggtttattcataggtaatacagaccttccagagaaaagtttatacgcctcacagaaaggacagggactttgaaattaacaatgaacttctttagaaattctgactttaatagttaacatttgtaagacttgaaacaagatatcttgtttaataaactccacaaacctcaatttttttacaagatggggaaaataatggctaccttagatgagtattgtggggattaaagtaaatagatataaaatatctaaaagaatgcctggggcattgttagtgttgtaataacttagtttcataaagctccagtaaatagtcatgtacatattattttttagaagtatgaagttcagaaatatttgtgatcccttttcttatttgcagtcttctcagtactaaatggaatgactaagkgtatctttaattattaaacaactcctaacctgaaaacaaatggattacattggtggccgactcacagagaaagtttatgcagatag

SEQ ID NO: 657748 - DNA, 526 bp, Homo sapiens
atgacctctagggtttcattctatcatgagactctattgttctacatttatattttctacttccaaagccctgaaatagagagatattttctgagcatgtgattaatgaattactgtttgggatagtttcaggtttatgtgcttatgatttaaaacttcttactcttgggagatggctagaatagagaacatcttgaattaatattctagaccaaaactgattgcaagtaaaattaacctccaacttatgtaaagagcattggttaacttattcttagaattatatagtggaagaaggaatatatgtgattatatttcatccatatttctgcacatatatacatatatataatgatttataaaccatccataaactgagctacaagaaatatatcaagggaaatacgcaagtctacattttrtgataggtttcagaaagctgtaaaacctcaagtggctccagagatcaacatttgactgcattttgtttataatacaatattattgaaaagtcagccactagcaa

SEQ ID NO: 657749 - DNA, 584 bp, Homo sapiens
ctgtctggtattaaataccttgaaaataccacaaataaaagcctgcatgtgatgcctgtgtttgttctgctctgggcccattccagtccacccctggccctcaccaccacacacatttacacagacactgcacttcatgcttctctcaaatgaagaaagaatgatcattttcatattgattctggccagggctgttctgaggagtgaattggccattaggtaaccttgattttcagcctttgtaaactaatgatatctattaatcatgccatctccagaatttgtctcttccagtaaaaatattcccagagagcaacttatatwttttttgtaattccatttacaacctcccattaatttttgtccatccaaagttttatttatccagtctatcctgaataaatatttcaaaaacaattatttacaaaagcatcagaatgaaaacaattacatttagtttaattgggtgcttgagaaagtttttaacaacaaaaaaagtgagataaaaacacaaagttgcaaaaaaaagaagttattcaaattggaaatgcagatttgtggtgaaacagaagtaaacagagcta

SEQ ID NO: 657750 - DNA, 604 bp, Homo sapiens
ttttccttgcctgattactctggctaggacttccagtattatgttgaatagggctggtgagagtaggcatccttgtcctgttcaggtctcaaagggaatggctccagcttttgcctgttcagtgcgatattggctgtgggtttctcacagttggctcttattatttttaggtatgttcctgtgatgactcatctcttgagggattttatcatgaagggatgttggattttaacaaaagcttttcctttgtcacttgaaataatcatgtggtttttgcttttaattctacttacatggtgaattgcatgtattgatttgcatatgttgaatcagccttgcatcccagaaataaagcctacttaatcatggtgtgttaacttattaatatgccaccagatttggtttgctagtattttgttgagaatttttgtgtctatgcacataaaatatatttttgtttctatgttaatcaagggtattggtgaacatctcagaggggttggagggcagcagggcctgcagaccagacatgccctaatcccataggggagtcaaygccactttctcctggctcagtggtcagctagggctagagcttctcaga

SEQ ID NO: 657751 - DNA, 604 bp, Homo sapiens
ttttccttgcctgattactctggctaggacttccagtattatgttgaatagggctggtgagagtaggcatccttgtcctgttcaggtctcaaagggaatggctccagcttttgcctgttcagtgcgatattggctgtgggtttctcacagttggctcttattatttttaggtatgttcctgtgatgactcatctcttgagggattttatcatgaagggatgttggattttaacaaaagcttttcctttgtcacttgaaataatcatgtggtttttgcttttaattctacttacatggtgaattgcatgtattgatttgcatatgttgaatcagccttgcatcccagaaataaagcctacttaatcatggtgtgttaacttattaatatgccaccagatttggtttgctagtattttgttgagaatttttgtgtctatgcacataaaatatatttttgtttctatgttaatcaagggtattggtgaacatctcagaggggttggagggcagcagggcctgcagaccagacatgccctaatcccataggggagtcaacgcmactttctcctggctcagtggtcagctagggctagagcttctcaga

SEQ ID NO: 657752 - DNA, 518 bp, Homo sapiens
gataatatgtaataagttgccccagctaaaatgataacaaatatgcttgtgaaacttacaaaataatgaaaatatatttggaaaaatatgaataaaactactataaacgttcctgtgcaagtttttgtgtggacacaaatttttaacaaatttaggtaaataccaaggagcctaccttagaccttagaccatttgggctaatataacaaattaccataaactgggcaggttataaacagtagaaatatttcrcttatatggtttacagtaggaatatatagtttctattgattttgaaagatagggttctactttatttttataccaaaataaattacagacacgtaacatatttgaacaaaagtcatacagttttatgaagaatgagtaaatgttttgagtgaaaaattatttctaagccagaaatgaaatttagaaggcataaaggtaaaatttgactacataagtaattaacatttgaatttcaataaataacagtatccaagttagtaaaaata

SEQ ID NO: 657753 - DNA, 518 bp, Homo sapiens
gataatatgtaataagttgccccagctaaaatgataacaaatatgcttgtgaaacttacaaaataatgaaaatatatttggaaaaatatgaataaaactactataaacgttcctgtgcaagtttttgtgtggacacaaatttttaacaaatttaggtaaataccaaggagcctaccttagaccttagaccatttgggctaatataacaaattaccataaactgggcaggttataaacagtagaaatatttcgcttatrtggtttacagtaggaatatatagtttctattgattttgaaagatagggttctactttatttttataccaaaataaattacagacacgtaacatatttgaacaaaagtcatacagttttatgaagaatgagtaaatgttttgagtgaaaaattatttctaagccagaaatgaaatttagaaggcataaaggtaaaatttgactacataagtaattaacatttgaatttcaataaataacagtatccaagttagtaaaaata

SEQ ID NO: 657754 - DNA, 518 bp, Homo sapiens
gataatatgtaataagttgccccagctaaaatgataacaaatatgcttgtgaaacttacaaaataatgaaaatatatttggaaaaatatgaataaaactactataaacgttcctgtgcaagtttttgtgtggacacaaatttttaacaaatttaggtaaataccaaggagcctaccttagaccttagaccatttgggctaatataacaaattaccataaactgggcaggttataaacagtagaaatatttcgcttatatggtttacagtaggaatatatagtttctatwgattttgaaagatagggttctactttatttttataccaaaataaattacagacacgtaacatatttgaacaaaagtcatacagttttatgaagaatgagtaaatgttttgagtgaaaaattatttctaagccagaaatgaaatttagaaggcataaaggtaaaatttgactacataagtaattaacatttgaatttcaataaataacagtatccaagttagtaaaaata

SEQ ID NO: 657755 - DNA, 670 bp, Homo sapiens
aaatgtcaaagtagtttgaattctttaacactgaaaatggtatttggtgtgtggaagggatattttggatcactaaccagaaaatgttgttgtttagatatgtatttagacatatagatagataggatagagaaatataatttatttgttatacacagccaggtaggaacagggcaggcattgttttcttccttttatatgtaagccttaaggggttaagcaccatggttaggattactaagagaataaatgcagagtgaatgttaaacactggtttgtctggccccaaaactcttacttgggtcctgaagcatccggacactcttctttgtctctcaagaacataagcaatctctattttgatattatcaatattttcttctgggtctcaggatcctagctatattccctcatcggtacattaactttgccattgtcatttagtagcraaaggtgtggtaagtatgttaggtaataggaactgtaggtttgtgtttctgtgtatctgtgtccatgtgaacaggcacattaatggtggcagttagtaagggtgcaattgctacagaaaatgactcacaagactaaagtaatccactccaatggcagagtcctctcgtgggtctcatgaagataagatgcaaatcatcaccccatgctaccaataaagtat

SEQ ID NO: 657756 - DNA, 670 bp, Homo sapiens
aaatgtcaaagtagtttgaattctttaacactgaaaatggtatttggtgtgtggaagggatattttggatcactaaccagaaaatgttgttgtttagatatgtatttagacatatagatagataggatagagaaatataatttatttgttatacacagccaggtaggaacagggcaggcattgttttcttccttttatatgtaagccttaaggggttaagcaccatggttaggattactaagagaataaatgcagagtgaatgttaaacactggtttgtctggccccaaaactcttacttgggtcctgaagcatccggacactcttctttgtctctcaagaacataagcaatctctattttgatattatcaatattttcttctgggtctcaggatcctagctatattccctcatcggtacattaactttgccattgtcatttagtagcaaaaggtgtggtaagtatgttasgtaataggaactgtaggtttgtgtttctgtgtatctgtgtccatgtgaacaggcacattaatggtggcagttagtaagggtgcaattgctacagaaaatgactcacaagactaaagtaatccactccaatggcagagtcctctcgtgggtctcatgaagataagatgcaaatcatcaccccatgctaccaataaagtat

SEQ ID NO: 657757 - DNA, 369 bp, Homo sapiens
ttcaataaactgctttcttttgtaaattgcccagtcttgggtatgtcattattaggagcgtaaaaacagaggaatacaatactatagccaagatcatgtcactgcactccagcctgggtgacacagcaagactctgtctcaaaaaaaaaacaaaaaacaaaaaaacacataattggccattcatacatgttcaagttagcaagctgtggatgctaccttcaaaattacaaataaaatttgcaccagtaatatagttcatatttaggagtgactgccacaactgaaaatttaccaagaaatattgataactaatgtttcaggtgaaagggtcatatgttttaatcaccagytacttatttattaatttac

SEQ ID NO: 657758 - DNA, 446 bp, Homo sapiens
gtaagtatttgatacaaatcctgactgtattttcacaagaatacatgatttggggtcgggcgcggtgcctcacgcctgtaatcccagcactttgggaggctgaggcaggcggatcacgaggtcaggagatccagaagattctggctaacatggtgaaaccctgcctctactaaaaatacaaaaacaaaattagccgagcgtggtggcgggcacctttagtcccagctacccaggaggctggggcaggagaatggcgcgtacctgggaggcggaggttgcagtgagccgagatagcgccatgcactccagtgtgagactscgtctcaaaaaaaaaaaaaaaaaaaaaaaaaaaaaaaaaaaaaaaattaatacatgatttgattttaaatattaaatgactttctttttattttccttctcttctctctcacattcttaatgcttta

SEQ ID NO: 657759 - DNA, 596 bp, Homo sapiens
gggaaataagacatgtggacagatgtagtgcactatggtctataacagagatatctacaaagctgaatgaaattttggtgaagctaatgtgggaaagcagccttcacagaagcacagacaatacatttgggttttcaaagaaaataataaaatgtttttcagattgggtcaaaaagacatggcatgcctgtaggaaagttcaacatatggaaggccttttctgcatctactgagataaccatgtggtgtttgtctttcgttctgttgatgtgataaatcacatttattgttttgcatatgttgaaccaaccttccatctcataaagcctacttcatcattgtggataagtttttacccacaatttaatctactggatttggtttgccagtattttgtggagtatttttgcatcgatgttatcaaggatatttacctgaggttttcttttttttcttgtatcyccaccaggctttggtatcagaatgatgctggcctcttagaatgagttagggaggaatcccttcttctcaattttttttttagatattctcggtaggaatggtaccagctcttctttgtacctctggtagaattc

SEQ ID NO: 657760 - DNA, 586 bp, Homo sapiens
gtttctgggcttgtattggttggtaggctatttattactgcctcaatatcagaactcattattggtctattcagggattcaattccttactggttcagtcttgggaggatgtatgtgtccaggaatttatccatttcttctagattttctagtttacatccataaagatgtttattgtagtgtctgatggttgtttatatttctgtggggtcggtggtgatatgacccttatcatttctgactgtttatttggatcttttttcttttctattttgttagctagttactggtctattttartaatttaaaaaaaaaacaactcctggattcattgatcttttgaatatagttttgtctctttttccttcagttcacctctgatcttggctatttcttgtattctgctagctttggggttcgtttgctgtaggttctctagttctttttttgtgatattaggttgctaacttgaggtctttctagatttttgatgtgggcatttaatgttataaaatttcctcttaacactgccttaagtgcatcccagagattctggtatggtgtctctttgatctcattagcttca

SEQ ID NO: 657761 - DNA, 396 bp, Homo sapiens
gggcatttaatgttataaaatttcctcttaacactgccttaagtgcatcccagagattctggtatggtgtctctttgatctcattagyttcaaagaacttcttgatttgtgccttaatttcattttttactcaagagccattcaggagaaggttgttgaattactatatataatagttgtgtggttttgagttaatttcttaatcttgatttctaatttcattgtgccacgatctgaaagacactttgttatgattttagttcttttgcatctgctaaggagtgttccacttccaattatgtgatcaattttagagtaagtgccttgtggcaatgagaagaatgtatattctgttgtttttgggtggagagtccagtaggtatcaggtccattgga

SEQ ID NO: 657762 - DNA, 553 bp, Homo sapiens
ctttctcactcctggcaactatccctttaccttccatagttgcagtgggggcataagcctgtcattaccttctgtatctcactctaaaataaaattatatttatttgtttgtttgtaagtatgtatttctgatattctaagtcactgttaacatgtattgcctaataattttatagatgaatcattagaaatttaagtgtctgtttttctttcttaaaatgagaaaagtaattaatagccaccctcaatatcacactactacttttttagcagaatattgaaaacagtttatatcttacttcatttctagtctattatttattcattgtattgctgacataaatattttaagagaaaaaaggatcaaagatttgcattattaggaaaatactttgttagatttttgtcaattactggagaaagctgtattaaccaatcatttaagttagtgcttatgatgataattgcatttctttaataatakaaaatacagaaattgtctagttctgtttcccatatgtaatgccttctgttctgacagtatgatgctaaa

SEQ ID NO: 657763 - DNA, 468 bp, Homo sapiens
atattttggatattaaccccttggcaaatatactgtttccaaatattttctcacattacttaggttgcctttttagtttttatttttttgttttctttgctgtggagaagctttttagtttgatgcaattccacttgcttatgtttgctttcattgcctatgcttttggtgttatatccatgacataattgccaaggtcaaggtcaaggaggtttttkttgtatgatttccacaaggatttttacagttttaggttttacactaaatatttaaataatttcaagtttatttttgtatatgttttaagatatgagtttaatttcattcctttgcatgtaaatatcctgttttgccaacactatttattgaagaccatattttccttattgtctattcttgacactctcatcaaatatacaacaacgaagttatgctgaaaacagggtcttcacagcagtggttatggca

SEQ ID NO: 657764 - DNA, 547 bp, Homo sapiens
ctaggaacagaaaaaatatagtctgtttctaagaaattctgcttccttagttgctcacagccctgtgacttattttggggaacaaaagtgagtacacaaaaaattacttgggatgtcttattttgaccaaaaattgtttgtttgtgttaatctggtcctcatatttgtggacaatcatgctaggtacttttaatcactttgaaattgtttgcctttgaaaagacactagccatggcaagtgacaaatttccagtagttagagtaagtccatgaccaaaagacgtgtcactgatacctttattaatcttttctccattcttaattagtagaatatacaatataccgaaaaattgcccccaactcacaggtaaaaaaaaaaaaacacawcaatttaaacatagatgtagactaaattaaacttcttatgaaaacgaatatttctgaagagaattctctatatttaacctttaaatttctataaaaacatcatacaagcacatacacacacacacacacaaacacacaaacacctacttttccttgtaga

SEQ ID NO: 657765 - DNA, 617 bp, Homo sapiens
aagtgtctatcaatggacaaatagataaaatgtggtatatacacacaatggaatatgattcagccttaaaaataaagaaaattctaactcatgatacattatggatgaatctggaggaggatattatcctacatcaaataagccagtcccccaaagacaaatactatatgattccacttgtatgagttacctagagtagagatattcatagaaaccaaaaaagaatggtggttgctgggggtaagggagaggcagtagggggaattttttattgggtataaagttgcagtctgtcaaaatgaaaagaattctggagattagttgtacaaccatatgattgcattttaaatartgaaatataccaataacaaaaatgtttaatattgcccatccattatgttaaaaaattgaaatatgtaaaagaacacccacatatatgaaggagtatattcaatatagattaatcttggaaattttattttctatgaaatatgacattttaaaatactacatactgtgatacagtttctccaaaattgataaacaaatacacatcaatggcttgttgtttagaaatacatgcagtaaaacatttttttcaaaagcaatggtaaaca

SEQ ID NO: 657766 - DNA, 626 bp, Homo sapiens
tgttgtccttgcgatagtttgctgagaatgatggtttccagcttcatccatgtccctacaaaggacatgaactcatcattttttagggctgcatagtactccatggtgtatatgtgccacattttcttaatccagtctatcattgttggacatttgggttggttccaagtctttgctattgtgaatagcaccgtaataaacatatgtgtacatgtgtctttatagcagcatgatttataatcctttgggtatatacccaaagtaatcggattgctgggtcaaatggtatttctagatccctgaggaatcgccacactgacttccacaatggtggaacttgtttacggtcccatcaacagtgtaaaagtgttcctatttctccacatcctctccagcacctgttgtttcctgactttttaatgatcgccattctaactggtgtcagatggtatctcattgtggttttgatttgcatttctctgatggccagtgatgatgagcacttttttatgtgtcttttggcttcataaatgtcttcttttgagaagtgtctrttcatatcctttgcccacttattgatggggttgtttgttttttttcttgtaaatttgttggagttcattgta

SEQ ID NO: 657767 - DNA, 553 bp, Homo sapiens
aaatatttaattaattttgaataaatttttgtatatggcaaaatgtaagtgtccagttcaattgtctgcatgtggctagccaattatcccaacaccattcaatgaataggaagtcctttctcctttgcttatttttgtcacccttgtcaaagatcagatggttgtaagtgtgtggctttataatgaactataggttggaatgtaaattakcccagccactatggaaagcagtctggagatttctcaaaaatattaaaacagagctaccatttgacccagcaatcacattattgagtatatatccaaaagaaaataagttattttaccaaaaaatcacatgcacttgtatgttcattgttgtgctatagtaaaaataacaaagatatcgaatcaacccaggtgcccaacaatggtaggttgaataaagaatatgtggcacaaaaacacaatagaatactacacagtcatgaaaaaagaataaatcatgtcactggcagcaaaatggatcgagctgaaggccataaaatcctaagcaaataaacacagaaacaga

SEQ ID NO: 657768 - DNA, 613 bp, Homo sapiens
ttatcaaatattcatttttcagctattttctccgagaatgtgaattgtctttatattgactgaacaatgacttttgaaaagcagaatatttttaacattagtaaattcctataaatcaatttttatttttatgtattgtgcatttagataattatttaaaaactcatcacaaaaccaattatcaaatagatttttttctcctacatctgctactggaagatttgttttttcacattttgcatttaggtttatgctccatatttgagttaatttttttttgaaagttatgaagtccatgtctaagttgtggccataatttttgcagtttttgtgaaacaacattccttgatatagctagtttactaagaccaatattttaaaaatatataaatagatgtaaattgtactaaataaatttttcctccatcaatgtgtttctcttttatttgttaatgtggtaaayggcatttatagatttttctgtgtaaaataatccttggttttgtagaataagccacatcatttctgaaagaatatgcttttatataccactgtatttataatagcttgaaattttttgtgtacaagtttttgcatctacatttatgcctac

SEQ ID NO: 657769 - DNA, 601 bp, Homo sapiens
ggcagaggagaggtggtatgagttccagagcctaggaattcagagtccatgcagcctctgttctcatgttcttggaaacttgrtaacatgaggtgagaaatccagtgtaaattactagaggataagaggacacatgccagaatatcgaggcatccagcaggaatgaccttgggtccactccttaatgctgtccatgacatattttagtattggtctttctcttaggagcacacaaatttggccactttcctatctttttcataacctcataattcactatagatgttactttagcactttatagagcagcctcgtatagaaatctgtgaatttcctcttctttctagataggctcgattaattaaccttaaactcacacccaatagcacctctaactcatgcttgaacaaagctcatccaacacacaaatttttttccctaagacatatcacagctttcttgtgctgaggaacattagacagtattttagtgctactcttgggggccaatatagacagtgaaataacaacaacaacaacaaaaaagcacatacatgtggaaaatatggcactaaacagactccaaaaaggacagctgtttt

SEQ ID NO: 657770 - DNA, 617 bp, Homo sapiens
ccaatatgatgtggcagaggagaggtggtatgagttccagagcctaggaattcagagtccatgcagcctctgttctcatgttcttggaaacttggtaacatgaggtgagaaatccagtgtaaattactagaggataagaggacacatgccagaatatcraggcatccagcaggaatgaccttgggtccactccttaatgctgtccatgacatattttagtattggtctttctcttaggagcacacaaatttggccactttcctatctttttcataacctcataattcactatagatgttactttagcactttatagagcagcctcgtatagaaatctgtgaatttcctcttctttctagataggctcgattaattaaccttaaactcacacccaatagcacctctaactcatgcttgaacaaagctcatccaacacacaaatttttttccctaagacatatcacagctttcttgtgctgaggaacattagacagtattttagtgctactcttgggggccaatatagacagtgaaataacaacaacaacaacaaaaaagcacatacatgtggaaaatatggcactaaacagactccaaaaaggacagctgttttgaat

SEQ ID NO: 657771 - DNA, 601 bp, Homo sapiens
ggcagaggagaggtggtatgagttccagagcctaggaattcagagtccatgcagcctctgttctcatgttcttggaaacttggtaacatgaggtgagaaatccagtgtaaattactagaggataagaggacacatgccagaatatcgaggcatccagcaggaatgaccttgggtccactccttaatgctgtccatgacatattttagtattggtctttctcttaggagcacacaaatttggccactttcctatctttttcataacctcataattcactatagatgttrctttagcactttatagagcagcctcgtatagaaatctgtgaatttcctcttctttctagataggctcgattaattaaccttaaactcacacccaatagcacctctaactcatgcttgaacaaagctcatccaacacacaaatttttttccctaagacatatcacagctttcttgtgctgaggaacattagacagtattttagtgctactcttgggggccaatatagacagtgaaataacaacaacaacaacaaaaaagcacatacatgtggaaaatatggcactaaacagactccaaaaaggacagctgtttt

SEQ ID NO: 657772 - DNA, 601 bp, Homo sapiens
ggcagaggagaggtggtatgagttccagagcctaggaattcagagtccatgcagcctctgttctcatgttcttggaaacttggtaacatgaggtgagaaatccagtgtaaattactagaggataagaggacacatgccagaatatcgaggcatccagcaggaatgaccttgggtccactccttaatgctgtccatgacatattttagtattggtctttctcttaggagcacacaaatttggccactttcctatctttttcataacctcataattcactatagatgttactttagcactttatagagcagcctcgtatagaaatctgtgaatttcctcttctttctagataggctcrattaattaaccttaaactcacacccaatagcacctctaactcatgcttgaacaaagctcatccaacacacaaatttttttccctaagacatatcacagctttcttgtgctgaggaacattagacagtattttagtgctactcttgggggccaatatagacagtgaaataacaacaacaacaacaaaaaagcacatacatgtggaaaatatggcactaaacagactccaaaaaggacagctgtttt

SEQ ID NO: 657773 - DNA, 601 bp, Homo sapiens
ggcagaggagaggtggtatgagttccagagcctaggaattcagagtccatgcagcctctgttctcatgttcttggaaacttggtaacatgaggtgagaaatccagtgtaaattactagaggataagaggacacatgccagaatatcgaggcatccagcaggaatgaccttgggtccactccttaatgctgtccatgacatattttagtattggtctttctcttaggagcacacaaatttggccactttcctatctttttcataacctcataattcactatagatgttactttagcactttatagagcagcctcgtatagaaatctgtgaatttcctcttctttctagataggctcgattaattaaccttaaactcacacccaatagcacctctaactcatgcttgaacaaagctcatccaacacacaaatttttttccctaagacatatcayagctttcttgtgctgaggaacattagacagtattttagtgctactcttgggggccaatatagacagtgaaataacaacaacaacaacaaaaaagcacatacatgtggaaaatatggcactaaacagactccaaaaaggacagctgtttt

SEQ ID NO: 657774 - DNA, 562 bp, Homo sapiens
gagttaatgtccaagataaatgaaactcctataacttaataataaatgttaaaaacaaaaacaaataacctgattgaaaaatggacaaaggaactgaataggcatttttccaaaaaaaaaaaaacatacaaatgaccagccagtatctgaaaagstgctcaacatcactaatcggtagggaaatgcaaatcaaaaccacaaagaaatatcacttcatatctgttaggatggctattataaaatggaaaaagataaatattgacaaagatgtggagaaaagggaacatttgtacatcattggtgggaatacaagttgatgcagccactataaaaaacagtatggagattcctaaaaaacttaaaaatagaactatcatatgatccagcaatatcatgtctgggtatatatccaaaggaattgaaatcagaatcttgaagagatatctgcactcccatactcattacatcattattaacaatagccaatactcagaagctatgtaagcgttcatggatggatgaatggataaagaatatgtagataggacaaaccctcagccaa

SEQ ID NO: 657775 - DNA, 596 bp, Homo sapiens
gcccagcctggctttttgtccttaggtttattgctgaatagttgcaaaatgggtccaaagcaccacagttatccataatagcwtcttgcacggaaacaaaggtacatagaagagaatctttgcaacccatgagactttcctttatgttttactgtctagaaggggctcacgtgcccaaccctagaccaatcactggaaataagaaatgaaatgtctgtaattaacttagttcagtcacagttcctcccctggagctggggtagaaacccacattcccagagcatgttttgcctgcattatacctgagcaaacttgggattctattagcaaaaaggaggagagaatgacttttggaaaggcaactaacatctgtcacatgtgctatcctgaattattctttatttttatatacatttatattgtccctttatattattaccctgatagcaggagtcaagtcttagactttctttgcattctccacagagcttgctccagcggtgagcacaagaaatatttgtcgattggttggagaataaaaagaaatcacagtctaatgtcaaagagttgaagaccctgtcattcacattgcctcc

SEQ ID NO: 657776 - DNA, 549 bp, Homo sapiens
tgttctcacttgtaagagggagctaaacagtgggtactcacggacataaagagagccacagtagacaatggggactactggagtggggggaaagggttgaaaaactgttgggtattatactcactgcctgggcgacaggatcatttgtaccccagactccagcatcgtgcaatatacccaggtaaccaacctgcatatgtacactctgaatctaaaataaaagttaaaattataaaaaaagatgctcacaaatatttattgaatgaatgaacatatggatgaatggctgagtgagtgaattttaattttattttttagatttaatttatttwaaaaatttctatgaaatattagatatacaaagagataaaaagactaaaatgatgaatcactgtaaactcaccaccttgccttgcattatgaatacttcatgcccctttgaggttgtatctcccttccttcttctcagggaagtcattatacagaacttgttcatttctgtctttactctttatatcttttttttttttttttttgagatggagtctc

SEQ ID NO: 657777 - DNA, 549 bp, Homo sapiens
tgttctcacttgtaagagggagctaaacagtgggtactcacggacataaagagagccacagtagacaatggggactactggagtggggggaaagggttgaaaaactgttgggtattatactcactgcctgggcgacaggatcatttgtaccccagactccagcatcgtgcaatatacccaggtaaccaacctgcatatgtacactctgaatctaaaataaaagttaaaattataaaaaaagatgctcacaaatatttattgaatgaatgaacatatggatgaatggctgagtgagtgaattttaattttattttttagatttaatttatttaaaaaatttctatgaaatattagatatacaaagagataaaaagactaaaatgatgaatcactgtaaactcaccaccttgccttgcattatraatacttcatgcccctttgaggttgtatctcccttccttcttctcagggaagtcattatacagaacttgttcatttctgtctttactctttatatcttttttttttttttttttgagatggagtctc

SEQ ID NO: 657778 - DNA, 660 bp, Homo sapiens
gctattagtgctgcgtaactcatcaccacatttcaaagatcaggatatggagaacaacacaatagggacaagtagaaaaaaacttgtggaagtccctgttcattcccaatratgggaccttttaatagaaatgcaaaaaagtggtgtgccatgggaaatctggatgtagtaatgagctaaactttttttttctatcttcagatagtgtcaaatcctacttcactgcaggtaaatattttctggaacttgtttgtatttataactcattatgtatctcagttctttctgtttggttatctctggtttattttaaagtatatcccttaggaaccctattctgaaagagctggttaatcaggacattgagccataataaaatgatgggaccctctttctagccttggggaaaatctctaagaaaacatacactggctttaggtgaaagtgataaagtgctttcactgtggaggagggctaactgattggaagcccagtgaagacccttgggaacaacatgctaaatggtatccagggtgtaaatatctgttagaacagaagggacaagaatatataaacaatattcatttaactcattcacttgaggagtgtctgctaagaactactgagaaaacaccatcactaactagaagaattgatgat

SEQ ID NO: 657779 - DNA, 532 bp, Homo sapiens
aattcactgttcacagtgaccttaaagaacataggtactgtgaataatgataatcacctatatatcaaaacccacatcatctatggctaatagcaggtttggaagtacaatataaaaatattcaagtgaaaatagcaacacagatatactaatatagcaatgaatttaaaatcattttgatgttattaaatactttgttcttttctttctttagaatttacatggcctgaggacagataatatcagatttawtgctacaaccccagatcctgaagagtgtctggcacatataaggaacccaattagtggctagtattattgctttctgttggagttttgccttattttattttattttttatactagttttagaattatgaactaaatgatgagatttaaaaattgtactagaaaagggaagtgaatagtgactatagggtcaactttataagagcaataaaaaaaatgtagtgagaaatgcagagcaaattaactcacatgcagttctacaaattaaaacacacagtacaa

SEQ ID NO: 657780 - DNA, 498 bp, Homo sapiens
gtactgtgaataatgataatcacctatatatcaaaacccacatcatctatggctaatagcaggtttggaagtacaatataaaaatattcaagtgaaaatagcaacacagatatactaatatagcaatgaatttaaaatcattttgatgttattaaatactttgttcttttctttctttagaatttacatggcctgaggacagataatatcagatttattgctacaaccccagatcctgaagagtgtctggcacatataaggaacccarttagtggctagtattattgctttctgttggagttttgccttattttattttattttttatactagttttagaattatgaactaaatgatgagatttaaaaattgtactagaaaagggaagtgaatagtgactatagggtcaactttataagagcaataaaaaaaatgtagtgagaaatgcagagcaaattaactcacatgcagttctacaaattaaaacacacagtacaa

SEQ ID NO: 657781 - DNA, 564 bp, Homo sapiens
cacagatatactaatatagcaatgaatttaaaatcattttgatgttattaaatactttgttcttttctttctttagaatttacatggcctgaggacagataatatcagatttattgctacaaccccagatcctgaagagtgtctggcacatataaggaacccaattagtggctagtattattgctttctgttggagttttgccttattttattttattttttatactagttttagaattatgaactaaatgatgagatttaaaaattgtactagaaaagggaagtgamtagtgactatagggtcaactttataagagcaataaaaaaaatgtagtgagaaatgcagagcaaattaactcacatgcagttctacaaattaaaacacacagtacaaaattaattgacaagaggagagagaattcagaaaacggcagaataggaggctcctgaccatttctcttcccacagacacatcaagtaaacacctacacatggatcagttctctcagagagaaagtcagaatgcagttgaaagactcctacacaaaaaaagcctgagaaaat

SEQ ID NO: 657782 - DNA, 557 bp, Homo sapiens
atgtgtagaaaacaaaaagtgaagttacaaattattttgacagtaatactagcttttataattgyttgcatatttacattcagtgagatctttgtattttcataattatgttaatcactgtctagtgtactcatttaaacagacagaaatcactttagtttttcttacagggcagatctaatgataacaaactctctcagccttggtttatatgggaatatcttcatttcccactctcttatgaaggacagttttgctggatgtaaaaatttttgattgatagtttttcttttggcactctgaatatattggcccacttcttccttgcctccaaagtttccaatgagaagtttgcagacaaacttattaaggatcccttgtatgtgatgagtcacttctctcttgctgttttcaggattctctctttgtatttgacttttgactgtgattataatgtgtgttagtatggttctctttatgttcatcctagttagagttcattgagcattttgaatgtttatatttatgtccttaatcaaacttgtgatgttttcaac

SEQ ID NO: 657783 - DNA, 552 bp, Homo sapiens
ccaaaacccagaattgaaccagtctcctttagatcttcaggctgatgccctcccaaccgagctatctcagcttactgtagactgaaaattttattcaatttctctttcaatacttcgattgtttccaactttttagctttcaggtttcttaagtacttttattatacaatgtatttacccactaagaaagacttggaacttattgactcctacatatgatggctgaatccaattccctggcagtgtggaatggataggtggaggagggagatagaagaaaagtaacaggaatkaaaaaacaaacaaaaaactttctgctcttccacatcctgttggttgagccagacacagcaaagaaaatttaaaaataaaaataaaaaataaaatgtggtggcgttctttgtttttcttttctttttgtctttaataatcttcgaagatgtggagaattggaacccaaggttaatttctgttaatgtggggtcaggtttctgtctcctagcgatgattttgaatgagctattaatcctttgttttatcctctttcatcta

SEQ ID NO: 657784 - DNA, 411 bp, Homo sapiens
ttatcatccacctttatccacagtcctcctcatgattagcacattgtcaataaatatttactaagctgaactgaaagtttttattatgcataaatactaagatgtccatgtccatggtcatgcaggacagcagaagtcctatttttttttttttacmagtgtatctattactaccaattgcttcaaggtcaggagccaactcatgtattagacatgtaaatcttgtgaaaatattcatattggaaacagcatgtagcaagtgcaaacagaactaaataaatccttaaatttatcacagtcccttcaaagtatgaattcttcttctagcattacatcaaatttgataaaatcaaaaatattttatctcaatgttttaaaagtgttgatgctgtatacattgagttgttgtac

SEQ ID NO: 657785 - DNA, 626 bp, Homo sapiens
gtccctgtgactctttctcttctgggttgcaccatatgttcctaactgatatcctttgatccataaattattgttggagtctgtgatctttctttttcttttccttttttttttttttttttgagacaggctggagtgcaatggtgcggtctcagcacactgccacctccaccttccaggttccagcaattctcctgcctcagcctcccgagtagctgggactataggcaygcgccaccacgcccagctaatttttgtatttttagtagaaatggggtttcaccatgttggccaagatgatctcgatctcttgacctcgtgatccacccacctcggccttccaacgtgctgggattacaggtgtgagccacagcacctggccatctgtgatctttctaaatcacaaatctggcagtgctagtccagtgctcaaaacccttcagtttttgcctaaagtccaagctgcttagcgcaacttgcctgatacccttgatctgaccccaaactcttagggctgtactcatacagcacagtgggtgttacggactgaatatttataatcacgcccccaaatcctaacaccaaccctgtggtgatgtattaggagacagagcctttgagactga

SEQ ID NO: 657786 - DNA, 585 bp, Homo sapiens
gatgacctgccagcagagacgagccacccactctagggcctcctctctgctggcagctgctcagatgatgggacaaccagctgcagagaggagctaccctctctgctgatagctggacacttgttgagatgacttgcctagcagagaggagctaccctctctgctaggagctgaacactcatcaggacaccctggctgcagcaaggagcatccccctgtgggtttcccctcagttgttctatcactcagtagagctcctcctcatcatgctcactctccacttatctgcctacctcattcttcctgggcacaggacaagaactcaggatctgctgaataaggctaaaagagctgtaacacaaacagagatgagatatgccccattgttcaccatgtcgcaggtgaagagaaggaaagaaatgctgcagcccttcagggaccccagacaygggagctccttgagttaagcccgtgactccctctttgaggccctgtggttcctggcatctccaagcttctgggaagcattatattcctcagtgccagctgtggaagctgtttgcagggcacctggtccagctgcag

SEQ ID NO: 657787 - DNA, 585 bp, Homo sapiens
gatgacctgccagcagagacgagccacccactctagggcctcctctctgctggcagctgctcagatgatgggacaaccagctgcagagaggagctaccctctctgctgatagctggacacttgttgagatgacttgcctagcagagaggagctaccctctctgctaggagctgaacactcatcaggacaccctggctgcagcaaggagcatccccctgtgggtttcccctcagttgttctatcactcagtagagctcctcctcatcatgctcactctccacttatctgcctacctcattcttcctgggcacaggacaagaactcaggatctgctgaataaggctaaaagagctgtaacacaaacagagatgagatatgccccattgttcaccatgtcgcaggtgaagagaaggaaagaaatgctgcagcccttcagggaccccagacacgggagctccttgagttaagcccgtgactccctctttgaggccctgtggttcctggcatctccaagcttctgggaagcattatattcctcagtgccagctgtggaagctgtttgcagkgcacctggtccagctgcag

SEQ ID NO: 657788 - DNA, 589 bp, Homo sapiens
aaaaaaatagagaaaacaaactgtttcmtatttattcctggattgggggaaaccattgctatctttcccagagttaaatatattataccctaagctcttaagaacgtacttacaaaaaaattaattctaatcctataactatgtagaatagtgatttccaaatttatgtaataaacaaatctttttaattatctaaaataaaggagaagtaatcttaagttttgttttagatgttctcactctccaaaataacatccctaatctcttttatgcccatttttcttgaatcagtttttttctaagaccaattacattagtaaacacttccactttccaacagcccagagcatttgtagctgtatcttcattagagccatttcgcagttcacaagctaagttctgaggtattttatcagaattcattagatccacaagagactgacagaatttctcataaatgtcacctaatgggcttaacactatacctcagtaaatgcatattttagttaacctatactttaaacagcttaattagaacttaattgctggaattctcttccctaaaaactagtccttaatggaattcata

SEQ ID NO: 657789 - DNA, 589 bp, Homo sapiens
aaaaaaatagagaaaacaaactgtttcctrtttattcctggattgggggaaaccattgctatctttcccagagttaaatatattataccctaagctcttaagaacgtacttacaaaaaaattaattctaatcctataactatgtagaatagtgatttccaaatttatgtaataaacaaatctttttaattatctaaaataaaggagaagtaatcttaagttttgttttagatgttctcactctccaaaataacatccctaatctcttttatgcccatttttcttgaatcagtttttttctaagaccaattacattagtaaacacttccactttccaacagcccagagcatttgtagctgtatcttcattagagccatttcgcagttcacaagctaagttctgaggtattttatcagaattcattagatccacaagagactgacagaatttctcataaatgtcacctaatgggcttaacactatacctcagtaaatgcatattttagttaacctatactttaaacagcttaattagaacttaattgctggaattctcttccctaaaaactagtccttaatggaattcata

SEQ ID NO: 657790 - DNA, 589 bp, Homo sapiens
aaaaaaatagagaaaacaaactgtttcctatttattcctggattgggggaaaccattgctatctttcccagagttaaatatattataccctaagctcttaagaacgtacttacaaaaaaattaattctaatcctataactatgtagaatagtgatttccaaatttatgtaataaacaaatctttttaattatctaaaataaaggagaagtaatcttaagttttgttttagatgttctcactctccaaaataacatccctaatctcttttatgcccatttttcttgaatcagtttttttctaagaccaattacattagtaaacacttccactttccaacagcccagagcatttgtagctgtatcttcattagagccatttcgcagttcacaagctaagttctgaggtattttatcagaattcattagatccacaagagactgacagaatttctcataaatgtcacctaatgrgcttaacactatacctcagtaaatgcatattttagttaacctatactttaaacagcttaattagaacttaattgctggaattctcttccctaaaaactagtccttaatggaattcata

SEQ ID NO: 657791 - DNA, 420 bp, Homo sapiens
actagaaaacattatattaagtaaaataagtcaagcaaagaaagacaaatattgcattgttctaactcacatgtggaaatttaaaaagtgaatcttatgaagatagtgaaagattggtggttatcaaaggccaggaggggtagagagaggaaactatttaaaaacgctgattaaggagtacaaatatatagttagatagaagaaataatgcctagtgttcggtagaacagtagagtgaatatagttaacaataatctatggaatatttcaaaatagaagagaataatttgaatgttcctagcataaagcaaagataaatatttcatttaaatatcaaaaaattggataycccagtctccatgatttgatctttacacattatatgaatgtataaaattacatgtactcagaaaatatgta

SEQ ID NO: 657792 - DNA, 605 bp, Homo sapiens
ctatattgtctaatcactattctcagtgaacttcacatatataatcaagccaaatatatgactaaaacttattttccaaataaattagtcctactattcrtctttggtagaaatgggggactagagagagaaaatttatgttttcagcagaaaactatagtacacctgttattagactctagctttgtccattgctttttaatatttattatttccctacaaatctggagtggaccttgaattctttcatgtctacaagtatttaaactaatattactaatatttccaaatttctttccatttttctggaaatcactaaaattaaaaacactttttcctgaagtgtttttggaatcacttggaatcactaaaattaaaaacactttttcctgaagccccggaagctgaagccagaaaatttgatacaaacttggaaaaaaatcatcacagcaacttaatatatgaacagactctgtgcctgttgataaatagactgctcagaaagctcactggaacacctgaggcaaactacaaaccaggaaaaatgtgtcaggttgccactatctgctctcacttcctgaagatgcttcaagcccaacatctaa

SEQ ID NO: 657793 - DNA, 582 bp, Homo sapiens
cctggcacatttcctatatgttataagttgaggtggaaatttaggagcttttaatcattctctttataaaataatgtcatatatttttataaataatacatataattttaagatagtaaaatatctgcatgcttaaatcaaatatattctacaacaaacatattcccactatatgttactagtatctgggaagaytgatgcctatctaccctttgctcaggtaaaacttcgaaaagagcctccttttaaatttaaagagctcctaacacattgttcatacttttaacctgcagaacttagggcaatcctagccttcttctgctcccaaaacttttgaaacaaaacatcaaatagaaaaacacaacagttctcacattcctttcagggtaacagagtggctgagccttgttattactccccagataatactagcttctgtcctcccaaagccacttaatcctgctcaattcaaaaatcaagtcctctgggagagtgagcagagcctgtgagctcattctgaaacctgtcattgtcttttccagccctgcctcccaacaacctctgctgactccagtgcgtggt

SEQ ID NO: 657794 - DNA, 616 bp, Homo sapiens
cagtggcactgatggccaccagcgatccaggctcaaatcctactagttcagcaaccctagcaggagatagggctttttcccaatggatccacagaatggcctaaggctggctttcagtggacctattctcattcctgaaccagtcactatggtcaggattgaggaggtagaattcatactcaatggccgggactggacctctgcagccagacggtgaggtcagccccaccaaaatgtatggactagaactgggataagaaaatgatttcccaaaggaaaatcagagtgggaaatgcaggtttataacagttgaataatctgayctgtatctttgaagccttcttgggtctcccagttttcttcttgggaaagccagtttgttgggcaggggttgggggtgaggggagctggattttctgtcctgtgaattcaatctaattcacatagcaggcttctatcatttaatgggaccattcttttattcagaggaagggtcctgggatgcatctttcaattattagagcattgggatgtttggattctgtctggtcttgctctgtctgtgtttatgacagtatacttgcaagctaatttctcctctctaggaagtaggtaa

SEQ ID NO: 657795 - DNA, 434 bp, Homo sapiens
ctctttttttggttccatatatggattttagagttgttttttctagttctgtgaagaatgatggtggtattttgatgggaattgcactgaatttataggctatttttggcaatatggtaattttcacaacattgattctacccatccatgagcatgggatgtgtttccatttgtttgtgtcatctatgatttctttcagcagtgttttgtagtttctcttgtaaaggtctttcmcctccttggttaggtatagtcctaagtatttttttgtttgttttgttttgttttgttttttgtttttttgttttgttttgttttgctttgcagctactgtaaaaggggttgagttttttatttgattcttggcttggtagctgttggtgtgaatagcagtgctactgatttgtgtacattgattttgtattctgaaactt

SEQ ID NO: 657796 - DNA, 515 bp, Homo sapiens
tatgttgcccaggatggacttaaacacctggtctcaagtgatcctcctgcctcagcctctcaaatctacttccttttggataaawttttttacctaaaagtttggaacaggtggggtgcctaaatgcctacaataccccttacactttactccctaagagaaaaaagaaatgcaagtatattttaaactggataagaacaaagcaaaaattggtttcaagtaagattttagtattgcaggcaccagtctgagtccgtctttaggctaggtaactttatgacgattacacaggcgtaattacccgtcagaagtctgataaaagacagcaagaccatgaatattgatgcactttcagaatgctggttggaagaccacggaattaacactgatggctctggttgtatttgccttgttgcttattttctatttccctaggcaatacggcatttcctgcctcctacaggaaatgattatgtgtccctctgatggaagtgatgactgagaagagtggaggc

SEQ ID NO: 657797 - DNA, 612 bp, Homo sapiens
gcttttacctggactgtgtcacagcctcctaacgggtcttcctgcttccacccttttcccctctctgatctgttttccacattgtagccagaatagttaaaatagaaatcaaaatagaactaaactcctcccatggcctacaaagcctgtgtgatccggcccctccacggctgagtcgtctcagtgtgctttagtcacgagggtcttgctggtttcactgagcactaagctcatcctagtacagagttcaggggaggctctggggtcggacttcgtgtgtgtgaagccttctctgtcacttgactgtgtgaccttggacaaaatgctttgtttctgtgcactctacaagtgatgatagtaataactggaayccagagggtggtcatgaggattaagtgaaaggatacagggaaggtgtttggtgcagagctggcatccagaaaacacgcatctttaatggaaatgtgttggcatggttggctcctatcattcagggtcccattcaactactgctcagaggacatcccgtattaatataaggtagccccccataactatcatggatttaacattgcactctatcaccttgtctctagctgtcccccacatgat

SEQ ID NO: 657798 - DNA, 600 bp, Homo sapiens
ctgggtgcccccaggttcactgctgccattagcattgatccgtctcctcctcctgccccctgatgatgtgtsgcgagcccacatcatcaggactccgaatggctgctctgtttgaccccgatcctcaggacacagcccactgggcttctccaagccacacaccatggggcctttgttctaactttgttgcttcccctggaccactccccgtggtgaaaggcggattccttgtttgccacaaggagttctgttttgtgtactcttgtcacaaaagggtactacacgtctctcaggggacatgttgtcagggtgctggggagacagtgtgaacaaggcaaggagcttgcctcatgggactagcactgacctgacggggaagacggagaatcaccgagatgaaaggacacagtggatgctccctgccggatgacagtgaatgccaggcatgggcagggacagggccttgggctcacgaaggacccctctgatatgggctgcttcctgcagataaaggacttcctgggttgcctacttcttattctggatcaggggattttaggtgcaatccaaagcccggggagaagaaccgccctgaaggga

SEQ ID NO: 657799 - DNA, 361 bp, Homo sapiens
ttggtttttgtgtatagtgagagacagaggtctaattgcattcttctgtgtgtggatatccagtgtgcccagcaccatttattgaagagattgctctttccccagtgtgtattgaaaatcagttggctgtaagtgggtggatttatttccgtactatctattctgttcagttgatctatgtgtctacctttatcccaataccatgttgtttttgttgctatakctttgtagcatattttgaagtcaggtagtgtgattcctccagcactgtcctttttgctgaagattgcttgggtatttggggtcttttatggtttcatatgaaggccacagctaacatcatactgaatgggtaaaagtt

SEQ ID NO: 657800 - DNA, 545 bp, Homo sapiens
ggcggaacacctagtgcagtcatttcctgccttagctggggctcctctgcaataatctctctcacctcagttttctttcctgtgcaatgggctaaggtcatggaattatgaagttagtaaactcggtagcagcccccatctttgccaggcccctacgggcttcttcagcagcccaaggtctaaaatgcccaggccatgattagaatcctaaaagaacgtggataaatctatggatgccctgttactgtaccaggggccagtcacccctgggtgatttcgatctgattacccccttaaaacttatgttctgtggcacactgtgaagacaagcaagggcttgcctgggccttggtttccagttacctgtaaacatactcagctctgatgaygctacagtaatggcagagtctgagcccttggcagagagaggcagaaagagcatatagggttgatgtttcccttatgtacaatgggatttactgttgctcatttcctccattcattcatttgttcatccattcattcattccactaagatctactga

SEQ ID NO: 657801 - DNA, 545 bp, Homo sapiens
ggcggaacacctagtgcagtcatttcctgccttagctggggctcctctgcaataatctctctcacctcagttttctttcctgtgcaatgggctaaggtcatggaattatgaagttagtaaactcggtagcagcccccatctttgccaggcccctacgggcttcttcagcagcccaaggtctaaaatgcccaggccatgattagaatcctaaaagaacgtggataaatctatggatgccctgttactgtaccaggggccagtcacccctgggtgatttcgatctgattacccccttaaaacttatgttctgtggcacactgtgaagacaagcaagggcttgcctgggccttggtttccagttacctgtaaacatactcagctctgatgatgctacagtaatggcagagtctgagcccttggcagagagaggcagaaagagcatatagggttgatgtttcccttatgtacaatgggatttactgttgctcatttcctccattcattcattkgttcatccattcattcattccactaagatctactga

SEQ ID NO: 657802 - DNA, 631 bp, Homo sapiens
gcagcctacctcagtttccccaatgaggcctttttcccagctgaggtttggtagccatgggaaggcaggagacaatgttgaatggacatggcctttccactgatcgtgacactgtccatcgacctgggctggacaagggctctgtgctcactcttccacccggtggctttggggctgcgagctgccctctgccctggggaaccactctgggggtctgctgtgttccagggttctgcctggcttatttgtgtcccctccccagggccctcttccccagacggggtagcctggaacaccctatagcttcacaattgaccccttttttggaagccctctgtttgtggacacagggaggccaagtggttcrgcagaaggccatgagcctccaggagacctatgtgcaaatcgtcactctaggacttaccagctgggtggctgtaaccacagaactgctcagaatctcagcctgctgtcaactggctgggaataaccctttctgcccaggcccctggcaggattattgaagcaatcctgtaaaagtgctctgcaaactctatgtgctgtgcaaaggtgaattaactattacggagggaactttgtttctttacactcagccatactcatgaaaggg

SEQ ID NO: 657803 - DNA, 568 bp, Homo sapiens
aacattctaatgcttcagaatgaaacttaagagacaattttgatgaagtcaaagttatcaatcttttcttttaaggcttgcagtttgtttttcggtgtcatctttaaaaatctgtctctactcaaaggtcataaagatagagaagtcctgattatcaaaagatttcatgaaaagtgaaaagacaagctccaaactagaaaagattttttraaagcataattgacacgagcttagcatctagaacatcactgttcaatagaaagataatggacagtgtatatgcagttttagaatttttagtagctgcaattaaagagaaaaaagaaacaggtataattaattttaatattaattaatgttaatactaatagatgtaataaagtgtttgacagagaacattttacactgcttcagtttttgaatgtgaataaaattaaattcattcaacttttagttcctcagtagtactggtgacatttcccacagtggtatggtggctgagcctttgctcataattgcctacacacccaacttttggaatgaagattacattttttaatgattcaga

SEQ ID NO: 657804 - DNA, 467 bp, Homo sapiens
tgtttgctagtttggtgtttgcggctgctttagagaacgtaactccaacaaatcatgagatccactgtactcatttatctttattttacacacagccatagactgagaagtagggggaagaattggagggaagaaataatgtgttttaatagtaacagttgtgtccagtcacagtggcaaatgcctgtagtcccagcaagtacctacccagaagtaggcatgggcatcctgggtatcctcactttatcttacagtgagctcagagagrtcagttgccaagttcatgcccggtttggctggctgtaagtgccctacccttttcatgcaaccatgctgcctcctctcctatctagattctttgaaatgtgaggtttattttccatccctcaaggggccatggagaaattgcccatctcatcttgtcccttgcattttaattgtcccagaagggtctgggggctgggaat

SEQ ID NO: 657805 - DNA, 503 bp, Homo sapiens
gaattcaatgagcagagacatatataggctgtgaagtaaagttacaaatagatgcaaaactggtgtgttcgaaggcagagccaggcctgaggcccagcctctgggtcaggcacaagagagtcaggggtggcccgtggcagtgacamgggtgatgctactcatgacttagggccgtgtccacccagggctcagggccctctgccaagccactgacagtcatccaggcctcattagggaggagctgcacctccctttctgtccctgctcctgacccttaatatttgatcacctgctgattagaaacagtagccccttggccgtgcgcagcccatggtccctgagccaggtggtttcttggccaccccctcccaacccagtgccagctctcacagtctcttgcagtgactccagagagctaaatgttcgtggccacttcctctgtgccttagaaaaggattagggctgttgctcgagccagtgtttaccctgaggggctctgtgga

SEQ ID NO: 657806 - DNA, 494 bp, Homo sapiens
cacagaactccttcttgcctggttcctagaaaacggcaggagggactggtgttccatgggacatgcattggggaaactgtctaatgtaatttccaggaagaaagaaggatgcaggagagtcttattagagcctctgtacttcagacgaagtagtgacrgggtctcaggcgtagggaaaagccaaggtgaggaggtgctgtctccgggcctctcctgtccctctccaccgccataacactgcaacaaggctcaagatcttgacccccagctctgaaaggtggcccactcccagccagcagttgcacaggaagccgcctggtataacatagtggtcaggagtacagactcaagcagaactgaatttaaaacctggcctcagccctgcagtccagctgtgtgaatttggacttgctgtgtaacttccctgaacctcaatgtttccatctttgaactggaaattctaggactgaatttgctaattgaagttggaattc

SEQ ID NO: 657807 - DNA, 493 bp, Homo sapiens
acagaactccttcttgcctggttcctagaaaacggcaggagggactggtgttccatgggacatgcattggggaaactgtctaatgtaatttccaggaagaaagaaggatgcaggagagtcttattagagcctctgtacttcagacgaagtagtgacagggtctcaggcgtagggaaaagccaaggtgaggaggtgctgtctccgggcctctyctgtccctctccaccgccataacactgcaacaaggctcaagatcttgacccccagctctgaaaggtggcccactcccagccagcagttgcacaggaagccgcctggtataacatagtggtcaggagtacagactcaagcagaactgaatttaaaacctggcctcagccctgcagtccagctgtgtgaatttggacttgctgtgtaacttccctgaacctcaatgtttccatctttgaactggaaattctaggactgaatttgctaattgaagttggaattc

SEQ ID NO: 657808 - DNA, 494 bp, Homo sapiens
cacagaactccttcttgcctggttcctagaaaacggcaggagggactggtgttccatgggacatgcattggggaaactgtctaatgtaatttccaggaagaaagaaggatgcaggagagtcttattagagcctctgtacttcagacgaagtagtgacagggtctcaggcgtagggaaaagccaaggtgaggaggtgctgtctccgggcctctcctgtccctctccaccgccataacactgcaacaaggctcaagatcttgacccccagctctgaaaggtggcccactcccagccagcagttgcacaggaagccgcctggtataacatagtggtcaggagtacagactcaagcagaactgaatttaaaacctggcctcagccctgyagtccagctgtgtgaatttggacttgctgtgtaacttccctgaacctcaatgtttccatctttgaactggaaattctaggactgaatttgctaattgaagttggaattc

SEQ ID NO: 657809 - DNA, 628 bp, Homo sapiens
tttttgctgcaccttttgctatgtctcatttagtaaacgtgatttgcactcaatttgattttcacaatcctttttgtaaaatctgttgrctttcccattatcaaaattgtataccttttaaaacaaaaaggtaaaaattcctacttcacttttttcctataaaaagaacacatttaatctcatttctggcactagaacttttcctcttacctctttttttttccaacttttaagatttgttcttgttttcagatttatagacgtttcctcccaatggttttctgtaaggcagttagttctctagttagttcttcctggagcattaaagccttcatccgcaaaatgcctgtaaatgattagagcataaggtaaaaggtttggggaaagcctattaatccaccagtaaagtattataacatctggaccatattaattagaattaatagttcatttgaggattagtgatgactcattcataaaagagacaggaattcaagtattcaagtacagtattgtcagtcaaaaggttaaggcataaactgttcacagccagaactctactgagttctactggaagatatttgatattaagaaaggattaacccattattggatcagaggagagttt

SEQ ID NO: 657810 - DNA, 628 bp, Homo sapiens
tttttgctgcaccttttgctatgtctcatttagtaaacgtgatttgcactcaatttgattttcacaatcctttttgtaaaatctgttggctttcccattatcaaaattgtataccttttaaaacaaaaaggtaaarattcctacttcacttttttcctataaaaagaacacatttaatctcatttctggcactagaacttttcctcttacctctttttttttccaacttttaagatttgttcttgttttcagatttatagacgtttcctcccaatggttttctgtaaggcagttagttctctagttagttcttcctggagcattaaagccttcatccgcaaaatgcctgtaaatgattagagcataaggtaaaaggtttggggaaagcctattaatccaccagtaaagtattataacatctggaccatattaattagaattaatagttcatttgaggattagtgatgactcattcataaaagagacaggaattcaagtattcaagtacagtattgtcagtcaaaaggttaaggcataaactgttcacagccagaactctactgagttctactggaagatatttgatattaagaaaggattaacccattattggatcagaggagagttt

SEQ ID NO: 657811 - DNA, 628 bp, Homo sapiens
tttttgctgcaccttttgctatgtctcatttagtaaacgtgatttgcactcaatttgattttcacaatcctttttgtaaaatctgttggctttcccattatcaaaattgtataccttttaaaacaaaaaggtaaaaattcctacttcacttttttcctataaaaagaacacatttaatctcatttctggcactagaacttttcctcttacctctttttttttccaacttttaaratttgttcttgttttcagatttatagacgtttcctcccaatggttttctgtaaggcagttagttctctagttagttcttcctggagcattaaagccttcatccgcaaaatgcctgtaaatgattagagcataaggtaaaaggtttggggaaagcctattaatccaccagtaaagtattataacatctggaccatattaattagaattaatagttcatttgaggattagtgatgactcattcataaaagagacaggaattcaagtattcaagtacagtattgtcagtcaaaaggttaaggcataaactgttcacagccagaactctactgagttctactggaagatatttgatattaagaaaggattaacccattattggatcagaggagagttt

SEQ ID NO: 657812 - DNA, 628 bp, Homo sapiens
tttttgctgcaccttttgctatgtctcatttagtaaacgtgatttgcactcaatttgattttcacaatcctttttgtaaaatctgttggctttcccattatcaaaattgtataccttttaaaacaaaaaggtaaaaattcctacttcacttttttcctataaaaagaacacatttaatctcatttctggcactagaacttttcctcttacctctttttttttccaacttttaagatttgttcttgttttcagatttatagacgtttcctcccaatggttttctgtaaggcagttagttctctagttagttcttcctggagcattaaagccttcatccgcaaaatgcctgtaaatgattagagcataaggtaaaaggtttggggaaagcctattaatccaccagtaaagtattataacatctggaccatattaattagaattaatagttcatttgaggattagtgatgactcattcataaaagagacaggaattcaagtattcaagtacagtattgtcagtcaaaagrttaaggcataaactgttcacagccagaactctactgagttctactggaagatatttgatattaagaaaggattaacccattattggatcagaggagagttt

SEQ ID NO: 657813 - DNA, 552 bp, Homo sapiens
cagtgaaatctcattatacaaagagaaccttatgcaacctgacaaaccactgaggtcatggtgactcagtgatcagcagatggtacttcaacagcaatcccctgtcaaacctcagaacttgaggctgaaacattgcttccacccaccatcagtgaagatgtaactagcatgttacaagagtgaataatctggacttcagagattaagtcaccaatagtgatctcacaagyactcaccggaactcctataatgtctccactttgtccatgccatttagcaatctcatctcctaaatggactgtgcctatgattcttaaggagaaagtgaatcattggtagatatcctgcacaagcagctggactttccagtaatagctttcttggggctattaggaaaattaaacaagaaatgaggctttctgggtctgcctgtatgtcttctgcataagaaaaagaagagacatcgaatcaaccaataagaagagcccaaataagcatcctcaaatcttttgggatttggcacttggggacatgagtagttgtctgggatac

SEQ ID NO: 657814 - DNA, 598 bp, Homo sapiens
ctctttattctggatagaactttctgggggctgccaggggtaaggatttggtgttttccactgcagtctggtggagtaccctttcctcgggtgcctgatagttgtatgagctctatttgtatgtaaatattttgaataaatactgagatatgtccaaggatatatctgccatctgtaagaaaaaaatgaaatttgcttgtcattgacattttttattttcctttgacactttttgtatttaaagaagttaaatctgctctaatctatggagaacttaacccctatttattaattcagatcacttctattagaataggggtgggttgttttgttttgttttgtaactcagtcacaaatattgtggtcgttcctatctcatgcaattcctttcatttaaaacagtctccattatttttgcacttacacatatttttcaaagygcagtctaaaccacacttctaggaggccttcgctgaatactttagacccactgaccatctttccctctcaggcttttgggtgcgcaccctaacatttggctttggtttacccttagacaccctcttttagcttataaccatacattctccctcataat

SEQ ID NO: 657815 - DNA, 598 bp, Homo sapiens
ctctttattctggatagaactttctgggggctgccaggggtaaggatttggtgttttccactgcagtctggtggagtaccctttcctcgggtgcctgatagttgtatgagctctatttgtatgtaaatattttgaataaatactgagatatgtccaaggatatatctgccatctgtaagaaaaaaatgaaatttgcttgtcattgacattttttattttcctttgacactttttgtatttaaagaagttaaatctgctctaatctatggagaacttaacccctatttattaattcagatcacttctattagaataggggtgggttgttttgttttgttttgtaactcagtcacaaatattgtggtcgttcctatctcatgcaattcctttcatttaaaacagtctccattatttttgcacttacacatatttttcaaagtgcagtctaaaccacacttctaggaggccttcgctgaatactttagacccactgaccatctttccctctcaggcttttggrtgcgcaccctaacatttggctttggtttacccttagacaccctcttttagcttataaccatacattctccctcataat

SEQ ID NO: 657816 - DNA, 600 bp, Homo sapiens
  misc_feature 197: n = A,T,C or G
acatggcatatcaaggtcactctgcccttggtcttgagagtacrtggcatttcaaagtcaacagtgctgcctagtggaatagagatcctgtccatgagacacattgtgggtcctttactgaaacaccctagcttcccaattttctttttttgcacctctctactagaaaccaggcttcctgctgcttctgtaaacangagacttctgccttcaacaactaatggtaaaatatcctctgaagccaaattttagtctcaatactgttccatctgcaggaaaatgaccatttggtccctaaattcttttaaagcactattgtgtctccaattaaaatgtcacttaattagtaagcggattttaagtttggaagttaactggaatcattctctaagggtaaatgctttagcacaggccataatagcaggatatagagctccaaccagaacacttcctctattcaaaagggaagtgtaacagttgcccaaatgcaactgtcacatagtcttttctgagatccatttttttttcggggagccaggcaggtcacacaagtctaggaagtcaaagggaaatcacaggcagaggactagaattgcatgg

SEQ ID NO: 657817 - DNA, 600 bp, Homo sapiens
  misc_feature 197: n = A,T,C or G
acatggcatatcaaggtcactctgcccttggtcttgagagtacatggcatttcaargtcaacagtgctgcctagtggaatagagatcctgtccatgagacacattgtgggtcctttactgaaacaccctagcttcccaattttctttttttgcacctctctactagaaaccaggcttcctgctgcttctgtaaacangagacttctgccttcaacaactaatggtaaaatatcctctgaagccaaattttagtctcaatactgttccatctgcaggaaaatgaccatttggtccctaaattcttttaaagcactattgtgtctccaattaaaatgtcacttaattagtaagcggattttaagtttggaagttaactggaatcattctctaagggtaaatgctttagcacaggccataatagcaggatatagagctccaaccagaacacttcctctattcaaaagggaagtgtaacagttgcccaaatgcaactgtcacatagtcttttctgagatccatttttttttcggggagccaggcaggtcacacaagtctaggaagtcaaagggaaatcacaggcagaggactagaattgcatgg

SEQ ID NO: 657818 - DNA, 571 bp, Homo sapiens
gatggaattgatgttcacagttttacctctcctggatttacacttctttctgtrcccaagttcactagttctttccaagatgctgaacatctggtctcatccctctctttggtcagttgaaatctgtccaaatccctttccccttagctcagctatggcagggttgaaattttccaaaagaaacatttatgaggaaattaaaggaagaggaaacaatcacaaaagcagagtggtgttaatagagaacatagttttaaattcaatctatctgctgcatggcctggctgactcacagcttacaaggcatctggtcccaattctcattctttgcctcaagatggaaatattggatagtagtggtgccaaagatgtccagaatttagcccaaggtagactcatgcaggctgttgtgctaggtctttggaaattagccccaattactagtcagtcccctttgtttgaggcttgtgctaccctcttgtcctgcaattgctatgacccaagactaccctcaccctcaagagagatatttctctcacttgggatcttggtggatgaccattactgactg

SEQ ID NO: 657819 - DNA, 587 bp, Homo sapiens
agactaagaaattacctcaggccacacagtgagtaagtggaggactgatattggaacataaatttatttgattcaaaatctgtatttttccactgatatatatgtttactagattcagacaattactaaaaacgagttaggtgatattacagaaataaagatgagtcagttggtgttttcacctctattattattacttaatgttattatttattatagaacatatgtactgtaaaactattctcctaaawttttgacatatatttatccaaaagcaagcaatcatttcagactataactgtactccatagtggttcttaaccatcagtatgaaccggagtcacaagaacttaaaaaatctagatgcccaagatcaaaggagacattgtgatttaattaatgtgagttgagaggttgatataaaaacgaatgtgaatgacatatatatgtatatatatgcatatgtacatatatatttcccaggattgagaatcacagaacgaccatatttgtaatgcaaatctgcacagtatgtgatgcggaaagaaccctttaatgatttttgatgtgccctatttctagagtag

SEQ ID NO: 657820 - DNA, 464 bp, Homo sapiens
ccctggctaaaaggagccaaggtacagcttgtgccttcacttcagagggtgcaagtcccaagcattggragcttccacatggtgatgtgcctgcaggtgcacagaagtcaagaattgaggttggagaacctccccctagatttcagaggatgtaagaaaatgcttggatgtccaggcagaggtatgttgcaggggcagagccctcaaagagaacctctgctagggtaatgcagaagggaaatatgaggtgtgagctcccacacagagtccccactgattcactgcctagtggagctatgagaagagtgccaccatcctccagaccacagaatggtagatccactgacagcttgcgtcccacatctggaaaagctgcatacactcaatgccacacagtgaaagcagccaggaggtaggctgtaccctgcaaagctacaggggcagagctgtccaaggttgtggga

SEQ ID NO: 657821 - DNA, 464 bp, Homo sapiens
ccctggctaaaaggagccaaggtacagcttgtgccttcacttcagagggtgcaagtcccaagcattgggagcttccacatggtgatgtgcctgcaggtgcacagaagtcaagaattgaggttggagaacctccccctagatttcagaggatgtaagaaaatgcttggatgtccaggcagaggtatgttgcaggggcagagccctcawagagaacctctgctagggtaatgcagaagggaaatatgaggtgtgagctcccacacagagtccccactgattcactgcctagtggagctatgagaagagtgccaccatcctccagaccacagaatggtagatccactgacagcttgcgtcccacatctggaaaagctgcatacactcaatgccacacagtgaaagcagccaggaggtaggctgtaccctgcaaagctacaggggcagagctgtccaaggttgtggga

SEQ ID NO: 657822 - DNA, 506 bp, Homo sapiens
ttccttgttttgcaaagtcagtaacttcccatatgcctgttttcagtctttccaaaggccaaaggccaaagsccccccccaaaaaaagataacctttcttgactattttaatctttcttttgcttttaccctttggattttgcactttacatctgtactgtattttattagagtatcagtaagaagcaggagtaaagtcatgtgtttaactgcttctcttctgccataagctgacctcttctttttaatttcagatttctactaacttccttaatgtttgcaactttttattatactcatagctacttattgattatggatttaatctctttatgaagtctgtctgcttgcctgcctccctccctccctccctctctccctcccttccttccttccttcattttttccttcttcttttctctctctcttgcttgcttttttttgtgtgtttgtaactgctgtgaatacatagtgagcatggcagtctaccagtagttatttgaact

SEQ ID NO: 657823 - DNA, 567 bp, Homo sapiens
gactctcttacaacatttctgacaattcttccctttgtaggtcatgctcccttacccacacattaaatgctggacttcctagccatgttcaacttgattaatttatatgcttagttaaagccttacttgacaaattttaacagaatactattaactgataattttagtttttttataagctgggaactatcaattacatttgtgaaaggtcatacaaatattttcatatagaattcccatgcagaattacttcaactcaagctattataagattcatgacttaccctcccaagatattattcaatatatgtaaattctcctgtcaatgcattccattatcacttactctcatctctatttttctttctcaccatagctcaaattcatagacatttctrtagtcatttcttcaaatctactacagaacctgttcttgaatacagattttccactctattccactgccagtgtttaaatgatcacaaattagcttttacttagagtggaagtggcaccactcaccatcacccctcatgaccctgtggtaaaatttttgcttcctgtttc

SEQ ID NO: 657824 - DNA, 527 bp, Homo sapiens
ttctagtttatttgtgtagaggggtttgtattattctctgatggtagtttgtatttctgtgggattggtaatgtataactagaataaccaatacagagaagtgcttaaaggagctgatggagctgaaagccaaggctcgagaactatgtgaggaatgcagaagcctcagaagctgatgcgatcaactggaagaaagggtgtcagtgatggaagatgaaatgaatgaaatgaagcgagaagggaagtttagagaaaaaagaataaaaagaaacgaacaaagcctccaagaaatatgggacyatgtgaaaagaccaaatctacgtctgattggtgtacctgaaaatgacatggagaatggaaccaagttggaaaacactctgcaggatgttatccaggagaacttccccaatctagcaaggcaggccaacattcagattgagtaaatacagagaacaccacaaagatactccccgagaagagcaactccaagacacataattgtcagattcaccaaagttgaaatgaag

SEQ ID NO: 657825 - DNA, 441 bp, Homo sapiens
tggaatatacatatatgtgtgtgtatacacacacacacacacatataaggggagtttagtaagtaatgactcgcacaatcaaaaggtcccacgataggccatctgcaggctgaggagaaaggagagccagtccgagttccaaactgaagaatttrgagtctgatgtttgaggacaggtagcattcagcatgggagaaaaatgtaggctgggaggctaggccagtctctcttttcagatttttctgcctactttttattctagccatgctggcagctgattagattgtgctcacccagattaagggtgggtaggcatttcccagaccactcacttaaatgttaatctctttttggcaacaacctcacagacacacccagggtcaatactctgtatccttcaatccaatcaagttgacactcagtattaaccatcataatagt

SEQ ID NO: 657826 - DNA, 532 bp, Homo sapiens
cttttgctatgatctatctaactaccaccactgccagtattagaattcataagaggatagtaaaagcacatgcatrtttaagaatttatcagcccttttctgttaaaaatatacgaaatgtgtggagtgggtaaagtatccatttttgctgtggcagaagatttattttataactattttatttgtctcctttttcattctcaagatgataataattctgttctcatctctggtacaataaaagtggaggaataagaaagggaactcagtctccaccctaacataggaagatccaataagaggcattgcaaaaatatatctctcattctatatttagaaattagactgcacaaagaaggagtaaaatgatggggattcaaaatcatgaaaggtattctgttttcttttcatatgtggtaaaaagtgtggggatgatgacagtggagacatagttttcaaagctacaggaatgagagagaacaattagaggaataaaccaggggaaactggtgcaaattttaccttctcctgt

SEQ ID NO: 657827 - DNA, 539 bp, Homo sapiens
gtaatttgtttaatagaagatattaaaaactgtgtgctaaagccagttaattattgaaagattagagaagtaactcagggaaaggataaaaatcccactctgtttcaaggctatttggttgaggaaacatrctaatgtagacacagactcctcagaagggaaagccctcatggatattcaatcttcccctgacatttgggggaagctacaaaaagcagtaatggaacctcaaacccttatgatccaattcttaaatgtagcctttaaagtttacaacaatagggacaaggcaaaataggtgaaaaaaaaaaaaggcttagaatagcaatgattaataaagccccctttattgctttaatccccctatcccctagggttacctattccaagaaagtgtcatgagttcagcttctgggacacccagagcagagcctctgactcaacagaccctgggccaaaatcagtattccttccaaaagcaaaagggccattgacaataagaatatcctaactgtcctcagtgagaaaggaaaaagctc

SEQ ID NO: 657828 - DNA, 453 bp, Homo sapiens
gagtcaaacatgcctcactatacctttcctttccccttaggaatttaagccaagttcaaaaggccctccaatatgaaaataagacattgctcttcctcataaagctaaataatagctcccctgttcaaccaggagacttaatcttactaaaaagaaggctaccctaaggattaattacaactaaaatggaaaggtycctatcagatattattgaatactcccaccactgttaaacttcagggaataactgcatgggtatatctatcctggattaaacttcttaaagtaacaggcacaaagagatgacatcgtgacctacataatgaatatttggaagacttccagtacctgtttaaaataatcaaaacttggccagaagtggtaatgcaatgctgtgaatggggataggagcactaatttttctcttcttcctgattgcagtattttatatag

SEQ ID NO: 657829 - DNA, 573 bp, Homo sapiens
gtccagttaaatttctctttgacggtcctttattttatgttatttttacctataaatcacctttaaaatccctttaatatcagcttgaatggttargatacagttttcatacaggatatatagcaggcctagataaaaatgccataaagcaaagctttgtggattgctttacgtcttgttttaattttagatttgttttccttttttttttcttttaattttcaaagtgtattttttgttccctgatttattatcacccagagaggaaaatgaaatatctgacattaaaatatactttggtagaaagtgtagtggaggaaagtgttagtattccatgatgtgtatgtatcacattatctggatccagtttgtcattgctggacagttaggctgatttcacgtcattcatattgtgaatagtgctgacgtgaacatatgtgttcatgtgtctttatgatagaataatttatattcctttggatacatatccagtaatgggattgcttggttgaatggcatttctgtctttaggtctttgaggaatcaccacattgtcttccacaatggttgaac

SEQ ID NO: 657830 - DNA, 573 bp, Homo sapiens
gtccagttaaatttctctttgacggtcctttattttatgttatttttacctataaatcacctttaaaatccctttaatatcagcttgaatggttaggatacagttttcatacaggatatatagcaggcctagataaaaatgccataaagcaaagctttgtggattgctttacgtcttgttttaattttagatttgttttccttttttttttcttttaattttcaaagtgtattttttgttccctgatttattatcacccagagaggaaaatgaaatatctgacattaaaatatactttggtagaaagtgtagtggaggaaagtgttagtattccatgatgtgtatgtatcacattatctggatccagtttgtcattgctggacagttaggctgatttcacgtcattcatattgtgaatagtgctgacgtgaacatatgtgttcatgtgtctttatgatagaataatttatattcctttggatacatatccagtaatgggattgcwtggttgaatggcatttctgtctttaggtctttgaggaatcaccacattgtcttccacaatggttgaac

SEQ ID NO: 657831 - DNA, 608 bp, Homo sapiens
tattatctgaaaaacaagatcattaatttttaaaattagtctttagtatgaattattatcattacaaaattatacatttaggtattattaaatagtgttgattttcaatatacccattcatatccactattttatttttctgtataaaacaattgactcacattttgaagagtttttttctaatatgtattaggaaatgaagccaaaacagcagattttaaacttttctaatatttcaagggaacatgagtatatacttgaatcattctaatgtatgcagtttttctgtttctttaattttgctttatggattatttctattaccataaagttggcacagttctataattrcattatcagagccctcatatgtggaagagaagcctattatgttttcaataacaaaatatattagaatgaacttacctgctctttatgggccttataaattagaagcataaaaacaaaagcaactgtttcaagaaaggttctaaggcatatatcattatgggatctgcaaattctactgtactcagtgacctactaccaagaaattcacacctaactagaaacaagtcatgctttctccaatcaaatttaaacaacac

SEQ ID NO: 657832 - DNA, 622 bp, Homo sapiens
ggttctcccttctttccttgacttccatggccttatgtttccagatgacaggccagttattctgtagtrtgtccctcacctgggttgaggctgatgcttcttcagggttggattcacttgcatgcaccttcagcaggatattatactgaagctgtgctgcgttttttttgcgtcctgtcatgtggtgagtaatttcactctaggattagagatggtgttcgctatgatcattcgattacagaggtgactgccagccttctccactgtaaggtgactcttctctttgtaataaacaaatattttgtgatgaggcacactgaaaccatgaatatattccattcctcatcaaactgtcactttactccatcatttagttatattgaaatggactcagatttttattttattcagtaggttattatccatcatcattattatttactttgatgctcacatggtcgaagatttggccatcaagggccccttgcagccaggttctgggcttttctggcctgcccccttcttcttagagtccttcattactttctagctcccagaatctttcaggtttatcttgggctttcccagcccttgccctggaatcagccattttccgaggaga

SEQ ID NO: 657833 - DNA, 622 bp, Homo sapiens
ggttctcccttctttccttgacttccatggccttatgtttccagatgacaggccagttattctgtagtgtgtccctcacctgggttgaggctgatgcttcttcagggttggattcacttgcatgcaccttcagcaggatattatactgaagctgtgctgcgttttttttgcgtcctgtcatgyggtgagtaatttcactctaggattagagatggtgttcgctatgatcattcgattacagaggtgactgccagccttctccactgtaaggtgactcttctctttgtaataaacaaatattttgtgatgaggcacactgaaaccatgaatatattccattcctcatcaaactgtcactttactccatcatttagttatattgaaatggactcagatttttattttattcagtaggttattatccatcatcattattatttactttgatgctcacatggtcgaagatttggccatcaagggccccttgcagccaggttctgggcttttctggcctgcccccttcttcttagagtccttcattactttctagctcccagaatctttcaggtttatcttgggctttcccagcccttgccctggaatcagccattttccgaggaga

SEQ ID NO: 657834 - DNA, 504 bp, Homo sapiens
tttagagagacacaattcaacccataacacttgggtatcaataatataaatactattgagctaaccaaaaattatatgtatttgaagaagagaggaaaatgtttgtgtgcacacatgtgcatgtgtataaaagagtgcatgtgagagagactttgacagcttaaatcatcatattccacagtagaaaatgagcagataatacctacaactaaaaaaacaaatcaagatggagctgtatatccttgatatttagaaatatggagacaagcctggccaacatagtgaaaccccatctctactaaaaatacaaaattggccaggcacaatggcaggcgcctgtaatcccagctactcaggaggctgaggcaggagaatcacttgaacctgggaggcagaggttgcagtcagccaagatsgcatcacggcactccagcctgggcaacagagtgagactctgtctcaaaaaaaaagaaaagaaaaagaaaaggaaatatggaggcaaac

SEQ ID NO: 657835 - DNA, 568 bp, Homo sapiens
ccctaatctaaaaattcaaaatccagcatgttccaaaatccaaaactttttgaggaccaacatgatacctcaggtggaaagctccatrcctgacctcatgaaaggttgcagcaaaaatgcaggcacaacacccagtttattcagcatccccaagagaaaaacataattaccttcaggctatgtgtacaaggtgtatatgaaacataaataaatttcatgtttagacttgggtcccagccccaagatatctcattatgtatatgcaaatatttcaaaatctgaacacatctgaaaatcttctggttcaagcatttcagataagagatatttaatctatatatacttattatataacctaacagttccactactgggcatttacccaaaagaaataaaacaaagacttgttacatgaatattcatagcagcttaatccataatagcctgttactgaacacaactcatacattcatcaacaaatgaatgaataaacaaattgtattatattcatacaatggaatactactcagcaataaaaatgaatgtactactgatacaaatagcatgg

SEQ ID NO: 657836 - DNA, 568 bp, Homo sapiens
ccctaatctaaaaattcaaaatccagcatgttccaaaatccaaaactttttgaggaccaacatgatacctcaggtggaaagctccatgcctgacctcatgaaaggttgcagcaaaaatgcaggcacaacacccagtttattcagcatccccaagagaaaaacataattaccttcaggctatgtgtacaaggtgtatatgaaacataaataaatttcatgtttagacttgggtcccakccccaagatatctcattatgtatatgcaaatatttcaaaatctgaacacatctgaaaatcttctggttcaagcatttcagataagagatatttaatctatatatacttattatataacctaacagttccactactgggcatttacccaaaagaaataaaacaaagacttgttacatgaatattcatagcagcttaatccataatagcctgttactgaacacaactcatacattcatcaacaaatgaatgaataaacaaattgtattatattcatacaatggaatactactcagcaataaaaatgaatgtactactgatacaaatagcatgg

SEQ ID NO: 657837 - DNA, 553 bp, Homo sapiens
agagactaggaatcactctcctcctcctctccaccacaccaaaaaaaaaggaataataagaaagtgaaaggaaaaatagttttaggttaaatttcatcaccatctgaaagaaaattactccgattttgtttaagcaagagaagaattcagctgagaaattatctagcaggcagcaaaatcagggagtcacttcccattgcaaagcaaaagaaaacaaggagcaagaggatggtcctggatagctgtttagacaatcagacatactgctaacatctccttgccttagaaactccgtgatgtttaaattaacaattrgccacaagccaaacacaggaacactcaaaagtttagaagggtgtgctgtaattggtaccttagcaaaacacaataataaattaagaggattcaagaagccttcactgtagactctaagaagatttaagatttgtaccaagaaacaggcttctaaatctcttctactgcattagtttagcatctaaagaacacctgtctaaaaatcaaaatatctaaatcctatcctttgagtcaactt

SEQ ID NO: 657838 - DNA, 525 bp, Homo sapiens
tcgttgagttgtttccagttttatggctattacaaataaagttgctataattatttgtgcacatgtctttcatttctcttgggcacatttctcggggtatataacactaggcacgcttttaaagaaactgccaaatcattttccaaaagggttgtaccttttacattcccactagcaatgtatgaaggttctcatttctccacatccttctcaatacttgttactgtacatcttttatattatagccattctagtgggtgtgaaatcttattatggttttttgacttaaatttccctaatgattaatgatattgagcttttttttcatgagcttgattattatctacatatttttggtaaagtgtctgttgaaatattttgcccattttccattgagttgtttgggtttcactgagttcattgggttcatttcatattctaaatgcaagttttattatatatgttctttgcaaatatyttctcccactgtgcagattgtctttccattttagtaacagtgtcttt

SEQ ID NO: 657839 - DNA, 576 bp, Homo sapiens
ggggagaacagaatgggtagtggggggttggggaaggatgggggaccaaggagaagagagtgaaacgccagacactggcggcccgggagccaggtttccactgggtgaggggtcctgtggggcaggtgggccctgagagtccagggcctggtcccggcatggctcccagctcccctgtrcccagagaatgtccccgctgaccacaggcatcactggacaccactgcggggaagcagcaacttcaaacttggtagaggagagactcaggggcagcacctcaaggcctgtccacaggcgggggcaggaaaacagtgctggaaacatgtgagggggaaaacgacgccgctccccacctgaccctgcctgggtcagaggtcactaggggctgctgatgccagtgacctcagacttccacctctgtgcctccaaacctcaccccaggagatgtcaggagccaaagagctccccaagccaagattctggagaaggcggccctggccagaaccgtgtgcttctgacgcccctgcagggcagctggaaaggggacagggaagccaaggccggtccagccccggg

SEQ ID NO: 657840 - DNA, 633 bp, Homo sapiens
ttaactagtatatgatctttctctatgaacactcgactggtaagggaagaaagcctccagtgagcacatgtacaatttaagtaaaacactgtgcatgcaggccctctcaagtgctggaagtgctggcaggccactgcacatgcagaaagcccacatataaaaccccaagtcaaagatctaactgtgcacttgaatctctcaagttgcctgcttggccctcttccaagtgtactttacttcctttcattcctgctctaaaactttttaataaactttcactcctgctcttaaacttgtcttggtccctccctctgccttatagcccctcagttgaattccttcttccaaggaggcaaggtttgaggttgctgcagactcctacagatttgccaccactaacagcatccgatttggggaggatacccctagtgattagcatagtgcaactccccttagggaaatattgctgaactgggggtgaagactagggagaatagaagtggggtctgaggggagaaggagaaatttttatgcagyagaagaatctgagacagcactgaccaaatccagaatcagaatcatttagtttccagataacaacctcgttgctgctgaaaggtgaagttcattggt

SEQ ID NO: 657841 - DNA, 638 bp, Homo sapiens
ttaattctagccctgtgatactgattttggacttttggccaccagaattgcaaaaaaataagcttttgttgctttaagtcaccaggtttgtggttatctgttagaggagccacaggcaactgatacactgatcttgagctgtatccamaatattaagttcagagtttttggacggtccctctgtttggttagtctgtgaccccttccttaactgatgaattggcagggctctgtgttatcatatcagaagatttttaattgtttgtttttctttaaactagtgagtatttagcatattttggtatctttaggctatgagttaattctatagttcttaaagataatacattgttccatctgcccatattcttccactttattcatacatatccatcagccttacaatccacattcttttcttttctggactactaggatgttagaagaaaaatacaggttctggcttatggctctttatctgtgaggttctgtacattgatcacacttctgagtcattttctataatgcaaagataacagtttccctttagttacctataacaaagaaatcagcagatacaagcagttaacacaaggtgtatatatatatatagagagagagacagagagagagagaag

SEQ ID NO: 657842 - DNA, 638 bp, Homo sapiens
ttaattctagccctgtgatactgattttggacttttggccaccagaattgcaaaaaaataagcttttgttgctttaagtcaccaggtttgtggttatctgttagaggagccacaggcaactgatacactgatcttgagctgtatccacaatattaagttcagagtttttggacggtccctctgtttggttagtctgtgaccccttccttaactgatgaattggcagggctctgtgttatcatatcagaagatttttaattgtttgtttttctttaaactagtgagtatttagcatattttggtatctttaggctatgagttaattctatagttcttaaagataatacattgttccatctgcccatattcttccactttattcatacatatccatcagccttacaatccacattcttttcttttctggactactaggatgttagaagaaaaatacaggttctggcttatggctctttatctgtgaggttctgtacattgatcacacttctgagtcattttctataatgcaaagataacagwttccctttagttacctataacaaagaaatcagcagatacaagcagttaacacaaggtgtatatatatatatagagagagagacagagagagagagaag

SEQ ID NO: 657843 - DNA, 576 bp, Homo sapiens
ttaaaagatcaaggacagagaaaccagactagaatttcagatgtggatcccaatgggaaattcataggggtaggcccttcaaattgcagttgctaatttctgatgaagatctttctcaggtgagagttttttgcagtactctttaggaggagtagcgacagggatttatttatataatgttggttcctaaatttctccaaccactctgggcaggtttgccaattctacatagatcctttcctccccaacatatcttattttgcagtgtacacagcaaatatatgcatgtctactctgagccaggcaccatgttaagtgataaggctataaaagtaaacatytgaatcttgacctcacagagttcaagtcgaattaaaaaaaaaaaaaattccactaatggtctggagggtatatcagatgtcaattttgagcctgtcagatgcattttgagtctgcagttcttagccttgaagggaggagagcacagagaaggcatccccagatgctatggatgagtttttgaatggtcccttatgcatacatgttcattcattcaacaaatatttacttactgca

SEQ ID NO: 657844 - DNA, 639 bp, Homo sapiens
caagtacatgttagttcaacatgttktttttcatatttataaatgtgaaaaataaaatttttatcttcccaaaacttaaaaattccttgcctatgaaagtttacttttcttttagacatgtactaaaagaagcacagcttacatagaatcctttaaaagccaatttgaggaagcaaacccagagcaatcacaattatagatgtatatgtcaatatatttaaatattatttaaaacagtgtattttgtaaagatatgtatttttaccttgaaagtccatataaaacaacagttccaagttaggatgggcaacaaacatgtgtcctcattatatttgattttttaaagtttattattaaatagaaaggttctaatattcgggtctattatgttcacaacactttaaatcgttcccattttatcgtcaataaccccatgaggtaggtattatgatccttattttaaaatgaggtaactgaagatgtttggtaatttactgaacatcctacagctacaagggacaaaagggcaaaactgagactgaaatccaaatctttacgatacccaaagctcgagatttttccattgttccaggctgctttgaacagaattacgcactacagtttatttttaccacgcgt

SEQ ID NO: 657845 - DNA, 595 bp, Homo sapiens
aatctaagctcccaggtgttagccaagggctaaccttgtgagaaggcctttccaaggaaagtagtcttaggcctgccattaatgcttttttttattttttggcaggagataattttgcttgccttaaataagaggctgtgtgaaaattcaatgttaatcaatgtaacatgcttagcacaatgcctcttagttcccaaaatgcttataacccactgggagagaaatgtattctcattttgcttaagaaggatctgagacttagggaggatgaacaactgacctttggccatacactttgtccaaagtagagctaagatttgaacttgggtgcatctgactccaaagcccttacctgtctttctgttgtgtcctgctgctaaygatgtaaaagaaatgaagtagaaaatagcatttatttattttaaaaaattgatttataggaatcttttaagaaacatttgttgagatctagttacaatgtccaatcagttaatataatcaggccaattccatggatagagaaattctatgatattaaaagggtagctaaaaggcctatctccctgtaagcctcagagcctctccaaaattcaca

SEQ ID NO: 657846 - DNA, 610 bp, Homo sapiens
ggacagcatggacactgaccattgacatactttaaggtatataccttagaaacacttagagaaacttcacacacttatataagaaatacacagaagactgtttgctgaatatttatttaaaatattgaaagtttgaagtctaagtattcatcaatatgggataggtaaataaaacattgattgtgatgcaattgttaaaatgaatcagctagattacatgtgaaattgtaagaaaaactttatagaatcatttcacagcatgatacaatttatgtaggtcaacacataattaatgttgatggcttacatataatatgtatgcagtcaaagaattaaaaacattgtctggcagaatacacaccaagctcagtatagcagttgtctctagagagtaaataagaagactgtgagaataagaacataagaatattgcatattatttgtatagtttgcttttttagataagatggtaatctttgctacaagttccatygcttgttttctagatgatagatagatagatagatagatagatagatagatagatagatagatagattttcaaactaaacaaataaacaaaccaaggaggattggcttgtggggaaaa

SEQ ID NO: 657847 - DNA, 575 bp, Homo sapiens
tctgcttctccaaagacactgaggaagtccaaaggaaacaccagctggcgaagagccacctccaggcccatctgtccatcatcagcctccaggaatgccagtgtccagagggcaccaggtctgcgtctgtctccctgggatgtgccttgtccttggtgggcatttggcagtgatcatgcctccctgtctccctcagagatccaactgtccccattgtggggccctaccttccaaggccrgtttacacctcctgccaagctccggggcctgcccccagcctgcctcactgacaaatgccagaccaaggggtcccacgtcaggcaagaggcctcagcctgtgctctgacacccctcagacgggggcccttgccaggctctgtggaagacaagcgaggactgataagtcaggatgaagatagcagccactggaaggcttggagagccaggattccatctcctctacaagtagcaagcaaggagataatgagaaaatcctccccccgagggggggagcaaagagtctctggtggttgcctcagagctgggctttcccttccttgaggctttgcagcgtg

SEQ ID NO: 657848 - DNA, 618 bp, Homo sapiens
aacattgatctaaactcacagggcttttatttaccatgtggaggacactaatgaggaatcctaactaccttaatttagaccttaatttggaatcagttttccagaaacaactaaggcaagcctttaaatattaccatcagaatcagcagtaacaggtccattgatcagtgtaaggactgttggataatttattttgatgaaataagtggcataattatatgtgattggttgcaagactggcaaagttgcctccacccgtgtaygaatggagtaaaagcatccagcaaacccagtagtctccccactttggagtggtgctcaggatgtggaaatctgtttcatccttcacttgatcggactgacagaccagatgttcccaccttcccataatggttgcaattgccaggggtgaattcttctatacttaatgtgcttcccagggagcctaaaaggatgcagcagcatagaagcttaagagatcacgttttatgaaggattctgcatcagctggttcatacatagagctaataaatgtctgtatgagttcagtctgagacttgctttccacacaacacctggtaaggaggattgggagaagagacatggtttctgaccacc

SEQ ID NO: 657849 - DNA, 618 bp, Homo sapiens
aacattgatctaaactcacagggcttttatttaccatgtggaggacactaatgaggaatcctaactaccttaatttagaccttaatttggaatcagttttccagaaacaactaaggcaagcctttaaatattaccatcagaatcagcagtaacaggtccattgatcagtgtaaggactgttggataatttattttgatgaaataagtggcataattatatgtgattggttgcaagactggcaaagttgcctccacccgtgtatgaatggagtaaaagcatccagcaaacccagtagtctccccactttggagtggtgctcaggatgtggaaatctgtttcatccttcacttgatcggactgacagaccagatgttcccaccttcccataatggttgcaattgccaggggtgaattcttctatacttaatgtgcttcccagggrgcctaaaaggatgcagcagcatagaagcttaagagatcacgttttatgaaggattctgcatcagctggttcatacatagagctaataaatgtctgtatgagttcagtctgagacttgctttccacacaacacctggtaaggaggattgggagaagagacatggtttctgaccacc

SEQ ID NO: 657850 - DNA, 654 bp, Homo sapiens
ctgcaggttgtcttggtgaacgtgtaactcagcttggtccaggaccacgatcagggaccaatcaggagctgaaatgataaatcacagaggctgctcagcttggcccaggacctattagaagctgaagtgaaagtttggcccaagaccaatcaggcgctgaagtgatgattcatagaagccggacttatagtcctaagaaaggaaaggaaagtgcccatcggaacccactggagcccaccgtgcccatgcccacaaaaggagaaaaaacttttttcgggaggccactgactatacaaaggataaaggcattttctatgccaggccttgttcccttatctgagtgagctggaggtttgtgcaagtttttatccaaatgggccagaatggcccaaggttttttgtatctgtgcagctgtgggcatgtctccaggcacaacatcctgttctagttcccttatctgtgcctgcagcttgaattttttttcccagrctgctttttatgttatgtggggaagaggcactgacccatgggctcggggctctttgggactcttcccttgttatccacctaaggcaagctacctaactcctttcatttcccccccactcaggagtggagaccttaacttctattagggagattcggcattgatc

SEQ ID NO: 657851 - DNA, 550 bp, Homo sapiens
gggcatccttgtcttgttccagatcttaaagtctttaagtttttccatacttagtatgaaagtagctgccagtctgtcatttatggcttttattgtgttgaggtatgttcattctatacccaattttttgaatagtttgtccgtgaatggatgttgaattatatcaaatgcttttttttttttaaacatcagttgaaatgatcatatagttttgtccttctttctgtttacataatgtatcacattgactgaaccatacttttatccctgggataaatccaacttggtcaagatgaataatctttttaatatgttgttgaattcasattactagcattttggtgaggatttttgcatcaatgttcattagggatattggcctgtagtttccttttttgatttgtctttttctgattttggtatcagggtaatactggtctcagaatgagttttgaagtattccctctccacctattttttagaatagtttgagtaagatttgtattggttcttctttaaaagtttggtaaaatgcagcagtgaagccata

SEQ ID NO: 657852 - DNA, 550 bp, Homo sapiens
gggcatccttgtcttgttccagatcttaaagtctttaagtttttccatacttagtatgaaagtagctgccagtctgtcatttatggcttttattgtgttgaggtatgttcattctatacccaattttttgaatagtttgtccgtgaatggatgttgaattatatcaaatgcttttttttttttaaacatcagttgaaatgatcatatagttttgtccttctttctgtttacataatgtatcacattgactgaaccatacttttatccctgggataaatccaacttggtcaagatgaataatctttttaatatgttgttgaattcacattacyagcattttggtgaggatttttgcatcaatgttcattagggatattggcctgtagtttccttttttgatttgtctttttctgattttggtatcagggtaatactggtctcagaatgagttttgaagtattccctctccacctattttttagaatagtttgagtaagatttgtattggttcttctttaaaagtttggtaaaatgcagcagtgaagccata

SEQ ID NO: 657853 - DNA, 642 bp, Homo sapiens
cttttattaacattaaatatcaagaacacacacacaaacacaagtggcttaaatttatataaggtttgagtcatagggctcaatttacggaggaaattgtagaaatatcctacatagtttctgaaaaatattgcattgaaaagatagttcaggacatatttttcattgtggttcttaaatctaaaactgtaaaaccattaaaatagyttagattactttaaaataagaagacaaaaacataagaaagttagcaaatgtggcaaaatttgtcaaagtatatataaataaatatacatttcaggaaatggaatgcatttaaaagaacttagtaagttaaattatttttctttttaagcttttctttcctaactttaatgatcttattctgtacatttccatattttgtaatatagttgcagtgctggatatcactttacagtttttacggtattacgaaagcttttattcttgctttttatggtcaatattttgaggaagcacatttcagactctgttttcttcagtaatgtgtgccctgttagatttgaaaaagtaccaatattatctttgattttatgatgtcatattctgttagaaaaagattggcattgcagtttctggctcatagtaagtgatacagat

SEQ ID NO: 657854 - DNA, 510 bp, Homo sapiens
taaaataatttggttaaatttctaaacagtgtcagaacctttaagataattggatttattccacttatyagtttggcttattaaatttacaagagttgcttatgtattttggttgttagatttgcaaggctaccctgtcgctcatttgaaaggtttgagaaaatcagatttatttgatttgtaaatttagttttaaatgttttaggcaacttaatttcactggtttataattgaagataattgtttaggggaatttaatctgtaatgattgaacatgaagataaaatgtgaaagtaattgtttatatttttctagtaaaattataaatgatatacgcaacaagatttgtgaaatgaacttttaagttttgcacttttagagttttgaaattttaacttttaaggtttgcaaaaagtttaaaaacatacaactttaaatatgtgatacaagtaaccatttttgtataataaagtctcacctaagttgacatttcagaaattaaaaatatga

SEQ ID NO: 657855 - DNA, 510 bp, Homo sapiens
taaaataatttggttaaatttctaaacagtgtcagaacctttaagataattggatttattccacttattagtttggcttattaaatttacaagagttgcttatgtattttggttgttagatttgcaaggctaccctgtcgctcatttgaaaggtttgagaaaatcagatttatttgatttgtaaatttagttttaaatgttttaggcaacttaatttcactggtttataattgaagataattgtttaggggaatttaatctgtaatgattgaacatgaagataaaatgtgaaagtaattgtttatatttttctagtaaaattataaatgatatacrcaacaagatttgtgaaatgaacttttaagttttgcacttttagagttttgaaattttaacttttaaggtttgcaaaaagtttaaaaacatacaactttaaatatgtgatacaagtaaccatttttgtataataaagtctcacctaagttgacatttcagaaattaaaaatatga

SEQ ID NO: 657856 - DNA, 461 bp, Homo sapiens
atgtgacataagattcacctgaggatctcgttaaatagccagttctgactcggtaggtctagagtggggtccaagagtccgaagttctagcaagatcccaggtgatactaatgctgcttgctggtcctcacaccacacctataacgccctgaggttcaggtctaagaaggrgctccatcggccagcagagagggcaacccagacttgcggtaagacacaagtaagcatgcccaagcatgacctggattcatatccagggaggatgaccccaggggaagacaagctaaggtccttattgattagggaaatactaactctaacttgctgtactttgtagaacaaacttaagggtgaggtgtttgcaaccccaagctagcaaacagtggacctacctacacttaaatatccaaccatctcagaatcagaagagtgaacacaaaatttttttttttttgagtgca

SEQ ID NO: 657857 - DNA, 539 bp, Homo sapiens
cccatttaaaaatatatctactaaaagcaagtgatagggttctatctatctttgctcttactctcttggatactcacaaatctgttgggccttagatctttattgctgggaacataaggagtgccttttgagttctcataaggagctgttagctttgcaactagaagaagaaaaagttccatagcatctactatgcccctagtcctagaaatttcatttagttattcaaaagacataarttgaggttctactctgtgcttcctttatggagcaaggtgacatataagagcagatgtgagttttataagctatcctaggttttcaaaacacctacatgaaatatattccaccccaaaggtatactacaatctctataagagagaggcctgagtgtgtgcattttcataacaattttctagaggattctgatgttcttactctctttcccagccccactctcccttgctagttagagctatgatgcagacaatagggattcaatcataaaattatgtggtttatcttgagaatggaaaata

SEQ ID NO: 657858 - DNA, 539 bp, Homo sapiens
cccatttaaaaatatatctactaaaagcaagtgatagggttctatctatctttgctcttactctcttggatactcacaaatctgttgggccttagatctttattgctgggaacataaggagtgccttttgagttctcataaggagctgttagctttgcaactagaagaagaaaaagttccatagcatctactatgcccctagtcctagaaatttcatttagttattcaaaagacataagytgaggttctactctgtgcttcctttatggagcaaggtgacatataagagcagatgtgagttttataagctatcctaggttttcaaaacacctacatgaaatatattccaccccaaaggtatactacaatctctataagagagaggcctgagtgtgtgcattttcataacaattttctagaggattctgatgttcttactctctttcccagccccactctcccttgctagttagagctatgatgcagacaatagggattcaatcataaaattatgtggtttatcttgagaatggaaaata

SEQ ID NO: 657859 - DNA, 539 bp, Homo sapiens
cccatttaaaaatatatctactaaaagcaagtgatagggttctatctatctttgctcttactctcttggatactcacaaatctgttgggccttagatctttattgctgggaacataaggagtgccttttgagttctcataaggagctgttagctttgcaactagaagaagaaaaagttccatagcatctactatgcccctagtcctagaaatttcatttagttattcaaaagacataagttgaggttctactctgtgcttcctttatggagcaaggtgacatataagagcagatgygagttttataagctatcctaggttttcaaaacacctacatgaaatatattccaccccaaaggtatactacaatctctataagagagaggcctgagtgtgtgcattttcataacaattttctagaggattctgatgttcttactctctttcccagccccactctcccttgctagttagagctatgatgcagacaatagggattcaatcataaaattatgtggtttatcttgagaatggaaaata

SEQ ID NO: 657860 - DNA, 556 bp, Homo sapiens
gttcaagaccagcctgtgtaacataatgagacctcatctttacaaaaattctaaaaaattttccaggcatggtggagcatgtatttactcccagataattggggcgatagggtaacagaattgcttgagcccaggagtttgaggctgcagtgagttagttcacaccactgcacttcagcctgggcaacagagtgagactctcccaaaaaaaaaaaaaagaaaagggcaatcatcagaataaataccttctagtagattattattaaaatttcatcatgatgtgcataatttaatagtatcaggaaatctggcagggcacattggctcacacctataatccaagtactttggaaggccagggcatgagaatttcatgagtccaggagttcaacaccagcytcagcaacatagtgataactcgtctttagaaaaaattaaaaagaaaaattaggtgagcatggtggtgcctgcctgtagtccctgatattcaggagtctgaggcaggaggatcccttgagtgtaagagctcaagactgtagtgagccatgattgcacc

SEQ ID NO: 657861 - DNA, 522 bp, Homo sapiens
tgattaggccataagggcttttgtcaacatgaatggattaatgcaattattgcagagtggcatcatttttatgagtgggatccttataaagggtgagtttggttccttctctagctcacgctctctcacccatgaaatcccttccaccatgctataatacagcaagaaaaccctcactagacatgacccttcaatctcagacttccktcagactcatgagccaaattagtttctgttcattacaaattaccaagtctgtggcattttgttatagcagcataaaacagtctaagacaggaagtatgaagataaaaaataatgaaataataatttccactggataatatatcaagaatgtcttcaataataatagggaattctaacaaagagctaacaatatatttgtggagaaagattagaggcatagacttagataaagtgaatggtaagtgcaaagtaagtgtccatcaatgatatacaaattcaaacaatgtaattattagtgataattgagacagttgg

SEQ ID NO: 657862 - DNA, 475 bp, Homo sapiens
gatgaactttattaaataaatactacagttacaacttgggatacatgggattagaratacataattaatattatcacctatatgtaagaagatgaaatatctctaaaataagaaaggctttaattataaaagtacagaaatgcaacctccaagggatttataatatttatctctgaaagtgatggtataaaagagtcaaagtattcatttcagcaagactcaattatatactgtcttcaagagactcatatcacatgctatggcactcctaagctcaaaataaagggatggagaaaaatctacccagcaaatggaaaatagataaaatgtaggtggtgcaatcttaatttcagacaaaacagacattaaactaatgaagataaaaaagacaaaggaggggattatataatggcaaatgattcaattcaacaagaaaacctagcttaaatatatatgcacccaacacaggagtact

SEQ ID NO: 657863 - DNA, 475 bp, Homo sapiens
gatgaactttattaaataaatactacagttacaacttgggatacatgggattagagatacataattaatattatcacctatatgtaagaagatgaaatatctctaaaataagaaaggctttaattataaaagtacagaaatgcaacctccaagggatttataatatttatctctgaaagtgatggtataaaagagtcaaagtattcatttcagcaagactcaattatatactgtcttcaagagactcatatcacatgctatkgcactcctaagctcaaaataaagggatggagaaaaatctacccagcaaatggaaaatagataaaatgtaggtggtgcaatcttaatttcagacaaaacagacattaaactaatgaagataaaaaagacaaaggaggggattatataatggcaaatgattcaattcaacaagaaaacctagcttaaatatatatgcacccaacacaggagtact

SEQ ID NO: 657864 - DNA, 612 bp, Homo sapiens
gtttgggagtttggttcaaggccacagtgacttataactctgccactgtacgctagcctcaatggcagagcaagatcccatctttaaaacaaattggcttaaaacgtgtccaaataataagagaagcagcttctgccaaccagggacagcaaaagaatttccagacatcattaagaaaatcactgaggagtcagagtatctacctgagcgaattttaatgccaatgaaagtgccctatactgttaaaaaatgccacaaaggacatttatttgttagaaaataagtgagcaccagaatttaaagcagaaagagataggctgcctctactgctctatgcaaacgcatttgggtttatactcaggactacccttatctataaacctgataactcgttggccttaaagagaaaaggttccaggcatggtggctcatacctgtaattccagcacattgggaggctaaagtgggcgaatcacttgagtccaggagttggagaccagcctrggaaacatgacaaaaccccatctctactaaaaatacaaaaatgagccagacatggtggcacacacttgtagtcttagttactcaggagactgatgtgggaggatcacc

SEQ ID NO: 657865 - DNA, 445 bp, Homo sapiens
gtgagggtcctactggttaaaactcatgaaatgtggaaactcctttcccaagactgaggtccccagcagtttctcactgtcatggtcatccatactcaggctcctgttttctttttcaacataaacgatccatgaattatatttctgattttaatattatgattttctgaatttaatccagttgtatatatctttttgttaacttaaatatttcaactgtaaacattgatatttgcaggtactaactcattccaatatttacagtaaaaatgaaattaacttgctcaatttccaaaagtaccaaagacacctgttttatatcctattgaaatytcttgcttcctgtgttcaactaattaaaatcccatactttctgatgagctttataaatgtaaaatatagcaacttctatcttaaataatcaccttagtattcttgacaattt

SEQ ID NO: 657866 - DNA, 644 bp, Homo sapiens
agaaaaagaatgtgtattgtgcaacaattaggtgcaatgttcttcaaatatctattagatccattagatctataagcacagactaagtctgaggtttctttgtagattttctgtcttgatatgtttaatgctgaaagtggggtgttgacgtctccaactgttattatattggggcctatctcttgctttagctctaatattattgcctttatatacctgagtagtccagggttgtgtgcatatatatttagaattgttgtgtcctcttcctgattgatgtctttattattacatagtagccttctttgcctcttcttatagtttttgtcttgaaataaaatattttttgtctgatataaatatagctattcctgctgggtttttttccattggcatggaacatctttttccatccctttatttttagtctatatgtgtatttataggtgaattgtgtttcttgtagtcaacagatcaatgaatcttgttttttaatccatttagctattctacgtcttttgatcagagagttttgttcatttacattcaatgtcattattgataattaaggacttaytcctgccatttttttatttgttttctggttgttttgtggtcttccctttcctattttgtttcttccc

SEQ ID NO: 657867 - DNA, 582 bp, Homo sapiens
taatcctggcactttgggaggccaaggcgggcagatcacttgaggttaggagtttgaaaccagcctggcccacatggtgaaaccccgtctctactaaaaatacaaaaaaaaaaatgagccaaacgtgttggcaggtgcctctaatcccagctatttgggaggctgaggcaggagaattgctggaacccaggagacagaggttgcagtaagckgagattgcgccgctgcactccagcctgggcaacaagagcgagattccatctccaaacaaacaaacaaacaaacaaacaaaaattatggtatatttgtatgtctaaaataacatgcagatattaataaccgtgtttcagaggaacatttactgtcattataaggagctcagagtctagtggtgggaaaaataggatttaaaacaaagttaacttacataaaaaaaaggaaaataacatgcagaaaaaatgatagaaacaaaataaatatttattatctgctatttgaggggttatgggcatatttatttctcctatctaatctttttaatgtttaaatgttattagtttgttgtttttataatcaatatag

SEQ ID NO: 657868 - DNA, 635 bp, Homo sapiens
ttttgttgtaggcatttagtgccacaaactttcctcttaccgctacttttgttgtttcccagaggttttgataacttgtgtcactattatcattcatttcaaagaattttttaatttcmattttgatgtcattgttaaaccaaatatcaatcaagagcagattgtttaatttacgtgtatgtttatagttttgatggtttattagttgatttctagttttagtcccctgcggtctgagaatacacttgatatgatttctttattttattttttgagatggagtcactctgtcacccagggtggagtgcagtggtgtgctctcagctcactgcaaactcggcctccaggattcaagtgattctcctgcctcagcctcctgagtggctgggactacaggcccccacgaccatgcccggctaattttttgttttttttgtatttttagtagagacggggtttcaccttgttagccaggttggtttcaatctcctgaccacccgcctcggcctcccaaagtgttggtattacaggcatgagctgctacatcatttaaaaaaaaaattattgaaacttgttttgtggcctattatatggtctgtcttggagaatgttccatgtgctgatgagaaggatgt

SEQ ID NO: 657869 - DNA, 596 bp, Homo sapiens
agctgggactacaggcatgcgccaccatgctcagctaattttgtatttttagtagagacggggtttcaccatattggccaggctggtctcaaacccttgaccttgtgatctgcccgcctcgacctcccaaagttctgggattacaggtgtaagccaccatgcccggcccrattaaatttaaatatatgaaaaattaagatatatgacagcaatagtaaaaaatttaaaagcacggtaagtgacatgtcctaaggcctttcattatttagaaagtgctagaatatgtaatctagattaaaatgtagcttgttaaggatgcatattataatatctaaagaaaacactaagttgtaaaatattgcataacaagctaacaaaggaggcatttgagtagcaatatttgataagttgttaatttgattttttttcacgtttgattagaacaggatgttaatgctatccagtgtctctgggaatgaggttggtggacagctacttaaagaagcacaaaagaacaaattgcagaatcaaatttcttgattagaatcccagttccaccacttagtatctacatggtcttaaaatattcttaacct

SEQ ID NO: 657870 - DNA, 610 bp, Homo sapiens
aattttgttctataagattgtaatattcatttttaataaatgcatttaatgaatgtatgtaatttttccccaaatgtttgcataaataaaaaacctttgtattaaggcataaaaagactataaatataattatccaaaatcttctaccgtaatctatttcagaaatgctcttctaattttttaagatagttcctttattttgttttgaataattttataaactctacatattatatatgcatgtgtatgttttttctgttttttttcttagaattaataactataaacactagtttgtggtcactgttgtttttttaccttagttttgcttttttttwaaaaaaaaatctgtatattaaatcctttttatatctacatcaatattaaagatgatctaacatatgtccccatgttaagcatatcaataactgagagtggtctgaggtttacgttaattgcaggctaacaagctagttatgtttcatgtatgctgacgggagacagaagattcctgggtcacagaccaagtattttattatatacaggagacagcaggagcttcctctttgtgcacgtttcctatgtgccccaagtccctggtgagcctgga

SEQ ID NO: 657871 - DNA, 601 bp, Homo sapiens
taaaagtgagcgttcttgtggtgttccacttcttagaggaaaggctttcagtttttccctattcggtatggtactagcggtgggtctgtgtagcacgtggcttttattatattgaggcatgttcattctatctccagtttttgagggtttttatcatgaaggaatgttgaattttatcaaatgatttttcarcatcaattgaaatgatattatggtttttagttttcattctgtttatatgatgtatcagattgactgatttgcatatgttaaaccatctttacatcctttgtcaaaaccccacttagtcatgatgagtgaattttataatgtattgttgaatttggtttgtagtattttgttgaggatttttacatgaatattttcagagatattggcctgtctctttttttaatgtgtctgtctggttttggtaacaggataatactggcctcatagaatgagtttggaagtattcgctcctcctctgtttttcagaacagtttgagtaggatacatataagttcttctttcaatgtttgataaaattcagcagtgaagtcatctgtattacggcttcaatcttgttacttgttattag

SEQ ID NO: 657872 - DNA, 601 bp, Homo sapiens
taaaagtgagcgttcttgtggtgttccacttcttagaggaaaggctttcagtttttccctattcggtatggtactagcggtgggtctgtgtagcacgtggcttttattatattgaggcatgttcattctatctccagtttttgagggtttttatcatgaaggaatgttgaattttatcaaatgatttttcaacatcaattgaaatgatattatggtttttagttttcattctktttatatgatgtatcagattgactgatttgcatatgttaaaccatctttacatcctttgtcaaaaccccacttagtcatgatgagtgaattttataatgtattgttgaatttggtttgtagtattttgttgaggatttttacatgaatattttcagagatattggcctgtctctttttttaatgtgtctgtctggttttggtaacaggataatactggcctcatagaatgagtttggaagtattcgctcctcctctgtttttcagaacagtttgagtaggatacatataagttcttctttcaatgtttgataaaattcagcagtgaagtcatctgtattacggcttcaatcttgttacttgttattag

SEQ ID NO: 657873 - DNA, 411 bp, Homo sapiens
agtgatttgtgttctcagtcttggcagagctatttattaagggatgatacaagcatgaacaatgagactctaagttatgataaagatgtaatacaattttaaaaacatcctcaattgttcatgcaaaacaagtctaatgtttttctttgacagtagatagcatggtaaagtcacaatgaagacagttctgtgggattagacatcatatttgtattgattttatagaacattatctggactcaaatttttatcaattacaatatctgcaagcatataaacttaaagaamacatacaaggagtgttttaattacatatcctgattgcatctagctctttaggtagagtgaaagtccaaagaggtgatatgttatggatagccttcacaagattttagacatgagtgggacttt

SEQ ID NO: 657874 - DNA, 417 bp, Homo sapiens
ctaaggagtgatttgtgttctcagtcttggcagagctatttattaagggatgatacaagcatgaacaatgagactctaagttatgataaagatgtaatacaattttaaaaacatcctcaattgttcatgcaaaacaagtctaatgtttttctttgacagtagatagcatggtaaagtcacaatgaagacagttctgtgggattagacatcatatttgtattgattttatagaacattatctggactcaaatttttatcaattacaatatctgcaagcatataaacttaaagaaaacatacaaggagtgttttaattacatatcctgattgcatctagcwctttaggtagagtgaaagtccaaagaggtgatatgttatggatagccttcacaagattttagacatgagtgggacttt

SEQ ID NO: 657875 - DNA, 635 bp, Homo sapiens
taaaaaaatctatttatatattcatttatcatattggttctgcttttcttgagaacaatgaagaatatacccttacaagaatattatttacrtattgaataaaatgaaataaaaatgaataaaatactggtacatgatacaacatgaactttagaaacattatgctaggtgaattaagccagtcacatgaagacctcatattgtatgatttcattaatgtaaaatatcaggaaaaaaagcaaatctagacagaaagaaagtagatttgtctctattctcaacaaacgctgttctaaaggagatataaagctggcaaaacagcatatgataaggtgtcaacaccattagtcattagtggaatgcaaattaaaaccacagtaagataacactacacactttttacaatggttaaaataatgaaaattccatatgctagtaagaatggggagttataaagacatacgagactgggaagaaaaagaggtttaattggacttacagttacacatggctagggaggcctcagaatcatggcaagaggtgaaaggcacttattacatggtggggcttagagaaaattaggaagaagcaaagcagaaaaccctgaaaaacccatcagatctcatgagacttat

SEQ ID NO: 657876 - DNA, 635 bp, Homo sapiens
taaaaaaatctatttatatattcatttatcatattggttctgcttttcttgagaacaatgaagaatatacccttacaagaatattatttacgtattgaataaaatgaaataaaaatgaataaaatactggtacatgatacaacatgaactttagaaacattatgctaggtgaattaagccagtcacatgaagacctcatattgtatgatttcattaatgtaaaatatcaggaaaaaaagcaaatctagacagaaagaaagtagatttgtctctattctcaacaaacrctgttctaaaggagatataaagctggcaaaacagcatatgataaggtgtcaacaccattagtcattagtggaatgcaaattaaaaccacagtaagataacactacacactttttacaatggttaaaataatgaaaattccatatgctagtaagaatggggagttataaagacatacgagactgggaagaaaaagaggtttaattggacttacagttacacatggctagggaggcctcagaatcatggcaagaggtgaaaggcacttattacatggtggggcttagagaaaattaggaagaagcaaagcagaaaaccctgaaaaacccatcagatctcatgagacttat

SEQ ID NO: 657877 - DNA, 562 bp, Homo sapiens
ggtaggtatttgagaactctatgtactttcttctcaatttttctgtgactgtaaaactgctctaaaaaagcatgtgtatgtgtgcatgtgcatgtgcctgtgtgtgtgtgtgtgcatgtgtgtgtgtgtgtctgccagtttgctgctttgctttaatctgtatcttttcgcctttattttgttgttaatatgacctctatttttgtgatattttcatttgtttcctcctcttctttcttgctcacggccaatscattgttaatcatcttttgttgttttcttatttcttccttgatccttttgtttctgccataggttcctgattcatagaagctatgtgtaccacccatttctttacacctgtggaggaatgcatggtacaattgccctctgttccactgcagcatttttctgctgtgtgctcttcatctgcctttttttttgatcttgtatttttttttcttgcagtacttctgagaaaatcttgaaaacattaagaggtaactggtaataatagaattatctcttttttcaaagcaataccatgtgttgctagaagtcc

SEQ ID NO: 657878 - DNA, 502 bp, Homo sapiens
gaattccatattcagcaaaattacccttcagaactgaatgacaaaataaagatagtttcagaagaataaagactaagagaaagggagagacttttgtggggttataaatggtaaaagaaggatcctggtagggatgttataattctatatagtcactgcatctatttcaacrtcctgattatgatattttactgtagttttataagatgtttcttttagagtaaggtggacaaagggtgcatagaactgctgtgttacatatttattatacttgcatgtgaatctactattatctcaaaataaaatgtttaatttataaaactgactttctcacttcctctgtaacaagattgatgctaaattaaatatttcacctgaggtttttagaatatcatagatagtggaggcgtagctcaccatatagaagggtccaagtaggtatttgagagttaatgaagcctcttaaacctttacagccaaataagggaataaaatataaggt

SEQ ID NO: 657879 - DNA, 621 bp, Homo sapiens
actggttaaatttctcccaacatttgtatctatatgcaattagagtgaatctttgaatatgtggggaatctgcatatagtaaaataacaaacaaatctttaaagtagtttttgcaatagaaatcaaattttctgagaaacactaaatattacttgttataagtgaataaatatttgaaaatttagggagtaacttagaaaatggatratataattcataattcataatataaaaatattttggaaaatgttttcagaatgtatttcttcaccctcaaactttgttatacagaatgtaatttctcaattgaactaagtgatgtgcttatttttcagtgtttgttttcctccactgactacacagatcatgtgtcaatctttttatttttaaaaataaataaaatttaaaatatattttagttttattacttttctataaattttatcctccaccttgcatgtggagaaatgttaatacaaaatttattactagccaatagattatatttttaaatatttagaattaagaaacctgctcttatgtataaatcacttttgatactttttagtctttgttcattagtatctatcatagtgaatctaatttaacatggatttttgg

SEQ ID NO: 657880 - DNA, 608 bp, Homo sapiens
aattgatatcttcatagatttatttttttgagtactaagctatgaccaggaaacaaattattytgctttttttctgattttccttaaattgggctttttagctatattatataaagaggttgctaaacataatttgttctgtattctgaaaagaatgacaaactaattctgaatgaaaggctgatattttttttcaaatttccacattacttttaaaaagccgaatgtactaataatatcacgtgaaaaagtaaaccataacatgatataaaatgtacacaaacattttgtcgaaaaccctattttagggttcatatcagctaaacctcctcaaagcaaacatacccttgatttgtgatagcttatgggatagagggttaaaactggataaatactaaaagtaggggctattatatcaaagaggatttttttgaagttgttattttataaatctaattatttctcccaatttaggagtactttttttttcagttaaggcctcatctaaaaatgactgttactgccctaatacaaagactgtatagactttttatgcttctacagtacatctcagagacctctgtgtgaaagcaatgctctggatgata

SEQ ID NO: 657881 - DNA, 608 bp, Homo sapiens
aattgatatcttcatagatttatttttttgagtactaagctatgaccaggaaacaaattattttgctttttttctgattttccttaaattgggctttttagctatattatataaagaggttgctaaacataatttgttctgtattctgaaaagaatgacaaastaattctgaatgaaaggctgatattttttttcaaatttccacattacttttaaaaagccgaatgtactaataatatcacgtgaaaaagtaaaccataacatgatataaaatgtacacaaacattttgtcgaaaaccctattttagggttcatatcagctaaacctcctcaaagcaaacatacccttgatttgtgatagcttatgggatagagggttaaaactggataaatactaaaagtaggggctattatatcaaagaggatttttttgaagttgttattttataaatctaattatttctcccaatttaggagtactttttttttcagttaaggcctcatctaaaaatgactgttactgccctaatacaaagactgtatagactttttatgcttctacagtacatctcagagacctctgtgtgaaagcaatgctctggatgata

SEQ ID NO: 657882 - DNA, 565 bp, Homo sapiens
ctcattttagattgtttcttaaatatataattatataattattttttcaaatgttattaatgattctttaattgtcagtttcaatggtcatgcctcagcctttctctggttggctttttcaccttcatatgaaattttcccacctcatcatcatcaaaatcatccttccttgatgacattcgcatatttcccaaatcattttctcttacttaatgagctccycaaatgtttattctatgtcatttactataattttgtatgcaattgattccagaaatattgcacctatgcaaaatatctttcctcaattccagatcaatcttcaattgattggacacttctgcctgaatatacatagaaaccacaaatggaatgttcaaaactcattaactttgtacccaaaatgctcatttgtattctggatctcactgaatatcaccaacataccaagacactgtataagtaagattttgagagttttgttagctatttatttttaccccatctacttcacctgcaactaatataatatttagttgtgtcaatttaacttctaaacattgtt

SEQ ID NO: 657883 - DNA, 565 bp, Homo sapiens
ctcattttagattgtttcttaaatatataattatataattattttttcaaatgttattaatgattctttaattgtcagtttcaatggtcatgcctcagcctttctctggttggctttttcaccttcatatgaaattttcccacctcatcatcatcaaaatcatccttccttgatgacattcgcatatttcccaaatcattttctcttacttaatgagctcctcaaatgtttattctatgtcatttactataattttgtatgcaattgattccagaaatattgcacctatgcaaaatatctttcctcaattccagatcaatcttcaattgattggacacttctgcctgaatatacatagaaaccacaaatggaatgttcaaaactcattaactttgtacccaaaatgctcatttgtattctggatctcactgaatatcaccaacataccaagacactgtataagtaagattttgagagtttygttagctatttatttttaccccatctacttcacctgcaactaatataatatttagttgtgtcaatttaacttctaaacattgtt

SEQ ID NO: 657884 - DNA, 578 bp, Homo sapiens
aagctttgtaaatttttaaaaatgaaattggcatgatatattaaaggaaaatttattctgaaggctctattaacagtgttactactgctcattgaaaatgaagattatttccctgacttagaagagctttaaaatttaaaattaaagagytttaaaactgaaggcattaggttatttgcttttgaaaaggaaacttggataatttttagattatcagtttaatatttcccacatccatttgattgtttgtcattgacagagtgacataaaataattgcagatgcttttataaaaacctatttggctgagttccgatgattctttccaaatggtccttacttcacctatagtttcttcctttttactaaatttgtactaattatcatggaatatatgatttctaggtaaaaagtaaataattgacttactctgataaatagcctaaatctctttttaatggaagatatttatagtaaaatactcctcattataacagatttaagtcaaaatgattcaaatacaacatttcactcctaagaacagggaatttctgaaatatcagaaacatcatgcctact

SEQ ID NO: 657885 - DNA, 578 bp, Homo sapiens
aagctttgtaaatttttaaaaatgaaattggcatgatatattaaaggaaaatttattctgaaggctctattaacagtgttactactgctcattgaaaatgaagattatttccctgacttagaagagctttaaaatttaaaattaaagagctttaaaactgaaggcattaggttatttgcttttgaaaaggaaacttggataatttttagattatcagtttaatatttcccacatccatttgattgtttgtcattgacagagtgacataaaataattgcagatgcttttataaaaacctatttggctgagttccgatgattctttccaaatggtccttacttcacctatagtttcttcctttttactaaatttgtactaattatcatggaatatatgatttctaggtaaaaagtaaataattgacttactctgataaatagcctaaatctctttttaatggaagatatttatagtaaaatactcctcattataacagatttaagtcaaaatgattmaaatacaacatttcactcctaagaacagggaatttctgaaatatcagaaacatcatgcctact

SEQ ID NO: 657886 - DNA, 535 bp, Homo sapiens
tttttcctttctcactgaggacagttaggatattcttattgtcaatggcccttttgcttttggaaggaatactgattttggcccagggtctgttgagtcagaggctctgctctgggtgtcccagaagctgaactcatgacactttcttggaataggtaaccctaggggatagggggattaaagcaataaagggggctttattaatcattgctattctaagccttttttttttttcacctattttgccttgtccctattgttgtaaactttaaaggctacatttaagaattggatcataagggtttgaggttccattactgctttttgtagcttcccccaaatgtcaggggaagattgaatatccatgagggctttcccttctgaggagtctgtgtctacattagtatgtttcctcaaccaaatagccttgaaacagagtgggatttttatcctttccctgagttacttctctaatctttcaataattaactggctttascacacagtttttaatatcttctattaaacaaattac

SEQ ID NO: 657887 - DNA, 631 bp, Homo sapiens
agtgctctttcagcagaatcagataattgcatattttaaaataatttaaataatgtaattagattgtttgtagctcaaaggatagatgcatgaggggaaggatactccattttccatagtgattatatcacactgcgtgcctgtatcaaaacatatcatgcaccccataaatatatacacctactatgtactcacaaaaattawaaataaataaaataattatattttaataaataataaactattaaatactcaattttataaataatatataagtaaaatattactattatttaataataacttttaaaagattatgtaacaattttgagtgatattaactgagatgcccagtgcatttgcctgaaaggccaaggaaactggcttgctggagaagtataccacatgtgcagttcatcagtcataatttttctgggcttccacaaatgagttcaagtaccaatagaactttacctttgctgcttcttggtttctctagttctttttccttctgcagattttgtttttgtttctgttctgctcatatatgataagccattctccagtgttgacagcattgattatgaatttgattttatggtctgaccatttggcaatctataaatggact

SEQ ID NO: 657888 - DNA, 631 bp, Homo sapiens
agtgctctttcagcagaatcagataattgcatattttaaaataatttaaataatgtaattagattgtttgtagctcaaaggatagatgcatgaggggaaggatactccattttccatagtgattatatcacactgcgtgcctgtatcaaaacatatcatgcaccccataaatatatacacctactatgtactcacaaaaattaaaaataaataaaataattatattttaataaataataaactattaaatactcaattttataaataatatataagtaaaatattactattatttaataataacttttaaaagattatgtaacaattttgagtgatattaactgagatgcccagtgsatttgcctgaaaggccaaggaaactggcttgctggagaagtataccacatgtgcagttcatcagtcataatttttctgggcttccacaaatgagttcaagtaccaatagaactttacctttgctgcttcttggtttctctagttctttttccttctgcagattttgtttttgtttctgttctgctcatatatgataagccattctccagtgttgacagcattgattatgaatttgattttatggtctgaccatttggcaatctataaatggact

SEQ ID NO: 657889 - DNA, 500 bp, Homo sapiens
agaaggggtgcaaaaagcaacaaccttttgaaatatttaaacaagttagtaattatacatagttaaacttttttaaagtggttattttattgattttaatgttgatattacagtttttaaaatagtttggtaaacagagatacaaaattatgaatacggagttatagttggtgatccccttgctttttaactggtctcttgggccgtgtagtcaccatctggactacatgaacagtcaagtgtgggaatcttcttaacatgtaaaatattcacctgtcttcttaggcctatttggtgtaaactgagactttgcccaccatcactactttctacaagataaaaatgtctagaatgagccagactcatagatctctacatttctaaagaggttacatccttttgttgtgtttccagcaaaagcttaggtttgtacttatgatcctayttcaatttctttgagcactaggctccttatgacagaacagcttgggcagaaataa

SEQ ID NO: 657890 - DNA, 520 bp, Homo sapiens
gtgctgtgattctattattccgcatttaagaattttaaggtagctgaattttataaaaggasagtaaattacagacttcactacactttggttatattcaggctttaattccataattcagggaggccataaataaattactttaaacacatgtaacagaaatatatttattccttacaccattttctcatgtgatgtgaagaaaggtttttttaggtcatctatccaacaaatttggaagagcatggttcaaaagtgatcaggacccacacaaaaagaaaaataataataaagttaagaagagatatgtcaggattatgtgagaaataaatacgaatcattgacatctaatagacaagatgaagatatttggacctcatggagaattttatttttaattatttatttatttttatctttttgagacagggtattgccctgttgcccatgctggagtgcagtggtaggatctttgctccactgcaacctccgtctcccaggttcaagtgattctcatgcc

SEQ ID NO: 657891 - DNA, 586 bp, Homo sapiens
atgtgtagacaatatagtacagtgcctcacacacagaaaaaaatgttagctattttcattattttatatattttttcttctttgacattccatgtgtcttaaaataatatgtctagataaattaaaaataatttacccagaaaaataaaaatggaagcatccaaataataagattgctctaaagtgatgcttcctttttaatgaaaaatcaaatactaaaaatgccattacaaaaattaaagaataaaaacccacaattttcaatccagccttttctgaccaaaatagttgatgactattttcctttattaattcatttaacaaatgtttgttaggaaatgtatctactcagcccttagggtacaaaggtgatcgaggcaattttacaaaattcctacttgcaaacagcttacattcctatggggagctaggcaatacagcaaatgaacagatatacaaacaaaatagygaaagagaaatgttcacatggtagcatatagacttgctgagggatgacctcttccaaaataaaaagatgtgacggtatctacccgtggcaatagaattaccatccatttataccttg

SEQ ID NO: 657892 - DNA, 564 bp, Homo sapiens
ccagtagacttaaatttacaagaatgtatctacattaatcttaactactgactagctattttcttttggattctctggacttcaatcactttataaaaaaattcaggaataaattgcsttcattctaaagattttaagtatattaggtaacaaaagatctgtgaataagaattacatattttagagtgatttataattttagaagatgtttgtgaaatttctgtaaaaagggccgggtgtggtagctcatgcctataatcccagcactttgggaggccaaagtgggcagatcacttgaggtcacgaactcgagactagcctgtttaacatggtaaaactttgttacaattcaaggtgagattcggatggggtcacaaagccaaaacatatcgggacacttttccttttgcttattaaaaaaagataaacaaaatcacaaataacatatacgtatacaccaatgatgtcctactgaaactgccacaatgggctctatcacctagtctaccctccctatagtcccatcagtcctgctgatattcaccgaaggctataattattatt

SEQ ID NO: 657893 - DNA, 666 bp, Homo sapiens
accagtagacttaaatttacaagaatgtatctacattaatcttaactactgactagctattttcttttggattctctggacttcaatcactttataaaaaaattcaggaataaattgccttcattctaaagattttaagtatattaggtaacaaaagatctgtgaataagaattacatattttagagtgatttataattttagaagatgtttgtgaaatttctgtaaaaagggccgggtgtggtagctcatgcctataatcccagcactttgggaggccaaagtgggcagatcacttgaggtcacgaactcgagactagcctgtttaacatggtaaaactttgttacaattcaaggtgagattcggatggggtcacaaagccaaaacatatcrggacacttttccttttgcttattaaaaaaagataaacaaaatcacaaataacatatacgtatacaccaatgatgtcctactgaaactgccacaatgggctctatcacctagtctaccctccctatagtcccatcagtcctgctgatattcaccgaaggctataattattatttcagttttctatcccagcctttctctgatctgcattcccaataaagtcagaaactaattgatatcctgctctcccaaattcttcaatactttttcctcatc

SEQ ID NO: 657894 - DNA, 564 bp, Homo sapiens
ccagtagacttaaatttacaagaatgtatctacattaatcttaactactgactagctattttcttttggattctctggacttcaatcactttataaaaaaattcaggaataaattgccttcattctaaagattttaagtatattaggtaacaaaagatctgtgaataagaattacatattttagagtgatttataattttagaagatgtttgtgaaatttctgtaaaaagggccgggtgtggtagctcatgcctataatcccagcactttgggaggccaaagtgggcagatcacttgaggtcacgaactcgagactagcctgtttaacatggtaaaactttgttacaattcaaggtgagattcggatggggtcacaaagccaaaacatatcgggacacttttccttttgcttattaaaaaaagataaacaaaatcacaaataacatatacgtatacaccaatgatgtcctacygaaactgccacaatgggctctatcacctagtctaccctccctatagtcccatcagtcctgctgatattcaccgaaggctataattattatt

SEQ ID NO: 657895 - DNA, 525 bp, Homo sapiens
ctgtttagacagcctcaaaacgattctttgtaagattattttgccctaagagtatggggggaaacattaaccaaaaaagaccctattgaaagattactatctgcaagacaaagcaaatgattatgtttctttatactccataaatgaatcataaaatatcttagctcatttctctgacatgttaaattaagaataatagttactcagtggctacaatcaaaacataaaaacacattttatatttgtctccatacccaaaacacctggcttgggttcatgctgataataatagttaatgtttatagggttcttattttatgctagcttttatcggtgctaaatcgcataacaagagttatcttcttawacccaccaacattatcaagaaggtagtaatattagctccttttaatgattagaaaacttgcctaaaatcacataaataataagtggcagaacttctataagatatttttctaggtgagaaaaaccctctgtaaagtagttaatgggtaacgtaaattg

SEQ ID NO: 657896 - DNA, 606 bp, Homo sapiens
tcagcttctctttggaatacagaacaagaagagcaggctttatcagttctcagaggagggtcaaaagaagaaaggggaaagttgcaaaatatatgaaggtatgaataaagttgcttaaaatcacagcaatgataacagtaaaattaaaatgagaagatatgctctctcctcaagaactaacatttcagcaggctgcctggcttctcaatgtctgggggtattagtgcagtaatcccagtccccagcccccagtttctagctccagcttctcatagcaattggcattcttatgagaaaagcaaataggcccatgcatgaagcctttagccccttgaggttgccagaaaggaaattaatccacatgctagattaaaaatataaagaggaaagcagggggtggtgactctcggtggcggcaggaatagacacttgatgatttaagaatgtgtaagtggctcttggcaacaggggttgactgtgggctttgaggcyctctgggcttattggctgtgggagtcctaattataagcataacagataaactcatcatgaccacaacaagctacttaatctggtcctgctaataacagccaattaaatttgcat

SEQ ID NO: 657897 - DNA, 395 bp, Homo sapiens
aaagaactaaaaacaaaatgaaacacatgaaaaaatgttcccaattaatttttcgatttcaatgtgagaaatgcgaaacttcctttttttttttttgctaccaaaaatagtgctatacttccactaagactttgactatgttctagcaacagaggccaagtatgtagtcctgaccatggcagarttatatggaacagttacactgtcagtttcttaatgtacattttatgttccttatgcaaaaataataataacctatttgtcttttattagccataatctctttctatttttagaagatagcaaaatgacttgctcatctcaaattagcagaaaattgttttacatattttcttcaaagaaacaagaacgaaaacaaacttagctgtaaatta

SEQ ID NO: 657898 - DNA, 638 bp, Homo sapiens
tagtctctgttgtacaatagatctcttgaacttattcctcttaaaagaaacaataggcttcacaggatcaagagaagagggctttcagattcccagtctgggctttgtccccagatagaggcgggctggagctcaggccccctmattgatatgtggtgtgtttattcattccctagacgtaccctgtctcttcctcttgttctgtcttcctgtaggataagcatgataaagcatactgtctgaggaggggtatgtaggcttctgggacccagataatctggattcagtgctgtaggtttagaggacttatgtgagaaaatcaactgcctagtaccagtggatcatggtaactgtattattatatttaaaaccttgcattattcttgagaaatctgagttcatgtccaaggtcacacatgtagcacatgtcacagtcatacttatgattccaaagcccatagtgttataccaggctatactatttttcaatctgaatataattgagacaactacagtgctccatcaaattctatttactctaaattattttcatttttttccagaattcgagtatttttttgaacagtgttttattcacacatacacatgcccacatctctctctctctatatatatat

SEQ ID NO: 657899 - DNA, 638 bp, Homo sapiens
tagtctctgttgtacaatagatctcttgaacttattcctcttaaaagaaacaataggcttcacaggatcaagagaagagggctttcagattcccagtctgggctttgtccccagatagaggcgggctggagctcaggccccctaattgatatgtggtgtgtttattcattccctagacgtaccctgtctcttcctcttgttctgtcttcctgtaggataagcatgataaagcatactgtctgaggaggggtatgtaggcttctgggacccagataatctggattcagtgctgtaggtttagaggasttatgtgagaaaatcaactgcctagtaccagtggatcatggtaactgtattattatatttaaaaccttgcattattcttgagaaatctgagttcatgtccaaggtcacacatgtagcacatgtcacagtcatacttatgattccaaagcccatagtgttataccaggctatactatttttcaatctgaatataattgagacaactacagtgctccatcaaattctatttactctaaattattttcatttttttccagaattcgagtatttttttgaacagtgttttattcacacatacacatgcccacatctctctctctctatatatatat

SEQ ID NO: 657900 - DNA, 564 bp, Homo sapiens
tctgagtcatgttatggtttgctaccttagcagttctgatgaatttcaggctcttctgaatctgcccttcaggtgttgtttgaactgatgtattctgcataacgttgttgaaagaatggggtccaaagagagaaattccatttttcttatcattggatttaggcttttcccactggagctaatcctggatgcatgtggaatttgaataagttaataaaattatgtttgtcattttaaaataaaatttcttcctagcttctaatttctcaatacatagtgtcagttactgagatcttgttgcatttgcgttttctgattctagaacaccagaaaaaaatactgtatattttattttagtaaaggtaaaatagtaggattatttgagcttgagtagcagttagctaattttttcatggatttttggtttgaagcatttacattttatatcagtgatattagccactctgaaataatgtgcacaacctgaaatcactacagattcawgaattacaaccaactagggcttcaatctgatctcttaatattcaagtttattaatgttag

SEQ ID NO: 657901 - DNA, 569 bp, Homo sapiens
ccctattttagaagtccacaccaatcactctcaacaaggaaactttgcaacytaaggacaaaaggaagagtaggaggaagagatggatagggaaaagagaagaggaaggaaagcagaaaggacatttttctggcatattacatataaaccttttcttaatatggttcatgcttacctaaactctccttttttaatactacattgaatactccaatgcttctccatttctgagtatgatgagactaattgtacaaatagatttttgttttttcttatttttgaaatttaccttcactgctgaacaccatcttgacttggcaaagattaaaactctcataagtgttttgtgtttgtttgcttgttttttttttatttatttttaatttttgtgggtacttagtaggtgtatacatttataagctccataagatgttttgatataggtatgcaatgtgtaataatcacatcatagagaatagggtatccatcccctaaagcatttaccctttgtgttacaaacaatccagttatactcttttagttattttgaaatttacagttatattatt

SEQ ID NO: 657902 - DNA, 569 bp, Homo sapiens
ccctattttagaagtccacaccaatcactctcaacaaggaaactttgcaacctaaggacaaaaggaagagtaggaggaagagatggatagggaaaagagaagaggaaggaaagcagaaaggacatttttctggcatattacatataaaccttttcttaatatggttcatgcttacytaaactctccttttttaatactacattgaatactccaatgcttctccatttctgagtatgatgagactaattgtacaaatagatttttgttttttcttatttttgaaatttaccttcactgctgaacaccatcttgacttggcaaagattaaaactctcataagtgttttgtgtttgtttgcttgttttttttttatttatttttaatttttgtgggtacttagtaggtgtatacatttataagctccataagatgttttgatataggtatgcaatgtgtaataatcacatcatagagaatagggtatccatcccctaaagcatttaccctttgtgttacaaacaatccagttatactcttttagttattttgaaatttacagttatattatt

SEQ ID NO: 657903 - DNA, 589 bp, Homo sapiens
gaaataccatacagtcttcctcagtagctgtgccattttacattctcaccagcaatatgcaagcgtttcaatttctccacattcttgccaacacttattttatttttttataatagacatcctaatgggtgtgaattggtatcttcttatggttttgatttgcactcccaatgtttagtgtcatgactaattttaactgaataattattatgcctttggtattcagtgtttaatatarcattaaattacagtaacatcattatctagtactttcagacttaaatattcagtctaaatcattttctacataaatgaatgttatttctttaaagatgtcatttactttttgcattacaggaaatacgttgtgaaaattccaaaggttttcctgataattattagctagataaatgtatactggaaaaatcagacattttgggatcaaacagaaacatcttgacatatgcctctgcttcctaaatttaatgaatgaggacaactatataaacatcccaatctcaatttcttcatctaaaaataaagaaacaaaaaatgctgacatcatatggtctaaaccaagggttattgg

SEQ ID NO: 657904 - DNA, 608 bp, Homo sapiens
acattattccacatatttattctatctgttaatggacatttggtttgctttcacatttttctattgtgagtaatgctgatatgaacattggattacaaatatctcttcaagttcttcctttcaattacgtgtgtatatacctaaaagtggaagtgttagatcacatgataattctgttcttcattttttgaagaaataccatacagtcttcctcagtagctgtgccattttacattctcaccagcaatatgcaagcgtttcaatttctccacattcttgccaacacttattttatttttttataatagacatcctaatgggtgtgaattggtatcttcttatggttttgatttgcactcccaatgtttagtgtcatgactaattttaactgaataattattatgcctttggtattcagtgtttaatatagcattaaattacagtaacatcattatctagtactttcagacttaaatattcagtctaaatcattttctacataaatgaatgttatttctttaaagatgtcatttactttttgcattacaggaaatacgttgtgaaaattccaaagkttttcctgataattattagctagataaatgtat

SEQ ID NO: 657905 - DNA, 639 bp, Homo sapiens
caagaaacttacaatttggtgggtagcccattcagtcagataaaataataaatcccatttaatgttttaggatttttactatctgtagagaacatggcacactagggacaccaagaaggacattatcagctcagtttaattaagtattttattatctctgaaggtaagtagtgaataatgtctatcctatctgctgtcaaacctraagtatattaccagcctgactgttatttttagctctgtcatatattcatgtatttaagtttcttttaaatacagttttaccatttgcctctataatttttgatatgaagaaattattagactccatttactatatgatatgttttggatctgtgtccccaccaaatcttgtgtcaaattgtaatccccagtgttggaggtggggcctggtgggaggtgattggattatgggggtgtattactcatgaatgatttaacaccatcccccttggtaccgtggttttgatagtgagggagttctcctgagatctggttgtttcaaagtgcttagcacctctatccccatcttttgctcctgttgggccatgtaagatgtgtgtgcttccccttcacctttgccatgattgtaagtttctaagacctccccagaagcaa

SEQ ID NO: 657906 - DNA, 595 bp, Homo sapiens
aatatttatatctcccctgcttccaaaaaagcttatcccagaatcaagaaataatttagacacaactatgtrccagaatattgttagatgcacttagaaattttagacataacaaggcataattttaaatgttaattcttttagctcaaacaaaatgtgattaattgattttgtctacaataacaggtagtgccccagggaaagctaggtaagaaaattccttaaagagatgagacagcattttacattctctttctctgcgctgaagtaagtcagtgtgtattttttctcttgatgttagctctgaattttataaattagggtaagagctcaattagaatcattcattcgttcaagaaacatttaaagaatatctactctgttccaagcacagttatagaaattagggacactaaagtaaacacaatggtcacatgcagctggtgaggacgtcatgttacattgtgataagtgctaaaggaagacagataagaaatattgtaaagttggcaaatgcaattctaaatatgatttcagaaacacctcactgagaaggcaactgagaggcaagtaaagacttgaaagacaaaaggaa

SEQ ID NO: 657907 - DNA, 595 bp, Homo sapiens
aatatttatatctcccctgcttccaaaaaagcttatcccagaatcaagaaataatttagacacaactatgtaccagaatattgttagatgcacttagaaattttagacataacaaggcataattttaaatgttaattcttttagctcaaacaaaatgtgattaattgattttgtctacaataacaggtagtgccccagggaaagctaggtaagaaaattccttaaagagaygagacagcattttacattctctttctctgcgctgaagtaagtcagtgtgtattttttctcttgatgttagctctgaattttataaattagggtaagagctcaattagaatcattcattcgttcaagaaacatttaaagaatatctactctgttccaagcacagttatagaaattagggacactaaagtaaacacaatggtcacatgcagctggtgaggacgtcatgttacattgtgataagtgctaaaggaagacagataagaaatattgtaaagttggcaaatgcaattctaaatatgatttcagaaacacctcactgagaaggcaactgagaggcaagtaaagacttgaaagacaaaaggaa

SEQ ID NO: 657908 - DNA, 590 bp, Homo sapiens
tgctgacaatcatttaatatttttagttataagttaaatggtttgaattacaaaaccagcttactcaaataacttggtatgtagctaaacatacarttgccaattgcttatcttttttttttttttttttttttttgagacaaagtttcactctgttacccaggctggagttctgtggctccatcagggctcactgcacctttgacctcttggagtgaagggaacctcccacctcagcctcctgagtagctgggaccacaggcatacaccactaagcccagttaatttttgtttgtttgtttctgtagaagtggtgtttcctcgtgttgcccatgctggtctccaattcctgaactcaagtaatccatctaccttggcctcctaaagtgctgggattacaggtgtgagccaccatgctcagcctgctcatcattatttatatcaacttcaatcctaaggattatgcttttccttctgtaggatttactaaaaagagtcttttctttggaataaactattttgtgacttttctataaaaacaatgagactaggattatagaacatgactcctatattgcatagcttctcaa

SEQ ID NO: 657909 - DNA, 590 bp, Homo sapiens
tgctgacaatcatttaatatttttagttataagttaaatggtttgaattacaaaaccagcttactcaaataacttggtatgtagctaaacatacaattgccrattgcttatcttttttttttttttttttttttttgagacaaagtttcactctgttacccaggctggagttctgtggctccatcagggctcactgcacctttgacctcttggagtgaagggaacctcccacctcagcctcctgagtagctgggaccacaggcatacaccactaagcccagttaatttttgtttgtttgtttctgtagaagtggtgtttcctcgtgttgcccatgctggtctccaattcctgaactcaagtaatccatctaccttggcctcctaaagtgctgggattacaggtgtgagccaccatgctcagcctgctcatcattatttatatcaacttcaatcctaaggattatgcttttccttctgtaggatttactaaaaagagtcttttctttggaataaactattttgtgacttttctataaaaacaatgagactaggattatagaacatgactcctatattgcatagcttctcaa

SEQ ID NO: 657910 - DNA, 590 bp, Homo sapiens
tgctgacaatcatttaatatttttagttataagttaaatggtttgaattacaaaaccagcttactcaaataacttggtatgtagctaaacatacaattgccaattgcttatcttttttttttttttttttttttttgagacaaagtttcactctgttacccaggctggagttctgtggctccatcagggctcactgcacctttgacctcttggagtsaagggaacctcccacctcagcctcctgagtagctgggaccacaggcatacaccactaagcccagttaatttttgtttgtttgtttctgtagaagtggtgtttcctcgtgttgcccatgctggtctccaattcctgaactcaagtaatccatctaccttggcctcctaaagtgctgggattacaggtgtgagccaccatgctcagcctgctcatcattatttatatcaacttcaatcctaaggattatgcttttccttctgtaggatttactaaaaagagtcttttctttggaataaactattttgtgacttttctataaaaacaatgagactaggattatagaacatgactcctatattgcatagcttctcaa

SEQ ID NO: 657911 - DNA, 535 bp, Homo sapiens
  misc_feature 1, 2, 3, 4, 5, 6, 7, 8, 9, 10, 11, 12, 13, 14, 15, 16, 17,18: n = A,T,C or G
nnnnnnnnnnnnnnnnnntgcattaagttttctatatttactgtcattgcttgaaattgaatttctttgtaatgctaaattgtattctactttcttgattttctactgtttatctattcatgtatggaagaaatcttggtcgattataagttttggcaattatgaataaaccttttataataatctatgtgaaagtttttgtgtggagataaattctcaattattttaggtaaataccaaggagcaccactgatggatcatatgrtaagagcatatttagttttataaaaaaaatgctacgaaattggcttccaaaatggctgtacgcttttgctttccaaccagcaataagttacagttcttgttgctccacatcttggttagcatttggtattgtctgtgttctagtttttaagactttgttttttatacattaagtaatgtttttgaatatgcattaataaaatgctgtttattattctactttgtatatgaatagtatcagcataattacgtttgatgacaataatttctt

SEQ ID NO: 657912 - DNA, 467 bp, Homo sapiens
taaaatttcttctatttattttattttattttttagtttgaggtcttacatttaagtttttaatctaccttgagtgaatttttgtatatagtgagagattggggtcaagtttaattcctctgcatatggctaatcaatttcccaagtatcatttatcgaaaacagtgttgggttcccctttgtttgcctttattgactacattgaagatgagttggttgaaagtgtatggatttatttctgatttctctattctattmcattgatatatgtgtccatttttgtaccagttccatgctgttttgattactgtagttttatagtatagtttgatatcaaataatgtaatgcctctggctttgttctttttgtttaggattgctttgattatttggactctttttaggttctatataaattttagaatttttctctaattccacaaaaataatgacattggtaatttgat

SEQ ID NO: 657913 - DNA, 462 bp, Homo sapiens
tttcttctatttattttattttattttttagtttgaggtcttacatttaagtttttaatctaccttgagtgaatttttgtatatagtgagagattggggtcaagtttaattcctctgcatatggctaatcaatttcccaagtatcatttatcgaaaacagtgttgggttcccctttgtttgcctttattgactacattgaagatgagttggttgaaagtgtatggatttatttctgatttctctattctattccattgatatatgtgtccatttttgtaccagttccatgctgttttgattactgtagttttatagtatagtttgatatcaaataatrtaatgcctctggctttgttctttttgtttaggattgctttgattatttggactctttttaggttctatataaattttagaatttttctctaattccacaaaaataatgacattggtaatttgat

SEQ ID NO: 657914 - DNA, 581 bp, Homo sapiens
tttgtttgtttgaattgatgggttcggcagcaataaatgaaaacacaattaaaagaggcttaaatatacatggtatgtgttatgtcaygtaggaactctagagcttcatggctacaaaatttgctaagtcattgactcaaatatgtaattaaggctaaaattttccccccactttcactctgcaccttcagcatgcttgccaagactttcatgttgatatgataatgtcagatacatagggattacaactacacaaatcaaggaggggaggggaagatcgaagatgatgtggtatgtctgatttttaaaatcattttactctgatataatttcaaactcaaaaaatttccaaaagtagcaaaagtaaacaagtacacataaagaggcatgtttctttttcctgacatttaagcacattaatgcttaattgtttaatgcttagttaatggttaatgtggtttctgtcagatttctctcctgtgaatttcctagttttccttttgtattaactaaatagatattagcggatattttgaagctgtctggataagtttcatatacagttttcacccactagtttt

SEQ ID NO: 657915 - DNA, 581 bp, Homo sapiens
tttgtttgtttgaattgatgggttcggcagcaataaatgaaaacacaattaaaagaggcttaaatatacatggtatgtgttatgtcacgtaggaactctagagcttcatggctacaaaatttgctaagtcattgactcaaatatgtaattaaggctaaaattttccccccactttcactctgcaccttcagcatgcttgccawgactttcatgttgatatgataatgtcagatacatagggattacaactacacaaatcaaggaggggaggggaagatcgaagatgatgtggtatgtctgatttttaaaatcattttactctgatataatttcaaactcaaaaaatttccaaaagtagcaaaagtaaacaagtacacataaagaggcatgtttctttttcctgacatttaagcacattaatgcttaattgtttaatgcttagttaatggttaatgtggtttctgtcagatttctctcctgtgaatttcctagttttccttttgtattaactaaatagatattagcggatattttgaagctgtctggataagtttcatatacagttttcacccactagtttt

SEQ ID NO: 657916 - DNA, 581 bp, Homo sapiens
tttgtttgtttgaattgatgggttcggcagcaataaatgaaaacacaattaaaagaggcttaaatatacatggtatgtgttatgtcacgtaggaactctagagcttcatggctacaaaatttgctaagtcattgactcaaatatgtaattaaggctaaaattttccccccactttcactctgcaccttcagcatgcttgccaagactttcatgttgatatgataatgtcrgatacatagggattacaactacacaaatcaaggaggggaggggaagatcgaagatgatgtggtatgtctgatttttaaaatcattttactctgatataatttcaaactcaaaaaatttccaaaagtagcaaaagtaaacaagtacacataaagaggcatgtttctttttcctgacatttaagcacattaatgcttaattgtttaatgcttagttaatggttaatgtggtttctgtcagatttctctcctgtgaatttcctagttttccttttgtattaactaaatagatattagcggatattttgaagctgtctggataagtttcatatacagttttcacccactagtttt

SEQ ID NO: 657917 - DNA, 522 bp, Homo sapiens
tagtctttctacttaagtcaagacaagtttacacatcacaaatacagtgtcatataaatatgtttttcgtgtgcttactattatatgaccagtgagttttatatcttcaggtgatttgtacttgctcattaatatcctgctctttttgattgtaaaactcactgtagcatttcttgcaggaagggcctgaagttgattaaatcccttagcttttgtctttctgagaaggtatttatttctcctccaagcttaaaggatattttcactgaatatattagtctatagtaaaagtttttctctttcagygctttaaatatgtcatgccattctctcctggcctataaggttttcactgaaaagcctactctgagtattggagtttctttcttgtttttttctttctttctttctttctttctttctttctttctttttctttcttttctttcttctttcttttccatgtatttttaaatctttcttagaaatctgaaggcttttcagtacagacttaattttgaa

SEQ ID NO: 657918 - DNA, 522 bp, Homo sapiens
tagtctttctacttaagtcaagacaagtttacacatcacaaatacagtgtcatataaatatgtttttcgtgtgcttactattatatgaccagtgagttttatatcttcaggtgatttgtacttgctcattaatatcctgctctttttgattgtaaaactcactgtagcatttcttgcaggaagggcctgaagttgattaaatcccttagcttttgtctttctgagaaggtatttatttctcctccaagcttaaaggatattttcactgaatatattagtctatagtaaaagtttttctctttcagtrctttaaatatgtcatgccattctctcctggcctataaggttttcactgaaaagcctactctgagtattggagtttctttcttgtttttttctttctttctttctttctttctttctttctttctttttctttcttttctttcttctttcttttccatgtatttttaaatctttcttagaaatctgaaggcttttcagtacagacttaattttgaa

SEQ ID NO: 657919 - DNA, 280 bp, Homo sapiens
tttattttctataatatattccactctccttttacatattttatatatatacatacatattacatacatagaagatgtagaaggaaaatggtatatataaatatatatatatatataygatgttagttcctttgaaaacagttgtatagctttcctacagctctttcagcattcaaagttccctgcttctgcaaactgtaatgaattcttttagtttcctaggtatgccatgaatctaaaactctgttcctttgtacacattcatattattccttagtct

SEQ ID NO: 657920 - DNA, 623 bp, Homo sapiens
ttccaccattatgccctcaccagggcccagcatagatttcatttatgctattatagattagcttaactgtcctagaaattcatattaatgaaatcataaagcrtgttttcttttattcttattttcttttggttagcataatgcttttgagatttttttcatgtttttgcatgcataactttttcctttatattgctgaatagtatactacatctttttatttgtataaatgttgataaacatatggtttattttccattttaatcattatgaatatagatactatgaatgtatatgtgaaattattggtggccatgtaattttatttgtattgggtaaaactgaggggtttttgtaactgtatttttaattttttaagcagctgtggaaatttaagtcccattaaaatttgtacaaaacaggcaaattcctactgttccaatttgttttttaagagatggggtctcaaaatactgcccagggttgtctcaaactcctggtctcaagggatccttctgcctcagcctcccaaatacctgggactataggtgtgagccactgcaccagatcaaacctttcttaattatagccattctaatacatgtacattggcacctcattgt

SEQ ID NO: 657921 - DNA, 555 bp, Homo sapiens
cgctgggaaggatactcttctgtcaggctgcacagacttagagcccattttgagttcgtggaaattggggtcttagaaatagctttagggattgaacaatttcatgttgacaaaataactgtctcaagacttttaaaagtttataacctattatsttcttatcatttgcacttttttcgaaacacagccaacagattacatcaacagagccttttagtctgaagactaatagtttgtgttctgagttatgcctatgtgttagttcacaagttaatggccgctgctttgaccacaccattctactttttcactgcaatatactagcttctctccaccattttatttggcagaacgagcttaatggatggtgcttagaacattctgaactcctagttgtagataggtaaaagctgccacttgacattctctacatctaatagcatcagcacatacagagcatgtggctttttgagtctggaaaagttctgagcagaagaactttcacacaatttagatttcaggctgcaagtagagaggccctccctcagcaaagca

SEQ ID NO: 657922 - DNA, 609 bp, Homo sapiens
ataaattcatgcctaccaatttattttaagacatgaatttaggtataaatgtgttatttataccaattatagcctcctctttgtgcctattgtttttcatatcaagtctggatttgtcagatataaatattgctattttagatatcttgatgttggtccatggtatcattttctgcttcttacaacrtcaaagaaatgaaaaacaaaccagaaatggacaaaaataatgaatattctatttgttgttatcttaaatgtttctctcataagcaatgttatttcttttttaaatttttatttttaatttttgctggtacataataggtgtatgtatggggtacatgagatgttttgacacaggcatgcaatgtgaaataagcacatcgtggagaagggggtatccatctcctcaaacatttattctttgagttacaaacaagtcaattacactcttcaagttatcttaaaatgtacagttaagttttcattggccatagtcaccctattgtgctatcagctactaggtcttatagcagtgtggttctggattttgttatatctaagaatcctaagattttgtcaatagtcattttagtgaaagtaaatact

SEQ ID NO: 657923 - DNA, 545 bp, Homo sapiens
tccctcctcccacccttcaccctcagttaggccccagtgatttgaaagaagttctattgtgggtaaaatgatgcyggctacagataaatctttttgttcatagaagattcaaccaatgcagcaaacttaatttttgtcttaatataataaatttccacagccaccctcaccttcagtaaccaccaccctgatcagttagcaggcatcaatatcaaggcaaaatcttccatcagccaaaagactatgacttactgaagaatcagatgattaacattttttatcaatgaagtatttttaaattaagttatgcactttttttagacacaatgcttttgaacactaaactacagtatagtctaaacctaccttttagtgcaccaagacaccaaaaagttagtgtaattcattttcattttattctgatattagctttattgcattggtctggaaacgaacttgcaatatctccaagctacagatgtacctgctttctgtttttttttttgtattcattacttttttttttttattagagaaagggaagt

SEQ ID NO: 657924 - DNA, 545 bp, Homo sapiens
tccctcctcccacccttcaccctcagttaggccccagtgatttgaaagaagttctattgtgggtaaaatgatgccggctacagataaatctttttgttcatagaagattcaaccaatgcagcaaacttaatttttgtcttaatataataaatttccacagccaccctcaccttcagtaaccaccaccctgatcagttagcaggcatcaatatcaaggcaaaatcttccatcagccaaaagactatgacttactgaagaatcagatgattaacattttttatcaatgaagtatttttaaattaagttatgcactttttttagacacaatgcttttgaacactaaactacagtatagtctaaacctaccttttagtgcaccaagacaccaaaaagttagtgtaattcattttcattttattctgatattagctttattgcattgrtctggaaacgaacttgcaatatctccaagctacagatgtacctgctttctgtttttttttttgtattcattacttttttttttttattagagaaagggaagt

SEQ ID NO: 657925 - DNA, 545 bp, Homo sapiens
tccctcctcccacccttcaccctcagttaggccccagtgatttgaaagaagttctattgtgggtaaaatgatgccggctacagataaatctttttgttcatagaagattcaaccaatgcagcaaacttaatttttgtcttaatataataaatttccacagccaccctcaccttcagtaaccaccaccctgatcagttagcaggcatcaatatcaaggcaaaatcttccatcagccaaaagactatgacttactgaagaatcagatgattaacattttttatcaatgaagtatttttaaattaagttatgcactttttttagacacaatgcttttgaacactaaactacagtatagtctaaacctaccttttagtgcaccaagacaccaaaaagttagtgtaattcattttcattttattctgatattagctttattgcattggtctggaaacgaacttgcaatatctccaagctacagatgtacctgctttctstttttttttttgtattcattacttttttttttttattagagaaagggaagt

SEQ ID NO: 657926 - DNA, 597 bp, Homo sapiens
gaatagttgtcatatatcattcatacagcttttastaatgcttattacttatataaccgtcttataatggttgcaactaaaattaacattattccaacatcacaaactaaagtacagaatatatttggatttcactagcttttccataaatgtttcatttctttttagtatataatacatgctcccacattgcttttagttgtcatgcctccttagttgcttctgatatgtagcagttcctctgtttttctttttttttctttttcatgactttgacacttttaaagagaacaggtagatagtttgaatttgacaaatgtttgcccacagtttgactgaggttagagatttgagggaagactaccatgaaggtcacgtgcccatctctgcatggagaaatgtgcctgtctctgcatcttttagccacatgcctcatttttggtgatgtaaaccttgatcatttgattaaggtggtgcctgccaggttttctcactataaagttactaatattatcttgtttattaatatttaattactgaatacatttcactagatatagcattttaaatagatagggttttgtttcttcttttcag

SEQ ID NO: 657927 - DNA, 597 bp, Homo sapiens
gaatagttgtcatatatcattcatacagcttttagtaatgcttattacttatataaccrtcttataatggttgcaactaaaattaacattattccaacatcacaaactaaagtacagaatatatttggatttcactagcttttccataaatgtttcatttctttttagtatataatacatgctcccacattgcttttagttgtcatgcctccttagttgcttctgatatgtagcagttcctctgtttttctttttttttctttttcatgactttgacacttttaaagagaacaggtagatagtttgaatttgacaaatgtttgcccacagtttgactgaggttagagatttgagggaagactaccatgaaggtcacgtgcccatctctgcatggagaaatgtgcctgtctctgcatcttttagccacatgcctcatttttggtgatgtaaaccttgatcatttgattaaggtggtgcctgccaggttttctcactataaagttactaatattatcttgtttattaatatttaattactgaatacatttcactagatatagcattttaaatagatagggttttgtttcttcttttcag

SEQ ID NO: 657928 - DNA, 597 bp, Homo sapiens
gaatagttgtcatatatcattcatacagcttttagtaatgcttattacttatataaccgtcttataatggttgcaactaaaattaacattattccaacatcacaaactaaagtacagaatatatttggatttcactagcttttccataaatgtttcatttctttttagtatataatacatgctcccacattgcttttagttgtcatgcctccttagttgcttctgatatgtagcagttcctctgtttttctttttttttctttttcatgactttgacacttttaaagagaacaggtagatagtttgaatttgacaaatgtttgcccacagtttgactgaggttagagatttgagggaagactaccatgaaggtcacgtgcccatctctgcrtggagaaatgtgcctgtctctgcatcttttagccacatgcctcatttttggtgatgtaaaccttgatcatttgattaaggtggtgcctgccaggttttctcactataaagttactaatattatcttgtttattaatatttaattactgaatacatttcactagatatagcattttaaatagatagggttttgtttcttcttttcag

SEQ ID NO: 657929 - DNA, 595 bp, Homo sapiens
attattactctatgatttatttgtgaattaaatctctagtaagagaagacgagcttaaggcaaaaagtacaagaaataaaatataaaggaatctgaaaatgatggatgttttaaaatgtgccaaagtaataatgacataaaataatacctataaatgctaagtagtttgaatattttgactgttaaagctgtcaaattatggggtttaatgctagtgtrgagaatacttttttctgaatattaaaatatcttacttacaaacggttgaaatgcattttatatcccaagaagtttagaaacttagcattaataatacttttttacaatgacttatggaaatataaatttataagacacattattccttaaaggaataagtagctgtattccattattgaataaatggagatctaacccattcatatttgattcttgtgagatcaaagtacataccgaattttaaaatatttattccatatattccaaaatatttacaaataagaacctctgctatatgccaaacaatatgtgaaatgctgaatatacaatggagaatagttgaggcagatattccaaatactgtggatctatatta

SEQ ID NO: 657930 - DNA, 589 bp, Homo sapiens
atcggtatactattaattatttgtaattagactactagttaatccacaattcccattaataattctagtaaatatattaatttattgttctatcaatatttggtacatcataaatacataataaatagagaataaattaataaagtgttgaatatatgattttcagagctgatttttttcagtcatcttctttgacaattttgaatttatatttgtaaataaatattcagattttttacatgcattggcattaaataaaattttgtaaaatttattccatagtgtaaaactaaattttatcctaattttgtcataaatttttatcattagcaccttttaaaagtacaatgatatgtctttatttaggtcattaatctaaaattgtagaataggtcagagaaaagaggaaaccctttgcacataactaaaatccttcccagaagatggcattcattctttaattatcacttkctatgaaggtcatttgatgtgttactaatttgcctaattgaattgccatcaaactcatatttcttcatcttaacactgaaaatctgaggagatgcttcaaattacattttttggatga

SEQ ID NO: 657931 - DNA, 566 bp, Homo sapiens
ttctcatttgacaaatttgacatgttttcatctattatttctttaaggactattttgatcttgcttcactgttcattgggattccaatgatattaatgttaattcatttgttactgtcccattggttcaagggcctttgtttattttttatttcctccttgctgttcagaataggtaagtttttttgttcaggacttgagttcacttaatttatcttctatcattctcactccactactgagtttatcaastgagttttgttattattatcatatatttcagctctgtaattttcaggtgaattcttttaaacttccaattcactgttaagatttttcatttcttaatttgtttacaaagcatttgtaattgcttgttagatcattttcataatagcagctttatttttgtatttttaaatttttcttctttttttccaacttttattttttactcaagggatacatgtgtaggtttgttacatgggtaaattgcatatcatgcggctttggtatacagataaaactgacacctagataatcatcgtaatacctgatatgtagttt

SEQ ID NO: 657932 - DNA, 566 bp, Homo sapiens
ttctcatttgacaaatttgacatgttttcatctattatttctttaaggactattttgatcttgcttcactgttcattgggattccaatgatattaatgttaattcatttgttactgtcccattggttcaagggcctttgtttattttttatttcctccttgctgttcagaataggtaagtttttttgttcaggacttgagttcacttaatttatcttctatcattctcactccactactgagtttatcaactgagttttgttattattatcatatatttcagctctgtaattttcaggtgaattyttttaaacttccaattcactgttaagatttttcatttcttaatttgtttacaaagcatttgtaattgcttgttagatcattttcataatagcagctttatttttgtatttttaaatttttcttctttttttccaacttttattttttactcaagggatacatgtgtaggtttgttacatgggtaaattgcatatcatgcggctttggtatacagataaaactgacacctagataatcatcgtaatacctgatatgtagttt

SEQ ID NO: 657933 - DNA, 622 bp, Homo sapiens
tgcttaaacttatttttttctctttggatttttaaaggttcactgtatgtatagtcttatatctcagtcgatcttgttagtggcttattgttaaaacatgcagtttttggctgggcatggtggctgtattcctagcactttgggaggccaaggcaggtggatcacctaagcccaggagtttgagatcagcctgggcaacctggtgaaactctgtctttataaaacattagaaaattagctgggtgtggtggcacacacctgtagtctcagttccttgggaggctgagtgtggaggatcccttgagcctgggtggttgaggctgcagtgagctatgcactccagcctgggaaacattttaaaaaaatgcagtctttatcgtctctgattttgttatgttttctttatattaatatttttattaatacctgcttttatcttttatagttcttccttgtattttgctttggtttaaactgttggttgataacatcttaagttgaccatttatcatattartttttcaatctttttttgctttctaatatgtgcattagattaatccatgaatttcctttaagtaccactttaactataccccacaaatgtatgatatgtgatgtg

SEQ ID NO: 657934 - DNA, 479 bp, Homo sapiens
tggccacaggacctccactagttaatgtgagtacacagagtgagagttctttccaccacctctctctgattctccagcactatgattagaaatgtgggtgctagagactggctgctttaaatcagatcttggttctgctcttaattgacggtgtgatcttctgccagctgtgtacttctctctgcctcarttttcttggaaaaatggaaatagttgtaaaggttttgtgtgtcgggcacttatgacagtgcctggcacataatgagcactcagtaagtgtgttattattgctagtcttccaaagaacctcaggaatgtcagctcttagacaagccagagaatacatgttttgaccaggctggtgtttaaaagtattttctctcacttgaaatatggctttttattccttcctggcttctgactcagaagtgatcttcaggacccatctgtgaatgaacaaccatattcttctctggaat

SEQ ID NO: 657935 - DNA, 479 bp, Homo sapiens
tggccacaggacctccactagttaatgtgagtacacagagtgagagttctttccaccacctctctctgattctccagcactatgattagaaatgtgggtgctagagactggctgctttaaatcagatcttggttctgctcttaattgacggtgtgatcttctgccagctgtgtacttctctctgcctcagttttcttggaaaaatggaaatagttgtaaaggttttgtgtgtcgggcacttatgacagtgcctggcacataatgagcactcagtaagtgtgttattattgctagtcttccaaagaacctcaggaatgtcagctcttagacaagccagagaatacatgttttgaccaggctggtgtttaaaartattttctctcacttgaaatatggctttttattccttcctggcttctgactcagaagtgatcttcaggacccatctgtgaatgaacaaccatattcttctctggaat

SEQ ID NO: 657936 - DNA, 540 bp, Homo sapiens
tctttagagggactggtttatttacttcatggtttcaattaagtggagtctatttttatttagcccaaatctcaagttacgattatttgatatgaaaattatttgaaaattgaactaaaatgaaatggccttccaagtgaaattatacaaggtgtaatgatgcagatcttgcactgtgaatatatacaaaatatattttgtgcctaggagacagcattaatcagtaatgcccctctggccatygacattggttttgtagtaaatctctgataaaagatacttcttccaaagttctttttcaagtaaagcttagtccagaataaatgtaacaatcaatccagagatatggctggaggtgatgatggtagtagctaccatttattgagcagttaatatatgccaggcactgtgataaggattttaccaaattgtttccttttactggcccttacggttatttttccattagatagatccctcctatcatgattctgtgacattggaaggcattaaggaatggtgtttaatacctaatttgaa

SEQ ID NO: 657937 - DNA, 540 bp, Homo sapiens
tctttagagggactggtttatttacttcatggtttcaattaagtggagtctatttttatttagcccaaatctcaagttacgattatttgatatgaaaattatttgaaaattgaactaaaatgaaatggccttccaagtgaaattatacaaggtgtaatgatgcagatcttgcactgtgaatatatacaaaatatattttgtgcctaggagacagcattaatcagtaatgcccctctggccattgacattgsttttgtagtaaatctctgataaaagatacttcttccaaagttctttttcaagtaaagcttagtccagaataaatgtaacaatcaatccagagatatggctggaggtgatgatggtagtagctaccatttattgagcagttaatatatgccaggcactgtgataaggattttaccaaattgtttccttttactggcccttacggttatttttccattagatagatccctcctatcatgattctgtgacattggaaggcattaaggaatggtgtttaatacctaatttgaa

SEQ ID NO: 657938 - DNA, 540 bp, Homo sapiens
tctttagagggactggtttatttacttcatggtttcaattaagtggagtctatttttatttagcccaaatctcaagttacgattatttgatatgaaaattatttgaaaattgaactaaaatgaaatggccttccaagtgaaattatacaaggtgtaatgatgcagatcttgcactgtgaatatatacaaaatatattttgtgcctaggagacagcattaatcagtaatgcccctctggccattgacattggttttgtagtaaatctctgataaaagatacttcttccaaagttctttttcaaktaaagcttagtccagaataaatgtaacaatcaatccagagatatggctggaggtgatgatggtagtagctaccatttattgagcagttaatatatgccaggcactgtgataaggattttaccaaattgtttccttttactggcccttacggttatttttccattagatagatccctcctatcatgattctgtgacattggaaggcattaaggaatggtgtttaatacctaatttgaa

SEQ ID NO: 657939 - DNA, 603 bp, Homo sapiens
caactttgaattcaccaacctgacccggttagataatcggatattttttaaacttttcctcctaagtaagacagaggaactgaacaaacagtagatgaagttcttctcctctgttggggtttagaagaaataagccactgagatagaaaccccctccccttctgaggtaaaatccttgggcgagagggctcctttctctgatgggctggaggtagtggggccaataatagaaatgtgagtctctgccggctccaaccagagcctccactgcacagcccccagcatggctaaaatgaaaaatttgcaccaagtattggtgaggatgtggagaatacattcttggtgtgagtgtaaaatggaacaaccactttgggaaaaggcgtagaagcttttttttatataaaactaaacatgcactgagaatctagcagttacgttcttgggcagtaaccggtaagtcaaaaaagaaaaaaagaccyatgcaagaatgtttatagcagctttattcataacgacaaaaactagacagtcctcacgcccatctagagaagagtgaataagcaaattaagatatataattgaatactattcagcaataaaaag

SEQ ID NO: 657940 - DNA, 345 bp, Homo sapiens
cctttcctactaattattctctgtgtaatttctagctccatgtcaattgattgactttccccttcattatgggtatattatcttttctgcatccctaaaattttttttcttttgcttttttttgtgggggtgggatcttgctatgttgaccaggctggtcttgaactcctggcctcaagtgatcctcccatgtcrgcctcccaaagtgctaggattataggtgtgagccaccacgcccagcccaaacatttttgattgaatatcacacattgtgaattttacctttgcgtgcaagatatatataaatatttttgagctttgttccaggatgttgttaagttatat

SEQ ID NO: 657941 - DNA, 345 bp, Homo sapiens
cctttcctactaattattctctgtgtaatttctagctccatgtcaattgattgactttccccttcattatgggtatattatcttttctgcatccctaaaattttttttcttttgcttttttttgtgggggtgggatcttgctatgttgaccaggctggtcttgaactcctggcctcaagtgatcctcccatgtcggcctcccaaagtgctaggattataggtgtgagccaccacgcccagcccaaamatttttgattgaatatcacacattgtgaattttacctttgcgtgcaagatatatataaatatttttgagctttgttccaggatgttgttaagttatat

SEQ ID NO: 657942 - DNA, 607 bp, Homo sapiens
ggtcactctgttctgtaacttttaatttgttggttatttatgttttatactaccaaatacactgagcttggcacagatattttatgggcccagaggatatagcattagaaacagcttgaatattcaagccatcattagccatttcactttcagagacaaatttaggctcagcctaattcagttttgtaatttacatactgttctcagagctcagaacactcagaatgtgaagacataaagtcatttcattttttttcttgtctatttcgtcatctttatttgaataataggctgggttaagtttggccttttagttgcaggagaactataacmgatttacacatgtttactgaatcataacaaccaaacttctttggatagtcagatcaactttaattaattatccagatgattacctgtatgtttcaaaaatagtttacacctccttcacccaaaatgcatgaccagtggcaatacaccagaaatatttggagttgttatagaatctgtactacgttttttcaacttgatcatttgcaatatcttcttgcagttttttttaactgtctaattacaatctagtatctttgggaggcagggtggtgga

SEQ ID NO: 657943 - DNA, 303 bp, Homo sapiens
cttttgaaatcattgaaaactctatataagctgagtttgcttactgaattcagggactgtgtaggtatagtagtagcaactattgtctttgcttcagttcacttktgaattatcatgacatattcatttcttttaagatcagatacaccactgttttaaaattcttcattcccttaacaaaacataacaactataacttaaggctttcttgggttaataatccacagtgatgtcagtggaaaactggaatgcttgggaatgattttgtagcttttcttactgactgaggaaaatcatttagct

SEQ ID NO: 657944 - DNA, 303 bp, Homo sapiens
cttttgaaatcattgaaaactctatataagctgagtttgcttactgaattcagggactgtgtaggtatagtagtagcaactattgtctttgcttcagttcacttgtgaattatcatgacatattcatttcttttaagatcagatacaccastgttttaaaattcttcattcccttaacaaaacataacaactataacttaaggctttcttgggttaataatccacagtgatgtcagtggaaaactggaatgcttgggaatgattttgtagcttttcttactgactgaggaaaatcatttagct

SEQ ID NO: 657945 - DNA, 303 bp, Homo sapiens
cttttgaaatcattgaaaactctatataagctgagtttgcttactgaattcagggactgtgtaggtatagtagtagcaactattgtctttgcttcagttcacttgtgaattatcatgacatattcatttcttttaagatcagatacaccactgttttaaaattcttcattcccttaacaaaacataacaactataacttaaggctttcttgggttaataatccacagtgatgycagtggaaaactggaatgcttgggaatgattttgtagcttttcttactgactgaggaaaatcatttagct

SEQ ID NO: 657946 - DNA, 545 bp, Homo sapiens
ctcctttttgtgatatgagtgccacctagagtacactctgagaactcccttaagcactatcgttaaactaaacgataactgaaaattggcttttggaactccgtccttccttaagcaagtaagaacctcagtagcaatcgtattttaaaggagaaaacaaaggtcttcactttcagtattatgacaaggtcaagtttgcaagtcagaacgttacctaaatctttcatttacttagaacaccattaaaccatgtgttaggacgatggctacaccataatcatatcatagagtgttttgtctacagatacaccattatttctttaaagtgtaattgggctgccaactattttatgccartttgattaacctagtgacactaaatgatctctctgtattaggcagtttaactaaaagaatgatgaaaaatttcttttctcctcccattacattccatttcaaatttgggtgtgttttgacattaaatggcatgaaataaaatagtatattggtatttgacttctgaggggctgcataaggaaataaac

SEQ ID NO: 657947 - DNA, 556 bp, Homo sapiens
aaatgcagtacctgcatttctcttttccaaactgagatggctatcaaacatgtctttcagaaagtgtttgcaggtgagaagatgcgcaaggtgaaggaaagttttcctgacccagatcttagaaggaaaggagaggatacattttgctttgtggcatatttattgtgggcaaaaagctactattgcctaagggaagtacggctgaccttagcccatccctggggcatatcttgtgcgtgtggtggggagacaaatcaggtagggaacaattccttctcgccttacctctctagcttccatgttcttttatggaacaaatcagattaatactaatgttaaggagagcyttaaaggagaaagagaatcaataaatcacagcctgaaagttgtgtatgttgtgtgcaagctcagaggggcagtcttcttcaatttgccttgtgctggtgaattgcttgaatgaacttcggtatttcttaacaccaggtactggagcccaccttctttctctccctctggtttcctctttaaatcacagcctgaccccagtctttatagt

SEQ ID NO: 657948 - DNA, 622 bp, Homo sapiens
cttttatggaacaaatcagattaatactaatgttaaggagagctttaaaggagaaagagaatcaataaatcacagcctgaaagttgtgtatgttgtgtgcaagctcagaggggcagtcttcttcaatttgccttgtgctggtgaattgcttgaatgaacttcggtatttcttaacaccaggtactggagcccaccttctttctctccctctggtttcctctttaaatcacagcctgaccccagtctttatagtccattgtaagtggaagttatagctctattcttcacccacaccttgctccctatcattgatacttagaagaaagtaacaatttgcagtactggctgaactcctttgggaaagtttctggagtgtatcaaataagaattcatcatagtaacatggtcgttactggctgaacaaaattctttttgagactattgtacttagtcattaaataattgtttactaaggcaattttcatgtttctrgaattcagtgtaatagttaacagctgtatatgtctcacaaaagaaactacttaggttggaaacaatggaaggttgtgtataattaattcaatcaggtcatgaatatttatgtaacatatggcattttaat

SEQ ID NO: 657949 - DNA, 500 bp, Homo sapiens
tgacagagatactagaattatctgacaaatattttaaagcagtgccataaagatgtgcatcacacaaaattatttatatgttcaaaacaaatgaaagcttagagagtgttascaaagaaatagaaagcctcagcaagacatagaagacataaagtagaaccaaatggaaatttgaaaactggaaaatgtgataatgtaaaagaaactacaggtgacctcaagagcagaatgaaaggggcaggggaaacaattagtgaacctgaagagagaaaaattgcctttgataaaattcaacatcctttcatgttaaaaactctcaataaactaggtattgaagaaacatatctcaaaaatagtaagagctatttatgacaacaccacagccaatatcatactaaatgggaaaaagctgaaaacattccctttgaaaaccagcacatgacaaggatgccctcttccaccactcctattcaacatagtattggaagttctagccagga

SEQ ID NO: 657950 - DNA, 468 bp, Homo sapiens
acatacctgagtcctcaaagaggtacctgctagcctgacatattgacagtaccctaccacatactgcgcattccttgcactctggacatactcatctgtcttcagtttrtatctgctacactccctcctactacaaggtgcaagctatttccttttctggaaagctctttctcactccttaagaatcaactacctctctttctccagaagttacctccatcatcactttttaaaggaagttttccaagtttccctcagttatattactatgttcctgcccattggatccattgtagcacttgctgcaatgaaaattttgcatttatttgtgtgattccataagaacaagggccatgtattgtcgttcactactgtcttctcagtgctttgcatgatccacaacaagtagttgttttttggtttaattgtgcaatgaatgaatggcctgaaatgcccaccaaccaagtc

SEQ ID NO: 657951 - DNA, 468 bp, Homo sapiens
acatacctgagtcctcaaagaggtacctgctagcctgacatattgacagtaccctaccacatactgcgcattccttgcactctggacatactcatctgtcttcagtttatatctgctacactccctcctactacaagstgcaagctatttccttttctggaaagctctttctcactccttaagaatcaactacctctctttctccagaagttacctccatcatcactttttaaaggaagttttccaagtttccctcagttatattactatgttcctgcccattggatccattgtagcacttgctgcaatgaaaattttgcatttatttgtgtgattccataagaacaagggccatgtattgtcgttcactactgtcttctcagtgctttgcatgatccacaacaagtagttgttttttggtttaattgtgcaatgaatgaatggcctgaaatgcccaccaaccaagtc

SEQ ID NO: 657952 - DNA, 550 bp, Homo sapiens
gggcgcctgtattctcagctacttgggaggcaagaatcgcttgaacctgggaggtggggattgaagtgagccaagatcgtgccactgcactccatcctgggcaacagagtgagactctgtctcaaaacaaacaaacgaacaaacccctaaaatataaagcttttttttaaaaaaacaatttttataaaatgtaatagggataatagtgatatatgagtaatgactaaacctacaaattgcaaaaatgtaccattttttgtttcaccaatttatataatacaatggataataatactttattaatgtgaaatcttgattggtcataagatttttctgactcacttctctgcaaatcatttctaaagccatcaaaatttatatatatatatattttttttttaaaaaggggctatgctaatcttctctgtatcrttccaattttagtatatgtgctgctgaagtgagcaccaaaatttatattttcaagatgatgacagcagagtaagaaataaaaataaaatcctaagcctcccaaccgactgaatggagt

SEQ ID NO: 657953 - DNA, 538 bp, Homo sapiens
cctacctcataagatagcatctccttacattgcaataacataaaacagcctgacttcttaagagttcttataaagataaaaatgagataagatacgcaaggtgcctagcttagggcctgccacatagaaagccctcaataaacctccttattattcactgttatcccccaacatacaattaacccaaacaccagggaacccaaacaagtgaatcaacaaatgttyattgagcgtctactgcctataggaaaacaaaaactgaaatgataccaggaagttgctggtgtccttccctatccacccctctgtttggtataggactcaggactgctatctcactcccaccacctgccttcttgtccaggtttcccatctcaggcatcagagccactagtttgtcagttgctgaagcccagaagccattctgattccttttcctcactccattcatatcgaattgcttcccaagtgcttttgattttattcctaaatagctctcaaatcccatcctcctccctaacattgctgccatcgcctc

SEQ ID NO: 657954 - DNA, 538 bp, Homo sapiens
cctacctcataagatagcatctccttacattgcaataacataaaacagcctgacttcttaagagttcttataaagataaaaatgagataagatacgcaaggtgcctagcttagggcctgccacatagaaagccctcaataaacctccttattattcactgttatcccccaacatacaattaacccaaacaccagggaacccaaacaagtgaatcaacaaatgtttattgagcgtctactgcctataggaaaacaaaaactgaaatgataccaggaagttgctggtgtccttccctatccacccctctgtttggtataggactcaggactgctatctcactcccaccacctgccttcttgtccaggtttcccatctcaggcatcagarccactagtttgtcagttgctgaagcccagaagccattctgattccttttcctcactccattcatatcgaattgcttcccaagtgcttttgattttattcctaaatagctctcaaatcccatcctcctccctaacattgctgccatcgcctc

SEQ ID NO: 657955 - DNA, 597 bp, Homo sapiens
tgtacaagttagggtatagggtaatctctatataacacaattttcaactacagtgaattaaaaattacaggaattatttctcactcacataatagtccaaaactagggaagtatttagaggagaaaagtggctctatgatccttatacattgctgcaacttgtgtattcaaaatggctacttcagttttcatcatgtgcaggtggtagaaaggagaaaaagttggggaaatcctatgacaattgttttccaggaaatacctgggaattgtacacacatgacatcttcctcattttacaaaaggtccccacttgctttaagacgggctgagaaatacattctttagctgagmaaccatgtgtccagctttgagactggggaaggtaagaatggccagtagggtcatttagttttctgttgcagtgcctcacaaggttgttgtgaggtttaaatcagtcaatatagttatttgcaaatgatttaaatctcagaaaatttaacgtatcattctgtgttgatggtttatttggaaaacttttattttcctaccaaagaaacaatgcacaaacttttggaaaggaatttacatgtaactgag

SEQ ID NO: 657956 - DNA, 611 bp, Homo sapiens
accaccatgattgctaccaaaacctcctcaaccactgtggcttcctccatgactcaagttgtcatccccatcggaattacctccacaacttcarccaaagcttccagaactactttaacctctttggctggataaagcaccagccatttcttgttcagacagaacttttttacttcacagttgtggccattcaaaggatagtatttccaaatgacagtcttatccatgtaggcatggtcatcagaggttacagaagcagagcccctcttcttgccattgcctcagacagttatgatttcaatcactttaatgtttacatactgttcaaaataattacttaggcattatttttcagtgtcttctttaatgccaccaataaagatctttttttacagttaagcaggcccctggtgtttgagaatcttctcttgagacaaccctgtttggttccacaactccttcatccacctgtgtgtccttgcattcaagctgcatccacttccacccacctccaccacagtggcatatgtgacaaacccaaagcttcccgagcatttggatcacttattgctgtacagtccagtaagcattctccattgctcagaatggct

SEQ ID NO: 657957 - DNA, 636 bp, Homo sapiens
caattgagactcctggtaatatttatccagggttgctgccgtaggtaggtggagttttggagaccctcatgattttaggtgggggccgagtagtatgaagaaacatctrtttccttaccttccacaacaaatgtatcaatccattaacacatgaaaagaggaaagcctcagaatgaggggaggtgtcttgcagattatttttcagataactctcatttgcgtttgaaatactaaagaattatgctggagaaattcacattcaagggaggtgaacacctttggcaaaatacaacatcatagcttatctttaggagacaccataaatatccaggtaaaagaagataagtatcaactacaattggggagtcagaggatctttgcatgtagaagaaatgtttataatctggcaaataggagagagtagagaaggagaaagttgcaagagttctatcaccataaactgtgcatggtgtgacaaagctctggctttcctcaggatccatttaattaattaattaattttggtgatcagtgcatttttttacttgatgaattttaataattagaattattatattagaaaaaatacagttcatttttgttgaagttagcttatcactcatctatgagataatg

SEQ ID NO: 657958 - DNA, 536 bp, Homo sapiens
aatatcaggggtgaatttcgcccaatatctggctgaatttctcctgatattagggcatggttttcctgcaggtttatattgaaggtatggggtatctcccattacagatttctattgaaaatcactcatatcgagaacagaaaatatctcaaatcaaatgaaaaaagaaaattaacaggcacaaacaccaagataacaaaaaaaagttggaaatatctggaaaatattttaaagcagccctcatataaatgcttcaatgagcaattatgaccatgcttgaaccaacraaaatattgaaagtcacaggaaaaaaacagaatatataaagaagaaccaaatggaaattttagaactaaaatatgaaataaacaaaattttgaaatgcagtgaatgggctccattagcagaatgaagagggcagagaaaggaatcaacgaagtcaacaattaaaccatgaaaattacccaatctgaaaagagagagaaaacagactgtaaaaaaaaaagcctcagctacatgtgggactgtaacaaagg

SEQ ID NO: 657959 - DNA, 627 bp, Homo sapiens
gcatcagtatattcactgaatgttctctactctttgccttaaataatatctgcttctatttcaagggtaccaggatccttataaacatatcaagtgatcgaagaaggtttactcttccattctgtatatacagagaaatcaggaatgatgaggaagggaggggagaatggcaatttcaacttctttctggttactcttacttttgcaaaataactccctttcacactcactcaaagaccctttctttgtaakgtgatcaactatcactgtttccctggaactgtctcaattttaacactgaaagttttgtgccctggagcacccctcagttacatataaatcaggagagatggtcaccctagacctgaggtaatatcacctcacatccctcctgtgtttctaattcgcgctctgatggaaccacatggtcaaacatggcttctatttctactgcttgacggaaactactaaaagtttgaaagtctccctatttgatgaagtgatctcttttcttgtgccttgagacaaaattcactaaggattttttttctgccattccagaaacttctcaagtatttcaggatctctcacgccaatgatattttaatgttggtgttcctcatgggc

SEQ ID NO: 657960 - DNA, 538 bp, Homo sapiens
gttcactcatgatttggctctctgtttgtctcttattggtgtataagaatgcttgtgatgtttgcacactgattttgtaccttgagactttgctgaagttkcttatcagcttaaggagatttggggctgagagggtgctctctatatattttttgatgccacacatgaatttatccccaggtcaactcccgagaaaaatttgggaacatatagtggttcctcccgtgttaatcgaccagaacaagacggatggtcttaactctcccctcactttgaataagttttagacaggtttcttcctgattatgggctggcaatctcctttttcttagaacatttactttagaaagcttgcaattgtaaattatttctctgtccctttgagatataaatcttctcctgcctccaactagttttataacccaggaatacgtttctcagcgacctaggagcaatcctttgaaatgcaatcatcaagaaaaatagggctcctatcttccagtctctctatgagggaaggagcttaacttatgtaagc

SEQ ID NO: 657961 - DNA, 538 bp, Homo sapiens
gttcactcatgatttggctctctgtttgtctcttattggtgtataagaatgcttgtgatgtttgcacactgattttgtaccttgagactttgctgaagttgcttatcagcttaaggagatttggggctgagagggtgctctctatatattttttgatgccacacatgaatttatccccaggtcaactcccgakaaaaatttgggaacatatagtggttcctcccgtgttaatcgaccagaacaagacggatggtcttaactctcccctcactttgaataagttttagacaggtttcttcctgattatgggctggcaatctcctttttcttagaacatttactttagaaagcttgcaattgtaaattatttctctgtccctttgagatataaatcttctcctgcctccaactagttttataacccaggaatacgtttctcagcgacctaggagcaatcctttgaaatgcaatcatcaagaaaaatagggctcctatcttccagtctctctatgagggaaggagcttaacttatgtaagc

SEQ ID NO: 657962 - DNA, 538 bp, Homo sapiens
gttcactcatgatttggctctctgtttgtctcttattggtgtataagaatgcttgtgatgtttgcacactgattttgtaccttgagactttgctgaagttgcttatcagcttaaggagatttggggctgagagggtgctctctatatattttttgatgccacacatgaatttatccccaggtcaactcccgagaaaaatttgggaacatatagtggttcctcccgtgttaatcgaccagaacaagacggatggtcttaactctcccctcactttgaataagttttagacaggtttcttcctgattatgggctggcaatctcctttttcttagaacatttactttagaaagcttgcaattgtaaattatttctctgtccctttgagatataaatcttctcctgcctccaactagttttataacccaggaataygtttctcagcgacctaggagcaatcctttgaaatgcaatcatcaagaaaaatagggctcctatcttccagtctctctatgagggaaggagcttaacttatgtaagc

SEQ ID NO: 657963 - DNA, 220 bp, Homo sapiens
ctgaccaaaaaaagctcaggaagaaaatgaacccgaaattaactttgttagatttatgtatgcacacacatgtgtgtgtttgtgtgtgtgtctgtgtgagtaactgatacagaattgcatcagccttcactagatccacatctcttaatgtcaaagaaatggaaaaggattttgttagatattaaatkttgtatcagacccctgattttgctggtggcca

SEQ ID NO: 657964 - DNA, 526 bp, Homo sapiens
aatggataaggcatgttccatcttatgtgttgaataaatatcctaaactccacacagccaaatgggaacccctgatttcaccacctcatcccacacaccagcacctcctcacaaaaaaaaaaaaaaaaaaaaaaaaaaaaaaaaacactttgcttcttccccagccttctccatctctggaaactgcmccatcagccaaccaggtgctcctatcaaaaacctaagaacttacttgcattcattccttttttcctcagtccacacatccagcctatgtgcaaatcctttcaattctaccttcagaacacaccccaagtgcatttgcatttctccatctccattgcttcctctgcagtccaagctaccaccatttctcacatggaatactgcaactaactttaagaatctatttcccacacagcagctagaagtacatttttttaaatgcaaattaggccatgtcatgcccatacttaaaacccatcaatggcttcccattgcacttagaatgaaagtcaacctcctt

SEQ ID NO: 657965 - DNA, 526 bp, Homo sapiens
aatggataaggcatgttccatcttatgtgttgaataaatatcctaaactccacacagccaaatgggaacccctgatttcaccacctcatcccacacaccagcacctcctcacaaaaaaaaaaaaaaaaaaaaaaaaaaaaaaaaacactttgcttcttccccagccttctccatctctggaaactgcaccatcagccaaccaggtgctcctwtcaaaaacctaagaacttacttgcattcattccttttttcctcagtccacacatccagcctatgtgcaaatcctttcaattctaccttcagaacacaccccaagtgcatttgcatttctccatctccattgcttcctctgcagtccaagctaccaccatttctcacatggaatactgcaactaactttaagaatctatttcccacacagcagctagaagtacatttttttaaatgcaaattaggccatgtcatgcccatacttaaaacccatcaatggcttcccattgcacttagaatgaaagtcaacctcctt

SEQ ID NO: 657966 - DNA, 526 bp, Homo sapiens
aatggataaggcatgttccatcttatgtgttgaataaatatcctaaactccacacagccaaatgggaacccctgatttcaccacctcatcccacacaccagcacctcctcacaaaaaaaaaaaaaaaaaaaaaaaaaaaaaaaaacactttgcttcttccccagccttctccatctctggaaactgcaccatcagccaaccaggtgctcctatcaaaaacctaagaacttacttgcattcattccttttttcctcagtccacacatccagcctatgtgcaaatcctttcaattctaccttcagaacacaccccaagtgcatttgcatttctccatctccattgcttcctctgcagtccaagctaccaccatttctcacatggaatactgcaactaactttaaraatctatttcccacacagcagctagaagtacatttttttaaatgcaaattaggccatgtcatgcccatacttaaaacccatcaatggcttcccattgcacttagaatgaaagtcaacctcctt

SEQ ID NO: 657967 - DNA, 631 bp, Homo sapiens
ttctttctgctttgaagattcgttctttgtctttgtctttcaaaagtttgattataatggatttctgtatgggtctttttggtttatcccacttggaattaattaacttctgagatttgtatgtcatacttttttcctcaaattttggaagttttcagctattagctttaaaaataatttatcttctctctattcttctcttgatgatcccataatgcacttctcacagtgaaacttcctggtttccataagtcctttaggttctgttcacagtttttcattgttattttctgttcctcagactcaataaatttacatgattttttcaagtttactgattcttttatctgttcaaattttatgttgcacacctccagtgaatttttcaattcaactatcatatattttgggttccaaatttctatttagttttttgtatatgattaacttgtttttgttaatattctcatttttgtycatgaatcatttcctgacttccttcactatttttctcatgtttcccttatctctttgagtatattaaagacaattattttaaagagtttttctcgtatgtccactgcatgtgttttttcagactggttatgtgattattttcttcctttaaatg

SEQ ID NO: 657968 - DNA, 382 bp, Homo sapiens
aaaagtactttgctatcataccccrctgtgaaaagaaagatgagaatttagctacaaataaaggccctgaacaaagcctcaggactctgaaaacatgtaggaaagaagtctactgactgtactcaatttgcactgcaattaaaggaacacccacacacacacagatgagaaagaacctatgcaagatctctggcaactcaaaaggccagcatgtcttctttcctcccaaagatcacactagttccccagcaagggttcttaactaggctgagatggctgaaatgacataaattgatttcagaatatagctaggaacaaagatcattgaaattcaggggaacatcgaaacctaattcaaggaagctaagtgtattagtctgtt

SEQ ID NO: 657969 - DNA, 382 bp, Homo sapiens
aaaagtactttgctatcataccccactgtgaaaagaaagatragaatttagctacaaataaaggccctgaacaaagcctcaggactctgaaaacatgtaggaaagaagtctactgactgtactcaatttgcactgcaattaaaggaacacccacacacacacagatgagaaagaacctatgcaagatctctggcaactcaaaaggccagcatgtcttctttcctcccaaagatcacactagttccccagcaagggttcttaactaggctgagatggctgaaatgacataaattgatttcagaatatagctaggaacaaagatcattgaaattcaggggaacatcgaaacctaattcaaggaagctaagtgtattagtctgtt

SEQ ID NO: 657970 - DNA, 343 bp, Homo sapiens
cagcgagcactcaggtgggagaggagcctacactgacattcaaaacattgagaggaagcatagctgcaacccatgaggaaatacggaggagccacatgactgagcaggagcctacacagtgaccattacacttcagcaccagctactagatcacaccccaaaacttcaacaccaaaagtactttgctatcataccccactgtgaaaagaaagatgagaatttagctacaaataaaggccctgaacaaagcctcaggactctgaaaacatgtaggaaagaagtctactgactrtactcaatttgcactgcaattaaaggaacacccacacacacacagatgaga

SEQ ID NO: 657971 - DNA, 382 bp, Homo sapiens
aaaagtactttgctatcataccccactgtgaaaagaaagatgagaatttagctacaaataaaggccctgaacaaagcctcaggactctgaaaacatgtaggaaagaagtctactgactgtactcaatttrcactgcaattaaaggaacacccacacacacacagatgagaaagaacctatgcaagatctctggcaactcaaaaggccagcatgtcttctttcctcccaaagatcacactagttccccagcaagggttcttaactaggctgagatggctgaaatgacataaattgatttcagaatatagctaggaacaaagatcattgaaattcaggggaacatcgaaacctaattcaaggaagctaagtgtattagtctgtt

SEQ ID NO: 657972 - DNA, 382 bp, Homo sapiens
aaaagtactttgctatcataccccactgtgaaaagaaagatgagaatttagctacaaataaaggccctgaacaaagcctcaggactctgaaaacatgtaggaaagaagtctactgactgtactcaatttgcactgcaattaaaggaacacccacacacacacagatgagaaagaacctatgcaagatctctggcaactcaaaaggccagcatgtcttctttcctcccaaagatcacactagttccccagcaagggttcttaactaggctgagatggctgaaatgacataaattgatttcagaatatagmtaggaacaaagatcattgaaattcaggggaacatcgaaacctaattcaaggaagctaagtgtattagtctgtt

SEQ ID NO: 657973 - DNA, 524 bp, Homo sapiens
cagtaaaatccgttgtttgagaataatgacttaaatttctacaaatcatagtatgcttaggtaccatttcacttataaacatcamctactagggaaaaataatttttaaaatataaaattttcctgagtttctgatcacacagctatgagctaaagaaagctattgtatttgtctttaaatatagttgctttattatttcttaagtatcctgtcatatttcaataatcatctgctaaaaaaattaaacaaaatgaaggaatcaaaacaagaaagaaaatgagacatttttcatagattgtacagcttagatatttcattaattgactgaattgaaaagttggaataggttagataggcattatctcattaatttctattgttatctttcatatatttatagaacaataaatgcacttattttttctatgtatttcctttcaaacatccaagataatatgtaaatcaattaagtcagtaataattggactcgtatttcttaaaaaatgacagattgaaaatatga

SEQ ID NO: 657974 - DNA, 549 bp, Homo sapiens
gcttcaaagattcaaaggacaggctgaatctctggttagggaataatgcagttttattgaatttaaagccaatgctcattaaccgttctgaagttcctaaggcccttaagaattacagtaaatcttctctacctattctccataaatgaaacaacaagcctgtatgatagtacatctgtttgcaacatggtttactgaatattttatgccctttgttgagacctactgctcaggaaaaaaaaaaratttctttaaaaatattactgctcattgatatgaccattagtgcacctggtcatccaagagctctgatgtagatgtacagattaatgttgttttcatgtgtgctaacagaacactcatctgcagttcatggatcagggagtaattttgaacttcaagtcttataactgtagccatggataaaggagtaatttcaagtcttgttttatttaagaaatacatcctgcaaggctatagttgccatagatactaacttctccgatagatctgggaaaagaaattgaaatccttctgaaaagaattaat

SEQ ID NO: 657975 - DNA, 549 bp, Homo sapiens
gcttcaaagattcaaaggacaggctgaatctctggttagggaataatgcagttttattgaatttaaagccaatgctcattaaccgttctgaagttcctaaggcccttaagaattacagtaaatcttctctacctattctccataaatgaaacaacaagcctgtatgatagtacatctgtttgcaacatggtttactgaatattttatgccctttgttgagacctactgctcaggaaaaaaaaaagatttctttaaaaatattactgctcattgatatgaccattagtgcacctggtcatccaagagctctgatgtagatgtacagattaatgttgttttcatgtgtgctaacagaacactcatctgcagttcatggatcagggagtaattttgaacttcaagtcttataactgtagccatggataaaggagtaatttcaagtcttgttttatttaagaaatacatcctgcaaggctatagttgccatagatactaacttctcygatagatctgggaaaagaaattgaaatccttctgaaaagaattaat

SEQ ID NO: 657976 - DNA, 547 bp, Homo sapiens
agtttatttatctattcatatactgaaaaacatcttggttgcttccaagtttttgacagttatgaataaagttgwtataaacatctgtgtgtaagatttttatagacataagtttttaactcctttgggtgaataccaagaaatgtgattactgaatagtatgataagagtatgtttaattttgcaagaaactgccaaattttattccaaagaaactgtacgatttgcattttcactagcaataaatgagatttcctgttgctccacatccttgtcagcatttgatgttgtcagtgttctagaatgtggccaattctaatatgtatgcagtagttttttattattgttttaattttcattttcctgatgacatataatgtgaaatatgttttcatacgcttatttgccatctgtatattttctctggtgaagttctatttaggtctttcaccgatttaaaaatctagtgtcttttttattgtggagttttaagggttctttgaatattttggctaatagttttttttatcagatgtgtgtcctgaaa

SEQ ID NO: 657977 - DNA, 507 bp, Homo sapiens
gcttggcccagccttaaggccaaacccagcactcttttactttcatttagctattgcagataacgataaccaagagattaaatattttgttttttcttactaatttgcatttctgtaattaattagttccgtgaactaatgccctgggactatgagtatgatycgtctctgaattccaccatagcttttacctttagtaattgaatgcagcccagctgcagctctttaagatgggtaaacacgtggccactcaataatcaagctttctcatcacccgcctttttatttttctctttacccatttagttttatttatactttctttttctttattttaaagcaactctgaaatggtctccaaactagaaaaaaaaattacattttccttagcaaaaccacatcattgtgtttttacaaacttcaccaaaaacaccttttactgtctattattttaactcttagtaacccaaattcccagtgaaaaaaattgaggttgtgtaatgtagc

SEQ ID NO: 657978 - DNA, 524 bp, Homo sapiens
ctgtgaccaaatgtgggtggtggttctctccaccactaaacaagcagtctatgctgcaatggacacaactaggtgtccttcaattcagttgtgacactgtctacccagagatagtgtcagatcctgcacatttgttagaggcattagaaccagagcaactccattttgaatagaagctgggtaaaatgaggctgagacctacagggctgcattcacaggcggttaaggcattctaagtcacaagatgagataggaggttggcacaagatacaggtcataaagaccttgctgataaaaacaggttgccgtaaagaagccagccaaaaccaagaaggcaacgagactgacctctggtcgtcctcactgctacactcccaccagtgcaatgatagtttacaaatgccatggcaatgtcaagaagttgatgtttagccctatctggtctaaaaaagagaggcatraatagcccaccccttgtttagcatattatcaagaaataaccataaaaatgggcaaccagcaac

SEQ ID NO: 657979 - DNA, 631 bp, Homo sapiens
ctatttctattttttaaatataattctgaccattctgctataataaaacttaacactaagaattttttaattaaatttaagaaaattcagttgagatattcaacattgagttttttacttccttcatgaaaagagtcagggttttctaacacaaagttgatttctggaaaatgatatgccagacacttataacacaaaaagagttagggacaaaaaaattacttgtattcaattttttmtttagctttttgaggggaaaatttaaaagtttctggcacccaagtctcacagagcagcgtttactggatccacaaatttatccaaggctactctgtatatcttgcatttccaggtctgttgtacttatctagtcagattctttttgactttttgcccgcacagtaatgaaaaaaaaatccatagacttaatcaatttatcacaggttttatagatgatataattaaattaaaccatttacatgaagaagcaagatagagtatttttgacacttggtgacactacatagatctaaaacgtgaattcaaaatcatcaattgcagcagatcctgttgatgccctgtctgacatccccttggtccatttgcataacctgaagttgtgatagaccat

SEQ ID NO: 657980 - DNA, 476 bp, Homo sapiens
agtatttggagatgggtctgtgggaagtgattaggtcatgagggcaaaactgttacggatagaattagtgcctttacaaaagaaaccctagagagctaatttgctcttctgccrtgtgaaaacccggtgactggaccgtcctctatgaacaagcccttgccagacacctaatatgcacatggctttggccttggacttcccagtctcagaactgaaaactgcatttttgttgattataagccacccagtgtatggtatcctgttataaaagcctgagcaaactaagatacaagtaatcccaattcctaccattatttatgtgaccactgccatttattgtattcatttatatactatattcattcaatacattgttacagttattccttttaaacaaaatattatcttttaggtcaattaagaataagaaaaaaacattttattttagtttcattcattccttctatgatattctt

SEQ ID NO: 657981 - DNA, 476 bp, Homo sapiens
agtatttggagatgggtctgtgggaagtgattaggtcatgagggcaaaactgttacggatagaattagtgcctttacaaaagaaaccctagagagctaatttgctcttctgccatgtgaaaacccggtgactggaccgtcctctatgaacaagcccttgccagacacytaatatgcacatggctttggccttggacttcccagtctcagaactgaaaactgcatttttgttgattataagccacccagtgtatggtatcctgttataaaagcctgagcaaactaagatacaagtaatcccaattcctaccattatttatgtgaccactgccatttattgtattcatttatatactatattcattcaatacattgttacagttattccttttaaacaaaatattatcttttaggtcaattaagaataagaaaaaaacattttattttagtttcattcattccttctatgatattctt

SEQ ID NO: 657982 - DNA, 476 bp, Homo sapiens
agtatttggagatgggtctgtgggaagtgattaggtcatgagggcaaaactgttacggatagaattagtgcctttacaaaagaaaccctagagagctaatttgctcttctgccatgtgaaaacccggtgactggaccgtcctctatgaacaagcccttgccagacacctaatatgcacatggctttggccttggacttcccagtctcagaactgaaaactgcatttttgttgattataagccaccyagtgtatggtatcctgttataaaagcctgagcaaactaagatacaagtaatcccaattcctaccattatttatgtgaccactgccatttattgtattcatttatatactatattcattcaatacattgttacagttattccttttaaacaaaatattatcttttaggtcaattaagaataagaaaaaaacattttattttagtttcattcattccttctatgatattctt

SEQ ID NO: 657983 - DNA, 439 bp, Homo sapiens
tcttcctatattttttaaattatattttatatcgtctttaccattaggataagcaggagagaaatgttgaatatattgattaatgtatctgatatatacactcatgtgccacataattatgttttggtcaatgacagaccatatatgtatgatgttggcctcataagattctaatggacctgaaaaatttctatcatccagtgatattgtaagccacytaacattgtagcaaaatgtattgctagtgtttgtggtgatgatggtgtaaacaaatttgctcttctttcagtgatattaaagtacacatgcaattgtgtgcagtacatagtattagataatgataaactctgttactggtttatgtgttttatatactacactttttatcattagaattaccccttctacttatggaaaaaaagttaaaactgtacaatag

SEQ ID NO: 657984 - DNA, 607 bp, Homo sapiens
tttgttacaaaagtaaacttgtgtcatrgggttgtgttgtacagattatttcatcacccaggtattaagcctagtatccattagttatttttcccaatcctctccctcctcccacccttcaccctccaaaaggccccagtgtgtgttgtttctcttgtgtatccatgcattctcatcatttagctcccactaataagtgagaacatgtggtatttggttttctgttactgtgttagtttgctaaggataacggcctccagctccatccatgtccctgtaaaggacatgagctcattcttcttcatggctacataggattccataggtagaacttgtgaatgtgaaataatccttcccatttctgagtctttgactcaacccctcactgtgtggaatttactttctttcttcctacctctgcttagtcaattccaactaatcctcttcgtatattggctaaaaggatttagtgagaagatgataattatggcatagagacagctaagattcagtgaaagataattagtatctctgaaggaaataggaaaagatggtacagaataaaagactttcaaaaatgtaaacattcctgaaatcataggattct

SEQ ID NO: 657985 - DNA, 313 bp, Homo sapiens
tctaaagaaatgtagacaagcatgacatttgtcactacaatgcttattcttcacaatttagacattgattaggtargggttatgagagcaggaatgaaatagagacaaattaagataatatgaatgtaaacttaaggttgactctagatttccaaaccaaagaaagtgttatttattataatgaaaatgaagaaaaggtgcaactttgtggttgaagtgaatttacaatagacgaaaacactgagccaagggaatgtctcccagactcaaaatagtgaaataaaatgagccagtgaatataacagtgaaaact

SEQ ID NO: 657986 - DNA, 313 bp, Homo sapiens
tctaaagaaatgtagacaagcatgacatttgtcactacaatgcttattcttcacaatttagacattgattaggtaggggttatgagagcaggaatgaaatagagacaaattaarataatatgaatgtaaacttaaggttgactctagatttccaaaccaaagaaagtgttatttattataatgaaaatgaagaaaaggtgcaactttgtggttgaagtgaatttacaatagacgaaaacactgagccaagggaatgtctcccagactcaaaatagtgaaataaaatgagccagtgaatataacagtgaaaact

SEQ ID NO: 657987 - DNA, 313 bp, Homo sapiens
tctaaagaaatgtagacaagcatgacatttgtcactacaatgcttattcttcacaatttagacattgattaggtaggggttatgagagcaggaatgaaatagagacaaattaagataatatgaatgtaaacttaaggttgactctagatttccaaaccaaagaaastgttatttattataatgaaaatgaagaaaaggtgcaactttgtggttgaagtgaatttacaatagacgaaaacactgagccaagggaatgtctcccagactcaaaatagtgaaataaaatgagccagtgaatataacagtgaaaact

SEQ ID NO: 657988 - DNA, 584 bp, Homo sapiens
gcagtagtattaaggaaggaaattgaggaagaaatacatatatctaaaacaatccttcrttaaaccaagataattaaaagatagactacatttaatgaaattttaaaatcacatattactagatgatgactggaaaagaaaaccttttgaaaaataaagactcataattttgaactactttatattgaattagaagttcagttaacaataaccaaccaagtaaattttagtaattgaaatgaggtaccagaaggaataagtcaagaaagaaagcagagaaaatttaggataattaaagaaaattatgattcaaaggtaaataaaatttaggcattgagtctatgtaaacggaatagaattaaatagtaaagagaacagaatataaggaataacagataaaacaggcacaaggccagtcgcgatggctcacgcctgtaatcccagcactttgggaggctgaggcgggcatatcacgaggtcaggagtttgagaccagcctggccaacatggtgaaaccctatctctactaaaaatacaaaaattagtcgggcatggtggcacaagcctgtaatccccgctactgc

SEQ ID NO: 657989 - DNA, 578 bp, Homo sapiens
cagttccactaagcagtgtcccaatagggactctgagtggggctctgactccacatttcccttctgcactgccctagcagaggtttcccatgagggctccagccttgcagcaaacttctgcctgggcattcaggcatttccatacatcctctgaaaactaggcagaggttcccaaaccccaattcttgacttttgtgtactgacaggctcaacaccatgtgaaagctgccaaggcttggggcttgcaccctctgaagccacagcccaaactgtactttggccccttttagccatggctagagtggctgggacacagggaatgaagtcaccaggctgcacataatagggaggccctgggcccaacccacaaaaccattttatcctcctaggcctcagggcctgtgatgggagtggctgcctcaaaaatctctgacatgccctttttccctggagatattttccccrttgtcttggtgattaatatttggctcctcattacttatgcaaatttatgcagctggcttgaattcctcctcaaaaaaatgggattttcttttctctcacattgttaggctgca

SEQ ID NO: 657990 - DNA, 583 bp, Homo sapiens
taaagcttagagaagctgtattatgaccccrtacccagccccagccacctctttgttaagtctgtgacagagaaagacaattttctagctgatacaacatggacatgttgtatactgaaaactaatatatgtattgttataaaatatatagttcttataatatacatttatatataatgtgtgtgtgtgtgtatatacacccccatatgtatgtcattatatatacacacacacgtcattaaagaagacctaaataaatggaaagacagccggttctcatggatcagaagacttattagtgttaagatggcaatattctactaattgatctacagatttgacacaatccctttctaaatctcagctacctattacacagaaattaacaaatgcattctaaaatttatatttaattgcaaaacaccgagaatagcctaaacaatcttaataaggaaaaaagttggaacatttatacttcccaattttaaaacttactaaaaatctatggtaatcagtcagtgtggaatagaaattggatttcatggataaacacatatttatggccaagtgatttttgacaagt

SEQ ID NO: 657991 - DNA, 598 bp, Homo sapiens
atgactttaagtaaatgcacacaattctctaaaacaaacatcctaacaaatgatgtttcttataaatatatagtttcaaagttaccagttattaatctttgaatgttaactgttaaaaagtcatttaagtatttaaaaaatttcctttttaataaacatatcgaaacttaactatataaagaaaaagacataaaaagtatacattaatgtcattttttattactcatgcaaatagttctgtacaaatcatgatgaaaaagctagtgtttccattctaacaatgacttttgtcaaccgcttctttacagtcttttattattagttactgaagtttgtggcgaattatttaactataacttcaatgatggcrtaccaaataatttggtcatcgttataattatttctgcaagtgccaacgcgaagatgtataaggtcataatagtttttgatgatacagttttctacctaggtttaataccaaacagatcctggaatgttcagaagaatgtataaaggaaaacaaaaagagaggctagtttatcttgcagcatggtgaatgtttttcttcttttattcattcctttaagtgtctactaag

SEQ ID NO: 657992 - DNA, 597 bp, Homo sapiens
aaataaaatatggtttataattttattagaagggtacttttgaaacatgatataactaatactactttttaaaacatttatgtcagaggcttgtgaaccaaaacaaatccgtcttgagtacggactgggtaaattgagtctgaaacccactgggctgcattcccagacagttaggcattctaagtcacaggatgagatatgaggtyggcacaagatacaagtcataaagaccttgctgataaaacagtttccagtaaagaagccggctaaaacccaccaaaatgaagatggccaccagagtgacctctggtcgtcctcactggtacactcccaccagctccatgacagtttacaaatgccatggcaatgtcaggaagttaccttatatggtctcatccaccccctgtttagcatatcatcaagaaataaccataaaaatgcgcaaccagcatcccttgtgggtgccctgtctatggaatagccattcttttattcctttaccttcctaataaagctgctttctctttactctatggacatgccctgaattctttcctgcaagagattcaagaaccctctgtaacatttcggctgtgt

SEQ ID NO: 657993 - DNA, 606 bp, Homo sapiens
aaatacataattatttgctttttatgttaaaattcagtttcaaatattactaaactactaaaataaaatatggtttataattttattagaagggtacttttgaaacatgatataactaatactactttttaaaacatttatgtcagaggcttgtgaaccaaaacaaatccgtcttgagtacggactgggtaaattgagtctgaaacccactgggctgcattcccagacagttaggcattctaagtcacaggatgagatatgaggtcggcacaagatacaagtcataaagaccttgctgataaaacagtttccagtaaagaagcyggctaaaacccaccaaaatgaagatggccaccagagtgacctctggtcgtcctcactggtacactcccaccagctccatgacagtttacaaatgccatggcaatgtcaggaagttaccttatatggtctcatccaccccctgtttagcatatcatcaagaaataaccataaaaatgcgcaaccagcatcccttgtgggtgccctgtctatggaatagccattcttttattcctttaccttcctaataaagctgctttctctttactctatggacatgccctg

SEQ ID NO: 657994 - DNA, 475 bp, Homo sapiens
ataactcaattacctcctactgggtccctctcacaacacgtgggaattcaaggtgagagttgggtgggacacagccaaaccatatcacccttcatcaaaataatctcctttacaaaacttaaattgaggtcactccttactaccrtgtttatacaaccatgtcctgggctagaattagtaaaagaccaaaccaaaacaaacaaaaaagaacctctaagcaacatatttacttatccttaaagcattaaggtggacaaaaagtagtattatataggtagctctctgtagaaaaaaaaaatcagcaggtaaaaagtcatttgtctgtatgccatagtctacgggaaaagcaggtaaatatgtcatagtaatagttttggctactttattatttaaaatagaaaacacaggagaatgtatgccgggcacagtggctcacgcctgtaatcctagctctcagggaggcagaggcgagagg

SEQ ID NO: 657995 - DNA, 475 bp, Homo sapiens
ataactcaattacctcctactgggtccctctcacaacacgtgggaattcaaggtgagagttgggtgggacacagccaaaccatatcacccttcatcaaaataatctcctttacaaaacttaaattgaggtcactccttactaccatgtttatacaaccatgtcctgggctagaattagtaaaagaccaaaccaaaacaaacaaaaaagaacctctaagcaacatatttacttatccttaaagcattaaggkggacaaaaagtagtattatataggtagctctctgtagaaaaaaaaaatcagcaggtaaaaagtcatttgtctgtatgccatagtctacgggaaaagcaggtaaatatgtcatagtaatagttttggctactttattatttaaaatagaaaacacaggagaatgtatgccgggcacagtggctcacgcctgtaatcctagctctcagggaggcagaggcgagagg

SEQ ID NO: 657996 - DNA, 475 bp, Homo sapiens
ataactcaattacctcctactgggtccctctcacaacacgtgggaattcaaggtgagagttgggtgggacacagccaaaccatatcacccttcatcaaaataatctcctttacaaaacttaaattgaggtcactccttactaccatgtttatacaaccatgtcctgggctagaattagtaaaagaccaaaccaaaacaaacaaaaaagaacctctaagcaacatatttacttatccttaaagcattaaggtggacaaaaagtagtattatataggtagctctctgtagaaaaaaaaaatcagcaggtaaaaagtcatttgtctgtatgccatagtctamgggaaaagcaggtaaatatgtcatagtaatagttttggctactttattatttaaaatagaaaacacaggagaatgtatgccgggcacagtggctcacgcctgtaatcctagctctcagggaggcagaggcgagagg

SEQ ID NO: 657997 - DNA, 598 bp, Homo sapiens
agtcctgcatttttattttgcactgggccctgcaatttatgtaattggagattgccttgatatctgcatttgtggttttcaaaaagtctgccacttcacaagcccacactttatgttggagtcattgtgtgggtgtaaattgtgtgagtaggtgtgtgttagcagggttggagtgaggaggggaaagcgctggagagcaggcgacagtggcaagaccaaattaagagcacacagatttcagaaaaggaagtggtcattggattctctgaagggctcacagtattaaagtcacaggaacaatgctgagatawtatcatgttaaattttccaagtcaaatggtgaagagatggaggtcgggggaggagtttcagcttcaccatggcagcaaaaaggttttcagaagcctgcgtgaagcagttctctctcagaactaaatgtacagaatgtaaaagacaaccagaattggttgtaaatgtcatttgttgtgagatggaaagtaatctcaagatttttcccatatttaacccttggcatttttgtgaaaaagagttgctgcctcccagtgcccatgcagtgaatgttttcaaacataccacc

SEQ ID NO: 657998 - DNA, 597 bp, Homo sapiens
gtgacctctactaaattttaataccagtggatggaatttgaggtattgattatatttactaaaaatcatattcaatattacaatattaaaattggaagacacgaacgtggctgttattatcaggccaagaagggtcaaatgactkgaggaaattacacaactattagcagtaagagccagtgttcgttgagggcttgttatgtgccatctacttgctagttttgtaggtacgtattacaaattaggatgacatatatttaatttatatggcatagctgaccaatgttagagttttttccttctgctttcaaaaggaaagttaacatttttaaaagtaatcatttggtctcataagttgcattatattgcaattattaagaagaaagattatggctcatttttcttctccttagattgttgagaagtaagaaggcatatcattttttaaaaagtaatatctttgccaatgtcttttttttcagttacattttcttctacactaggttttaaaaaaggctcccaaaatacattgtcaaaagtctgccagaatggaattacatatatgaaaatttaaagctgtatgaccagtagatgctg

SEQ ID NO: 657999 - DNA, 455 bp, Homo sapiens
ttaagaagtgagcttgggttagtctgaccaagccccatcaagtgatatgatctaagggtgttggttgtgagaagataaagctagatagtagcattgaggtttgtgtaagaaggtgataactactttgagagatacttaggagtgagtctgagtataacattttagtgagcgtaaagggacaaaactagaaaatcaagtataagtattaatatggaaagagtatttgttctaaaaaartcaagcatatattgtttctctctctctctctccccctcccactctccctctctttctctccctctcccacccttcctccctctctctccctctctccctctctctttgtgtgtgtgtagcatggttgacaaatattttcaaaaatataaatattcctgtctcttttgaatttctgtattcatgacattctctctaatacatccaaagaatacatgtct

SEQ ID NO: 658000 - DNA, 600 bp, Homo sapiens
aaactgaaacatacccataattaggcaaaaaagagatttataattcaaagtctatgtttatgaatcactacaaatgcaagctatccatattaaacaaaatacatatttctattacatataacacatataattctacattaatataaatagttgattaagcatgtattggaactatttctaaataatgccttttaagtaatagtgatatttaaatacttaagctattaaaaatcctccaaatttataaatatttaaaatatggtagctcaggcaagcacatgtttatatattttggagtcatcgtcaatgcaggsgctaactctatgctatgttgccctctagaacattcagaattacactttgttcttcagagtagcagaattcagaaagtctccctcagattttgttactctagtcaagtcacatccaagagataagccaaataatcaattaaagtaagatctttattactaatttcttatattagttgggttatcatttgaatagtcatgtaggtgaggacctttttgatatggcctaattagattagtcaatgcatctctcccataataagttctttcatgtaaatgttttagaact

SEQ ID NO: 658001 - DNA, 557 bp, Homo sapiens
tatctgtgcttcaacataccactgtattctyctatttctagtttgtaccattccttatgcctaaaatgccttcatataagggatgcagaaatttagaaaatgcttttataaactccatgtgcaaacttacaatagagaattaaaggtctcctcaaagcatgttccagtaaatacctcatctccaacctcaatcatgtcatttacttctgtagtttgaatcactaaatctgtgactttttctccatttagcctgaatcaaactgtttatttctaaaagccagcaacttctatgaacactaagggtcacatattcagcagaaaagagaattgtatattattttactgaagaatattacagtcataaaattttagatctagaaatgtcctcagagatgatttagcaataactaatgaccaggaaggttaaaaaacacccaaggttccagaaaaatatatggtagtgagtgttgccatctaagagaaaagccagagggactaagtccaatagccacgtacggtagagcagacctttttggtaatgtagtaagataccttct

SEQ ID NO: 658002 - DNA, 557 bp, Homo sapiens
tatctgtgcttcaacataccactgtattcttctatttctagtttgtaccattccttatgcctaaaatgccttcatataagggatgcagaaatttagaaaatgcttttataaactccatgtgcaaacttacaatagagaattaaaggtctcctcaaagcatgttccagtaaatacctcatctccaacctcaatcatgtcatttacttctgtagtttgaatcactaaatctgtgactttttctccatttagcctgaatcaaactgtttatttctaaaagccagcaacttctatgaacactaaggrtcacatattcagcagaaaagagaattgtatattattttactgaagaatattacagtcataaaattttagatctagaaatgtcctcagagatgatttagcaataactaatgaccaggaaggttaaaaaacacccaaggttccagaaaaatatatggtagtgagtgttgccatctaagagaaaagccagagggactaagtccaatagccacgtacggtagagcagacctttttggtaatgtagtaagataccttct

SEQ ID NO: 658003 - DNA, 557 bp, Homo sapiens
tatctgtgcttcaacataccactgtattcttctatttctagtttgtaccattccttatgcctaaaatgccttcatataagggatgcagaaatttagaaaatgcttttataaactccatgtgcaaacttacaatagagaattaaaggtctcctcaaagcatgttccagtaaatacctcatctccaacctcaatcatgtcatttacttctgtagtttgaatcactaaatctgtgactttttctccatttagcctgaatcaaactgtttatttctaaaagccagcaacttctatgaacactaagggtcacatattcagcagaaaagagrattgtatattattttactgaagaatattacagtcataaaattttagatctagaaatgtcctcagagatgatttagcaataactaatgaccaggaaggttaaaaaacacccaaggttccagaaaaatatatggtagtgagtgttgccatctaagagaaaagccagagggactaagtccaatagccacgtacggtagagcagacctttttggtaatgtagtaagataccttct

SEQ ID NO: 658004 - DNA, 570 bp, Homo sapiens
ccaacttcacatggtctttccctctgtgtgtccatgtctcgagtgtccctgtcttttctcttataagagcacctgttcttgaatgtagatcccaccctaaacctaggatggtctcattttgaaatcctaaactaattacatatccaaaaccctatttcaaataaggtcacattctatataaataattttatatatagtcattcatttacattaataaattgttgccataataaattattgatgcctacattatgacatccattcactcatgcrttcatttattcattcaaaaatattaatatgtatcagacactgtgcaaagaattggagatataacaatgaatttgacagaaacagtccctgccctccaagatgttagaatctaatgataaactaataagtaatcaagttgtgatacatattacaagaagtatagtctccccaccttctagccccaattattatttacttcctctgtgttctcaacaaaatttctacatatattggaagttatctcaatatgctatacattttgtttttatacctgtctctaaaagtagactatgagtt

SEQ ID NO: 658005 - DNA, 570 bp, Homo sapiens
ccaacttcacatggtctttccctctgtgtgtccatgtctcgagtgtccctgtcttttctcttataagagcacctgttcttgaatgtagatcccaccctaaacctaggatggtctcattttgaaatcctaaactaattacatatccaaaaccctatttcaaataaggtcacattctatataaataattttatatatagtcattcatttacattaataaattgttgccataataaattattgatgcctacattatgacatccattcactcatgcgttcatttattyattcaaaaatattaatatgtatcagacactgtgcaaagaattggagatataacaatgaatttgacagaaacagtccctgccctccaagatgttagaatctaatgataaactaataagtaatcaagttgtgatacatattacaagaagtatagtctccccaccttctagccccaattattatttacttcctctgtgttctcaacaaaatttctacatatattggaagttatctcaatatgctatacattttgtttttatacctgtctctaaaagtagactatgagtt

SEQ ID NO: 658006 - DNA, 554 bp, Homo sapiens
tcccctaggctaacagttacgtctgtcaacgttacttaaattaatctgaacttcacctctaggtagttgaggtacctcaaaccccttctagctctcccaagccrtagttacctttctttacaaccaaatagcttaaaacaaagatggctttcattcatcagttaacaatccagctatgcttaccaagctgctggccatttttaagtaagcaaaatctttattgttttgaggggcaagaaaggggatggataaacacatacctctacagttctgccatgctcctaagcagccttggcacaagttgctgtcgtgatgggcaggttgatgtggaactagctgatcattcacaaacattcactgagtgtctcttatggcacaacaattagaaataaactgaacaagacagtccctgctctcaaggagtttataatctaatggggtatttgaaacccactgtgcatcggaatcaccaggagggcttagtagctatgtagaatctgggctccacgatagtgcagattttgcttcaagaggtctcagctggttcccaagag

SEQ ID NO: 658007 - DNA, 608 bp, Homo sapiens
attctgttcaacaagtgaacatatgaagcattttctaggacagaccatgttcagccacaaaacagtctaaacaaatttttaaaaatcaaaaccatatcaagtatcatttcagactacaatggaataaaactggaaataaatacctagaggaactttggaaacgatacaaatacatagaaattaaacaacttgctcatgaatgaccacgaagtcaatgaagaaactaaaatgaaaatcaaagagtttcttaaaataaatgaaaatggaaaaacagcataccaaaacctgtggaatacagcaaaagcagtgctgaggggaatttgcaacaataaacccctagatcaaaatgtagaagtgctacaaattaacaatctaatgacacatctcaagaaaacagaaaagcaaaaacaaaataaacccaaaattagcagaagaaaagaaataatgaaaatcagagtagaattaaatgaaatagagacttaaaaatasaaaggatcaattaaaaaaaaagttgattcctttaagccactagctacactaaccaagaagagagaagacccaaataaacaaagtcagaaaaaggagacatggaaaccaataccacagaa

SEQ ID NO: 658008 - DNA, 329 bp, Homo sapiens
gtaccctgtattttaacatctacaaggacaaggaaggcaggattgatggccctgcagtcacgtcctgggctgacactggcagtggaaggtaactcatgcttagcacttgacgtaattttttgatgactgaaacctgatcccatcgaccgatcccctagtggctgatctcatctctttaccatcagagaaactgaagtcgagttaccaggaaagatwcaaaagaggaagcgagtgggcaacgtctcagcatagaaaggagtaagcttgtgtttgatcttttgtccaaagaacattcctaattctcacaaatgggatggccgaacccaaaa

SEQ ID NO: 658009 - DNA, 613 bp, Homo sapiens
aacatgagtgaggtctggtatacagaaagtaatttatttccaaagctagctaaggtgaagacacacaagtgtctcacctttaaatataccacttcacctttagagccgaaagtgggcatttttgaaagacaggagagcaagtgaccarggggtcagggggtcacttgttagctctggtgtctaatctactgaacatagagctggtgactgctggtgcctttgatggcaggactaagctgaaaactccccacatgtgaaggagtttcatagaaactggcttttatttccggcaacaactctcggtgggtgaaagtcccaaggcaaccccctggagggtgagagttccatgttttagtctgcaaactgactgttaactctcaaagagagatctgtcttggagcacgtagatgaaattgccccataggcagtgtttggtgaaggggaagcaaaaggttatctttacatttctaaagggctaagtaggaagtagggaatgagaaaataagagaaagagaaaaaaaaatgtcttagaaaaatgggagtattcagttataaaaggaaatattaggaagatagaatggacagaattggtaagatagatttcaaatgtgag

SEQ ID NO: 658010 - DNA, 412 bp, Homo sapiens
gttatatttcctgcctaagatgtttgtatgggtgagtgaaaggtctgatgaagatagttcctttttgcccccaaaggttttattgatcatgctgayaatgaatttattgttattttaatcttttactgttatactcaggcttaaattctctaccctatacacttcagttgacataattttaatttccactatgatgcttctctcttttctatcaacactctctccccgcagggtttcatctagatcaggagtcagcaacatttttgacaaagagccagacagtaaatattggaggctttgtgttgccaagaggcaaatttatggaaatttccctgctgaaaaatttccctatattttacattttagacttataaatgatacacctacttataactcatgagccatacaaaca

SEQ ID NO: 658011 - DNA, 541 bp, Homo sapiens
gggtgtgtctccacatttctccacatgaatattaagagtgttgatttttactmtgttgatttttagcttctgtaaaggtaatttttatttttatacttatttttatttatcatatgactattaattgctcccaggtaatgtggactaaaagggctttcttagtttacacacactcatgcacacacatacacagatatgtatgcacacacgtgagacatttgcaattgtaaaacctactacggagtaaaaaggaaagggcataggcaaaatgccatggcttgcctacaactacaatttggatattagatatttatcttttgttctttcttcatagaactgctttgactgctcaggcttttaggggctccaaatgaattttagaatagtttttttttttctaattctgtggaaaatggtatgcatagtttcgtagggatagcattgcatgtgtagattgctttggacagtatggtcattttaacaatattgattcttccaattcatgagcatggaataattttgcatttgtgtcatctatgag

SEQ ID NO: 658012 - DNA, 590 bp, Homo sapiens
aggctacctatgagatgcaactcatgttgcagagctttttagtgatcaagctgagaccctgccattgctcagctccctcacctgctttatcctgcttccttcacttcctttcttatagaagccactctccataagtcacatactccagaattcttttctcaggatctgcttctgggaacgcaacctaaggcagtgctttatgtgaattagcatcctcctcctcttttattttatctcaagcctcttaaactactggtttaatgagtattgcaacaactttggagcgagcagaacatatataaacataaaaggccatttggaaaaaaaaataatgtcagcaccttgacytaagattttcaatggttcaaaacacttttggaaataatggaaaagtaaaactatttctggatcaaggaaaatatacaaagaactggcatgcttgtttttgaggagaaattatccttaacagatttttaagtattactgtgaaaaagacaaataattctcttgaaggggatagcctcctagattctgtctcttgacttaattgcattgctttatcttgcttattcttaactaaggattaaaac

SEQ ID NO: 658013 - DNA, 506 bp, Homo sapiens
aatctctcatcatttgcttgtctgtaaaggattttatttctccttcacttatgtagcttgtctgcacatgaaattctggattgaaaattcttttcttggaggttccaaggtggccraataggaacagctccagtctatagctcccagcatgagtgacacagaagatgggtgatttctgcatttccaactgagatactgggctcatttcactggggcttgtcagacagttgatgcaggacagtgggtgcagcccacggaccatgagctgaagcaaggcgaggcaccaccccacccgggaagtgcaagggatcggggaattccctttcctagccaagggaagctgtgatagacggcacctggaaaattgggtcactcccaccctaatactgtgcttttccaatggtcttagcaaacagcacaccagcagattgtatcccatgcctggcccagagggtcccatgcccatggagccttgttcactgctagcacagcagtctgagatcgaa

SEQ ID NO: 658014 - DNA, 506 bp, Homo sapiens
aatctctcatcatttgcttgtctgtaaaggattttatttctccttcacttatgtagcttgtctgcacatgaaattctggattgaaaattcttttcttggaggttccaaggtggccaaataggaacagctccagtctatagctcccagcatgagtgacacagaagatgggtgatttctgcatttccaactgagatactgggctcatttcactggggcttgtcagacagttgatgcaggacagtgggtgcagcccacggaccatgagctgaagcaaggcgaggcaccaccccacccgggaagtgcaagggatcggggaattccctttcctagccaagggaagctgtgayagacggcacctggaaaattgggtcactcccaccctaatactgtgcttttccaatggtcttagcaaacagcacaccagcagattgtatcccatgcctggcccagagggtcccatgcccatggagccttgttcactgctagcacagcagtctgagatcgaa

SEQ ID NO: 658015 - DNA, 412 bp, Homo sapiens
tgaattctggcaaatctcaatcctggtccttaaaatatgcgtaagaataatgcctaccttacaagtttcctgtgagaatcaaatgacaatccatgtatagtgcttagactggtgactggcagaaagcaagagacagtatacattaattattgtttactccttggtttgaatggtttgatccaactctttctagagagtaagtttggctgtgtgtggatgaaggaggagggaggatttttgcacagggagggaggttctttcaagagctggagatgggaaccaagggggaagaaggctgaagaaagcagaaacagggggcactggagacagaaacacctgctcygcaattttgtccagcaaggtccagccccatctggttttctgactttccattttgatgaggaaaccccag

SEQ ID NO: 658016 - DNA, 669 bp, Homo sapiens
ctaacatgaatgttaccctggaggaaggtttagactgctgtgttgccaggctctcttgtctgctcttaccatttttatcaataacttggatgatgatgtagctgggatgctaatcacatttgcaaatggcctgcagctcattggaaaagctatctgctggatagcagaatcagaattttagaatatctaaatgggccaaatctaacaagaaggaatttaataagaaaaatgtaaagtcctgtacttgggtccaaaaaataacatcaagtatagkctggggaaattgtgacataatagcatgtgagtgtttcaggtattcgtattgacatcaaaatgaagtaaagattagcaataaaatgaacaacaaaggaagtactggttgcattaatactttagtgcagataaaaagggacccacctggaactattctcttttttcttggtcagaccactcttagagtgttatgtttagtttggggaacagtttggaagtaacatagacaaagtactttgggacacaggggaatgtcagaacagtaagaggaagtaagagttattgaaggaaactagaaagaagcagtcagggagatgagtgggaataaagtacttccatgtctaaaagtattaaaagggtaccacatcagcagtggttcgatggaatgaatatatt

SEQ ID NO: 658017 - DNA, 351 bp, Homo sapiens
gacagtccacttcaaacatcactgtaaaagtggtaaaaaatgatttcattgtgattatgttaaaatttttgatgtctctttcacttgttttaggaaatctgtcttctgatatttatacyggatggattctttacctgtattttgctgaagcccaattccctgcctcttcagggcttcaatgatggcgcttttgtttttacagtcagcttgtgatgttttgtccaaaggaagattctgataacaacttcagcagcgagaaaagctggatgtaaatttatagttattgtccttttcaatgtaaaaaaaaagttgaaaaatactgaagactttttcttagtgttaatttctctt

SEQ ID NO: 658018 - DNA, 598 bp, Homo sapiens
atcttctccttcagtaacagagttttcacatcccagaaggttgagaaggatatcattatctttatcatctatttcacatcccagtagcatccagctttccacattattgccttctgaaatggtgctctcttcctctgcacttgaactgacctctataatcatggcctcttggattacacctgatctctcttcaatatcactcttgcatttcttatcaaacagctcattagattgaagaaaagcagaaggaccatgggtattttcttgtgcttgagctctaacattctttcctttacatctataaatactatcttcatcagacagtgatgacctctgacccatctgacagctggatgacctcactatctgaaaggacaattagcttcttctgatttggtttactactcgaagattccaaattcccagagttctttttttcatgttcttcctccctgatgacatcatcaagatcttgggcataataaattyggctatagagttgaaattccacctcactatcaacactcagttcactagataactcgtccctataaagatcatcttcatatgcttctatagtctcatagccaccaaacat

SEQ ID NO: 658019 - DNA, 548 bp, Homo sapiens
aaaattctcccagataattgcctctcctttctttggccagtactgagattggcctgggaggctcctggaaggtggggtcccactctctatgtccctgcttcccagagtttttccctgaggcctcaccctcatcctagggaacataagaactttgcccgggcccatctgagcatgagagctgggggaagacaggacccaattgccaatcctggtatattcgaactaatgagggctttctctatttagactgctagcacaactagaagtaagaaaatgcttaarttatttttaaattgagttgcaaatacaagtaacatacttctgaaagaaaagttctaattttcattaaacctttaatttattctctacctcattttcttgttgcagctttacatgatggtgggttggggaggttttcatgatctcctttttttcagatgaggaacctgaggcacagaataggcaaatggcttgtccaagatcacacagcaagacagcagtggagataagagtcactgcttttgattagcccaaatccttttccacct

SEQ ID NO: 658020 - DNA, 548 bp, Homo sapiens
aaaattctcccagataattgcctctcctttctttggccagtactgagattggcctgggaggctcctggaaggtggggtcccactctctatgtccctgcttcccagagtttttccctgaggcctcaccctcatcctagggaacataagaactttgcccgggcccatctgagcatgagagctgggggaagacaggacccaattgccaatcctggtatattcgaactaatgagggctttctctatttagactgctagcacaactagaagtaagaaaatgcttaagttatttttaaattgagttgcaaatacaagtaacatacttctgaaagaaaagttctaattttcattaaacctttaatttattctctayctcattttcttgttgcagctttacatgatggtgggttggggaggttttcatgatctcctttttttcagatgaggaacctgaggcacagaataggcaaatggcttgtccaagatcacacagcaagacagcagtggagataagagtcactgcttttgattagcccaaatccttttccacct

SEQ ID NO: 658021 - DNA, 520 bp, Homo sapiens
tacatacatacctgagactgggtaatttttaagaaaagaggttttaattagcttatggttctgtgggctgtacaggcttctgcttctggggaggcctcagaaaacttacaatcacggtggaaagcgaaggggaagcaggcacatattcacatggctgacaggagagagagagtgaagaggaagtgctacacactttcaaacaaccagatcttgtgagaactcactcactattatgagaagagaaaaggggaaatccacccccatgatcmaatcacctcccaccagattcttcccccaacattggggattacaattcaacatgaaatttgggtggagacatgaagccaaaccacaccaggcctccaagtccttatattgaattttgaaaacattttgatgctttcagcttgccttattcttatatatacatacccaactgactccatttctaataaataatgggaggaactggtgaacattttcatggacttaggaacacacttgtcatatttatctacat

SEQ ID NO: 658022 - DNA, 535 bp, Homo sapiens
atcatgcgggtggatctttctcatgctattctcatgacagtgaataagtctcacgagatctgatggtttcataaagggaagttcccctacacacgctctttcttgcctgccaccatgtaagacatccctttgctcttccttcttctttcaccataattgtgaggcctccccagccatgtgcaactgtgagtccatttaacctctttcctttataaattaygtttttattagcagcatgagaacagactaatacactctctaatacccaataccttgggcttacacgagcactgctcccctttcctgaaactctcctcccttccttctcacccagaagcatccctgtgatgtctctgatcctactgtaaattccatcttttctctgctatcaaatctgcaagcaaagctctgtctctgagccccatgtcctcccagtgtcatgcatatgcagtagcccctcatccatgttatccaaccccagtggatgccggaaacctcggaaaattctgaacgccatatagcctatgtttttccc

SEQ ID NO: 658023 - DNA, 535 bp, Homo sapiens
atcatgcgggtggatctttctcatgctattctcatgacagtgaataagtctcacgagatctgatggtttcataaagggaagttcccctacacacgctctttcttgcctgccaccatgtaagacatccctttgctcttccttcttctttcaccataattgtgaggcctccccagccatgtgcaactgtgagtccatttaacctctttcctttataaattatgtttttattagcagcatgagaacagactaatacactctctaatacccaataccttgggcttacacgakcactgctcccctttcctgaaactctcctcccttccttctcacccagaagcatccctgtgatgtctctgatcctactgtaaattccatcttttctctgctatcaaatctgcaagcaaagctctgtctctgagccccatgtcctcccagtgtcatgcatatgcagtagcccctcatccatgttatccaaccccagtggatgccggaaacctcggaaaattctgaacgccatatagcctatgtttttccc

SEQ ID NO: 658024 - DNA, 566 bp, Homo sapiens
aaatttctgttttttataaattacctaacctcaggacctctgtcatcgcagcataaatgacctaagacaagtagactaacagaatgaatacaagcaagatataaaatattagagggttgcatggcacatggaaaatgataacactgaataactacacaactaataatgaatgtaatttgtaataactacaaaacctgtataaataaaggtacctaagaattttcctagccgagattatcagtttaccctaggctcccaaagctgcctagcatggtgaaatggaatcataagggtaaggctgagcctgttttctacaaagttctatctgatgatttgccaaggttagtaggatcactgcatcacagttgtcggataccaacattggataatcagtaagcagccctgctcagaagacacagtgggctaggcaattgcagaagctcccttccttagtaatccatgtgagttgtcytgagattgtcttgaagatctctggtgtttaaattgctctccttgtgtaagtctgttgcctagagagttggactgaatcaaagtaaaaagtggaa

SEQ ID NO: 658025 - DNA, 478 bp, Homo sapiens
cctgttgctattgtggggagctcacatgttgtatcagcttacatgccatgtgactggcatcacttccatgtgggcagttcctctctccagtaaattgcggatagcagtaaaaagtgattgctcatggttcttgcatatttttctttcagtgcaatattgtaaacctggaataacacctggaacccatacaaagtgccactartgatgccagaaatgcttccaagcagcagacaaaagtcataactttacaagaaaaagtttaattgcttgatacttattgtagattgaggtctgcaactgcagttgcccactgtttcagacagaagatttaccttgaaaacagatgacataaacttatagtagaaaataaatacagcacagtactgtaaatgtattgtctattccttgtgattttcttaataatattatcttttctttagcttactttattgtaagaatacaatgtataatacatata

SEQ ID NO: 658026 - DNA, 606 bp, Homo sapiens
agaaaataaatacagcacagtactgtaaatgtattgtctattccttgtgattttcttaataatattatcttttctttagcttactttattgtaagaatacaatgtataatacatataacataaaaatratgtattaattgactgtttatgttaccgataaggcgccagtcaacagtcggctattaatagttaagttttgggggagtgaaaagttatatgtgagtttttgactgcgaacatggcaggtgcccctaacttttgcattgttcaagattcaactgtattttttaaaaataaatgcatataaaatgctttgcaaatttctggcacataagcatatttgactatagttagttatttttataacaaatacggtaaaaacttgattaagataaatgctaaaatagaaaaagaagtgatctttgaaggttccgtaagggcagggccgattaagtctgactgggtcccagctgggccttagaggctccagaccaataatccgtggacagctaaacccactgaccaatagtctgataatgaatgcaaaccaaccatgcccctgcagctgatggtgatctcaaccttttaaacatagaaattaagaca

SEQ ID NO: 658027 - DNA, 600 bp, Homo sapiens
tgcaagtggaaatactgaggcccaggaaagtagagtgaggcccctgaaacctcatacctggttccatgtgctgagtctaggacaaaggggctctttcatcctatcgcatcataaagataagccagttcttagcctttctttctctttctttctttctttctttctttctttctttctttctttctttctttctttctttctttctttttctttttctttctttctttcyttttctctctctctcattctctctctttttctttctttctctttctttttttctctttctctctctctctctctcttccttccttctttccttccttccctccttccttcgttctttttatcttttttttttttctggagtctcgctctgtcacccaggatggactgcagtggcgcaatctcggctcactgcaagctccgcctcccgggttcatgccattctcctgcctcagcctcccgagtagctgggactacaagtgcccgccaccatgcccggctaattttttgtatttttagtagatggtctccatctcctgacctcatgatccgcctgtctcagcctcccaaagggctagcattacaggcttgagc

SEQ ID NO: 658028 - DNA, 600 bp, Homo sapiens
tgcaagtggaaatactgaggcccaggaaagtagagtgaggcccctgaaacctcatacctggttccatgtgctgagtctaggacaaaggggctctttcatcctatcgcatcataaagataagccagttcttagcctttctttctctttctttctttctttctttctttctttctttctttctttctttctttctttctttctttctttttctttttctttctttctttctttttctctctctctcattctctctctttttctttctttctctttctttttttctctttctctctctctctctctcttccttccttctttccttycttccctccttccttcgttctttttatcttttttttttttctggagtctcgctctgtcacccaggatggactgcagtggcgcaatctcggctcactgcaagctccgcctcccgggttcatgccattctcctgcctcagcctcccgagtagctgggactacaagtgcccgccaccatgcccggctaattttttgtatttttagtagatggtctccatctcctgacctcatgatccgcctgtctcagcctcccaaagggctagcattacaggcttgagc

SEQ ID NO: 658029 - DNA, 539 bp, Homo sapiens
tagctccaatcccacatttcagaccatctctcaatctctttaagaaacttggagtaggaggatggcggatgaaaaaaatcttttttttttttttgagacggagtttcgcttgttacccaggctggagtgcagtggtgtaatctcagctcactgcaacctccgcctcccgggttcaagcaattttcctgcctcagcctcctgagtagctgggattacaggcacccrccaccacacccagctatttttttgtatttttagtagagacagggtttcaccatgttggctaggctgctctcaaactcctgacctcaggtgatccacccacctcggcctcccaaagtgttgggattacaggcatgagccactgcgccctgccaaaaaataattttagagcttttttacccacagtatcaaagctactgatatcagttaaggatatgtatcttcattgccaagcttgaatcagctttggggggtgggtgggaggagcaaggaattaagggatgctcttaattctgccaaggttgtctacaggaggc

SEQ ID NO: 658030 - DNA, 625 bp, Homo sapiens
ccagccagcgggtccgcctgccctggggagtcctggctaggtcctgggggcctctagaacacaaggaagtcagatataattctcaatggcctgggcaatcatgatagagtcttaagtagtggaagatcacgcaccaggggccagcaggtccaactctgccacctgcttttgtaaaaaaaagattgccacatagccacaccaatttgtttacatattttctgtgctgttgggtactacaaaggaataawtagtagttgtgacagagaccttaaggccccaaagccaaaaatatttaccatctggcctttaacagaaaaaaattgcccatacctgtcctgtaccacgtgatctgtggcaaactcaacctctttgagcatcagtttctcctttataaaatgatgctggtacactggaaacaggtaaattttatggtatgtaaattatatctcaatagaactgtttatagaaatgaagatgtcaatgggacaggcatggaactgctggaaaaagggttaaaaggaatatcaaataaaaatcacagagcagattggcacacagagctcaacagcactttctactgctgatactatggctaacagcttggtaaagcaggtcttattatcct

SEQ ID NO: 658031 - DNA, 625 bp, Homo sapiens
ccagccagcgggtccgcctgccctggggagtcctggctaggtcctgggggcctctagaacacaaggaagtcagatataattctcaatggcctgggcaatcatgatagagtcttaagtagtggaagatcacgcaccaggggccagcaggtccaactctgccacctgcttttgtaaaaaaaagattgccacatagccacaccaatttgtttacatattttctgtgctgttgggtactacaaaggaataattagtagttgtgacagagaccttaaggccccaaagccaaaaatatttaccatctggcctttaacagaaaaaaattgcccatacctgtcctgtaccacgtgatctgtggcaaactcaacctctttgagcatcagtttctcctttataaaatgatgctggtacactggaaacaggtaaattttatggtatgtaaattatatctcaatagaactgtttatagaaatgaagatgtcaatgggacaggcatggaactgctrgaaaaagggttaaaaggaatatcaaataaaaatcacagagcagattggcacacagagctcaacagcactttctactgctgatactatggctaacagcttggtaaagcaggtcttattatcct

SEQ ID NO: 658032 - DNA, 397 bp, Homo sapiens
agattcaactcaaaaaggtcttatccaaggaacttatagttagactgtcaatagttaaagacaaagagagaattctaaaaacagcaagagaaaagtatcaagtcacatattaagaaaattccattatactaacatcagatttctcagcagaaactttacaggccagaaaagagtgagatgatatattcaaaatgttaaaagaaaaaaaatgctatycaagaatactacacctagcaaagatatccttcagaaatgaagaagaaataaagtctttcccagacaagcaaaaactgaggacattcatcaccattagaccaattctacagaaatgcttaagggggtcctacttctggatgctaaagaacaatatctattgtcataaaaacacagggaagta

SEQ ID NO: 658033 - DNA, 397 bp, Homo sapiens
agattcaactcaaaaaggtcttatccaaggaacttatagttagactgtcaatagttaaagacaaagagagaattctaaaaacagcaagagaaaagtatcaagtcacatattaagaaaattccattatactaacatcagatttctcagcagaaactttacaggccagaaaagagtgagatgatatattcaaaatgttaaaagaaaaaaaatgctattcaagaatactacacctagcaaagatayccttcagaaatgaagaagaaataaagtctttcccagacaagcaaaaactgaggacattcatcaccattagaccaattctacagaaatgcttaagggggtcctacttctggatgctaaagaacaatatctattgtcataaaaacacagggaagta

SEQ ID NO: 658034 - DNA, 545 bp, Homo sapiens
gaattcttcacacctattttctgcaatcattgcctgtacatgattcacagcctacacagtagggaacgctcaaggaaaaagattgtgccatgcaacacagaggcagcagatagcatcaggaaaggcattttgcaccccctttggcataaatgcccttactgtgccatttgaacctaataatcactaacatttattgaatacttactatacatgctagacacactggactaagcattttatttctatactcctgtataatccccacttctattctttgaactattcttaaattagcatcataatctttatttattaaaaggctaaaattcagagggcttaatattcttgactaagatgacagagcttgtaaatgagggagtcacatttcaaattcacrcctgcttgagtctaaaatgggtaggctgaagcagtgggcaaatactgcctccccatttaggacctactctattctttgaaagttcccttccctaaattttagtcctaggagagaatagaagaaaaaccggaagagagaaagcacacct

SEQ ID NO: 658035 - DNA, 545 bp, Homo sapiens
gaattcttcacacctattttctgcaatcattgcctgtacatgattcacagcctacacagtagggaacgctcaaggaaaaagattgtgccatgcaacacagaggcagcagatagcatcaggaaaggcattttgcaccccctttggcataaatgcccttactgtgccatttgaacctaataatcactaacatttattgaatacttactatacatgctagacacactggactaagcattttatttctatactcctgtataatccccacttctattctttgaactattcttaaattagcatcataatctttatttattaaaaggctaaaattcagagggcttaatattcttgactaagatgacagagcttgtaaatgagggagtcacatttcaaattcacayctgcttgagtctaaaatgggtaggctgaagcagtgggcaaatactgcctccccatttaggacctactctattctttgaaagttcccttccctaaattttagtcctaggagagaatagaagaaaaaccggaagagagaaagcacacct

SEQ ID NO: 658036 - DNA, 553 bp, Homo sapiens
ttgcctgtacatgattcacagcctacacagtagggaacgctcaaggaaaaagattgtgccatgcaacacagaggcagcagatagcatcaggaaaggcattttgcaccccctttggcataaatgcccttactgtgccatttgaacctaataatcactaacatttattgaatacttactatacatgctagacacactggactaagcattttatttctatactcctgtataatccccacttctattctttgaactattcttaaattagcatcataatctttatttattaaaaggctaaaattcagagggcttaatattcttgactaagatgacagagcttgtaaatgagggagtcacatttcaaattcacacctgcttgagtctaaaatgggtaggctgaagcagtgggcaaatactgcctccccatttagracctactctattctttgaaagttcccttccctaaattttagtcctaggagagaatagaagaaaaaccggaagagagaaagcacaccttggtaagctgaatataaactttgtgagtaaagcattc

SEQ ID NO: 658037 - DNA, 553 bp, Homo sapiens
ttgcctgtacatgattcacagcctacacagtagggaacgctcaaggaaaaagattgtgccatgcaacacagaggcagcagatagcatcaggaaaggcattttgcaccccctttggcataaatgcccttactgtgccatttgaacctaataatcactaacatttattgaatacttactatacatgctagacacactggactaagcattttatttctatactcctgtataatccccacttctattctttgaactattcttaaattagcatcataatctttatttattaaaaggctaaaattcagagggcttaatattcttgactaagatgacagagcttgtaaatgagggagtcacatttcaaattcacacctgcttgagtctaaaatgggtaggctgaagcagtgggcaaatactgcctccccatttaggacctactctattctttgaaagttccmttccctaaattttagtcctaggagagaatagaagaaaaaccggaagagagaaagcacaccttggtaagctgaatataaactttgtgagtaaagcattc

SEQ ID NO: 658038 - DNA, 645 bp, Homo sapiens
tttacatgcactcattttcctgtatgtatgtgtagctgtatataattctgtcacatgtaacttcatgttaacactaccacaataatgatgcagaattgttccatcacaaggcttccttttgttatcctttcatgtccacaccaacctttaaccctctttcctaactcctggtaaacactaacaatttctctgtttccataattctataatttcaataagggtatgcaaatggaatcagagtatataactttctgagattagctttgtttttcttcatcataatctccgagagatttatttaggctgttgggtataacaataatttattccttgtcacccyttcataatattccatgcttaaactcccttagttaagcattttccagttaaagaaccttgcagttgtttctagtttgggccattgtgaataaaactgctatgaacattcaaatacaggtttttgtatgaacacaagttatcatttctcttagataaaagcccaacagtacaactactgagtcaaattataaatttatgatagttttataagaatctatcaaactattttccagaatgactgtaccattttgcatccccatcggtaatgtatgagtggatctggtttctctaaattattgccagcat

SEQ ID NO: 658039 - DNA, 623 bp, Homo sapiens
aatattaatgacatatattaaaccacaaattcaaaaagcttaaataatgccaaatacaaatgaagaaatattcaaactcataaaatattcaaagacaaagagaaaatcttcatggcagctgtaggacaaagacatttcctacagaggaacaagattaaagattacagtgcatttattgtcagaaactatgcattcaagaagataatgaacagtctttaatagtgctaaaaggaaaaaaatctcctaacccagaattctagaccagcaaaaacatatttcagaaacaaagaagaggctgggcgtratggctcacacctgtaatcccagcagtttgggaggctgaggcaggtggatcacttgatctcagaagcttgagaccagcctgggcaacatggtgaaaccccatgtctacaaaaaaagtagctggtatggtggtgcacacctgtagtcccagctacttgggagactgaggtaggaagatatcttgagcccaagaggttgaggctgcagtgagctgagatcataccactgcactctagcctgggtaacaaagtgagaccctgtctcaaaaataaaataaaataaaataaaacaagatatataaaggagaaataaaaatgtct

SEQ ID NO: 658040 - DNA, 623 bp, Homo sapiens
aatattaatgacatatattaaaccacaaattcaaaaagcttaaataatgccaaatacaaatgaagaaatattcaaactcataaaatattcaaagacaaagagaaaatcttcatggcagctgtaggacaaagacatttcctacagaggaacaagattaaagattacagtgcatttattgtcagaaactatgcattcaagaagataatgaacagtctttaatagtgctaaaaggaaaaaaatctcctaacccagaattctagaccagcaaaaacatatttcagaaacaaagaagaggctgggcgtaatggctcacacctgtaatcccagcagtttgggaggctgaggcaggtggatcacttgatctcagaagcttgagaccagcctgggcaacatggtgaaaccccatgtctacaaaaaaagtagctggtatggtggtgcacacctgtagtcccagctacttgggagactgaggtaggaagatatcttgagcccaagaggttgaggctgcagtgagctgagatcataccactgcactctagcctgggtracaaagtgagaccctgtctcaaaaataaaataaaataaaataaaacaagatatataaaggagaaataaaaatgtct

SEQ ID NO: 658041 - DNA, 613 bp, Homo sapiens
tatatatctgttaattcttttcaggttcaaatatgttcctgaccaaaaacaatataccacgtccatataacaaatttattaccgatatcccctttttcttaaagacatatataaatgaaagaaagaaggcttagacatttcagatttgtattggctttgaacttcagatagagttcatattcacttctagagaatgtgtcaatattcacattgaatcagtttccataaatctatccacagcaacagctgagagtgcctttgccttatgaagggcagctggccaagctgagaatcacttataawaagctgtcaaatttaatgaccacacctccactgctattttcatttatttttttaaatgaagattatttagttcataaaagttctaaaatcagcccatgtctccaactaagagaggatgagtctacagtcaggtaagacaagaaaaatcaaaacagaacaaaacaagcaggctttcttcctatgaattccaggaagtctcaaagtcaaatatattaataactgaaataatgagatacatttaggtaaggtcaggctgaagctatgaaaaattctgaaccttaaatatatcaaagaaaacattttaaattgt

SEQ ID NO: 658042 - DNA, 524 bp, Homo sapiens
ggaacactcaatctctgaccttttcaaggagttggaatgatcagaaattgagggggcaaaatttgcagaaactraaatttgtagaaactgaaatttgcaggtggcgagaatgtagcaaaaggaaaataaaaaaaaataaattgtttatttaccagtggtataattagaacagggacaaaagccagggcaggatctgtgggtgcacatccacagctaccttatctagctctgaggagtgagggtcatgactgttacacacttccctgagattaagtcagatgttcttgttgcattcttccagagcaccctgcttatccaccctcggagccccacacttttatcacagcagaatgtaaacaagatggcagggcccatgtacatgtcttttgttcacctgtgtattcatgacagcacagagcctgttacagaacagacacttagtacatgtttaagaaattatagaagtttttgaaagtatgtttaacaaaaacagtcaatttgccaagctcctctcccaggtcctc

SEQ ID NO: 658043 - DNA, 524 bp, Homo sapiens
ggaacactcaatctctgaccttttcaaggagttggaatgatcagaaattgagggggcaaaatttgcagaaactaaaatttgtagaaactgaaatttgcaggtggcgagaatgtagcaaaaggaaaataaaaaaaaataaattgtttatttaccagtggtataattagaacagggacaaaagccagggcaggatctgtgggtgcacatccacagctaccttatctagctctgaggagtgagggtcatgactgttacacacytccctgagattaagtcagatgttcttgttgcattcttccagagcaccctgcttatccaccctcggagccccacacttttatcacagcagaatgtaaacaagatggcagggcccatgtacatgtcttttgttcacctgtgtattcatgacagcacagagcctgttacagaacagacacttagtacatgtttaagaaattatagaagtttttgaaagtatgtttaacaaaaacagtcaatttgccaagctcctctcccaggtcctc

SEQ ID NO: 658044 - DNA, 613 bp, Homo sapiens
gtaataattctaactaaatccctaaagtatgaatctctggagggataacaacagagtagacattcttctctctgcacatgatacatactctaaggttgaccacacaactgacataaaacaatcctccaatttaaaaaaaaaaataccaatcacacccttggacaacagtgcaataaaaatagaaatcattactaagaaaattgctcaaaatcatacaattacatggaaactaaacaatcagcttctgagtgacttttgagcaaataatgaaattcaggcagaaatcaagatgttctttgaaactaatgagaaaaaagataccacataccagaatctctgggacgcagctaaatcagtattatgagagaagtgtgtagcactaaacacccatatcaaaaagttagaaagatctcaagttaacagcctaagatcacaagtaggaactcaagaaacaaaagcaaaccaactgtaaggctagcagaagacaagaaacaaccaaaatcagagctgaactgaaggasactgagctgtgaaaaatcgtacagaagatcaacgaatccaggtattggttttttttaaagaattcataagatacatagaccactagcaagac

SEQ ID NO: 658045 - DNA, 585 bp, Homo sapiens
tctttgaaactaatgagaaaaaagataccacataccagaatctctgggacgcagctaaatcagtattatgagagaagtgtgtagcactaaacacccatatcaaaaagttagaaagatctcaagttaacagcctaagatcacaagtaggaactcaagaaacaaaagcaaaccaactgtaaggctagcagaagacaagaaacaaccaaaatcagagctgaactgaaggagactgagctgtgaaaaatcgtacagaagatcaacgaatccaggtattggttttttttaaagaattcataagatacatagaccactagcaagactgataaagaaaaaaaaagatccaaaacacagtcagaaatgacaaargagatgttaccattgactccacatagaaacaaaaaatcgtcagagactactacaaacacctctatgcacatgagctagaaaacctagacaaaattaataaattcctggaaatctacaacctcccaagattaaatcccaaaatagaccaataacaagacccaaaattgaatcagtaataaaaagcctaccaaccagaaacccataaccaggtggattcac

SEQ ID NO: 658046 - DNA, 585 bp, Homo sapiens
tctttgaaactaatgagaaaaaagataccacataccagaatctctgggacgcagctaaatcagtattatgagagaagtgtgtagcactaaacacccatatcaaaaagttagaaagatctcaagttaacagcctaagatcacaagtaggaactcaagaaacaaaagcaaaccaactgtaaggctagcagaagacaagaaacaaccaaaatcagagctgaactgaaggagactgagctgtgaaaaatcgtacagaagatcaacgaatccaggtattggttttttttaaagaattcataagatacatagaccactagcaagactgataaagaaaaaaaaagatccaaaacacagtcagaaatgacaaaagagatgttaccattgactccacatagaaacaaaaaatcstcagagactactacaaacacctctatgcacatgagctagaaaacctagacaaaattaataaattcctggaaatctacaacctcccaagattaaatcccaaaatagaccaataacaagacccaaaattgaatcagtaataaaaagcctaccaaccagaaacccataaccaggtggattcac

SEQ ID NO: 658047 - DNA, 599 bp, Homo sapiens
tcaaattcaggtttctcgaagatcttctagaagcatctgatattttgaattagacagatgatctttgaaacaagcagaggaccttgtttagtggacaacttctgcccaagatatcagactcagactcctgattttctgtctgattggttataataattcttattattttattaatatctggctgttgtacacccataatcctctttctctttctgtattataatagctaggtcagaacgtactaattctaacgtctaatgtcactcttaacttactccaaagaatagccactgccaatttaccaaatgctgggtacacctttcatcaccagaccccaattataaaaccctctggataattctgttttcatcaaatgaaaccraaaggaattacagccaaataatgctatcattatgtacttattataaaaagcagaataaattacacctatatagacaaatgacttttctaaaaatcaacctattattttgctagtgttcctctttcccggaaaaagaaccaattattacaatctattgatcatatcataggtaattctcaaaaatctttctagagcagtggacaaattgcttgtcacc

SEQ ID NO: 658048 - DNA, 540 bp, Homo sapiens
tgaaaataaaatttatattattaaaaacttatgttagatattatctcggaaaaaatggaacaggtagaaaagtaaaacatgttcaaacctcagaaatagcagccagttctaaactattttattgttcatattaatgtcatttgaggaaatcgttttgttgcaaagtggtaaaaaggagttttaaaacatattaatgagactatattttcttcttttttttggtctttagtgttcagaagtgtaastaaaggggagatggaagaatatcggtattttattctgatatatgtaaaaatacttttaatcaactgatttttggacataactgagcgaatttttccaacaaaactggctatgctaaagaaccccaaattacggtgttttggatggctaaagaatgtgctgagatgttgattccctgggccatcaagctggtgcatcctcagtgtgattggtaaatatttatttctacagagtccaagacgtgagaatggttttgtggcataaaagtcatgatgtcgacgtaaaacattttcttgt

SEQ ID NO: 658049 - DNA, 540 bp, Homo sapiens
tgaaaataaaatttatattattaaaaacttatgttagatattatctcggaaaaaatggaacaggtagaaaagtaaaacatgttcaaacctcagaaatagcagccagttctaaactattttattgttcatattaatgtcatttgaggaaatcgttttgttgcaaagtggtaaaaaggagttttaaaacatattaatgagactatattttcttcttttttttggtctttagtgttcagaagtgtaactaaaggggagatggaagaatatcggtattttattctgatatatgtaaaaatacttttaatcaactgatttttggacataactgagcsaatttttccaacaaaactggctatgctaaagaaccccaaattacggtgttttggatggctaaagaatgtgctgagatgttgattccctgggccatcaagctggtgcatcctcagtgtgattggtaaatatttatttctacagagtccaagacgtgagaatggttttgtggcataaaagtcatgatgtcgacgtaaaacattttcttgt

SEQ ID NO: 658050 - DNA, 540 bp, Homo sapiens
tgaaaataaaatttatattattaaaaacttatgttagatattatctcggaaaaaatggaacaggtagaaaagtaaaacatgttcaaacctcagaaatagcagccagttctaaactattttattgttcatattaatgtcatttgaggaaatcgttttgttgcaaagtggtaaaaaggagttttaaaacatattaatgagactatattttcttcttttttttggtctttagtgttcagaagtgtaactaaaggggagatggaagaatatcggtattttattctgatatatgtaaaaatacttttaatcaactgatttttggacataactgagcgaatttttccaacaaaactggctatgcwaaagaaccccaaattacggtgttttggatggctaaagaatgtgctgagatgttgattccctgggccatcaagctggtgcatcctcagtgtgattggtaaatatttatttctacagagtccaagacgtgagaatggttttgtggcataaaagtcatgatgtcgacgtaaaacattttcttgt

SEQ ID NO: 658051 - DNA, 561 bp, Homo sapiens
cacaaagaaagattatattaaagaaataaaagcttggccttggcttttgggaaaagtaagagagactcacaagagaaaggttatggccagagatggattcaaactaggaagaagtatttggctctttgtctcagcaaagctagtggacataatgcaaatttgagctgtaacttacttcaagggcttatgattgtggaaagcattcagagaacaattcaatatttgacagatcttcagtgaaaggaaggagtaagaggttgcaagcaaagaccttgatttgtatctttgggagaaaagtctccctcatttgtcctccagcctatttaagtccattgaacagaaagggtgttcttttcattcacttccaagacacaggacatgctagtttcctagggctactataacaaagtgccacaagaggatggtttaaacaacaaagttatcgtctcacagttctgaaggctaaaaatcgaaaatsaaggtgttggcaggccatattccctctaaaaactatagaggaatttttccttgcctcttcccagcttgtgctgttttgctgga

SEQ ID NO: 658052 - DNA, 643 bp, Homo sapiens
atacaccatggaatactatgcagccataaaaaaggataagttcatgtcctttccagggacatggatgaagctggaaaccatcattctcagcaaactatcacagaacggaaaaccaaacaccrcatgttctcactcataagtaggaggtgatcaatgagaacacatggacacagggaggggaacatcacacacggcggcctgtcagggggtggagggctaggggagggatagcattaggagaaatacctaatgtaggtggtgggttgatgggtgcagcaaaccaccatggctcatgtatacctatgtaacaaaactgcacgttcagcgcatgtatcccagaacttgaagtataataattaaaaagaaaagataaaaagatattagaggctggtcacgccaggtagaagatagagttattacttaaatctatctcactgaaaattcagagggtagggtttttcaaggatagtttggtgggacaaggagtcagcttccgggtagggtcacgggacccacgggtgaagtcatcccatgcaaaaacctgaagagatacccaagaaagccaatcttaggttgcacaataatgatgttatctgcaggagtgattggggagttgcaagtcttgtgacctccagaataacag

SEQ ID NO: 658053 - DNA, 643 bp, Homo sapiens
atacaccatggaatactatgcagccataaaaaaggataagttcatgtcctttccagggacatggatgaagctggaaaccatcattctcagcaaactatcacagaacggaaaaccaaacaccacatgttctcactcataagtaggaggtgatcaatgagaacacatggacacagggaggggaacatcacacacggcggcctgtcagggggtggagggctaggggagggatagcattaggagaaatacctaatgtaggtggtgggttgatgggtgcagcaaaccaccatggctcatgtatacctatgtaacaaaactgcacgttcagcgcatgtatcccagaacttgaagtataataattaaaaagaaaagataaaaagatattagaggctggtcacgccaggtagaagatagagttattacttaaatctatctcactgaaaattcagagggtagggtttttcaaggatagtttggtgggacaaggagtcagcttccgggtagggtcacgggacccacgggtgaagtcatcccatgcaaaaacctgaagagatacccaagaaagccaatcttaggttgcacaataatgatgttatctgcaggagtgaytggggagttgcaagtcttgtgacctccagaataacag

SEQ ID NO: 658054 - DNA, 658 bp, Homo sapiens
cataccctcttcctcctcagttgagatcagcttgggaccaggagggacttctccttgcaaggaaaagataagcagaaggcccctagcagcctccatcactgtagaggacactcacagtyttcactactaatggatcctgcagccctcacagaccctgagcccagctaagggagctgcatagaattcacatggaggcactactccagatgagcctatgttgtaccttgcaccctgtgaatcaaactgctactgcactgcaacatgttaaaaccagagctactgctagagtgtgttctgttctgggggccagtagccattgtatccctccatccctgaggctctgccatcattgcacccccactttcacacaaatggtaggataccatttcctcactcagcttctgtagccccctaccatcttgaaataagctgcataggaagcattccacttccccaatcccaattgctgctcccctcaaccccagctactcaaagactaggcccagcagagcagctgtgctccctgatgctcaaaccaacctatcgcctgctccacaggaatcaagcattggcttgagagtagctgtgaccccgtgcacagccaacacagcaccctgcccctcagggaccatacccttcagcccagtgagtaagatat

SEQ ID NO: 658055 - DNA, 394 bp, Homo sapiens
ctaaactgttgacctctaaaagggtcaaccaattctaaactgaagaaaccctaagctgaagacatttttctagatgtatcacagtcaaaatgctcaaaaacagtgataaagagaaaatcttgaaagcagccagatagaaagatactttacatagaggagaacaaagggtgttctactatttcccataagaaataatgcaaatragcagatgggagagtaacatctttaaagtattgatataaaaatatagaattctatacctacagaaaatatccttgtaaaacctaagtgaaataaatattttatcagacaaaaataaattgaaatgatttatcatcaataaacctacactataagaaatgataaagcaagtttttcaggcaggaggaaaatg

SEQ ID NO: 658056 - DNA, 574 bp, Homo sapiens
ctgggcaaccagagtgaaactccattttgaacatctcaaaaaaaaaaaaagaagaagaagagttcctatcaaaaagaagatttaagagtgacagccaagttatactgtccactctttctttttttccatcaaycctcagacccattgctttaataaaaaaaatccatctctctctctctctctctctctagagagaacaataaccacaacgccacaatgtcatagctgcaaacaccactatctggaataaagacaggtaaggaagagggaatataagaggtgaatgaataaagagacaaaaaccacatttttttttcttcaaagagaatgttctccattctgaaatatgttaaaaactgttaaatgatttaaagtctgttgtagacaaagagatgattaaagaatatctgcaagctgtaaactggactaggacagattatatcctgtggcaatggtaataaaaataggacattatttaaacaatttcatatattatcttgtacagcagccatggaaatgcaccagtcagctctcgtgctgcgaagagcttcacttgctgatggccccagctggt

SEQ ID NO: 658057 - DNA, 574 bp, Homo sapiens
ctgggcaaccagagtgaaactccattttgaacatctcaaaaaaaaaaaaagaagaagaagagttcctatcaaaaagaagatttaagagtgacagccaagttatactgtccactctttctttttttccatcaatcctcagacccattgctttaataaaaaaaatccatctctctctctctctctctctctagagagaacaataaccacaaygccacaatgtcatagctgcaaacaccactatctggaataaagacaggtaaggaagagggaatataagaggtgaatgaataaagagacaaaaaccacatttttttttcttcaaagagaatgttctccattctgaaatatgttaaaaactgttaaatgatttaaagtctgttgtagacaaagagatgattaaagaatatctgcaagctgtaaactggactaggacagattatatcctgtggcaatggtaataaaaataggacattatttaaacaatttcatatattatcttgtacagcagccatggaaatgcaccagtcagctctcgtgctgcgaagagcttcacttgctgatggccccagctggt

SEQ ID NO: 658058 - DNA, 574 bp, Homo sapiens
ctgggcaaccagagtgaaactccattttgaacatctcaaaaaaaaaaaaagaagaagaagagttcctatcaaaaagaagatttaagagtgacagccaagttatactgtccactctttctttttttccatcaatcctcagacccattgctttaataaaaaaaatccatctctctctctctctctctctctagagagaacaataaccacaacgccacaatgtcatagctgcaaacaccactatctggaataaagacaggtaaggaagagggaatataagaggtgaatgaataaagagacaaaaaccacatttttytttcttcaaagagaatgttctccattctgaaatatgttaaaaactgttaaatgatttaaagtctgttgtagacaaagagatgattaaagaatatctgcaagctgtaaactggactaggacagattatatcctgtggcaatggtaataaaaataggacattatttaaacaatttcatatattatcttgtacagcagccatggaaatgcaccagtcagctctcgtgctgcgaagagcttcacttgctgatggccccagctggt

SEQ ID NO: 658059 - DNA, 574 bp, Homo sapiens
ctgggcaaccagagtgaaactccattttgaacatctcaaaaaaaaaaaaagaagaagaagagttcctatcaaaaagaagatttaagagtgacagccaagttatactgtccactctttctttttttccatcaatcctcagacccattgctttaataaaaaaaatccatctctctctctctctctctctctagagagaacaataaccacaacgccacaatgtcatagctgcaaacaccactatctggaataaagacaggtaaggaagagggaatataagaggtgaatgaataaagagacaaaaaccacatttttttttcttcaaagagaatgttctccattctgaaatatgttaaaaactgttaaatgatttaaagtcygttgtagacaaagagatgattaaagaatatctgcaagctgtaaactggactaggacagattatatcctgtggcaatggtaataaaaataggacattatttaaacaatttcatatattatcttgtacagcagccatggaaatgcaccagtcagctctcgtgctgcgaagagcttcacttgctgatggccccagctggt

SEQ ID NO: 658060 - DNA, 401 bp, Homo sapiens
caggtttgttacataggtatacatgtgccatggtggtttgctgcacctgtcaaccggtcatctaggttttaagccccgtgtgcattaggtgtttgtcttaatgctctccccctccttgccccccatcccctgacaggccctggtgtgtgatgttcccctccctttgtccatgagttctcactgttcaactcccacttatgagtaagaacatgtggtgtttggttttctgttcctgtgtttgctgaatttacaagaaaaaaataaccccatcaaaaagtgrgtgaaggttaacagacatttcttaagagaagacatttatgtggccaacaaacatatgaaaaaagctcatcatcattggtcattagagaaatgcaaatcaaaaccacaataagataccatct

SEQ ID NO: 658061 - DNA, 552 bp, Homo sapiens
ttttaattctagaaaaccagaatacactagtaacatttgaaaaagaaggaaatatgtggtttgacaatatgggagaaacatgtttatatatttcaayttaaagttgaagggctactatggataaaaatagtctacgcttcttctaaacggcttcagaagctagaacaaagaaaaaaatcaggccacatttcaagaaaataattttagaataatacatgttcattgttaaactgtttatctgggaaagtttgctttaagagccagtgagcttcctaacactggatagatcccattagtgattaaaaaaccatctgtcaaggacccatatctaagatatggattggactagtgacctccagggtccctaatgtgtaagattccaaggttatttaattccaggagggaattggagatgacctctgggttatgtctgtagataacaaaacagtaaattattttataaggaatagctcattttaggcttggacttcaaggagataattttttaagattcccttcttgtgctgtctctgattgaaatgtctcacaagc

SEQ ID NO: 658062 - DNA, 618 bp, Homo sapiens
tttggcttctctctgttctttagtgctattttggagttcatgaaaaaactgggagagatttcagaggagtgcttctcccacaaggctatgacttgtgcccttccactaactctcacataactccctctactgtactttcttcttcatcaagaaaagagaatcctgatccttcaactgctaacacatccatctattgtggttgaactgagatgtgtgaaggctaaaaaaatgtatgctacttctcactgtctatggcagaatggtccatgtcactacttgtttcttaaatccagaaacatgtgctctctctggaaggcatctgagtttggaaaaagaatcaacactgcagccaaccacatcccataaagactatctctccacagatcacatggtcaactaggtcgtgtccaaggtgacctttcagagaccatgtatctgggtaacccacaggcttgctgttgctccaaagacaatcaaactagggtctccatgcagtaaygtcagaaactttagaagaaatctgattatattcatcactttttccttttggacttctttcttcttcaaaacactgttaatttacttgttataaggactaaggacttttttttctgtgtt

SEQ ID NO: 658063 - DNA, 212 bp, Homo sapiens
ttcaatcgtttagcttctctgggccacactgcaagaagacgaattgtcttgggccacatataaaatgcactaacactaacgatagctgrcaagctaaagaaaaaaaaatcaccaaaaaaatctcataatgtttttaaaaagtttaccaatttctattgggcctcattcaaagctgtcctgggctgtgtgtggcctttgggctgtgggttgga

SEQ ID NO: 658064 - DNA, 212 bp, Homo sapiens
ttcaatcgtttagcttctctgggccacactgcaagaagacgaattgtcttgggccacatataaaatgcactaacactaacgatagctggcaagctaaagaaaaaaaaatcaccaaaaaaatctcataatgtttttwaaaagtttaccaatttctattgggcctcattcaaagctgtcctgggctgtgtgtggcctttgggctgtgggttgga

SEQ ID NO: 658065 - DNA, 212 bp, Homo sapiens
ttcaatcgtttagcttctctgggccacactgcaagaagacgaattgtcttgggccacatataaaatgcactaacactaacgatagctggcaagctaaagaaaaaaaaatcaccaaaaaaatctcataatgtttttaaaaagtttaccaatttctattgggcctcattcaaagctgtcctggrctgtgtgtggcctttgggctgtgggttgga

SEQ ID NO: 658066 - DNA, 604 bp, Homo sapiens
tcacgtttttcttagggtggtgacagagtttcaagaaagcaagatcaatagtgaaggtgttgtaaagcctcttgccacttcctacctagtatattctactgacaaaagtaaaccacatgaccaatcccaaagatcaagggtagagaagtaccctctgctcacagaggtggggtcaaaatcgaaataaatatttctgaatagttatctaatctgaaaccagttagtactttattggtacttacactttttaataaaaattttacttatttctgtgtcttcagtaaatacacacacttagacacacacaaagctataactagctcatttacaaattttaaaaagtgttttttttcttgttggtgctatggtggatatttttctagtgcgcaaagcttggcaaataaagtgagtgaaaaaytttaggatcttttaacttcttactgatagatactcatggattgaatacattgcaccactcagggtagtagttgccccttacctggaggagatttgtcccaagatcctagtggatacctaaaaccatggatagtgccaaatcctatgtgtaatatactatgtttctttcctatacatacatacctac

SEQ ID NO: 658067 - DNA, 619 bp, Homo sapiens
ggtcagtagaagcagttatccaataggagagggggtaagtaaggtgaagacagctggaaaggaaaagaaaccaagaatgacccctttccacagcctacagatgaaagaggtaggggagaaaacatatctgaattatattttaattaaaatatagaaattcatattctaatttctgaaataaaattgtggtttacaatataactatctattaaatagcaataaccaaaagaagtcatgaaagctgctagatttttttacakatctggaaacttttcctgaatacatatttaaagaactacagaagacaaaaatgaaattgcattgaatgccaattagagacaagtttgttctttcaaaaaaattggatatttgctttgtaattttcaccaattttattttcctgaattatttctatttttaatgtaaaaataaaagtatctgagatgggtctaagatatcagagaattatctttatttatattgagatatatcaaaatataatgttaatatgatttgtcactgaactatatgataactcagtcatacttctgtcttttaaaattggctacagttaaacttcaatctgtcaatacagtaaaagctacctaagtgggaattc

SEQ ID NO: 658068 - DNA, 619 bp, Homo sapiens
ggtcagtagaagcagttatccaataggagagggggtaagtaaggtgaagacagctggaaaggaaaagaaaccaagaatgacccctttccacagcctacagatgaaagaggtaggggagaaaacatatctgaattatattttaattaaaatatagaaattcatattctaatttctgaaataaaattgtggtttacaatataactatctattaaatagcaataaccaaaagaagtcatgaaagctgctagatttttttacagatctggaaacttttcctgaatacatatttaaagaactacagaagacaaaaatgaaattgcattgaatgccaattagagacaagtttgttctttcaaaaaaattggatatttgctttgtaattttcaccaattttattttcctgaattatttctatttttaatgtaraaataaaagtatctgagatgggtctaagatatcagagaattatctttatttatattgagatatatcaaaatataatgttaatatgatttgtcactgaactatatgataactcagtcatacttctgtcttttaaaattggctacagttaaacttcaatctgtcaatacagtaaaagctacctaagtgggaattc

SEQ ID NO: 658069 - DNA, 533 bp, Homo sapiens
cagttaggagtttaaaaaagagaaattgagagatgaaaggtattaacaattagcacaaaactctattttgtgatggatgctataaagaagagagaaaacattaaatatgtcatatttattatataaatattggtgtcatttatattatcaattattttctaggccttgaggtaacagcatttaatagaatgcacattttggcctttattgagactatattgttgtcaggaaaatataccataatcaaataaatacacagtataattccattaatatattttttaaagagaaataaaaccagattaaaaaaawaagagatggttgaaggagatggtaaaagatgaaagatggtcatgtgggattgagatattttacaaataggaaatagagatgagtgataggcttgtccagtaagacatctttgaggaagagataacttaaatgttgtgagtgtgcaagccacgtagctccatggaggatattctaaagagaagtaacaaagccagcaaaagctctaaaacaaaaatgtgatt

SEQ ID NO: 658070 - DNA, 454 bp, Homo sapiens
aggtaagtagaaatgagtggtgcaagtaggtccattacaagctagtagtggatgctgtgatacgctgcccaatgtagtgaattcttatgatttgatgtctcctcaccatccatttgaaaacaggaataactttctatactaggagcatggcttagtcatccctgacacaattttcagttctccacttctttccatttctcagtgtgattgatcaaacatctacctcatacaacgaccttctggtgactacctccatatgcgatagctagatacaactgactgtcttaccccactgacccccamatcctgcgtggacttcacagatacaccacagcaaccacctcttggtcacagcatgactccatggaactcatgactgctctaaatctaccaattagaactcctctggggaaatctacctaggtaacacaatggaccccggtaaaggcctgtg

SEQ ID NO: 658071 - DNA, 454 bp, Homo sapiens
aggtaagtagaaatgagtggtgcaagtaggtccattacaagctagtagtggatgctgtgatacgctgcccaatgtagtgaattcttatgatttgatgtctcctcaccatccatttgaaaacaggaataactttctatactaggagcatggcttagtcatccctgacacaattttcagttctccacttctttccatttctcagtgtgattgatcaaacatctacctcatacaacgaccttctggtgactacctccatatgcgatagctagatacaactgactgtcttaccccactgacccccaaatcctgcgtggactkcacagatacaccacagcaaccacctcttggtcacagcatgactccatggaactcatgactgctctaaatctaccaattagaactcctctggggaaatctacctaggtaacacaatggaccccggtaaaggcctgtg

SEQ ID NO: 658072 - DNA, 315 bp, Homo sapiens
acgcacttgaaaatatactagtccgtgacacagtaaaagaaaaatcatgcrgataggcaacagatagttttggaaatttaaaactcaggttttgttttatgtcttcatatatgatgctgaggtaacagatataaaattaggaatttgtcagcaatagctcctcctgcctttatcatatgttttaaacgatttaacagtgacactttattatattttctttttcattgagattcatttcctatcttgtctaatattctcctactctcctgatagtttacacacaattatcacagaacactagcagttccattaatt

SEQ ID NO: 658073 - DNA, 515 bp, Homo sapiens
cgtatgtgtattaattttgtacttctgtaactaactgcattttattattgctttagtcatctttagttttattccttgaattttgtggttatgccagatacataatcatatctattgcaaatggtaataattgtaaccttcttttccattgttatactcctaatatatttctaatctggaatacatcttaacactgaaaattttcttccaattcacatatgcttatttttcagtactttaggtgtcttataaaatrttacacactcacacaagtcttcaaatacagtaataaaagtaactcccatgaacaaatcaaatgacttgagaattaggtcattattattacattaaatctacttgttcaattattcccaagagactctgttgccttccaacacatttgtgtttattctggattttgaatgtctcattatcatttctctttgtttattttgtcacatgtataaaatgcgtgaggaaatttgtgaagccttataaataatactgttaaattt

SEQ ID NO: 658074 - DNA, 315 bp, Homo sapiens
acgcacttgaaaatatactagtccgtgacacagtaaaagaaaaatcatgcagataggcaacagatagttttggaaatttaaaactcaggttttgttttatgtcttcatatatgatgctgaggtaacagatataaaattaggaatttgtcagcaatagctcctcctgcctttatcatatgttttaaacgatttaacagtgacaytttattatattttctttttcattgagattcatttcctatcttgtctaatattctcctactctcctgatagtttacacacaattatcacagaacactagcagttccattaatt

SEQ ID NO: 658075 - DNA, 315 bp, Homo sapiens
acgcacttgaaaatatactagtccgtgacacagtaaaagaaaaatcatgcagataggcaacagatagttttggaaatttaaaactcaggttttgttttatgtcttcatatatgatgctgaggtaacagatataaaattaggaatttgtcagcaatagctcctcctgcctttatcatatgttttaaacgatttaacagtgacactttattatattttctttttyattgagattcatttcctatcttgtctaatattctcctactctcctgatagtttacacacaattatcacagaacactagcagttccattaatt

SEQ ID NO: 658076 - DNA, 315 bp, Homo sapiens
acgcacttgaaaatatactagtccgtgacacagtaaaagaaaaatcatgcagataggcaacagatagttttggaaatttaaaactcaggttttgttttatgtcttcatatatgatgctgaggtaacagatataaaattaggaatttgtcagcaatagctcctcctgcctttatcatatgttttaaacgatttaacagtgacactttattatattttctttttcattgagattcatttcctatcttgtctaatattctcctaytctcctgatagtttacacacaattatcacagaacactagcagttccattaatt

SEQ ID NO: 658077 - DNA, 440 bp, Homo sapiens
tctcatggactagaagacttaatattattaagttggtagtaatccccacgttgatctacagagtcaacagaagctcaatgaaaatcatagctgcaatgttaattttttttgcagaaattttctacctgattcaaaaattaatatgaaaatccaagaaactaaaaatatccaaaatggttttggaatattagaataaagttggaggattcacactttgttatttcaaaccttactkcagagctacagtaatcaaggcagggatattctggctttaggatagatatacagagcaatgaaattgaatggagaagctggagggatcacactatctgacttcaaatcatactacaaggctacagtaaccaaaacagcatggtacttgtgccaaaacagatatatagaccaatggaacagatcagaggcctcagaaataacaccac

SEQ ID NO: 658078 - DNA, 526 bp, Homo sapiens
tgtttaattttacattttttaaacttaaaatttaaattttaaaaaaattgtatgtgttttctgatttgcttctttggttcaaaattagtatttgaaatttatctgtgggaatacatagtagtttattcattgtcactgctgcataaaattacattttataattatgccctgatctatagatgtattatataacttttggayatacagcctgatttgagtatatttgtgttaaggcaaatctgctatggaagttattatacttgggctccaaagcacatgcacatcaagtttttttaaggaatatgtccagtagttgaaatgctgagctgtagagcaagagaacatgcaaattactggaaaatgacaaattgtcttctgaactgttatgttaattgaacttctaccagcaaactataggaatgatctttacttcataactgtgctgttaaatatgttggttgctagttagatattgctataaagttaatctttataatggtgtaacattaaaacctcattttctcag

SEQ ID NO: 658079 - DNA, 448 bp, Homo sapiens
tcacggcaacagttttttgggggtggtgctcaaggcattttgcttgttgactttctggaggaccaaataaagataacatttkcttattataaaagtgttttgagagagcttgtcgaaacataggcagaaaaacactcagaaaaccaccagagagtccttctccactacagcaatgcccctgttcattcctttcatccaacaaaggcaattttgcaagagttttgatgggacactattagacatccacattaacagtttgatttgggtctctctgattatgtttgtttttcaattaaaaaacaaatctctaaagggtatgcatttttcttcaggcgatagtgtaaaaaagactacattgacatgactaaattcccaggacactcagttcttgaataaacttaatggctggtatcatcatttacaagacaatgttgaactttatgtatat

SEQ ID NO: 658080 - DNA, 664 bp, Homo sapiens
tctcatttgacaatttactaaatttttacattttattaaaatgctatacttctttgtattagcacttttaacaatctaatttaacaaatttgcactttaaagtgtaactayttttacacttataactcatactgggcttcaatagttattgaacattttgatattaagcacaaactttgatataatacaaaaatatgataaactaatgtttgagtgtgtctcattgtaagctgtaaccagactcactcagagaggatttaaaattatgtacgtataacaaatttaacaaatatccaaagtttatattaaaactataaaacacttctgaaagataaaaaagtagacaggaaaagtaaaaaatcttactctcttcttgaataatgataaatataatagatattaaaatactttatagtctttttatcacctttttatgcatttattcataaacagagccatttaatacaaataaaaatccaaaaatgtattcaagtatatttaaatattttatgtatgacaaggtaccagataaatcagtgggaagtgataaatgttttgagaagaggtattggggtaactggataataatatggaaaaattaaaattttatcaggttctgatgtcatatataaaaaaataggaaatttataagtgaattagagat

SEQ ID NO: 658081 - DNA, 568 bp, Homo sapiens
tgaggttagatgtagttgtataatttcttctggccaatgaaatatgagaagtactgtgtcacttcctaacaacctattattatgagagtccaggagttgttgcaagtttctcccacacacggagatgatggaagcatgtatcaagatgaatcttcatcagcctgggtctctgagtgattataatgaacagagtcacccttcaaacccaccttggatgggtaatatgctcaagaaataaagttttgtcacattaagtcactgaaattttgttactatagcctgactatcctaatgcacaacaacaaaatcacaaacacacacacacacacacacacacacacacacaygcacacacacacaatcttgctggcttaaagtaagacagtattatttctttatatatcacatcacatcaatctaaagtttgtacaaggtcactgttttggtcattctcactccaggaccaagctgttgaaacagctatcatacttgatgctgccgtcacagtgacagagggaaaaataactagttcttattggttatttgcagaaatggtctaatttaccta

SEQ ID NO: 658082 - DNA, 409 bp, Homo sapiens
aatgtcatcttttaaatgtttagagcatttatatggacatctcttaagttgttggatctgattttaaaatgtaagaggcaaaatccccgatatagtgatgtgagtgggctgccattcttttccctaaaaccaactacaaatactcaacaaaatacttgtcaaaaacatatgtatcaragttatcgaaattgaccaaataggaagaaatgcattcttgggaaatcatggaactttgagcaaaaacaatggaagtctgtggcataatcccctggggccattctcatccacccagacttgcagtgctgtagttccccgaggatgaagaaaaacccagaaaccattggcttcaccgtcagaggtgattctcttaacttggagtggaaggcagaaaaacctatatccacactgt

SEQ ID NO: 658083 - DNA, 608 bp, Homo sapiens
atctgttattagtacatctatctcagctttcttttggttatgtcagcctaacagatcatttttacatttttttcagacttcctgttcttatttttaataaaaaacatttaattacttttaaaattcattttagatatttttattagctgaagtatgaaaatcatttatatttagctcaagatatttttattgtggtctaccactttgctatttttccatctgttgtattttcgacttgctctttcttgccttttttctcaattaagcatttttttctccaatatgcccttayaatctcctataagtctaagtatcttttgattttgccctagatattatttcatgattccttgacttattagtgtctgagtataaggtaaaattttcattacttttcctagactatgaagatcttatgatacttttgatattttgttaggtagtttccttgatatttattttaaattttatatgatggattttatttctatagtcactatttatttagatttatccagatgttttgtccttccttttcttgatttcatttctaaatttctacatttacatctaaaataatttttcttctgcttcaaatacattattat

SEQ ID NO: 658084 - DNA, 369 bp, Homo sapiens
gtcgagtattcactggatctcttcctactacaataaataagttctggcacattacttacacaaaagataaaaagtatcagtaataaacacttccattttataatcaaataggcayaaaggatgcataatattttccaggcagcgatgccccatatatccatagattctagggttgttattgttgttgtttaacacaggagatgctaaacaaccaagtacatgctgctaaaaacaccctgcagataaaaaccctcccactagctaatgtaattagcttgtttgctaaaaagtctgcttttagcatgtttacaaatgtattagtctgctaggggtattataacaaagtatcatcaaccaggtggcttaaga

SEQ ID NO: 658085 - DNA, 369 bp, Homo sapiens
gtcgagtattcactggatctcttcctactacaataaataagttctggcacattacttacacaaaagataaaaagtatcagtaataaacacttccattttataatcaaataggcataaaggatgcataatattttccaggmagcgatgccccatatatccatagattctagggttgttattgttgttgtttaacacaggagatgctaaacaaccaagtacatgctgctaaaaacaccctgcagataaaaaccctcccactagctaatgtaattagcttgtttgctaaaaagtctgcttttagcatgtttacaaatgtattagtctgctaggggtattataacaaagtatcatcaaccaggtggcttaaga

SEQ ID NO: 658086 - DNA, 369 bp, Homo sapiens
gtcgagtattcactggatctcttcctactacaataaataagttctggcacattacttacacaaaagataaaaagtatcagtaataaacacttccattttataatcaaataggcataaaggatgcataatattttccaggcagcgatgccccatatatccatagattctagggttgttwttgttgttgtttaacacaggagatgctaaacaaccaagtacatgctgctaaaaacaccctgcagataaaaaccctcccactagctaatgtaattagcttgtttgctaaaaagtctgcttttagcatgtttacaaatgtattagtctgctaggggtattataacaaagtatcatcaaccaggtggcttaaga

SEQ ID NO: 658087 - DNA, 487 bp, Homo sapiens
tgttagggacaggcctgaatagctaacttttttcttttatttcaagttgacttaatattataaaaaaaaaattttattttttcctttaatagagtcaagtatacagtttctgttttcakccagtaactttagcagagactttttctctctgctagtgaaagagaggactcaggtttagaggaaatttgccttttcagaacatttgatcttcataacacatcaagatgtatttagagaaaagaaaacatggacttagtactatttataaatagcttcctttatccttaatcctaaattaaaacaaaactaaaacttaggaaaagcacttgcattatacaaaatttatactttagctatttctacatttaaaaataatataaatcaccaattttatgttttaggcaaacaagtgtattctcaaactttatattattcagcaatacctattactctccaagtatattcatgtatcatctctctcatttaa

SEQ ID NO: 658088 - DNA, 487 bp, Homo sapiens
tgttagggacaggcctgaatagctaacttttttcttttatttcaagttgacttaatattataaaaaaaaaattttattttttcctttaatagagtcaagtatacagtttctgttttcagccagtaactttagcagagactttttctctctgctagtgaaagagaggactcaggtttagaggaaatttgccttttcagaacatttgatcttcrtaacacatcaagatgtatttagagaaaagaaaacatggacttagtactatttataaatagcttcctttatccttaatcctaaattaaaacaaaactaaaacttaggaaaagcacttgcattatacaaaatttatactttagctatttctacatttaaaaataatataaatcaccaattttatgttttaggcaaacaagtgtattctcaaactttatattattcagcaatacctattactctccaagtatattcatgtatcatctctctcatttaa

SEQ ID NO: 658089 - DNA, 487 bp, Homo sapiens
tgttagggacaggcctgaatagctaacttttttcttttatttcaagttgacttaatattataaaaaaaaaattttattttttcctttaatagagtcaagtatacagtttctgttttcagccagtaactttagcagagactttttctctctgctagtgaaagagaggactcaggtttagaggaaatttgccttttcagaacatttgatcttcataacacatcaagatgtatttagagaaaagaaaacayggacttagtactatttataaatagcttcctttatccttaatcctaaattaaaacaaaactaaaacttaggaaaagcacttgcattatacaaaatttatactttagctatttctacatttaaaaataatataaatcaccaattttatgttttaggcaaacaagtgtattctcaaactttatattattcagcaatacctattactctccaagtatattcatgtatcatctctctcatttaa

SEQ ID NO: 658090 - DNA, 487 bp, Homo sapiens
tgttagggacaggcctgaatagctaacttttttcttttatttcaagttgacttaatattataaaaaaaaaattttattttttcctttaatagagtcaagtatacagtttctgttttcagccagtaactttagcagagactttttctctctgctagtgaaagagaggactcaggtttagaggaaatttgccttttcagaacatttgatcttcataacacatcaagatgtatttagagaaaagaaaacatggacttagtactatttataaatagcttcctttatccttaatcctaaattaaaacaaaactaaaacttaggaaaagcacttgcattatacaaaatttatactttagctatttctacatttaaaaataatataaatcaccaattttaygttttaggcaaacaagtgtattctcaaactttatattattcagcaatacctattactctccaagtatattcatgtatcatctctctcatttaa

SEQ ID NO: 658091 - DNA, 611 bp, Homo sapiens
atgcagatcattatgtattcttcaccataggtcagttgcttagcgaccagagaagtagagaactactaattgaaagtattctgtattgctggcaaggcttgctgcaggacgttgaacttggaaacagcagagactgtttcagataaaaatgttgcagaggatgaaagaaaaatagttgcagcattatcgtactaggaatggttattatttactttatggtaaattttgcaaaatgctttgctgtgtttctgttttataatgaatattcaaattgattttactattaaggatcatttacacaatcagattaaaaatcagagttgtggaatctatttttaaaaagtaaaacagaacacaaaggagaaaaagaagaggaggacaaaagagaagaaacagaagcaacagcactaagttagatccaggtccctaaagataagtaacaatatctgtatgaacttttctgattgcttattttattttgtaatgaaaacaaagaaagaagaggatgaggaggaasatgaggatgaggagactgaggaggaaggcaaggagaagaaggaagaggagcaagaggtaaaggagaagaaaagaaaaaagagagataagattat

SEQ ID NO: 658092 - DNA, 329 bp, Homo sapiens
aacactctaacagagcaatagtataaacaaatttattcaaagcattaattttatattagtctrtatcaggctttctaacctgtacattatataaaattaggattattttctctcttctttccatgtaatgtacaattcatgtatccatcaaaaatagatgagtggtcattttgtgacatctttcacttaatagaaaagactaagtcagaaaagagaaaatgtccttcacaagaccaagactaagttggctcaattttcctgatagcttatttgctataagaattctgatataattctgtatttacaggcttattctcactctctcacaa

SEQ ID NO: 658093 - DNA, 572 bp, Homo sapiens
ttctccctgaaatctaggtgtcagtttaacaaaatgcatttctcagttcactgaatatgactccaggataaataaaaaagaacattcatattcaaaaaaagtaatttatttacctagtttatcccaagatttatactgtcaatagccttcattacaaattaagygctaaaatatatagtaagttcctgaaactctaccaaatgttatctatacgaagtagaattaaattaaatcattgtgttaactttttattcctattaaaggatttagtcttcttctagtttagatataatagcaaaagcaaatgtacatccctggtttcttgccaattatagctgggtcacacctgcctaagtagtgttttataataaatacatggtaagtaaattagtatccaaccctcaggcctacatggaataaatttggtggggtacttctcttgggaaaaaaaaatgttgttagcattttttgtttgctagtatcctttagacctactacctataaaaacccctctaaatgaagcctctggcagcatttcaacaagctaacttccgtagatttcttcagttcat

SEQ ID NO: 658094 - DNA, 269 bp, Homo sapiens
ctgtgttggaatttatcaggataggaaccatctaaattgaaaatgccccttcatatatttttatcacagtgaaagtcaaagcctagaataacaaaaaggcacaaaattaatrtcatcaggaaacaatttactcagctaattagcataacattctcatataaaaagacagatggattaagggatcaggtcattcatagcctgcagcaaactgcttcagtctttaatcccctgctgttacctatcaactggtactctttttatggatttgg

SEQ ID NO: 658095 - DNA, 515 bp, Homo sapiens
taagggatcaggtcattcatagcctgcagcaaactgcttcagtctttaatcccctgctgttacctatcaamtggtactctttttatggatttggatagatccctgggaagatttagattctcccattggattgattcaccttgttcctttaactttttattgatgatatatttcattatttcctgactaaaacaacagtaagaactctagttagcagctaaagaattgaactaaaggtgtatctccacatttctcatatagtagcttctacaacacacacacacacacacacacacacacacacacacacacacacacgatgccctgcagtgctaacaaataggctccagcttgaatacaaccatagaagagttttatatatatatatatatatatcctacttcaataaaagttgggatttcatgctacatacaaaactttcaagacaattaggaatagcacagcaacagccagtaataactatgaaaaatatcaaattctttacatggaagtag

SEQ ID NO: 658096 - DNA, 515 bp, Homo sapiens
taagggatcaggtcattcatagcctgcagcaaactgcttcagtctttaatcccctgctgttacctatcaactggtactctttttatggatttggayagatccctgggaagatttagattctcccattggattgattcaccttgttcctttaactttttattgatgatatatttcattatttcctgactaaaacaacagtaagaactctagttagcagctaaagaattgaactaaaggtgtatctccacatttctcatatagtagcttctacaacacacacacacacacacacacacacacacacacacacacacacacgatgccctgcagtgctaacaaataggctccagcttgaatacaaccatagaagagttttatatatatatatatatatatcctacttcaataaaagttgggatttcatgctacatacaaaactttcaagacaattaggaatagcacagcaacagccagtaataactatgaaaaatatcaaattctttacatggaagtag

SEQ ID NO: 658097 - DNA, 515 bp, Homo sapiens
taagggatcaggtcattcatagcctgcagcaaactgcttcagtctttaatcccctgctgttacctatcaactggtactctttttatggatttggatagatccctgggaagatttagattctcccattggattgattcaccttgttcctttaactttttattgatgatatatttcattatttcctgactaaaacaacagtaagaactctagttagcagctaaagaattgaactaaaggygtatctccacatttctcatatagtagcttctacaacacacacacacacacacacacacacacacacacacacacacacacgatgccctgcagtgctaacaaataggctccagcttgaatacaaccatagaagagttttatatatatatatatatatatcctacttcaataaaagttgggatttcatgctacatacaaaactttcaagacaattaggaatagcacagcaacagccagtaataactatgaaaaatatcaaattctttacatggaagtag

SEQ ID NO: 658098 - DNA, 515 bp, Homo sapiens
taagggatcaggtcattcatagcctgcagcaaactgcttcagtctttaatcccctgctgttacctatcaactggtactctttttatggatttggatagatccctgggaagatttagattctcccattggattgattcaccttgttcctttaactttttattgatgatatatttcattatttcctgactaaaacaacagtaagaactctagttagcagctaaagaattgaactaaaggtgtatctccacatttctcatatagtagcttctacaacacacacacacacacacacacacacacacacacacacacacacacgatgccctgcagtgctaacaaataggctccagcttgaakacaaccatagaagagttttatatatatatatatatatatcctacttcaataaaagttgggatttcatgctacatacaaaactttcaagacaattaggaatagcacagcaacagccagtaataactatgaaaaatatcaaattctttacatggaagtag

SEQ ID NO: 658099 - DNA, 249 bp, Homo sapiens
ctgaggatgtatgttaatctgtcttggagttgractgcatttagtatttgttatagctcaagtttctgaaggtttcaaattcctctagtgtccttgtttttgtctcctcccttaactttgggtttccttaagtactcatcttcaaacagtgtctgtttcttgtagctcttttgtctatccccgtatattggagtcatgttggtttaaattttatggtatgagcagagaaatatgttctatagtgctcga

SEQ ID NO: 658100 - DNA, 249 bp, Homo sapiens
ctgaggatgtatgttaatctgtcttggagttggactgcatttartatttgttatagctcaagtttctgaaggtttcaaattcctctagtgtccttgtttttgtctcctcccttaactttgggtttccttaagtactcatcttcaaacagtgtctgtttcttgtagctcttttgtctatccccgtatattggagtcatgttggtttaaattttatggtatgagcagagaaatatgttctatagtgctcga

SEQ ID NO: 658101 - DNA, 249 bp, Homo sapiens
ctgaggatgtatgttaatctgtcttggagttggactgcatttagtatttgttatagctcaagtttctgaaggtttcaaattcctctagtgtccttgtttttgtctcctcccttaactttgggtttccttaagtactcatcttcaaacagtgtctgtttcttgtagctcttttgtctatccccktatattggagtcatgttggtttaaattttatggtatgagcagagaaatatgttctatagtgctcga

SEQ ID NO: 658102 - DNA, 352 bp, Homo sapiens
gcagtgcaccctctctgccaaggggcagccagagtgctttgttaagtggtcccygatcctgtacatactccctaactgactgagaccaccaacaggggtctccaagcatgttatacaggagtgttcctgctggcatcacatcagtgcccctctgggatggagctcacagaggaaggagcaggcagccatccttgctgttctgcagcctccactggtgacacctccaggtgggagaggaaccaagtgagtagggtctggagtggacccccaacaaactgcggcagccctaataaggaagaggggtctgactgttgaaagaaaaacaagccaacagaaaacaacaacaacaaaa

SEQ ID NO: 658103 - DNA, 352 bp, Homo sapiens
gcagtgcaccctctctgccaaggggcagccagagtgctttgttaagtggtccctgatcctgtacatactccctaactgaytgagaccaccaacaggggtctccaagcatgttatacaggagtgttcctgctggcatcacatcagtgcccctctgggatggagctcacagaggaaggagcaggcagccatccttgctgttctgcagcctccactggtgacacctccaggtgggagaggaaccaagtgagtagggtctggagtggacccccaacaaactgcggcagccctaataaggaagaggggtctgactgttgaaagaaaaacaagccaacagaaaacaacaacaacaaaa

SEQ ID NO: 658104 - DNA, 352 bp, Homo sapiens
gcagtgcaccctctctgccaaggggcagccagagtgctttgttaagtggtccctgatcctgtacatactccctaactgactgagaccaccaacaggggtctccaagcatgttatacaggagtgttcctgctggcatcacatcagtgcccctctgggatggagctcacagaggaaggagcaggcagccatccttgctgttctgcagcytccactggtgacacctccaggtgggagaggaaccaagtgagtagggtctggagtggacccccaacaaactgcggcagccctaataaggaagaggggtctgactgttgaaagaaaaacaagccaacagaaaacaacaacaacaaaa

SEQ ID NO: 658105 - DNA, 352 bp, Homo sapiens
gcagtgcaccctctctgccaaggggcagccagagtgctttgttaagtggtccctgatcctgtacatactccctaactgactgagaccaccaacaggggtctccaagcatgttatacaggagtgttcctgctggcatcacatcagtgcccctctgggatggagctcacagaggaaggagcaggcagccatccttgctgttctgcagcctccactggtgacacctccaggtrggagaggaaccaagtgagtagggtctggagtggacccccaacaaactgcggcagccctaataaggaagaggggtctgactgttgaaagaaaaacaagccaacagaaaacaacaacaacaaaa

SEQ ID NO: 658106 - DNA, 363 bp, Homo sapiens
catacaagttacggctctagccacttctgcttcaggaagtagatcttggctatggctctctggtgtgccagtttctctcaattttgtggtgatgtttgccctgctttcacagttttctgatagacctaagaaaagtcattgattttcaatttgtatagctttttttattattattattgtaaggycaggagtgacaacttctgagcccttcacatgttggtgataaatccaaaagtcctgtaatgtatttgttttctcattttttaaaaccaagtgtttgaagctattttattaagggtttccttttcctcaaaaagtagatgcattaaatataatctagatattctacactcatgagaaaga

SEQ ID NO: 658107 - DNA, 363 bp, Homo sapiens
catacaagttacggctctagccacttctgcttcaggaagtagatcttggctatggctctctggtgtgccagtttctctcaattttgtggtgatgtttgccctgctttcacagttttctgatagacctaagaaaagtcattgattttcaatttgtatagctttttttattattattattgtaaggccaggagtgacaacttctgagcccttcacatgttggtgataaatccaaaagtcctgtaatgtatttgttttctcattttttaaaaccaagtrtttgaagctattttattaagggtttccttttcctcaaaaagtagatgcattaaatataatctagatattctacactcatgagaaaga

SEQ ID NO: 658108 - DNA, 289 bp, Homo sapiens
caaacatttggactttatcagaggtaaataataagagatcatactattagttaaaattaaagtataaatttagatcattatttttaattggttattttttaaagcyaacataactttaatttacaatgtaaactcaggagtgaaagagcattaagtaactcatgatccgtaaagaaaatttcaaaatttaaggtaagtaatgagatttccccatatttttgtgtttaattcatcaatgtttttaaaatacttaaaccagctaagaagtgtgttcaggtttcctatttat

SEQ ID NO: 658109 - DNA, 289 bp, Homo sapiens
caaacatttggactttatcagaggtaaataataagagatcatactattagttaaaattaaagtataaatttagatcattatttttaattggttattttttaaagccracataactttaatttacaatgtaaactcaggagtgaaagagcattaagtaactcatgatccgtaaagaaaatttcaaaatttaaggtaagtaatgagatttccccatatttttgtgtttaattcatcaatgtttttaaaatacttaaaccagctaagaagtgtgttcaggtttcctatttat

SEQ ID NO: 658110 - DNA, 289 bp, Homo sapiens
caaacatttggactttatcagaggtaaataataagagatcatactattagttaaaattaaagtataaatttagatcattatttttaattggttattttttaaagccaacataactttaatttacaatgtaaactcaggagtgaaagagcattaagtaactcatgatcygtaaagaaaatttcaaaatttaaggtaagtaatgagatttccccatatttttgtgtttaattcatcaatgtttttaaaatacttaaaccagctaagaagtgtgttcaggtttcctatttat

SEQ ID NO: 658111 - DNA, 586 bp, Homo sapiens
aaaattatgacactgttaagttgctgcttctgtgtggcaggggataaaaagattgattaccaacctaaaagaattgaagacttcccaaatatctattttcccagaaaaattagatkggttccttccattttaacatgttcctaatgtcaggtcatagcactctggcttcctttctggtactgttcctgtgtagcaattattattttgtcgaggccaactgacccattaggcccagtggccatagtgcctagggaccacagtactcttacagaaccacaaaaatgatttaaattcgttaaaatgaaaagagaaaatgaacttcaggtcaaatcaaatgtgttaacatatgatattaatctagttagctttatagtaataaagtcataaaatatgctttttgatgtatttttaatagaggaggcagccaacaaaaataaatgtgcatacagcccattaaagtcagaacatagccctgcatatttcagttgattatttgtgtaataatataaagtttgtgttctctgttccactgtagctacaagattattttgtaccttattgtccagcacagggtattgtgcagagt

SEQ ID NO: 658112 - DNA, 489 bp, Homo sapiens
tggagatgaggtcttgttatattggctaggctggtctcgaactcctgagctcaagtgatcctcccactacagcctcccaaagtgctgggattacaggtgtgagccaccatggctggcctaaatttcctatatatattctttctttgtttctttatgagaatgcaagcatacatgaatgtgtattcttattttcccaacttttaaaatacaaaacagtatacytagtaatatgccgctatgcttatatactaggtttttgccaattaatatgtcatggaaatcttcatatcagtacatgagaaccttgctgagcagtatttggattgtttcccatctttgagcaatgctgcagtgaaaaccttgttcatttctcatacctttgtgcaaccctctgtggagtaaatttctgcatatgagattattgagtcaaagggtaaatgcactataaacttttatatttgttgtcaaattgccctcaatagagcacca

SEQ ID NO: 658113 - DNA, 489 bp, Homo sapiens
tggagatgaggtcttgttatattggctaggctggtctcgaactcctgagctcaagtgatcctcccactacagcctcccaaagtgctgggattacaggtgtgagccaccatggctggcctaaatttcctatatatattctttctttgtttctttatgagaatgcaagcatacatgaatgtgtattcttattttcccaacttttaaaatacaaaacagtatactyagtaatatgccgctatgcttatatactaggtttttgccaattaatatgtcatggaaatcttcatatcagtacatgagaaccttgctgagcagtatttggattgtttcccatctttgagcaatgctgcagtgaaaaccttgttcatttctcatacctttgtgcaaccctctgtggagtaaatttctgcatatgagattattgagtcaaagggtaaatgcactataaacttttatatttgttgtcaaattgccctcaatagagcacca

SEQ ID NO: 658114 - DNA, 582 bp, Homo sapiens
aagcttcatcatgcaggcagagaccacgtccatctgcatctaccatgttcactgttgtttacttagcacttagtcctgtgcctggcccatcggaggcaccagcaagcgtgtctgtaggagtggggcttccgcaggacagtgctgctttttattattatttttttaaatagaagggacttaagggccaatgacttttaattctgctgagtaagatgtagaaaaattacagctaccatatatcatcaacatgttgtaaaagttggaaggacatactcttagaataaagaacagttcttttcttttcttctctttttgttttgtttcgtttcgtttcatttcaagacagagtctcgctgtgtcactcaggctggagtgcaatggtgcsatctcggctcactgcaacctccgcctcctgggttcaagtgattctcctgcctcagcttcccaagtagttgggactataggcgcataccaccatgcccagctaatttttttttttttgtttgtttgtttgtttgtttttgagatggagtgttgctgtgtcgcccagctggagtgcagtggcgtgatctcagctcactg

SEQ ID NO: 658115 - DNA, 593 bp, Homo sapiens
tggctaatgaactataactctttggtttgttattttagtggttgctttaggatttgtagcttatatccttaactttttgcagtctagtttcaagggatattacacaattttaagtacagtgaaaaccttataaaactatactctcatttttcctttcctgctctttctgctatagtagttgtcatatattttagttttacatatgttagaaaccccacacactgtttcaggccacatggtctcagagcctgaattgtctgagccaaaatccatcctcttaatatatgtgctaaactgcttcaagaaaacaaacaaaaacaaatgaataagcaaaaaccctgcgctcaaatttgggctctgaggagcctcagctatgaaagacatgctggctaaacataaggcgggatcctggctaaaatgcaacacaatcaggaaattcaacatcacatctgtatggattcttgatggttataaaattcttgatgtattatcaaatgctactaggatgcaattgatagatttccagagtaatgttactctaatctatttttttcacwtggaaagtatacatattgtaatacacagttttgtgt

SEQ ID NO: 658116 - DNA, 600 bp, Homo sapiens
attgtaatatcaggttttctgtacattgcattggctctggggaaaagactgtagtgcaattcctatcaaagtgctttttctatgtaagattttatatcgtttttatgccatgcttatttacataagctcaacatgataaggaaagtctattaggataaacaagtttagttaatatggtctaaaaacaaaatttaatcctatcttctgataacttcctagattcctccatttagagcttttttttctaagttctccattttctttctacctaaaagtatccaaatcttagctttttattttgttaatgtctttaattttacttgctatgccatcctrcacctatgtcttgtgttttccttttccaccaatattttctccttgcttatttaactttttaattaaatcctgccaaaatccctttagagtggcattgcatgtttgttggcaggctgcagtgtgctgtgctgcttcagcttgagcttaggtacaaaaatgttgatatttacaaagccgtaaaagtcaatattgtaccaccagagcagaacggcctctagattgtcaagcctaacctctgacccaacactcagatagggcttaaaa

SEQ ID NO: 658117 - DNA, 638 bp, Homo sapiens
gcaaacggaaacacgtcccatgctcatggattgaaagaatcaatattgtggaagtgactatactgcccaaagcagtcttcaggttcagtgcaattgctatcaaaataccaaacatcatttttcacagaattaggaaaaaacagtgtaaaattcatatggaaccaaaaaagatctcaaatagccaaagcaatcctaagcaaatggaataaatctggaggaattatattgctggagttcaaattatactacaagcctataattaccaaaacagtataatgctggtgaaaatggggaccacatggaccaatggaacggagtacagaacctgaaaataaagccaaatacttacagccagatcttcaaaaaagtatacaaaaaatacactggggaggggamacctgttttataaatggtgctgggaaaactggcaggccacatgtgaaagaacgaaactgggtccctgtatctcaccttgtacaggagtcatatcaaggtagatgaaagacttgaaactaaaacctgaaaacataaaaattctacaagataatattggaaaaactcttctggacattgtcctccgcaaagaattaatgactaagaccctgggagcaaatgaaacaaaaacaaaaataaataaa

SEQ ID NO: 658118 - DNA, 584 bp, Homo sapiens
ctcttttttaaattctgaaatccatgtctttargaaatttatggaaaaaaacaaaaagatatgcctatattaagatagttagcaaaattaactataatattctatcatttacattttttcccacgaaactctcaatagttaataatgtcttagaactgaaagttaagaaaacgaaaacaatgtctattagtagacctaataagccaatgtctattattgacctagcttaaatgtagaaatgtaaataagaattacaagacaagtaagaattacaagaattataagacaagaagacttcaattgttatattcaaacaaacccaaaagtacactgtaaattgtatataactaaagtgaaaaaatggtgctctattaatttttttaaaggcaaagactgtgccttttcattattacaaaacatagtatataaatgatacttagattattattatgctaatgaactgtcagaaaacaattaaaaatccattcacacttacattcatattttaagtcaacaaataaatattgtgctgttggcatgtatcatctacacagatgaccaacccatggccctggccttaagaa

SEQ ID NO: 658119 - DNA, 584 bp, Homo sapiens
ctcttttttaaattctgaaatccatgtctttaagaaatttatggaaaaaaacaaaaagatatgcctatattaagatagttagcaaaattaactataatattctatcatttacattttttcccacgaaactctcaatagttaataatgtcttagaactgaaagttaagaaaamgaaaacaatgtctattagtagacctaataagccaatgtctattattgacctagcttaaatgtagaaatgtaaataagaattacaagacaagtaagaattacaagaattataagacaagaagacttcaattgttatattcaaacaaacccaaaagtacactgtaaattgtatataactaaagtgaaaaaatggtgctctattaatttttttaaaggcaaagactgtgccttttcattattacaaaacatagtatataaatgatacttagattattattatgctaatgaactgtcagaaaacaattaaaaatccattcacacttacattcatattttaagtcaacaaataaatattgtgctgttggcatgtatcatctacacagatgaccaacccatggccctggccttaagaa

SEQ ID NO: 658120 - DNA, 648 bp, Homo sapiens
gaaatatagttatgtccttggaagctggtttactgcagctcttaaatggcttctcactggcaactaaatactctcttattatggtctaaataccccaaactaagagagaagcttcagatgtaaattgataaatgacttgtctttatttgctggtcctagtccccttatcttttataaaagtttttttcaaaggtgtcataacactagatgttccctcccatttatttaatgtacgagtgaatggtatgccaaaggaatgcagagctgggcagaagttaaagtagtgaaaacaagtttaattcaggactatttcattaagggaagagagaccacaaaatgagaatgggctccattctgactacaccggggagaacagcgacttatakccaagaagcaggggtctgtggatggaaaatttctaagagaagacatggtgtttggggagagttctggctgaatcaacccaacaggattcctgctgaaggcaggccagggtgatcaggtatcaaacacagggtgtgaaaaatcctggtcagacattgagagtgatctgttattgagggagggggaaattccctaaactgccctggcagttttatttactgaaacgggattttacaaggtagtgcacagatgagtctaggggca

SEQ ID NO: 658121 - DNA, 648 bp, Homo sapiens
gaaatatagttatgtccttggaagctggtttactgcagctcttaaatggcttctcactggcaactaaatactctcttattatggtctaaataccccaaactaagagagaagcttcagatgtaaattgataaatgacttgtctttatttgctggtcctagtccccttatcttttataaaagtttttttcaaaggtgtcataacactagatgttccctcccatttatttaatgtacgagtgaatggtatgccaaaggaatgcagagctgggcagaagttaaagtagtgaaaacaagtttaattcaggactatttcattaagggaagagagaccacaaaatgagaatgggctccattctgactacaccggggagaacagcgacttatagccaagaagcaggggtctgtggatggaaaatttctaagagaagacatggtgtttggggagagttctggctgaatcaaccyaacaggattcctgctgaaggcaggccagggtgatcaggtatcaaacacagggtgtgaaaaatcctggtcagacattgagagtgatctgttattgagggagggggaaattccctaaactgccctggcagttttatttactgaaacgggattttacaaggtagtgcacagatgagtctaggggca

SEQ ID NO: 658122 - DNA, 648 bp, Homo sapiens
gaaatatagttatgtccttggaagctggtttactgcagctcttaaatggcttctcactggcaactaaatactctcttattatggtctaaataccccaaactaagagagaagcttcagatgtaaattgataaatgacttgtctttatttgctggtcctagtccccttatcttttataaaagtttttttcaaaggtgtcataacactagatgttccctcccatttatttaatgtacgagtgaatggtatgccaaaggaatgcagagctgggcagaagttaaagtagtgaaaacaagtttaattcaggactatttcattaagggaagagagaccacaaaatgagaatgggctccattctgactacaccggggagaacagcgacttatagccaagaagcaggggtctgtggatggaaaatttctaagagaagacatggtgtttggggagagttctggctgaatcaacccaacaggattcctgctgaaggcaggccagggtgatcaggtatcaaacacagggtrtgaaaaatcctggtcagacattgagagtgatctgttattgagggagggggaaattccctaaactgccctggcagttttatttactgaaacgggattttacaaggtagtgcacagatgagtctaggggca

SEQ ID NO: 658123 - DNA, 563 bp, Homo sapiens
tacagaaaagcatttctgaggctgtacaggatgttttccggtacctgttcgggaaaccctcacttctgtctccttgttgtctattactgcacacttctgcagttgctgagtaatgctcctggagacatcatcccagcacagcaggctcccaatcacagctactgctgacagccagggaaacacagtcaaaatcctagaaacacacacttgacctggattgagggcagcagcttctggattcattcctttgctaatttcttttcttttcgtttggagacagggtcttgctctgtcscccaggctagagtgccatggcacaatcatggctcactgcagcctcgacctcctaggctcaagcaatcctcccacctcagcctcccaagtagctgggactacaggtatgtaataccatacctggctaatttttgtattttctgtagagacaggatgtttccatgttgcctaagctggtcttctctgctaatttctaatttcttaaagtgaaagtagattctctggattttctgttctgtgaagaaggctccttgggaagtagggggcac

SEQ ID NO: 658124 - DNA, 560 bp, Homo sapiens
tgccactatactccagcctgggtgacagagtaaaattctgtctcaaaaaaataaaaaaaaaatttaaagaaacagattttaaatatctgattctcactgagttcccagaattcagaaactcttaaagaacctccttacttttcatggcaatatagttatttgcataattttggtaggaattggtcctgcttttcaccataatataattaaataattgatagtacaatcaaggccttatccgaagtgtcatatctgagaatggtgctcatttaatcagatatgaacaccagtttgttttaacaaacgsaagttggtcatacttagagaatcagtgcctacaaagccctcccaggaaaactggcctggttcctggctgacagagtccccaccttttgaggtgttggaaaggtcattttctagtacaccagtaacgttaggatattcagggaccgtaagaaaagaggatttcacccaaattcataggtactgcaggtgaaatttggtagagagagtttcttggaattgatttcctagcctcaagatagtaaatagcagaggct

SEQ ID NO: 658125 - DNA, 612 bp, Homo sapiens
ttatttgcataattttggtaggaattggtcctgcttttcaccataatataattaaataattgatagtacaatcaaggccttatccgaagtgtcatatctgagaatggtgctcatttaatcagatatgaacaccagtttgttttaacaaacgcaagttggtcatacttagagaatcagtgcctacaaagccctcccaggaaaactggcctggttcctggctgacagagtccccaccttttgaggtgttggaaaggtcattttctagtacaccagtaacgttaggatattcagggaccgtaagaaaagaggatttcacccaaattcataggtactgcaggtgaaatttggtagagagagtttcttggaattgatttcctagcctcaagatagtaaatagyagaggctcttaaacccatctgatatttttatgaaaactcccagacataagttaatttggtagcattagttgttgctcagtactatatagctcaagatttgcaaagactggcaaacttaagaaaaacgatatgctaattaacatcccttgctgcctctatgtaaacaatcaggctaaacctaattgaaatcagccttattttgtgatcaagaatt

SEQ ID NO: 658126 - DNA, 611 bp, Homo sapiens
aataatcttggaagccttatgctaagcatctgctatgtgccaggcaccatgccacatgctttgcatactctctaatctctattccctgcaaagtgagtagcactatctctgtttgcagatgagggaatggagcatcaaggaggttaggtaacacactcaaggccacttggcttgcaagagattgaaccagaatttgaatcctgatctagctgatgctaaaacctgtattttttctacaaccccagactacctgctccttcaactgactttccctcataaccaagcctacacatgaattgaattcctcccgtattttctcaatatagactggcacctctctgsatatatagcattattagaattgtggggtatgatgaaggagatatgggtagacaagaagccctctacctttttcgtttaatttcttttgaatcgaggtggggtctcactctctcacccaagctggagttcagtggcgcgatctcagctcactgcaccttctgccccccaggcacaagtgatcctctcacctcagcctcccgagtagctggaattacaggcacatgccaccatgcccggctaaagaccacctttaagaacaacactgtttc

SEQ ID NO: 658127 - DNA, 603 bp, Homo sapiens
gttgtcttcgagtgcagaaagaaaaaaggagaggggccaaattgagaagtttaagaaaagcacagtttttaatggatcaattttctgttgcctctagtctgttcgaaagaatacaattctatgaaccattattcacgagcactcatagataataattacagtaacaacaacataaatctcccctgataygggcaaggagtagctccccagacatgtttagtaagctgagggaatagatgataaactcttcagggcacttgtaattataaaaaaagaaatcattcttatttgtctttaggatttagagatatacagatggccacctatctgggctcagtagtctccacactttttgggttatttaccccatctgtaaaatttgtttcagcacatatcccccagtatgtcatgtgtctatgcattttatgcatgtcttcccatcttcacctattaggtacatttaaaaacatatacaagaaattgaaactagcacagaatcagataaaaatcaatagaagtaaataataccatgttttcttccttcatctcaaaagattgtctaggtccaactcattctgaagacccctgctctaaatctcatgg

SEQ ID NO: 658128 - DNA, 603 bp, Homo sapiens
gttgtcttcgagtgcagaaagaaaaaaggagaggggccaaattgagaagtttaagaaaagcacagtttttaatggatcaattttctgttgcctctagtctgttcgaaagaatacaattctatgaaccattattcacgagcactcatagataataattacagtaacaacaacataaatctcccctgatacgggcaaggagtagctccccagacatgtttagtaagctgagggaatagatgataaactcttcagggcacttgtaattataaaaaaagaaatcattcttatttgtctttaggatttagagatatacagatggccacctatctgggctcagtagtctccacactttttgggttatttaccccatctgtaaaatttgtttcagcacatatcccccagtatgtcatgtgtctatgcattttatgcatgtcttcccatcttcacctattaggtacatttaaaaacatatacaagaaattgaaactagcacagaatcagataaaaatcaatagaagtaaataataccaygttttcttccttcatctcaaaagattgtctaggtccaactcattctgaagacccctgctctaaatctcatgg

SEQ ID NO: 658129 - DNA, 653 bp, Homo sapiens
ttcggtgtaagaccagggtgtttgcttaatatacagagttcaggcacacgcccacaccaagtgaatcagactctggggatgggttgtacaacctgtttgaacccctttccctgcaggatttctttcttttttcacagaaaggtttagaaacttccctacttagaagaaaccagtgtgaggaataaatgagcccagctgccgaaggacgtacccttgggatgagaggatggccaggagctggaggaggcaagggctgagggccgggaggatgaagatgaatctcagctgagggagagaccaatctgggctagggaaggtgaggctgggaggtctcttggaagaggcagctacattcctctcattccttaaaggtgaatttctgagggtagaatttcaagggggcgaatggaaaggacaggagcagtatctatctatatctatcaatctattatctatcggtctatcatcttcccccaatcccctcccagtgttaaccagctcaccctgtggcagcaggagyctctagagctgggtgtgttggaggttggtgtgttagactgctcgggtttccataacaagataccagagactggatgacttgaacaccagaaatcgatttctcatagttctggaggctggaagtttaggatgcc

SEQ ID NO: 658130 - DNA, 653 bp, Homo sapiens
ttcggtgtaagaccagggtgtttgcttaatatacagagttcaggcacacgcccacaccaagtgaatcagactctggggatgggttgtacaacctgtttgaacccctttccctgcaggatttctttcttttttcacagaaaggtttagaaacttccctacttagaagaaaccagtgtgaggaataaatgagcccagctgccgaaggacgtacccttgggatgagaggatggccaggagctggaggaggcaagggctgagggccgggaggatgaagatgaatctcagctgagggagagaccaatctgggctagggaaggtgaggctgggaggtctcttggaagaggcagctacattcctctcattccttaaaggtgaatttctgagggtagaatttcaagggggcgaatggaaaggacaggagcagtatctatctatatctatcaatctattatctatcggtctatcatcttcccccaatcccctcccagtgttaaccagctcaccctgtggcagcaggagtctctagagctgggtgtgttggaggttggtgtgttagactgctcgggtttccayaacaagataccagagactggatgacttgaacaccagaaatcgatttctcatagttctggaggctggaagtttaggatgcc

SEQ ID NO: 658131 - DNA, 565 bp, Homo sapiens
ctgcactccagcctgggcaacagagtgagaccctgtcaatcaaccaatcaatagaaaaagaaaaaactttcccagaattcctgcaacagatatcccctttgttttcattgagcaaagacaggtcacccttagctgcaagggagcctgagaaagtgcatttttggctttttcactttctatagtaggaagcagaaaatagagaacggggttagaaatgactgttagatagccagtcatcagtatgtgccataaaatgcacatgagatataaatgcttatgtggcaaactygataaattaaattattcagtaattagctggctaggttttcaatggaagaaacaggaaagatggggtcttctattaattttctcttgttagctgatttgatcaattgatcttttttctgtttaattgatttgttttatgtttgttcagatcaaaaagtcaaaaagttttctttaaaatacaagggccaggtgtggtggctcatgcctgtgatcccagcactttgggaggccaaggtgggcggatcgccagaggtcaggggttggagaccagcgtggc

SEQ ID NO: 658132 - DNA, 565 bp, Homo sapiens
ctgcactccagcctgggcaacagagtgagaccctgtcaatcaaccaatcaatagaaaaagaaaaaactttcccagaattcctgcaacagatatcccctttgttttcattgagcaaagacaggtcacccttagctgcaagggagcctgagaaagtgcatttttggctttttcactttctatagtaggaagcagaaaatagagaacggggttagaaatgactgttagatagccagtcatcagtatgtgccataaaatgcacatgagatataaatgcttatgtggcaaacttgataaattaaattattmagtaattagctggctaggttttcaatggaagaaacaggaaagatggggtcttctattaattttctcttgttagctgatttgatcaattgatcttttttctgtttaattgatttgttttatgtttgttcagatcaaaaagtcaaaaagttttctttaaaatacaagggccaggtgtggtggctcatgcctgtgatcccagcactttgggaggccaaggtgggcggatcgccagaggtcaggggttggagaccagcgtggc

SEQ ID NO: 658133 - DNA, 550 bp, Homo sapiens
agatcttgtaaaatcttgttaaatttatacctaaatattttatatttcaaattccacttattcattgcyggtatataggaaagtgatggacttttgtatattaaccttatatctcacaatcttgctaaaatcacttctgtatttttttttaaagaaacactacagatacacttaaaagcctcttttactatgtgtgtttatccataaacaatataaagtattgttttgtatatttaaaaatacatgcttagatattatccctttcatatcctttcgaaacttgcttttattaccattaggttttcaatatttattcatgtttgtttacatgtttcttgttcactttaactgctgtatgatgttccattgtgtttagactccacctattttatattccagtggaatttttccattcctgaattgttagatatttatgttgtatataggttttcttgatattatgaccaatgcttcagtgaactttcttgtacattcccttgtgccactttgtgagaatctgtctaaattataacgtacatttccctgatac

SEQ ID NO: 658134 - DNA, 604 bp, Homo sapiens
ccgagggaaatgtgtaatagcagaggtctatccaaatgaaaaacactgagaatagatttttaatctgaaggttgcatttagtgaaaggactcaagaaggtgctatccacgaaagtgtttaggactcagaacctagactagcataaagccattgaggtactcgcctcaggcacaaaatttaagcttgtgacaaaaacccaggagactaggatgaggcgagtgaggtgagtcacgcaagtgcagggtatgatcctgtctttatttaaatttttgatattttgttcatcatggacttttttgcaagaattttgatatttaaaaagattgtctaaaaatattaagtatcttcattactgagtttctaggcggccctttaaaatttttgccaaaggagaatgtctccatagcgtcactctagtcccagccatatttaggtgactttcgactgtaagagaggcttataggtgcctttcagtgtcagtttctgagacctaaagktttcagggttgaggtggagattgatgaataaattacttgggaataaatatgattaaaatagaggatctaattccccaccgccctttctcagaggcgccttgatgtgg

SEQ ID NO: 658135 - DNA, 602 bp, Homo sapiens
gctaaagtgaccaaaaacttagatcacaacactcaattccctttgaatgcttgaaaagcattctcaagaaggacaggtataaacaagcccagactgtgaatattataatacctatctcttcagtgcacaagcaccaagaaatatccacaagcatccagatcatccaggataacattacctcagaaaatgaaataaagaaggaaccagtgaccaatcccagagtaacagagrtatgtgaccttttagacagaattcaaaatagctgttctgaggaagctcagtgaaattccagataacacagagaaggaattcagaattctatcagataaattgaacaaagagattgaaatactttaaaaaaatcaagcataaattctggagctgaaaaatgcaattgatataccgaagaatgcatcagagtctttcaacagcagaactgatcaagcagaagaaaaaagtattgagcttgaagaggggctgtttgaaaatacacagtcagaggagacaaaaaaagaataaaatagaatgaagcacacctacaacatctagaaaatagcttcaaaagtacagatctaagagttatttgccttaaagaggtggta

SEQ ID NO: 658136 - DNA, 474 bp, Homo sapiens
ttatcttgtctcatgagacaaggcacacagtctttctccaaatgcaaaacctgcaacagggacaagcacctgaggactctacccaccagtcctctcctgttccactcacttggcccttaatccttccctgcagacaaatatctctcgaattgtttggctcatttttcatgcatgtagagctcttcaaccagacagaaagcttcttgaggaggaggacttggatttactatcttcatactccataaagtaacagggatcatattccagaaatcaacatgaggaaagacgtttttgtgtgtatgagtttacttacttgggtaataaggcagaatgtttgaaatgagaactgtttcaggaaataccaagagcaacacagttccatatgcaatgaatatttcttcagtggccttaaaagtagtatgagctcctccctccaatygaatctgtttgagaatgtttttattctcttagtta

SEQ ID NO: 658137 - DNA, 607 bp, Homo sapiens
cttgaaacattataatggaaacaaaacatggcaaaacctacggaacacagcaaaagtagtactaagagggaagtttatagctataagcacctayatcaacaaagtagaaaaactttaaacaacctaacaatgcatcttaaagagctagaaaagcaagaacaaaccaaaccaaaaattagtagaagaaataataaaaatcagaacaaaaataaataaaattgaaaaaaaaatacaaaaaaaatcaatgaaatgaaagctgggttttaaaaaagataaacacaattgacaaacctttagctagattgagaaaaaaaagagagaagacccaaataaatacaatcagagatgaaaaaagagacattgcaactgataacacagaaacgcaaaggatcattagtggctactatgagcaactgtatgacaataagttggaaaatatagaggaaaggtataaattcctagacatatgcaacctaccaatatttaatcatgaagaaaatcttaacagaccaataatgagtaataagatcaaagccatactaaaaagccagcaaagaaaagcccaggacccactggcttcactgctgaattttaccaaatatttaaa

SEQ ID NO: 658138 - DNA, 590 bp, Homo sapiens
tatacttacagaactgtgcaattatcctctctatttaatagcagaacattttaatagtcccctcgaagaaacaccatacctattagcagtccctctccattgtctcctacttccagccccttgcaacctctaatctgctttctgtatttatggattatccttttttttgacaatttacgtaaataaaataatacatggccttttgtgtcaggattttttcatctagcataatgtttccaaggttcaccgatgtagcatgtatcagcacttcatttgctttattgggcaaataatattccattgtatgtagatactacattttatttgttcattcattagttggatggacttctgggttatttccacatctgtttcaattctcttaggtatgtayctaagagtagaattactgggtcatatggtaggttatctgatgtgttggcatacaattgttcatactattcccttataattattttttatttcataaggctagtagtaatatatcctatttaattcctgatgttaggaatttgagtcttttctctttttttcttggtcaatactgctaaaggtttgtcagttttgtt

SEQ ID NO: 658139 - DNA, 334 bp, Homo sapiens
caagcaaaaagaaaacgaataaaggctccatgccttaaatatacccccacactttttaactttttgttgttactatttatatataccttattgtactatgtcttgaaaagttgttgtagttattacttttgattggttcatcaaaccatgtttgatgtttttttattttgaagttatctttttccatgttttcaaaccatgtttcccaggttggtcttgaacycctgagctcaagcagccctctctcctcagcctcacaaagtgctgggattacaggcatgagccatcgtgcctagccaaatcactagtcttctactggcattgaagagggcag

SEQ ID NO: 658140 - DNA, 616 bp, Homo sapiens
gtatatatacatataaaacctctgtatatacagtttctatgtatatatacatataaaacctctgtatatacagtttctatgtatatatacatataaaacctctgtatatacagtttctatgtatatattcttttaaacctctgtatatacagtttctatgtatatatacatataaaacctctgtatatacagtttctatgtatatatacatataaaacctctgtatatacagtttctatgtatatatacatataaaacctctgtatatacagtttctatgtatatatacatataaaacctctgtatatacagtttctatgtatatatacatataaaacctctgtatatacaktttctatgtatatatacatataaaacctctgtatatacagtttctatgtatatatacatataaaacctctgtatatacagtttctatgtatatatacatataaaacctatgtatatacagtttctatgtatatataacatataaaacatatgtatatatattttctatgtatatatatacatataaaacatatgtatatatattatatatattttctatgtatatatacacatataaaacatatgtatatatgttttatatgta

SEQ ID NO: 658141 - DNA, 616 bp, Homo sapiens
gtatatatacatataaaacctctgtatatacagtttctatgtatatatacatataaaacctctgtatatacagtttctatgtatatatacatataaaacctctgtatatacagtttctatgtatatattcttttaaacctctgtatatacagtttctatgtatatatacatataaaacctctgtatatacagtttctatgtatatatacatataaaacctctgtatatacagtttctatgtatatatacatataaaacctctgtatatacagtttctatgtatatatacatataaaacctctgtatatacagtttctatgtatatatacatataaaacctctgtatatacagtttctatgtatatatacatataaaacctctgtatatacagtttctatgtatatatacatataaaacmtctgtatatacagtttctatgtatatatacatataaaacctatgtatatacagtttctatgtatatataacatataaaacatatgtatatatattttctatgtatatatatacatataaaacatatgtatatatattatatatattttctatgtatatatacacatataaaacatatgtatatatgttttatatgta

SEQ ID NO: 658142 - DNA, 592 bp, Homo sapiens
tggaatctatgacttgcttctaatgtgtagaatatgataaagrtaacaagatatcactttattgtttcaattaagttatataagattcagtcttagcacattggagaaagataaatcttcctgctctgtgtaaagaagcaaacgtattgtaaactgcctttggagaaggacatatgccagggaactccaggtgacttcttggaccagaggatggcctccagacaacagccctcagtcatataaccaaaaagaaatgaattctgccaacaatctaaatgagctttgtaaaacaattgcattccatattgttaattatattttgaaaagaaatgtaatttaaatactaaataatgagattttattttatatatgatcaattatatacaataaattattttcttataaatctagttacaacttttctgtttcttatattgaacaaattttgagctataactcagtcatattactttacttgcttttgccattaccatagcttggtaggaaataaggttttaaataatagtcttttaagtaggtgacagatttagaataaaagattcataacagttctaattttaaaaaatgactt

SEQ ID NO: 658143 - DNA, 669 bp, Homo sapiens
ttgcattatattgaaattattgattgatgactatacaggtatctaaaagtgctttagtgatatttgaggraattggaattactagataggctgggaatacctttttaaaatttgaaacaataaactcggctgggagcagtggctcatgcctgtaatctcagcactttgggaagttgaggtgggaggatagcttgagcccaggagtttgagaacagactgggcaacatagccacatttgcagcccatcactacccaaaaaaaaaaaattgtagatgtggcatgtgcttatattcctaactacttgagaggttgaggcaggaggattgcttgagcccaggaggtcaaggctgcagtgagctatgattatgccactgcatgccagcatgggtgacagagtgagaccccgtctctaaaaaacaaaaacaaccccccaataagcaatagattatgggctcctgctttttggaaatttgttagctaacatgtttttaggcactaagtatgagtgatgcctgtaccctcaaaacggtagctttcctctactataccagcaaaaacaagtttggaatataatgggaaaatatacattcacaatggccagtgatttggggggagccagagtagtgcttgactctgttacctgtggtcgatagtctttaagatggctcc

SEQ ID NO: 658144 - DNA, 500 bp, Homo sapiens
agacaataaaatttcttatcgggaatgtaagctattcacactgggtcttctgataattagtgcattttagtataatttagcttggttcattaggatatgattattacatgacagcaaatgaatgatactttgtttcttagtatactgaattgtcacactgtggatattataaatgtacttctttactaacccacatgcactttgactcttccaaattggcacagtccatacatactgatgcttttcaaaaaataaaaaamaactagttcctgctttaccaaccaaccctgacaataatatgaatgtttgtgtatgtttagagatttagtcagataattaaacagtaacatctattaaacaacttataatgcttgaagtactgttctaagtactttaatacattatctcaagaaataggtaactcacagtctaggtagatattttttaaattaaattaacatttgcaaatatctgaatataaaactcttttctccattttg

SEQ ID NO: 658145 - DNA, 462 bp, Homo sapiens
ttttttaaaaaataaaatataccatgtctataatatggtctcataagggcctatggcccactgtaacacctcatagagatccaaacttcacaaatagaatagaaatgtgttctagctctatctcaggtcttttctctagtactccattgtatcctttgaagataatctcgtcttagtccattttctgctgctataacagaataccacgcatggaataatttataaagaaacgagttttattggrcttatggttctggaggctgggaagtccaagatcagggggctacatcttgtgagagcctatgtgtggcatcataacatggccagagaccatgcaagcgctcaagaaagattttataacagaagcactcctgccataactaacccattcccatgtggcattaatcgattcatgaaggcagaacccccatgatcttgtcaccttttaaaagtcccacatcc

SEQ ID NO: 658146 - DNA, 594 bp, Homo sapiens
tattcagtttgaatgctggaaacatgaaatgacatgaatttcagtttcttatgacattcaagtataatatagaattctcactatcattgtttatctcccacttttgttcatgtcttactttatctttgaagatttgcctatttattaaaatcctgaaatgcactgtagatgccagaatatgccacaggtatatttgtaatgatatatttaagttacattaaaatctgagaatattatctgaaatttgaaatcttacagggcctgaatattttattacaaaacctatttctatatccatttctgtagtttcatgatttggartgaatagatgaataacgatggctgaatagtatttatgagtttgttgaaattagatgacaatctgtaaggctctaggaaataaacaattaaactgaaaatatttgttccttaactcctctttggaaactaatttcctatgcataaggaccttccaatcttccccaggtaccctaaactcagacaaactccagctttgcctgtggcttttaataatgtaaaatgaactatttttttaagaagacaaaaattgagctatttatgaaagactaatca

SEQ ID NO: 658147 - DNA, 594 bp, Homo sapiens
tattcagtttgaatgctggaaacatgaaatgacatgaatttcagtttcttatgacattcaagtataatatagaattctcactatcattgtttatctcccacttttgttcatgtcttactttatctttgaagatttgcctatttattaaaatcctgaaatgcactgtagatgccagaatatgccacaggtatatttgtaatgatatatttaagttacattaaaatctgagaatattatctgaaatttgaaatcttacagggcctgaatattttattacaaaacctatttctatatccatttctgtagtttcatgatttggaatgaatagatgaatarcgatggctgaatagtatttatgagtttgttgaaattagatgacaatctgtaaggctctaggaaataaacaattaaactgaaaatatttgttccttaactcctctttggaaactaatttcctatgcataaggaccttccaatcttccccaggtaccctaaactcagacaaactccagctttgcctgtggcttttaataatgtaaaatgaactatttttttaagaagacaaaaattgagctatttatgaaagactaatca

SEQ ID NO: 658148 - DNA, 582 bp, Homo sapiens
tgcttttttgataaagaactttatgttttttctcctactctcagctacaaaatggtggtttaattaagaggcaggctggagggattgctgtgtagagagaggaaagcagagagcttccagagaataaaaatcgtttgtgtcctaaacacrttttgtcctagagcaaaattatatctttacttgtttttggcagataatcaaccttattccctaacttttgttgctataagtgcagcagatgtacagatggatacctgggatgatttgatagactcagagtttaggaagaacaggcagctgctctgagccacactcacagcaggagaggagttaaggggagacaacaatgactgcacggggtcttctttcttggcaaaaaacctgttatctggcatgaaagaagcaatttcaatatgctggttgatgattctacaatggggacatgtacttagttacagaggtgggctttatccaatagattcccagagtccttgatactggtttttcgatggacacacatttgttcaagaagttttggacctctcaggattgcactggaaatcttcaattatctcccttgaa

SEQ ID NO: 658149 - DNA, 599 bp, Homo sapiens
agataaaaataaataaatgagtgaacaggacaaaccctaaatctctttgcctctccttttatatatttgtagcattatcataaaaatagcacttgtgagagtcgaatggcgaaatatttgtaaatgtatgacacaatgcttgtaaatatgcaatgcatagttttctaggagcatcaggattataggactgagttcacactttctaatattytgtaggaaatttaatattcagatcttttcttaaaggtgttaaagtattcacaagctaatacaagttttatattgtattgacttcacttattccagagagatgagatgctttcaaaatcagatcttctgaattattgaaatacttattgaaataaagactctggttctcctaatgctgtgctttgccttactgctgtcccctgctccctgccccaaacaagggccaaagttcctggaatactacaattgtggatgatcctctgctaacacaattgatttctatctccacttgaattaattgtttgcatcgactggcagaaattcaaagaaccaaatgatttgttccctgggaaatggcagaagatttgaagtgatactcaaaatgaaca

SEQ ID NO: 658150 - DNA, 599 bp, Homo sapiens
agataaaaataaataaatgagtgaacaggacaaaccctaaatctctttgcctctccttttatatatttgtagcattatcataaaaatagcacttgtgagagtcgaatggcgaaatatttgtaaatgtatgacacaatgcttgtaaatatgcaatgcatagttttctaggagcatcaggattataggactgagttcacactttctaatattctgtaggaaatttaatattcagatcttttcttaaaggtgttaaagtattcacaagctaatacaagttttatattgtattgacttcacttattccagagagatgagatgctttcaaaatcagatcttctgaattattgaaatacttattgaaataaagactctggttctcctaatgctgtgctttgcctyactgctgtcccctgctccctgccccaaacaagggccaaagttcctggaatactacaattgtggatgatcctctgctaacacaattgatttctatctccacttgaattaattgtttgcatcgactggcagaaattcaaagaaccaaatgatttgttccctgggaaatggcagaagatttgaagtgatactcaaaatgaaca

SEQ ID NO: 658151 - DNA, 596 bp, Homo sapiens
ctttgctaatttagttgaatgcttagcttattaattttcattttccttagtaagtaattaaagtatttgcaggttacttccaagaacatttttcccaagaacattttttaaccacatcttataacttttgatatgcactgttcctcttgtcttaattttctaattcattgattacaaacatgttttctcctaatcttcaacacactaaaggatatggcttaggcccgccagtaatactggcatagcacactagagtagtaattttcaaagggattaggaatgagggggatagaaggaggctatatttcaattgaaatggatttccagatgtctttgataagctcactctctctacaaccaacaaaactggcaatctgcaaatgaaaattatttttataaatactctgtaatcatgcattttttaatcctcaacttttattttaagttcaggggtacatgtacaggatgtgcaggtttgttacataggtaaaygtgtgccatggtggtttgctgcacagaccatcctatcacctaggtattaagcccagcgtccattacctattcttcctgatgccctccctcccactactcccacc

SEQ ID NO: 658152 - DNA, 584 bp, Homo sapiens
ttggtcagcaaaagtacccaaattcattttgtttctctgttgctaatggtaacttggaaattagagttcctaggaaattcctgaactatttaatttctctagtgcttatggtaacttggaatttgtagtgcccggaagacttccatcttccatagctacctacacattgtgttttgaggaaagcaactaacgaggatataaatcttgggggatcaattcaaaaaacagtctcaagatctacatacttcaagtttgttgatattctaaggccttcttatcgaataattttgggtaataaaattagagaacagtttgatattgactatgaaatgtaaaattatcattagaaaaattagtcctgtcacatttattagraaacttatttttataattaaatcagacctgtgtattttaaattatattaaacatggtgaaattttatttggaagagattataaataagtgctgataaactgttccaaaatgatggtcacaatattttattcacatattttccccatacattttgaaaaggatttgaggtatgttacacaaagaagcataaggtaaaataagtcatacat

SEQ ID NO: 658153 - DNA, 618 bp, Homo sapiens
atgcagacccaaagacatttgatgattgaaatgatccagatgtctgttttttgtttttgcttttgtttttgttttaatatttgtaaagcagaaagggcatttggccctggggaaaaataaaagaaaattatatcaaaaagtggagattttaaaatttgttttagcaacaattattctctagatagaacacagtaatcattatgaatatcttaaacaccaccccatccaacgagacatttctttcccaatacgccatttccattgtctttaggatatataaaatgacttcaaaaaattccagaattttaagttctgcagttccaaggatgataaacatttctttcaaaggcttaacgtttgctcttattctatgtcaaaattttatgtgatgacacctgtttcacatgaataagaaaaaataggccatcttcttggtttacaaatggaatgcaacatttcctgcaaataaataaccaggaacaaacttaatgaccttcgcagttttattggaagaaaattccccartcatcagctactgtatcatacaatctgtggtcaagtacaatatccagcatcaaattatttagctaagtaaaaacaagtctaacaaaccaagtc

SEQ ID NO: 658154 - DNA, 533 bp, Homo sapiens
ttggcgtttatttgattatcttttttagtggttgtactatttaccaaaattatatatagtattttttctaaaaaatgaaataaattcttaagttacatattcctctttcatctgcaatgctacatgaaatacaatattaaaacaatgattttgatccacttgaaatattttcccaacctcttacatattggtaactagtaattttcacctcaggggcaatccatggtcactggttgatggaataacatttatttcatttaaacatagagggtgttatccattttgctgaaaggtcaaggtaagagactttacaaagtatatacaaacaaaagctaagcctataatttctaggcagtgatgagcaagctctaaaactatattttgggccaggcgcagtggctcacacctgtaattccaacactttgggaggctcagatggmtgaatcacttgagcccagaagtttgagaccagcctgggcaacataatgagacccctgtctctataaaaaaaataaacaaaaattagccaggta

SEQ ID NO: 658155 - DNA, 417 bp, Homo sapiens
tccaacctctggctgttacccacttctgaacctgctttacattttcagctatctttgttgcagcctggcaatgcagaagaaaaagaagtccattttcagggggaaacttcaagaagccttcagatatttgcattaaaaagaagtccagtgctaatagccaagacgatggggaaatgtcattgaagatatttcatagctccacttcgcagtactttattttctgtatgatcataatgaaaaggggtttaattggctcatggttctgcaggctgtaaagaaagcatagtggcttctgcttctgggaggactcaggaagcctcccaatcataccagtaggaaaacagcaatgaaatrtttcatacagcaggagtaggagcaaggctgagagaggaaagacgtgccacaccgtcctataac

SEQ ID NO: 658156 - DNA, 392 bp, Homo sapiens
taatacattttgttatttttctaattaaaaatgcatacttttttgagataatagagaagatatgaaaatataagaactataattccaataccaaagatactaattgtcttcttttctagactgaaaactaaaagaggagcrgtcagatccttcctgtccaaaagcatactttcagtttctcatactgtgcctgtaacaaagtttcactaagtaactgttcatccaatgaaagaatatatgagttatatacattctttcttttagttccctctctctctttatacacacacactctaaagtgtttgaggtctttctttgtgtgtgtacagtgctgtatgcatttcctaatttatatcagcataataaacttagacatttgtgctactattaat

SEQ ID NO: 658157 - DNA, 392 bp, Homo sapiens
taatacattttgttatttttctaattaaaaatgcatacttttttgagataatagagaagatatgaaaatataagaactataattccaataccaaagatactaattgtcttcttttctagactgaaaactaaaagaggagcggtcagatccttcctgtccaaaagcatactttcagtttctcatactgtgcctgtaacaaagtttcactaagtaastgttcatccaatgaaagaatatatgagttatatacattctttcttttagttccctctctctctttatacacacacactctaaagtgtttgaggtctttctttgtgtgtgtacagtgctgtatgcatttcctaatttatatcagcataataaacttagacatttgtgctactattaat

SEQ ID NO: 658158 - DNA, 598 bp, Homo sapiens
aaccatctgatcaactacaaggctgasaaaaacaagcaacggggaaaggactctctttcccaggggtgttgggataatggcctagccatatgcagaagaatgaaactggacccctaccattcaccatatgcaaaaatcctacctaggaaataccattctggacattaaccttgggaaagaatttttggctaagtccccagaaacaattgcaacaaaatcaaaaattgacaattgaaacctaactaaagggcttctgcacagcaaaagaaactgagagtgaacagacaacttacagaataggacaaaatactcaccacatatgcatctgacaaagatctaataggcagaatctgtaagcaacttaagtgaacaagcaaaaaacaaataacctcacttaaaaaatgggcaaaggacatgaacagacacttcttaaaagaagacctacaagtggtcaacaaacatgaaaaaaatgctcatcatcaataatcagcagagaaatgcaaatcaaaagcacaatgagatactatctcacaccagtcaaaatggctattattaaaaagttaaaaaacaacaaatgctggtgaggctgcagaggaaa

SEQ ID NO: 658159 - DNA, 613 bp, Homo sapiens
tccataaaactacttctcgttatgacagattgaatgggggcctgagttaaatataactgcataaatgtgaaaaggcaaaagggacctaattgaagatattattagaaaataaaatatagcaaattaattaaacaatgcaaatctcagtaacaatggctatgcatttttaacacttaatgttttaatattacccttacaaaggttagtcaaaacacatactaaacttttatgccagttttttttccagggtggttatttatccagcaaatagaaactatcatcaatgtttactcattcatctggcaaacaagcattcaaaacctactttatgcaaggcatcatgctaggtgctaagaagaatacaatgatgaagaataaaactttcttgcctttgagaattgcaaattaaaattacaataagatatcatcwtataccggtcagaacggctattattataaagtcaaaaacaacaggtgttggtctggatgctgagaaaagggaatgcttatacactgttggtgggaatgtaaatcagttcaacttctgtggaaaacagtatggagatttctcaaagaactaaaaatagaactactattaggtccagtaatttca

SEQ ID NO: 658160 - DNA, 613 bp, Homo sapiens
tccataaaactacttctcgttatgacagattgaatgggggcctgagttaaatataactgcataaatgtgaaaaggcaaaagggacctaattgaagatattattagaaaataaaatatagcaaattaattaaacaatgcaaatctcagtaacaatggctatgcatttttaacacttaatgttttaatattacccttacaaaggttagtcaaaacacatactaaacttttatgccagttttttttccagggtggttatttatccagcaaatagaaactatcatcaatgtttactcattcatctggcaaacaagcattcaaaacctactttatgcaaggcatcatgctaggtgctaagaagaatacaatgatgaagaataaaactttcttgcctttgagaattgcaaattaaaattacaataagatatcatcatatacckgtcagaacggctattattataaagtcaaaaacaacaggtgttggtctggatgctgagaaaagggaatgcttatacactgttggtgggaatgtaaatcagttcaacttctgtggaaaacagtatggagatttctcaaagaactaaaaatagaactactattaggtccagtaatttca

SEQ ID NO: 658161 - DNA, 572 bp, Homo sapiens
attttgtttttcctttgaggaagcagaataaactgtatcctgcgcctgcrttttgactggcccatcacatgaggtcaggtgtggaattttctgctgtggtgtcatgttggtgctcaaaaagtttcagattttggagatttttggattagggatactcaacctgcattaaatcagtttatcctcaaacagctctaagagataagcacttctatcatcccattttactgataagtatgtggaagcacagagaggcagagtgacttacctaacagcacacagctcataaggggctgggctgggagttaactccaagcagtttggccccagctgtgctgcaatcattattgtttggctcagagagaagggccttcttctgaaggctactcacagcagatgagtaacctccaggctcttgagcccctggcttgccattctttctcccgaacctggcccagtgccatgctaggcggggggcacgtgttggaaacctggctgacacgtgtgagtccgggagcgattgggcaccttcggtcattctgctgtggttcgtcaggctgtggttcctcagtgtg

SEQ ID NO: 658162 - DNA, 572 bp, Homo sapiens
attttgtttttcctttgaggaagcagaataaactgtatcctgcgcctgcattttgactggcccatcacatgaggtcaggtgtggaattttctgctgtggtgtcatgttggtgctcaaaaagtttcagattttggagatttttggattagggatactcaacctgcattaaatcagtttatcctcaaacagctctaagagataagcacttctatcatcccattttactgataagtatgtggaagcacagagaggcagagtgacttacctaacagcacacagctcataaggggctgggctgggagttaactccaagcagtttggccccagctgtgctgcaatcattattgtttggctcagagagaagggccttcttctgaaggctactcacagcagatgagtaacctccaggctcttgagcccctggcttgccattctttctcccgaacctggcccagtgccatgctaggcggggggcaygtgttggaaacctggctgacacgtgtgagtccgggagcgattgggcaccttcggtcattctgctgtggttcgtcaggctgtggttcctcagtgtg

SEQ ID NO: 658163 - DNA, 611 bp, Homo sapiens
ggcagctactgcaatcctcatagaagatgccaacaagctagccctaggacagaagttaaaaattggggtgccacatgctgtagtctccttaatggaccaaagaggacatcgttgcctgtccaactttagaatgctaaagtgtcaaagttttctgtgtaaaatttccagataacactacagactgtaaatttcttgaacccagctaccctgctgcctgtggaggagcccactttgaagaatggtgggttgcctcactgctggcaggaccttccccactgttgcactgtattcagtggacaaaatgttctcgagctaggaagaactaagggatacccccttggagagcccagatgttgaatacttcactgatggtagcagtttcataacaaatggggtgcgatatgcagggyatacggtagtgacccaacactcggtggtcgaggctcaagccttaacttctgggacttctgctcagaaggctgaattaataatagcattatccagagcactgttattggccaaggggaaaaagtaaacatatatactgactcaaactgtgcttttgcaaccctgcacacccatggggcaatatacaatagagaggacttctg

SEQ ID NO: 658164 - DNA, 611 bp, Homo sapiens
ggcagctactgcaatcctcatagaagatgccaacaagctagccctaggacagaagttaaaaattggggtgccacatgctgtagtctccttaatggaccaaagaggacatcgttgcctgtccaactttagaatgctaaagtgtcaaagttttctgtgtaaaatttccagataacactacagactgtaaatttcttgaacccagctaccctgctgcctgtggaggagcccactttgaagaatggtgggttgcctcactgctggcaggaccttccccactgttgcactgtattcagtggacaaaatgttctcgagctaggaagaactaagggatacccccttggagagcccagatgttgaatacttcactgatggtagcagtttcataacaaatggggtgcgatatgcagggcatacrgtagtgacccaacactcggtggtcgaggctcaagccttaacttctgggacttctgctcagaaggctgaattaataatagcattatccagagcactgttattggccaaggggaaaaagtaaacatatatactgactcaaactgtgcttttgcaaccctgcacacccatggggcaatatacaatagagaggacttctg

SEQ ID NO: 658165 - DNA, 611 bp, Homo sapiens
ggcagctactgcaatcctcatagaagatgccaacaagctagccctaggacagaagttaaaaattggggtgccacatgctgtagtctccttaatggaccaaagaggacatcgttgcctgtccaactttagaatgctaaagtgtcaaagttttctgtgtaaaatttccagataacactacagactgtaaatttcttgaacccagctaccctgctgcctgtggaggagcccactttgaagaatggtgggttgcctcactgctggcaggaccttccccactgttgcactgtattcagtggacaaaatgttctcgagctaggaagaactaagggatacccccttggagagcccagatgttgaatacttcactgatggtagcagtttcataacaaatggggtgcgatatgcagggcatacggtagtgacccaacrctcggtggtcgaggctcaagccttaacttctgggacttctgctcagaaggctgaattaataatagcattatccagagcactgttattggccaaggggaaaaagtaaacatatatactgactcaaactgtgcttttgcaaccctgcacacccatggggcaatatacaatagagaggacttctg

SEQ ID NO: 658166 - DNA, 491 bp, Homo sapiens
agtaaatagttgctgtttgaggaatatataatcttatacataaaaaaccatagacagtacattgaaatttgtctaataaatacactcagtaaattaacaaaatataaaattaacataaaagtataagttattgttctatacacttaaaacaagctattggatacagtagaaataaaaaatattttactaatttttttttttttttttgagacagagtcttgctctgtggcccaggctggagtgtaataatgtgatctctgctcactgcaacctccacttcttgggttcaagtgattctgcttgttcagsctcctgagtagctgggattacaggtgcccactgccacacctgactaattttttatactttcagtcgagatggggtttcatcatgttggacagacaggtctcaaactcttgaactcaagtgatccatccgcctcagcctcccaaagtgctggaattacaggcctcagacatggtactggccaa

SEQ ID NO: 658167 - DNA, 492 bp, Homo sapiens
gggaaggagaggaagaaggagaatatgaattattagggttggcctgtcttgcaattccccacaacatttttcagcaaggaggagmtgggcagaagcactgcaaagcagcaggagtggggatataaggggctgacagtcttgtctctactctgaggaaggtctcaaaccatctcatcagctccaaggaagatacaactaccagccctgagggtgggaaaagattaggccctattccatcccctcagggctgaaagcaggtccagcacacagaggtggtacccaaggccaaacataatcaatgatggatgccttctcgctccagagtgggagtcctgagtgcaggaaccaagtgctgctcattaatctatcttcacaccttgcacagtgcctgacacaagaagcccatgagcatttgttgaacgaataggcgagtgagtgaatgaatgaactgtttcttctatttatgtctgtggctggaagaaattccccttt

SEQ ID NO: 658168 - DNA, 492 bp, Homo sapiens
gggaaggagaggaagaaggagaatatgaattattagggttggcctgtcttgcaattccccacaacatttttcagcaaggaggagatgggcagaagcactgcaaagcagcaggagtggggatataaggggctgacagtcttgtctctactctgaggaaggtctcaaaccatctcatcagctccaaggaagatacaactaccagccctgagggtgggaaaagattaggccctattccatcccctcagggctgaaagcaggtccagcacacagaggtgrtacccaaggccaaacataatcaatgatggatgccttctcgctccagagtgggagtcctgagtgcaggaaccaagtgctgctcattaatctatcttcacaccttgcacagtgcctgacacaagaagcccatgagcatttgttgaacgaataggcgagtgagtgaatgaatgaactgtttcttctatttatgtctgtggctggaagaaattccccttt

SEQ ID NO: 658169 - DNA, 479 bp, Homo sapiens
ggctcctttaaagttgttttattgtatttttctaagtaagcacttggatcctcaaaatgtttcatttacatgggtcttttctgtaaggcagcgcacaaaagaaaattaaatttatttgaaaattgtctctgcactaacagcctggagtatcctctttactgtccccaacacacacacacatacacacacacacacaggcacactcacrcaggcacacacaggcgcacacacacaggcacacacatgtaggcacacacaggcacatacacacaggcacacacactcgtgcacacagccctccccttaaaagtagttcaaacctataaagttcagtttgattccagggttatttctaaaattctcacatgttcttttgcaagcttagaacgctgccctaacaaacactaaggtagtacatattaggccttcaggtgtcttgttttacttattaaaagtattcacaattgatttttcaattc

SEQ ID NO: 658170 - DNA, 383 bp, Homo sapiens
acacatgcaatttaaaatgtaaattttaaaatttaaaaagtaaaaagcaagtgaaattaaatgatttagttttattttatccaawatagcaaaaatatatttcaaaatgtaatcattataaaacttactgagatattttacatttttttaatttactaaacaaacactcgagatgcggtgtgtatattatagcacctctcaatgtgttctagtcacatttcggttgtttaacagccacatgtgagtggctgccatactggactgtacaggtgtagacattaagaatcagactttttccaatttcaacacttgtcattttctattcctatgaactattatcataggattgtgaactattatacaatattctttatttaatgccg

SEQ ID NO: 658171 - DNA, 383 bp, Homo sapiens
acacatgcaatttaaaatgtaaattttaaaatttaaaaagtaaaaagcaagtgaaattaaatgatttagttttattttatccaaaatagcaaaaatatatttcaaaatgtaatcattataaaacttactgagatattttacatttttttaatttactaaacaaacactcgagatgcggtgtgtatattayagcacctctcaatgtgttctagtcacatttcggttgtttaacagccacatgtgagtggctgccatactggactgtacaggtgtagacattaagaatcagactttttccaatttcaacacttgtcattttctattcctatgaactattatcataggattgtgaactattatacaatattctttatttaatgccg

SEQ ID NO: 658172 - DNA, 500 bp, Homo sapiens
taaaaacagcatggtattggcataaaaacagacacatggactaacggaacagagtagaaagcctggaaataaacctacatatgtactgttaatttatctttgacaaaggtgccaagaatacacaatggaaagggaacagtcttttcaataagtcatgctgggaaagaaaaaatattggaccatatctgwtaccacatacaaaaatcaactcaaaatggtttaagaacttaaatataagacctaaaagtataaaactactaaaagaagtcatgagaaattgccttaattcattaggctgggtaagggatttggggatattactctaaaagcacagccaaaaaacaaaaacaaaaacaaaaaaacagataggcaaagggattgcatcaaactgaaaaatttctacacagcaaaggagacaatcaacagaggtaagagacaacctacaggatgggagaaaatattttcaaaatgtacatctgatacggggttaatatccaacg

SEQ ID NO: 658173 - DNA, 500 bp, Homo sapiens
taaaaacagcatggtattggcataaaaacagacacatggactaacggaacagagtagaaagcctggaaataaacctacatatgtactgttaatttatctttgacaaaggtgccaagaatacacaatggaaagggaacagtcttttcaataagtcatgctgggaaagaaaaaatattggaccatatctgttaccacatacaaaaatcaactcaaaatggtttaagaacttaaatataagacctaaaagtataaaactactaaaagaagtcatgagaaattgccttaattcattagkctgggtaagggatttggggatattactctaaaagcacagccaaaaaacaaaaacaaaaacaaaaaaacagataggcaaagggattgcatcaaactgaaaaatttctacacagcaaaggagacaatcaacagaggtaagagacaacctacaggatgggagaaaatattttcaaaatgtacatctgatacggggttaatatccaacg

SEQ ID NO: 658174 - DNA, 548 bp, Homo sapiens
ataaaaagtgggactaccatatgattcragaaacccatttatggatatatatccaaaataaatgaagtcagtttgtcaaagagatgtttgcactcccatgtttattgcagcattgttcacagtagccaagacatggaattgacttaagtgtccactgatggacacatggataaagaaaatgtggttttatatacattgaagattttaaacacaatggaggggtggagcaagctggtggaatagaagcccacaccattgtacacacccccagacctcactgtggcaacaccagattttaacaactatgcacacagaaaagcaccatcacaagaacaaaaatcaggcaagcaatcacagtacctcatttttgacttcatatcactacaagaagcattgaagaggaatggaaagacagccttgaatctccaacaccacctctcccttatgagcagctgccatgtggcatggagagagaatctgtgcactttggggagggagagaccagtgattgagtactttacattgaactcagtgctgctgtgtcacag

SEQ ID NO: 658175 - DNA, 592 bp, Homo sapiens
ataaaagaacccaggtggacagttctctcttgggatccctcacactgttgcagtcaaacattttctgggctgtggttgattggcctgctcatataagatggtttactcaggtggctggcagttgatgctggctgtcagctggaaactcagctggtgttgtcagccaaagcatctacatgtggctttgtcagctttgtattcttaaaataatcagacttcttatgtggcaactggcttcccaccctgagcaagcgccccaagagaccagagggtagctgagcctgcatggtcttctgtgacccagccttagtagtcacccagggtcaattccttcataccgtattgttgaaagcagttagtctacccaggcccaaagagaagaaacatagagtccaactccttgtaaaaagagaattaaggtttttgtttggtaaagaygatgactgctacagatttcttaatgatttgtggtcattaagaaatctatggctgggcgtggtggctcacgcctgtaattccagcacttttggaggccgaggtggatcttatcttatgtattattatattctaaacataatataatggggaccat

SEQ ID NO: 658176 - DNA, 615 bp, Homo sapiens
aattggcctttaatagtcatagatttaaaagactgtttcattactaactccttagctgagcaagactgtgaatggtttgcatttataattcctgcagtaaacaacacgcagcctgctaagcattttcactggaaagtgttgccacaaggcatgttaaacagtccaacaatttgtcagacttatgtaggacaagcaattgaacttactcataaaagatttgtcacagtgttaaattattcattatatggacaataytctttgtgctgcccccactcgggaaatattactccaatgttatgatcacttgcaaaacccgatttctcctgccagtttaattgtagctcctgacaaaattcagactactactccttacttctacttagggaccttagtaaatgacactaccattgtgccacagaaagtaaccatacgtaggcctcaattgaaaactttgagtgactttcaaaaattactaggggacattaattggacacgacctgccctaggcattcctatctatgccatgagtaatctattttctatccttacaggaaatcctagtctcactagccctcagcaattaacaacagagactgaggcagagatacagctgat

SEQ ID NO: 658177 - DNA, 510 bp, Homo sapiens
ttgtcaagcccagcatgtgtgaggcagtgtgggacgggcataggagacaaaacacgatgagtgcagtgttctggggtgagggaggccacagtgggtaggaggtaggggccaccccaccctaagtgggaagcaccgctggaggaaatgcatggggcaagggtgggtgtgagcttggatatgggcgtggctggggtcagtgtctgagctgtgtgagggagaaagcrgaagggaaatgtctaggagccagtgggagccactggagggggccacagtttcccagcacctgcctggtgccaggcaatgcaaggagtaggacagcctgtcctcatggagcctgcattccaggggctgaaagcacagatcactccagaaacaggcctctcacatcccatccatggtgatggactcagaacagtgtgggaggcaaggcaaggggtcttgatgggagctccctggggtgagtgaaacggtctagagcttagcctggggggtagtgacccggagggttca

SEQ ID NO: 658178 - DNA, 602 bp, Homo sapiens
agcttgacaggagaactggacacaacaggccaggtggggatgggacgcctggatactgccttgggcctgagtgggcagggaagaggcaaagatatgctatcgtggatcctaggctggctacaaggctctcagatgccaacccacctccctcctgtccttttacactccctgggccccctgccccctgcagcccagggcccctcactgcctccyccaccagctgctcactgaaccccttgcagctcttggagagggcaagctgagattctggagccagaaactcctgggtccttttctacactaactcactttgtgaccgtcttctctcttggccttcatttcctcaactgtgcaatgggagcagtgcacccctcttgggtgtgaagggcccagcagagggcccagtgcaaagctggcatcagtgcatgtttgtgcgatgggcagacgggttgggggggtcagtagccttgactacagggacagggactctgctcacctccaggctgtcttccttgcctttctttccttgaagggagtggttccctctgagtgcctatgctaatgagctccctgcagccccatctgcataaggagcttctgac

SEQ ID NO: 658179 - DNA, 633 bp, Homo sapiens
ggacttactgaattagactttctggggatgggccccaggaactgaaattccaacaagtgtccagtatgtgatccttagtcacaactgaatatgagaacccctgaatctagctgaagtcctatctttgtgaagccgtcatatgtgagtcctactccatagtgatttcacctttcttttaaggattgtcaaactttcttcctatttaaatttgtcagcagcactcattttgacatttcatctattatttaaatgttaaagtgtgatttagtttataagccactgaagaataggaattcatatcccgtttaacatgtagcataatatagtttaatataatgcacacaaagtctatatacacacacacacacacacacacacacacacacacacacacacacacacacatacatattatttccatcctttttggtagtggagttctgagattcaaggagaaccacaattgtytctaatcattttttcaaaggcatagttctgtgaacaatgatgatgtaaagctttgggaatcttgcctttgatttgagatattttctactcccagtgctaaactgaattaagcctttgaaaatcccattgacactttaaaaaatcttaaatatttgttatatgaag

SEQ ID NO: 658180 - DNA, 543 bp, Homo sapiens
ataaacaaatcatgtaaagatatacctaatatttgctaaggtgttatgtcttagctgaaaaaactgctgtaacaaatgtttgctgaataaatgccataaatatattcaatataaaaaaactatatcttcaaagtaaatgaatgaataaataaatatccatgtatctacatcatattcataggctgtttcattcgtgcctttattttttaaatacaagaaaattatacttcattatactcaagtataatctctttgctggagtgaatttattctgttcaagttttactttaactattgaattatttatcttaacatttagccagtaataaagtacaaattgggaactgggctgcagttttatacatcttgcacaaaacacmcccttcctacaaacacacacactcagagacagagagagatgcacttgttctttaacttagctctcttaagatatttttcaattccaaaatagtttctctttcacctgttctaaattcttttccttataacttatttatacctgctaagttctgtaccaagcag

SEQ ID NO: 658181 - DNA, 559 bp, Homo sapiens
caatggagtaacaaaggaagcctgaggagcccctggcacccgaggaccttctctctggccgttcacagccacttatgtttcaatgcagaagatttcaagactggtttgagaaaaataatcctgttttggggattaggttccctgtcaaaggccatcagatggacagctatttatcaggcaattagcctaaggctcttaggtaatgataaaaaaaaaaaacaaaaaaatcaaaaaaaaaaaaaaacagaaaacaaaacaaaaaaatcccttatattttcctattggaatcttttattctgttttattgaggcttaagcaaaacagctttgcccataactcactgtggcctggagttatgacaccaacttgtatttggccaactaagaaagaggccaaactgcattcttcttagaaggtctattcagttgataaatggcactaaactgttggtttttttcatataacctttactcataagttgcattgattatgctctaagagataagggactsatggtaattcaaatgggcacctctgaaaagatttatcagttttctgt

SEQ ID NO: 658182 - DNA, 527 bp, Homo sapiens
ttatgcctgtctttactgcaatctctgaacataaattgtgaagatttcatggacatttatcacttccctaattatactcttataatttcttatgcctgtctttactttaatctcttaatcccattatctttgtaaactgakaatgtacgtcacctcaggaccactgttgtacaaattgattgtaaaacgtgtgtttgaacaacatgaaatcagtgcaccttgaaaaagaacagaataacagcgattttcagggaacaagggaagataaccataaggtctgactgcctgcagggtcaggcagaatagagccacatttttcttcttgcagagctcttataaatggacgtgcaagtaagagagatattgctgaattcttttcccagcaaggaataccctggagaaggaatacattcttgggaggaggtctataaacagccaccctgggagtgtctgtcttatgcagttgagataagaactgaaatacaccctggtctcctgcagtaccctctggcttactaggattggga

SEQ ID NO: 658183 - DNA, 507 bp, Homo sapiens
ctcttaaatctgttctatttttttcgttacgtgtacctcaacatactagacctatatatgctaaggcttaaaagaaaattctccttttggctcaaggtgctcacccaccatctggaactatttcccaagcttcatccattatgcaaatgagatttaggatccatcatgtttcatctactggtactaatacattaatgttggatgttacggcgtgagcccccagcagacattggcttttcatcagtcattggcttgagctcacagctcattacttttaatggctttgtggcacttaaggtcactgggctcctaactgctgctgcctagggtgttatcaattaaagcagttttctctatttaagtgaagcattttttcccattttctttctttcttctttttaagtttaatttttttttttttttgtctctctggaaatcccactacttgagaatagattatgayggtttaattgaataaatagggctgttttcagaaatttaggaaaa

SEQ ID NO: 658184 - DNA, 632 bp, Homo sapiens
agaattgggtggggatacagccaaaccatataggtattattgctttgatgatttcctcctctctagtgtctattttctctcattctggaatctctattatttggacattgccttaattgttcctaaaatggccatacctttatttcttacaatccatgtgtttgcctatatcttctaccttctaggagttttccttgactgtggaaaggaaaactcttgcttttgtttaaaattgttttgctacagtatttttcatgtcctatagctcttactttaatatccattccttcttcatagcattctgctcttctttaatgggtccactatcttcttatgtctctgagtatattaagtgcagtttcttcgaagctgtttttgccttcaacattgcctctgctccttctcagctccctgtttatcattggttgctttttctcttttcatgttagaggcttttctcaaaagttttaagatgctaagctatctgttcatatttaaarcttgcttttaagctctgtgtgaatggcagattgttctgactggtagacttcactcttttaagcatgatccaagcttactctctgggatggttcagtttctctatctaaggattcctcaaattcttgatccag

SEQ ID NO: 658185 - DNA, 621 bp, Homo sapiens
agcttaatggtgatactgggtaaacttgaataatgtgaagaatgtgcagtattaaaatgaccaagtataacaaaagggatgttactgtatcagtggttttcttctggatattttgctgtttcttaaagttaataacaagatattgtacctaccaaaacactcatcttatgattctaggttgagattgacggaaaataaaggaattttgaaggaatggcctggtggattatattgagatcagaaataatgccgtyacttcttttgggatatctcaggccagggtttgccttctattctgctgttccacctttatttggcaaattagcatatcttggagagttttgttccaaacttgatattgctactggccagtagctgggaatttttttccttgatgtgtactatgtaatcatgtatcctagaaacaaatactatgtttatttcttttgtcttctcttttatttgttattgtgcttgtgttaacaaaaatacattttataagaagttttaaatgtatttaatttttttacaaattttatagtatttagtgaatagagaaaatgttccagtaggttaagtaaaagaaagttatatgcaattctttacgtactgtataattac

SEQ ID NO: 658186 - DNA, 632 bp, Homo sapiens
gaaaattataataaattatgaaatagaggccctttcatgtcaaaaagtcatgaaagaaagaaaacaaaaagaaggaaaacaaaaaaggcacttaaaagattatgtaggaaagagagaagattactaagcagatttgaaaaataacaacaaatagaactyttaaataaaaagacatagaaattaactcaacagacagattgaaaagtagattagaaagaattgaataaagaatgtggtaactgaaacactggggaaatttccaaaagatagcagagagaggcaaggagatagcaaatacaaaataagttgtattttaaaaatgtatgtgtaaaatatataaaagtacttaaaagtattaaaaagtacttaaaaagatatgtgtaaagtatataaaagtacttaaaaaccattaaaatgtatctgcatatatccaataccaggttaacaatagaacaatatttttacttggaatctctttttctttgctaaaacaattatctttattctaactttgttttgttttgtttttttgagaaagcatcttgccctgtcacccagactggggtgctgtggcatgatcatagctcactgcagctttgaactcctgggctcaggcagtcctcttgcctcag

SEQ ID NO: 658187 - DNA, 556 bp, Homo sapiens
ctccacctcccaggttcaagcgattctcctgcctcagcttcccgagtagctgggattacaggcatgtgtcaccatgcccggctaattttgtatttttagtagagacggggtttcgccgtgttgcccaggctgatctcaaactcctgacctcaggtaatytgcccgcctcggcctcccaaagtgctgggattacaggcgtgagccactgtgcccggcctaatttttgtatttttaacggagctggggtttcaccatgttggccacactggtctcggaactactgacctcaggtgatccacccacctttgcctcccaaagtgctgggattacagacgtgagccaccgcacccagccattttctaaataagcaattaaaaaagatttctgtaggatataagacacagtgttcctgcaaatacgggtaggctatttctgtcttattgatcactgttccactatttcctcagggcctggcatactgtaggcattcagtaaaagtgtgttgaatgagtttataaatttattatatagtagaggtttgtattttgtgattgtt

SEQ ID NO: 658188 - DNA, 549 bp, Homo sapiens
  misc_feature 235: n = A,T,C or G
ggaattcagacaaaatgttggcatggggaaagcaatggtattgaaaatcattgcctatgattgcagaaaatgtttagtcttgccatactgtctgtcccaaacataatcctggaaaaccccttcatgggtcacaggacattttgcctttgggacccttcgagamatggcagttagactttatccagctgtctccatctcagggtcacagatactttctggtgctaatttgtatatngctcactggggtgagcatttccatgccgatgagccacagcccaagtagtaggtagattgtgattggaaaaggtaattcctcatggggggtgccatctgaactccatagaaaccgaggaacacacttcgttggtcaggtaattggatccatttgtaacatttttgcctaagtcccaacatttccattgtgcctgtcacccctaatcctctgggccgatggaatgcactaatgatacaataaaaactcaattggcaaagctaacagaagtttttaacctttcttggacaaggatctcccactggttgtggaaaatg

SEQ ID NO: 658189 - DNA, 411 bp, Homo sapiens
tgataacttgaaataagaatgggaggaaaggtcaatctgaattcttaaaatgttgaaggctgggaataagaagtaatatatcacagaatctgatagaaaaatttttatttattttatgggagaaaatgggagactaacakacaataggaataggaaagaattaatagaaatagcaaaaagaagtgtatctgcaattattaatataatacaagaggacattgtgtagagatatttaaagaaagattgatgaaatttagatttatggtgaaatatcctaataaagacattatttataatcaactgttcatcattattatataattctgacagttttaggatataaatgtaaggcagaatgatctaatataaaatgtataaatgggacaacatataattttgcttaggaagttg

SEQ ID NO: 658190 - DNA, 411 bp, Homo sapiens
tgataacttgaaataagaatgggaggaaaggtcaatctgaattcttaaaatgttgaaggctgggaataagaagtaatatatcacagaatctgatagaaaaatttttatttattttatgggagaaaatgggagactaacatacaataggaataggaaagaattaatagaaatagcaaaaagaagtgtatctgcaattattaatataatacaagaggacattgtgtagagatatttaaagaaagattgatgaaatttagatttatggwgaaatatcctaataaagacattatttataatcaactgttcatcattattatataattctgacagttttaggatataaatgtaaggcagaatgatctaatataaaatgtataaatgggacaacatataattttgcttaggaagttg

SEQ ID NO: 658191 - DNA, 392 bp, Homo sapiens
taatagaaatagcaaaaagaagtgtatctgcaattattaatataatacaagaggacattgtgtagagatatttaaagaaagattgatgaaatttagatttatggtgaaatatcctaataaagacattatttataatcaactgttcatcattattatataattctgacagttttaggatataaatgtaaggcagaatgatctaatataaaatgtataaatgggacaacatataattttgcttaggaagttgaataaataaagtagtgatttacratttgcattaatataaaaaaatttaaaaaatggtttacattttgtttgaaatggatgataaacaggaaaagagtaatttagtacattgagtaatttagtacattggtcaccaaagaaat

SEQ ID NO: 658192 - DNA, 581 bp, Homo sapiens
atttataagactattaatggcaataaacatgatttratataatgttttcaaaaattaggggaattctattcccagcattgtggtagactaaatttgctgaatcactatcctgctatatgaaatctacaaataccagataaaatgtacatgtcatttttcaaaagtatattactgacttgaatagaaactaaggtgaaccacataggccaagcataaggagaatacataaatccagagaggtatgcagacccccaaaccagaagcttccataaggacagtcctggccctagtaccctgagcttcaatttttatgaccacctgggatatgggagagtgtgagacaaaacctagtgcctgcccagtatagcagtcttacaggagaaaactgctgaaagccagagatacgaaggactataatttcagtgaaaggataaactagataaaaacctgttcctcagcgggagacaaccaggaaattttcctgcctcaaactcggtgctatttagaggaaaaatgagaaggccatcttcacatgaatttgtggtttaaattttcactgtaagtataagttaaaaaaaacc

SEQ ID NO: 658193 - DNA, 551 bp, Homo sapiens
gtattttcagcatttgcatattaaaggaataatattgatgcttaacttcattagtgatcaggaattccaaatttaaaaaaaattttttcatctcttatagtatatttaaaaattcattgctgataaggattcagggacgccaacattgtacattggtagtgaaaatggaaattggaaactttctgtaatctgacagtaattatgtttttaaaaatccttttgaacttgcagttctacttttgggatttgaatttatggaaagtaaagtgccagtgagaaagaatattgttgccccttgaacaacatagggttaggggagctggcctcccacacagtgaaaaatccgcatacaacttttgattccccccaaactactaataacctattgttgaccagaaggcttactgataacatgcattacatttaagacatattttgcatgctatgtgtattatatactgtattcttacaataaactaagctacagaaaaraaattataatcaagaaaattgtaaggaagagaaaatatatgacccattcattaagtgga

SEQ ID NO: 658194 - DNA, 551 bp, Homo sapiens
aatccctaatcaatgttatttctgtaaaccactgggagttcctgacaagcaactttctaccagccaactccctgtctccctttttggtctttacaaacctgcttgtaacaaaggccaaacagaacccatatccaagattgcttggctctgagccttctgggcaactatcctcacactggctcaaacaaactctttaaatcatatcttgtgcttaagccccttccttctaggtcgatgtttttggccctgggagcaggattcagagcaacttatctctgaccatctgacygtcctctcaaaggcctccaggtggctacatagtaggtagaattttattggtgagatcagtttgcagtccgggaagagacagtctctggtgtgtgtctttgaagaggtgctttctcttcagagagagagagagagagagagagagggcaggttggtttttgtgcctcacagggtgtgtatcacacaatagagtcatacatattcagcaggtttggggaaacgccatttctgaggggtattgagctcatgtgcaacgggtaaac

SEQ ID NO: 658195 - DNA, 675 bp, Homo sapiens
aggtttgtagtaagtgatccacaaaacttcaaatcaagaattcgcatacacatatttatgagagaaagacaccttcaatccaggcctgaaatatttcattaatattaacttatagaaaataataataaaatgcacaaggagacaacagtccttgaataagagtagaaacaaagaagatatattcaagcacacctaatgcttctaatggtagaattatcaattaaraatatggagtaagtatgcttaatatgtcaaaagaaataaaagagaacagtaagtggatcaaggaataagatactctctaaacaaagtaccaggtagatttagaaaaagtgaatcatatagaagtacaagagctgaaattttaaaaataaataaataaaatacaataaaatgttaaacagcagattagacagataaagaattcaaagaacatcattttaaaaaaactattcataacacaattaaatagaaatcaaaattaaatagataactgggggaaactcacccacatttgaaaacaaaatcaaaatgctaataattcatgggtcaaaaaataaattacaatgaaaattagaaattgtaaagcactaaataataataaatcctctatatattaatgcttgtgatatgaagccaaagtagcaattagagggaaacatgagggcttaaatg

SEQ ID NO: 658196 - DNA, 579 bp, Homo sapiens
tgcttgttaatccaggataatttctccaagtcaaaattcttgactacattgtatctacaaagtctcttttgccattcaagtaacatattcacaggttccaaggattaagatgtggacatctttrggaggccattattcagccttccagatctcattacttctctcatcactcgtaggtagtacatatgctacatcctttagaatcacaaatacagtttcaattcaggaattaaaattgtagaaatttatttaaacttgatgcttctaccctcctgcctctaggtcctctttgagcaggaagtaagcagtcagttcctgaaggcaggtacaattggctggttttctttcctcatgtagctagccttcttctccaactagtgcttctggtttccccagggttagagcagagggaagaaggcagaggtgagaggattaggaattatgatgtggccccaagttggtactctggggacctgattcttccttacctggatgcttttggaaattctttgatgaccccaccctcggctatcactagggttccctcacctaaagtttgtctggcatgtattattattt

SEQ ID NO: 658197 - DNA, 558 bp, Homo sapiens
aatctgtccatattgaatcccttaaaatattaaaagattgacacaccaagaagcagggtttataatacaaatgcaacattttcattcattatgtattcattatgtaacgttaattatgtaaacaattatgtaagcaatgtggtgaattatgtaatcaattatgtgacatattaattaaacaatttagagaaactacacagttatatcaatagatgaccaaatgacatttgataatattcacaaataaaacaggattaaaatgaaatttcccaaacttgataaagaacactcamcaaaaccaacagcatattaattagtgaaaatgactactatcattttttaattaaacgtgaaataactagggcctgaaacaaagcagagattcactttctatcatcatctaacattttttaaaagtttcagctcgatgaaaaaagccctcaaaaatgagaatagttagtagtgtaaatgatggaaattaattttttttgtttgcaggatataaaattgtatagttcatgagactctgcttaaatactgttagaattaataagagaa

SEQ ID NO: 658198 - DNA, 571 bp, Homo sapiens
cagaaaatatcttaatatcttcagaccgtggctgagcatgggtaactgaaaccgtgcaaagcaaaaacatggagaagaggggactgctgcaaatacacayatatgtatgtatctatttcacacaagagtatgaaaacattacactttaacagtttaacaaagaaggaaacaacagacactggggtccacttgaagatggagggcgggagggcggagaggagcagcaaaaatatccatcgggtactgagcttcattcctgggtgatgaaatgatctgtacaacgaacccctgtgacatgggtttacctgtgtaacaaaccttcacacatacctcagaacctaaaataaaagttaaaaaaagaaatatgaaagtaaaaaaagttaaacaatgttcataaatgttttgattgtttagtgactacttttatattaaacttctatctagctagaattgacattgctattaggtataatttatagatataaatggatttttgggtagctatccatactgctattgcttattgaatattaaaatattccccatttactctagctttttgtaattatgt

SEQ ID NO: 658199 - DNA, 649 bp, Homo sapiens
atacaggaggtgtcagagtcagaagaaaagatgatgtaattagtaacagaagcagagattggagtggtgccctttgaagatggagcaagaattaaggaggccaaggaatacaagtggccactagaagctgaaaaaaatcaaaggaatggattctttcctcagagtctccagaagaaaccagccctgctgataccttgaccttagcccatcaaaactaatgtgactggagatcacaaaaggaaagtcacaggcaaaattccatgagcatgtctgttttgtttggccagaatagtgttttgagaaggaaaagaaaaatgagccaaactttaaaaactggtacatttcacacacamaaaaaatctacatttctagattctcttaaagcaagcaaacaaacaaacaaacaaataatttcctcccctcctcagagacatagaaatatataacctccattttggtgtggcagcacagccagcagctgactctgagttgcagctcttcccatagctgggatttgtgcctgctaattgcagtctcctccactccctattgtctctctatctgggtatagcagagaaatattcctgtgcatccacctctgtagataggttcagagggcggcatattttaagagaaagaaatgttgata

SEQ ID NO: 658200 - DNA, 566 bp, Homo sapiens
ttcatcattttttccctttctactggctaattcttaacattccaatactaataaatgtataaacaaatgctcctcctttcagccccttcagctaaagccatttccctgtttccattaagggaagaataactaactctacacatttttatcttctcatctttcatcatcttctcaactcacccctttaacatctgtttccacatatccgctgaaacagctcctgctaagattacccataagatctcggtaagacagtgagatcactttcttcttcccaaattcaatagtccaattttttttctcattttatttgacttctcaatagcacttgacgtagttatacccactatcatttcagaacatctgtctttaaagtttttttttttcatttatcttttttagttttgttttcctgtagattttctaaatgccacctttttggatttcttcctaccytggtgctgccccttctgagttttcgttactgtctgttccctctaaggggacaatgttcaggattggcccttcttccctatctacactttgtccgtaagtaatcacaccat

SEQ ID NO: 658201 - DNA, 566 bp, Homo sapiens
ttcatcattttttccctttctactggctaattcttaacattccaatactaataaatgtataaacaaatgctcctcctttcagccccttcagctaaagccatttccctgtttccattaagggaagaataactaactctacacatttttatcttctcatctttcatcatcttctcaactcacccctttaacatctgtttccacatatccgctgaaacagctcctgctaagattacccataagatctcggtaagacagtgagatcactttcttcttcccaaattcaatagtccaattttttttctcattttatttgacttctcaatagcacttgacgtagttatacccactatcatttcagaacatctgtctttaaagtttttttttttcatttatcttttttagttttgttttcctgtagattttctaaatgccacctttttggatttcttcctacctwggtgctgccccttctgagttttcgttactgtctgttccctctaaggggacaatgttcaggattggcccttcttccctatctacactttgtccgtaagtaatcacaccat

SEQ ID NO: 658202 - DNA, 640 bp, Homo sapiens
ttatgtgaaaatgtaactgggccctttaaatagcttacctttgccagctgccagtaaagagtgctggagagatgttacagaaggaataggttttgcttattggttctagtgtgcctttctacaggctcttgcagcaagtgtagctccttcactgcccagttcctgcaggtaccacgccttctcaagcatctggcttttgcaggggatggcagacagcagcarccagcaggttcccatggcactccctcaagaagtttcaaaaattttctccagtaagacatatccacctgaatagttttttcctagcacccaaaagaacaaatcttcagcaagttccatcaccctgatattactgcaacttttcagctattcagtgaacagaaccctcactggaaagttcagtatatctcagccctggaggcaaagttctttactgggtgtctttcttaaccgtggaggtggcagcttctcattatatctgctaatattatatgttttagaattctctgtatttttactaaataatacctttttatttcagtctcctgttctactgaataatcatctgtattaaacttggactcagactgacacatctatcttatattacttaagggtcatgcctacttagcatatgaaa

SEQ ID NO: 658203 - DNA, 465 bp, Homo sapiens
gaaaaatcagctctatcacaaaataaagaagccaaaagactgggggagttcagaaccatgttactgacaggcatttgaagtaggcaccacgctggtcccagtggctggccctctctacagcacatacaaagatcacttcgacatgctgagagctgggcagcttttgagatcactaaccatgaggtccctgaagctgctcagggaatgtcacttagagtcactttatacacctgtagtttagagatgatacagggggtgtcctggggtacccatcctgaggtcagggagctctccttctggaggcatcccrcctgcttgatgcctgagaggaaatcagaagagcaaatttaccgtccattgagctcttgcacctcactctatctcctttgtgttatccagtaagcctcaggtcctgtgttatccatattctttgatgtaaatgcataaccataataagagctggca

SEQ ID NO: 658204 - DNA, 618 bp, Homo sapiens
ctgtctcctataacagcaaaatattaggttaatttgattagtgctagagaaacttagatttgggagagagtaagcctggtgctcattttggattaattatttactttttttcctgaaaaatagtataaaagatctccttccccttaaaatagtgaaatagcaagtgatagcattttgagaaatcctaatttaggaaggacgatttaggatttaggaaggaagctgaacgcctttcctttaaacaaactcaggtttaaagtaccacatcctgttctttttaccaagtctactgaaccctgctcccacctcctgacaaaacaaacaaacaaacaaacaaacaaacccccaaataatcagacacacwtgaattcacattcttgttctgttactggcaaattgttgaactgaggcaaggtacttaatgctctcagtcttagtttctcacctgaaaaatgcagatgacaatataagtgtgcatcccaaagtcttatctgtttcccatccttctctagaggattctaatggaggttagagtaaacaaatagatagatgtataatttctataaggattacttctgcaattgctaatccttattataaaatgcttagtacagagcc

SEQ ID NO: 658205 - DNA, 614 bp, Homo sapiens
taggatttaggaaggaagctgaacgcctttcctttaaacaaactcaggtttaaagtaccacatcctgttctttttaccaagtctactgaaccctgctcccacctcctgacaaaacaaacaaacaaacaaacaaacaaacccccaaataatcagacacacttgaattcacattcttgttctgttactggcaaattgttgaactgaggcaaggtacttaatgctctcagtcttagtttctcacctgaaaaatgcagatgacaatataagtgtgcatcccaaagtcttatctgtttcccatccttctctagaggattctaatggaggttagagtaaacaaatagatagatgtataatttctataaggattacttctgcaattgctaatccttattataaaatgcttagtacagagccataataggtactccatgtgtggtagcagcaattaatagtatttcaaccaccgatgagaatataagaacagaagttgagcttcatagccatactctcacattgacttcacctttgttgttcagtttcctcataaaaatggarataaaaatacttaatatttcaatttactttaaagaaataaatacaaaatatctgtaact

SEQ ID NO: 658206 - DNA, 585 bp, Homo sapiens
tttctctaacaataaacttgtcatgctacaagtatggtactggaggtaaggttttggttgtacaattgattttgaactaaatcctggtaagaaggaagacaaatttttatttacccatacaaataagtttcttgctgtgaaaagtagagacagtaacagattttgaatcctggggtgccagtaagaattagatgtcatttaaaaatgttacattttagtttacaaaaacatacatcatgacattgttgtgagttagtttatctagaagattaaacattaatataaaataaacaataattctaaccaactaaccataataatattttcctaatttgttcacttattcctatataattattttttggtctgctcgatctcacgttatcaatctcaagaagctctctctgcctcaaaaaaaaaaatgagttctggaaatcctgacacagttcagtratgtaatctgaaagttgtctaagtgatgtctattcacaaacttcttagccaaatgtctattttttaaagtgtcaaaagtttgaagtatctagctcaatcttattccacacattctggctggtagtctatata

SEQ ID NO: 658207 - DNA, 520 bp, Homo sapiens
gcccagaatacgtagaactttgaaccaaagtgagctatatttgtttgtggataaaatctgtagaactcaggggaaatgttctctctaatgagggacagagaagaaatgactagcaggaaatgggtttctctcctgctcaaaagtcagacacattgaagacaagatcactacttttagttcactcccctccccttctccattcaaaaactgtcactgctctgatgatgtcacccttctcccaaatgtatttatatgcacaaatgggtgtttatgaagctttcagattctctttactggtagggaacgtagttccttatcaggacaacaaagattgacatttgacagacagcaggaaaaacaagaattaaagcagcaaggctttctaattccctctaaaattattggctttttcttacaagcaagrctgccagagtttgcaattgttcagaaattgcagcaccgagagagtcttctgactgcagcaccatctcagaagctttttttgcccaggccagcctat

SEQ ID NO: 658208 - DNA, 587 bp, Homo sapiens
actaggatgtacctaggtgtggtgattcttcatatttattttgcttggattttcagagcttcttttatctgtaggttgatctagtttctgtttcaccaagctcagcaaaaaattgtagtacatacatagaatggaatattagtctgcctttaaaaagaaggaaatcctgacatatgccacaacatggatgaatctgaaagatattatgctgtgttaaataatccagtcacagtaagaacaaatactgcataattacatttatataaggtatccaaaataggtcaaattcrtagaaacagagagtagaacaataattttcaagggctaggggagagggaaatgagaaattgctgttcagtgaatataaagcttcaactatgcacaataaataagttctagagatctactgtatggcatactgcttatagctaacaatgctgtattgttcatttaaaatttttgttagggaagtacgtcttatgttaagtgttgttaccacaaaaatcaaacaataaataaagccagaaagaggcatgaggaaatttttggaggtgctgaatatatttattaccttgattatgatgatg

SEQ ID NO: 658209 - DNA, 465 bp, Homo sapiens
gttgttagtttcaaaaacataaatattgcccaactattaagttgagaatattgatacgccacttcttgaaactctttacgaataatgatttgaatgactccgttttctttccggctcaactgttttctctttgactttccttcttactcttccactcttacaattttaagcaatcaacctatatcttaataactaccaarctgggtcttattcattgacttacatgggttacaggcccatccccgcaccagtcgtgtggccagagagttggaatatgatgactgcccaagtaaatgggaaaatggtaaacctggaaactattttccaagtaaacctggaaaatgggggatatgaggagggtgagtcttaacctaaccaaattactgagggcagggagaaagtggaaccccaaaataaaattagggtgcttttactgatggggaagttgacaaagaaaagcacata

SEQ ID NO: 658210 - DNA, 604 bp, Homo sapiens
tttggtgctgtcctcacaaagtgtgtgagttctggtgagcttggctgttcaaaagtgtggcaccttgctccctttctctctcttggtcctcctccagccatgtgacatgcctgctcccgcttcatctttcgccataattgtaagtttcctgaggcctccccagcagccaagcagacaccagcatcatggttcctgtacagcctgcagaactgtgagccaattaaacatcatgtcttyataaattaccctgtctcaggtatttctttatagaaatgtgagaattaactaatataaagactctttcttaaaaataaaagttttctggtgataaatagaacacagtggactatttagggagcatcacatgaaaaaataaaattgttttaaaatttacttgccaatattctatatcatgctcttaaagccattatggtttttgttgttgttgttgttgctatacatgttggttcatgtaaaatataaaatatatgtatatttttggaaggcgttttaggtcaattttttttctttctcagcaaatagaagtgatggaaatgtggctgacgacagacaagcaaattttataatgactggcagtagcagg

SEQ ID NO: 658211 - DNA, 534 bp, Homo sapiens
gaatattactgactatggttctgatgcagaacaaagaaatattagccataagaaaactacttctgtgttatcatttggattaaatatatgctaatgaacaagtagaattaagagctgcaggaacggttagaatatagcagtaatggtggcctctatttcaggagacccagggaattcctgcmaggtaaactccaagtagaaataacaaggaaggcattattttccataatttacgtgattcatatttattttcattaaaaacttgcacttaggaactgctgaatcatgaacaactttaatgttaaaaacacagctgtgtctcaatgaggaaaaataaaaaattgacagaaatctgaatttgtttcaagaggttcatacctttattagtgtttttcctctctaaactacgtgtcttcctccctcatgagattaataattgaggagaggaattcattcatctttgtatttctagcatctaaaatagtgattgatccataggttatgttcaatattgctcagtaaatgaataaagac

SEQ ID NO: 658212 - DNA, 558 bp, Homo sapiens
acctaagtgttgtttaattacataagaaaaatacaaatattgtaaataaattttaaartggtgaaaaatcatggattatcaccccctgtcttttgttgaagtaaatgagagaccatgcggtgtaatggaatggtaattgtactgtaaatctggagtcccggttttcttctccggagtgtgactttccttgttcctcaccgaggagcacaagttcatcatgtgtaaaatggggaggattcagaaaatgatctctaaggtccttaccactcctaagttgatatgtctgtgaaagataatggtgtccaatgttgcctcagaggaaaccagaaatttatttgttctatttccttctcaatctttcttcctttgcccatttccttttttcttcctctctgtttcatagatatttcaaagacctgcttttttggttgacaaactttggtcatccagtcacttcttaattgatagctatttcagagattgtagcaaagggactatttggcttcctatctatgcagaatccattctgcctgatgacactgcatcattgacttactg

SEQ ID NO: 658213 - DNA, 558 bp, Homo sapiens
acctaagtgttgtttaattacataagaaaaatacaaatattgtaaataaattttaaaatggtgaaaaatcatggattatcaccccctgtcttttgttgaagtaaatgagagaccatgcggtgtaatggaatggtaattgtactgtaaatctggagtcccggktttcttctccggagtgtgactttccttgttcctcaccgaggagcacaagttcatcatgtgtaaaatggggaggattcagaaaatgatctctaaggtccttaccactcctaagttgatatgtctgtgaaagataatggtgtccaatgttgcctcagaggaaaccagaaatttatttgttctatttccttctcaatctttcttcctttgcccatttccttttttcttcctctctgtttcatagatatttcaaagacctgcttttttggttgacaaactttggtcatccagtcacttcttaattgatagctatttcagagattgtagcaaagggactatttggcttcctatctatgcagaatccattctgcctgatgacactgcatcattgacttactg

SEQ ID NO: 658214 - DNA, 558 bp, Homo sapiens
acctaagtgttgtttaattacataagaaaaatacaaatattgtaaataaattttaaaatggtgaaaaatcatggattatcaccccctgtcttttgttgaagtaaatgagagaccatgcggtgtaatggaatggtaattgtactgtaaatctggagtcccggttttcttctccggagtgtgactttccttgttcctcaccgaggagcacaagttcatcatgtgtaaaatggggaggattcagaaaatgatctctaaggtccttaccactcctaagttgatatgtctgtgaaagataatkgtgtccaatgttgcctcagaggaaaccagaaatttatttgttctatttccttctcaatctttcttcctttgcccatttccttttttcttcctctctgtttcatagatatttcaaagacctgcttttttggttgacaaactttggtcatccagtcacttcttaattgatagctatttcagagattgtagcaaagggactatttggcttcctatctatgcagaatccattctgcctgatgacactgcatcattgacttactg

SEQ ID NO: 658215 - DNA, 620 bp, Homo sapiens
tgctggcttttctccattccctgtctcacatttactactctttaactgcacacacttaaattacattatagataagcttcttgtacccagtccttgtttcaatatttgctttaggagtaaccaaatttagagcaacagataattatttcacattattattccaaactactaaaaaagaaaaaatcatcttaatagaaataatgtaatttttttagtagaagtaatttgaaatatctggatattcatttatatcttttagttatttttacatgataatattatagattattaattttaatgacattatccatacattttgtgttttgtggaagacagtatcgaaggaagaatctgtgtaaaaatgccctaaacatttttttctagagtcacacatttatccaaggctattctgtatatcttgcatttccaggtctgttgttattatcttaktattcattatgctcaatccatatgttctaaattaattttattagctattttacatttaattctactaccaaaccttacattttcatatacaaaactacttaaggctagattgcatttctgtaaactggtttttagtgtgtgtctgacatatcactgttcccagcaaatag

SEQ ID NO: 658216 - DNA, 620 bp, Homo sapiens
tgctggcttttctccattccctgtctcacatttactactctttaactgcacacacttaaattacattatagataagcttcttgtacccagtccttgtttcaatatttgctttaggagtaaccaaatttagagcaacagataattatttcacattattattccaaactactaaaaaagaaaaaatcatcttaatagaaataatgtaatttttttagtagaagtaatttgaaatatctggatattcatttatatcttttagttatttttacatgataatattatagattattaattttaatgacattatccatacattttgtgttttgtggaagacagtatcgaaggaagaatctgtgtaaaaatgccctaaacatttttttctagagtcacacatttatccaaggctattctgtatatcttgcatttccaggtctgttgttattatcttagtattcattatgctcaatccatatgttctaaattaattttattagctattttacatttaattctactaccaaaccttacattttcatatacaaaactwcttaaggctagattgcatttctgtaaactggtttttagtgtgtgtctgacatatcactgttcccagcaaatag

SEQ ID NO: 658217 - DNA, 596 bp, Homo sapiens
cgtaacaaatgataatcctttaagaacaaatttgtttgagggatagagtatgatgagtagggcagagggtggtgccattttagataggtgacataaaacgtgagctcactgatagactctttaaagggataacagttgctcagggacattagtaaggcgaggaaagaagccatgcagaatatctgggaagagcattccatgcagaggagtagtatttgcaaaagcttcaggtagtagtttggggtaaggaatgggaaagaagccagtggcctataacaaagtaagttgtgtcctggcattaaactatattgacatcaaaatacgaatgaaagtgtaaattgtcaagaatagacagtgaaatcgcaactatgagagcatgtggtggttagaataatgccagattataaataacactaaaatctttctaactaaaagtgttatattggtacatgaatgggtcaactaagcaayggcaaaaagtaggcaatcaaaaatattcacaaaaagttatagaacttttatggaataaaacaaacttgtaaaacagttcagaaaagacaaaacttctaataaatgtcattgtgtcacctgaacag

SEQ ID NO: 658218 - DNA, 546 bp, Homo sapiens
aatgaacaaaatctcttagaaatatggaattatgtaaggagaccaaacctatgaatcattggtgtctctgaaatagataagaagaatgtgagcaacttgacaatcatatttcaggatatcatccatgagaacctccccaacctagacaggccaatattcaaattcagaaaacagagataaattttgcaagatactacacaggaagacacatgaaaataagattctcaaaggtagaaatggatgaaaaaaaatgttaaagacagccagagagaaagcacagttcacctacaaagggagccccatcaggctaacagtagatgtctcagcagaagccctataaaccagaaaatattaggagtcaatattcaacattattaaagaaaagaagttctaaccwtaatttaatatttggccaaactaaacttcataagcaaaggagaaataaaatccttttcagacaaacaaatactgagggaattttttattaccagaccttattttcaagagttgccaaaggaagcactaaatatgggaaggaaagaccat

SEQ ID NO: 658219 - DNA, 415 bp, Homo sapiens
aatggcagctgttgattatagcctataacttctattacgtttctattcagtgccaaaaagatgtgcaatttacaattttatgtttctataagtataaattccagatagatagaaaataaataatacataaatgcaatgtctaaatgcaaaccattaacaagtgaatcttaacttcattttacatattcgatgttttaaaatgttttcagtgaaatttataagtattattacattgtatatctaatacaatatgtgaagagaaaagaatagcagcccaattttatggaaatgttaatttatttatcatattagattacaaaccagctttatctttatatagcttaacatcctgcattgtttcttagcatttttcttccactrtctcatagcaataagttattatttgggaaataaa

SEQ ID NO: 658220 - DNA, 427 bp, Homo sapiens
agtatttgcctaagtaagtttgggatttgattggaatccatcatctctttcttctttccatttttttttttttcctttagaatgygaatgtcagtcctatgcctgtctcaccaatgtatttgggaaacacgtgacttatttaatttcacaggctcacagctgtaaagaaagtttgtctcaggattaagcttatctgatttagatgatattttaatgaaactttgcactttagactttagatatgatgctggatctagttaagacttttggacctgtttggatgaaatgaatatattttgcatgtaagcaggacatggatgtaatgtagggaagggtgtcagttgctgatgctgtgggctgattgtgcctcccccaacactcatatgtcgaagccctaaccctcaacgtgatagtgtttagcaatgac

SEQ ID NO: 658221 - DNA, 471 bp, Homo sapiens
aagtttgggatttgattggaatccatcatctctttcttctttccatttttttttttttcctttagaatgcgaatgtcagtcctatgcctgtctcaccaatgtatttgggaaacacgtgacttatttaatttcacaggctcacagctgtaaagaaagtttgtctcaggattaagcttatctgatttagatgatattttaatgaaactttgcactttagactttagatatgatgctggatctagttaagacttttggacctgtttggatgaaatgaatatattttgcatgtaagcaggacatggatgtaatgtagggaagggtgtcagttgctgatgctgtgggctgattgtgcctcccccaacactcatatgtygaagccctaaccctcaacgtgatagtgtttagcaatgacgcccttaggggataatttaatttagatgaagtcttgagggtggagctccatgattgaac

SEQ ID NO: 658222 - DNA, 471 bp, Homo sapiens
aagtttgggatttgattggaatccatcatctctttcttctttccatttttttttttttcctttagaatgcgaatgtcagtcctatgcctgtctcaccaatgtatttgggaaacacgtgacttatttaatttcacaggctcacagctgtaaagaaagtttgtctcaggattaagcttatctgatttagatgatattttaatgaaactttgcactttagactttagatatgatgctggatctagttaagacttttggacctgtttggatgaaatgaatatattttgcatgtaagcaggacatggatgtaatgtagggaagggtgtcagttgctgatgctgtgggctgattgtgcctcccccaacactcatatgtcgaagccctaaccctcaacgtgakagtgtttagcaatgacgcccttaggggataatttaatttagatgaagtcttgagggtggagctccatgattgaac

SEQ ID NO: 658223 - DNA, 634 bp, Homo sapiens
tataggttgaaaatttgctcttttggtgctgtaccataaatcccatggactttcttcattttttttcattaattttcttttttcttctctcactatatatctgtcacacctatcttcatgttcataggtaattccttctgcttgatcaattccgctgctgatatcctctctctcctcgcattatttatttcattcattgtatttttcagctgtggaatttctgggtttggggttttttttaaataattttaatctctgttaaacctatcagtttggtcatttattgcttttctgatttcaatgacttgtttctcwtattttcttgaagctcactgagcttccttaaagtaattattttgaattctttatcagacagtttgcatatctccattttggggtggggggtttaactacagggaggtcattgtgttcttttcctgatgttatgtctcctttttttcatatttcttattgctttacaataatatttgcaaatttaaagaagcagaaactatttcagtctttgcatattgactttgtctggaaaagtctttcactagtcagcctgtccagagattctagacaagctgtctggagtagtctgggtaggtttgctgctaaagttctcaaggag

SEQ ID NO: 658224 - DNA, 634 bp, Homo sapiens
tataggttgaaaatttgctcttttggtgctgtaccataaatcccatggactttcttcattttttttcattaattttcttttttcttctctcactatatatctgtcacacctatcttcatgttcataggtaattccttctgcttgatcaattccgctgctgatatcctctctctcctcgcattatttatttcattcattgtatttttcagctgtggaatttctgggtttggggttttttttaaataattttaatctctgttaaacctatcagtttggtcatttattgcttttctgatttcaatgacttgtttctcatattttcttgaagstcactgagcttccttaaagtaattattttgaattctttatcagacagtttgcatatctccattttggggtggggggtttaactacagggaggtcattgtgttcttttcctgatgttatgtctcctttttttcatatttcttattgctttacaataatatttgcaaatttaaagaagcagaaactatttcagtctttgcatattgactttgtctggaaaagtctttcactagtcagcctgtccagagattctagacaagctgtctggagtagtctgggtaggtttgctgctaaagttctcaaggag

SEQ ID NO: 658225 - DNA, 634 bp, Homo sapiens
tataggttgaaaatttgctcttttggtgctgtaccataaatcccatggactttcttcattttttttcattaattttcttttttcttctctcactatatatctgtcacacctatcttcatgttcataggtaattccttctgcttgatcaattccgctgctgatatcctctctctcctcgcattatttatttcattcattgtatttttcagctgtggaatttctgggtttggggttttttttaaataattttaatctctgttaaacctatcagtttggtcatttattgcttttctgatttcaatgacttgtttctcatattttcttgaagctcactgagcttccttaaagtaattattttgaattctttatcagacagtttgcatatctccattttggggtggggggtttaactacagggaggtcattgtgttcttttcctgrtgttatgtctcctttttttcatatttcttattgctttacaataatatttgcaaatttaaagaagcagaaactatttcagtctttgcatattgactttgtctggaaaagtctttcactagtcagcctgtccagagattctagacaagctgtctggagtagtctgggtaggtttgctgctaaagttctcaaggag

SEQ ID NO: 658226 - DNA, 534 bp, Homo sapiens
ccccttgttgatacaaattttacatcatttctagttttggctcttatgaataaagttctcatgagtatgcacattacgagtttttctatgcacatatgctttcatctccattggataaatttctaggaattacttagttataccgtaagtgtaaaataaattctttaagaaactgccaaacattttccagagtggctgtcatcacttaaatcacacaagcaatgaacaagaataatgatgtgcattctcttcatcacttggttttcttaatctttcaaaaagcatctctggtggttatctaytggtatttattgtgatattgatggacatttctttataatgttaagtatcttttcatgtgctagttggccatttgaatttattttttagaaagcagctggtcaaatttttgccagtttggggctgcttttgattagctggtgttgttcacatgttttgaatataaatattttgtcatctgcatttgtcatcttaagaagccataacaaaatacttcagactattggtttcaag

SEQ ID NO: 658227 - DNA, 572 bp, Homo sapiens
ggacctggcaaaactatttctaggagaacaaatgcaaactgtatttttagtgctaagaagcttttgtcctcatcaatagcttcatctgcttatagacacatcttgagaatcacaaatttaatctctttttaatgtacactgtaaccaatcaattcttatagatttcawtttcatcaaaatttctgtgattcagtataatgtcattatttatcatctatgctgttgaaataggctttatacaattctatgtttacttcatcttgagtgaattcatcacagttccaatcatttctcttaccatttcacaaaccttccatcactattagctgcgtggttattaatatcagactcctacttactgatatcagcaatctacaatgtctaagtctgacctaagttccaaacttatgtcttgctactccatataccttaaactggttccaacagaattgctccatgcagttaatatagttaattgattagttaatttacttttgaaatagttagaggtcctcgggaagtaacaaaaacaaagctgtagaggacagttccagttttctgacattcaattt

SEQ ID NO: 658228 - DNA, 572 bp, Homo sapiens
ggacctggcaaaactatttctaggagaacaaatgcaaactgtatttttagtgctaagaagcttttgtcctcatcaatagcttcatctgcttatagacacatcttgagaatcacaaatttaatctctttttaatgtacactgtaaccaatcaattcttatagatttcattttcatcaaaatttctgtgattcagtataatgtcattatttatcatctatgctgttgaaataggctttatacaattctatgtttacttcatcttgagtgaattcatcacagttccaatcatttctcttaccatttcacaaaccttccatcactattagctgcgtggttattaatatcagactcctacttaytgatatcagcaatctacaatgtctaagtctgacctaagttccaaacttatgtcttgctactccatataccttaaactggttccaacagaattgctccatgcagttaatatagttaattgattagttaatttacttttgaaatagttagaggtcctcgggaagtaacaaaaacaaagctgtagaggacagttccagttttctgacattcaattt

SEQ ID NO: 658229 - DNA, 558 bp, Homo sapiens
ttcccttctcaacctcctgttctcatcatttcacaatcagtaaactagggaaaggggccaggaagtccaggtacatccttttaagggtaagggcccagcagtacacatattacttctgctttcatcctattgaaaagctataagggcagatggatgtcaataatctttagctaaatatccaggttwaaactaagaagaatgaacttccgactatgaaagagatagagtcacaaggacatgaattacactgctgcccagaataacaacaaagacaaaatatatgagaaaacagtttgtgagacactgaatatgggcaagaaggacccaagagatgtgaatcagccatacaacttccctccttactatggttttaaatcagccatacaacttccctccttactatttttttttcttatttttaagtcctagggtacatgtgcaggatgtgcaggtttgttacataggtaaacatgtgccgtggtggtttgctgcacctatcaacacaacacctaggtattaagcccagcatggatcagctatttttcctgatactctccc

SEQ ID NO: 658230 - DNA, 558 bp, Homo sapiens
ttcccttctcaacctcctgttctcatcatttcacaatcagtaaactagggaaaggggccaggaagtccaggtacatccttttaagggtaagggcccagcagtacacatattacttctgctttcatcctattgaaaagctataagggcagatggatgtcaataatctttagctaaatatccaggttaaaactaagaagaatgaacttccgactatgaaagagatagagtcacaaggacatgaattacactgctgcccagartaacaacaaagacaaaatatatgagaaaacagtttgtgagacactgaatatgggcaagaaggacccaagagatgtgaatcagccatacaacttccctccttactatggttttaaatcagccatacaacttccctccttactatttttttttcttatttttaagtcctagggtacatgtgcaggatgtgcaggtttgttacataggtaaacatgtgccgtggtggtttgctgcacctatcaacacaacacctaggtattaagcccagcatggatcagctatttttcctgatactctccc

SEQ ID NO: 658231 - DNA, 513 bp, Homo sapiens
catttacataatgtctgaccagtagaaagctctcactgttaactattttaattatattattactattatcatcagaccagtattataatttttattatccaaggttacgtagctaattagaagctgagctcacatttgaactgaaatttttctgcttcagtagaaattaatayattactgtatagcacacaaaaagaatcagattttaaatatatcatttttcttattttttccctacttatgttcttctttgggctaagtaccttgattctaacctcattgataatttcaacaacttagagtttaatcgcttctttatgacatatgggtttttactctctagatttataatatagatattcaaccatatctgaggctatgatgattattttggggaatgtttcattaatattaatagatgacatttgcattatcatttctatgaccttcatcttgtttttaatctgtgtaatcttttctcacttcaaaatcaatttgaattgatctaacaag

SEQ ID NO: 658232 - DNA, 513 bp, Homo sapiens
catttacataatgtctgaccagtagaaagctctcactgttaactattttaattatattattactattatcatcagaccagtattataatttttattatccaaggttacgtagctaattagaagctgagctcacatttgaactgaaatttttctgcttcagtagaaattaatacattactgtatagcacacaaaaagaatcagattttaaatatatcatttttcttattttttccctacttatgttcttctttgggctaagtaccttgattctaacctcawtgataatttcaacaacttagagtttaatcgcttctttatgacatatgggtttttactctctagatttataatatagatattcaaccatatctgaggctatgatgattattttggggaatgtttcattaatattaatagatgacatttgcattatcatttctatgaccttcatcttgtttttaatctgtgtaatcttttctcacttcaaaatcaatttgaattgatctaacaag

SEQ ID NO: 658233 - DNA, 386 bp, Homo sapiens
atatttgaattatgttatgtagtctactctcatggcctctgtttaagcctctgtaggtgaatcaacttcgattattgagtcttctttttattctgtaaggatttgtttttggtccatcatttccatcatccattattaaattcattcttccagcattggctctgagctcccyacatttctttcccctataccaattactttggttatttttaaataatagtttataagtactaagaaatagtttattatataaataagtaaattatttatataaataaattattataaactaataatttataaagattaaactaaaattgcgtcatgttagcttttctcgcatattaaacacactctcattagagatatggaaaagggaatatatt

SEQ ID NO: 658234 - DNA, 612 bp, Homo sapiens
tattcatgtcttggaactgatttactcagctgcacctgggaacataggtaacgggaccatgaacgtcaaagggaagaacaaagggcatggacacattatcagcatttcaatgtattttggattatgtcaggcagtatgttttctataaaaaagaaagtgatctgataaggccctaaataagtcttcttactgaaacatgtgaatatcatttttagagtgttttctattaactggggaaagtaagattattcccaaaatattttgaacaaccttgtctaggaattcaagttacakcttttgttcaccaagtagctagtagggaatgtttaacttcagaggtaaaaacatattgaaatttccaagataaagatataatgggaaaaacttttcattgccttaatggtattatttgagtttgtaggtaggcaactgcattgctaacataactatcttataggtctgaagtggtatctgaaattttatcactgccaactaatatggtttggctgtgtccccacccaaatctcaacttgaattgtaataatccccatgtgtcaagggaagggacaggtggatataattgaataatgggggcagtgtcccccatactgt

SEQ ID NO: 658235 - DNA, 530 bp, Homo sapiens
ttgtaatcagacttttaggaacatatttttaaaactttatggaacaagaatatttgtagaaagtgattgctatttttcacagtgtcaggctgctctttgttgagaattgtgtgtatttttttcttctgaattgtagctgatataaattgtcaaagtacaggattaaaaaaaaaaagaacggagtaaagcatggaaagtgaaatatgatttttgtatattgcacacctattcgttggttttataatcacaaaagtgactatagtgattataagcacatmcttgctaaatgaaattttatccaagagagtttcaggagacacaataaaaccactatttcctaggatgttttaaggaaaatgctattgggcaccagcagctagaagaacagaagcagtgggagggtagcacagccatactagatactcagagagaagcctgttctgagaggagttggaatgtcagtgggaggcagggacattcagatctaagggatcactaagtaatctatcttttgctaactgaatttgtta

SEQ ID NO: 658236 - DNA, 563 bp, Homo sapiens
ttgattcatgataggtgcatatattgagtaagatcttttcccacagctcatctttgctctaaagtttaatattgtaatttaataaaaatggctttgcagctatgaaagctagcttggtaaagagatatatgtatttcaaggctggttcaggttcaaagttaaaacaagatttttttttctattgccatgtccatctttctctaccaagggaaatcacctcttcaaaggaaaagacagtaaatctctaaatctccatatttactcaggtcccgagactctgcagggcaaaagctgccaagtctatagatttacaatgttttatgataatgattttctccaagggctcacccaagatgaaaagataaattaatttatccacttccaaccactagtgaaagtttagtctccattccaaaagctgccttcagaacagtacctgcacaatataattcatcagtggtgattaaaatttaagagcctcyggatatggccatcttgcactgggcctatcaagtggaaagcactgtaaaaaagatgactttaaagctgaaaagggcattata

SEQ ID NO: 658237 - DNA, 579 bp, Homo sapiens
taatgcttgataaaagtaagtacaacttcaaattctwgactggtttaaattgtttaatacttattacagccttagactggagttgttatcagcattttatagatagtgccctatagaagtaatttgtctaagagcacatagctaaaaaagagcaagattcaaacccaaacaactttatttcagaacttaaattcttcacccatggtcttttactatagctatgtttttagtttgcaaataaaaagagtgaaaatttacataaagtaactaataatattttcaatcctagagaatatattgggaataaattttcttgtctcaaaatttacaaaatgtacttacgtatctaagttttaattatcactgatacagaagaacaagtacaactttaattagccataaagaaagaaatattgactattattttaacatagaaaaaatttaaatctatgagaattggttctttgtattctaataaattataattttccacttacataacatttgtgttatttctctgtagatattataaatccatatgtatttctctagaaaattttatttttttaacaaaatata

SEQ ID NO: 658238 - DNA, 588 bp, Homo sapiens
atttacaaagaaatgctatttttaatacacagaaattaggacattttggaagttcagctattaaaaacaattccttggtgaattttgtgttgcactaagctactttataaagcttccaaaaacatttcctaccttctgtttatatcgttgtccttcattttcctcaaagtgcatctctgatttgtggcttcactccagtttttcatttcccctgtattgctctcctgcttctcctcaaccaatgcttcaatgcataaaaatgtcgtttactttttaaattaaaagttccctaattttccctttttcaagaatcatagtgcatacatggatactgtacagtttattctcttcccattgctgttggttcaggtgtgttagtctttcctttccagtgtgaccatcgcttcaggtcgggagtgatgastatactggtctttatgcggtatgttttttaaaatgtatagcatgatggatttcaggatcatacacactaattttttattcttatcccttattgtatatatcaatgcatttcatatattttcacacaaaactttaagaaatgcatggatatagggaaaatgacat

SEQ ID NO: 658239 - DNA, 563 bp, Homo sapiens
atctttctggaaataagtgaacgggaacttttttttgtctttgttgctgttgttgtttgtttttgccctttgcaagccaggaagcaaatgtagtttatatttatattgataaatcattcagttacaaaattcaatgtagaaaacttgttgctgcatagcattctaaatttttgtttatgcaatcctttggctcccttttattttgtttttccttccagaagttttttggcattttgtctttgttcctagaattctaagattgtacagtaacatgtcttggtgcatattcacttttttgaggtgaaatatatatttagtaaaattatctacttttaattaatttatgagattagggaaatatgtaaattcatgtaactacccctgcaatcaacagttagaatatttcagtcatcttgttacayagtttagacttttctagaatttcagtctttagtgtctcttttctttaacttagcatactacttttgagattcatccatactgttgttttgtcagtactttatttcttgttgttgatgagtagtattacattttatgaagat

SEQ ID NO: 658240 - DNA, 544 bp, Homo sapiens
gtgtagacaagatgtagagaactagtattccagacacaactttttctcctacctaccatattgtcaaagttcttattgcagaaaagagaattcactcttttcagcatcaggcaaaakaattttttaatgagtgtagaattagttgtgaaggatgacaaaacagatgctaggcagagatttcagaaaaaaatctcgttatcatgctgcaaaactgtctcacaagagaactcgcctctgtcttacagagaagttctgaatctgagttctttgattttgtttcatgaatcccaaaagatttgggggtaaaattcaaagtatctaatagtgcagtagggaaaaacaattacatatttattttcaataacctctatggctataaaagtaggaagcagtagtagtaatgtccatgactaacaaaaattcaaatgcagatatatttttggcaggtttctcaagatataatatacctttattattacttcacaattttagtctgtgataggcctattgtatcatcatattttagttttctatagaaaccaca

SEQ ID NO: 658241 - DNA, 544 bp, Homo sapiens
attctaagtcacaagatgagataggaggttggcacaagatacaggtcataaagaccttgctgataaaaacaggttgccgtaaagaagccagccaaaaccaagaaggcaacgagactgacctctggtcgtcctcactgctacactcccaccagtgcaatgatagtttacaaatgccatggcaatgtcaagaagttgatgtttagccctatctggtctaaaaaagagaggcatraatagcccaccccttgtttagcatattatcaagaaataaccataaaaatgggcaaccagcaacccttggttcatctttgtctatggagtagctattcttttattcctttactttcctaataagcttgccttcactttactctatggacttgccctgaattctttcttgcccaagatccaagaattctctcttggggtctggatccagacacaacacactgagggctcagtcttacaaaactgcccctcttttccaccagttgcaaatcctcccctgaaacttctgactgctaacttcaagttcagattgcca

SEQ ID NO: 658242 - DNA, 544 bp, Homo sapiens
attctaagtcacaagatgagataggaggttggcacaagatacaggtcataaagaccttgctgataaaaacaggttgccgtaaagaagccagccaaaaccaagaaggcaacgagactgacctctggtcgtcctcactgctacactcccaccagtgcaatgatagtttacaaatgccatggcaatgtcaagaagttgatgtttagccctatctggtctaaaaaagagaggcataaatagcccaccccttgtttagcatattatcaagaaataaccataaaaatgggcaaccagcaacccttggttcatctttgtctrtggagtagctattcttttattcctttactttcctaataagcttgccttcactttactctatggacttgccctgaattctttcttgcccaagatccaagaattctctcttggggtctggatccagacacaacacactgagggctcagtcttacaaaactgcccctcttttccaccagttgcaaatcctcccctgaaacttctgactgctaacttcaagttcagattgcca

SEQ ID NO: 658243 - DNA, 577 bp, Homo sapiens
tacaggccttgtgtgagttcataatccagcagggctgtcattaaatcttaaagctccaaaataatctcctttgactctgtgtctcacatgcaggccacactgaagtgatgggttcccaaggccataagcagctccacccctgtggctctacaaggctcagctcacatgtctgctctcaagggctagtgttgattgcctgtggcttttcaaggtgcacagtgcaatccgttagtagatctatcattcttggttttgaaggatggtgagcctctgcttacagctccactaggcagtgccctcatggggactcagtgtgggagctccaatcccacatttaatatcggcattgtcctaatagaagttctttatgagggctctacctctgcagcagacttctgcctggacattcaggcatttccatacatcctctgaaatctaggtggaggcgccaaagcttcaactcttgccctctgtgcacctgcagrtttaacaccatgtggaagccaccaaggcttatggtttgcatcctctgaaacagtgccttgagatatctgggacccttttagccacagctaga

SEQ ID NO: 658244 - DNA, 570 bp, Homo sapiens
ttttaaaaagttgtatagtttcagtcattcacaacaacaatattttgtctctgtgaggattactataagtgactgaagtacatctgtggggctctctcttctacttctttcatctatatcatcaaagctggaaaaagaccttagcttctcttggaagaaaaatccagctatctctctattgttttttctgagatgttgtaacaatgccccaggttcaatgttctaacgcaagagaggcttgggtcctaggttaaattagatgaaagcttgcatgagataaaaccagttcactctgcttctgtttcctctaacattagtatctctttttgatcctgggcacctttgcagtaaagaaagggaaataagtgaaatatagagatcattaggaataacttgcttgatcttaagcaatttaaacttgataaattgaggaaagggcagttttacacagtatagttaattttaccatagctcatagcagtaagaaattgcaacaaatatagattacktgtttctcttttgaatcatcatttacagctttaccagtctttggatagttcagaagtgatt

SEQ ID NO: 658245 - DNA, 448 bp, Homo sapiens
agatctacaaatatctagtatttcaaagaggggcaagacaagtgttgaggaaagtcaaatttagaaatgacaacctttaatacggcttttaaaaatgctatattgatccagttttaagaccctgggtaggggatgctcggttctacttttcaaggagctgattgagtccacaccccgaaccaccactcttatcaagttttcaggctccaggcatctatacgtctgtcctaatcacgagtgcctggctgcarttattcaaatcttcccaccttaaacctgcttaccctatctcaccctttcattacagcagaaaccaccataaaggcacttgcccacagttcccctctttccgtcatccttgtgcctgacccaggttcgtcctctaagtagcccggccaaacctgcttttttctctccagggaaatgtgactataacatatctgtaaaa

SEQ ID NO: 658246 - DNA, 448 bp, Homo sapiens
agatctacaaatatctagtatttcaaagaggggcaagacaagtgttgaggaaagtcaaatttagaaatgacaacctttaatacggcttttaaaaatgctatattgatccagttttaagaccctgggtaggggatgctcggttctacttttcaaggagctgattgagtccacaccccgaaccaccactcttatcaagttttcaggctccaggcatctatacgtctgtcctaatcacgagtgcctggctgcaattattcaaatcwtcccaccttaaacctgcttaccctatctcaccctttcattacagcagaaaccaccataaaggcacttgcccacagttcccctctttccgtcatccttgtgcctgacccaggttcgtcctctaagtagcccggccaaacctgcttttttctctccagggaaatgtgactataacatatctgtaaaa

SEQ ID NO: 658247 - DNA, 448 bp, Homo sapiens
agatctacaaatatctagtatttcaaagaggggcaagacaagtgttgaggaaagtcaaatttagaaatgacaacctttaatacggcttttaaaaatgctatattgatccagttttaagaccctgggtaggggatgctcggttctacttttcaaggagctgattgagtccacaccccgaaccaccactcttatcaagttttcaggctccaggcatctatacgtctgtcctaatcacgagtgcctggctgcaattattcaaatctkcccaccttaaacctgcttaccctatctcaccctttcattacagcagaaaccaccataaaggcacttgcccacagttcccctctttccgtcatccttgtgcctgacccaggttcgtcctctaagtagcccggccaaacctgcttttttctctccagggaaatgtgactataacatatctgtaaaa

SEQ ID NO: 658248 - DNA, 374 bp, Homo sapiens
ctttaatacggcttttaaaaatgctatattgatccagttttaagaccctgggtaggggatgctcggttctacttttcaaggagctgattgagtccacaccccgaaccaccactcttatcaagttttcaggctccaggcatctatacgtctgtcctaatcacgagtgcctggctgcaattattcaaatcttcccaccttaaacctgcttaccctatctcaccctttcattacagcagaaaccaccataaaggcacttgcccacagttcccctctttccgtcatccttgtgcctgacccaggttcgtcctctaagtagcccggccaarcctgcttttttctctccagggaaatgtgactataacatatctgtaaaa

SEQ ID NO: 658249 - DNA, 555 bp, Homo sapiens
tgttgatgccctgtctgacatccccttggtccatttgcataacctgaagttgtgatagaccatttcagtatattcgtagcttcctatttaaatgcctgaatggctcagcttctctgctagaaatttgggagggtgctttctcagatactgtgtgagattgttgaagcctagaagagtgaagaagtaactgtccctggggcaaacctcaccacatactcatccatcctcttgtaggacaattcagaggtatgttacagatagtcacttaggctcccagtgtgtttcatccctgtttctcacaaggacgttccactcattaatacatgttgctggcttttctccattccctgtctcacatttactactctttaactgcacacacttaaattacattatagataagcttcttgtacccagtccttgtttcaatatttgcttkaggagtaaccaaatttagagcaacagataattatttcacattattattccaaactactaaaaaagaaaaaatcatcttaatagaaataatgtaatttttttagtagaagtaatttg

SEQ ID NO: 658250 - DNA, 508 bp, Homo sapiens
cattttaaatgggggaaaataatatagtcctcctgctataattgtcataagactcaaatgagatagtgcatacaagtcacttagcaaaaaacctgatcgttagttaggtggtaaatgcttaataagtgctattattataatctcaggcataagcatttgtgagacaaaataaaatcmtttataaagtatatattgtctataaaataaatgttagttctatttgtcttaatccattttctgttgcttataacagaatacctaaaacttgataatttataaagaaaaggaatatatgtcttaccatcattaagattgagaattagccaggtgtggtggcaggtacctgtaatcccagctacttgggaggttgaggcaggagaatagcttgaacccaggaggcagaggttgcagtgagctgagatcacgctactgcactccagcctgggtgacaagagtgagactctgtctcaaaaaaaaaaaaaaaagactgaaaagtctggccaggcac

SEQ ID NO: 658251 - DNA, 500 bp, Homo sapiens
tgtatttttgtatttttagtagagacagggtttcaccaggtttcaccatgttggccaggctggtcacaaactcccgacctcaggtgatccgcccctgcccccrgcctcccaaagtgctgggattacaggcatgagccaccatgcccagccataaattttattttgggccatccaagtatgccttccaaacttcatattcatatgaagtgttaagatacatcagatatcaggccaggcgcagtagttcacacctgtaatcccagtgcttagggaggcagaggcaagaggatcactccagcccagaagtttgagatcagcctgggaaacacagtgagaccctgtctctacaaaaatattttaaaattagccaggcacggaagcacacacctgtagttctagctgtttgggatgctgaggcgaggagatctcttgagcccaggagtttgaggctgcagtaagctatgatcatgtcactgtactccagcctgggtgtcagagca

SEQ ID NO: 658252 - DNA, 508 bp, Homo sapiens
ttaccccacaatatggtgctatcataaagggctccacaaagagataagcacattatccttagaagatacaacttttgaaatgtgtctgattgggttttgttgttgttgttgttgttgttgtttgtttgtttgttttgagatggagtctcactctgtctgccaagctggagtgcagtggcttgatctcagctcactgcaacctttgcttcccgggttcaagtgattctccygcctcagcctcccaagtagctaggactacaggtgtgtgccaccacacccggcaaatttttgtatttttagtagagatggggtttcaccatgttggccaggctgatcttgaacttctgacctcgagtgatctgcccacctcggttatgggggttttaagagtgatcataaacctcactcttatcgccttggaagaaactaagaaagaaatacaatgaagattaaaatagtgtatgcatgtgaacctggattcaaagataaggcttgggccaaggggcaa

SEQ ID NO: 658253 - DNA, 508 bp, Homo sapiens
ttaccccacaatatggtgctatcataaagggctccacaaagagataagcacattatccttagaagatacaacttttgaaatgtgtctgattgggttttgttgttgttgttgttgttgttgtttgtttgtttgttttgagatggagtctcactctgtctgccaagctggagtgcagtggcttgatctcagctcactgcaacctttgcttcccgggttcaagtgattctcctgcctcagcctcccaagtagctaggactacaggtgtgtgccaccacacccggcaaatttttrtatttttagtagagatggggtttcaccatgttggccaggctgatcttgaacttctgacctcgagtgatctgcccacctcggttatgggggttttaagagtgatcataaacctcactcttatcgccttggaagaaactaagaaagaaatacaatgaagattaaaatagtgtatgcatgtgaacctggattcaaagataaggcttgggccaaggggcaa

SEQ ID NO: 658254 - DNA, 543 bp, Homo sapiens
actacacatatatgaaggccaagaggaaactggctgtgcagggcagactgttacccagccagtggcaggcaggagtgtggactgccttgcacagatagagcccaagaacgggagggaaggggagaccacgtatgggagacgtgtgagtatgttggccccacctgatagagatgcacgaatgtgggaggggttgttagacttctccagctctccagtgaaagaratcatgcctttttccataaggggatgaagccaagaggaagagagaaaaatcagaagtgtttctgcaatactattcccaattagtgaatatagtaggagtggcctcccctctacccaaacagaagcagcagaaataagcatcccatgccaataggtcttgaaggataaaaagagattcagcagggagatgaaaggaatcattccatataaagggaaaggcaaggcaaaataggaagatttcactgtacaaagtgccttcagaaaaaggtgagaatagagtctcttgacatttatcaagaatttctaactaaaggcggttga

SEQ ID NO: 658255 - DNA, 507 bp, Homo sapiens
tcccatgccaataggtcttgaaggataaaaagagattcagcagggagatgaaaggaatcattccatataaagggaaaggcaaggcaaaataggaagatttcactgtacaaagtgccttcagaaaaaggtgagaatagagtctcttgacatttatcaagaatttctaactaaaggcggttgatacccctaaataaatatgtttctattcctccaagtctagatctaaaaacagcatagaagggcactactcaacgagtttgtgytttcttatttggggatcactaagccttttgaatctgtgggttaatgtctttcagttataatctccttaaatattgcttctatccattcccccttcctgctctctctgagactctagttatcccacgtctcttacgctgttattgtttacttttccattttttctctatatttgttttgaatattttctaacaacctgccttctagttacttagtaaactacatgcacaatctgtcattaaacaa

SEQ ID NO: 658256 - DNA, 518 bp, Homo sapiens
tagcggtttggggttttgttgttttaatagctgcaaatcatctgatgcttctcccatcaaatgtggggtctctccctcctccccttgagggtgggtgggcctgtgattgcttcaaccaacaccatccatgtgacttctgaagcttttagcttccatttagttttgttaggatgtttgttctcagagaagccagttgccatgtaagaaatcaggataccacctgctggaccaccgtggctaagaccaccctgctggagaggccaagtgtaggtgcccttgtcaatagtcccagctgagctcctcgccaacagccagcatcaactgccagccatgggakgagccaccttgtttctgcagtccagggggaccttcagatgaccgtagctcccgcagacacctgacggcaactaagggagaggcacccagtgagaaccacccagtcgagcccttcccaaattcctggccctggggtaattgtgttgtatcaatgctaaccagaacaaggaccaattcattga

SEQ ID NO: 658257 - DNA, 518 bp, Homo sapiens
tagcggtttggggttttgttgttttaatagctgcaaatcatctgatgcttctcccatcaaatgtggggtctctccctcctccccttgagggtgggtgggcctgtgattgcttcaaccaacaccatccatgtgacttctgaagcttttagcttccatttagttttgttaggatgtttgttctcagagaagccagttgccatgtaagaaatcaggataccacctgctggaccaccgtggctaagaccaccctgctggagaggccaagtgtaggtgcccttgtcaatagtcccagctgagctcctcgccaacagccagcatcaactgccagccatgggatgagccaccttgtttctgcagtccagggggaccttcagatgaccgtagctcccgcagacacctgacggcaactaagggagaggcacccagtgagaaccacccagtcgagcccttcccaaattcctggccctggggtaattgtgttrtatcaatgctaaccagaacaaggaccaattcattga

SEQ ID NO: 658258 - DNA, 520 bp, Homo sapiens
aaatttctcattatctgaaaattaagtaacacacttctaaataatccatgagtcagagaagaaatcagatggaaaattagaaagtattttaaaccgaacaaaaattaaaagacaacatatcaaaatttggaggatgctacaaaagcattacatagggggagatttacagctttaaatgcttaaatttgaaaatgaaaaaagtattataccaattacctcaatttttgccttaagaagctagaaaaagaggaggaaattaacccaaaataaacagaagaaatgaaataataacaaagyaaaaatcagtgaaaagatagaaaaacaatagagaaaatcaggaaaactaaaagctagttttatgcaaagatcaataaaatttatagacatctagccagattgatcaggaaaaaaaaaaaagtaaaaattgacaatatcaggaatgagaagaggaggtggagcaagatggccgaacagaagcctccagcaatcatccccaaaataggaacaccaaattgaacca

SEQ ID NO: 658259 - DNA, 641 bp, Homo sapiens
tgttccccttcttccttgtgcccatgctctctaatgaaaaattcatggccatttgagttatttcccactataagtaatgtgctgtttttcttgatgcctttaagatttttctcccttgtcttcagttctcagcagtttgattatgacgtattcggacataggtttctttggttaattttgtctgaggttaactgagctttttgaatctgaagtttatgtctgtggacaaatttaagaagttttcagacactatattttcaaattttttttctgcattcttatattctagaactctgacaccacaaatggtagaccttttgttgttgtcccacagggytgtgaggctctgttaatttttttctctgtatagtttatgttgaataacttctatttctctatctgcaagttcattgattcttacctttgtcatcttgagtctactgttaaatccacccagtgaattttttatttcagttattatattttttagttctaaaatgtccatttaaaaaaaatatattttttatttatttgctgagacattctatctttccattcgttacaagaatgttttcccttagttcctggagcatataatatgatccaggaagtaatagctactttaaagttcttgacagata

SEQ ID NO: 658260 - DNA, 596 bp, Homo sapiens
ttgttgcttgttacttgttggtaagtttaggttttccatttcttcatgattcagtcttggtaggtgtatgcatccatgaatctatccatttattttaggtgtgccaaagttttgatgtgtatttgttcataatagtctgtaatgattttttttttgtatttctgtggtctcagtggttatgtctcctttttatgtttgattttctttattgggggtcttctttcttttttcttggttagtatagctaaaggtttgtttattttgtttaccttttcaaaaaacctactytctgtttcattaatcatctggatttatttagtttcaattttatttatttctactccgatttttattatttctttccttctgctaattttgggtttcatttgttcttgcttttctagtttcttgaggttcattattagattgtttatttgaattctttctattttttgttgtagatatttgttgctataaaattccctcttagtactgcttttgctgtatcccatagatttgggtatgttgtgtttctattttcatttgtttaaagatattttaaaatttctttcttaatgtttttattgacctatttg

SEQ ID NO: 658261 - DNA, 577 bp, Homo sapiens
tctgaggtatgcctgtactcaattctgccaatgtagcatatgaactgtcaatatctaaatgaatgtacccatgctccaataaaacttataaacatagatgsctagctgaatttaattcactggccataattgccaatcccagatatgagctattatttgtgaatgagaaatcacagtacctacaacataaataacaaatagaagtatctctaaagaaaaacaatagaagtatatataagcatacctccatagtagtagataacatggaaagtacaagcaaatatatgtgcatctcatatactataatttaaatattcatgttatagaattggaaaatgccagtgtcaaacggagataattcaactctttcatgcagtcatagtcaatatttggatatgtttcaactttaaatacacattgtatatgttaaaaacatggtattcaaggatgtttgctagtacttcagattgctaaagttcaaatatcacttttggcatttcctgtttatgtaacaataaggaataactaaccccaagattttcagtctataaaatgactgtagtgagagtgtgtaggg

SEQ ID NO: 658262 - DNA, 577 bp, Homo sapiens
tctgaggtatgcctgtactcaattctgccaatgtagcatatgaactgtcaatatctaaatgaatgtacccatgctccaataaaacttataaacatagatggctagctgaatttaattcactggccataaytgccaatcccagatatgagctattatttgtgaatgagaaatcacagtacctacaacataaataacaaatagaagtatctctaaagaaaaacaatagaagtatatataagcatacctccatagtagtagataacatggaaagtacaagcaaatatatgtgcatctcatatactataatttaaatattcatgttatagaattggaaaatgccagtgtcaaacggagataattcaactctttcatgcagtcatagtcaatatttggatatgtttcaactttaaatacacattgtatatgttaaaaacatggtattcaaggatgtttgctagtacttcagattgctaaagttcaaatatcacttttggcatttcctgtttatgtaacaataaggaataactaaccccaagattttcagtctataaaatgactgtagtgagagtgtgtaggg

SEQ ID NO: 658263 - DNA, 630 bp, Homo sapiens
tctaactcaggaatatttgggttgaaagacgagtagggaatatgtaacttttaaaatataggacattcatttacagaaagaattactgtaactcaaacagctaaaataaattgtcctcaatctggtagaaatgaatcacttatgatgttctagtgatttaatccccagagaaggaaaataaaaaataatttcatataaattgagattaaaaaccgtgttcttatattcagggttagagatattccacagtatgtcaatgaatcctctagtcagtattttgttagaaagggagagggggtgaagtagaaaataaacaaraaatagaggcaggaaagtagagctgaatgactagcactaggggaatgtatttatttactctattacccaagagggagccacacttgagatatatttctggactgtaactttcatctactttctcatgagagaattcaatctttatcctatttgcaaggtggaaaaaaagtcactcgacacttagctggtgttttgcttccccctccaccttggaatcttcctggcttccaggtctcacgcagtatgaaaactatgagacaggtgtcccatcctgggattgatttagtccacaaaagggcaggctttccaaaa

SEQ ID NO: 658264 - DNA, 568 bp, Homo sapiens
gaattctttggggaggctttgcatttaggaagataaggggagttcaggaagagcctcttcctgcagctgttgattctcaaatgtcttcagctcaaaatactccacatggtcctgtggcatactgcagacctcttcaccctgcaagtctttggtctagaataccctgccggacgccagcagcccgcccacaggcctaagctcagggcccaagctcctgagctcctcttccaggcctgtactgacrctggcccaggtccgatcaggcacccagcccccgattccgtggctgcccacatgaacctcagtgggcgacccaacacgtgtgcaatgttatgagggaagcttagggaagggaggctggagccagccttgttgaatcccccactcctcacccagctcctggcatactgtaggagttcaataaatgtctgaggaacaaatggaggagactatgaatgttttgtgagggctttctgcccctcaggcaaagcatcacaagatgatataaggatacaaagccaaagcttttaaagaaatcctcattaactgaattagtcatattctgaag

SEQ ID NO: 658265 - DNA, 568 bp, Homo sapiens
gaattctttggggaggctttgcatttaggaagataaggggagttcaggaagagcctcttcctgcagctgttgattctcaaatgtcttcagctcaaaatactccacatggtcctgtggcatactgcagacctcttcaccctgcaagtctttggtctagaataccctgccggacgccagcagcccgcccacaggcctaagctcagggcccaagctcctgagctcctcttccaggcctgtactgacgctggcccaggtccgatcaggcacccagcccccgattccgtggctgcccacatgaacctcagtgggcgacccaacacgtgtgcaatgttmtgagggaagcttagggaagggaggctggagccagccttgttgaatcccccactcctcacccagctcctggcatactgtaggagttcaataaatgtctgaggaacaaatggaggagactatgaatgttttgtgagggctttctgcccctcaggcaaagcatcacaagatgatataaggatacaaagccaaagcttttaaagaaatcctcattaactgaattagtcatattctgaag

SEQ ID NO: 658266 - DNA, 453 bp, Homo sapiens
agcttaggaattcaaaaccagcctgggcaacatggcaagaccccatatctaccaaaaaaaaaagttagccaggcatggtggcatgcacctgtggccacagctactcaagaggctgagatggaaggatcacttgagcccaggaggtgaaggctgcactgagccacgtaaaccaacaataaaattctaaggcccccccsccaaccatctgaatggacccttcctcttagccaagggcattccaaagttaacctgaaaaactagttcaggccatgatgggaagggggagtcagacatgcctcattctaccctcctcccttcaaaacccctcatcataacccagacattcttttctatcgataataactctttcaaccaattgccaatcagaaaatctttgaatccacctatgacttggaagtcccacctttcagttgtcccacctttccagaccaa

SEQ ID NO: 658267 - DNA, 453 bp, Homo sapiens
agcttaggaattcaaaaccagcctgggcaacatggcaagaccccatatctaccaaaaaaaaaagttagccaggcatggtggcatgcacctgtggccacagctactcaagaggctgagatggaaggatcacttgagcccaggaggtgaaggctgcactgagccacgtaaaccaacaataaaattctaaggcccccccgmcaaccatctgaatggacccttcctcttagccaagggcattccaaagttaacctgaaaaactagttcaggccatgatgggaagggggagtcagacatgcctcattctaccctcctcccttcaaaacccctcatcataacccagacattcttttctatcgataataactctttcaaccaattgccaatcagaaaatctttgaatccacctatgacttggaagtcccacctttcagttgtcccacctttccagaccaa

SEQ ID NO: 658268 - DNA, 585 bp, Homo sapiens
cagcaagctgcagtgctaggctcaaacctgaatatattttgaaagaaagaaaggcctgccaaaaggacacagtgaaccaacaggaaacaatcaacatctgccattatctggactctccccctgcttgggagctgcgttcagcacggtcagggagcygagggagggaggaatggggctgagagaaaatggagttcctgggcctgggtgagaccccctcgcctatctgcctgcctcactcccaggctctgcagtgggccaggagccagagccaggactcgcctacaagggacatctgtgaagctctttgagccgaaggccaaagctgctgtctctatgatcagggattccgacagcagagtccccagtgtcctggctaccatgttagtagagtcatgtttcagtttactgggtacagaggagacccactgcatggggccaagcagagggtgtgtgtgtgtgtgtgtgtgtgtgtgtgtgtgtgcgtgcgtgtgtgtgtttgtacacacctgcagttctggggagtcagggtatttgcataacacacatatctttgcagataccagacaaacaggaagtttcagaacc

SEQ ID NO: 658269 - DNA, 585 bp, Homo sapiens
cagcaagctgcagtgctaggctcaaacctgaatatattttgaaagaaagaaaggcctgccaaaaggacacagtgaaccaacaggaaacaatcaacatctgccattatctggactctccccctgcttgggagctgcgttcagcacggtcagggagccgagggagggaggaatggggctgagagaaaatggagttcctgggcctgggtgagaccccctcgcctatctgcctgcctcactcccaggctctgcagtgggccaggagccagagccaggactcgcctacaagggacatctgtgaagctctttgagccgaaggccaaagctgctgtctctatgatcagggattccgacagcagagtccccagtgtcctggctaccatgttagtagagtcatgtttcagtttactgggtacagaggagacccactgcatggggccaagcagagggtgtgtgtgtgtgtgtgtgtgtgtgtgtgtgtgtgygtgcgtgtgtgtgtttgtacacacctgcagttctggggagtcagggtatttgcataacacacatatctttgcagataccagacaaacaggaagtttcagaacc

SEQ ID NO: 658270 - DNA, 377 bp, Homo sapiens
tggctgggcccttggcacctgaataaaggrtccaaaaaccagacagcctgagcagccatagattcgtatctgagtggggccagtaaagacatgggaactcacttcatagaccccgagtttcagcctgccagtcccaggcccagctgctctcacaagttatttaggttcctctttctggccacacaagctacagctggaaaaatccacctgaacagcctaattttctaactcaaaaattcaggcttaaccagcagcatttgtgggcaaggatcataaagaacaaactgggataaccctatacaagtcaagaatgactcgagtttatggaatgaaatggagttgccctaggtcctcggaacttcagaggagagcctgga

SEQ ID NO: 658271 - DNA, 575 bp, Homo sapiens
agatacaggaatgtgacccttggaatgggggcctgtgcatcaccaacgtttgtgaatcagcaagaaacacaaaacacacatgccctccaaggctgaatgatagctcatgctgcatctgtttwtttctgacaaggctaacctagttttaattatttatactaaaacttataagccactaaaaatgtcctgcagaatgaggatacaagggaaagaagtcttggtaatctgagaccctgctgcagcaggagctctgctcttaagcctcactggcaacaagctcgggctgtttctggggagtcctttgctgtgtggtcaaggcagaaagggtgggagaggtttctgtgagtttctgttggaggagtatgggtggaaacagagctagggagtctaatctacactcaaaaagcataaacctctcagagactgctaaggccagggcaatataggactgaaaaaccccctccatgaagcccaccaggccactctgctgtcacaacccccgcaggtgtctgggtgctggtggctggacattctggaactcacagtaaaagcactggtcgtattggcagcaccaa

SEQ ID NO: 658272 - DNA, 520 bp, Homo sapiens
atacactgtagtttttttgtgtgtgtgaagctcttaaggcataccaaattttcaatgtgatgttcatttctatttcagtctgttttagaccaggggtcctcaacccctgggtcactgactggtacaggtctgtggcctattaggaactgggctgcacagcaggaggtgagtggcaggtgagcaagcattaccacctgagcaccacatcctgtcagatcagcagtggcattagattttcgtaggaatgcaaaccctattgtgaactgtgcatgcrcgggatctaggctgctcactccttatgagaatctaatgcctgatgatctgaggtggaacagtttcatgtcgaaaccatcccccctccacccacccctgccctgctgctgtttgtggaaaaattgtcttccactaaaccagtccctggtgccaagaagtttggggaccgctgttttagaccattatctggcagattgcagtttaaataaattcctacatttattcaacagtgatttactgagtacct

SEQ ID NO: 658273 - DNA, 557 bp, Homo sapiens
ctacaggcacccaccactatacccacctaatttttgtatttttagtagagacgggtttcgccatgttggccaggctggtctagaatccctgacctcaggtggtccatccaactggcctccaaaagtgttgggattacaggtgtgagccacygctgcacagatagattttagctggagcactccttgagacagtgagctgttaaattgttgtagttcccttaagctgtttttgagtgattctctaagaaaccaggagaattgacggaaaatatgaaaatctttcttcatcttccatcacacacacatattctctacctttgactctgaacttttaaaaaaaagccttcatgcagccaactctgtatttttttaaaataaatttttaaataaaagaagactaatttttgttgctcagattgtgtgagggttctctgggtgttctgaagtaggtcagtaaacacctgtcacagtgttatgtggtgttgttaaaatatgtccacaaattctttgacatgccttccttcaaaaagtagaacgtaattccttccttcttgagt

SEQ ID NO: 658274 - DNA, 465 bp, Homo sapiens
acgtggcttcatgggaggcacactgaattgcagtttcaraaatgaattctgtcccttgctctgacactgatcctctctctgggtgaccctgggccagcaaccgcatccttctgaaccacgacatctccctgttgagatgaggtggaactaacataatctctaagttttctccaagctttaatagactgtcatacaaaccttagctcattgcctggcaaagtctccaaaaaattgtagttgatgtcataataatctttatcatcatcatcatcatcatcattgttccctgaatctgggtagaggagctaagaagtcaaaggtgggtccaaggtcagcaggagagtcaggaccacaatcactgcctcttttgggaggcctgccttggctctccccagaagaaaattcctaccttcctcccacttctcccaaccagactctgaatggccaagggcagagactgtctca

SEQ ID NO: 658275 - DNA, 632 bp, Homo sapiens
tgaggacctcactctgcggtagtccctgccaccggcacagccrccccagcactggagaagccatcagctggtgcgtggctttatcaggtaggtgactgttgatatccttcagtaactgctaatcctaaggggtgtgacatggctttgccaattaccagcctatgcctttgtccactcctcatatccctgcaaaaatggtccccaggcaaccacattttctcctgcaatgtctatatccaccatcacttctttccacttctagacattcatatgagattttactgctgtttatactcctaaaataactggcataaacaatttgcccacaggcaaacacaactgagtttgaaaatttcacacaaatcataatgagaataactattggacagaggtgattaaattgtggtcaggccccaccgagcccctttgggccctatggagggaagcatgtgcaggctttgattgaagagctgacagcagagaaacatgctacagggagtggcagtgcccagaagagttccccaataaaatggaaattgtttctaggggatcatgccacctggggaatgcaagaaggagatattcatgagcagggagcctctttacccccaggactgacacagactgtaagg

SEQ ID NO: 658276 - DNA, 408 bp, Homo sapiens
tggaaaagtaaacaggttttaatgaaataaaagctgaaaacttcccacattttgggagagatatggacattcagatcaagcaagctaaaaattcctaaaatggattaaatgccaaaaaaaaaaaaaaaagcctccttgagacacattatagtcaaactgtcaaaagacaatgacaaagcaaattytaaaaacagcaattgaaaagcatcacgtcacatgtaaggaaacctccataagaataacagcagatttctcagcagaaacctcacaggccaggagagaatgggatgatatattctaagggctggaaaaaaaaaaaaaaaaaaaaaagaccaccaagcaaaactatcctctggaaatgaaggagaaataaagcctgtcgcagacaagtaaaaattgagagaattc

SEQ ID NO: 658277 - DNA, 408 bp, Homo sapiens
tggaaaagtaaacaggttttaatgaaataaaagctgaaaacttcccacattttgggagagatatggacattcagatcaagcaagctaaaaattcctaaaatggattaaatgccaaaaaaaaaaaaaaaagcctccttgagacacattatagtcaaactgtcaaaagacaatgacaaagcaaattctaaaaacagcaattgaaaagcatcacgtcacatgtaaggaaacctccataagaataacagcagatttytcagcagaaacctcacaggccaggagagaatgggatgatatattctaagggctggaaaaaaaaaaaaaaaaaaaaaagaccaccaagcaaaactatcctctggaaatgaaggagaaataaagcctgtcgcagacaagtaaaaattgagagaattc

SEQ ID NO: 658278 - DNA, 407 bp, Homo sapiens
tggaaaagtaaacaggttttaatgaaataaaagctgaaaacttcccacattttgggagagatatggacattcagatcaagcaagctaaaaattcctaaaatggattaaatgccaaaaaaaaaaaaaaaagcctccttgagacacattatagtcaaactgtcaaaagacaatgacaaagcaaattctaaaaacagcaattgaaaagcatcacgtcacatgtaaggaaacctccataagaataacagcagatttctcagcagaaacctcacaggccaggagagaatgggatgatatattytaagggctggaaaaaaaaaaaaaaaaaaaaaagaccaccaagcaaaactatcctctggaaatgaaggagaaataaagcctgtcgcagacaagtaaaaattgagagaatt

SEQ ID NO: 658279 - DNA, 194 bp, Homo sapiens
gttgaggatttctacatctaaattcctgagagattagtctttagtcctcttttagtgcattatctttgtcaggttttatcrggttaatattggcctcataaaatgagttcagaaatgttccccacctcttgtattttggggaagatattaagtaaaactggcattaattcttcattaaatatttggtagaattc

SEQ ID NO: 658280 - DNA, 194 bp, Homo sapiens
gttgaggatttctacatctaaattcctgagagattagtctttagtcctcttttagtgcattatctttgtcaggttttatcaggttamtattggcctcataaaatgagttcagaaatgttccccacctcttgtattttggggaagatattaagtaaaactggcattaattcttcattaaatatttggtagaattc

SEQ ID NO: 658281 - DNA, 499 bp, Homo sapiens
ttttaataggaaaaaagtataagatgggcataaaaatgtgttccttattgagaaaagaatgattttgagtcagacatagtggctcatacgagggaggctgaggtagaaggatcacttgaggccaggagtttgaggctgcagtgagctatgattgtgccactgcactccagtctggctgacagagtgagaccctgtctcaaaaaaaaaaaaattaaagttttttttaatttaaaaattttttaaagaataattttgtctaacgtagaggttatttaaaggctatttcaaaatatggatatggaaagaaatagaataccgaaagggagagagagagatgtgaaaaaagttatggatatgaagatatattttttaagaaaggttacaaagaaaagaataactttgtatgagaaagaatctcgtatgayacatttttgttctaaactaaaatgactgcttatttaagttaaggaagtgtaggataaagcagaaagtcccagca

SEQ ID NO: 658282 - DNA, 483 bp, Homo sapiens
agcagcaagttcttcacccaaaactctgaataaagaacagtctgaagaaaatagatgggtacagcgtggtgatggaaaagccaagtcactcacatcagaatctgcaggctgaggagtaacaagcagaccccaagaatgttcgtgaagaacaggatcatttatgcatccttgagtttgcagtgaaaagcataacccacacttttatagcctggtagcttttggacccacccccactgccctaggagatgggggctgccatactgtggctatctgagcgttcaaacctcatgctgaaatgtgatccccagtgttgggggtggagcccaatgggaggtgtttgggtcacaaggacartgtccatctgtctgtctctctgtccgtctgtctgtctctctttctctgtcttctgccatgactgaaagcagcctgtggccctcaccacaagcagctgttggcaccatgcttcttgtagagcctgcagag

SEQ ID NO: 658283 - DNA, 500 bp, Homo sapiens
acctgtcatttcaaatttttgagctacataggacatgaaaagcatggaaaaagccaggccaaagtaatctcatttcctttttaaacaaactagtagtacaaacaagtagtacattctgatttcagaaagcattcaataccgtttctcatgaggcttcaggtaataagccacaattatcatgagtcactctcacaaaaagactcttgcaggcaaataaggcaaatggagaaatacagtctggatgacagcataagtggatcagtggctggttaaacatccatattcayactgtgatgattattggagcaatgtcaatttggattacaagtctccagaggtaacatttacagggctttgtcttgtaacctcttctgtatttatgtaaacatcttgcatataaataaacaaaggactgcttatatattcgaaggtggaactgagtccaactgaataactcatctctgataccaaatatgcatttaaaagatccccagaagaaa

SEQ ID NO: 658284 - DNA, 500 bp, Homo sapiens
acctgtcatttcaaatttttgagctacataggacatgaaaagcatggaaaaagccaggccaaagtaatctcatttcctttttaaacaaactagtagtacaaacaagtagtacattctgatttcagaaagcattcaataccgtttctcatgaggcttcaggtaataagccacaattatcatgagtcactctcacaaaaagactcttgcaggcaaataaggcaaatggagaaatacagtctggatgacagcataagtggatcagtggctggttaaacatccatattcacactgtgatgattattggagcaatgtcaatttkgattacaagtctccagaggtaacatttacagggctttgtcttgtaacctcttctgtatttatgtaaacatcttgcatataaataaacaaaggactgcttatatattcgaaggtggaactgagtccaactgaataactcatctctgataccaaatatgcatttaaaagatccccagaagaaa

SEQ ID NO: 658285 - DNA, 500 bp, Homo sapiens
acctgtcatttcaaatttttgagctacataggacatgaaaagcatggaaaaagccaggccaaagtaatctcatttcctttttaaacaaactagtagtacaaacaagtagtacattctgatttcagaaagcattcaataccgtttctcatgaggcttcaggtaataagccacaattatcatgagtcactctcacaaaaagactcttgcaggcaaataaggcaaatggagaaatacagtctggatgacagcataagtggatcagtggctggttaaacatccatattcacactgtgatgattattggagcaatgtcaatttggattacaagtctccagwggtaacatttacagggctttgtcttgtaacctcttctgtatttatgtaaacatcttgcatataaataaacaaaggactgcttatatattcgaaggtggaactgagtccaactgaataactcatctctgataccaaatatgcatttaaaagatccccagaagaaa

SEQ ID NO: 658286 - DNA, 471 bp, Homo sapiens
ttacctaccaaaaatatccttcaggaatggagaggaaaccaagacagtggcagatgaaggaaaactaagaggactggttgctatcacactggctctaagagaattgctaaaggaagttcttcaaacagatggggaagattccaaaggaaacytggaccatctggaagaaagaaagaacaacagaaggagtaagaatatgagtaaatacaataaactcttcttctcttgagttttctaagttacctttgatagttgaagcaaaaattgtaatatgatgccatgtgattttcactgtgggtgcaggaaacacctaagacattctaagcaagggagggaaaagagatttaagaggggtaaagtttccacatttcactcaaactgctaacatgttgacaccagtagactgtgatatattatatatgcataatgtaatatgtaaatcaaccactaaaaagtctatacgaagagatg

SEQ ID NO: 658287 - DNA, 471 bp, Homo sapiens
ttacctaccaaaaatatccttcaggaatggagaggaaaccaagacagtggcagatgaaggaaaactaagaggactggttgctatcacactggctctaagagaattgctaaaggaagttcttcaaacagatggggaagattccaaaggaaacttggaccatctggaagaaagaamgaacaacagaaggagtaagaatatgagtaaatacaataaactcttcttctcttgagttttctaagttacctttgatagttgaagcaaaaattgtaatatgatgccatgtgattttcactgtgggtgcaggaaacacctaagacattctaagcaagggagggaaaagagatttaagaggggtaaagtttccacatttcactcaaactgctaacatgttgacaccagtagactgtgatatattatatatgcataatgtaatatgtaaatcaaccactaaaaagtctatacgaagagatg

SEQ ID NO: 658288 - DNA, 471 bp, Homo sapiens
ttacctaccaaaaatatccttcaggaatggagaggaaaccaagacagtggcagatgaaggaaaactaagaggactggttgctatcacactggctctaagagaattgctaaaggaagttcttcaaacagatggggaagattccaaaggaaacttggaccatctggaagaaagaaagaacaacagaaggagtaagaatatgagtaaatacaataaactcttcttctcttgagttttctaagttacctttgatagttgaagcaaaaattgtaatatgatgccatgtgattttcactgtgggtgcaggaaacacctaagayattctaagcaagggagggaaaagagatttaagaggggtaaagtttccacatttcactcaaactgctaacatgttgacaccagtagactgtgatatattatatatgcataatgtaatatgtaaatcaaccactaaaaagtctatacgaagagatg

SEQ ID NO: 658289 - DNA, 471 bp, Homo sapiens
ttacctaccaaaaatatccttcaggaatggagaggaaaccaagacagtggcagatgaaggaaaactaagaggactggttgctatcacactggctctaagagaattgctaaaggaagttcttcaaacagatggggaagattccaaaggaaacttggaccatctggaagaaagaaagaacaacagaaggagtaagaatatgagtaaatacaataaactcttcttctcttgagttttctaagttacctttgatagttgaagcaaaaattgtaatatgatgccatgtgattttcactgtgggtgcaggaaacacctaagacattctaagyaagggagggaaaagagatttaagaggggtaaagtttccacatttcactcaaactgctaacatgttgacaccagtagactgtgatatattatatatgcataatgtaatatgtaaatcaaccactaaaaagtctatacgaagagatg

SEQ ID NO: 658290 - DNA, 492 bp, Homo sapiens
gtaagagagaaagggatataaaataaaaggcagagcagtagaaggttctggattacagtcacaagtaagaattaaaagacaaaacaaacccaggccttaaaaatgcactttagaattaggttctaatggtgagccaggcacagtggctcatgcctgtaatcccaacactttgggaggctgaggcgggtggatcacctgagatcaggagttcaagaccagcctggccaacatgaaacctcatctctactaaaaatacaaaagattagctaggcgtggtggcacgcacctttaatcccagctattcgggaggctgaggcaggagaatcgcttgaacccaggaggcrgaggttgcagtgagccaagatctcgccactacacttcagtctggacatcagagtaagactctgtctccaaaaaaaaaaaagaagaagaagaagaatataatgggaggaaaagaatcagctgaataattggagcagctctgctgaattc

SEQ ID NO: 658291 - DNA, 259 bp, Homo sapiens
gaattcaagaccagcctgggcaacaaacaagaacccatctctcaaaaaaaaattttttagccaggtgtggtggagcacatctstatcccaattactagggaggctgaggcaggaggattgcttgagtccaggagttcaagaccagcttgggcaacaaaatgaaatcaccatctccacaaaaataataataattaataacatatatatagttgcaaaaatatgtacaacatgatttcaattttataagtgaaatatagac

SEQ ID NO: 658292 - DNA, 259 bp, Homo sapiens
gaattcaagaccagcctgggcaacaaacaagaacccatctctcaaaaaaaaattttttagccaggtgtggtggagcacatctctatcccaattactagggaggctgaggcaggaggattgcttgagtccaggagttcaagaccagcttgggcaacaaaakgaaatcaccatctccacaaaaataataataattaataacatatatatagttgcaaaaatatgtacaacatgatttcaattttataagtgaaatatagac

SEQ ID NO: 658293 - DNA, 259 bp, Homo sapiens
gaattcaagaccagcctgggcaacaaacaagaacccatctctcaaaaaaaaattttttagccaggtgtggtggagcacatctctatcccaattactagggaggctgaggcaggaggattgcttgagtccaggagttcaagaccagcttgggcaacaaaatgaaaycaccatctccacaaaaataataataattaataacatatatatagttgcaaaaatatgtacaacatgatttcaattttataagtgaaatatagac

SEQ ID NO: 658294 - DNA, 622 bp, Homo sapiens
agtggactattttctgaaatggtttttaataactgagtaactatagtgacctatagtgacatgtgtattcattataaagagctttttttaaaaaagagacaaaagtgaagaaatataagccagatgttttaacaagcatttaaactatatgagtaattctagattcaattatactaagcaattagttagtactatcataagtgaccacaaaccgtgaagagaacaggttatctcaatgcaaatctctgtagagctgggagttatcttgatgcaaatatgtagagctgggcatacttgctaacttagttatagtcttttagagatttaaatatgaatatgatatgtataaacacatgtaaatgttcaataattacaaaatattagaagctataagatgaaatggaggtcatcactgcagtgaatgaaatgccagcagcatcagaaaaggtcaattctcagaatctgcactatgtaaatgaataytttgtatctcagaaatacacatgcagtatatttactttaaagtaaaaggatgtgttcatcgtcattgggaggtatcctctaacattgcattattctctttaacattcacagttatgctatccatatttatgagctgaaa

SEQ ID NO: 658295 - DNA, 421 bp, Homo sapiens
gccagagggataaatacctggacctcactgtctgctggtacaatctgttgcatggcattttggtgaactgtaggattatttacagaaagttacctgttgaacagcatagtatgttcacttgggcaattcgatgggttaatttcttccaccacctaagcctgtatctragagcagccaagtaagctatatgaatgccgactgcggtcaagtggagtaatgcttcagcagcacagctgcaataggcttgtattccaacatacacggactggcatatttgtaacattgcaagaaggtgacgctctgaaggagtctaaaggaaagggaaccctcatttcaccacgtaatcaagaagaggtttctgctaaacataggtttgactcctggctgtacatttactagctttcattcattcatttgatga

SEQ ID NO: 658296 - DNA, 600 bp, Homo sapiens
gatcccacaatctgggtactaggagtagaccatccattcttgatttgaactgtttctgcaggtactcatttgttcaaacactgcctatttcgttttgcaacagatctattttagaaaatctttatattgagcaaacagcagtctcactatagcctctacttgttggtcataatctgccagaggaagcttacctgatgatgatggtgctgctgctgctgataatgatggtgatggtaatgacgaacatgacacaagatcacaggcactgtgctaagcaytaaacacatacaatcttatttaatcctcataatgttatggcataaatattacccctcttttaaagatgaacagatgattaaaggggtaaagttgctttgatctttaatattaatttgtgtctttctcacttcaaattcagcgatgaaccctattcctatgacaatctttccttgctcctataaattgttttgtgacgtgagtaaagacaacacatctatggcttttgtaagcccaggtggcttgtagtaatcatgtcttctctatcattatctcaattattcatatcttctcaaccatgtatagaagaattgcctcatggat

SEQ ID NO: 658297 - DNA, 461 bp, Homo sapiens
ccctattctctccataaatacaccaatacccccttcaatcttcaaagtaattaacagtcctaagatcggcaattctattacagctcaccttctgaagtgaggtcacccattattgaggtttaagaccccagcacacagctaccattccttctcaagctgttagctgtgtctgggtcaatgtgggtggmtataacaaagtactctagatgttggtccaaatctttcgagaaccatgggctacatactgtaggtttaggtctgagatcagggtgccagcaaggtctggttctgggaagggctgtcttctgggctgcagactgctgacctcttaatgtatcctcacagggtggaaaaagaaagctagaaagctctctggggttccttttataagagcattaatcccatttatgaaggcttcacccttatgggctaattcccaaagtcgtcaccacctaataccg

SEQ ID NO: 658298 - DNA, 558 bp, Homo sapiens
ccctgttgtgcattctttcaaatggtctatgatttaataatttaatacagaggataccagtgtgtctgtgtgtgtgtgtatgtgcgtgtgtgcatgcatgtgagcatataatctcatggggtaaggaaataaaacgttacttcctctatttttgttgtccatctaaagctaaaaattaaccattattaatattcaatatccagatcaacctagcaatctcacttagtccatatttgagatgtcacatgtaacatatctcaggaggagggaagtttacaaaatggaggtgctgactgtgtcaccatcartgcagtcgaggtgtgcctggtttaatggatttatggattttattatcccttcctccctcccttccttccttctgctgaatacatgataagaactatgccaaaccgtgattatacagcctgaatataaataagatacacaggagtttctagtgtcatagggataacatgcatatttatgtatttgtttaatttataatcaactgagaatctactatatgccatgcattgttccagggaatcagcagagaac

SEQ ID NO: 658299 - DNA, 552 bp, Homo sapiens
gcaagtatttggtgcaggaggattccaagcagaatgaaaagcaagtacaggccaggcgccatggctcatgcctgtaatcccagcactttgggagaccgaggcakgtggatcacaaggtcaggagatcaagaccattctggccaacatggtgaaactccgtctctactaaaaatacaaaaattagctgggtgtggtggcatgcatctgtagtcccagctactcaggaggctgaggcaggagaattgcttgaaccctggaggtggaagttgcagtgagctgagattgcgccactacactccagcctggcaacagagtgagactccatctcaacaataaataaataaataaataatgaaaagcaagtacaaaggacctgagataggaatgtgcttgacatgatcacataaggagtcctctatgactagcatggcacgagcaaggcatagggtcgtaggagataaatcagagggtatctctgggtcagatcacatgattcctatgggatggacttggacctgttgttttacgtataccatgaagccactgaaggat

SEQ ID NO: 658300 - DNA, 578 bp, Homo sapiens
tgcaagtatttggtgcaggaggattccaagcagaatgaaaagcaagtacaggccaggcgccatggctcatgcctgtaatcccagcactttgggagaccgaggcaggtggatcacaaggtcaggagatcaagaccattctggccaacatggtgaaactccgtctctactaaaaatacaaaaattagctgggtgtggtggcatgcatctgtagtcccagctactcaggaggctgaggcaggagaattgcttgaaccctggaggtggaagttgcagtgagctgagattgcgccactacactccagcctggcaacagagtgagactccatctcaacaataaataaataaataaataatgaaaagcaagtacaaaggacctgagataggaatgtgcttgacatgatcacataaggagtcctctatgactagcatggcacgagcaaggcatagggtcgtaggagataaatcagasggtatctctgggtcagatcacatgattcctatgggatggacttggacctgttgttttacgtataccatgaagccactgaaggattttgaagaggggtgtaacaagatct

SEQ ID NO: 658301 - DNA, 480 bp, Homo sapiens
aggaggaagtgagaatgaaaaactataaagatagaaaaaccacaatttttatgtattttaccttatatcaggcctatgtataaatatttttgattgttcagtggtatcaaccagttttatattcttcacatggattggatgctgtaaatcctcatttaaagggttagtaatgaatataacattagtttcccctgaacaaacattcttaaatccaacaaatgttgaacctaaaacataaataatagataagtgattrttttctctaaagaaagtgataaaatcagatttaatgcacattctgccaaacacatcttttgtcactaccttaaacatggagctcttgcctgatatggtaaataagtctaccactatttgttgtagcctgttgcctcccaatatcaatatccatatcactgggtaatgatctcccatattttctccgggcttggccacgtaacttggtttggccaatgggacaat

SEQ ID NO: 658302 - DNA, 571 bp, Homo sapiens
tattccaccctggaaaaggtaacaattcatgctgagtagtactgacatgtattcctggtgtgagttttcctttcttatagggcttcagttagcaccaccatactaggactcacaaagtgatctaatggcacgggctcctgcataacatcaccctggactaaagaactcacgttcgacaaaataggtacaggggtgagcataagacaatggaatcaccatggaagaattgctccaatcatacaatatagcatctggagaatgtcaccccaaaagactggtggaatagattcttgaaggcacagctgacrtgtcaactttggaaatgacaacctgcaaaaaatgtgttattaacctaaaacaaagggcattatatggtggtaaatatcaaaaatatagaatacatgggtgctggtaccaaaggcaagaagtaggagtaactgttttcaccattatccctggaagttcacttgggaaacttgtgcttccaatactaaaattttaggttctatgagtctggaggtcatagttcccagatgagaagtgtttcagcaggacatacagtaagtgactc

SEQ ID NO: 658303 - DNA, 434 bp, Homo sapiens
agggtctgagccattctaccaggcaagccatcttgacaagcagaagtgttaaccaaggaagacagaaatttagaaagggtgatggatgagagagatgatgagtatcatttatggtttagggaccagctatggcagggtgaccaccaaacctcttctyaaagtttttcccaaaaattgtgaccatgcagaatcttggagaaatcatatataacttaatataactaacaatgaagaaagcaagtagatcccagtagtcccaagagaggactaaagtggatacaggctggtacacccatctctcatctctttgaatattggctgttaacaaatctcccttttcccagacaattagcttagccaaaaaggagccacatacccgggaaatcaaggtcctccccataggggcagctgtaaccaaaaactaacatggggat

SEQ ID NO: 658304 - DNA, 674 bp, Homo sapiens
atgggtaatctgtttgctttaccatttatagaagaagtcatattcctactaataacatgaactgctaatgtttccagagacattactatatttcaggcacagctctacatgctttatatgtaactcattgttactacatcatagtaactctatgaggtaggcacagatgagtaaattgagacacaggaagtaatttgccaagatagtggtcttagttcagtctgccataacaaaataccacaaattgagtggctcaaacaacagaaatttattttctctggatctctgaaagtctgagatcagggtgccatgatggtcatgttctgctgagggttctttgctcggcttgcagatggccactttcttgctgtgtcctgacatggctgagagagtgcaagcaagctccctggtgtctccttttagaagggcactaattccatcatgaggtctcccccttcacaatctcatctaaaccctatttcttcccaaaggctctcatctccaaatatcatcaccttgaagattagggcttcaacatgtaaaatttggggacacaattcagtccatagcagtctcaagctggtatggtgcacagcaagaactcaaaaacagtctagctgtaaaacccatgcrcttaaccattatgctatatttccttcttttaaattaagaga

SEQ ID NO: 658305 - DNA, 531 bp, Homo sapiens
gagaaagccctagcataatggttaatacaggactttggattttaatatccctggacttaaattctggctctgccaggttaagacaaaactgaccagaaaactgtagaaatagagaaactatgaattgttgtttttgtaataaagagggtgagagagtggggtttagattatttaatgtctttgtagtgaagattgaaacatataatcttaatctctggtttgtaattcctgtcaattacttgctaaacttttttttaaattttgtgccttttctctctcttttttttttttkgttttttttgtttgtttgtttgtttgtttttaagtcacactgccagggtttgaatatttactagttacttactctcttgaagtttggggtctcatactcatataaataataatagtacctatgttgtatggttttcaaagaattaaatgatgccttctggactgcttgggacatagtaaatatgcaataaatgttaggtctttttattattattcctggcttgtacacaggactaagta

SEQ ID NO: 658306 - DNA, 531 bp, Homo sapiens
gagaaagccctagcataatggttaatacaggactttggattttaatatccctggacttaaattctggctctgccaggttaagacaaaactgaccagaaaactgtagaaatagagaaactatgaattgttgtttttgtaataaagagggtgagagagtggggtttagattatttaatgtctttgtagtgaagattgaaacatataatcttaatctctggtttgtaattcctgtcaattacttgctaaacttttttttaaattttgtgccttttctctctctttttttttttttkttttttttgtttgtttgtttgtttgtttttaagtcacactgccagggtttgaatatttactagttacttactctcttgaagtttggggtctcatactcatataaataataatagtacctatgttgtatggttttcaaagaattaaatgatgccttctggactgcttgggacatagtaaatatgcaataaatgttaggtctttttattattattcctggcttgtacacaggactaagta

SEQ ID NO: 658307 - DNA, 431 bp, Homo sapiens
tttgctatagctcaaattaaagatgatggagacctaaggcaaaagcggagagcatgaacggaggttccacagcagctgctcaagagaagagaaaggaaggccagaaaagaaaggaaattggatgacagaatatcatctaactttctctaagatatttcatgaagtttgtataagcctgacgtcaataccacacaaagacaaacaaaaaggaaaattatatcttgaactgkgtgtacatagacagaaaagttctaagaacatattggcaaaccaaagataacaatgcataaaaaatcatgaccacattggatttattccagcagtgaaatgatggttcaatattaaaaagacattaatatacattaccacattaacatactttttaaaagacatcattatttcaacttgtggagaaaaggactttaagttca

SEQ ID NO: 658308 - DNA, 592 bp, Homo sapiens
tgataccaagctcccctaaaagtcaaccactctcttcttttgtctccattcttgacttagaacaatattgatttccttttttgaaaacttgcaaatattaggaaaaatcagcatttgatacattctcttcaccttgaatttcccactaccaattcacaccttatttaatcttatgaaatagtaattaaaagcatgggcctgagataactgatcagagttagaatccaattaatgtaagcccactagaaagtagcctcaccacttaatagccatctagctcagggtgaattaggtaacttttctaaacctcactttaatcttctgcataaaagagataatattgtccacttcatagaattttggggggcattaaagaaataakctacgtgtagtacctagtatctactgtatgattcatcaacagaaacaccaacaccaagagttaaaggaaatattaaaaagcttaaattaccactagaaaaaaaggttccgtctcccaccagcttgtattaattagaactaattcaaattaactaaagaaaaaacttccttaataataattcaaaataatactaggatgccttatataact

SEQ ID NO: 658309 - DNA, 592 bp, Homo sapiens
tgataccaagctcccctaaaagtcaaccactctcttcttttgtctccattcttgacttagaacaatattgatttccttttttgaaaacttgcaaatattaggaaaaatcagcatttgatacattctcttcaccttgaatttcccactaccaattcacaccttatttaatcttatgaaatagtaattaaaagcatgggcctgagataactgatcagagttagaatccaattaatgtaagcccactagaaagtagcctcaccacttaatagccatctagctcagggtgaattaggtaacttttctaaacctcactttaatcttctgcataaaagagataatattgtccacttcatagaattttggggggcattaaagaaataatctacgtgtagtacctagtatctactgtatgattcatcaacagaaacaccaacaccaagagttaaaggaaatattaaaaagcttaaattaccactagaaaaaaaggttccgtytcccaccagcttgtattaattagaactaattcaaattaactaaagaaaaaacttccttaataataattcaaaataatactaggatgccttatataact

SEQ ID NO: 658310 - DNA, 549 bp, Homo sapiens
gattcactgctatctaaacatttacatttttatttgtttaatctctatcttcccactactttggaaagcttgtgaggacagaaaccatgtctgatttgttgatgtttctttgagcaaagcatggtaccattcctggcacacagtaggaactagataaatatttattgcttaaatgctatctagagctgtgaagcatcttagcatattacagtgttttaataaagaatcctatttaaatttgtttaaccaagaatttcccaattatttaaaaatctaaactttttrtgttttaacatatactaatatttctagatactattgtcttatagctcacatttcataaaacattgttttacactaagtcatttctaatttaaagactcaagtctaaaagcctgagcttatattcttatgatcattggatgagtctaaacctcagaggcttaaataagataaagcaacaatcgtcttctaggacattaaccccaatcactttagggggcattgtatagcatgcatatgttacttttcttgtgctgcttttcaggg

SEQ ID NO: 658311 - DNA, 637 bp, Homo sapiens
tcatttgtccaaagttaaggttgagttaagaaaaattattttttataatttcaacttttattttagatttaggggatgcctgtggaggtttgttacctgagtacattgcatgatgttaaagtatggggtatgaataatcccatcacacaggtagtgggcatagtacccaataggtggttttttagcccttaacccgcttcctcacttccccctctagtaatttatagtgtgggttaaagacattttttaacacagttttaaaaaaatacctcatatcagaagcacattcaggaataaatatattcaactattgttggtggaataaatgcctattttaggataaattctaaattgctttatacaatatcaaatgtacagataccaaggtatatatacaattccaggcatctataagaagctcaatgcattacataaattattttatgtggctgagattctacatgcaaacacacacacayacacacagactaccatcattgccttaggaatcctgattctactttaaagcttactaatacctcatatttattctgatgctgctttgagttcttacaatgaaagtgataatttaaaacagggtgatttactgttgaactttgatattgaagtgagacca

SEQ ID NO: 658312 - DNA, 562 bp, Homo sapiens
acaatcagctagaaaatacataaatagaaaacaagaaatcaagaaattaagacaacaagagaaatttttttttaatatgagaagaaaccaacaagaaatggaagaaacaggaacctaattatatttaaattacaggggtggagatttaagcagctaaatagatggcagatgttagagatttcaggataataatacaaacctttgtatttaagtggaaagtgaattaacaaaaaaatgcagcaaagaaatacagtattatattaaaataagagtgtaggtataaaacagctaagcaatgcagtttaggaggacccaggttatatttatacccagatctccagcctgagatttcagcatgcttgaatatgaagggagtgtttgtwggatggctccaccaggagccatctaatagaaagagctacctgggaaagaagaagaaaaggacaggcacttgagattggctagtatgaacacatcagtcatctgacaggcctattggaaaacagtgtcgttcttatttaacatctgccatatattgaacattcccaggaccccagaaata

SEQ ID NO: 658313 - DNA, 562 bp, Homo sapiens
acaatcagctagaaaatacataaatagaaaacaagaaatcaagaaattaagacaacaagagaaatttttttttaatatgagaagaaaccaacaagaaatggaagaaacaggaacctaattatatttaaattacaggggtggagatttaagcagctaaatagatggcagatgttagagatttcaggataataatacaaacctttgtatttaagtggaaagtgaattaacaaaaaaatgcagcaaagaaatacagtattatattaaaataagagtgtaggtataaaacagctaagcaatgcagtttaggaggacccaggttatatttatacccagatctccagcctgagatttcagcatgcttgaatatgaagggagtgtttgttggatggctccaccaggagccatctaatagaaagagctacctgggaaagaagaagaaaaggacaggcacttgagattggcyagtatgaacacatcagtcatctgacaggcctattggaaaacagtgtcgttcttatttaacatctgccatatattgaacattcccaggaccccagaaata

SEQ ID NO: 658314 - DNA, 543 bp, Homo sapiens
aaaaatactaaactttgctaataatgaaataaaatttcaaattaacctgacttgcaaaaattttaaatgttaggccaagtgttaatgagattataataatctccttcattgttggtgggtatgtataaatagggtcaacttctttggaaaacaactgggcctcacctagcaatatggtaatgaaatggtcctaactctacaacagttttttgactcctaaggcatataccatagacagcatttgcacatatttacatrtaattacacagaacatggacattcacaatagaattgttcatattatttaaaacattgctgacaaactaaaagtccatctagagtagaaatgacactcaaagtggcaactcatacaataaaacaaatacaggagtgaaaactaataaaccttagctatgcacaccaatgtaaatgaacctcaaagacatataatgagcaaaacaagcaagtcatagaacaaatgcattgtaattccttgtacgtaaagttcacaaccaggcaaaactaaatactaaacccttttgg

SEQ ID NO: 658315 - DNA, 458 bp, Homo sapiens
catcttcctccttttagaattcccattatctattatttacatttttatgtccatgtgtactctttgtttagctctaacttataagtgagaacatgcagcatttgattttctgtttctgcattagtcacttaggataatgkcctccagctccatttatgttactgcaaagaacaaaggacatgatttcattcttttcattatataaaagacaactgaacttgtatgtttattgcagcactattcacaacagcaaagtgatgaaaccaacctaagtgtccatcactgattgactggataaagaagatgtggtatatatgcaccatggaatactatgcaaccatcctgcatttctaatggctagaaattcctgccattaatttcattcctttagattacacaacttcaataaaggtatgggcgttgtcctctataaagccatttgtcatgattttcaagac

SEQ ID NO: 658316 - DNA, 651 bp, Homo sapiens
tatttatagcctgagtaaagttaaaagaatgtaaaatatatcatcaagttcttaaaataatatacatgcatttaatatttcctttgatattatacaggaaagcaatattttggagtatgttaagttgaagtaaaascaagtactctggagcagttcattttacagtatctacttgcatgtgtatacatacatgtaacttcattattttaaaaatatttttagaactccaatactcaccctgttatgtcttgctaatttaaattttgctaattaactgaaacatgcttaccagattcacactgttccagtgtctataaaagaaacactttgaagtctataaaaaataaaataattataaatatcattgtacatagcatgtttatatctgcaaaaaacctaatagctaattaatctggaatatgcaacattgtccttaattgatgcaaataacacaaatgctcaaagaaatctactatatcccttaatgaaatacatcattcttcatatatttctccttcagtccattcccttaggcaatttttaatttttaaaaattattatcaggggagaaaaattggcaaaactattatatgtaagggaaatatatacaaaaagaaaattaatcatagtcacctgactaagaaattctga

SEQ ID NO: 658317 - DNA, 605 bp, Homo sapiens
aatatactttcaacatgagatacagagttcttggctagcagatgagaagttcaacctgaataactatcatgggcaaactaggcatcaattattaagcaataaacctgttctaaattgggacaaagaagacccagcttgcatctcagccctattcactactagagagttgttgctgaagaaaaaaaattaaagaacacagaattcaattagtaaagaaaatgcatgaatctaatcaagctttcattgaaaacacacacatatacacaccaggagaagtagggtataaggtcagaaatagattgaaatttcaattgaatacaatgggtttgatgatgccccatgggcagtactaaaataattgctccaaacttccaactatggttctaggaggatcatrtggaaactttttactctcaggcaccatgttctagactctgattcctaactgagaagtagctatattatggccctgagtttatggattgacaacctaaatatgtctcagatagtaactctcctccatgtagctgggcaattaaactctaggaagacttagaaataaaaatcaaattaatacaatgttgaataggagtggtgagagaggg

SEQ ID NO: 658318 - DNA, 636 bp, Homo sapiens
taatgactctatcccattctagtctagactatatgaggaaccttgcattgtgcaacatagtattttttcaaatttatcattatatataatactttgaaggaaaactgtatgcatgaatcttaatatacatcattgaaactttttcctaaaaaattctagagtcgaattgctgagtcatgaatggtaagcatttttaagttttttagtgggtactgccgcatttccctccaggatggttgcattgattcacaggcaaaatatattaaagacaatatttaaaaccacagcatgacccaccttcacatcatagcacagatgtgggcttctaggctagaccacagcagatagaatggcttgctttgtggcaataaggaaagctctcttcctggaaaagtttgaggcaaagttacagagtcactaatagcaacagccttgatttagggttcaaaccacaagcaagaattaattcctacattacatgctggtcatgccaacacatttttttaaacttttccaataaggttagtaktatcactttcaggattatgtttgaatcctataggacaacataggcacagcagagaaggaaataaataaaaatacacataaagccttccaaatagacactgaattaag

SEQ ID NO: 658319 - DNA, 636 bp, Homo sapiens
taatgactctatcccattctagtctagactatatgaggaaccttgcattgtgcaacatagtattttttcaaatttatcattatatataatactttgaaggaaaactgtatgcatgaatcttaatatacatcattgaaactttttcctaaaaaattctagagtcgaattgctgagtcatgaatggtaagcatttttaagttttttagtgggtactgccgcatttccctccaggatggttgcattgattcacaggcaaaatatattaaagacaatatttaaaaccacagcatgacccaccttcacatcatagcacagatgtgggcttctaggctagaccacagcagatagaatggcttgctttgtggcaataaggaaagctctcttcctggaaaagtttgaggcaaagttacagagtcactaatagcaacagccttgatttagggttcaaaccacaagcaagaattaattcctacattacatgctggtcatgccaacacatttttttaaacttttccaataaggttagtattatcactttcaggattatstttgaatcctataggacaacataggcacagcagagaaggaaataaataaaaatacacataaagccttccaaatagacactgaattaag

SEQ ID NO: 658320 - DNA, 528 bp, Homo sapiens
ctggtgattatctgtacaaaataagcagcttcaacacaaaaaagaatttacacgtgcacacttctgtttgtataagcaatcttctactttgcacatgaggccatatattgtgcagacacagctccttaaaatgttctggagccactgtgatttagctggttggtattcacctaatgtcagtaattagagtacaagtgctgacctaggggcaaattcaagttctttactgttttacagctaaatacatgtattttaaaaaaacatagttatttaaaaattgataggtttatagttaaagtatttgaggataaatactcaaaaaatctaacttctgtaatagtaagtttacctatgacttgattcrttttaagttcccaacttacaaacagaccatgctcaagtaacctaaatctgtcaacaattactccttcttaccctgcttctgaaatacttactaaaaggattgctgggaacacctatcaaatgcttataggaaatttgttgttttaaaatggaaagaaaagaaca

SEQ ID NO: 658321 - DNA, 557 bp, Homo sapiens
ttgctttgcatggtattattattgggaagtcatgcatgtcagaactgtgtccttgctttgtacagtgaaaccatacaagatgatgaaactattttggtatgtacaagtgttatttagacaggccatgcacagtgaagactgcctgtagtctgatataaagactcctgtgctttatatcagacacttctgaagcaattatttctggcaaattgggattacaggtctactctaacccttcttctagatattgtccaaacgggtcaaacactaaggagacttttgcaattagtatgctaaatattgtgccttacaacacaaccattattttgcaattgacctagtatcctaaacaaaagaactggagcccctgacccaatatggctttcttgttaactctgtgtagttaacaacamtaattagcttaactgtgttagggaatctgcatctacaaaaagctggccctttggaatacatacaaacttctctgggtacacatctaggccagtttagacttcatgatgtcataagctatatataacattgtgtctcgttagtta

SEQ ID NO: 658322 - DNA, 425 bp, Homo sapiens
gaattctggcccaccaggggattacctcaaggctttagttaatttacagcctgactgtgcccaggagggttctagcccacttaccagatgggacaataactcaagataagtcgttggaacaagtctcatagaatagcacctcctcaccctccttgcatgccccgcattccaagcactcctttttaagtctttgttttttgtccaaaatttgaaatggtttctttaaggtaggagcctggaccatttcttcactgctagctttggaaaataaagtcatttttcttccacygaacctcatccttgttatttggttctgtgagtgttgagggactggacctgcgtttggttacacaatcaacataagtcatagagaaaggacaagcatagatatcaggagagacactgactcaaacactgcatggtac

SEQ ID NO: 658323 - DNA, 538 bp, Homo sapiens
agaactgcccaaagagatgcagccactaagtggtggtgctgggagttaaacccagcagtgtaccccaaggttgcactgcccatttttatagccactagccacatatggctattgagcacttgggatgcggttcatccagattgagatgtattgtaatggaaaatgcacaccagattaagaaggctgagtatattttgaaagtgatgtcaaatacctcattaataattttatattgattacatattgaaatatccatttctggaatgtattgggctaaataaaatatgttactaaaatcaattttacccatttcttctcacactttttgatgtagagctagaatagtttaaattacacatgtggcatgcagtctatttctattgtgcagaaatagctgtcyagagagcacacttacagatacataccctaacagcatcagtgatcatgctaaatgcgctaggcatactacaattgactcctaaacaacatggatttgaactgtgcaggtccactcacaggccgactttcttctgcctct

SEQ ID NO: 658324 - DNA, 593 bp, Homo sapiens
tccattttataccctgtgtccaaggctgttgggaatttttataaaatcatttaagactttgctgaaacaccccttcttctgttatcttttccctggttcctagtaaccttgatgggatgcccatgagtccatgatactttaaaattcttattggagtacccagtacaggatttgtttattgyttgtgactttctttctcagtagaccatgagcttctgagagcaggaacttttttaactcattgtcatattctttaaatttagtgtaaaacccaaccttgtcgaacattgtacagcaaaaaaaatatttgttgaatctcatcattccctctctcccttgcactctgtattccagtcctattgaactttcatttcatcctgttgatttgattctttcttgtccctgtgccttgtgtattatgtatgtgtatatgatatttatattatcatgtgatattacaggcagtactgcctgcagtactccctccatatacccatttattccttcttcttcttattctaaaaggttttcctgacttttgagggaaatagatcttccttctctatgtcctcactactccttgtactatcccc

SEQ ID NO: 658325 - DNA, 633 bp, Homo sapiens
tctataacctgtgtttctttaaaaatcaatgtgttttagagtgtgtgattcctaaaaacagattaattaggtattataccagtaaagtccatttgtcaaaaaatttggaatacctttttatgtaaaagaataagcatrtagattagctttaagtccaacaacatttcaacatttttcaaaaaaaaatctttaaaaaatatttcaaagatcctactatatctgagatgccttgttattataaagaggctatttcttaagaatttatgcactatatgcatttctaagtgtatgcacttttttttggcctaaattgcttgcctatgaaggattcaggaaattatattctctcctcaacatttccctgaaaaccatctgaaaaattccagtaaagtgcaaccgcttcatcagtaactacacttcacagttatttccacaaacattatttttattaaaaaaataattttctgctgagaatatattatctctgctacagccctcctttggtggtttaaaaaaaacaagtagttctttgtgtatgttattgttgaaacagaatagagaaaataccagcagctgggacatgttagaaacatttctgccttcttccaaggcattgcaaaattcccaagtggg

SEQ ID NO: 658326 - DNA, 563 bp, Homo sapiens
ttgaggttgtaaaaagaggataatttttaccttaagtgtttgctgggtaacttagaccagaagctcaatggaaatgtttcagagtagagctccaattttagctgcatttgtagttcacaaatgcaattataaggagccaaaaacctctaagttatgccacttacaattccaaattccaatcagtcaatatttatagagcacccactgggtggaaaatgctgtagcagtaccatgcataaaaacaaaatcagcattttattacaaggaataaacaatacagttgggacaccactgtgtcaaacccttaatatcatgctattgactcagacataaaattgaatggcatgttaataagtgaatgcactccagtgttttttgattctacaatactaacatctcatgcatgatctgtcacactgtggttgctgcactgttttgagcaaccagatacagcttgttgatcaattccacccgtcattgagatgctaaggcaagtttcctaggttctttttgaatgargccttttaatctcttcctgtaaataatgaaagagaattagggcc

SEQ ID NO: 658327 - DNA, 538 bp, Homo sapiens
agcatggatctgaataaaatactcagaaaacacaatacaaatatagaggatataagacatgaagaatataatataataacaactaagcctatcataataaaattatagaacacaaaaaataaatttcaaaagcaaataaagaggaaatgcagataatataaaaaggaaggaaaattagactgacagtaaacatccttacaacaatatagaaagtaatacttggaatggaacacagcacaggtttaaaaaaatcataggagtttgagttaagaatatactcattctcagccaaaattaagcagtgacttccaaaataaactaatatgaatttagagaaacatagtaacaatatcagaatagcggggggaagaggttttagaagtgacgtgstatttacttgtaaaattacactgggaatgtgggacttatttctattactatcttgtttcaagtgaagatattctaagttctgttcttaaaggagctggtgaaggaattggggatttggagaagtcatagagatcacaacagctatttt

SEQ ID NO: 658328 - DNA, 402 bp, Homo sapiens
ggagcccacctattgtgtcagcatgacctgggtgtgagacatggagtcaaaggagatcattttggagctttaatgtttagtgactgccctattagattttgcattttacatttccaccaacaatatatgaggagactcataggcccaacaccatgtgtaagccaccaaggtttggagcttgcaccctctgaagtaacagcctgyggcccttttgttttggccaatttctcccatttggaatgggtgtatttacccaatgcctgtaccaacattgtaactaggaagtaactaacttgttttgatattacaggctcataggcagaagggacttcccttgttccagatgagactttggacttggaagtttgggttaatgctggaatgagttgagactttggggga

SEQ ID NO: 658329 - DNA, 588 bp, Homo sapiens
aatgatctaactatacagagttgataagccttaagcctgatagtggctgactagaatatagttgtgtgaatactaattttctatggttatcagaatagtgtgatactggcataaggatagacatatagatcaatgacatagaacagagagctcacatatttatacccttgcatatgtgatcaaataatttctcacaaggatgtcaataccattccacaaggaatgaacattttcttcaacaagaaatgggaaaattagtgctgggaaaactggatatccacatgtaaaagaatgaaattggactcttactttgaccatatacaaaaattatctcaaaactgaataaaatataagaaaacataggagcaaatcttcatgacctttgatttggcaatgatttcttaaataagacactaatagcacargtaacaaaataaaaattagataaattagaccatcaaaatcaagaatgtttgtgcaaaggatatcatcaagaaagcaaaaagacaaccttcagaatggaaggaaatgtttacaaataacacatctgacaaagaattaatatccacaatatataaagaacttcca

SEQ ID NO: 658330 - DNA, 581 bp, Homo sapiens
agtaactctgtctcactttcctctttttaaaatgcggctaacaatagtacctgcctcttacattgttttaaaatttaagtgaattaatacatatgaacacatagaacagtgtctggttcatggtgaatgttatgtttgttaaataaagtacatttcccaacacagtggccaggtgatttaatctggaatagctcacagattctcaaagtactgtaatgcttctgtagttgctatagyagtaatgccaatatcatatcccctttcttgaaagaaaaatttcactggggttactacagtttggaaagtctttgtatggcagtgaaatgatgtaatcacatttgggaaagagaacacaaatgatccatcagaatatctgagaaggatccaaagaaaatacagttctccccagcccttctcacctaggtaggtgggaaatgatgcccaaatctctctcctgtcaggggatgggagagatgaactctgcttctccaccagggttctgcagggtaaatactggaggaggagtctctcaccaatgtttttaggaacactgaaatcccaggagtcaactgagctaagtt

SEQ ID NO: 658331 - DNA, 428 bp, Homo sapiens
ctgctttcagttatattgttggcaagatttctctgaatactgactacagggattacaaggtcattgttggttccaatgaatcccataaacttgtgaataagaagcccttaaytttccagggctttaagtgtcatgataaggaatagaatatgtcaataacctgctctgtaggtttcctgtcttagatgtctggatttgatcacatctcgggtaataaatttgcctcataattatttaaggaagatcacttggaaacatggatggccaaaggaactcttaatatttaaagttacttggaaccattaaacaaatttattaatattgatcaattttaattactattaacctcaggaaaacaaaccaacattagatgattttgagcactctcttgattattcgtattactaatgcttgattagtttgtccaa

SEQ ID NO: 658332 - DNA, 582 bp, Homo sapiens
gcctaattcacactgcaatgcatatcatgaacattgtaccaatcataaatccctactttaaatctagattttataatgacagctctgctttcagttatattgttggcaagatttctctgaatactgactacagggattacaaggtcattgttggttccaatgaatcccataaacttgtgaataagaagcccttaactttccagggctttaagtgtcatgataaggaatagaatatgtcaataayctgctctgtaggtttcctgtcttagatgtctggatttgatcacatctcgggtaataaatttgcctcataattatttaaggaagatcacttggaaacatggatggccaaaggaactcttaatatttaaagttacttggaaccattaaacaaatttattaatattgatcaattttaattactattaacctcaggaaaacaaaccaacattagatgattttgagcactctcttgattattcgtattactaatgcttgattagtttgtccaaattgtcctttcatacgtgagctttaactgttcctgaacatcaagtctgattcagatggcagtaagaaaag

SEQ ID NO: 658333 - DNA, 582 bp, Homo sapiens
gcctaattcacactgcaatgcatatcatgaacattgtaccaatcataaatccctactttaaatctagattttataatgacagctctgctttcagttatattgttggcaagatttctctgaatactgactacagggattacaaggtcattgttggttccaatgaatcccataaacttgtgaataagaagcccttaactttccagggctttaagtgtcatgataaggaatagaatatgtcaataacctgctctgtaggtttcctgtcttagatgtctggatttgatcacatctcgggtaataaatttgcctcataattatttaaggaagatcacttggaaacatggatggccaaaggaactcttaatatttaaagttacttggaaccattaaacaaatttattaatattgatcaattttaattamtattaacctcaggaaaacaaaccaacattagatgattttgagcactctcttgattattcgtattactaatgcttgattagtttgtccaaattgtcctttcatacgtgagctttaactgttcctgaacatcaagtctgattcagatggcagtaagaaaag

SEQ ID NO: 658334 - DNA, 641 bp, Homo sapiens
tggttgcagtgccaatacctttgatctcaatgttctccagtaactaggattgtggcttaataaaatagaatcctattgtctttggtttctgaaagtaaatacagattgtgggcaccatctgggcatgcaggtacaaccaagtgtcctttgcaccctatgcccatcaagccagggcagcacactctgtctaaggatgccctgagggatgcttcagatgcagccaaagataggaagctgtttcccaggcagaatgggttattcaagggaaatcctagactcaggattgttcctttgcatgcttagcttaaatagtaattgagcctttttctgagaggctccaccatttgaactgrtaaatgttctgtggttattcaatttcacaatgactaggtctggattacagaaagttaaatctaaactaggacagaaaattgacaatagaagcaattcagatagattcttgaattaggacagtgacttagttactcagatcttcaaggagggttttgttaatgtttttgtatttttgtttcatttggtttagagaactgctagagtggccaagactgggtccatggaagaaaagggtatataccaactatctcaggtagataattgacatttccttttttttttaacat

SEQ ID NO: 658335 - DNA, 446 bp, Homo sapiens
ggttatgttcatgggataaaatattatattgagcattaaaaaattatgttttaatgtaaaattatacttgtaagtaaaaaataaacagactataaatctgcacatatggaatgagcatatatatatatatakagagagagagagagagtcatgcacatatttatactgaaatgaaaaactgcaactgtagataagtaaattgttttctatttttcaagtattaagtaattttttttttttgagatggagtttcgctcttgttgcccaggctagagtatagcagcgcaatcttggctcactgcaacctccgactcctgggttcaaatgattgtcctgcctcagcctcccaagtagctgggattacaggcatgtgccaccatgcccggctaacttttgtacttttagtagagatggggtttcaccatgttggccaaaatgttctagat

SEQ ID NO: 658336 - DNA, 602 bp, Homo sapiens
gtttttctcttacagctttcaagatgttctatttatgtttggctttcatcattttytctgtgatgtgtctgtgtatggatcttttccatttatcttatggggaattccttgagttacatgaggtataaattaatgattttcagcaaatttgagtattctttttttgattattttctctacactttcctctttccactctgactctaccaacaaacatggcatgcttagtgctgtcccacatttctcatttttctttattattttttcactttattaatttttctctgttcttctgattacatcatctctctctaccaattgttctttaagcttattgattcttctgccagtttaaatgtactgttgagccccttgagtgaatttttcatttcagttttacttttcaactccaaaatttccattggttctttttataatgtttctctttactgatagtatctattagttgagacattatcatcatattttttttctttaatcatggtttgctttagttctttgaacacgtttgtaatagctgctttgaagtctttgttaagtctgacatatgggccttcttatggtaatttctgaatgtttca

SEQ ID NO: 658337 - DNA, 494 bp, Homo sapiens
tcatctctctctaccaattgttctttaagcttattgattcttctgccagtttaaatgtactgttgagccccttgagtgaatttttcatttcagttttacttttcaactccaaaatttccattggttctttttataatgtttctctttaytgatagtatctattagttgagacattatcatcatattttttttctttaatcatggtttgctttagttctttgaacacgtttgtaatagctgctttgaagtctttgttaagtctgacatatgggccttcttatggtaatttctgaatgtttcaccccactcccgtcttcacccacatgcatataagtcatatttttctgtttctttgcatgtctcataatttttgtcaaaaactgatattttagataaaatagtgtaacagctctaaatactgaccctccccactccgtataccagattattgtttatttgtttagtaacatggctggactattttagtgatgtct

SEQ ID NO: 658338 - DNA, 602 bp, Homo sapiens
gtttttctcttacagctttcaagatgttctatttatgtttggctttcatcattttctctgtgatgtgtctgtgtatggatcttttccatttatcttatggggaattccttgagttacatgaggtataaattaatgattttcagcaaatttgagtattctttttttgattattttctctacactttcctctttccactctgactctaccaacaaacatggcatgcttagtgctgtcccacatttctcatttttctttattattttttcactttattaatttttctctgttcttctgattacatcatctctctctaccaattgttctttaagcttattgattcttctgccagtttaaatgtactgttgagccccttgagtgaatttttcatttcagttttacttttcaactccaaaatttccattggttctttttataatgtttctctttactgatagtatctattwgttgagacattatcatcatattttttttctttaatcatggtttgctttagttctttgaacacgtttgtaatagctgctttgaagtctttgttaagtctgacatatgggccttcttatggtaatttctgaatgtttca

SEQ ID NO: 658339 - DNA, 494 bp, Homo sapiens
tcatctctctctaccaattgttctttaagcttattgattcttctgccagtttaaatgtactgttgagccccttgagtgaatttttcatttcagttttacttttcaactccaaaatttccattggttctttttataatgtttctctttactgatagtatctattagttgagacattatcatcatattttttttctttaatcatggtttgctttagttctttgaacacgtttgtaatagctgctttgaagtctttgttaagtctgacatatgggccttcttatggtaatttctgaatgtttcaccccactcccgtcttcacccacatgcatataagtcatatttttctgtttctttgcatgtctcataatttttgtcaaaaaytgatattttagataaaatagtgtaacagctctaaatactgaccctccccactccgtataccagattattgtttatttgtttagtaacatggctggactattttagtgatgtct

SEQ ID NO: 658340 - DNA, 421 bp, Homo sapiens
cactgcaagctctgcctcccggggctcacgccattctcctgcctcagcctcctgagtagctgggactacaggtgcccaccactacgcccggctaattttttrtatttttagtagagatagggtttcactgtgttagccaggatggtctcgatctcctgacctcgtgatccacccgccttggcctcccaaagtgctgggattacaggcgtgagccaccatgcctggtcacatatctctatatttcttattggttctgtttttctggagaaccctgactagtacagggaacacatcagaaactgagatattcagaaactgttagaagaagaaaacctggcaaaagactgaacattagaaggataaaaggttccaactattgtgatttgtgtgttaaaggaaagtgggacctcacggattatga

SEQ ID NO: 658341 - DNA, 416 bp, Homo sapiens
ttatactatatcaagcaacgtaatgcctgtctctgcgctatttcaaaatcataaagttttcaaccagcatacttcaacatyatcaaaactaatatttgaaagaaaaaagaaaatttcctgttattctaaattaaaaacaatcattatataaattgaaactgaactggcttccaagtgaatgattatgtatatacaaaattgcttaaaatggcaaagctaaaagaacacattcttaactctattctgatccatgtataagaatgaaaactataatgtattctacagataacttttttgtttttaaatgggcataattcatctgtataaataaaatatatattagagccagtatatatgcttgtaagatttccaattgcaatgataataagccaaactgtttgcaagtataacacact

SEQ ID NO: 658342 - DNA, 559 bp, Homo sapiens
cagtgacgacaatgtacagtgacgcccctagtggtggttctcagccctttggagaatctatcagtctcttttattctcttaaaaatcaattcatgcctgtaatcccagccctttgggaggctgaggcgggcagatcacgaggtcaggagatcgagaccatcctggctaacatgatgaaaccctgtctctactaaaaatacaaaaaaatttgccggacgtggtggtggtcacctgtagtcccagctactagggaggctgaggcaggagaatgacatgaacctgggaggcttgcagtgagccgagatcaggccactgcactccagcctgggcracagagcaagactccatctcaaaataaataaataaataaataaattcatgaggagagatgagtctgagacccatatcattcacaactgcaagcctggttgtttgaagtcttctaagaagctttgccctgcagtctttgattgggcttcagtgaatacagtcatgaatcagtatacaaaacgcgcagccatgaagcagaattaaaatcaatgggaggaaatatctgatg

SEQ ID NO: 658343 - DNA, 579 bp, Homo sapiens
agtgaacttaagcagggggaggaggagaagaaagagaagtctcaccatcaaagaactgatgccaatgtaagtcatatctgaatactgttgaacacagttttaggttttaaaaattgcaagagcagtgggaaaaaaaaaacacacctttgaattaatgtgtgtctcttgatgtcctaaaatgttcatctcattgtttagtttaaaagaactaaaagtaactattccagagagaagaaccattcttggctttggcaagtatctaaaacaataactataattcaggggttctcaagagcaacgctatttggggatcgatgattctttgatgagcatgggccgtcctgtgcattgcaggatgttcagcagcatcactggcctgcacccactaggtactacctcaagccatgacaattagaaatatttccagacattcctctatttctcctagagagcaaaagcaccccttggttgagaactgtggctgtaactgatgggtagcacaaaacgtagtggggaayctggtcaatagtgcctgagtacactagtgaaggctttccaaacaatatgatgcttaaactg

SEQ ID NO: 658344 - DNA, 445 bp, Homo sapiens
atgatatttatagtttttaatgataatgattatcaacatcatagcacaggtgttggtgtggatattggttttaagttttcttaggtaattacctaagagtgaggttgctgggttatatggcaagcatgtggttaattttgtaagaaattgttttatcttttttttttttttaccattctaacagttgtatagcatatctattaaatataccctttaaaaagtcctctaattttaaagatttcatctttcaaaaagggcaacatgttgtcatgattttggggtggctgtgtgtcartagctgaaaatgtgtttcctgcccccaactcttagaataaaatgttgcagctgaaaatgctctgtcattgattatttaatcactgagtggatagtatatctgtacaacagttatggtctgccttttcaggtagagattccattttaaaaa

SEQ ID NO: 658345 - DNA, 566 bp, Homo sapiens
aagtgttaagtataaactaatttaggctctatagacacaggcctcataggcatggtagggatatagtattcatgtttattaattaataacttattgtcttatgagaaaacacagtcaaatacagacatgcctcatttaaccagcactgacagcacatgggcgtttcacagaatttaacttaccaaatagcctaaagttatctttccttataaagttaaaacattttcatgggcagtttttcaaaatgtatgcaattcttccttgcttttttgcatgtagcaggcattgcttgattaaactttatgttggatgacttaaccttttcataatgactcaatgtcatcattacaaaaattaattattactctgggttataatacagtattgttctcaggagtttttgaggtttggaaagatatttatctyactaaaagctctagagtgctatgattcttcttattagaaggatgagggtaaagaaggggtctaaactgaatactcagttcccatggctctgattttagaggtcattatataattctcagacacctaagttttgaggctat

SEQ ID NO: 658346 - DNA, 566 bp, Homo sapiens
aagtgttaagtataaactaatttaggctctatagacacaggcctcataggcatggtagggatatagtattcatgtttattaattaataacttattgtcttatgagaaaacacagtcaaatacagacatgcctcatttaaccagcactgacagcacatgggcgtttcacagaatttaacttaccaaatagcctaaagttatctttccttataaagttaaaacattttcatgggcagtttttcaaaatgtatgcaattcttccttgcttttttgcatgtagcaggcattgcttgattaaactttatgttggatgacttaaccttttcataatgactcaatgtcatcattacaaaaattaattattactctgggttataatacagtattgttctcaggagtttttgaggtttggaaagatatttatctcactaaaagctctagagtgctatgattcttcttattagaaggatgagggtaaagaaggggtctaaactgaatactcagttcccatggctctgattttagaggtcattatrtaattctcagacacctaagttttgaggctat

SEQ ID NO: 658347 - DNA, 578 bp, Homo sapiens
ctacatgataaaatgattttgattaaaggctgcactgacttggcttacgatgtatggcttcagaccctgtakgtaaatagaataaagtcaatgaagttaattcctatggtatggttttgaaagcccagtcttatatctatctctttcaccagactgtgagctatgtgaagctggagtttcagtcttgatcatctttttatcttttgggcaaaagtgtacactcactacatgctgaacttctaacctctgtattgtaaagtaatggtttgctccctacattttaatcaaacacatgcaaaataatccttatagatttgtgagcattgcatcaatttcttcataatgcagtatttcaaatgaggcaatgacaagggcacacatctggcttacaggcgatgcttcattttaacacaatgctgtagctgccaagaggatataatacatatcatagataatacatttccaaactaatacaacatggcctattatcagtgctgaaaatgaattagatatccagaaaccaatgatgttaactatgtgaaactcatggaaactttacatagagaaatataaaaaca

SEQ ID NO: 658348 - DNA, 607 bp, Homo sapiens
cagtagttcccacattcttagatctatgaaagcacacatgtggaaatcagaggtggaaccccaatttagggctaaccacttctgattttatcaattagtgacatcaatgatcatttattatcaccttcatttcacaaaagaatgtccattttaataacaaaaagtcaggaaggacatcattttcaaactaaaggaagaaagtaatgttaggccaataactatctttatttttctcattttgaagtcttaggccaatattatttttatttttctcattttgtaacaagattctttgtcttcactagtccttgatcatgaactcaggctttgyaaccctgtcttttatgatttcacagcttcgttctacaaaattctctacaattttagggaaatcccccgtcaatgtcaggtaataatttacgatgatgagaaaaggctaagggacagttagaaagggcaaaaaaggacagaacatgaatctgaggatattcctccaaagggttgatgttaaaaatcaacaggacagaatgggaacagggttgttttattttcttgaatatcaggaatgttttcaccttagctcaaatgagccacagcgctaattcac

SEQ ID NO: 658349 - DNA, 548 bp, Homo sapiens
ataatagtcaataagccaagagatatttctttccaaccttgtgagctccccagtatgatgtggcaagcttgtaaaccaatgctaatgctgaacatgaacactcacacatgcacatacacacagggcccttaaacgagacctttccaactgagtacacacacgctaataagccctgccttgttttgggggatccactaagcagctctcagaaaattcatcctgagagctaatctaagtgaactatattgttctacratctccatcttccatgaaataaccctttctacacattaagcaactgatggcctggaaagcactttgtaaactataccagtaactggtaacacagatccatatagatgaccaagttcccccaaacaaaaccagagctcactcaacacctgaaataattctggtggtttacaaggcaacagttaggcacatgtatctctccactgccctctcctctccttccccatcccctgaaaaaaatctaattctgaattccataacagctttaggacagtttacaagtcactattcatctt

SEQ ID NO: 658350 - DNA, 548 bp, Homo sapiens
ataatagtcaataagccaagagatatttctttccaaccttgtgagctccccagtatgatgtggcaagcttgtaaaccaatgctaatgctgaacatgaacactcacacatgcacatacacacagggcccttaaacgagacctttccaactgagtacacacacgctaataagccctgccttgttttgggggatccactaagcagctctcagaaaattcatcctgagagctaatctaagtgaactatattgttctacaatctccatcttccatgaaataaccctttctacacattaagcaactgatggcctggaaagcactttgtaaactataccagtaactggtaacacagatccatatagatgaccaagttcccccaaacaaaaccagagctcactcaacacctgaaataattctggtggtttacaaggcaacagttaggcacatgtatctctccactgccctctcctctccttccccmtcccctgaaaaaaatctaattctgaattccataacagctttaggacagtttacaagtcactattcatctt

SEQ ID NO: 658351 - DNA, 505 bp, Homo sapiens
caaggagctgcaaatgcagaactcactgggcaaaaactgacagatgataccaaagtcgtgaaagtatctcatctcaaaaaagataactacaatctcaaactttcaaaaaatgcagatcttgctcagaataaatcgttaacaatctcaaagtgcatttggatgcagaacgtatatttacctatataagctctttcttgttctcgagtaagtccagggggaataactgtaggcattcctggaatcactgtcttctgttccattgtgtcttggttccagcggctcctcttccgcttcttacttgggaagtctaaaaggcagagacaaaatccatccgatgtaaatayaagtagttatcaacagacagctaagggtatttaaggtactacacagaaactcagcagactgtgaagctgagagcttaacctaaaacttaaacattaaaaaaacagaaaacaaacctcagagatcagagatttaaagcttatggccactacaagggtatgtg

SEQ ID NO: 658352 - DNA, 551 bp, Homo sapiens
tcacaatgagctctaagaatgtgtcaaactgtcaattgatttcaaagataacctaacaaggttaataactcttatcttccggatgataacctaataactaagtattgcacatctttagtgcccaaagctgctctatttgtcatgttatttttcaggaaaatacaaatggctattcaaaatttacatgatgcatttgcaccaggtgagggttaaatcataccaggacccaatgctgaaataaaaaatttgaataatttaagtgaaaagagactcaagtcaccacataacatggtgaggtagaagcatgatgaatgcaaaagtatatccagtactacattcagttgtacatcgtgatttaatttcagaaagataacatcctcaatcacattaacttaatgattttatttgaattttattttattttaattgtattcaaaccttacttgaaaatttgctctggtcttataattgaatatacattataaatattagggtctaattcataawgcaatggttttatattttaaatattattataataaaaatgcata

SEQ ID NO: 658353 - DNA, 614 bp, Homo sapiens
aagtgtttagttgaggatttttgtatctgttatcatcagggatattggcctgatgtttcctatttttgttgtctttaactgatttttgtatcagactgatgctggcttcatagaatttgttttggaggagtcccttctggaaatcaaaaagtttctgagacaggtttcaatcaatttaggaagttgaaactctttcttccayttgttttattatattgataaagatttcaattatattttgaaatttttaagtgagcttttcagttttattagctctgattgctttctctttaagatgtctacatttttattttctggattgcactacagatttctttgtgttaattttcaaccttatcttggatctcattgagtctccctgcaatccatgctttgaattctccatctgtcatctctctgcccccattttagctagagaccattgctgtagagctagagcaatatttgatggagtcaaaacatccaaattattcatgttggcagaattctgtttttttcttatctggacagggtagagtcttttggctctggttctctattcctgtgcatttctatcagtaggtttcgtattggtctttgcagtttgacccaca

SEQ ID NO: 658354 - DNA, 614 bp, Homo sapiens
aagtgtttagttgaggatttttgtatctgttatcatcagggatattggcctgatgtttcctatttttgttgtctttaactgatttttgtatcagactgatgctggcttcatagaatttgttttggaggagtcccttctggaaatcaaaaagtttctgagacaggtttcaatcaatttaggaagttgaaactctttcttccatttgttttattatattgataaagatttcaattatattttgaaatktttaagtgagcttttcagttttattagctctgattgctttctctttaagatgtctacatttttattttctggattgcactacagatttctttgtgttaattttcaaccttatcttggatctcattgagtctccctgcaatccatgctttgaattctccatctgtcatctctctgcccccattttagctagagaccattgctgtagagctagagcaatatttgatggagtcaaaacatccaaattattcatgttggcagaattctgtttttttcttatctggacagggtagagtcttttggctctggttctctattcctgtgcatttctatcagtaggtttcgtattggtctttgcagtttgacccaca

SEQ ID NO: 658355 - DNA, 614 bp, Homo sapiens
aagtgtttagttgaggatttttgtatctgttatcatcagggatattggcctgatgtttcctatttttgttgtctttaactgatttttgtatcagactgatgctggcttcatagaatttgttttggaggagtcccttctggaaatcaaaaagtttctgagacaggtttcaatcaatttaggaagttgaaactctttcttccatttgttttattatattgataaagatttcaattatattttgaaatttttaagtgagcttttcagttttattagctctgattgctttctctttaagatgtctacatttttattttctggattgcactacagatttctttgtgttaattttcaaccttatcttggatctcattgagtctccctgcaatccatgctttgaattctccatctgtcatctctctgcccccattttagctagagaccattgctgyagagctagagcaatatttgatggagtcaaaacatccaaattattcatgttggcagaattctgtttttttcttatctggacagggtagagtcttttggctctggttctctattcctgtgcatttctatcagtaggtttcgtattggtctttgcagtttgacccaca

SEQ ID NO: 658356 - DNA, 385 bp, Homo sapiens
aattatatactttaaaatgattacagtgatgaatttyattttatgtgaattttgtctcaacccctctacccacagcttacatttatacttaatcatcaaatattgaatgcttttcccctaacacaaggataaccactttcatcacttctcatcactggctagagaacctagccagtgtagtaagggaagaaaaagagataaaaaacatacatattgtaaagaaagaggtaaaactgtttaatgcatagctcacataattagttttgtagaaaatcctgtggaatctacaaaaatgctcatgaaacttgtgagtttagaaacatcacaggatacaagatcaatatacagaaatcaattgttttatatactggtgataacaaaaatt

SEQ ID NO: 658357 - DNA, 539 bp, Homo sapiens
cattttttcttttgtcacttgtgcttttggtgtcacatctaagaaaccatagcttaatctaaagtaatgaraatttattcctgttttctcttaagagttttatatttttagatttacacatggatctatgatccactttgagttaatccttgtattttgtgtgaggtctggagcaaacttcattctttcgcatgtggatattcagttatcttggcatcatttcctgacaagactttcttattgaattgtcttggtactcttgtcaaaaatcaaatgactataaatgtgagggtttatttcaagactctaaatttgattccattgatctatatatctactcatatgccagtaccacattatcttgaatactgtagcttcgtagtaaattttgacattgagatgtggggttcctccaacgttgttcttctttttaaggattatgtgaatattctgtgttccttgcatttccatataaagttcaggatacactagtaaatttctacaaaagagaatccagctgagattttggtagggaatac

SEQ ID NO: 658358 - DNA, 635 bp, Homo sapiens
tctgctaccttcagactttttttatgcagcctttctcacctatctcaggcttcataaaattgaagagcatyaggatcttatggattaggctttggtttaagggaaggttgtggctggattgatcttcagtgcagaccacaaatagtttctctgtttaggaattagggctgttttgttttcttgtcattcatggagtaatacttttaatgctttcttcatgctttccttgctaattttaataatttctgattttttatttaaaatgagaaacatgtaactctttcacttgaacatttagagacgattgtagtgttattaattttaatattggcctaactgaaattcaatcattggtctaatttcaattgttgtattacaggcatagcaaggccaaggcagaaagagagagccagggcaaacaggctgctcagtggaacagtcagaatacaaacatcatttatctattagttttgttgtcttacacgggcttgtttgtggcaacccaaaacaattacaatagtaacatcaaagatcactgatcacaaatcaccataacagatataataataatgaaaaagtttgaaatactgtgagaattactgaaacgtggcagaaagatacaatgtgagcacaag

SEQ ID NO: 658359 - DNA, 578 bp, Homo sapiens
aaacgttaaagctcaaatgaagaatgtctttgatgggctcattagtagactcaacatggctaacaaaagaatctctgagcttgagaatatttcaacagaaacctcagacacaaaaaagcaaagagaaaaaagactgaaaacaaaaaacctatccaagaactgtgggacaactgtacaagttgtaaataaatgtaataaggatactaggagaacaaaaagagaaaggacagaagaaatatttgaggtaataatgactgagaatttctccaaattaatgtcagacaccataccacagatccagaaagctcagagaacactaagcaggataaatgccagaaaaaaaaatacatctaagcatattatcytcaaattgaagaacactaaaaagaaaatcttgaatgaggccagaagaaaaaacaccttacctatagaaaagcaaaaataaaaattacatctgacttctcttcagaaactgtacaaataaataaagtggagtgaaatatttaaagtgttgagacaaaaaaaaacctaaaattttgtactctgaaaaattatatccttaaaaaataaaggagaaa

SEQ ID NO: 658360 - DNA, 542 bp, Homo sapiens
atataggtaaatagaaatcacccaactgaaaaacmaagaaaaagtagaaaaagttatttcaaaactgcagagagaaaataaagaattttttagactaacaaaaactgaaagtcattttctgtagaattgcactaaatgaaatgttaaagttatgcagaagaaatatattatctgacataaacttgtgcctacacaaaaattaaagagcactgaaagcacggtgctaaagctaaagctaaagctcatgcctgtaatcccagcattttgggaggccgaggtgggtggatcacctgaggtcaggagttcaagaccagcctggctaacgtggcaaaaccccatctctactaaaaatacaaaaattagccaggtgtggtggctaatgcctgtagtcccagctactcgggaggctgaggctggagaattacttgaacccaggaggtggaagttgcagtgagccgagatcgtgccattgcacgccagcctgggcatcagagcaagactccatctcaaaaaaaaaaaaaaagggaatatataaatattgg

SEQ ID NO: 658361 - DNA, 553 bp, Homo sapiens
ccctcgccccttttctgaatttttccttacccctttccttggaataaagcaaacaccagacccaaatggattttaagtgacactttcccaagagtctggagaggggacagagactggacgtggtgtgtcctgcctgagccgagtcatctggttacgagggcaggggcaggctggggtggggctcatgcgccccggaagcaccctggctcctcgctctcccatgcctctccctttatgtcctctgctgtccagcgcctgggccccggccctccctgggacaccatcctgccctgcccsagtcgtggctctccagtctctttcggggactcgcccctggcacccactagatggcgctcccggccactcagctccccctgcctcgcttggggtggtgctggacgtcgggagcgctggcctctgctctgctgatttgcaggtgggagtgcagggtgagcccggcgcaggggataggaggtgggggagtcgagagctggagtcaggcgccgctcacgctgggatgacggagtgttaacctcagactctgggtcccttt

SEQ ID NO: 658362 - DNA, 553 bp, Homo sapiens
ccctcgccccttttctgaatttttccttacccctttccttggaataaagcaaacaccagacccaaatggattttaagtgacactttcccaagagtctggagaggggacagagactggacgtggtgtgtcctgcctgagccgagtcatctggttacgagggcaggggcaggctggggtggggctcatgcgccccggaagcaccctggctcctcgctctcccatgcctctccctttatgtcctctgctgtccagcgcctgggccccggccctccctgggacaccatcctgccctgcccgagtcstggctctccagtctctttcggggactcgcccctggcacccactagatggcgctcccggccactcagctccccctgcctcgcttggggtggtgctggacgtcgggagcgctggcctctgctctgctgatttgcaggtgggagtgcagggtgagcccggcgcaggggataggaggtgggggagtcgagagctggagtcaggcgccgctcacgctgggatgacggagtgttaacctcagactctgggtcccttt

SEQ ID NO: 658363 - DNA, 562 bp, Homo sapiens
tgactggggcttctgcctttctttcagagatgccttgcccagagaggaggaatctagagacgcactctggctactgtggctttgaggtgctgcggtgggctccactcagtttgtacttcccagagggtttgtttatactatgaggggaaaaccacctactcaagcctcagtaatagtggacgcccctctccccaccaagctcgagcatcccaagtctactttagactgctgtgctrgcagtgagaatttcaagccagtggatcttagcttgctgggctctatggaggtaggatccgctgagcaagaccacttggctccctggcttcagcctttccaggggagtgaacggttctgtctcaatggcattgcaggtgccactggggtatgaaaaaaaactcctgcagctagctcagtgtctgcccaaagagccaccctgttttgtgcttgaaacccagggaccatgtagtgtaggcacccgagggaatctcctggtttgtgggttgcaaagaccatgggcaaagcatagtatcttggccagatagcaccatccctcacagcacga

SEQ ID NO: 658364 - DNA, 562 bp, Homo sapiens
tgactggggcttctgcctttctttcagagatgccttgcccagagaggaggaatctagagacgcactctggctactgtggctttgaggtgctgcggtgggctccactcagtttgtacttcccagagggtttgtttatactatgaggggaaaaccacctactcaagcctcagtaatagtggacgcccctctccccaccaagctcgagcatcccaagtctactttagactgctgtgctagcagtgagaatttcaagccagtggatcttagcttgctgggctctatggaggtaggatccgctgagcaagaccacttggctccctggcttcagcctttccaggggagtgaayggttctgtctcaatggcattgcaggtgccactggggtatgaaaaaaaactcctgcagctagctcagtgtctgcccaaagagccaccctgttttgtgcttgaaacccagggaccatgtagtgtaggcacccgagggaatctcctggtttgtgggttgcaaagaccatgggcaaagcatagtatcttggccagatagcaccatccctcacagcacga

SEQ ID NO: 658365 - DNA, 543 bp, Homo sapiens
ataaatatgaatgaatgaatcatatggtctcaattccacttatataacaatgacttcaaaatctgtatttagaactcattcctctccccgagccagactcatttacgtagtaactattaaatatcccatttgtatcacaaaactcaytatttcaagagtgaattaatgcttcttttggttcattgcttccttgcttcttctggttcattttctaccctagagggtgacacatgctactaatacaggagccttctttactccatgttttcccttcaagcaaccgtatctaaccaatcattaatcctgccaaatgtgtatcacctaaaaatatcctaaatgcatttcctcctctgcattctaactactgctgcccttgttctaggactccactctcccacatcaaccaacttttctccttggccccagtactgccctccttaaatccaacttctatgcacttgccactgtgaactatctgataataatttttttcttgcaatgttgttccttagtgacctataatttatatttatcccaatgtac

SEQ ID NO: 658366 - DNA, 596 bp, Homo sapiens
tcagattgaagtactccctttaacatttcttgtatgacaggactggtgttgatgtaatccttcaactttgcttgtctgagaagttctttatttcttcttcatgcctgaatgatattttcmatagatacactatcctaaggtaaatgttttttttttttccttcgtcactttaaatatgtctttccactctctcctggcctgtaatgtttccacagaaaagtctactgccagacatacagagctctattctatgttatttgttcttttctcttgctgcttttataatcttttcttcattcttgacctttggaagtttgattattaaatgtcttgaagttgtcttctttgggttaaatctgcctgccgtttattatagcctcttgtacttggatattgatatctttctctaggtgtgggaagttctctgttattatctctttcaataaactttctacccctatctttttctctacctcttctttctggccagtaacttctgtttgcccctttgaggctattttcttgatcctggaggcatgcttcattttaaaaattcatttttcttttgtcccctctaactgtatattttcaaatag

SEQ ID NO: 658367 - DNA, 504 bp, Homo sapiens
tttgccagtcctttgtcattttgaatttggcatttgaaggaaagtttaaaactcctgccaaagcaccaatattcccattgcaaactttagttagatgaagcggtgatttctagtgctttccataagtggattttatataatgtaaaaatgtttagggtgaagctacaaaaataaataggattgtcatwtttaaataacatactcacacaaaatttactctaacaggaaagttgtggtaatgcaatttttcacaaacaggaccaggataaaaaaaatataatgtttgtcatgaaaagtcaaaaaaaattgtactatttttatttgtgtctgaattgaataaggaacatcataaagacaaaagaggtatattgccattcccaatatgatatgctggtactgctttggagctagaagggaccttgatgatgccatcttccttcactagttgtctaacaaaatttggagccctagaaagaaggtcaggtggagcagaaagggcacaga

SEQ ID NO: 658368 - DNA, 618 bp, Homo sapiens
gtctcatggattacagcaatgggtgagtgaattatcgtagctgaagatagtaatcatggtcatttggggagaggatctagccattctgagagtaaagtaatttgkgatatggcatgctcacaggtgttggggctttatctgctgagtggggtagaggatttaggcattcggttatctccttgttttgggagcctctgcagatttagtacctatgagctgcggacactggaagggtggctggagatggagagatgtcttgtttccaggagtcagaataggtttggtttgcagtatttcaagtggagcaggccctctagggatgtgagagcagcatgccacttagtatgagtctaagggaattcagaacattttcttgactagttataagaaaacttggccatagggacacagaaacattgcactccatccttagaggataaaggaaaagagataaccagttggcaatgtctgctttctcaaaccaagatggcagaatcatatcgtgcttcttaaatttgaaatgtcagccctagcttgtctcaggagatggctgaagccattgagtctcaccctgattaactcagattacagttggcccttcctcatccctcagctcct

SEQ ID NO: 658369 - DNA, 603 bp, Homo sapiens
cgctgatgcaagatatgggatgccacagccttgggcagctctacctctatggctttgcagggtatggcccccctcctgactgctttcacgggctggcgttgagtctctgtggcttttccaggctcacagtgcaagctaccggtgaatctaycattctgaggtctggaagacagtggtccgcttctcatagctctactaggcagtgccccagtggggactctgtgtaggggcttcgatcccacatttccctttctcactgggctagcagagattctccatgaagccttcaccccttcagtaaacttctgcctgcatatccagacatttccacacatcctctgaaatctagttagaggttcccaaacctcaattcttgacttctgtgcaccctcaggcccaaaaccatgtgtaagccatcaaggtttggggtttgtaccctttgaagccatggcctgagctataccatggccccttttagtcatggctgggacacagggcaccaagtcctgaggctgtacaaagcagcaaagacctagtcctggcctatgaaaccattttttctttctaaggctctgggcctgtgatgagagggactgctgggac

SEQ ID NO: 658370 - DNA, 603 bp, Homo sapiens
cgctgatgcaagatatgggatgccacagccttgggcagctctacctctatggctttgcagggtatggcccccctcctgactgctttcacgggctggcgttgagtctctgtggcttttccaggctcacagtgcaagctaccggtgaatctaccattctgaggtctggaagacagtggtccgcttctcatagctctactaggcagtgccccagtggggactctgtgtaggggcttcgatcccacatttccctttctcactgggctagcagagattctccatgaagccttcaccccttcagtaaacttctgcctgcatatccagacatttccacacatcctctgaaatctagttagaggttcccaaacctcaattcttgacttctgtgcaccctcaggcccaaaaccatgtgtaagccaycaaggtttggggtttgtaccctttgaagccatggcctgagctataccatggccccttttagtcatggctgggacacagggcaccaagtcctgaggctgtacaaagcagcaaagacctagtcctggcctatgaaaccattttttctttctaaggctctgggcctgtgatgagagggactgctgggac

SEQ ID NO: 658371 - DNA, 586 bp, Homo sapiens
  misc_feature 546, 547, 548, 549, 550, 551, 552, 553, 554, 555, 556, 557,558, 559, 560, 561, 562, 563, 564, 565, 566, 567, 568, 569,570, 571, 572, 573, 574, 575, 576, 577, 578, 579, 580, 581,582, 583, 584, 585, 586: n = A,T,C or G
ctttcctccatgtgaggatagaatgggaagtctgcaaccttgcaagaggcctctcaccagaaatcaacacactggcaaactgatcttatacttccagcctccagaactgtgaaaaataaatttctaaagtttataagccaccctgtctaaggtatttgtaaaagcagcctgaactgaataaaacaagtacgtttcttgtagatagaatataactatatgccttagatttttattcagtctaacaattttgtaattggtgtgtttataacacctatagaaaatgctattattgatgtagttggattataatatacagatctgctaggtatattgtatttgttcaatatgttgttttattgttctttttctgaccacttgagttaacttagcaactttttaatgcaattttcacagtttttctttcagcactttaaagwtgtcattctattatctttcaatttgcacagtttctgagaagtcttaaataattcgatataattgctgtttttaatatactaaagtagccaagtctattgctgagaatgnnnnnnnnnnnnnnnnnnnnnnnnnnnnnnnnnnnnnnnnn

SEQ ID NO: 658372 - DNA, 570 bp, Homo sapiens
tttcacatcccttttttggaggcgggaacataattcaaccaaaacaccagtttgcttaatttcccaaaacttcagtttccttatatgaaaaatgcaaataatactgactgtctgtagcattaattgaaagattaaaataaatggactaagaaataaactatggaaaaccaactagtatagcagctgctgtatcacaggtgctcaaatatatatacggtcaccctgttatccagtcatatgtgtcatatatacacacacacacacacataaacacacagatttgtgtatgtgtatgtataaaactttcccttttctcccaggtatttatgtctctttggtgttcacacaaaacatgatgtatttttctttycattcgttacattatatttgaactatatatctatttatctatctggcttgctactactttgatattagaaactgttgcagtaatttttagattgatacctaactttgtttactaattaataatttacttatcaagtaaaggactaaatggaaaaatggatggatgaacatgactacagcttaccaaaaatgccctttata

SEQ ID NO: 658373 - DNA, 400 bp, Homo sapiens
tttgaaatttaagctccatttaggagccagaaccaattatttataatactagaatggcctgaaataatcttgtattatcctgaaaaaaaaatctgaagtgggaataagcccacacctcatttatgtgtgtaaaacaatctcagctttacatcttttaagaaaagtctgaataactgccttatttccacatttctttgyataaataaggcagtgcaaaagctttgtcagctgattaaatttatatgcaattttggtaagacattgttttctagttccacaatatatttttgtccagtccaccgaaatttgagtttgattcactcacaaagctgatcctcccaacttcatttaataaaatgtaagaagactttaaaagatatattaggaataactagttaga

SEQ ID NO: 658374 - DNA, 658 bp, Homo sapiens
tattagagctttagatattgacaaagatcctggtagtgtacaacataatccaaaggaagaaggaatattttattagaagcctagccactctggaactcaatatatataatagtaaaggttgttgtaaattcaaagcaaaaaacaaaacaaaacacaaaatctcataccctttctcgagtgcaccatcatttaaaaaccacaggagtggtggtaattgtgacactgtggagctgtccttctttgatgtctcagtcactcagtaagccatgtaatttaaattgaccctctgagtgaccaagttgctctgaaaattttccaagtacatgttacaatgagaatgagagaaggwggagggaaaggcggggacatcatgaaggtagaagaggaggaggtttagaatcaagcacaaagagggctcaaaattacgtggaaattggggctggtcagtcagttagccaggggactaatgactttatgcctgctactctgcagtctaccatcattagggacatcttaaacatagaaaggaaggaacacccaatttcacttcaggcacccagccacaggaactttcctaaggttgagcctttgcgttgaaagtgagaccgttatctaaggattcctctccacaccctgattcctgaggagtgttcaaaga

SEQ ID NO: 658375 - DNA, 596 bp, Homo sapiens
aaggaatgtgtcttgcacaaattagcctatagacctttctaatcaggaccaatatgtgacatatacaaaggcaagatcagctgtaaggaaggattcactcctttaccaccaagccatggagactgcttgagtcatcatggccttggtctcttgatttcccttatgttatttgagtagaaactcaggcaccaatgatgcccccagttaaccataaccataatggtagcatccaataccatttttaaaaaagtcagggttgtagacaaaagactgatgtagaccagtggagaagacaagagggagttatgcagcctactctgagagcaaagtctggtttggatcttctctgctacttttgtacatttcatgctagaggcagaacaagtatccagggaacactttggaactttcctaaatttacagaggggcctgtaacattcaattagggggaacacagaatgttctactctagcaaaatttataggtagtataagaaattccatcaagtgtcttgtgkaaaactgaatgcataaaagtaaggatgtggataatgggatcattcaatatagatttcaaaccaaagtccgctgcttaat

SEQ ID NO: 658376 - DNA, 513 bp, Homo sapiens
aatattttcttatgtgtttatatgaatatgtaaccacattgcgagaacatgattcatcttagcaccaggcataagggacaaatttggaagggaccgcctacttttcaacatgtggggsatgggggtggggagagtattccagtaagtgagaagacttttttttttcagttgggactatgaaaagacaacaacaacaaaaatatttaaaaaggcaagacccaccctctggaatgggaactcggagctttactctaagagcttatgcagtggactagggttgtggagtggttctgctgtcacctctggtttttcttccctaggaatctagtgagaacctctgtgtgctcgtggagcaacctctatgctcatctcatgtgggctttcttctggagattttacattcttttcattctacattatctcatctggggtaaaactaccagttcttgttttagtaactttcatgaacaacgttaatcattgcttattcaggtacttaaagtgcattaatta

SEQ ID NO: 658377 - DNA, 619 bp, Homo sapiens
tttacagtagtgcataaatattattatttcacaagttctcatagagtatgttaactcaacatgttacctgttttaagaaagaaagataaaaatataaccacacattttgtttttcaataataattttgcaaaccatgaatagtaatgtacctatttaataaaatgatattatgataaatgtacttttaagacagagaaacatttggggactagaagtattaatcatgcaagtacatagacttctatctcataaacaaaagttggctattaaagcacctatgatgtggtactgggcttgaacccartgcatatccttggccaagagtccctatcaggataaactcctctgagctagagagtgttggttcatttttaatcattcactcattcattcaaggaacaagtctttatagaacacctactctgtcttggcactttgctagagatacaaatgttaataagatttagtttctattcacagtgaaatcacagtactctgagaaaaaagcctatgagcaaatcattgcaaaattataaataccatcataaaggaatattccatgtcttatagaagtaatataattaatactgcaggggtacagtatcatcaggggagcta

SEQ ID NO: 658378 - DNA, 619 bp, Homo sapiens
tttacagtagtgcataaatattattatttcacaagttctcatagagtatgttaactcaacatgttacctgttttaagaaagaaagataaaaatataaccacacattttgtttttcaataataattttgcaaaccatgaatagtaatgtacctatttaataaaatgatattatgataaatgtacttttaagacagagaaacatttggggactagaagtattaatcatgcaagtacatagacttctatctcataaacaaaagttggctattaaagcacctatgatgtggtactgggcttgaacccagtgcatatccttggccaagagtccctatcaggataaactcctytgagctagagagtgttggttcatttttaatcattcactcattcattcaaggaacaagtctttatagaacacctactctgtcttggcactttgctagagatacaaatgttaataagatttagtttctattcacagtgaaatcacagtactctgagaaaaaagcctatgagcaaatcattgcaaaattataaataccatcataaaggaatattccatgtcttatagaagtaatataattaatactgcaggggtacagtatcatcaggggagcta

SEQ ID NO: 658379 - DNA, 332 bp, Homo sapiens
taagactttcttgggattcagcagtttggaaacactgcttttgtagaatctgcaaagggatgtttgtgaggtgattgatgccaaagttgaaaaagcaaatatcaaagggtaaaaactagaaggaagttatctgagaatccggtttgtgatgtgtgcattcakctcacagagttaaaccttggctttgatccagcagtttggaaacaccgtttttgtccattctgtgaatggtcaattgggagctgaaagaggccaagggagacaaagtgaatattcaaggatgaaaattagaaggaatctatctgagacactgcttggtgatgagtacattc

SEQ ID NO: 658380 - DNA, 599 bp, Homo sapiens
gaaaaatggggtatccatcccctgaagcatttaccctttgcattacaaacaatccacttatactyttttagttatttttaaatgtacaattaacatattatcgaccatagtcacccttttgtgctatcaagtagtaagtcttatatactctttctgattatttttctacccattaactatccttatctcccaccctctcacctccccgctacccttcctagcttctagtaaccatccttctattccccacttccctaagttcaattgttttgaattttagatcccacaaataagttagatatcatgatgtttgtctttctttgactggattacttcacataatataatgacctcgggtcttatccatgttgttgcaaatgagtgaatctcattctttttaatggctgaatagtactccattatatataggtaccacattttctttatccatttatctgtcaatggacacataggttgcttccaaattttggctattgtgaatagtgctgaaacaaacatgggaaggccaatatctctttgatatactaacttcctttcttttaggtatacattgagcaaaaggattactggatcatata

SEQ ID NO: 658381 - DNA, 600 bp, Homo sapiens
catgggaaatagagcccaagataataactgtaatcttagtgggatgagaaggcagaggttggaggctgggattaccaaagtagggaggaattcaggatgcaaaatgcccccaaaaaagacctaaagagaaagagcccagaaatctacagcaaaattcacctcaaattattaactgagtcctaagcttacaaatatgtaggacaggatgccaagaaacccaaaacaaaccaagtaaagaggcaagtagacattttggcagcccatcaatggtgaggagatgggctggcaagcaagcactgccaagayggaggagcactgaaaaacccctgagctcttatgtgtgactctaaaaaagccatgccttaagagtatggacaaaatagcaatagaaaaattctaacaaagccccaaaccaagccttgacagaatcagaagtacgagaagaaaaattaactgtctttggaggaaaaaacattctccagactctctgcaaatctttcgttcacattatctagtatccagtaaatattatgaggcatgcttaaaaaaacaagaactagtgaaaattgagaaaaaaaatagtcaaaccagaaagactca

SEQ ID NO: 658382 - DNA, 600 bp, Homo sapiens
catgggaaatagagcccaagataataactgtaatcttagtgggatgagaaggcagaggttggaggctgggattaccaaagtagggaggaattcaggatgcaaaatgcccccaaaaaagacctaaagagaaagagcccagaaatctacagcaaaattcacctcaaattattaactgagtcctaagcttacaaatatgtaggacaggatgccaagaaacccaaaacaaaccaagtaaagaggcaagtagacattttggcagcccatcaatggtgaggagatgggctggcaagcaagcactgccaagatggaggagcactgaaaaacccctgagctcttatgtgtgactctaaaaaagccatgccttaagagtatggacaaaatagcaatagaaaaattctaacaaagccccaaaccaagccttgacagaatcagaagtacgagaagaaaaattaactgtctttggaggaaaaaacattctccagactctctgcaaatctttcgttcacattatctagtatccrgtaaatattatgaggcatgcttaaaaaaacaagaactagtgaaaattgagaaaaaaaatagtcaaaccagaaagactca

SEQ ID NO: 658383 - DNA, 613 bp, Homo sapiens
cagccaaaccaaagtagaccttctttctctaaatacaccagagctgttcacaaccccaagcattggttcatgctatctcatcttcttgggattttcttctgttcttatttcactcttcctacctgggagcattccacttaattttcagtgctcagatcaaatgccacctcctccatgaagtcttaagaaatttctaccctcttccaggcaaaattagtcactccttcctctacatatcttcatatctctctattcacagtgctaatacacttaatagcagcttgggtaggccacctttcttaactccctccaaaaggatctggattcctcctttggtttcctaaaacaaattttagacctctgttatagtctataccctattccactttgtgtgtacatggtgtgttttataacctgtttcttaaattagacaacaatccccctcaaagatagacactgccttctcctttaatttcccagcatgaagcaaagattccacagttttaatggayactaaataaataattctttaggcaagattcagattagacatcatcatctcaggaagcctttccaagccctaacaagtggtagtgagctgcatctgtcacat

SEQ ID NO: 658384 - DNA, 511 bp, Homo sapiens
aacccacagaaactataaagcaaccacacaataaaaccttcaaaactatcagttaacaacttcatgacagtatcaaaacttcacatatcaatattaatcttgaagacagaargtctaaatgctgtacttaaaaggaacagagtggcaatttgaataaaataaaaaaagacaacccatctgccagctgttttcaaaagaaccatcccacatgaaacaacacccacaggttcagtgtaaaagacttaaggaagatcggttaaacaattagaaaataaaaaagaaacattatttttacataaaaacatactttaaaccaacagcagtaaaaaaagggacaaagaaatgcattacataatgataagaagttcaatttaacaagaagactcaactattcatcaaacattagagcacttttagtcataaaagaagtacttctagacctctgatagacttaggcagctacatgataatagtggaggaatttaacactctactgacagcatcagacaga

SEQ ID NO: 658385 - DNA, 511 bp, Homo sapiens
aacccacagaaactataaagcaaccacacaataaaaccttcaaaactatcagttaacaacttcatgacagtatcaaaacttcacatatcaatattaatcttgaagacagaaggtctaaatgctgtacttaaaaggaacagagtggcaatttgaataaaataaaaaaagacaacccatctgccagctgtyttcaaaagaaccatcccacatgaaacaacacccacaggttcagtgtaaaagacttaaggaagatcggttaaacaattagaaaataaaaaagaaacattatttttacataaaaacatactttaaaccaacagcagtaaaaaaagggacaaagaaatgcattacataatgataagaagttcaatttaacaagaagactcaactattcatcaaacattagagcacttttagtcataaaagaagtacttctagacctctgatagacttaggcagctacatgataatagtggaggaatttaacactctactgacagcatcagacaga

SEQ ID NO: 658386 - DNA, 590 bp, Homo sapiens
ttttaaaaagttttttagatgttaatttttaaagcattagaaacacaaattaaacattaaatataagtagcaaatgttgtatcttgaattttacctcaaatttaattttcttagttaattttaaagtgtcattgcttaggaaatactaaaaggatttgcttttgtaagaaatagttcaggaaaatcatcacgacatgaacaagaaatggctttactacatattttcaaatcttggtgagaagaaaattgaacgttatcttccttctcttcatgaaagatataccatgatctacctttattaaccatgttatgtccctatgaacttctctttgcatttattcaggaaaaaaaagttttaatttttatgctcacaagagtagctccctctttggaaactctcctcagaatcaagttttttttttttttatgttttggggttttaatgcttcccacatggtctatactacttatttaatcagtacctaataraaatcaagattcacagtttggctcttaagaatactttcatgatggtgattatagtattacaagaatcagtaattccatttttctattttccccctaatttt

SEQ ID NO: 658387 - DNA, 568 bp, Homo sapiens
acaaagtggtacctcaggaacagaaaaccaaacaccgcatgttctcactcttatataagtagaagttgaacaacgagaacatatgggcacagggaggaggtacatcacacactgctgactgccagggggtggggggctcggggagggatagcattaggagatatacctaatgtagatgacaggttgataggtgcagcaaaccaccatggcacgtgtatacctaagtaacmaacctgcatattctgcacatgtgtcccagaacttaaagtgaaataataataaaaaagtggtgactacgtattttagtttgaaaaagtctaaaactgttactcacttacttgaagactgtgcttggcatattatgtatagcagggtcagcactttttttctgtaaaggctacatgatacttatttttgcctttgtgtactacacacactctgttgcaactactcagctctgacaatgaaatgtgggaacagccatagataacattaaataaataattttggctgagttccaatgcctactcaccaaataatggcaataagccagatttggctcactgtc

SEQ ID NO: 658388 - DNA, 600 bp, Homo sapiens
tacacaatgcttgcctgtaaccccattgtatcttgaaagtaactaatttttttttttaatggtctaggctcacaggcagaagggacttacctcgctcacatgaggctttggactgtgaacttttaagttaatgctgaagtgagttaagacagggggactctttgagamgggataatagtattttgcaatgtgagaagcacatgaagttttggaggcaccagaggcagaatgacagtgtttggatttgtgtccacaaccaaatctcatgtcaaattggaggtggggcctggtgggaggtgactgatcatagggtcagatgtcctcctgtctgttcttatggtactgagtgagttctcatgagatctgatggtttaaatgtgtgtggcaatttcccctttactttctctctctcctgccaccatggtaagttttgcctggttgcctttcaccttccactatgattgtaagtttcctgggaccccccgagtcatgtttcctgttaggcctacataactgtgaataaattgagcctctttatcaaatatatagtttgcaaatatatatgtatatatgcctagactcttgtaaatacaatactct

SEQ ID NO: 658389 - DNA, 533 bp, Homo sapiens
tggtttaaatgtgtgtggcaatttcccctttactttctctctctcctgccaccatggtaagttttgcctggttgcctttcaccttccactatgattgtaagtttcctgggaccccccgagtcatgtttcctgttaggcctacataactgtgaataaattgagcctctttatcaaatatatagtttgcaaatatatatgtatatatgcctagactcttgtraatacaatactcttgtaaacacaaccaatatatttctggtatggttcttgtttacaggtaccaagacagacctgatcataaaaccaataacaaagaatgtcagaagtcttttacatggattaagaaaaaaatgcgagcaagaaggcctaagaaaggagaggtttcaatagatggtacactcggttgttcccttagaccacctttgttagtcttcgcctcaaagaaaaacatttccactgaaaaccacataatctggtttaacagattaaatatataaactatgatgtgctgggagaacttcagctttttttcc

SEQ ID NO: 658390 - DNA, 533 bp, Homo sapiens
tggtttaaatgtgtgtggcaatttcccctttactttctctctctcctgccaccatggtaagttttgcctggttgcctttcaccttccactatgattgtaagtttcctgggaccccccgagtcatgtttcctgttaggcctacataactgtgaataaattgagcctctttatcaaatatatagtttgcaaatatatatgtatatatgcctagactcttgtaaatacaatactcttgtraacacaaccaatatatttctggtatggttcttgtttacaggtaccaagacagacctgatcataaaaccaataacaaagaatgtcagaagtcttttacatggattaagaaaaaaatgcgagcaagaaggcctaagaaaggagaggtttcaatagatggtacactcggttgttcccttagaccacctttgttagtcttcgcctcaaagaaaaacatttccactgaaaaccacataatctggtttaacagattaaatatataaactatgatgtgctgggagaacttcagctttttttcc

SEQ ID NO: 658391 - DNA, 618 bp, Homo sapiens
tatttgcattttgggtgagttcacggtgaaataagaaggttctcaacgttactatcatcctgggtattaactgaccatcagtctgtttgatcatgacgaaaactaacacaacattaaaatacagtaataatgatcatattgaatgatcattactgaatgactctgaaaagactcgttataactatatttaaggaagaagaaatttccacaagttaaattgttcagagatctgattttttttgtttgtttgttttcactgtctctgacatcatgatgccaaataaacagtttttctcaattattattatatataaagtttaaaagccagtataaatcatcccatgcgttctttttatgtacaaaaagtctttatgtgcattaaatagacatctgggtacttgtgctttgatagtttaaacttctttttacrttaatcggaaaaagaaatgttagtttttaagaaataatatttaaaacatcaaaatcatttagcgtttagtattacactccaattttcttagttgaggaaagtcctgtttgatctgaagattatatgttgtccctgaacttacttctgattttgtgatgagcattgcatttttttgagcatttcagaaa

SEQ ID NO: 658392 - DNA, 618 bp, Homo sapiens
tatttgcattttgggtgagttcacggtgaaataagaaggttctcaacgttactatcatcctgggtattaactgaccatcagtctgtttgatcatgacgaaaactaacacaacattaaaatacagtaataatgatcatattgaatgatcattactgaatgactctgaaaagactcgttataactatatttaaggaagaagaaatttccacaagttaaattgttcagagatctgattttttttgtttgtttgttttcactgtctctgacatcatgatgccaaataaacagtttttctcaattattattatatataaagtttaaaagccagtataaatcatcccatgcgttctttttatgtacaaaaagtctttatgtgcattaaatagacatctgggtacttgtgctttgatagtttaaacttctttttacgttaatcggaawaagaaatgttagtttttaagaaataatatttaaaacatcaaaatcatttagcgtttagtattacactccaattttcttagttgaggaaagtcctgtttgatctgaagattatatgttgtccctgaacttacttctgattttgtgatgagcattgcatttttttgagcatttcagaaa

SEQ ID NO: 658393 - DNA, 618 bp, Homo sapiens
tatttgcattttgggtgagttcacggtgaaataagaaggttctcaacgttactatcatcctgggtattaactgaccatcagtctgtttgatcatgacgaaaactaacacaacattaaaatacagtaataatgatcatattgaatgatcattactgaatgactctgaaaagactcgttataactatatttaaggaagaagaaatttccacaagttaaattgttcagagatctgattttttttgtttgtttgttttcactgtctctgacatcatgatgccaaataaacagtttttctcaattattattatatataaagtttaaaagccagtataaatcatcccatgcgttctttttatgtacaaaaagtctttatgtgcattaaatagacatctgggtacttgtgctttgatagtttaaacttctttttacgttaatcggaaaaagaaatgttagtttttaagaaataatatttaaaacatcaaaatcatttagcgtttartattacactccaattttcttagttgaggaaagtcctgtttgatctgaagattatatgttgtccctgaacttacttctgattttgtgatgagcattgcatttttttgagcatttcagaaa

SEQ ID NO: 658394 - DNA, 485 bp, Homo sapiens
agggaacagagttaactctactttttcttgggttagtaatttgatgcaacacatcacaaaattttatgtgtaaaattaatttaaattgacttggctgtagtacttgctatatgtgttgaaaactggctgtaaaattataaattaatgtcttgacaccttgaaattccattttcaagttatagcaatgtagattatatggaattacagttaaactgtattaattatcattcttctgtaagcmatgaccagtttttcttttggcttttccctttctataggcacacaagcaacctatacccggccaacagtgagcccatccattggtcggatggctgcaacccctggagctgcaacctatgtgaaaactacgagtggtagcatcattacagtagtaccccaatcattagctaccttggggggcaagataattagcagtaatatagtttctggtaggtatatctgaaatatgttaaaggtataggtgg

SEQ ID NO: 658395 - DNA, 485 bp, Homo sapiens
agggaacagagttaactctactttttcttgggttagtaatttgatgcaacacatcacaaaattttatgtgtaaaattaatttaaattgacttggctgtagtacttgctatatgtgttgaaaactggctgtaaaattataaattaatgtcttgacaccttgaaattccattttcaagttatagcaatgtagattatatggaattacagttaaactgtattaattatcattcttctgtaagccatgacmagtttttcttttggcttttccctttctataggcacacaagcaacctatacccggccaacagtgagcccatccattggtcggatggctgcaacccctggagctgcaacctatgtgaaaactacgagtggtagcatcattacagtagtaccccaatcattagctaccttggggggcaagataattagcagtaatatagtttctggtaggtatatctgaaatatgttaaaggtataggtgg

SEQ ID NO: 658396 - DNA, 485 bp, Homo sapiens
agggaacagagttaactctactttttcttgggttagtaatttgatgcaacacatcacaaaattttatgtgtaaaattaatttaaattgacttggctgtagtacttgctatatgtgttgaaaactggctgtaaaattataaattaatgtcttgacaccttgaaattccattttcaagttatagcaatgtagattatatggaattacagttaaactgtattaattatcattcttctgtaagccatgaccagtttttcttttggcttttccctttctataggcacacaagcaacctatacccggccaacagtgagcccatccattggtcggatggctgcaacccctggagctgcaacctatgtgaaaactacgagtggtagcatcattacagtagtacccmaatcattagctaccttggggggcaagataattagcagtaatatagtttctggtaggtatatctgaaatatgttaaaggtataggtgg

SEQ ID NO: 658397 - DNA, 340 bp, Homo sapiens
atgtctctgaacctagctcctaagatgaatttcttaattccctagattttaacaatggaataagagcatgacagctgagcatcaaaaatacaaagatagtgaaggaagtaggggagaccaccaaaaagaatctctgagtgacctttcagcttaatgctacagcaaatacacagtagcattttacttataaggttagacagacatactacaactctattacagacctgccatagaaaacaaaataaactagtcttggcaayaatttgagagtgtaattaaatccagtaatgggtgtgatacaattttaaagagtttctttaatgaggttttcaacaaatct

SEQ ID NO: 658398 - DNA, 640 bp, Homo sapiens
tgacattgttagaaacccatcaaaggaactccacatctatatagaaaaaaaggttcaaagctataagattgctttaaaaagaaatatttaaatggcacttacaaaataatcttccgtatatgaattaatactgatactatactgttttctggtcctaaaatattttctaagtgagaagtctgatgtctttctttgggaatcaccagcctatagctatacgctagctactactctgaaaagcctctttaaaaatggggaagccatagattgaaaagcgtcctcaagaaataaacctagaaatcaagtttgggtctgtgattagttatcccactagtcggataaaaattttactgaaagtgttttcatatatattccatctgtttggaaactatctagattctttgcttgcgagtgacagacatccaactctgccatggtaaactaggtaatgtaatacattaccattgtataccataatatatataaagtatacattatgtatactttgtatactttatatacattatcttcctccccataacttgtatagccatggaaagagaaaggaaggagctggtcttagggatatgtatatctagggactcaaaygctttggggactttgtccaacttgtttctgg

SEQ ID NO: 658399 - DNA, 575 bp, Homo sapiens
ttatttttttatttttatcttttttgatagcattctttattaccttagggaaaatcctaatttgctgagagttatactsaagaaggaatattgaatttaattaaaatttcctgtatatatttagatggcttaggtttttctcctggaatattttacttggtgaattacattaagtgatttttgcattcccagaacaaaggaaacttagtcatgtcattttctttaaaacttgttattacaaattgatgctttgggtttgctaagtttgattttcttaatttgctactccatgccaatggtacctttttcttagttttaatttaatatttcactctgtattttatatatagtaaatatatctctttagctatctatccaataacatcaatatctagaattgattcttagatttttgttggactcaggtctctctaactcccagtcccagctagtaattcatgtgacggtgttcttagtgtctcttgttaccatcaatcaaaatcttgttcattcatgaaaacctattccagtttttctcctttgtaaggccttcccagattcctgtgactagaagt

SEQ ID NO: 658400 - DNA, 575 bp, Homo sapiens
ttatttttttatttttatcttttttgatagcattctttattaccttagggaaaatcctaatttgctgagagttatactgaagaaggaatattgaatttaattaaaatttyctgtatatatttagatggcttaggtttttctcctggaatattttacttggtgaattacattaagtgatttttgcattcccagaacaaaggaaacttagtcatgtcattttctttaaaacttgttattacaaattgatgctttgggtttgctaagtttgattttcttaatttgctactccatgccaatggtacctttttcttagttttaatttaatatttcactctgtattttatatatagtaaatatatctctttagctatctatccaataacatcaatatctagaattgattcttagatttttgttggactcaggtctctctaactcccagtcccagctagtaattcatgtgacggtgttcttagtgtctcttgttaccatcaatcaaaatcttgttcattcatgaaaacctattccagtttttctcctttgtaaggccttcccagattcctgtgactagaagt

SEQ ID NO: 658401 - DNA, 496 bp, Homo sapiens
gattctttttgaaatgtagggagagggggaggtgggaacagatgagcctggagaggtaggaagcggtcagatcataaaggctcttaggagtcttgttaaggagggttcggctttagcctagtataagggaaagctactggagagttacaggcaaggagggacatgatcagatttctattttggagagactcctttagctgcagagtggcaaatgcatgggaggaagcaggtgtttggtgtgggtcctgctgattctgaattgcctctgggctttgcactggaggtgtccaccctgtaggtaactaccttcatccgtgggactggagctcaaaagacaggtataggctggaaataggaattcactgtatctctgctggcacsggggcactaatgcttatcctgggccaggtgctgggattcggcttatctgtggagcaataattgaagccaaggatatgtgtgatcaagggagggagaaggggccctggggcacagt

SEQ ID NO: 658402 - DNA, 597 bp, Homo sapiens
aaaccagataagagttaagaggttgcagttaagtcgttgagatgaaaggaccgaagtagggtggtggtgttaagactggaaagaagtggactggtttgagaaattttgaggaagtacaaccaaaagcaattggagactggttatyggaaggtgcggaattgggtgaaggcacgatgcctgggtagctggtgctgctattaactaaacgtaggaatgttaacaggaagaatctaggagggaagaggtgggtttactttgggtcttcctaaatttgagatgctctgcagatacgttcatggagatgtcaccaggctgttggatataagtaaagcacacccatggaggcggctatgaaatagatcaatcaggaagctcctgggaggatgacaagaagaggcctctgcaaagaccttggatgcaccgttgtttaaaggggaggcagaagaacatacctggagggaacagttagagcagtgtgaggagaaccctaggagagtagtttcatggaagccaaggaggttgattaaatgagataacatatatgctcttcttaggacagcacctggcaggttgtaagtcgtattgccagctagtgat

SEQ ID NO: 658403 - DNA, 257 bp, Homo sapiens
aaaaacatttacattcttctgcagtgaacatggagcactctccaggacagacactatgctaaaccataaaaacctcaataaattataaagaaaatgtataatgtaaagtatactctccaactaaaattgagtgaatctagacatcaatggaagaaaatagttgtgaatctcacaaatatcagcaaactaaacaaygcatccccaaataatgaatgggcaaaagaacaattgcaagggaaattagagggcaatttaaa

SEQ ID NO: 658404 - DNA, 587 bp, Homo sapiens
tgtgtgtgtgtggtaagttaatgtataagaaaacttttatattactgatatttaataaatgtaagtttttttcgtctttctccttcccattagttagaatgcatatcattaggcagtgggaggattcattttgtaatgaaaatggtatattgataagggtagaaactcaatcatgatcctgcctacactataattagaaatcacatctgaggaaaaaaaacagtaaattattatgaatcattttggtgctatcattggttttagtgtaattgttcattaagcctttaaaattattagaccttgttaattaaaaagcctttcctgaagtgcaatgaagatgcttattcacgtcaaatgatttacagtgagatcccttctaattacagatgctacagcttcatttgcatagttgagatagttagcttccatacacagccagtgctcactgtatcatgaagtggctccagcatgccactttagattaaaatgtgcttttgaaaattaatattgggattggcaaaargaacactattgggctagttttgtattaaatcttagccacatgcaagattagtgttagaagagag

SEQ ID NO: 658405 - DNA, 551 bp, Homo sapiens
tccatgctgccacactaatctatcagtctattcccaggagcatttaaccattttaaatactatgaacagacaggaacttctagatatgatctccttgctttctaatttttctttcataattttttcccctttgctctctacatttttggaaattttatcatcttcatctttgagatctataatttggtcttcaggtcttctatttaaaaatttagcaatcttgatttttatttataagagctgttctttattcttcctccttcattgcagcctgtttttattttgaggtggcaatattctcttaaatgtctctacctataacattaaatgttcttaaagttctcttctgtttcctgggtcactggttctgattttttcctctacctctaggttctttatgttttatcrctgcttttcctcgaatatctggatagtcttaatattttcattaatctgatctccattttctttcaattattcagaaattcttctaagtttctattcattatatcactctttctcaattttcagcattgttatggatgtactga

SEQ ID NO: 658406 - DNA, 615 bp, Homo sapiens
agactaaaaattggtgattgtttcgaagttaaatactagggaaatgatttcaggaattaaatattatcgtagtaaaaatcagggaagcgttagaaaataaataatgagttgaaaaatgtgttgctttaacgtgtaatgatatgagccagcgccttgtgatcagctatggcatgatgtagaagtatgggtaagacaatacagtggagctgtagatgagctgcgtacatggtagcccccctttaagtaaatgaacttaatacaaactaattagattagaaacagaatttggagtatggttgccaaatattttgagttgaaggacttgcttttttacagtattttttaatggggaattttttcaagaaatttcgtgaacttgaatttgagaatgttttatttttacttaaatttttatatkgtatgtaatcattccatgtgataagtttttgttgtgtatttggcactaactcactttcaacagcacaggggagggctttacttgattcttttttgttaaaaagaagggatggggtatggaatattcttaatgtcacttgaaaaatattggattacaattaaatgtaaaattggttttttggtttttttttttttaat

SEQ ID NO: 658407 - DNA, 616 bp, Homo sapiens
attcccctcctgaactgacatcagggaatgcacactgggggggaaatgaaattcactaaagtactccaactaagtaactaaacaaataaacaagcaaacaaaataacaacaacccatagccccaagaaagaaagaataggtattcagagttcaatattatataaaatggccagttttcaacaaaaaattatgagatgtgcatagaagtaaaaactgtaaattgtagagaaaatttaaaaaggcaatagtacctgcctttgagagaatctacacgttagactcagcagacaaatttcaaagcaaatattaaaaatatgttcaaggaactaaaggaaaccgtgccttaaaaagaaaaaggtatgatgacaatgtttcatcatgtaaagaatgtcaataaagaaggaaataaattacttttttaaaaactaagtgaaaattctcaagttgaaaactacaataaacraagttaataatttaatagaggggctcaatggtatgtttgaactggcaaaagaatgtgtgatgttgaagactgattattagagaatatgaaatatgaagaatatgaaaaaacagaacgaatagaaatgaacagagtttcaaagaaatgtcagac

SEQ ID NO: 658408 - DNA, 408 bp, Homo sapiens
aggtgtgcaccaccatgcctggctaaactttttattttttgtatagagacagggactttctatgttgcctagcctggacttgaattcctgggctcaaacaatcctttcaccttggcctcccaaagtgctgggattataggtgtaagccactgtgcctggtccaaaaattttcatcaccttaaaaagtttcctggtaactatttgtggttaacctacttaaccacttaactgttttctgtcaaaatacctggatttttcctcttctagaattttatataaagggaatcatacactrtgtgctcttaaaacataatgtgtttgagattcacccttgttattgcatgtatccattgctcactccttttcattgctgagtagaatttcaatatatggatataccactattta

SEQ ID NO: 658409 - DNA, 609 bp, Homo sapiens
tttcattgttattgttacaaattttggttttgaatttggttaaatgttttttatgcatctgagataatcatatggtttttctcctttattctattaacatggcraattacgttaattgattttcaaatgttaaacccagcttgcattcctagaataaactcactttggaaggctgtgttatcctttttacatattgctgagttcaatttgctaatattttgttaacaattaactcaccagggcctaagattttaaatttcaaatccagtttatttaattgatataggactactcagatattttatttcttcttgagtcagtgtggtcatttgtgtccttccaggaatttattcatttcatttatgttgttaaatttatattgataaaaagttgttcataatgttctattatcttttcaatgtctgtagaaacaataacgaagtgccctcttttacttggaccaaaaactaaatcttgggataagagtcaaaattgggggctgccaggcacggtggctgacacctataagctcagtaccttgggaggctgaggcaggagaattgcttgagtccaggagtttgacaccatcctgggcaaacatagtgagac

SEQ ID NO: 658410 - DNA, 596 bp, Homo sapiens
gcatgctggcacacatctgtaatcccagctattcaggaggctgaggcacgggaattgcttgatcctgaggggcagaggttgcagtgagccgagattgcaccmctgcactcccgcctgggtgacacagcgagactctgtctcaagagaaaaaaagaaaaaaaaaaaagaaaaaagaaaaagtgatatctgaaagaagagtaatagtcatcagagcaggaaaggatagtgctacaggcaataataataatatctgagatggctggaagcaagaaataacttggaaaatttaatgaaagaatttcaactgtgctaaatcatggagctagaaagcagtaaggatgctaagggcagagagaaacaaatggactaagttattcataatatggaattggcaagatttggtaatcagatgaaatacgtgagagaggtttctagagtaagcaactgagtgccatttgtcaaaaaggtacacatttaaaaaagtaggctgggggaagggatgaagaagatgacacgtttgcttttggacagctgagtttgagatgcacatgggacgtttagtgaaggcaatgaggcttatagccatcagaaaagat

SEQ ID NO: 658411 - DNA, 548 bp, Homo sapiens
acttaatattctcttgagtataaaataaaagagactttcttagaaagccctttttggggccacgcatggtggctcacacctgtaatcccagcactttgggagcctgaggcgggtggatcacttgaggccaggaacttgagacctggccttgaacttaatgtcacccggatatccaggcttttgtttatgaccattttttggtcataaacaaactrgccaacatggagaaaccccatctttactaaaagtacaaaaattagctgggtgtggtggcacgtgcctgtgatcccagctacagctactcttgaggctgaggcaggagaactgcttgaacccaggaggcaaaggttgcagtaagccaaggtggcgccactgcactccagcctgggtgacacagtgagactccatctcagaaaaaaagaaagccctttttcactactaaatatttcctggagttctgaatttttcatttgctattatataaaacaaaccaacttattggtaagaggatgacaagaagggaacctcttttgatctctgctgaaaat

SEQ ID NO: 658412 - DNA, 548 bp, Homo sapiens
acttaatattctcttgagtataaaataaaagagactttcttagaaagccctttttggggccacgcatggtggctcacacctgtaatcccagcactttgggagcctgaggcgggtggatcacttgaggccaggaacttgagacctggccttgaacttaatgtcacccggatatccaggcttttgtttatgaccattttttggtcataaacaaactagccaacatggagaaaccccatctttactaaaagtacaaaaattagctgggtgtggtggcrcgtgcctgtgatcccagctacagctactcttgaggctgaggcaggagaactgcttgaacccaggaggcaaaggttgcagtaagccaaggtggcgccactgcactccagcctgggtgacacagtgagactccatctcagaaaaaaagaaagccctttttcactactaaatatttcctggagttctgaatttttcatttgctattatataaaacaaaccaacttattggtaagaggatgacaagaagggaacctcttttgatctctgctgaaaat

SEQ ID NO: 658413 - DNA, 432 bp, Homo sapiens
tatttttaaggtgtttttaggaagtgatctagtgttttgggatacatttgtgaataaaaagacaaatatacccatcctcatgaaggtcctcatacttgattaaaaatgcagatattagggttttacagcagaaatttggatttttcgacrtttgaaataagaccctagaatctgcagtttatcaagcactccaggtggttctgatgccaggtgaatcaggtgatttaagtaccctgatacatcccgtgaagtagcttgagtaggagcacagtaattcatctggtgtttctgctttctaaatttgtttgtcttcttctccccatagggtctttgggagagggcagggatatgaaaaaggaaaggaaaaaatttcaggcaaactgaagtagcatttttcaagaaagggaactttctaaggtctcctaaggctag

SEQ ID NO: 658414 - DNA, 547 bp, Homo sapiens
ccacctcaacctcctgagtggctgggattacaggcatgcgccaccacacctggctaattttgcattttttagtagagatggggtttcaccatgttggccacgctggtcttgaactcctgacttcaggtgatccacccaccttggcttctcaaagtcctgtgattacaagcatgagccactgtgtctgccctacatatctgtatacttattcatatttccctggcatattgcamaataattcttaactaaattccaaggaataaaaataaagtcgtaattgaaaggtgaagatgaagggacagtgtccacaaaaaaagccaggcagagttagaagtgacagtcaggaggaagggtaaaggatcacaatgatttataaaaaggaaggcccagaagaaatgaaaaaaaaaaaaggatctctaaagtatctccaattacctagaagcatcagttctcatatgggacattacagacaagcttgagatggctgaagagtaatcttaaaatatatctcttacttttaacagcatgcagttaatttgtaaattaa

SEQ ID NO: 658415 - DNA, 547 bp, Homo sapiens
ccacctcaacctcctgagtggctgggattacaggcatgcgccaccacacctggctaattttgcattttttagtagagatggggtttcaccatgttggccacgctggtcttgaactcctgacttcaggtgatccacccaccttggcttctcaaagtcctgtgattacaagcatgagccactgtgtctgccctacatatctgtatacttattcatatttccctggcatattgcacaataattcttaactaaattccaaggaataaaaataaagtcgtaattgaaaggtgaagatgaagggacagtgtccacaaaaaaagcmaggcagagttagaagtgacagtcaggaggaagggtaaaggatcacaatgatttataaaaaggaaggcccagaagaaatgaaaaaaaaaaaaggatctctaaagtatctccaattacctagaagcatcagttctcatatgggacattacagacaagcttgagatggctgaagagtaatcttaaaatatatctcttacttttaacagcatgcagttaatttgtaaattaa

SEQ ID NO: 658416 - DNA, 480 bp, Homo sapiens
acaaatgttcattgtagcactattcacaatagcaaagacatggaatcaacctaaatgcccatcgatgatagactggataaagaaaatgtggtacatatacaccatggaatacaccatatacaccatgcaaactaatgcaggaacaggaaactaaacaccacatgttctcacttataagaaagagctgaatgatgagaacacatggacacatttcaggggaacaacacagaccttgtgtctgtcgcagggtgagggtgtggggagggagaggagagcatcagaaataatagctaatggatgctgggcttaatacctagttgatcggatgatctgtgcagcaaaccactgtggcacacgtttacctgtgtaacaaacctgtgcatcctgcacatgtactcctgmacttaaaagttaaaggaaaaaaaagagaaagagatggcataaatgaaaaaaccatgcactttggagtcatgcaagttg

SEQ ID NO: 658417 - DNA, 607 bp, Homo sapiens
ttgtgccaaatagcaggatgccattcttttttctggctgaataatattccattctttctttatatatagacacacacatatacatatacacacacatatatatacacacatacatctatataatatgtatattatatgttatatatatgcatacacacatatatacatattccacattttctttawccatttgtccatctacagacatgtatgttgtatccatattttgggtattgtgaaaaataccactataaatatgggattgcagatatctttatgaggtagtgatttcattccctttgggtataggctcaaaagagggattgtgggatcatatatagttctatttttaatttctttaggaacctccatactgttttccataatgactgcaacaccctacattttcaccaacaatgtacttttctccacatcattgccaacatctattatctcttgacttttcaataatagtcatcctaatggatatgaagtgatatctcatagtggttttggtttgcatctcctggatgattatggatgttgagcacattttcatatacctactgtccatttttatattttctttggataaatatttctttag

SEQ ID NO: 658418 - DNA, 582 bp, Homo sapiens
tttgccaaatgttctttactgaacatgcattagttttgaattaaaaaaatattacagaagaaaaatattaaatcttttatagaacttggttcaagtattaatatatgaattattttaatatctactgaacacagcccttaggtcttcaggatatctcaactgcatgatgaaaagaaaattcggtattttaaaaactgacccaaatcttgtgtactgcygcagggaaggtaaaatggtgcagccactatggaaaacagtacggaggttcctcaagaaattaaacatagagttaccacatgatccagaattccactctgggaatatacccaaaaaaaactcaaaggagggattcaaacagatatttgtacactaatgttcaaagcagcattattcacaatagccaaaaggttgaaacaaccaaaatgtccagcaacaaatgaacagacaaaatgtacacacatacaatggaatattattcagccttaaaaagataggaaattctgacacatattacagaataaatgaactttgaaggcattatgtcaagtgaaataagccaaacatcaatggataaatattgta

SEQ ID NO: 658419 - DNA, 582 bp, Homo sapiens
tttgccaaatgttctttactgaacatgcattagttttgaattaaaaaaatattacagaagaaaaatattaaatcttttatagaacttggttcaagtattaatatatgaattattttaatatctactgaacacagcccttaggtcttcaggatatctcaactgcatgatgaaaagaaaattcggtattttaaaaactgacccaaatcttgtgtactgccgcagggaaggtaaaatggtgcagccactatggaaaacagtacggaggttcctcaagaaattaaacatagagttaccacatgatccagaattccactctgggaatatacccaaaaaaaactcaaaggagggattcaaacagatatttgtacactaatgttcaaagcagcattattcacaatagccaaaaggttgaaacaaccaaaatgtccagcaacaaatgaacagacaaaatgtacacacatacaatggaatattattcagccttraaaagataggaaattctgacacatattacagaataaatgaactttgaaggcattatgtcaagtgaaataagccaaacatcaatggataaatattgta

SEQ ID NO: 658420 - DNA, 535 bp, Homo sapiens
taaactgtgtggtacaatagaaatggctatagaattkggattcaaatatattaagagtttgttttctacttttgataattgttgatgtcaaactagattttcatgaatgtcagttacttcatctgcaaaatgtgagtaatagctaaattactggtctgctgtataaatcaaatgaccctataacaacattttaagctgttaaaacacattattaatataagggagtatctaaatataaaattatagttaactctcttattctgaaagaagtttgattttaaagatttattctagttaatggagtaacagagtttaagattaattaactttcaccaaatgtttaattttgaaggatattcatttttctaagtctcaagaagagggaactacgtggaaaattcctgattgaatattgaatgtgtggtatcagggctcaaaaccaacttatctctttagtaaagtgcgtgagtaacttggctatggcatctcttatcccactgattgtcaggatatattgcggagacctagctctcag

SEQ ID NO: 658421 - DNA, 583 bp, Homo sapiens
gcaataggctggccatggtggattacaactgtaatcccaacactttggaggctgaggcaggtgggtcacttgagctcaggggtttgagaccagcctgggcaacatggcaaaacctcatctctacaaaaaatacaaaaattagctgggtgtggtggctcatgcctgtagtcccagctacttgggaggctaaggtgggaggatcgcttgagcttgggaggttgaggctgaggctgcagagagctgtgatcatgccactgcacgccagcctgggtgacagaacaagactctgttaataartaaataaagaaaaagaaatgtaattgtcttaagatcccctccctgggaatctcatcaaataaccaggaaagactaactgctggacaagagaaaagtctaaaagttgtcaccacacccaggcagacttatcatcaattcttctgagagattacctgggagactctattagcataataagacaacctttgttcatagcgaagttctgcccctcaacctctcaccacctcctccagagctcagaactttgtcccaagccactgtctattctttgtgctcattcgatttc

SEQ ID NO: 658422 - DNA, 559 bp, Homo sapiens
agaggcagatgttgcagtgagccaagatcgggccactgcactccagccctgggcaacggggtgcgactccatctcaaaagaaacaaaacaagcaaaacaaaacaaacaaacaaacaaaaactgcttggacttggatggcctcatcattgcctccttttctggggataagatgaaaggctccaatcaggctgactggcactggccagcttgccagaaggcatggtatccccagccctctctacattattctaagtttggaagtagtcagaagaaaatagtatggaattttggtccccaaatctactcattaaaaccatgtggatactctacttcacacccttacttgaggcctcctggctctgacacagatttaagacctacttttagtgawttttctgattcctggtcctgcaaatttagaagagttcatgaaaggactgctggaaggaagcacacttgcagtgaaaagtgataactgctcgatattaaaagagaaacccggaaagttctatacaaaacctatatccctgtccactatgatagtggattttccttaaag

SEQ ID NO: 658423 - DNA, 558 bp, Homo sapiens
aagttgcaggatacaaaatcaatgcacaaaaatcagtagcatttctatacactaataacagtctaactgagaaaggaatcaagaaggcaatcccatttataatagctttaaaaaacacataggagtaaacgtaaccaaggaggtgaaaaagctgtacaagaaaaactacaaaacactgatgaaaccaaytgaagatgacacaagcaaatggaaaagcatcacaggctcatggatcaaaagaattaatatctttaaaatgaccatacttctcaaaacaatctacagattcagtgctgtccctatcaaagcaccaactcacttttcacagaattgagaaaaacaatcctaaaattcatatggaaccaaaaaagagtccaaatagccaaagcaatccttaacaggaagaacaaaactggagacatcacattacctgacttcaaatgatattataggttggtgcaaaagtaattgccatttttgctgttacttttagtggaaaagacagcaattacttttgcactaacctaatacaaggctacagtaaccgaaacagcatag

SEQ ID NO: 658424 - DNA, 597 bp, Homo sapiens
tagtaaggggtcctaccactgatggtttggactcacgggcaatttacagttggatggaagctgaagtgtcatcagatttagaggccacagtctggcagcctgtggaccaaatccaggccaccaacacattttggtccataaagtgttttttaaactttccatcatgaataatagcatattgtggatcataaatatatataaattagtgagaatgctataataaacccccatagtcccaccacccagtttcagccagcacttaatctattcaaaggcaatcttccttcatctattctcccactctcctccagaatttgaagcaaatctcagaaatcctatcatttcttctttaagtactaaaaagtagtcctaaaagataagaattcttttaaatagcataataatatcaatatcacayctaaaacaataattccttgtcctcaaatatatagtcaatgttcaaacttccccaattgtcttatttttctttattgttcaaattgggatccaaatgaatctccacagtgcattctctcctttaatcggataatcccccagttaatctctttttttcctggaaatttatttgttaaataa

SEQ ID NO: 658425 - DNA, 512 bp, Homo sapiens
gaaaccagctgtctgggcaggcatgcctgacagggactggtgtgggggatttaacagggtgacatcatgactggctttagagctaggcagtttggggatttggtgtagaagggtaatggtgaggctgggtgcagtggctcacacctgcagttccagtgctttgggaggccgaggagggaggatcrcttgaaaccaggagttcgaggtaacagtgagctatgatcgtgccactgcactccagcctgagcaacagagtgagaacctgtctctatttttaaaaaaagaagaaggtgatggtgagatctcacaaattcctgattagggaagtcatatagctgaacatatgctgaaagaaatatttctgaaaaacaagtctgctttctatttcaaacaatggactaaaaagggctgaggatggaggctggaggccagcgcagaggctgctgcaatcctgcctcacaattggtggggaggttctgcagtcctgcctctgctgctgaattattacattt

SEQ ID NO: 658426 - DNA, 488 bp, Homo sapiens
gaatatgggagagataaatgatgaaaaaaaatgagcgaaaaattgaaccagatttattctgacaatgtttaggcctgtgactctaatattataaatcactttcttacagaggaatttacttcctgagctttacacaactttataagcctggcatgtgtatgagaacagaacctagaaattggagatgggaaaatgatggtttgtatawatgtggtttgaaaccacaactggtgattttgtcaatgcaggggcttcatccgcctggggcccagcactgcaggaagttggtacagcttaggagtttacttccaatacttccaagataaaattttaaagagcagaattaaaaaatgttttgtggtggccacatggccttcaactctgggctaaaaagaaattaaagggaatttataatctggggatgagggcagtattgggctgtcaatagaaggtactcgttcaggtaatccttatccagagatgggatg

SEQ ID NO: 658427 - DNA, 606 bp, Homo sapiens
tactttttaaatattgaaattgataaatttatgttcaatagaattatcttcatctttaattacttcttatgtagaaaaaaaagaatctagtttttgagctaaatagaacaaagttcaaatactgttagttctgctttctcgatgtgtgtggtcttggctaaacttcagtttcctcatctgcacggtagaattgagaggattaaaggaaaaatcacactcatggaatatgtcagaaactagatagacattgttattcctaaattttctgttgaggaaaccccatgacaacaaccaacacagcacatttccacttctattttgataaaaccagaaactatttaaatattgcaataatttgaggacactctctatttagcattcaataacaacagtatggtcattaaattagagttytgtattcctcaatttactgcaaagtttgagggtttggagacactataagagtaatataatttgtttattcatctaagaagattgtattgtgatcaggcatgttatctaaaaatctctagggacttcagcattgacagaataagaaggggaaagagaaggagagaaaaagtaaaattactgcaaaaaaaaatg

SEQ ID NO: 658428 - DNA, 600 bp, Homo sapiens
ttttggactcaatttgctaatattctgttgagaatttttgtatcaatgttcatgagagatattgttttcattttaataatatctttggtttgggtacagggtaatgctaacttcatagaattgagttaggaagtattttctctgtttatgtcttttggaagatattatagagaatggtataatttcttctttaaatgtttggcagaattcttcgctagtagacccacatgggtccagtgctttctgttttgaaaggttattaattactgatttaatgtatttaataggtataggttgactcagattatctttcttcttgtgtgagttttggcagatgtctttcaaagatttggtccatttaatccaggttatcaaatttgtggacatagaattgttgtttatagtatttctttattaccttataatattcatgggatctgtagtaatgtcccctcttccttttctgatcttagtaatttggagaytttctcttttttccttagcttggctagaggtttattaattttctctcttttcaaagaaccagcttttagtcccattgatttttctctattgacttcctattttcaatttcattga

SEQ ID NO: 658429 - DNA, 416 bp, Homo sapiens
tctacaacagtttttttacaaaargtttctaggcttctactctggcctcctttgcttttcccgataacagactgcctacataattttcaggcacagtgcaaaatgaaaatgtgggctttttattaataaattattttgtatttcagtacggtcacagcagagcattaagcctagtacagggcacttctaagcgtagggctcagagcaactgcacagatcacacaagcatgaagctgatcctgtcccacaatatcttttaaaagtataaatcatctgacaagtgtgtcatgacattaagtggttgaaagcatgatcttttcaacaaatggtactggacaactggatacccacatgcaaaaaaaatatagttagacacttgccttacatctttaaaaaaattcactcaaaatgaattc

SEQ ID NO: 658430 - DNA, 384 bp, Homo sapiens
ttcctcatgtttagattattasttctatctttaattaatagtttctttgaaggattatttttaagtcacctatctgttttaatagggttaatttaattaaaatgagataagttattcattattcttttagccaagcacagatgaccttctgctgaaaggtgactgacaagagagggctccactctccagtggtggttgtgggactccctgttcccttgggataacccctttgcaatacatgacatatgaccatccaatatacaggctagggtatgagatggtacacatatcattctgtacattaagtctttgtggaggtcaattctttccatattttttgcataatacctgtgtaagtcctaatattacccccataaaccagtg

SEQ ID NO: 658431 - DNA, 644 bp, Homo sapiens
ggatggggatgtggaaggccagggtggtcttgggaaatgccaacattggggcaggaaaatgaaaataattgtccacacctaggtccctgggcacaggcccaagagtggagccctaggcagggaccatgccctcctctacccagcacttcccttccccaccttccatattggttaaagcgaccatgccattcccttcccagcacttccatatcagtatggcctctttcaattctgtcctgtcagtaataatattctgtgtccaaagcagttagtactgatgaatttcatggtgtgtgcggggagaacctaatgcattaggagaccacaaacaccaagtgaggtttgctattagttccagckctaagaggctgtggtcagcatcacagagactggaaatgggtggtcctgcattgtagattgtgcgcctgcagggagcctgaatgtaccttcttcccttgccacatgccacatagacattctgatttctgaacagtcactttccggctcttctttttcaggatctgaaataatcattaacttatggtcatgaactaagttggattattctcttatcagtgtgtctggaacaaaggagtatagactggctagggatctgaggaatgaaaaatacatatgttatcaag

SEQ ID NO: 658432 - DNA, 631 bp, Homo sapiens
taataaatgttcttttattgtcgggctaggctacaaaattgaaagggaagagatatgctcgatttataaactgagcagatgacatcgcataagtcactgcgattatgttgaggtgagacaagttacaatctccaaacgtttgttggaattgggagagaaatgcaggggaagctggtaccacaccagagccactagtccaaaacctaaggaaagaaaaaaacatggttgctgtgttgtgtgtaatcccgatccagwttcccctgagatggccattcctgcccaggaatgagtcagaggtcagggagggctgcttcatctggccagcagggtcctcctgctcactctcagggaggctgtgcagcgtggaactttgacaactgtcccatagttctaaagcgtttggagtcagggacccttcatgaaatgctaacagcaagatcatatgcacaagtaaagaaatagcaacaaacatagtggaagcatttgctctgaaaaattccccagtgatagattatctaggggacaacgcctaaggtcaaagctttctccaagataataaagataataaaggaaaatccttgttttgcagtctgacagataatatggaaatcagtcttggaagtgcctatgg

SEQ ID NO: 658433 - DNA, 631 bp, Homo sapiens
taataaatgttcttttattgtcgggctaggctacaaaattgaaagggaagagatatgctcgatttataaactgagcagatgacatcgcataagtcactgcgattatgttgaggtgagacaagttacaatctccaaacgtttgttggaattgggagagaaatgcaggggaagctggtaccacaccagagccactagtccaaaacctaaggaaagaaaaaaacatggttgctgtgttgtgtgtaatcccgatccagtttcccctgagatggccattcctgcccaggaatgagtcagaggtcagggagggctgcttcatctggccagcagggtcctcctgctcactctcagggaggctgtgcagcgtggaactttgacaactgtcccatagttctaragcgtttggagtcagggacccttcatgaaatgctaacagcaagatcatatgcacaagtaaagaaatagcaacaaacatagtggaagcatttgctctgaaaaattccccagtgatagattatctaggggacaacgcctaaggtcaaagctttctccaagataataaagataataaaggaaaatccttgttttgcagtctgacagataatatggaaatcagtcttggaagtgcctatgg

SEQ ID NO: 658434 - DNA, 611 bp, Homo sapiens
agtgggaagacagttcaagaccattatgccaggtgacagggaacacgaggaagaaacaggcataaaatataggtgatgcggaaacccctggcaactcactgggcctgagcaaagaagcgggaacatgtggtgatacttgttggaagctttaggctacggagtgaggtgctagtgagatggcagagtatgctctgtaggcattttgggaaatatgggattggatatagggtggaagggaaaacagagaaatttccgtgtattgattagctactgtgtgtcagatattttgctgtttaatagttttgaaagctccccaggtgactgtgatgtgcagccagggctagaaactgctgtcatctcagccttctctgtacctagttcaggcaactggagtttgaagccagccttstaagccttctctgggagatttatgagaatcttttcgaagtaaatttttaaaagttataaaatatctaatataattgttagaaaactctttaaaaacatacaattggtcaacaaccatctatttcttaaactttggtgtacatatatatgtatgcatatatgtatagacttacatatgttacatgtgatttggagaaagaaat

SEQ ID NO: 658435 - DNA, 472 bp, Homo sapiens
aggaattcttccttctatagacagccctgtgatttttgtggtgtttaaactttgtaaaatctggattttatcaggacaagtgaaaaattgcagaggactaattcctaaatattagtgagtgtttaaccctccgccaaaaaaaaaaaaaaaaamaaaaaaagggaaatggtggatgtagtgtctgttcttatgtctgggaggctgtctaggcaaaactcttctttttggtgttaaaatacccattattttaatttaattttattattttttgaaagtagagatgggggtcgcactttgttgcacaggctggtctggaactcttggcctcaagtgatcctcccaccttggcctcccaaagtgttgggattagaggcatgagtcctcatacccagccaggcgttattttataaaacagttttgctaggttatttgtttgagtgaggttttcaaaaatgtttttaaagaacaaata

SEQ ID NO: 658436 - DNA, 588 bp, Homo sapiens
agccactgacaatcatttgacgtaaaacaggctttgcatatgcgatagaagattatggttctttaggattttctaacaagcctttagctccttcaggttctccagccagactgaagatgcagtgggtgagattccatttctgtcagtgtgactgtggttccctcaaatctcaatcacctgtgtctgtgcactccagtaggcgactaactgagattgaacaggttgctccaaaggktagttaactcagattaatgtgaacagttgttggggtaaagacaagtgtagtgggtgtcagtacaaagcagctgtctccttggtgagttaaaccacgtgtggcatcccagtaccctgctactgcatcaaattgagttactagttgtggagaggaagataaataccagtgtgcaggtgggagtcaagtgctaatttactattttgagaaaaaccaatcacatttattttggctttctgctgtaacatttaagtctacttctgacctcaaaggaaataattacctattttataagtcattagttgtgctgagtagcatttaaaaaatagcagtgtctctcatactactttggtgtt

SEQ ID NO: 658437 - DNA, 588 bp, Homo sapiens
agccactgacaatcatttgacgtaaaacaggctttgcatatgcgatagaagattatggttctttaggattttctaacaagcctttagctccttcaggttctccagccagactgaagatgcagtgggtgagattccatttctgtcagtgtgactgtggttccctcaaatctcaatcacctgtgtctgtgcactccagtaggcgactaactgagattgaacaggttgctccaaagggtagttaactcagattaatgtgaacagttgttggggtaaagacaagtgtagtgggtgtcagtacaaagcagctgtctccttggtgagttaaaccacgtgtggcatcccagtaccctgctactgcatcaaattgagttactagttgtggagasgaagataaataccagtgtgcaggtgggagtcaagtgctaatttactattttgagaaaaaccaatcacatttattttggctttctgctgtaacatttaagtctacttctgacctcaaaggaaataattacctattttataagtcattagttgtgctgagtagcatttaaaaaatagcagtgtctctcatactactttggtgtt

SEQ ID NO: 658438 - DNA, 540 bp, Homo sapiens
ctcttggatcctgatttattatttcttctgttttttcccctaaaattmtcatatgattttgatagaagtacattctgtatatatccatccaatatattaatttaaaaataatgtcaatggtacagggcagagatctgaaatgttttacgggaagacttatgcacccttctaggtaagagaccacacttaattattttattactctagcctcaagctcagtacttggctggccggagctgctcaagaaatatttgctgcattgaaagagctgttgaacatgcttaagctgtcttcatctaaccactctctagtaccaaacccatcagctgggctaccatccaatctgcattcctgcatgttaaagacaagatataatgagaaactttgccaaatgccttggtgaaatgtgtgtgtcctatatttatgggattaccgaacagtttagaaatgatatcctctgttctgtgcttgcaagccaaattgccatatgctctttccagcactggacagacactgagtaaatgtcaatcaaatgaattc

SEQ ID NO: 658439 - DNA, 437 bp, Homo sapiens
ataccctttaccttccttagtcagcaggaagataaggggagtgagcggaccagtgaaaaaagcacccgagagttatttacccaatgccatttctaaaatgtcamgttatttaacttgagatgattgccacaggaaataatccatgaaatagctcttggtctttttgaaattttgtgtcattattagactcgttcatcaagaaatttgcacctgagctcattgcagctcaagctcaaatggctttcaaatgaaaatgtcttttagcttaaataggaaggatagccatccttccaaaggaaatggacaattgtattaatgtctctttggtttgtattacaatccatctaactagtatttacaaacgaaatgaagcattatttgaatgtcagttgtttctagagagataaatgggattatgtgcttaattaggagaattc

SEQ ID NO: 658440 - DNA, 481 bp, Homo sapiens
cctgggctcaagcagccctcccacttcggcctcccgacttactacaggtgcatgccaccattcccagatgagactgagtctctgtrtgttgcccaagctggtcttgaactcctggactcaagggatccttctgcctccgcctcccaaagttctgggattacagctgttagccaccatgcccagttgttttgcttctttatgggtgtttatttcatttccgtttcattcaccaaatgtctgcattttgtgtcactgtttacacaagtcactgtctcttggttgttaatgtgaaaacttggagaacagaaacaaaacttctctagtgatcttgagcaggaacatagatttgcctgagttcatctaatatattccattaagatgcccttaacaaggcatgttaccttcagtcatctctttaccctctttgtgccaagtttcttcatttgtaaaatgggaaggttagaaacagaactagatctta

SEQ ID NO: 658441 - DNA, 481 bp, Homo sapiens
cctgggctcaagcagccctcccacttcggcctcccgacttactacaggtgcatgccaccattcccagatgagactgagtctctgtatgttgcccaagctggtcttgaactcctggactcaagggatccttctgcctccgcctcccaaagttctgggattacagctgttagccaccatgcccagttgttttgcttctttatgggtgtttatttcatttccgtttcattcaccraatgtctgcattttgtgtcactgtttacacaagtcactgtctcttggttgttaatgtgaaaacttggagaacagaaacaaaacttctctagtgatcttgagcaggaacatagatttgcctgagttcatctaatatattccattaagatgcccttaacaaggcatgttaccttcagtcatctctttaccctctttgtgccaagtttcttcatttgtaaaatgggaaggttagaaacagaactagatctta

SEQ ID NO: 658442 - DNA, 205 bp, Homo sapiens
taacccaaggatgatttgtaagtagttattttcatttggaagcctttttctccaaacgtgcctcatgccataatggttttcatttgggagrctttttctccaaacatgcctcgtgccattatggttgagagcagtgcacacaaaatagaccaggctaccaagcccccaaaccggaagcgaatcatgtgactgaggcactcacttg

SEQ ID NO: 658443 - DNA, 315 bp, Homo sapiens
gaattctaccggaaatgcttaaggactaataactgtaatttcctgagttatactagtcaatttgatcaaaattccttttgatctgtgggcaaatggttctataaaattttttactttttgtgcttttcagactcattttgcttcctgttgatttttggctttacaagttagcaattctggttgcaaagtttattattctgaatgctsatcatcaacttgggaacctgcttccaaatacaagtgtaagacagtatcatgcttacaatgtattgatatctgattacatttttggtgaaagggaagatgtggacaaaa

SEQ ID NO: 658444 - DNA, 569 bp, Homo sapiens
aagcttcttcagcttgttcaaaatttgaatggtcagttactttcaagttttcattttaaaatgaatattttattgaatataatgcagttaaagacatgtgaagggactatattttaatcatcttatgctcagttaaattttttttttttttttggagacagagtctcgctgtgttgtccaggctggagtgcagtggcatgatcttggctcactgcaacctccacctcccgctttcaagcaattctcctgccycagcctccaaagtagctgggattacaggcgcccactaccaggcccagctatttttttgtatttttagtagagagggcttcaccacgttggccaggctgattttgaactcctgacctcaagtgatccaccctccgcggctttccaaagtgctagattacaggcctgagccaccatacccggcctgagccaccatatccagatagtttttttaaatattataaagtattctgtttctttcatctgtgaaatgtaagagtagtaatttataaatgaaagttcttcctctatgattaattcgagagtcattctcaagggca

SEQ ID NO: 658445 - DNA, 606 bp, Homo sapiens
tggcccatacagctaaacaactatgccagcaaaaaatttataggatcagagaaataattaaggaatccctgactttgttttttccatgctatgaaagagaaaactctatgaaagaagagctgcaattgacctcttttattgtagctcttagctrtcttctgtaagacaggtaaggtttgccatagctcagctgcataactgagtgactgtttgcttcttgatgcacaaaaatcagctggtgtccttgaagatttcatcccttggatttttagtttgggtaccctgtcttttccatgaatgaggctgcaatagttacaatatttcttttccttttttttgatattttatgtaatttcctgtaaagaatcatgttaggaagatagcaaaggtcacagaccttcataaaattaggctgtcagtattcaatagaatagtagtcaacaaaattgtaaataaagccattttaatatggacaatgttataatatgaaaaataaagacatggaattgaatatgcagttaagtagatactctattaataagccacggaaagaaaagttgaatacactgaaatggtattcaataatattaatagcaattgctcaat

SEQ ID NO: 658446 - DNA, 644 bp, Homo sapiens
atggtggaataagaggaggtgttagctattaatactgtcctttacagatggcacatgcaattaaacatcagttttagggaaacaaaactctaacccgaagaagagttgctaggagacttttgaccttgctggggtggcatgtgcattgcatcagagaccttctgtgctccttccagtcactctgcatctgtgagtgcctgccaagggtgtacataggtctgtgtgcaggtctaaaaaaaaaatccatctcatggaaattgaggaagttaaatttgagatggtatcttgaactacatagcaggtatactgctgagtatatagctgaaattttgggtgaatgtgaaatgtaccagtataacatttataatattatgtggcaactgtaacttgtcagagaagcactagtgaacattatcaaaaaaaataagccaaaacatagaactgactcaccaaaaattgttaattgtatgcttaggttgcgtaattttctaagtcacakgttggtgggaaattttttttgatatgggctgacaaagcacaataaacttggagacaaaataaattgtactattgctacttaaggtatgtgctcatattttgcaataagcacatttttattgtttttaatcctctcattaagacat

SEQ ID NO: 658447 - DNA, 593 bp, Homo sapiens
atgaaccattgccccttcagggaattgtcaagcacagccttacaaacaggtattgcttagacaacttgcagactrtatcagtgactaaggatttccaggacttctttcagtccagcagcagacatactttatgaaagcagtatccagcagaataaaacttaattactaaggactaaatgaactgatgagactaatttaattgtggttatttgtttagatatgttgctgttgttggaatgctctcttatttatggttgtatgaggaaaccctttctcctttttcccaagctgtctctaagcctcagtttaatagactatgctttggtaaactgcagtgaaacatttttagtggtatctcattctcactcatcccttagaattcagaaacagctatgttactaagatttgtgacttgacttggcaatatagttatttgggtaagattcaataagaatcttgctctctttttatcagagcataattggaaacatcaattgtgcaagcaatatcgcatttgagaatgattctcatttaatcagctgtgaaaagccccctattaaagagcaagttcttagttggaagcctgttctcaa

SEQ ID NO: 658448 - DNA, 588 bp, Homo sapiens
  misc_feature 142, 143, 144, 145, 146, 147, 148, 149, 150, 151, 152, 153,154, 155, 156, 157, 158, 159, 160, 161, 162, 163, 164, 165,166, 167, 168, 169, 170, 171, 172, 173, 174, 175, 176, 177,178, 179, 180, 181, 182, 183, 184, 185, 186, 187, 188: n = A,T,C or G
  misc_feature 189, 190, 191, 192, 193, 194, 195, 196, 197, 198, 199, 200,201, 202, 203, 204, 205, 206, 207, 208, 209, 210, 211, 212,213, 214, 215, 216, 217, 218, 219, 220, 221, 222, 223, 224,225, 226, 227, 228, 229, 230, 231, 232, 233, 234, 235: n = A,T,C or G
  misc_feature 236, 237, 238, 239, 240, 241: n = A,T,C or G
ctcaggaaggggaccaatatctatgcatgggagcactgaaagtctgcagacgacagagagccagaaagatctccaaatcagctcctgggcctgcctgtgcacgagaggcagtgtcctccttggggagcttgcatgaaaaaannnnnnnnnnnnnnnnnnnnnnnnnnnnnnnnnnnnnnnnnnnnnnnnnnnnnnnnnnnnnnnnnnnnnnnnnnnnnnnnnnnnnnnnnnnnnnnnnnnnaaggcttggaactcattttstgtttggaatctacccaaatatataagacattctaaaaatggaaaatggagcacccagaaagtgaaaaatgtaattgtaaataaaattaagagatgattttgagaaatgtgggcatttaaaggacagtttttaagatattctgtatgtctggcaattaagatttcaatgaaacacttctgttgccttttactgactgttgatagctttattaatgacagggggtgacacacagatattaaaaatgcagaggagaattactggggagcaaagggaagagccccagggggttttgtttgtttttaggttacgcagagttttttgagaat

SEQ ID NO: 658449 - DNA, 584 bp, Homo sapiens
attgcaggatcaaatagtagcttaatttttagtttttgaggaacctcaaaactaaaaaataatcttctccatagtggttgtagtaatttacattttcaccaacagtatatgagggttcccttttctccacaaccttgacagcatttgttattgcctgtcttttgggatacaagccattttacctggggtgagatratagctcattgtagttttgattcgcctttctctgatgatgagtgatgttgaccaccttttcatatgcctgtttgccatttgtatgtcttcttttgagaaatgtctgttcaaatcttttgcctatttaaaatgatcagattattatatatttttttcctatagcattgtttgagctccttgtatattctgattattaatcccctggcagggtttgcaaatatgttctcccattattttggttgtctcttcactttgttgattgtatccttttactgtgcagaagcctttttttcagggctagctgaggttttattttggggggaaaaaaataaaagcagttgagttgttttgtagctgaaggcatgggcaaggtggtccccaggcagtaa

SEQ ID NO: 658450 - DNA, 584 bp, Homo sapiens
attgcaggatcaaatagtagcttaatttttagtttttgaggaacctcaaaactaaaaaataatcttctccatagtggttgtagtaatttacattttcaccaacagtatatgagggttcccttttctccacaaccttgacagcatttgttattgcctgtcttttgggatacaagccattttacctggggtgagataatagctcattgtagttttgattcgcctttctctgatgatgagtgatgttgaccaccttttcatatgcctgtttgccatttgtatgtcttcttttgagaaatgtctgttcaaatcttttgcctatttaaaatgatcagattattatatwtttttttcctatagcattgtttgagctccttgtatattctgattattaatcccctggcagggtttgcaaatatgttctcccattattttggttgtctcttcactttgttgattgtatccttttactgtgcagaagcctttttttcagggctagctgaggttttattttggggggaaaaaaataaaagcagttgagttgttttgtagctgaaggcatgggcaaggtggtccccaggcagtaa

SEQ ID NO: 658451 - DNA, 584 bp, Homo sapiens
attgcaggatcaaatagtagcttaatttttagtttttgaggaacctcaaaactaaaaaataatcttctccatagtggttgtagtaatttacattttcaccaacagtatatgagggttcccttttctccacaaccttgacagcatttgttattgcctgtcttttgggatacaagccattttacctggggtgagataatagctcattgtagttttgattcgcctttctctgatgatgagtgatgttgaccaccttttcatatgcctgtttgccatttgtatgtcttcttttgagaaatgtctgttcaaatcttttgcctatttaaaatgatcagattattatatatttttttcctatagcattgtttgagctccttgtatattctgattattaatcccctggcagggtttgcaaatatgttctcccattattttggttgtctcttcactttgttgattgtatccttttactgtgcagaagcctttttttcagggctagcygaggttttattttggggggaaaaaaataaaagcagttgagttgttttgtagctgaaggcatgggcaaggtggtccccaggcagtaa

SEQ ID NO: 658452 - DNA, 546 bp, Homo sapiens
aagactgtctaagcgacctaagtaaatgtatattgagggccaggcgcggtggctyagcttgtaatcctagcactttgggatgctgaggtgggtggatcacctgaggtcaagagtttgagaccagcctggccaacatgttgaaaccctgtctctactgaaaaaaaaaaaatacaaaaattagccaggcatggtggcatgcgtctgtaatcccagccactcgggaggctgaggcaggagaattgcttgaaccccgggggcagaggttgcagtgagctgagatcatgccacttcactccagcctgggtgaaagagcaaaacttcgtctcaaaataaataaataaataaataaataaatggatatagaaggacatatcctgcaatgaatatttgtcaatcaaatgtgtcttgcaattaataaatgtcaaacatggcaatcttacatgaacttcagcaagtctgtctccatcttgctcccttttgttgctctctctagcttttcacttcttcactacctggtttacaatcttagaatttaaccctgtgctg

SEQ ID NO: 658453 - DNA, 546 bp, Homo sapiens
aagactgtctaagcgacctaagtaaatgtatattgagggccaggcgcggtggcttagcttgtaatcctagcactttgggatgctgaggtgggtggatcacctgaggtcaagagtttgagaccagcctggccaacatgttgaaaccctgtctctactgaaaaaaaaaaaatacaaaaattagccaggcatggtggcatgcgtctgtaatcccagcyactcgggaggctgaggcaggagaattgcttgaaccccgggggcagaggttgcagtgagctgagatcatgccacttcactccagcctgggtgaaagagcaaaacttcgtctcaaaataaataaataaataaataaataaatggatatagaaggacatatcctgcaatgaatatttgtcaatcaaatgtgtcttgcaattaataaatgtcaaacatggcaatcttacatgaacttcagcaagtctgtctccatcttgctcccttttgttgctctctctagcttttcacttcttcactacctggtttacaatcttagaatttaaccctgtgctg

SEQ ID NO: 658454 - DNA, 485 bp, Homo sapiens
gccctgcccctttttatttctctgaaaggttttctccaatgtcctgtgatagttcattgtctctggccctttgaaatagtgttgtgcaaaacctcattattgatctgttcctgttctactcccactgtcctttgggacaataatcagttttgatattttgattgctttgccatatgctgatggccccaaagatatgggtgtagacatcacctttagctcaggactgatgtttccaactkcccccaaaagatgctcatgtgttgctgtgttacacaagcacctcactctttttaagggatatgatggattggcactgatggatttggcattcagcatcactttaaccattttctcataggcttttccgtatttcagaggctggggcccatgtttagcattttcttgtgtgtgaatcatgttctacttagaagaactcacacaatatttgggaagtaagagtgagatgggggcagcgtgctaatgtt

SEQ ID NO: 658455 - DNA, 512 bp, Homo sapiens
gtttttaaaattattttttctttctgacaatctatgtctctctatgggtagtttaatccattgaattcaaagtaattttctgataaaatatttattattgcaattttatatttgttttgtgtgtattttataacttctttcccctcatttaacttattacttcccttttttgtgtttatttgattttcttgtcataacatattttgattctcttctaacttcttttagtgtatattctatagatatttcctttgtgattaccatggaaatgaaatataatattaaagttttaataatctatttcaaactgataacaacataactcaaattccatataaaaactcagctccctagagcccaacccaccctacttcatgttatttatcttgcaaattaaatatttatatgttgwgtacttattaatatgcttttgttttattctgcttgtagaataagagaagttacaaatcaaattacaataatacttgtttttacagttaattttactttta

SEQ ID NO: 658456 - DNA, 491 bp, Homo sapiens
atatgaaggtgataattattaaattatgaccagcaagaaagaatcattatgctaactgtaactccagaagcaacaggagcctttaaggaaagtgaccacatcctctgtgagtttagacaaactgagaagattctcacaccagtcagaatggctattaytaaaaattcaaaaaaataacagatgctggcgaggttgtggagaaaaaggaatgcttatacactgttgatgggagtataaattagttcaaccattttagaagacagtgtgaagattcctcaaagacctaaagatagaaatatcattggatccagcaatcccattactgggtatatacctaaaggaatattgatatggtttggctgtgtccccaaccaaatctcatcttgaattgtacttcccataatccccacgtgtcatgggagggacaaggtggagataattgaatcatgggggtagtttcccccatcctgttctcatgatagtgagttagt

SEQ ID NO: 658457 - DNA, 598 bp, Homo sapiens
ctgtttcctgtggttcctaaggtttatcctccagtacccaatgtctgcttccctattgcacttgaaatggaaagggatccaggcaagggacctctttttccagagtgttgcttattgcaaaggaataacaagaagtataacatttaccaaaaagattcactcttctcaaatgcttgagattcactaaaacytattgtttatttaaagaaatactttgatctctataggatctataaataacctttaatatcttttattttcccttaaagacagtattctcaaactttagttctaattaattaggtttgggatgggatcccggatttgtatttctaacaagctcctggtttgtgcttgtctttgaactaatctctgactgtctcaaggcaatggtttttgagcttgactataccttcaattccatgtagggctttcagaaatcccaaataactaaaactgcctttgcaaaaattatcacagcgagaaaattatggcagtgaaagagatctgacctaactaactccatcttgtctttaacctccaaactgcctgtattagtccattttcatgctgctggtaaagacatacctgagactgt

SEQ ID NO: 658458 - DNA, 612 bp, Homo sapiens
tttagtttcagcttagcctttggggaattttttatgatgctggtatataaaatcatcataaaggtaaagtcaatgcactgcggyttccctgtataatgttccttcacttatttatttttttgggctgccatgagaagatatatttatttttgctgttaactgtttgctgaagattgggtgactaatacttttaggtagctcagtcagtccatgttttggggtttcttaaaagttttgttacactgtgcagcagagcaaaaccctgtctcaaaaaaaagttttgctacaaacggttattaaaaatattgataggggctgagcatggtggctcattcctgtaatgtcagcactttgggagaatgggatgggaggatctcttgcggccaggaattcaagactagcttgggcaacacagcgagaccccatctccaaaaacaaattttaaaaattagcctggcctgttagtatgtgcttgtagtcctaggtagttgggaggctgaggcagaaggatggtttgaggccaggagtttgaggctgcagtgagctatgatcatgccactgcactccagcctgggtgacagagccaggccctgtctccaacaaacaaacaaa

SEQ ID NO: 658459 - DNA, 612 bp, Homo sapiens
tttagtttcagcttagcctttggggaattttttatgatgctggtatataaaatcatcataaaggtaaagtcaatgcactgcggcttccctgtataatgttccttcacttatttatttttttgggctgccatgagaagatatatttatttttgctgttaactgtttgctgaagattgggtgactaatacttttaggtagctcagtcagtccatgttttggggtttcttaaaagttttgttacactgtgcagcagagcaaaaccctgtctcaaaaaaaagttttgctacaaacggttattaaaaatattgataggggctgagcatggtggctcattcctgtaatgtcagcactttgggagaatgggatgggaggatctcttgcggccaggaattcaagactagcytgggcaacacagcgagaccccatctccaaaaacaaattttaaaaattagcctggcctgttagtatgtgcttgtagtcctaggtagttgggaggctgaggcagaaggatggtttgaggccaggagtttgaggctgcagtgagctatgatcatgccactgcactccagcctgggtgacagagccaggccctgtctccaacaaacaaacaaa

SEQ ID NO: 658460 - DNA, 589 bp, Homo sapiens
cactgtgcagcagagcaaaaccctgtctcaaaaaaaagttttgctacaaacggttattaaaaatattgataggggctgagcatggtggctcattcctgtaatgtcagcactttgggagaatgggatgggaggatctcttgcggccaggaattcaagactagcttgggcaacacagcragaccccatctccaaaaacaaattttaaaaattagcctggcctgttagtatgtgcttgtagtcctaggtagttgggaggctgaggcagaaggatggtttgaggccaggagtttgaggctgcagtgagctatgatcatgccactgcactccagcctgggtgacagagccaggccctgtctccaacaaacaaacaaacaaacaaacaaatcctaatataagtcgtgtctgtgtttagttacttccatgctggtgtggtcaagatctagagttcagcccatgaacaggccggtgtacattgtttcctgacttcctgactagagctggacccacagctctaatcatccaccttgcagatggagcacctggcaactcaaaggcaacgaaatgagatactggggatagcccagggctt

SEQ ID NO: 658461 - DNA, 668 bp, Homo sapiens
ggctgtctctggttggcttggactaattayttggggaggaatggttggtgaggaattaagcactttagccactattattacttgtaacaataatatctataatatataatgtaatatcattatatttcaaatgtaatactaagttatacaaaattattaaaaagcaacaatttatattattatttatataatctgatatactattatttataatttgtttcacttttaaaattattttatataaactttaaaaattcgatttattcataaaataattacaagtttacttcctaattgtaactttgctataaatgaagctacaaggtgctgttctagtttttgacagtttataaaaagagaagacatcaaaaacaagacatcagcataatagagaagtgaatgaatgaacaaaagtcattttgttttctggctcagtattctctatagtcttaagcagattttgaagaaaaaaaatttggaagaggaactaaaaaaaaaaagaaaaaaaatgagaaagttccaaatcttagtgaatacagctcttgccacaatgaaacattgtgaaattggtctcctggtctgagtcatcactataaacgctttctgcttcttctgatattttatttttattcttttataggtttttgaatactgacatttggccgtga

SEQ ID NO: 658462 - DNA, 668 bp, Homo sapiens
ggctgtctctggttggcttggactaattacttggggaggaatggttggtgaggaattaagcacttyagccactattattacttgtaacaataatatctataatatataatgtaatatcattatatttcaaatgtaatactaagttatacaaaattattaaaaagcaacaatttatattattatttatataatctgatatactattatttataatttgtttcacttttaaaattattttatataaactttaaaaattcgatttattcataaaataattacaagtttacttcctaattgtaactttgctataaatgaagctacaaggtgctgttctagtttttgacagtttataaaaagagaagacatcaaaaacaagacatcagcataatagagaagtgaatgaatgaacaaaagtcattttgttttctggctcagtattctctatagtcttaagcagattttgaagaaaaaaaatttggaagaggaactaaaaaaaaaaagaaaaaaaatgagaaagttccaaatcttagtgaatacagctcttgccacaatgaaacattgtgaaattggtctcctggtctgagtcatcactataaacgctttctgcttcttctgatattttatttttattcttttataggtttttgaatactgacatttggccgtga

SEQ ID NO: 658463 - DNA, 628 bp, Homo sapiens
gaaaaatgaggtgacggtcaggggtaaaaacaagaaytaaagtaccagaaaatgataacacaggagatagaaggtcgattttgaagaattctaaggtctttctattgttaaggtgaagaacggaaatattaagtgaccttaaaatctaagtaaatatctgtgttaaaaattgagaacatcaaatagataatttgttaatttgataatgtgggcagtgatatggtttggctgtgtcctcaaccaaatctcatcgtgaattgtagttgccataattcctgtgtcatgggaaggaccaagtgggaggtaactggatcatgggggcgggtctttcccatgctgttctcatggtagtgaataagtctcaggagatctgatggttttataaaggggagttcccctgcacaagctctctttgcctgccaccgtgtaaaacatccctttgctctaccttggtcttctgccatgattgtgaggtcctccagaagccatgtggaactgtgagtccattaaacctctttcctttataaataacccagactcaggtatgtctttattagcagtgtgagaacagactaatacaggtaggtaaaggaaaataatgaaaaacccaatcaagtcaatgaaagtc

SEQ ID NO: 658464 - DNA, 431 bp, Homo sapiens
ttaaatttagggaatcagacccaagaacactaaaaggattaggggctctccacctgtcttccttggtcttgctctctatgctctcaggtcttcactgttgtagccacagtggtgttagaaggacgaaaatgctagggtagggatggggcaggggtagtgtgaactatagtggttttcaaaatgggcaacatcaatataacctgggagcttgttagaaatgcacattctcaggtctgctgaagaccgactgaatcaggaaatctaggggtggggcccaagacctccaggtaattttgatgcatgctaacatatgtgaaccagcattwtagaaagtttatgctacttaaagaaagtctgtgaagcaacaccccctgggaacttgttagaaatgcagaatctcaggccccacccttctgagattcaggtttcat

SEQ ID NO: 658465 - DNA, 606 bp, Homo sapiens
tgtattctaaaacaaatatttattaagtacctgaaaaatgtctggtactgatgtaaggtcctgagaatgaatacataaaacacacagtacttgccctctagaagcttatttcaatgggaaggactgacctataaactaataatcacattgcaatgcattcgccataacagagatgattacaatgcagcatgggagagacataaacaaatacatgatgtcaagacatccagyaatctgacctctccactggcaacttcgaggaaaaattgaagcagggtatattttttaccttgatttacaaactctctttttcaatcatccttcacccatgctttttttctgacctccacttaaagttcacctgaccctcattggccccattaccctcgcctggcctggttcatttctaagctataaagagttacagcaaaaatttcagagtaatatactttaaggaattatctgaaaggagggttgtatttataatctaagaatcaatttggggaaaaaaacacctcattttccagaggatcaactctggaaaagtcagttttctatcaaatgattccacactgatattttcaaagtctgccagtaatgctcaac

SEQ ID NO: 658466 - DNA, 580 bp, Homo sapiens
cccagtcaggaggcacaggatgagggacccacttaaggaagtagtttgtatatcttttagcagagccgttgtgctgtgctgggggagtccccctcctctagatcggccagcagacgggaaagattaagcccactgaacttgacaccttggccgctcctcctgccaygtgctctgtccctggcagaggacaattctgtctgtaaaggcctggctggaattgctggaattcatgtgtgaggccctgcccagtgagaagggatgaatctgggtcccacctaaagaagcagtctggccgtgatctgccacagctgctgtgctacgctgtggggagtaccacccagtccaaacatcccagtctccgtagcactagctggagagaactgcctactagagccacagtagtggcggtcacccctcccaccatgaactcggtagtcttaggcagactccaggctgctgtgctggccagcagggatttcaacccagtgggtctcagcttgtggggttctgtgggcgtgggaccctctgagtgaggatgtttggctctctggcttcagtcccttttccatgacagtggaca

SEQ ID NO: 658467 - DNA, 580 bp, Homo sapiens
cccagtcaggaggcacaggatgagggacccacttaaggaagtagtttgtatatcttttagcagagccgttgtgctgtgctgggggagtccccctcctctagatcggccagcagacgggaaagattaagcccactgaacttgacaccttggccgctcctcctgccacgtgctctgtccctggcagaggacaattctgtctgtaaaggcctggctggaattgctggaattcatgtgtgaggccctgcccagtgagaagggatgaatctgggtcccacctaaagaagcagtctggccgtgatctgccacagctgctgtgctacgctgtggggagtaccacccagtccaaacatcccagtctccgtagcactagctggagagaactgcctactagagccacagtagtggcggtcacccctcccaccatgaactcggtagtcttaggcagactccaggctgctgtgctggccascagggatttcaacccagtgggtctcagcttgtggggttctgtgggcgtgggaccctctgagtgaggatgtttggctctctggcttcagtcccttttccatgacagtggaca

SEQ ID NO: 658468 - DNA, 399 bp, Homo sapiens
ctcctcccagcacttccctgcccccctcccatatcataggtatacatgctaaataaggtcttccacatggcacatagagctaagtattagaatgcagattgtaataacaaagtattggaaatgatgtactatattcataaaatgaaatattgttttaaaaatagattagatcaaatttattaccrgggataaatctcaaatatataatgtcaaatgaaaaaaaggaaatagcaaaagaatatacctggtataaaaccatttgtgaattaaaaaaaagaaaaaaatacatatgtgattttggatacctctatgcatggtaaaagtttaataacatatggaagggatacatatcaacttcagactaatggttatctcatggagaagaagggacaagaaaga

SEQ ID NO: 658469 - DNA, 469 bp, Homo sapiens
atctataactaaggtctgagtcctgaagacctttttctggagcctcagtaagtttacttaatctaaatgggtctaggtgctggggtgattacccttatcatgtctcccgctaaatcataaaggtttggggagttcctttagaccccaataaacttgtttgtggagrcctggggagtttcgtcagacccccaataaaacttggttaatcctaaaagggtcctgttaagaattccttcattaccttgtcatgcttgaaggcccaggaaaagcctaggcaaaactcttggtgggctgtttgttacattccagcctttgtataagggcactggctcaatcagcttttaatatttaacctagcttctcagtcagtgctgggacagttgtaatggaggcctgcattagtgagacctggcctgccataataccagcaccatgacagtttacagatgccatggcaatgtcaggaagt

SEQ ID NO: 658470 - DNA, 541 bp, Homo sapiens
tgtctaagcgacctaagtaaatgtatattgagggccaggcgcggtggctcagcttgtaatcctagcactttgggatgctgaggtgggtggatcacctgaggtcaagagtttgagaccagcctggccaacatgttgaaaccctgtctctactgaaaaaaaaaaaatacaaaaattagccaggcatggtggcatgcgtctgtaatcccagccactcgggaggctgaggcaggagaattgcttgaaccccgggggcagaggttgcagtgagctgagatcatgccacttcactccagcctgggtgaaagagcaaaacttcgtctcaaaataaataaataaataaataaataaataaatggatatagaaggacatatcctgcaatgaatatttgtcaatcaaatgtgtcttgcaattaataaatgtcaaacatggcaatcttacatgaacttcagcaagtctgtctccatctkgctcccttttgttgctctctctagcttttcacttcttcactacctggtttacaatcttagaatttaaccctgt

SEQ ID NO: 658471 - DNA, 586 bp, Homo sapiens
tatagtcagtcttttaaatttttagccattctagtgtgttgcggtatctcattgtagttttaatttctatttctctaaggactaatgatgttgagcacatttattggccacttctatatcttcttttgtgacatgtctgctcaagttctttgcccattttaaattgagctctcttttatgtatttatttatttaattttatttatttatttttttgagacaagagtctcactctgttgtccaggatggagcacagtggcacaatctcagttcactacaayctctgccccccaggttcaagtgattctcttgcctcagcctcccaggtagttgggattacaggcacatgccaccatgcccagctaatttttgtattttcaatagagacgaggtttcaccatgttggctaggctggtcttgaactcctgacctcaggcgatccagccaccttggcctctcaaagtgctgggattacaggcatgatgagccagtgcacctggcctacttattatttttaggagttatttatatgttctgcacatgagacctgtgtcagatatgatgcatttcaaaattctctcccagta

SEQ ID NO: 658472 - DNA, 606 bp, Homo sapiens
agatgtgaggtactgttctagtgatcatattagatgttgcctagatactttgttttttttttttycatggggttatggttttataggacttgtgagatttgtgctttaaggaagttctgttttggtgcatatttgtttgtcagcatttgtttgtctgagaaagactttatctctccttcatttatgaagcttagtttttctggatacaaaattcttggcttacaattattttgcttaaggaagccaaagataggaccccagtcccttctggcttgtagggtttctgctgagaaatctgctgttagttggataggttttcctttataggtcaccttatgcttttgtctcacagctcttaaaactcattccttcatgtagactttagatagcctgatgactatgtgccttggtgatgatctttttgcaatgaatttcccaggagttccttgagttttctgtatttggatatatagagctctaccaaggccaaggaagttttcctcaattattccctcaaataagttgtctaaacatttagacttctcttttccctcaggaacaccaattattcttagatttggccattttacatgatcccatatttct

SEQ ID NO: 658473 - DNA, 591 bp, Homo sapiens
tattcctgctttcttaagaaacagaaaagactaatttattttctctttccaaagataacacttaaaaatccattaaaaggatgtcatgtttctccaaactctttcaagagtccatgtcttctattttctggccacagcattttcagtttcttcycactagcctggtcaaactaccaacggcaatggatagctcagttctatttaagataagcttggctgttctcttaagtgtcttgcagcagaaatactggcccattcaaaatagttgggctaacttttaaaacaacaactaagcgtcttccaagacagttacaaaagactaaataaaacacagaggaaaacaaaaaagagggagctcaaaatgggagcttggctctgacaggtgaattttcacacagaactgcggcactgagaacaaaactagcctagaaccacttgtgctatgtcatgtggaggtcattcaaatgcacaggatacagaaactcttcaacggtctagtcatttcacactacgtcgaagcaaaccacaaaagcaggcccaggaaattagatttctccaaggatggacccagacgactcagcctgaataaaa

SEQ ID NO: 658474 - DNA, 541 bp, Homo sapiens
aaggcttccaacttattgatgaaaacttgccacacctttggaagaatcattaaatcattcataagagggggtggttctttaaacaataaatagcttacattctggtcactactaggtcgtttaaatatatggggaagaatttgaggctgtaatttggagagttccttgaacaattctgaaggaaagaaatctttccccaagagcattatatagactgaacttttaaaaataatgagctgtacaatatgaggaagtagtatcctgatacaattgtagagctggctgagattcacaaagttcagagtaattgaccttggtttgtccagctgggacaagtatgtggcttaaggatcaacttgaaactgacttcttatgacccctttcgccaaatttatatcttcagtaactmatttcacattaagccctactgttgtatctaggggcctgtgtcaggcccttcctcatgaatttatttgcgcaagttctttcaaggcaaagagttttaaaatcacagagaccgttgtgatttcaagtattatgg

SEQ ID NO: 658475 - DNA, 541 bp, Homo sapiens
aaggcttccaacttattgatgaaaacttgccacacctttggaagaatcattaaatcattcataagagggggtggttctttaaacaataaatagcttacattctggtcactactaggtcgtttaaatatatggggaagaatttgaggctgtaatttggagagttccttgaacaattctgaaggaaagaaatctttccccaagagcattatatagactgaacttttaaaaataatgagctgtacaatatgaggaagtagtatcctgatacaattgtagagctggctgagattcacaaagttcagagtaattgaccttggtttgtccagctgggacaagtatgtggcttaaggatcaacttgaaactgacttcttatgacccctttcgccaaatttatatcttcagtaactcatttcacattaagccctactgttgtatctaggggccygtgtcaggcccttcctcatgaatttatttgcgcaagttctttcaaggcaaagagttttaaaatcacagagaccgttgtgatttcaagtattatgg

SEQ ID NO: 658476 - DNA, 541 bp, Homo sapiens
aaggcttccaacttattgatgaaaacttgccacacctttggaagaatcattaaatcattcataagagggggtggttctttaaacaataaatagcttacattctggtcactactaggtcgtttaaatatatggggaagaatttgaggctgtaatttggagagttccttgaacaattctgaaggaaagaaatctttccccaagagcattatatagactgaacttttaaaaataatgagctgtacaatatgaggaagtagtatcctgatacaattgtagagctggctgagattcacaaagttcagagtaattgaccttggtttgtccagctgggacaagtatgtggcttaaggatcaacttgaaactgacttcttatgacccctttcgccaaatttatatcttcagtaactcatttcacattaagccctactgttgtatctaggggcctgtgtcaggcccttcctcatgaatttatttgcgcaarttctttcaaggcaaagagttttaaaatcacagagaccgttgtgatttcaagtattatgg

SEQ ID NO: 658477 - DNA, 595 bp, Homo sapiens
tttcctgtggttcctaaggtttatcctccagtacccaatgtctgcttccctattgcacttgaaatggaaagggatccaggcaagggacctctttttccagagtgttgcttattgcaaaggaataacaagaagtataacatttaccaaaaagattcactcttctcaaatgcttgagattcactaaaacctattgtttatttaaagaaatactttgatctctataggatctataaataacctttaatatcttttattttcccttaaagacagtattctcaaactttagttctaattaattaggtttgggatgggatcccggatttgtatttctaacaagctcctggtttgtgcttgtctttgaactaatctctgactgtctcaaggcaatggtttttgagcttgactataccttcaattccatgtagggctttcagaaatcccaaataactaaaactgcctttgcaaaaattatcacagcgagaaaattatggcagtgaaagagatctgacctaactaactccatcttrtctttaacctccaaactgcctgtattagtccattttcatgctgctggtaaagacatacctgagactgt

SEQ ID NO: 658478 - DNA, 535 bp, Homo sapiens
gcctctgacttcaggctggtattcatggactcaacctccagacacgacctggtagcagacagaaacctgtatcccctgtgaggtggatctgaactccagttcacatcattgccagtcaatcacagtgaccttgagctccagacaacattcagttataacaggtcttagcagcagtggacttcaggtacaagccaacattgcaacagattcagaagccagaagmtttaggcacacaccagctctgcaccagcctcagcagccatgggattccagcttgatgccataccattcacagtggccctgagtttagggagcatcagatggtctgcttagaatctctggacaggctcactgttgaaagccattcccagacaaagccagtctgtgaagaatgaaatatgtacctatttcttcaaatgtgcagacattaatgcacggccacaaagatcaagaataatcatagaaacatgacatcatcaaatgaacaaaatacagtgccagtgccttaccctaaagaaatggagatgtacgaact

SEQ ID NO: 658479 - DNA, 559 bp, Homo sapiens
ctgggccttgtctcctcacctgtcaaatggagagaaccttaccccttagggttgttgtgaaactctactgcttgtggagatggtaaaagctcagtaaatatcattttctagattttctaaagatctattattttcaagaatactattattcttctttctgaaataaatgataattttttccccaaaaagttctgtgttccacatgatagaagcagatgaaatagtgaaagttctgttaaccaactatttaaccacaaacaactcctttgcattttccagggaacagatggacytttcaagaccaacttgaaggctataaatagactcactattttgtcatgacacaagtcttagacaaaactgggttttaatgctccttctttaagaattgttattcatattatccatggagttatttctgtactaaaataatgaattgctatctcaacttgaagccaaagcatagttcaaaaataaatttaggatgagcatccttttagttctgcacagtccaatacagtatccaataggctatttaagtgtggctatttaaatttaa

SEQ ID NO: 658480 - DNA, 452 bp, Homo sapiens
gaattctgagaatacacagaggtagtccttaatcaggcaatgaaatctattttctcagcccattttcaaaacaatgacccttttaccataaagatacgattctaggagcattctgtttaaagcacaggtctttctgtctctcttctcagacaaaaagctgaagcatttaatttgccttggctcatctcaagtatgagttttagactgaaaactactcttcatttattcaatggcagaatctctattagtcagctctagtctgtctaktatttcaaagctccatttaaggaaaaaagaaaaacaggaaccagcttcattcttagattttacacagagaaatcccacaaagtaatcttctagtggaccaaagatggctaatctatgcttccctcatgtaaaggtttgatcctttgaagagaaatctaagtaacatggaggaggctagctcactg

SEQ ID NO: 658481 - DNA, 608 bp, Homo sapiens
aaaacctgtgcctcaacttctcaaccaggacttttttcgcataccattcaatctaagagtgagattgcaaagtgtgagactgtcctcctccttctgagctctccaaagttagacagaaacaaaaaacrtagatagacataggaggcaatctgatagataagaactcttggactgtttttttcaatcagcagtctaatcattggatagaataagagaaggctgatataagaatcaggcacaggaattctcgagcaattcatctgagaaaagaacaacaacaaaggtttgaagggaggtagtatatttttcaatggattctaatggcatgctatggagtcaccattgtttgtcttgctatcttttaaatataaaacacaatctcacctacctaaggcagatgagaagaaataccattcctggatccctggtccagggcctacttacagaacctgaagggcactcataagctgtgcaatttggagaactcacactgctttgctctcccaggctcctcatctgtaaatgagagggttagattacatttatctagttttgtttatcacttcctctctcaactaaacccctgcccaaagataatgagcctattc

SEQ ID NO: 658482 - DNA, 608 bp, Homo sapiens
aaaacctgtgcctcaacttctcaaccaggacttttttcgcataccattcaatctaagagtgagattgcaaagtgtgagactgtcctcctccttctgagctctccaaagttagacagaaacaaaaaacgtagatagacataggaggcaatctgatagataagaactcttggactgtttttttcaatcagcagtctaatcattggatagaataagagaaggctgatataagaatcaggcacaggaattctcgagcaattcatctgagaaaagaacaacaacaaaggtttgaagggaggtagtatatttttcaatggattctaatggcatgctatggagtcaccattgtttgtcttgctatcttttaaatataaaacacaatctcacctwcctaaggcagatgagaagaaataccattcctggatccctggtccagggcctacttacagaacctgaagggcactcataagctgtgcaatttggagaactcacactgctttgctctcccaggctcctcatctgtaaatgagagggttagattacatttatctagttttgtttatcacttcctctctcaactaaacccctgcccaaagataatgagcctattc

SEQ ID NO: 658483 - DNA, 552 bp, Homo sapiens
tgctcccatcaagtcattcccagaatctgctgcttccaatgacctccttacttccccatctgatgagcaaggccatccccagttcttgtttactcactgccaccaaacctttgcatacattgccagctagcaccctttttacaaatgaattcagatatatctattcctyttttagatcttacctctcagtcaaaggcataaatacatgtagaatgcaggaatgaataaaggctatctacaaggggctcagagtgaaactgagccaactctgacaacttgcacctatgtgcaagaccctttgctaggcactatagaggatatgaagatttgcattttggttaatccggacaaaaccaccacataaaacatcttatagggaagtgcatcccaattgccaaaggaagttacaaacttcttgcggaggaaaagtcacataatgggcttgatgccacctgtatcataaaataagctgtctgtctgaacaggcacatcaaaacttgattgtttacttgaataaatactgaactcattctaaaaaaaagagagccacct

SEQ ID NO: 658484 - DNA, 562 bp, Homo sapiens
agttaataaaagaaagtacaataagcacatgatcatttcaaaaggagcagtaaattatttaacaaaatacaatctctttcctgatttggggaaaaaaaaaaaactctcaacaaactaggaataaaagagaatattctcaaccccatgacaggcattcataaaaaaaacaaaaaaaaamccaaaaaaacaaaaaatatgtttcttagggaaagattgaatgcttttcctctaagatcagaggaaggtaagaatatccactatagccactttttaaaacatattactggagattataaccagtaaaattagggggagggcagtgctctagagtggaaaaaataaaactgctctttttgcagatgacatgatcctatatatggaaaatcctaaaaaatccactaaaaagctattaacactgataaaatgttcattacaaaacatcaaaaattgtattttataaacaatgaccattctgaacataataagaaaacaattccatttaaaaatattatttatatattttaaaataatacgatacataggtataattttaacaaagtaa

SEQ ID NO: 658485 - DNA, 562 bp, Homo sapiens
agttaataaaagaaagtacaataagcacatgatcatttcaaaaggagcagtaaattatttaacaaaatacaatctctttcctgatttggggaaaaaaaaaaaactctcaacaaactaggaataaaagagaatattctcaaccccatgacaggcattcataaaaaaaacaaaaaaaaacccaaaaaaacaaaaaatatgtttcttagggaaagattgaatgcttttcctctaagatcagaggaaggtaagaatatccactatagccactttttaaaacatattactggagattataaccagtaaaattagggggagggcagtgctctagagtggaaaaaataaaactgctctttttgcagatgacatgatcctatatatggaaaatcctaaaaaatccactaaaaagctattaacactgataaaatgttcattacaaaacatcaaaaattgtattttataaacaatgaycattctgaacataataagaaaacaattccatttaaaaatattatttatatattttaaaataatacgatacataggtataattttaacaaagtaa

SEQ ID NO: 658486 - DNA, 562 bp, Homo sapiens
agttaataaaagaaagtacaataagcacatgatcatttcaaaaggagcagtaaattatttaacaaaatacaatctctttcctgatttggggaaaaaaaaaaaactctcaacaaactaggaataaaagagaatattctcaaccccatgacaggcattcataaaaaaaacaaaaaaaaacccaaaaaaacaaaaaatatgtttcttagggaaagattgaatgcttttcctctaagatcagaggaaggtaagaatatccactatagccactttttaaaacatattactggagattataaccagtaaaattagggggagggcagtgctctagagtggaaaaaataaaactgctctttttgcagatgacatgatcctatatatggaaaatcctaaaaaatccactaaaaagctattaacactgataaaatgttcattacaaaacatcaaaaattgtattttataaacaatgaccattctgaacataataagaaaacaattccatttaaaaatrttatttatatattttaaaataatacgatacataggtataattttaacaaagtaa

SEQ ID NO: 658487 - DNA, 461 bp, Homo sapiens
atgtatcaggattttatttctttatgtttctcaatagcatttcactgtatgcatatattgcaaattgtttatgcattcaccagtttgacactggggttatttccaggctttggctattataaataaagtttctggaacattcatgaataagaatacgtgtagacatacgatttaatttctcttgcatgatacaggagtgcaatggctgggttatatgataagtgtgtgtttaactgtgtaagaaactgccaaattgtttcccaaattctctgtatcatttcacatctccatccacagtgtaagcaagatcttgcttttgaggttattccgttttgtttgttttcatttgaagctccacaggcatctgatgaacagctgtgtatgtcagtttgaagccrgttgattaggttatttaactgttaactaaaattttgtgggataagtgtaaccactgatataaa

SEQ ID NO: 658488 - DNA, 526 bp, Homo sapiens
gccaagctaaggagttgaacgccatccttatcataatgatgactaccaaagtattaaaagcrgagagtcagacagttctcaagcataatcctggccttacctcactaatttagcttatatttattaagcacctatgatataagacactaagcttagagtaatggacaaagcagatgaggatcttgccctcttgaaacccatattctctttggagagacacatttgatgggaaaaatttgaacactgcgttttaatcttaaaacctatattatcattgtttcatgttccaaagaaacataacatactcagaaaaactaatacaacagaaatatagtactcaaaaaagcaaaaaacagtatggctcttaactaagtattgcttcaggagttaaaatttaagggaaagagcgtaggcagtggaaaatgtcacacaacacaaaaattgcttaaaattcatctttagaaatctccatgtataatatacattcaaactttacaagttggaatttaagggaaaatatacatag

SEQ ID NO: 658489 - DNA, 526 bp, Homo sapiens
gccaagctaaggagttgaacgccatccttatcataatgatgactaccaaagtattaaaagcggagagtcagacagttctsaagcataatcctggccttacctcactaatttagcttatatttattaagcacctatgatataagacactaagcttagagtaatggacaaagcagatgaggatcttgccctcttgaaacccatattctctttggagagacacatttgatgggaaaaatttgaacactgcgttttaatcttaaaacctatattatcattgtttcatgttccaaagaaacataacatactcagaaaaactaatacaacagaaatatagtactcaaaaaagcaaaaaacagtatggctcttaactaagtattgcttcaggagttaaaatttaagggaaagagcgtaggcagtggaaaatgtcacacaacacaaaaattgcttaaaattcatctttagaaatctccatgtataatatacattcaaactttacaagttggaatttaagggaaaatatacatag

SEQ ID NO: 658490 - DNA, 559 bp, Homo sapiens
aatcagttcttctttttctataaaatacaacctgttttcaacaaaaagttacaagacatgccaaaagacaagaaaattagtgtggaaaaaaaatttgtagagccaaactcaaatatcacactgactttggaattaamagagaaataatttaaaataactattaatcatatgttaagaactctcatgaaaataatagacaacatgcaagaaaagaggagtcatgtaagtatcaggggcatttgaaccagaatgcctccatcttgaacaggtactgggtcaaatgaggctgagacctgctttggtgcattgccaggagttcggcattcttagtcacaagatgtttatgaataagggaacagattaatatgtttattaaacagacccacacctaaaagactcagggaatgtcctgatgtcctgttatcttaagggcaaaagcattcttcatttaagaataagtttcactttaaataaaaccatatagagtcttgtcaaagtcagtagttaaacaaagatgaacaatactttgtcaggagtcgttgtaatagaacacacctcc

SEQ ID NO: 658491 - DNA, 380 bp, Homo sapiens
catttagaggattgaattacatttatttaatgatagaatggtaatacaatgggagggaagcaatgactgcgacaagccacaaaaacacktctagccttgagagttgcaatggatattcccagccaaatgagtctgtttaatgtgttttcatgcatgcaagtttatctgcttagctcaaactgtttgaacttatagtcccatcatggttatttccaatattttgaaaacaaatatatacttccacatattttaaaaaatcaccactctccaatatttctgttgaatcagaccttacattatgttgtttaataaagtatggtaagttttggcatgtatgatttttatcatgtaagaagcataatttcttagccaaaaattta

SEQ ID NO: 658492 - DNA, 427 bp, Homo sapiens
gagcattgggtgaaaaacgaaatcaagatggaaatgtaaaaaatttcttcgaactggatgacacaacctatcaagacctctgggatacagcaaaggcagtgctaagaggaaagtttrtagcactaaacacctacgtcgaaaagtctgaaagagcacagacaatctaagttcacatctcagggaactagagaaggaggaacaagccaaacccaatcccagcaaacaaaggaaataaccaagatcagagcagaactaaatgaaattgacacaacaacaacaacaacaaaaatacaaaacataaataaaacaaaaatttggttatttgaaaagataaaattgataaaccattagcaagattaaccaagaaaaggagagaaaatccaaataacctcactaagaaatgaaacaggggatattacaactgaca

SEQ ID NO: 658493 - DNA, 427 bp, Homo sapiens
gagcattgggtgaaaaacgaaatcaagatggaaatgtaaaaaatttcttcgaactggatgacacaacctatcaagacctctgggatacagcaaaggcagtgctaagaggaaagtttatagcactaaacacctacgtcgaaaagtctgaaagagcacagacaatctaagttcacatctcagggaacyagagaaggaggaacaagccaaacccaatcccagcaaacaaaggaaataaccaagatcagagcagaactaaatgaaattgacacaacaacaacaacaacaaaaatacaaaacataaataaaacaaaaatttggttatttgaaaagataaaattgataaaccattagcaagattaaccaagaaaaggagagaaaatccaaataacctcactaagaaatgaaacaggggatattacaactgaca

SEQ ID NO: 658494 - DNA, 427 bp, Homo sapiens
gagcattgggtgaaaaacgaaatcaagatggaaatgtaaaaaatttcttcgaactggatgacacaacctatcaagacctctgggatacagcaaaggcagtgctaagaggaaagtttatagcactaaacacctacgtcgaaaagtctgaaagagcacagacaatctaagttcacatctcagggaactagagaagsaggaacaagccaaacccaatcccagcaaacaaaggaaataaccaagatcagagcagaactaaatgaaattgacacaacaacaacaacaacaaaaatacaaaacataaataaaacaaaaatttggttatttgaaaagataaaattgataaaccattagcaagattaaccaagaaaaggagagaaaatccaaataacctcactaagaaatgaaacaggggatattacaactgaca

SEQ ID NO: 658495 - DNA, 666 bp, Homo sapiens
attgtattgtggctatgtaagtgaagatccttaatcactggaatgttttggagtaaagaatcataatatatgcaattttctctcaagttcttccagaaaataattatgcatgtgtttgtactacacatagaaagatggatagatgagggagtgatggggaagagagagaaaagagcaaatgacaaagcaaatgggtgaataaataataggggaatctgtgtataggtatttgggtgtcatttgtattatttttattttcaacaatttttcaagtttggaattaaactatttaatttgaaatttttagggtaaccacagtaacagaagtggaatgacggtttccactaagagtcttcagacacagtgaggcttgagctgggtcaccaaggagacaaagcaggaaaaggcttgacagttgtgacaatgggctgtgctatttgaagtaygtgacacagaatatagcagtccccttgctctgaacttccctttcatttggtgcccttgacatcaagatgaagaaggctccaaaacgagtttaaacagagattaaatgtgaaaacaaggaggctgtacactgatgtacctccattaacaaatcaataaagagtcctctcctttttgatatccctggaagttatgctgttatgccttgctgaacatgaaaga

SEQ ID NO: 658496 - DNA, 666 bp, Homo sapiens
attgtattgtggctatgtaagtgaagatccttaatcactggaatgttttggagtaaagaatcataatatatgcaattttctctcaagttcttccagaaaataattatgcatgtgtttgtactacacatagaaagatggatagatgagggagtgatggggaagagagagaaaagagcaaatgacaaagcaaatgggtgaataaataataggggaatctgtgtataggtatttgggtgtcatttgtattatttttattttcaacaatttttcaagtttggaattaaactatttaatttgaaatttttagggtaaccacagtaacagaagtggaatgacggtttccactaagagtcttcagacacagtgaggcttgagctgggtcaccaaggagacaaagcaggaaaaggcttgacagttgtgacaatgggctgtgctatttgaagtatgygacacagaatatagcagtccccttgctctgaacttccctttcatttggtgcccttgacatcaagatgaagaaggctccaaaacgagtttaaacagagattaaatgtgaaaacaaggaggctgtacactgatgtacctccattaacaaatcaataaagagtcctctcctttttgatatccctggaagttatgctgttatgccttgctgaacatgaaaga

SEQ ID NO: 658497 - DNA, 533 bp, Homo sapiens
ggatctctgaggcatgaagcagggtatcaaatacaggcagacttcggagatgtcgtgggctcggttccagatcaccacagtaaagcaatgtcacatgaatttgttggtgtcccagtgcatataaagttatgttgacaatactgcagtctagtaactgtgcaatagcatcatgtctaaaataatttatataacttaatttaaaaataccttctgttaaaaaatgctaacgatcatcagagccttcagtgactttcactctttttgctggtggagggtcttgttttgatgttgatggtgctgactgatcagggtgttggttatggcaatttcctaaaataaaacaacratgaaattggctgcagtgattgactcttttttctcacaagagatttttctgtagcataggatgatgtttgatagcattttacccatattagaacttttataactggagtcaatagtctcacaccctgtccctgatatatcagctaagttgacataatattctaaatcctttgttgtcatttcagcaa

SEQ ID NO: 658498 - DNA, 533 bp, Homo sapiens
ggatctctgaggcatgaagcagggtatcaaatacaggcagacttcggagatgtcgtgggctcggttccagatcaccacagtaaagcaatgtcacatgaatttgttggtgtcccagtgcatataaagttatgttgacaatactgcagtctagtaactgtgcaatagcatcatgtctaaaataatttatataacttaatttaaaaataccttctgttaaaaaatgctaacgatcatcagagccttcagtgactttcactctttttgctggtggagggtcttgttttgatgttgatggtgctgactgatcagggtgttggttatggcaatttcctaaaataaaacaacgatgaaattggctgcagtgattgactcttttttctcacaagagatttttctgtagcataggatgatgtttgatagcattttacccatattagaacttttataactggagtcaatagtctcacaccctgtccctgatatatcagctaagttgacrtaatattctaaatcctttgttgtcatttcagcaa

SEQ ID NO: 658499 - DNA, 425 bp, Homo sapiens
caatgcttgggtcacctccagattcattttcacagtctttcatgttttggtcatatkacattgtattttgctgccatatgactgatctttttttgttaaatgtgagatacttgttacaaaatatttagcaatgaattgaggcctagcagcatgttatcttgctgcagaagagatgggagtctacttctgggggatggtcaggggtcctccatacaggctgcaattgaggtcgtcggtgcaggctcagtccctacaaaggccagggtatttcctgtccacctttattctgatgcatgactcttctgggtctcaaccagagccagtggacttcagtatgggtagctttcattggcagaccctcaatccacttgttttccatctaatcccacgcatgtgtgcaaaagctgctgtgcttctttgcatct

SEQ ID NO: 658500 - DNA, 430 bp, Homo sapiens
gaattcaatgcttgggtcacctccagattcattttcacagtctttcatgttttggtcatattacattgtattttgctgccatatgactgatctttttttgttaaatgtgagatacttgttacaaaatrtttagcaatgaattgaggcctagcagcatgttatcttgctgcagaagagatgggagtctacttctgggggatggtcaggggtcctccatacaggctgcaattgaggtcgtcggtgcaggctcagtccctacaaaggccagggtatttcctgtccacctttattctgatgcatgactcttctgggtctcaaccagagccagtggacttcagtatgggtagctttcattggcagaccctcaatccacttgttttccatctaatcccacgcatgtgtgcaaaagctgctgtgcttctttgcatct

SEQ ID NO: 658501 - DNA, 430 bp, Homo sapiens
gaattcaatgcttgggtcacctccagattcattttcacagtctttcatgttttggtcatattacattgtattttgctgccatatgactgatctttttttgttaaatgtgagatacttgttacaaaatatttagcaatgaattgaggcctagcagcatgttatcttgctgcagaagagatgggagtctacttctgggggatggtcaggggtcctccatacaggctgcaattgargtcgtcggtgcaggctcagtccctacaaaggccagggtatttcctgtccacctttattctgatgcatgactcttctgggtctcaaccagagccagtggacttcagtatgggtagctttcattggcagaccctcaatccacttgttttccatctaatcccacgcatgtgtgcaaaagctgctgtgcttctttgcatct

SEQ ID NO: 658502 - DNA, 414 bp, Homo sapiens
gaattcaatgcttgggtcacctccagattcattttcacagtctttcatgttttggtcatattacattgtattttgctgccatatgactgatctttttttgttaaatgtgagatacttgttacaaaatatttagcaatgaattgaggcctagcagcatgttatcttgctgcagaagagatgggagtctacttctgggggatggtcaggggtcctccatacaggctgcaattgaggtcrtcggtgcaggctcagtccctacaaaggccagggtatttcctgtccacctttattctgatgcatgactcttctgggtctcaaccagagccagtggacttcagtatgggtagctttcattggcagaccctcaatccacttgttttccatctaatcccacgcatgtgtgcaaaagctgct

SEQ ID NO: 658503 - DNA, 603 bp, Homo sapiens
cttgagacaaggccaagacgaaatgatcctcagaattcttttcaaaccatgaacttttgattcccaactccaaaatacaaacatgcacacacayatacacacacacacacacacacacacacacacacacggggaaacaatgctagttgttatgatttatttaaaaaataaagaaaaagaatctacttgaatgtctgcttcccctttggtgtgtagggctgtgaaagtgctccttgtaagacatgaaatatcaataagaaacttgcaaatcagcaatctggaataaaagctttagttatgaaaatattaagctgggcatgatgattttaattatcccttcatctcattctcattttgatgatatgataattatagcatcatattccaatttctgttgttataattcagtgcctgcatatgtcagatttaatattcatttgcctatctttatgtggggccagatggaagaggtgcatcgcctatttataagaactagttgttattactgaattttcttaatttcttcttgatagcagtggctgaggtggagggtgatttaggattgcgttagaaatgccagggcaataatccaaagtaaataat

SEQ ID NO: 658504 - DNA, 603 bp, Homo sapiens
cttgagacaaggccaagacgaaatgatcctcagaattcttttcaaaccatgaacttttgattcccaactccaaaatacaaacatgcacacacacayacacacacacacacacacacacacacacacacacggggaaacaatgctagttgttatgatttatttaaaaaataaagaaaaagaatctacttgaatgtctgcttcccctttggtgtgtagggctgtgaaagtgctccttgtaagacatgaaatatcaataagaaacttgcaaatcagcaatctggaataaaagctttagttatgaaaatattaagctgggcatgatgattttaattatcccttcatctcattctcattttgatgatatgataattatagcatcatattccaatttctgttgttataattcagtgcctgcatatgtcagatttaatattcatttgcctatctttatgtggggccagatggaagaggtgcatcgcctatttataagaactagttgttattactgaattttcttaatttcttcttgatagcagtggctgaggtggagggtgatttaggattgcgttagaaatgccagggcaataatccaaagtaaataat

SEQ ID NO: 658505 - DNA, 615 bp, Homo sapiens
atatcaacttatgggcatctgtaccacaactggaagtgtgaatatttagatttttttgtatgactggtattgaactgactcccctgatggaccattgatgttatcaacattcaggatgtaggccgggcgcggtgatgcacgcctgcaatcccatcactttgggaggccaaggcaggtggatcacttgagctcaggagttcaagaccagcctgggcaacatagtgaaacccagtctttacaaaaaacaaaaaattagcagggcatggtggcacatgcctrtagtccaaaaaaaaaaaaaaaaaaaaattaagatgtaataatgtggcactgcctggcttcaggtttttgttttgtttttaatgaaaaataatgaacagaaagttcacataaacgaataaataaccttcaatataagcctggaatacatttttataatgatgtatcaaatattttttaagttgtcaaaaataatctttttaaaatgttcttaaagttaattgaaaaattagtttcaaatgatgtacatttttaaaatatgttggggagcataataatagtgaaataactattgaaattaaatgtttttgtctttaaatgttaaaatttgtattctta

SEQ ID NO: 658506 - DNA, 615 bp, Homo sapiens
atatcaacttatgggcatctgtaccacaactggaagtgtgaatatttagatttttttgtatgactggtattgaactgactcccctgatggaccattgatgttatcaacattcaggatgtaggccgggcgcggtgatgcacgcctgcaatcccatcactttgggaggccaaggcaggtggatcacttgagctcaggagttcaagaccagcctgggcaacatagtgaaacccagtctttacaaaaaacaaaaaattagcagggcatggtggcacatgcctgtagtccaaaaaaaaaaaaaaaaaaaaattaagatgtaataatgtggcactgcctggcttcaggtttttgttttgtttttaatgaaaaataatgaacagaaagttcacataaacgaataaataaccttcaatataagcctggaatacatttttataatgatgtatcmaatattttttaagttgtcaaaaataatctttttaaaatgttcttaaagttaattgaaaaattagtttcaaatgatgtacatttttaaaatatgttggggagcataataatagtgaaataactattgaaattaaatgtttttgtctttaaatgttaaaatttgtattctta

SEQ ID NO: 658507 - DNA, 615 bp, Homo sapiens
atatcaacttatgggcatctgtaccacaactggaagtgtgaatatttagatttttttgtatgactggtattgaactgactcccctgatggaccattgatgttatcaacattcaggatgtaggccgggcgcggtgatgcacgcctgcaatcccatcactttgggaggccaaggcaggtggatcacttgagctcaggagttcaagaccagcctgggcaacatagtgaaacccagtctttacaaaaaacaaaaaattagcagggcatggtggcacatgcctgtagtccaaaaaaaaaaaaaaaaaaaaattaagatgtaataatgtggcactgcctggcttcaggtttttgttttgtttttaatgaaaaataatgaacagaaagttcacataaacgaataaataaccttcaatataagcctggaatacatttttataatgatgtatcaaatattttttaagttgtcaaaaataatctttttaaaatgttcttaaagttaattgaaaaattagtttcaaatgatgtacattttwaaaatatgttggggagcataataatagtgaaataactattgaaattaaatgtttttgtctttaaatgttaaaatttgtattctta

SEQ ID NO: 658508 - DNA, 625 bp, Homo sapiens
tatctgttaccagggtgccaaacagctgttcaggagctgcgacgggtgtctaactgctcactgaagaggtcaaagagagctttgagaaatgcttgccctgacagtgatgtttgttctctcagtgctaccgctgatcgccttcataccagccaatcrcatagctgagaactcaagcaagcacgaaatagaaaaacctcaatttgaagagttttatattgaaaatatccaggatttcctgattattttacagacaagctaacgaaattcagtagatgacctgcgtttcatcgctgccagatgataaacatttgggagcagggaccacttgctgaaaggcatcttgagagatatgctcccacttctcagatcggaagactaaggccccaaagcctccagatctagcctcttaatccaggcttcttcttagccactgtggtctcaccccgtttatcaggcagtgggatctgtctgccccacccaactccagagcttttccttttgttttggaattgcccttgagttctgcgccgctcttctcctcttccccgtgggtatgaaaacaccaaggatgtcaacaggaaaagacaaggatctgtaaacagagaagcgagcaggaaacaaggcc

SEQ ID NO: 658509 - DNA, 625 bp, Homo sapiens
tatctgttaccagggtgccaaacagctgttcaggagctgcgacgggtgtctaactgctcactgaagaggtcaaagagagctttgagaaatgcttgccctgacagtgatgtttgttctctcagtgctaccgctgatcgccttcataccagccaatcacatagctgagaactcaagcaagcacgaaatagaaaaacctcaatttgaagagttttatattgaaaatatccaggatttcctgattattttacagacaagctaacgaaattcagtagatgacctgcgtttcatcgctgccagatgataaacatttgggagcagggaccacttgctgaaaggcatcttgagagatatgctcccacttctcagatcggaagactaaggccccaaagcctccagatctagcctcttaatccaggcttcttcttagccmctgtggtctcaccccgtttatcaggcagtgggatctgtctgccccacccaactccagagcttttccttttgttttggaattgcccttgagttctgcgccgctcttctcctcttccccgtgggtatgaaaacaccaaggatgtcaacaggaaaagacaaggatctgtaaacagagaagcgagcaggaaacaaggcc

SEQ ID NO: 658510 - DNA, 625 bp, Homo sapiens
tatctgttaccagggtgccaaacagctgttcaggagctgcgacgggtgtctaactgctcactgaagaggtcaaagagagctttgagaaatgcttgccctgacagtgatgtttgttctctcagtgctaccgctgatcgccttcataccagccaatcacatagctgagaactcaagcaagcacgaaatagaaaaacctcaatttgaagagttttatattgaaaatatccaggatttcctgattattttacagacaagctaacgaaattcagtagatgacctgcgtttcatcgctgccagatgataaacatttgggagcagggaccacttgctgaaaggcatcttgagagatatgctcccacttctcagatcggaagactaaggccccaaagcctccagatctagcctcttaatccaggcttcttcttagccactgtggtctcaccccgtttatcaggcagtgggatctgtctgccccacccaactccagagcttttccttttgttttggaattgcccttgagttctgcgcygctcttctcctcttccccgtgggtatgaaaacaccaaggatgtcaacaggaaaagacaaggatctgtaaacagagaagcgagcaggaaacaaggcc

SEQ ID NO: 658511 - DNA, 538 bp, Homo sapiens
catggggccacctatgaccactggcttctgagcatcatcattttgcttgatattgaattttcagtttagttatgtatatattgttatccttatctttcacaattgtcatattaatacacattttgaacatctacagatagggctactgagatcaacaggataattatactgatttttgcttttaattttgccaaagactgcattgaaattctccccttgtactttctttcttcatatttccttcaaaggagtctgagctcatttaacttgctttattctctaaagttcaacaatactagtaggactacactggccacaccgataagcagcaatctgtactaagcaaagagggccagttccaaccaagccagtccactgataggaggctccagggttgggggggtggcggggtgggrcagggcccagagagagcaaaaaacaacatttttttggttgtctattatgctgtatgccagcacttacagttccatttgtaaacattaatttaatcctaagtcaactcagtgaacattgtatt

SEQ ID NO: 658512 - DNA, 600 bp, Homo sapiens
ggtgatgagggctatttcttggacactcctagcacaggcagtggcaagagcaccaaatcgctctgaagtatggactgagctgttaccattcattagaggcctgtgtgaggatccaaatagcctaactggagttgattgactctcctgacaggtataaccactccaattttctttcttttcgttctttcttgagagtcggggtctcattctgtcacccaggctggaatgcagtggtgtgatcatagctcactgcagcctcaaattcctgggctcaagcaatcctcccacgtcagcctcctgagtagctgggactacaggcacatgccaccatgcttggctaatttattttgttttattttttacagagatgagaatctgtctatgttgcccaggctggtctccaactcctgacttcaagcaatcctcctgcctcagcctcccaaagtgctgggattacaggcatgagccacagtgcccagccccactcccattttctgaatctttcagaatttcagattgccttaaactgcccaaaaaagctgctataaaacctcaacatatcgctgctgcrcaaaaccacccaaaccatcttcagacctc

SEQ ID NO: 658513 - DNA, 581 bp, Homo sapiens
agatcttcatccttgtcttcacattgaataggtagaggaggagaggaagagaaggagttggtcttgctatctcaggggtggacgaggcagaggaaaattcacatataattggatccatacagtttaaacccatgttgttcccagggttaactgtagttccttacagtttacagagcactttggcatggaaatggaaactataaacaaacaaacaaaaaagacaaatgcctgcagttcagcaaggtagaacaagttttcccaaatcacacagacaggatgtagtgaacttagaactctactccaggtgatatatttccaagttcagagtccaaaataaaacaaaaggtacagtaattataagtcaatttaattctcaatagttttggacatgcggctaaaaattatagctagtggccatctgtcaacaaatgtaaactatgaaactggatattaaattatatctaatttaatacactgtacataggatctaattttacatactgtggcctaacagtgtgcaaaatgttaggctacccctgtagygtacagtgtcacctctgtcatatacctctgtcaaactg

SEQ ID NO: 658514 - DNA, 540 bp, Homo sapiens
atactcctgcctcaacctcccaaagcactggcattcgaagtatgagctgccacacccggcttgaatgccttttttaaaatcatgagcctcagcatcatccttactcacatttattaacactgtttgcaaagcattcctgctgatactgccttatttgagccatattcacttgtttactccacaattctttttaatctttacaatgtgactaattagtaagatgactaagagagtgttccctactcccgttgccatcacaggccagtgatggagataaaagtaaacaagtgattccagcatgctagacacaactctacaatggaattcgggagcccaaactattatggaagcatataaaagttggactcaaaccagaatgaggtgagaaggacaccttggtcaatttttgtattattataaagaagtaactgagtctgggcaattcaaaaagaaaagaggtctatttggctcacagctctgcaggctgtataaggagyatggcaccagcatctgcttctggtgagggcttcaggaagattc

SEQ ID NO: 658515 - DNA, 558 bp, Homo sapiens
ggtaacatatatcaccatgggtagaggccagatttctttgattgcagtgatggatgtctatgtgctggctccacgactttagatgagtcagttaacttccccatgcttcagtttccttatttatgaggtggcaattatgatgataccttcctcagccaggcgcattggctcacgcctataatcccagcactttgggaggccgagacaggaggatcacctgggcccagaagctcaagwcctgcctgggcaacatggtgaaaccccatctctacaaaaaatacaaaattagccaggtgtggtggcatgtgactgtagtcccagctacttgggaggctgaggagggagaatcgctttagccccagagtcagaggttgcagtgagccgagactgtgccactgcactctagcctggctgacagagtgagaccctgtctcaaaaataataataataataatagtacgtacctcaaagggctgttgtgtagtttaaatgaatcaatacatacagcatttagaattgtacctggcagataggaagcattcatttggaaagaagagt

SEQ ID NO: 658516 - DNA, 554 bp, Homo sapiens
cattagaaggtaacatatatcaccatgggtagaggccagatttctttgattgcagtgatggatgtctatgtgctggctccacgactttagatgagtcagttaacttccccatgcttcagtttccttatttatgaggtggcaattatgatgataccttcctcagccaggcgcattggctcacgcctataatcccagcactttgggaggccgagacaggaggatcacctgggcccagaagctcaagtccygcctgggcaacatggtgaaaccccatctctacaaaaaatacaaaattagccaggtgtggtggcatgtgactgtagtcccagctacttgggaggctgaggagggagaatcgctttagccccagagtcagaggttgcagtgagccgagactgtgccactgcactctagcctggctgacagagtgagaccctgtctcaaaaataataataataataatagtacgtacctcaaagggctgttgtgtagtttaaatgaatcaatacatacagcatttagaattgtacctggcagataggaagcattcattt

SEQ ID NO: 658517 - DNA, 562 bp, Homo sapiens
agaaggtaacatatatcaccatgggtagaggccagatttctttgattgcagtgatggatgtctatgtgctggctccacgactttagatgagtcagttaacttccccatgcttcagtttccttatttatgaggtggcaattatgatgataccttcctcagccaggcgcattggctcacgcctataatcccagcactttgggaggccgagacaggaggatcacctgggcccagaagctcaagtcctgcctgggcaacatggtgaaaccccatctctacaaaaaatacaaaattagccaggtgtggtggcatgtgactgtagtcccagctacttgggaggctgaggagggagaatcgctttagccccagagtcagaggttgcagtgagccgagactgtgccactgcactctagcctggctgacagagtgagaccctgtctcaaaaataataataataataatagtacrtacctcaaagggctgttgtgtagtttaaatgaatcaatacatacagcatttagaattgtacctggcagataggaagcattcatttggaaagaagagt

SEQ ID NO: 658518 - DNA, 565 bp, Homo sapiens
tcactattttttaagtgaaaaaaaaagcaagttagaaaatagtgtgccatacctattttaataagctattttcaagaatcaattgagaccatgaatataaaagtgatttgttcctatttcttacacttcactatttcttgaaaaatttcttaccagawtcatctattacttttatcataaaaatctaatgaaaaatattaaaaagtgatttgtgcactggaaagaacactttccagttctcaagcgagaaggtattcttatttttactctaattcttaggagatatttggttcttaggaaattgttttctcacgtactatatgagagaacagttttgaattttctttcctttctttttctttctttctttctttctttctttctttctttctttctttctttctttctttctttcttctttctttttttttttttgagacaaactctgtgctctgtcacccaggctagagtgcaatggcacgatctcagctcactgcaacctctgcctcccaggttcaagtgattctcctgcctcagcctcctgagtagctgggattacaggtgc

SEQ ID NO: 658519 - DNA, 603 bp, Homo sapiens
gggaggacttctcaagagaagacagaagggcacstgttccttctgctgcttccatgtaccagagaaggaaggcagaggcctcccagatgacagggatggctcctcagagactaggctggagaggtactggggaatggacctagtctctgtagcatgacacagggcctttcggagagccagctacactcagctagaaagcctcaaccaccaaagagaaaggggcgagtgatcccgtctctcttcctgctacagcctgcccttccatgtgtgtatgcaaaactaagcatgatccttgaaaaaaagagaatgaaaaatatagaaatgatgacagtgctttactgataataagatcatgggtgattttttttcctgttacagttcccgaattttgtttattgttacattaattgtttaaagtaactgtatttaaatgatgaggtttttgttttaggcaaaatcaaaccagctgcccaaattgaaaaattatcagagttaagcaacaaacgattttgaagaaccttcctaaaaattctcaattataatctatgggaacatcaatgtaaatgttaacatacagaaaaaagccactcggtaaatgttatt

SEQ ID NO: 658520 - DNA, 504 bp, Homo sapiens
cgtggtggctcatgcctgtaatcccagcactttgggaggccgaggtggggggatcacttgaggtcaagagttcaagaccagcttggccaacatggcaaaaacccatctctactaaaaatacaaaagttagctgagcatggtcgtggtgcacagctgtaattccagctacttgggaggctgaggcaggagaatctcttgaacccaggaggcagaggttgcagcaagctgagattgcacccctgccctcagcccgggtgacagagaaaractcttatctccaaaaaaaaaaaaaaaagaaaagaaaaaaaagaagtgtatgtatatgtgggtgtgtgcacatgtctgtgtatgtgtgcacatgtgtttgcacaagtgcatgtgtgtacatgtgtgcatgcgtatatgtgcagtgcagcagtgatggcaacccaggtgtttgctcttatgagctttgggcataaaactctccatttgaggcataaatgcccctcccatctgcttctt

SEQ ID NO: 658521 - DNA, 504 bp, Homo sapiens
cgtggtggctcatgcctgtaatcccagcactttgggaggccgaggtggggggatcacttgaggtcaagagttcaagaccagcttggccaacatggcaaaaacccatctctactaaaaatacaaaagttagctgagcatggtcgtggtgcacagctgtaattccagctacttgggaggctgaggcaggagaatctcttgaacccaggaggcagaggttgcagcaagctgagattgcacccctgccctcagcccgggtgacagagaaaaactcttatctcmaaaaaaaaaaaaaaaagaaaagaaaaaaaagaagtgtatgtatatgtgggtgtgtgcacatgtctgtgtatgtgtgcacatgtgtttgcacaagtgcatgtgtgtacatgtgtgcatgcgtatatgtgcagtgcagcagtgatggcaacccaggtgtttgctcttatgagctttgggcataaaactctccatttgaggcataaatgcccctcccatctgcttctt

SEQ ID NO: 658522 - DNA, 485 bp, Homo sapiens
actaacataacttattgttgatgatgtcaacttgatcacctgggtgaggtagtgtttggtaggttcctctactgtaaagttactctctcttcccktgctttttatactgtactctttagaagaaagtcactatgtgtaacccacagctaagaaatggggaattatgcttcctctcctttcggtcagagtatctacataaattatttggaattcttctgcaagggacattttttaattctctcctatgtatttacttattcaattatttatattcatataatgaatacatacacagttatgaatatttattttatatttttggttataacgcagtattatgttatttgttttattgattaaattttttcctctttgcctactgggaactcttcagttggctcctgtgtccttttggcatttgtggttttttcttttttcttttttagcactttcttaccttctggcactataagatgttccccctg

SEQ ID NO: 658523 - DNA, 535 bp, Homo sapiens
agcttgagtagccacacacagcgtccggtttgcctgtgatagactggtttatgttggttgtccgagggtcattacttaatagtttggatgatacattatgtttgcacccgaacactcacccatatgcattacaaaagaatagcagctggcaaatgttacaatgaaaaaaagatttttatataattatcggtgtaaaaatacaacaatactgttcatatttttccatggaattatttccattagttggcatgagatgttggcttttggaaatatagcagctgagttctggtttatttacttagagaaaaattgtggtatatttcagtgtgccatgttggtgtgtgttgtatacataaacacacmcaaaggacacacacacttgtaatatcattacagaagtaagactcaagttgtttgtttacactgtaggctcagacatgttcatgcttgtctagagagctagtaggataaggctgcctctgcactgggacaggtagaagagtggtttccattcgcataatgagcagagaaacct

SEQ ID NO: 658524 - DNA, 535 bp, Homo sapiens
ttcaaaatcttgtctcttttgaagagtactcatcagttattttgacaaatgtccctcaattgcagttccatgatttttcgtgattggaataagctgtgcatttttrtcaaaaataccacagaaatgatttatacttctcagtgcatcatatcaagggcttcataatgtctacatgtcttatgattggtgctgttgtctttaatcacatgttataatggtgtattccagatttctctatttataacattaatacttttataccatgcaaatcggtttctcaaaattctacccattcatttttgtatccatcagtggatctcatctccaacaatgttttactgtggtgcttgtctaatagtgattttccatgtcttttctacttttattaattagaattttattgtaaggagagtgatgtcttttcccctaagtatttactgattctattatttatttatgggctcagggaagtatcgtttattctatgggttaaaattcaataccatcattatttattttgtgctcaaaatgttca

SEQ ID NO: 658525 - DNA, 619 bp, Homo sapiens
ttttgttgccttttttttcattttgacatataatattttattaccactcgctttaaaatattctaaaaatccattgcaatttatcttttggcctatagcttatataaaaatatgctgatttcaaaatattttggaatgtttactagagatggggagcagaaaaataaagctctatgtctcagggacayagataagagaagaaaccatcctgggacataccactagttttccttcaactgaaggaaggacagaatctctaagaaagcctcattcctgagtcccagagacccaatgcctgcttaagacggaggcttaaacagaacaacagaatacacgtcacgactaccactaggcttacaggtgttgtgtaacagtaacacttgtctactcatgggacaacagaaagagcatgtggagactttttctgaggcccaggtgcaatgagaagacctaaagctaagggtggaactcagatggagaaaaatcatctgacgaatgagccccgttatcaacacaagataaaagtggatacagttgaaccgtgtgataaactgagggtaacaaaagcagcaacaaaatcaaaatgtagatgaatttttgcttagattgaatcaactcc

SEQ ID NO: 658526 - DNA, 607 bp, Homo sapiens
ttgaaagttagagtggataaaatcatagtcagaaattgttcaacctttcctacctcccccttcattttattggtaggagaattgaggtgcagtgacaggaaatgacttgttcacggttccagagacaggaaaaggaagagtgttgttttgtttttataaataaacattttcataagttaggatgagttctaactactcttcaagtgttaatacatttaattctcaattcaaatttatgggcttatattattaacctcatcattcaccttctctagtttctagaagtaaagactaaagcaaagaaaggtttagtatttgctgaaggccacagtttgtaactggctgagttaagatttgtaccccagcagtgaggttacaaagtgaatgcttttcacccctrctaggccacccagaacagtatatttcttcttgtaaaactctgacattcaaagtcagtcctgtccttgaaatctgagatgtagaaacacaatgtgatgaaaatcccaagtatttccatctaagcacaaaagcctctatctatttggtaagaacaaattaattccctgaatctttgatgcaaaagtgagagaagaatagtaaaaacgaa

SEQ ID NO: 658527 - DNA, 554 bp, Homo sapiens
actagtcattgtattctcgaatgctgatctttcacaaaagatgcatttctcatttaaagaaattgtcagtctcactttaaaaagtctttaatgaagcaataaaagtattgattttattaactcttaattttgaatacatattttttaatattctgtgtgacaaaatgaagagctctcctgcatactgaagtatagcatttgccttgaggaagaacatttatgcaattgtttgagttgcaagctaaactagccactttttcatggaacatgattttacttgagagaatgactgacagatattcttggatatatggtgaaaatattcttggcaatgaaaaatgtaaagctgtaaattcaacgaaaacaactgattgtatcacccatgataaaatttgaactttccagtgaaaaaycaaattttgaaaaacctgtatacaccaccatgaacttgacttaaacactttcctaatgagattggtagtgttactaatggacaattttttttatattgtatgatgatatgtggccatttagaagctttttaaaaaataatt

SEQ ID NO: 658528 - DNA, 594 bp, Homo sapiens
aaactaacaaattctgcacttaaatttgagtaggtttttaaggtactgacaagctgactctaatagacatctacagaatacttcacgtaacaatcacaaaccttcttctcatctggtcatcattagtaatcatcagagaaatgcaaatcaaaaccaaaatatgataccacctcacaccagtcagaaggcatcctcatctttcaccttatacaaaaatcaacttaagatggatcaaggacttaaatctaagacctgcaaccataaaaattcaagaagataacttcagaaaaacccttgtagacattggcttaggcaaagacttcatgaccaagaacccaaaagcaaatgcaacaaaaataaagataaatagatgagacttaattaaactaataagcttctgcacagcataagaaacaatcaacagagtaaacagacaacccacagagtgggagaaaatattcacaatctgtacatccaacaaggaataatatcaggaatctacaaggaactcaatcaaattagcagtaaaaaaamcaaacaatcccatccaaaagtggcttaaggacatgaatagatcattctcaaaagaagata

SEQ ID NO: 658529 - DNA, 590 bp, Homo sapiens
tgctagaaacattgcttgttttcatttcacttccttgaatctgaaatattgttctggtacttctttcctgaaccagtgaccccgccccccaccacctcattcctctgctctttctccaacctaccacacaaattcacacactgtgctatttctctagagctcagagctatttcgtctctattttgagctgtatcctaaatcrcttcatattctttctttcagaatcttaaaaaaaaaaaaaatctgccacttccaggtctccttttttcagttctgatattgttattccctcaccctcaatgataatttcctttcaatagcagtcagctatctaaatcttgcctgtgtctgtggttgtagatgtgcttgctcacatgttttcaagacattaagcctccttgctgaatttttgactttgtatctttcttttcacaagtcaatataaagatcctaagtaatcagttaaacagcaaatgactctgatcttggttgttccacaggcacagttttgagcaattaatgctcatttgaagtcactgaatcacaggattttcccaactgtttagcctttttaaaccatgagataagtg

SEQ ID NO: 658530 - DNA, 582 bp, Homo sapiens
aaaaacagcagcccatctcctagacaaaaagtgtgcaccagaacatcaaaactctacttaaatgctactctaktggggattttggttatctgtataccaaatgccttgctaagtatttcccacagaaagacaagcctttattgcttggttcctgcagtgtccttgggctactttttcttctttcctgcccttgcaattccaggtaaagattcagaaggttcagcaatcgaaggtaagatcccaagggcagcagagatgctgggggtggggacagtggggagccctgcccttcagtgagcagagacagctactggcagggctagtctctgagtctgcagatgtagtgctctgatactcctagctctcttcccctcagcagaattttagccacagtctgtctccaatgtgctgacctgagctcccttggcctacaatttcattccacttataccagattgctccaaataaatcactgtatcagggagaggtaaattcacagggtgcttttccaaagaagtgtttccattagaaatttcacaaagtgctgccaatgtcatttacaagaaggttaatttattacca

SEQ ID NO: 658531 - DNA, 588 bp, Homo sapiens
gaaagactccttttggatgaatgtttcacagcagttaataatgtggtcagaatacctgttgcctaggaggctcacatctgccactttcatacagcaggcagcatccttcatgctgtagtgggagtcttcatgagggccttcctgggtgggaaggtgtatagggtagggaacagtggcctggcctggccagtttatccctgaagactggccactaatgtcttccagctgggcctcttcctattcacatggagtgagaggtggggarggggcaccccatgccaagcttgccaaccccatctaagaggcacacatgtctacaaacagatgagcctctacttcattatcacctcggccgggacatgttcacatctgatattggattaaagaggtgctaaaatcaatcaagctggagcataatttccaacacagagtgaaaatcaaccttatgggcccacgcttagccagatggactgccaccacctggttttattaaaaatagaggacttgtcaccactgacagcctaaatattccactttcctccttttttccttttctccaaaatattctcattgcctgtcctgtcacca

SEQ ID NO: 658532 - DNA, 570 bp, Homo sapiens
ggagggaccggtgggaggtaattgaatcatgggggcaggtttttcctgtgctattctcgtgatagtgagtaagtctcacaagatctgatggttattataagggagagttttcctgcacaatctctcttctcttgtctgtcactatgtgagacatgccttttaccttctgccatgattgtgaggcttccccagccacgtggaactgtaagtccgataaacccctttctttcgtaaattgcccagtcgtgggtatgtccttatcagcagcatgaaaacagactaatacarggacattaactgctaaaagaatttcagtgagtacacaagctaatgaggaactgataaattgagctattaggacatcatgtttgattgcttcagaacatagcaaggcaccatttaccacagatacacctaaaggattatctgcagcatgtcatgaagtttaaaatccacaaattgatctccacatttattcatagcatgtgctctgttattcctctcttcctgcaggtcactgtaagccctgagcggtggatactgttgtcacctagactggcccctgggtac

SEQ ID NO: 658533 - DNA, 493 bp, Homo sapiens
ttgtctttgttgagtaaatttttttttcttttgccacttcctcattcactaataatttttttttaggttttccatcctagttttgaaccccaattacatggcacaggatgartgagcatgagaagtgtatccagatactttgttctcttactattcgagaatcgagttggaccttccaccgtgctcagctccgccttggggtgtcctaaataaaactttaccactttcctttacagttcaaatctctggtaagatctccgccagttaccctcacaaatgtcctcagtaatttttgtttggcagctgttcccacaggtctgcatgaaccaggtatttttctgcgttcccttttgccccctcctcacgtccctttgtctcaccacctaggaggcagcaaagccatcctgtgtcacagctgcattaacacgaactggctagtttggtgagtcaacaatccaaaggctgttttttgcagggtgcagctcctgtcaga

SEQ ID NO: 658534 - DNA, 638 bp, Homo sapiens
aattcaaatttaccctatttctttgtcttcacagatgacaaatactggttaattagcartttaagaccagagccaaattatcccaagagcatacattcttttggttttcctaactttgtgaaaaaaattgatgcagctgtttttaacccacgtttttataggacctacttctttgtagataaccagtattggaggtgagttttaatggttggtcattcgacccctcagattgtgaaacagatatggaatgaggctttctagaaggcacattttctgcgcaagttcccaaagctccttgaccttccagggagagagattaagagaatataggactgaaatagttattgtcaacttagttctttgtgtttttggtttctgatatatgaaatagtagataatgtgtgtttttttttaaaaaaacactctaaataaaatgtcatcttattaatcatagtggaaacacattggaaaatagtgtcatagatgtacaagaccaagtatttaatctacagtcagtttcgagggttatggatttccagattcctttctgtaatcactggattcaaaagacaaaatgagacaaccatcctctaaatgacaggaggtcaggaggtcctgcaagatcttccttaaaagaa

SEQ ID NO: 658535 - DNA, 638 bp, Homo sapiens
aattcaaatttaccctatttctttgtcttcacagatgacaaatactggttaattagcagtttaagaccagagccaaattatcccaagagcatacattcttttggttttcctaactttgtgaaaaaaattgatgcagctgtttttaacccacgtttttataggacctacttctttgtagataaccagtattggaggtgagttttaatggttggtcattcgacccctcagattgtgaaacagatatggaatgaggctttctagaaggcacattttctgcgcaarttcccaaagctccttgaccttccagggagagagattaagagaatataggactgaaatagttattgtcaacttagttctttgtgtttttggtttctgatatatgaaatagtagataatgtgtgtttttttttaaaaaaacactctaaataaaatgtcatcttattaatcatagtggaaacacattggaaaatagtgtcatagatgtacaagaccaagtatttaatctacagtcagtttcgagggttatggatttccagattcctttctgtaatcactggattcaaaagacaaaatgagacaaccatcctctaaatgacaggaggtcaggaggtcctgcaagatcttccttaaaagaa

SEQ ID NO: 658536 - DNA, 533 bp, Homo sapiens
tcatacacacacatagacacacacacacacacacacacacacacacacacacacacacacacacttgagacaaggtctcactgtcacccaggctggagtgcagtgatgcaatcacagctcactgtagcctccacctcccaggctaaaggaatcctcccacttcagcctcctgagtagctgggamtacaggtgtgcgccaccatgcctggctaatttttgtatttttggtagatacggagttttgccatattgcccaggctggtctcgaactcctgggctcaagtaattgcctgctttggcctcccaaattgctgggactataggtctgagccactgcacccagccctcatatatatttttaatgctaaattaaatcagcagttctgaaaaacagtctttcataaaactgtttcctccttgaggtttaacctgtttctattcttttcccaagtcaacaagattcaaaacattggcatccttttttgactccttacttcccttcaattaccgttttctatgcccacatactatta

SEQ ID NO: 658537 - DNA, 622 bp, Homo sapiens
tccttctacacagtgcattctagtctaacctaaacacgtttaactcatcgcttagagcacaggaagtaacattggtggcccacatgtcaaaaggtggatgtttttgtgactcctggtccttattctccaaagataacaaggtaatgacacaagaaagtttttgttaaagaaattgataaatgtraagtactgtctgcattttttttattagtccaacttgcatcaaagaggttcataaaataaattggcctcattgagtttatttctggaattatcaattgaacatgtgcttgcaaagacagagacctcttctggccttctctggcttctcattctacagttttcatgagtcctaaaacattttgtctcccatttctccaattaatttcttattcttctcatcacttgccatatttgcacattctgaatattccagttacatactacataccaggcttcatgtttgtcttcccctcttgtatgtgagagcaagggggaaatgaccatgatatgttttgactgaacccctggctcctagaaccatatcgtccatatatatttgttgagtgaatgactagatgcactgcttgaagagtctaacgaaagataaacttagctggat

SEQ ID NO: 658538 - DNA, 431 bp, Homo sapiens
tgattgatgaatattgatacaaatatccataacaaaacactagcaagccaaattcaacaacacattcaaaagatcattcatcatgaccaagyaagatttatccaagggatgcaagaattgttcaacatatgtaaatcaattaatgtgatacattgtatcaacagaagaaaggacaaaaaacataaaatcatttaaattgatgttgaaaaagcatttaataaaattcaaaataccttcatcatgaaaatcctcaaaaaaaaacaacaggtactgaaagaacatacttcaacataataaaagtcatatactacagatccacagctagtattatactgagtggggaaaactgaacgcctctcctctaagatcaggatgtccactttcaacactgttatccaacatagtgttgcaagtcctaggcagagcaatta

SEQ ID NO: 658539 - DNA, 599 bp, Homo sapiens
tgtggtgtgggggaatttggggaatgttaatgggtacagaaacaaaagaataatcacattgggtacacatagaatacaaatgggctcaatggacactggggtcaataagagggaggacggaggtagagggtcaagggttgagaaactaactattatgtactatgctaacaacttggatgagaggagcaattgtcaccaaaaccacagcatcatgcaatatacctaggtcacaaacctgcacatgtaccccttgatggaaaataaaagttggaattatataaaaaaaaaatatcaataggagayactcttacaatttaatggaacgaaggcatttaaactagcaattattgcagacttttcagtgtctctttttgattaaaaaaaagtgggaggtaataggaaagaatgtagatactggaggatttcagattttgaaattttggatgaagagtaacacatttagaactagacaccttgaccagaatggagcttcagtactcctctccaacttcttcaaatccccaacacaaacatacagacatttgcccacggacattcatacaacctacttcttttaatgtcctaggaagagatagaaa

SEQ ID NO: 658540 - DNA, 599 bp, Homo sapiens
tgtggtgtgggggaatttggggaatgttaatgggtacagaaacaaaagaataatcacattgggtacacatagaatacaaatgggctcaatggacactggggtcaataagagggaggacggaggtagagggtcaagggttgagaaactaactattatgtactatgctaacaacttggatgagaggagcaattgtcaccaaaaccacagcatcatgcaatatacctaggtcacaaacctgcacatgtaccccttgatggaaaataaaagttggaattatataaaaaaaaaatatcaataggagacactcttacaatttaatggaaygaaggcatttaaactagcaattattgcagacttttcagtgtctctttttgattaaaaaaaagtgggaggtaataggaaagaatgtagatactggaggatttcagattttgaaattttggatgaagagtaacacatttagaactagacaccttgaccagaatggagcttcagtactcctctccaacttcttcaaatccccaacacaaacatacagacatttgcccacggacattcatacaacctacttcttttaatgtcctaggaagagatagaaa

SEQ ID NO: 658541 - DNA, 600 bp, Homo sapiens
aaattccttctgagccaggctgcagatgcctaggagatggagctggggcttccacatcctttccatgcttccactctgatcacttggacactggtctcttgttctggttttacgttgggaagtccctggaaatggggtctgtcacctgatcagaactgcactctgtccctgctggctgtagtagctgcccgagaggaggatgagggtgccaggcagaggctgcgagtccctgttctgggtttggttccttggtcctggtctgagctctgtgaggtctggattctgtgcaggatggcaacttgctcttgagcacgtgaaggtgtagatcctattgtgccagatgcagtatactgtctcaycctcagaaggagaccccaaattatttgttgttaaagaaagaagctaaaagggtcaaggtactgacagtgtttcttagatttgatttgtttacttcagaaatggattcctttgccctgttctcaggaagaagaatacaaggcagtagctctaagtaccatgtgctaacagatgacgccatggtatcacctcaaaggagtgggaagaatgtgagagtaaatagagagttaaaaaactgtggca

SEQ ID NO: 658542 - DNA, 600 bp, Homo sapiens
aaattccttctgagccaggctgcagatgcctaggagatggagctggggcttccacatcctttccatgcttccactctgatcacttggacactggtctcttgttctggttttacgttgggaagtccctggaaatggggtctgtcacctgatcagaactgcactctgtccctgctggctgtagtagctgcccgagaggaggatgagggtgccaggcagaggctgcgagtccctgttctgggtttggttccttggtcctggtctgagctctgtgaggtctggattctgtgcaggatggcaacttgctcttgagcacgtgaaggtgtagatcctattgtgccagatgcagtatactgtctcaccctcagaaggagaccccaaattatttgttgttaaagaaagaagctaaaagggtcaaggtactgacagtgtttcttagatttgatttgtttacttcagaaatggattcstttgccctgttctcaggaagaagaatacaaggcagtagctctaagtaccatgtgctaacagatgacgccatggtatcacctcaaaggagtgggaagaatgtgagagtaaatagagagttaaaaaactgtggca

SEQ ID NO: 658543 - DNA, 549 bp, Homo sapiens
ctaggtcagcctaggcaaatagagatggaggcacatctgagcacactgagaatcttcctgatacttctactgcactgatcgtgttcaaaagacagattcaaatgccatagcattgatgtttcttcatgttattccactagcctggagaaaagtgattttttttccaatgtttccaaccctatttccttatgctttgatgaggtgaaactgctttttttggggggcggagcgggggggctgcctctgttagatcaaggctacctagtttgggagaaagactgggaggttagttttatcaaaaaaaaaaaaaaactctcatatcatccttcaagcctcatttgaaagagttcttcctctgattatctcacmatttcatataagcatttatgctttaattctcacatcattgccttatagttcatctgtttgtctcattcgctggacccccagctatgtgaaaatgggaccccataattcacctttgccaatctggtattatctgccatggcgagtagatggcacatatagaaatttaaaaaaaaaaaaaaa

SEQ ID NO: 658544 - DNA, 549 bp, Homo sapiens
ctaggtcagcctaggcaaatagagatggaggcacatctgagcacactgagaatcttcctgatacttctactgcactgatcgtgttcaaaagacagattcaaatgccatagcattgatgtttcttcatgttattccactagcctggagaaaagtgattttttttccaatgtttccaaccctatttccttatgctttgatgaggtgaaactgctttttttggggggcggagcgggggggctgcctctgttagatcaaggctacctagtttgggagaaagactgggaggttagttttatcaaaaaaaaaaaaaaactctcatatcatccttcaagcctcatttgaaagagttcttcctctgattatctcaccatttcatataagcatttatgctttaattctcacatcattgccttatagttcatctgtttgtctcattcgctggaccccmagctatgtgaaaatgggaccccataattcacctttgccaatctggtattatctgccatggcgagtagatggcacatatagaaatttaaaaaaaaaaaaaaa

SEQ ID NO: 658545 - DNA, 609 bp, Homo sapiens
tgatcactaatgttggagctggggcctagtgggaggttattgggtcatgggggtggatctctcatgaatggcttggtgccatccccttggtgataagtgggttctcctgttctcgctcagtcagttcacacaagatctggtcatttaagagtctgggacctcttccttttctctctcttgcttcctcctttgccatgtgatatgtcagctccctcttcaccatctgccatgatcataagcttgctgagkcctcaccacaagcagatgccagcaccatacttcctgtgaagcctgcagaactgtgagcccaaacaaacctcttttctttataaaagtatccagcctcaggtattcctttatagcaatgcaaacttactgacacagaaaattggtaccaaggagtggggtgttgctataagatacctgaaaatgtgaaggcagcttggaactgggtaacaggcagaggttggaagagtttggagggttcagaagaagacaggaagatgaaagaatgttaatcttcttagagacgtgttaagtggtcgtgaccaaaatgatgatagtgatatggacagtgaaggccaggctgacaggtctcaggtggaagca

SEQ ID NO: 658546 - DNA, 647 bp, Homo sapiens
gctggccgtttaaatcccctggaagttatttcagtcagttggggagagcttgcaacagtgagggagatgcaaaaacaatggccataacctctttgtgtgatcagaagcagcaatctggagatcagagcacaaatacctaataattgcaggacagggtcctgttcgtccaccctggctctcaaagttgtatgaaagttgtattatataaagctgctccaggaacaggtgcacaattrcctgccactgggcttagagtgggggatgggtagccgctactgtattaagagctgaaattcaccaaaattcactacaatttactatctaagctgtcccctggaagatggaagccttgcattgactccagagttctaacatagttacatcagacagattcttccagtgcaattgtcatctaggtgaggagctagatttctggtagttccaactctgccatcttcctagaatcctcacctgtggttctttttaaagttctctttttccttaatttcttaggcattgatctaattatgtactgtggataactcaattttctgtattttgggagtgacttgaatgatttaataatttgaatataaccttaatggaagtttatgttagtgaagctttcatttaatttccgaaataac

SEQ ID NO: 658547 - DNA, 647 bp, Homo sapiens
gctggccgtttaaatcccctggaagttatttcagtcagttggggagagcttgcaacagtgagggagatgcaaaaacaatggccataacctctttgtgtgatcagaagcagcaatctggagatcagagcacaaatacctaataattgcaggacagggtcctgttcgtccaccctggctctcaaagttgtatgaaagttgtattatataaagctgctccaggaacaggtgcacaattacctgccactgggcttagagtgggggatgggtagccgctactgtattaagagctgaaattcaccaaaattcactacaatttactatctaagctgtcccctggaagatggaagccttgcattgactccagagttctaacatagttacatcagacagattcttccagtgcaattgtcatctaggtgaggagctagatttctggtagttccaactctgccatcttcctagaatcctcacctgtggttctttttaaagttctctttttccttaatttcttaggcattgatctaattatgtacygtggataactcaattttctgtattttgggagtgacttgaatgatttaataatttgaatataaccttaatggaagtttatgttagtgaagctttcatttaatttccgaaataac

SEQ ID NO: 658548 - DNA, 553 bp, Homo sapiens
aaaaacctacattcaaagtacgggtatttgaaagtaacaaattatactacttacatacagagaaaaagacataactaaactacttcaaacccaatgcagaggaaactttcaaggcaaatgatgacttaktacttaaaaagtggtttttctatcttcaaagtgctaaagaaacaagtattcaaaaagaaacttcaggtcggtctacgaagttctgactgacttgaagtagtgaaataccaagaatgcagtggacaaatttaaaaggccttcattagaataaagtatatcttaactacattttgcaaagaaatgaagcaatggttgcacaaccagtcagggccaagttagtaacatacaactcagccatcagcccacctctccttcaaactaaactaatctaaatgtatttttcagaaaatttcctccatactccatgtatgtgttacatacatccaatcatatccatattttggatcatttttttctatattcatcagattattggttaaaatgcacagcaagtagaaatgatccatttcaaaattcttaatat

SEQ ID NO: 658549 - DNA, 575 bp, Homo sapiens
agaaaggattgttgtgatctaccattccaagtgttgatttatggttctttatgccaaaaggaataatatgagtctacttcaagatggcagccctatgattatattttgtttctctccatttcaaaccatcaccgatttcttcaattgctttttctatggtatggtttccaaattctttaccattgtgtctgcttttctggttttattgcttattgatgtatcttctcaaaaatggcttctacatatgaccctaaccctgacattttgtgatccctgagtgtggttgtgatattgttayctgctttcaaaatatgacacttctactaatataggctaagactacagaaactgcaacaaattagcatcacataattggttgataattgggcttttagtcaacctgaaattttcacttgaactctggctaaattaggtattggtcattattgactatattgtctttggtgaattccctaaccatcctttagcctcagtttcctgaatatatctatcttactaattgttacaaaagatgaaggaaaaatgcatgtaaagtgtcaactcttgcctgaaac

SEQ ID NO: 658550 - DNA, 561 bp, Homo sapiens
agtttatcaaatgcagccattagggatgggcccatgttaccaaaggacagagtgggggaaggtgctcattccaagaggctgctgcaagagttcagtcaacccaggacacctagagccatctgggcctgaagccaggggctggcaagtgacagaatggaccacagagtctttttctccttccacattttcaatagaccatatactgtcatagtattttgtgaaacatttaaaaatctaaagtacaacatacatacagaaaacacatgaaacctaaatacacagctctgtaacttatcacaaagtgagmacccatgtaactacaagtcaggtcaaaaactagaagttacctgcaccccaaaactgtccttgtatctcctcctttccaaagctagccactacaaccttgtgtgccagagttcgctctcttttagtttgtgcttattataaatagagtaactcaggatgtgtgttcctgatggatgtgtggcggctgatgacagaactacaaggagagcagtgccatgcactaaaccctgatcttgttctgggcattgggctaaa

SEQ ID NO: 658551 - DNA, 561 bp, Homo sapiens
agtttatcaaatgcagccattagggatgggcccatgttaccaaaggacagagtgggggaaggtgctcattccaagaggctgctgcaagagttcagtcaacccaggacacctagagccatctgggcctgaagccaggggctggcaagtgacagaatggaccacagagtctttttctccttccacattttcaatagaccatatactgtcatagtattttgtgaaacatttaaaaatctaaagtacaacatacatacagaaaacacatgaaacctaaatacacagctctgtaacttatcacaaagtgagaacccatgkaactacaagtcaggtcaaaaactagaagttacctgcaccccaaaactgtccttgtatctcctcctttccaaagctagccactacaaccttgtgtgccagagttcgctctcttttagtttgtgcttattataaatagagtaactcaggatgtgtgttcctgatggatgtgtggcggctgatgacagaactacaaggagagcagtgccatgcactaaaccctgatcttgttctgggcattgggctaaa

SEQ ID NO: 658552 - DNA, 561 bp, Homo sapiens
agtttatcaaatgcagccattagggatgggcccatgttaccaaaggacagagtgggggaaggtgctcattccaagaggctgctgcaagagttcagtcaacccaggacacctagagccatctgggcctgaagccaggggctggcaagtgacagaatggaccacagagtctttttctccttccacattttcaatagaccatatactgtcatagtattttgtgaaacatttaaaaatctaaagtacaacatacatacagaaaacacatgaaacctaaatacacagctctgtaacttatcacaaagtgagaacccatgtaactacaagtcrggtcaaaaactagaagttacctgcaccccaaaactgtccttgtatctcctcctttccaaagctagccactacaaccttgtgtgccagagttcgctctcttttagtttgtgcttattataaatagagtaactcaggatgtgtgttcctgatggatgtgtggcggctgatgacagaactacaaggagagcagtgccatgcactaaaccctgatcttgttctgggcattgggctaaa

SEQ ID NO: 658553 - DNA, 561 bp, Homo sapiens
agtttatcaaatgcagccattagggatgggcccatgttaccaaaggacagagtgggggaaggtgctcattccaagaggctgctgcaagagttcagtcaacccaggacacctagagccatctgggcctgaagccaggggctggcaagtgacagaatggaccacagagtctttttctccttccacattttcaatagaccatatactgtcatagtattttgtgaaacatttaaaaatctaaagtacaacatacatacagaaaacacatgaaacctaaatacacagctctgtaacttatcacaaagtgagaacccatgtaactacaagtcaggtcaaaaactagaagttacctgcaccccaaaactgtccttgtatctcctcctttccaaagctagccactacaacyttgtgtgccagagttcgctctcttttagtttgtgcttattataaatagagtaactcaggatgtgtgttcctgatggatgtgtggcggctgatgacagaactacaaggagagcagtgccatgcactaaaccctgatcttgttctgggcattgggctaaa

SEQ ID NO: 658554 - DNA, 601 bp, Homo sapiens
gaggcagcagaattgcttgaacctgggaggtggaggttgcagtgagctgagttcatgccactgcactccagcctgggcaacagattaagactgcatagagagagagagagagagagagagagagagagagagagasagacagacagacagacagacagacaaacagacatgatcttgtatatagaaaatcataagagatccacccaaaaaaaaaaactattacaactaataagcatgctcactaatgttgtaggagacaagatcaatcgacagaaatcagttctatttctgtacactagcaatgaacaatttggaaataaaattaataaaacagtttgaagttcagttggatcctggcagcagctgcagcagttctcttctgtgtctctctttgccacctccttttcacttccggaacatgtgtgcacatatatttgtttaaataactgttattaattcttttgcacatataaccaggaattaaattgctgtctgttatttaagccacggcaagattcttcccttcttcccaatagtaaaccaggaatattagaaatgttttatatttgaaaaagacctgtatatgaatccagaatcctta

SEQ ID NO: 658555 - DNA, 512 bp, Homo sapiens
tctttactatttcacattttcggccaacaaatcaaggtacaaacagaatttatttcacattaatatattaactggattttttgtcaaataaatagggaattctctttaaataaccatctccttacttcatggccagtgcaggaatgaactagagcaaatgtcagtgtgtccrggggcatgaggcttataggaaagaggcaggctgaggggctccagccagcatgcagggtcaggggccctcattcctggcccacccaggtggcacaaaggcacagatatgcattctctagttccagtagagaagccccttctagagggaagagagaggagacggaaagcaaattccagaaacactagcagaaagcagggaggcttcctccccagcctcagtgggcttgtcctgatgccactcaagtcctagaagctcattttacagcctcaaaagtcacatggagttggcaacaccatgacccaggacagggaaggggagggtgacagtggctggggccaga

SEQ ID NO: 658556 - DNA, 592 bp, Homo sapiens
atctacatcaagatttcaagacagcaaatacttatcagatgcctaccactttcccaatattatttaagagttgtttcaacatcaagggacaaggggacagaaaaggaatgggaacacactctaacctcgctgagctactccaccccaaattctgagaacacagtggagcttggaggtagactggaaggagttctctaggccggaaaaaggtgggtctggttctccacccttctgagcctctcctacagccacgaaaactgccccaggatgtcctcaggcaggcttacttcataggatgtaaaaaaataaaaaataaaaattaatgaagttggaacctacacatcacgcaaaggttgctaacctttaccctatataattatcttaagtgacctgaagagtatatggagatcctaaaattaccttgttcttgtargcaatgttaaggacaccttggtttattgagcccttggtaacttctgtcaaatatacagtactgtccttgaaatagtgtattctatagaagaaaacacttagattagtgaacaggccaattctaataagcttcttttaaacacacaaggagaaagaaaag

SEQ ID NO: 658557 - DNA, 551 bp, Homo sapiens
aatattttctgacaacatgattttgaatgtagcaaacccaagaatttacaaactagctgaacataggaaaatatcactggatatgtcaacatatacagattaactgtattcctgtaaatatcaattaacaagaaggtgaaactttgaaatgatacaatttacaataatataacacatagcaagtacccaggacttaatcaaattaaaggcaygaaagacacctgtgcagaaaactataaaacattattgaaagaaattaataaagaactaaataaatgatgactctaccatgtttctcatttcaaggacccaatattctaaggctggcaaatgagtctcttttattattattttatttatttatttatttgagacggaatcacgctgtgtcccctaggctgcagtgcagtggcacgatctcagctcactgcaacttctgcatccctggtttaagtgattatctgcctcagtctcctgagtagctgggattacaggtgcccaccaccatgcctggctaatttttgtatttttagtagagatgaggtttcacc

SEQ ID NO: 658558 - DNA, 596 bp, Homo sapiens
ggtttcaaaagctaaacctataaaaatagaaaatgagtgtaattaagtggtctaatttagaatgatggactttttaagtcgactattgaatttactttgatgcaaaaatttcaaacttttagaatgttagccatcattcattctgtgtgtgtttgtttgtgtgtgtgtgtctggattgaaaggaagacacaatttaaaaatcttttaaaaatgaaagctcttttaattctgtaatatacataatttagaagtgaaaataatgttgtttgatgttatttttaactgttataagtggtaaggtgatttggtcaaagtaggaaatactcattttatcagggtttttattttttatttttcttttttttttttgagatggagtcttgctctgtcgcccasgctggagtgcagtggcatgatctcagcttactgcaacctccgcctcgtgggttcaagcgattctcctgcttcagcctcccgagtagctgggactacaggtgcatgccaccatgcctggctaattttttgtgatttttagtagagacggggtttcactgtgttagccaggatgatctctatctcctgaccttgtgatatgt

SEQ ID NO: 658559 - DNA, 596 bp, Homo sapiens
ggtttcaaaagctaaacctataaaaatagaaaatgagtgtaattaagtggtctaatttagaatgatggactttttaagtcgactattgaatttactttgatgcaaaaatttcaaacttttagaatgttagccatcattcattctgtgtgtgtttgtttgtgtgtgtgtgtctggattgaaaggaagacacaatttaaaaatcttttaaaaatgaaagctcttttaattctgtaatatacataatttagaagtgaaaataatgttgtttgatgttatttttaactgttataagtggtaaggtgatttggtcaaagtaggaaatactcattttatcagggtttttattttttatttttcttttttttttttgagatggagtcttgctctgtcgcccacgctggagtgcagtggcatgatctcagctyactgcaacctccgcctcgtgggttcaagcgattctcctgcttcagcctcccgagtagctgggactacaggtgcatgccaccatgcctggctaattttttgtgatttttagtagagacggggtttcactgtgttagccaggatgatctctatctcctgaccttgtgatatgt

SEQ ID NO: 658560 - DNA, 579 bp, Homo sapiens
cttacgtagttaatttttgtatttctcatttggttttctagatgtggtttgttttctaaaatgtcttagtaagttggagaatttcttagaattggaacttgttcagatatatattttcttatttttccttcatggttttatatattttcatttaaatcaaactctgggggccttgcctcagctattagaagacctgaaagactttgtgtagctgtgctcctgatgaactgcagccggctgtcttctcttgctggtcctgagggatgtccaactctaatttgrcttcatccacagcttttgtcttctctgagttaaaggtgattggatctaattcggcaagcaggtgttagcgactgctactgtggggcaactgtcctttgcacaagacttatgaaaaattagcttaagaaggactctgttatagcaagaaaaagattctataatttgcagcacaaataatgtctgttggcagattagccatgtggactcaaaacatcttactgttgttctgtggaaagatttctctctgacttgatatgctttaattggttattcctagacctagaaaatcactgctgc

SEQ ID NO: 658561 - DNA, 539 bp, Homo sapiens
tatcctctacctcttcttcctccaactccacccctaccagctgggccttcctggcrgtgactcaatgtcttcctcctccaataatttcactcccatttgagtctttgctcagatgcaaatactttatgtgcctgcaatgtactcctccaatagttacttttacaaattccacctctttcctggcaaaccctcttgcctgtctccccgcccccaacatcggccactacaccaggggcccctctcctgttacccttcgcaagcatttagtgaatgaggaaaactattttcggggcctgattccagacatggtggaggaaacaggcacacagcaagcccattctgtaggaagcttactccactggagagagaaccagacacactcacagaagtgaggccaggcgtggtggctcacgcctataatcccagcactttgggaggccaaggtgggcggatcacctgaggtcaggagattgagaccagcctgaccaacatggtgaaaccccgtctctactaaaaatacaaaattagccaggtgtggt

SEQ ID NO: 658562 - DNA, 570 bp, Homo sapiens
taatataataaatgagctgacatcagggtaatttgcctttgccatgtggtgcaaatagttatcatttttcaaatcactgagtgccattattttgactgatattaratgtctttttttttggaggtaaagtataatatcgataattttcagattcactcataccaatattttgtctaaagacatttaccttgtctccatgtaaaaattttctttttcctaaatttcagtggttgcattttgtgatctatgattctcttcctttcacttttgtgtccaaaagtttcctgaactcattatttcttcttttatccacttcttcctctcgactacagttcatatccaaataactgtatctctgcctgatttttctgttttaagctatgtgtctgactaacctgaggaaacaactcagatgtcccatggttacaccaaatttgctcctaagccttccctttcttcagtatccctaggaaaattattatgatatcaagttttgcaagaaaaaaagacatatggacatcatttttaattaattctagtctttattctccatatccaatcaataatttg

SEQ ID NO: 658563 - DNA, 570 bp, Homo sapiens
taatataataaatgagctgacatcagggtaatttgcctttgccatgtggtgcaaatagttatcatttttcaaatcactgagtgccattattttgactgatattaaatgtctttttttttggaggtaaagtataatatcgataattttcagattcactcataccaatattttgtctaaagacatttaccttgtctccatgtaaaaattttctttttcctaaatttcagtggttgcattttgtgatctatgattctcttcctttcacttttgtgtccaaaagtttcctgaactcattatttcttcttttatccacttcttcctctcgactacagttcatatccaaataactgtatctctgcctgatttttctgttttaagctatgtgtctgactaacctgagraaacaactcagatgtcccatggttacaccaaatttgctcctaagccttccctttcttcagtatccctaggaaaattattatgatatcaagttttgcaagaaaaaaagacatatggacatcatttttaattaattctagtctttattctccatatccaatcaataatttg

SEQ ID NO: 658564 - DNA, 591 bp, Homo sapiens
tattgcactagcccagaccataatttagccgtgggaacagaaggataagttcatccatgtgtttaaattatactgtgactctctttcttttcttamacttctgggagtaggaagtgtgaaattatattaactacagtaatttgaaattttgaaatctgtgttttttatttgtcacctaaggagtatattgaatctctcatctttgttgtctgaggtatttcatcatataatatacttcagaaagtaaaagtaaaaactcttcccttttttttatttttaaactaactggcattattaatagatttgtgttcttgtctgtaaatgattgttagaaatatgaggtgatacctcagaaaacccttttttctaggtaaaggcattacacaaatacaacatgttaatatattttaggattgtttgttatgtgcagtgtctctcagagttttagctaggagccattggtatctgaatgagagaaacgtgataaaaatgggtattgatcatcagaatctcaggggatggggtcaggagtctgaattttaacaggtttttcagatgattattatgcacagaacatgagaactgctgatg

SEQ ID NO: 658565 - DNA, 530 bp, Homo sapiens
ctttgtgtgtgaaagactgtctttgattcagtaaaagcagctctgctttaacccarttaacagcactaagtagttatttccagtagacacatctgtgttgttattcactttcccgaatttgtgtccttttcttttttgaaatgactaagctgaagactcgattttctgaaggatatttaatctttgcttgcaaccaatttcaatgtatttactctacagatgaataccttggccttagtggttgaaaaatgtaaatctgttttctaaaactttatttaacctaaatggaagtctttatttttaaagttagtgaaatcgaattgtggatttcattgcctggatttcacttgtgtttttcatagcacatcacttactacccttcctttacctgcttggttttctaaatgccttttctaccaaaaactcactcctacctcctctacttatttctgtccacctctcttaacaacacgctttctttccccctgccctgtttcaggatacagtacagcctgaatgtggcagacagg

SEQ ID NO: 658566 - DNA, 583 bp, Homo sapiens
caacagaactcagttttagggatagtttacagaggggggatatgtatcttaaaagatatgggagcttacaagggacttccttgtgagcaatttgtgagggaggccatctggggagatatgtgatcctctatcattgtgggaacctggcttacggatgaggctgtgacacagagttgtgaaattacaactatctgtttgggaacaaaaggatggcagtattttgtgactcagttcccatggttaatttttcttttgtcctgataagtttgaggtcccaagattctattttctttcacacatcttagaggaatgtctaaggcatggccattagctcaggtgtctgatttataaattcttttagtcaggcttttgacgtaaaagaaattgacatcctgtttctgtttaaatctctagtgagaatctaaaatayagacaggtgtctaacgactggagaagtttcatattttttctgattaagaaatagtagtggggcttccagaatgtcagaagtggtccaaaataccactcctctcatgaaaacaccagaaaactagaacaaattcaaaaccaactgttataaaac

SEQ ID NO: 658567 - DNA, 583 bp, Homo sapiens
caacagaactcagttttagggatagtttacagaggggggatatgtatcttaaaagatatgggagcttacaagggacttccttgtgagcaatttgtgagggaggccatctggggagatatgtgatcctctatcattgtgggaacctggcttacggatgaggctgtgacacagagttgtgaaattacaactatctgtttgggaacaaaaggatggcagtattttgtgactcagttcccatggttaatttttcttttgtcctgataagtttgaggtcccaagattctattttctttcacacatcttagaggaatgtctaaggcatggccattagctcaggtgtctgatttataaattcttttagtcaggcttttgacgtaaaagaaattgacatcctgtttctgtttaaatctctagtgagaatctaaaatacagacasgtgtctaacgactggagaagtttcatattttttctgattaagaaatagtagtggggcttccagaatgtcagaagtggtccaaaataccactcctctcatgaaaacaccagaaaactagaacaaattcaaaaccaactgttataaaac

SEQ ID NO: 658568 - DNA, 575 bp, Homo sapiens
tctaatcctcttgttagggacatttgaaattggcctctttttggtcccttgagacttactttatttctgcttggtgcctatagaatttttaatttaatattgaagtttaataaccttttcccctgatacatggtgtgccatttctaccttactattgaattctctatttcacagaaacgttcctgtattatatctttgaatamttttctatttcatttgttcagttctctagtttaggaaaataagaggaaaatatgaaatggttagatgctaagtagatataagacattataagaagcaaagatgaaggaaatgtatcagatgtacagttcagaacaagtagtgtcgaagaggtcagagcgtctgggaaacccaatcaaaatgtttcccctgaagatctccgtattgtgtcagccatcatagactccctacaatagtacaaatagaacactgctccttcttaatcgttttttaagttagtatttaaccctcatttagtgtgtctttaccatgtgctaagtcctgtaaagacaaaagatattaatgctttagtctaaaatctagatttttttcca

SEQ ID NO: 658569 - DNA, 575 bp, Homo sapiens
tctaatcctcttgttagggacatttgaaattggcctctttttggtcccttgagacttactttatttctgcttggtgcctatagaatttttaatttaatattgaagtttaataaccttttcccctgatacatggtgtgccatttctaccttactattgaattctctatttcacagaaacgttcctgtattatatctttgaataattttctatttcatttgttcagttctctagtttaggaaaataagaggaaaatatgaaatggttagatgctaagtagatataagacattataagaagcaaagatgaaggaaatgtatcagatgtacagttcagaacaagtagtgtcgaagaggtcagarcgtctgggaaacccaatcaaaatgtttcccctgaagatctccgtattgtgtcagccatcatagactccctacaatagtacaaatagaacactgctccttcttaatcgttttttaagttagtatttaaccctcatttagtgtgtctttaccatgtgctaagtcctgtaaagacaaaagatattaatgctttagtctaaaatctagatttttttcca

SEQ ID NO: 658570 - DNA, 575 bp, Homo sapiens
tctaatcctcttgttagggacatttgaaattggcctctttttggtcccttgagacttactttatttctgcttggtgcctatagaatttttaatttaatattgaagtttaataaccttttcccctgatacatggtgtgccatttctaccttactattgaattctctatttcacagaaacgttcctgtattatatctttgaataattttctatttcatttgttcagttctctagtttaggaaaataagaggaaaatatgaaatggttagatgctaagtagatataagacattataagaagcaaagatgaaggaaatgtatcagatgtacagttcagaacaagtagtgtcgaagaggtcagagcgtctgggaaacccaatcaaaatgtttcccctgaagatctccgtattgtgtcagccatcatagactccctacaatagtacaaatagaacactgctccttcttaatcgttttttaagttagtatttaaccctcatttartgtgtctttaccatgtgctaagtcctgtaaagacaaaagatattaatgctttagtctaaaatctagatttttttcca

SEQ ID NO: 658571 - DNA, 531 bp, Homo sapiens
gcaattcttctaaaacatgagacagagaattccgatttcagctgacrctggctgttccctgtcaaagcagcacacgttactgaagaaagtgaacacccccttgaaagcggtgaagaaaccttgagaatatcattaaattataattaaattttattatatgaaaatagaaaaattttgtatcacctaaagttcaataaagtgcaaaagatacatggtaaacaggaaaaacaaaacaaaacaaaacaaaaaaacaaaacaggcctggcataacacaaaggtgttattacccttaatatataacaagtctctaaaaatagggaagaaaagactaccaacaagcccatgtaagcatgtcagagacatgaacaaacagttcaaagaaaaacaaaagaacaaatggcttttaatctcattcaaaatgtgaaaaagttcacattaaaactatactgagaaaccacttcaagacaaaattttagaagtttcacatgtaactacgttagtgtggctgtgcccacattgttgtgaagaaag

SEQ ID NO: 658572 - DNA, 531 bp, Homo sapiens
gcaattcttctaaaacatgagacagagaattccgatttcagctgacgctggctgttccctgtcamagcagcacacgttactgaagaaagtgaacacccccttgaaagcggtgaagaaaccttgagaatatcattaaattataattaaattttattatatgaaaatagaaaaattttgtatcacctaaagttcaataaagtgcaaaagatacatggtaaacaggaaaaacaaaacaaaacaaaacaaaaaaacaaaacaggcctggcataacacaaaggtgttattacccttaatatataacaagtctctaaaaatagggaagaaaagactaccaacaagcccatgtaagcatgtcagagacatgaacaaacagttcaaagaaaaacaaaagaacaaatggcttttaatctcattcaaaatgtgaaaaagttcacattaaaactatactgagaaaccacttcaagacaaaattttagaagtttcacatgtaactacgttagtgtggctgtgcccacattgttgtgaagaaag

SEQ ID NO: 658573 - DNA, 531 bp, Homo sapiens
gcaattcttctaaaacatgagacagagaattccgatttcagctgacgctggctgttccctgtcaaagcagcacacgttactgaagaaagtgaacacccccttgaaagcggtgaagaaaccytgagaatatcattaaattataattaaattttattatatgaaaatagaaaaattttgtatcacctaaagttcaataaagtgcaaaagatacatggtaaacaggaaaaacaaaacaaaacaaaacaaaaaaacaaaacaggcctggcataacacaaaggtgttattacccttaatatataacaagtctctaaaaatagggaagaaaagactaccaacaagcccatgtaagcatgtcagagacatgaacaaacagttcaaagaaaaacaaaagaacaaatggcttttaatctcattcaaaatgtgaaaaagttcacattaaaactatactgagaaaccacttcaagacaaaattttagaagtttcacatgtaactacgttagtgtggctgtgcccacattgttgtgaagaaag

SEQ ID NO: 658574 - DNA, 561 bp, Homo sapiens
ccactgcgcagtgctgggatcagtccactggcactacactttaacaatcctttatagcactgatagtgcttgccttccatttttcaggattcacctccaatttccagatcaaaacasagtgtgcctttgtatatacttcaaagaaaacaaagatgctagacaacaggaaatataaagtgaaatcaggtattttccaaaaaccaaaactatactagaattgatttttttaaatgtatatgtcttaatcattcaaataaagtcaactacaatggaggagatatttgaacccctcaattctaactttttactgagtctagaaaataataaatgcttgtagatactactgaaaagttctagttggcaaaccataaaagacatcccatacaaacacagaaaaattttaagcaaagaaatgagaatgaatagtctgaggaccatccccagctagcatgtgtgagatggtgtttagggtaaacaaccagactgatgagaaggacatcagttggctgcaggctccaatgcagtgaacttggggagcaatgtgagaggtgctgtctctga

SEQ ID NO: 658575 - DNA, 548 bp, Homo sapiens
ttaatttacaaattaactgcatgctgttaaaagtaagagatatattttaagattactcttcagccatctcaagcttgtctgtaatgtcccatatgagaactgatgcttctaggtaattggagatactttagagatccttttttttttttcatttcttctggccttcctttttataaatcatttgtgatcctttacccttcctccttgactgtcacttctaactctgccttgctttttttgtggacactgtcccttcatcttcacctttcaattacgactttatttttattccttggaatttagttaagaattattttgcaatatgccagggaaatatgaataagtatacagatatgtagggcagacacagtggctcatgcytgtaatcacaggactttgagaagccaaggtgggtggatcacctgaagtcaggagttcaagaccagcgtggccaacatggtgaaaccccatctctactaaaaaatgcaaaattagccaggtgtggtggcgcatgcctgtaatcccagccactcaggaggttgaggtgg

SEQ ID NO: 658576 - DNA, 581 bp, Homo sapiens
atgggccataaactgcgtaatacaaagagtaatagattgagctagaatccaggtgttcttatttctagttctaacactgtaaataactttgtagtattgagcgcacattaaactatctttaggattctatttcctcgtctgaaacactagcgtaatggggtggtaattgtatagcatcagggtgtcagttgacttttaagtaggaatttatcttttctctcttttatgtaagtaagatacgaaatggcatttagaaaaatgttcactgagttttgaaaaagaaaacacactgctttggtttactttgtctttttaaaaagacaacatttcactatgatgttgaattacattgcatgttccccataaacacttagaagttataataacgttactcatttaaaacccctgcagagctaccatgtaggtaatatttaaagatcattgttctgaatcaatgacatagaatgagttactgagctatcaaccgcctgcattggtgacaaaygtaattgtatataaatgttttatatgatgcacagatatgagtatttgatgagtacatgccattaaatccaaatata

SEQ ID NO: 658577 - DNA, 486 bp, Homo sapiens
ctctataggggagctacaagaaaaggggagggaaagagttcttgctgtagtggattcaacgtgaaaaatggtcaacagagctgactgagtgctggagacacagctaaaccagtgggcatgggtttggccatgcagatccttatagcatgttaagggttttgttttttctaacagtaatggacacccactgaagggttttaggcagtaagacaatgagatcagttttaactgcagtgtagaagaatggattgctrcatcattcatttatttcttcttcaaatcattattaagaacctactggctaaacactggagtcaaccaaaatatgcaagatatagtcatccctttgaaatgctcacagtctaatcggggagaaaggcattctattagtgtcccattgatgctgtaacacattctcatgaatttagtggcttaaaacatacacattgtttcttacattctggaggtcggaagtctgcaatggat

SEQ ID NO: 658578 - DNA, 542 bp, Homo sapiens
ctacaaaaatgcccactgtgattttgatcagaattgcatcaaatctatctagggagaatggatatcttaaaaagattgagtcctcctctccatgaacatggtataaatctctttttataatctaagccttaatttttcttagtaatgtaatttattctttattgtagacatcttgcgtctctttttttttttttttttggaggcagggtcgggttctgtcccccaggccagagtgccatggtgcaatcttggcacatttccacctctgccttctgggctcaagcaattctcatctatttccattctccattattycttccttccacttactttgaatttaattcactcttctttttatagtattttaagggctaaatttaggtaattaattttgggctttttccctaaaattatcatttgatgattgacaatttcttctaagagagtactgaccaatagtcctttctgtgatggtttactgttcaataaggtggtcactagtctcacatggttactgagcacttgaaatctggctagtgtga

SEQ ID NO: 658579 - DNA, 440 bp, Homo sapiens
aattactgttttcaatagtacatatatttttgcaacagtgatttttttttaattggaccatagttttaaaaaaattaatctttaagctggttttgatgatttggatactatcygaacctagtcttggtattccactcagcagccacagacagcctctttttgatgaacaaggccttgaatctgtaagactccctcatcctgccttcgggttttggagtaattcacccaaaacaagcttggtaaggttggatcagggtgaagaaaagaaaaatagagctgtaaataagtgaagacaagtccaggaagggacatgcaaattccaaaattgtgcaatataaatttagaaatatatcaaggttaaccttatctgtgttcaattttgtgtctgtacagtggtaccacttttactgctgatgtgccattgcggaaagggcgccaaa

SEQ ID NO: 658580 - DNA, 590 bp, Homo sapiens
caccaggtccctcccacaacgggtggggataatgggaactacaattcgagatgagatttgggtggggacacaaagcctaaccatatcagatggagtggattttagtgctggtgaaaggaggcaaggcatctcaggcagccagagctgtcctgctaagcaatgtggctgtacgccagaatggtcagtggtcaccgagtcccagcagtagcttctgctcagtgagtggctgccatttccccctcgtcttggcagccctgcaaaggaccgtattgtcatgctcattttgcagatatggaggtagaggccagtgcaggtaggagactagctacaaggccacatgggtgctctggttggattggaattagaagctgcgtatgtctgactgttggtgaggatgctgagaaggamaaggcatgattgggggaaaatgggagggtcatagtggtactgttgaaagagctcctgggaggaacaagtttatcttacccatgagggaaatgtggcacagagacagtaattgatacttggtctacagcaaatgggtggcagagcagaggagagtaggtgataagcttcaccccaccgtgagc

SEQ ID NO: 658581 - DNA, 590 bp, Homo sapiens
caccaggtccctcccacaacgggtggggataatgggaactacaattcgagatgagatttgggtggggacacaaagcctaaccatatcagatggagtggattttagtgctggtgaaaggaggcaaggcatctcaggcagccagagctgtcctgctaagcaatgtggctgtacgccagaatggtcagtggtcaccgagtcccagcagtagcttctgctcagtgagtggctgccatttccccctcgtcttggcagccctgcaaaggaccgtattgtcatgctcattttgcagatatggaggtagaggccagtgcaggtaggagactagctacaaggccacatgggtgctctggttggattggaattagaagctgcgtatgtctgactgttggtgaggatgctgagaaggacaaggcatgattgggggaaaatgggagggtcatagtggtactgttgaaagagctcctgggaggamcaagtttatcttacccatgagggaaatgtggcacagagacagtaattgatacttggtctacagcaaatgggtggcagagcagaggagagtaggtgataagcttcaccccaccgtgagc

SEQ ID NO: 658582 - DNA, 582 bp, Homo sapiens
ggagcatttcctccatgtcagaccagatgtcctcagcttcagctccaaaaatacagccacaggagggaagggaggcacagaggagaagtggtgtctccttccttggaggaggtggggcccacagggawtaattaataaatggcaccggttcaatttaaaatacaactaactgtatcctgtggggcaggtgattattgcaatgagtggcctggaggggagagcgaggatattggctgcagtcatctagtctttctgtcaacctatttaccccttgcaatcacctactcatccacctatctacctacctaactacccatctgtctaactagccattcccctgcttatcctccaaggaccttggacaaactacagaccctctgggccttggtttccctgttgcaaatggagataacaattctcccctgatctcctgagcttgtttaaaggattggatggacttaaagatgatccgtaaagtggtgcaaggaatgtgaatattagatagtggatgcattatttttgttgtcaacgttactaccaccacaaccgtatctgccgctgctgatacctagaccgttcttg

SEQ ID NO: 658583 - DNA, 638 bp, Homo sapiens
aggacgctggggtgggccctgcctgggaaggggctctcctgggcttctctcactgcttccttctttcatctccrttcctttcacaaatacattccctttccacctcctctctgaacccgaaaagggaagggaggcaggaggaatttctacattggaaggggaggaaaggggttttcactgggtgcaggctggatggtggaggagtcaggagctgcagttgtttatcagtcttttctgggatcaacttgggggtgaagggggaagcatggtgagagtgcactgtcaggttcaacaggctcctgggagctcttggggcaaaaaccctcccatcaggaacccacttatcaactctcaggcaacctctggccctgccaccactatagaagtccagtgtgcctcagtgcccacagatcttgaacagctctcaatagcctctgagcaccatttctgtgcctattggccccaccaaattagctgaggtgttctggcattcagtcctttcaaggaatacgtattagcctccacttatatgctggacactgagaaccaagcagaaacagaacaaaaccaggctcctaacctcatctgagcatggggagcctgcccctcaaagagcaaatatatgtgactctgtcagg

SEQ ID NO: 658584 - DNA, 587 bp, Homo sapiens
caattattgtatagcaataattggttgaatattactcaacaacttgaagctctgtcaggtgaaaataaaaggtagaattgttcactatggccacaaactgagaatgaaacatgagatcaccagggagatccatttctactaagcagaaagcaaacctttctattagtcagagaagatcaagggcagactgggttgcctttgaaggtggtgagttctctgtaactatagctgttcaagcagataccacttagtgaacatgctgtatacagaccccaaccctgccatccctgagagcctatgaatttatgtcaagatttatccgcacccatacaatgatctggtgccctctcccagatgttctgactttccctattcgagctgctataggtttctcttccacataaaccagaggaagcattctagctccaggtgctggtggacaggttgcttaattttaacacaactgtcatctggccacaagaatgtgtggaagtgactgytctcttttgggacctgagttcattccccagtgatatttatgccaaaatagaggaacaggttttctgtccacgtaggttctccagtgt

SEQ ID NO: 658585 - DNA, 555 bp, Homo sapiens
gtcttgatctcctgacctcatgatctgcctgccttggcatcccacagtgctgggattacaggcgtgagccaccacacctggccaagaaacgttaaaataatttttagacataaaaaggtatataaaatagctgcctttaatttatgacaaaggttagaagccttcagattatatttttggtaaatctatagaaatatttaaaatgtaattatttctttcacctagaattactattagaaggctcctagaattactattagaatgctgcttgagactcatggtctctacactgyctgtcctgtgctactcaaatgggcataaacaacatggagcaacataatatgttctactactttcagcattcaatgtacttagctgttacagacaaaggaaattatttctaccttagataacagctgtgaatccaactgaagccaagaaacagacaggacacatgttttagaatattaaatttccttatgaaaaccagcctcctacatcattttatcttttcgaaggaacttcctggaggacagctttgagctttatcatacc

SEQ ID NO: 658586 - DNA, 555 bp, Homo sapiens
gtcttgatctcctgacctcatgatctgcctgccttggcatcccacagtgctgggattacaggcgtgagccaccacacctggccaagaaacgttaaaataatttttagacataaaaaggtatataaaatagctgcctttaatttatgacaaaggttagaagccttcagattatatttttggtaaatctatagaaatatttaaaatgtaattatttctttcacctagaattactattagaaggctcctagaattactattagaatgctgcttgagactcatggtctctacactgcctgtcctgtgctactcaaatgggcataaacaacatggagcaacataatatgttctactactttcagcattcaatgtacttagctgttacagacaaaggaaattatttctaccttagataacagctgtgaatmcaactgaagccaagaaacagacaggacacatgttttagaatattaaatttccttatgaaaaccagcctcctacatcattttatcttttcgaaggaacttcctggaggacagctttgagctttatcatacc

SEQ ID NO: 658587 - DNA, 540 bp, Homo sapiens
gagaaaaaaataatttaaaaatttgatttttttcctttcacaatattcaaactcagactattttatgtaaatttttatttatataattttttgccataactaaaaaaatagcacttgtgatgttattaatctcttgcaatggatactgctgaaggcagagcaagactgtttaacttctgtccctrttgacctcctgtgtgtaatctaatggcttatttactgagcaaaaacagatcagctagtccttattaaagcctgttagagcaacaaaagtataatactattttttaatctgataacaacagaagtgaggagaagaaatcaaaatttattagcctgttaatgtgttagcactccttaatgtagacaaagtaaactcttccagcaaactgaagttcaatgttaacttgactccctatttatatgtctccttggtacctataaagaccttgagaaacttgaagggatggcttgtgttattaaacagaataacgtctaacactgtaaatcttggttccaaccctacatagccaagacatg

SEQ ID NO: 658588 - DNA, 540 bp, Homo sapiens
gagaaaaaaataatttaaaaatttgatttttttcctttcacaatattcaaactcagactattttatgtaaatttttatttatataattttttgccataactaaaaaaatagcacttgtgatgttattaatctcttgcaatggatactgctgaaggcagagcaagactgtttaacttctgtccctgttgacctcctgtgtgtaatctaatggcttatttactgagcaaaaacagatcagctagtccttattaaagcctgttagagcaacaaaagtataatactattttttaatctgataacaacagaagtgaggagaagaaatcaaaatttattagcctgttaatgtgttagcactccttaatgtagacaaagtaaactcttccagcaaactgaagttcaatgttaacttgactccctatttatatgtctccttggtacctataaagaccttgagaracttgaagggatggcttgtgttattaaacagaataacgtctaacactgtaaatcttggttccaaccctacatagccaagacatg

SEQ ID NO: 658589 - DNA, 387 bp, Homo sapiens
agtaaaccaagtttttcttaattcaagcaatatatatttcctaaatatttaatataagttccaactacaaatagaataacaacgtaggccactrctattctttctaaccaatccttcagggcagatgctgctgttaatacatggaacacactctagggtagcaaagttttacataatcaaatgcttctttactccagaagtccaagtacttaagctgagggtaagaaatctgaggatggcttcccatctttacataaatacatcaagtttccccctttaattgtaggtcacacagcctatatttttaatatattttagttcccttcactaatacagaaccctttgatgcagcacacaaaaaagttacattttagaaatagggatatt

SEQ ID NO: 658590 - DNA, 387 bp, Homo sapiens
agtaaaccaagtttttcttaattcaagcaatatatatttcctaaatatttaatataagttccaactacaaatagaataacaacgtaggccactgctattctttctaaccaatccttcagggcagatgctgctgttaayacatggaacacactctagggtagcaaagttttacataatcaaatgcttctttactccagaagtccaagtacttaagctgagggtaagaaatctgaggatggcttcccatctttacataaatacatcaagtttccccctttaattgtaggtcacacagcctatatttttaatatattttagttcccttcactaatacagaaccctttgatgcagcacacaaaaaagttacattttagaaatagggatatt

SEQ ID NO: 658591 - DNA, 570 bp, Homo sapiens
tatgtcatctttacatgttatagaaataatctaagggaaaaaattatatgcaaaatgatgctctcagcattattcaaaatagtttttaaaaatcagaatactttaagacatccagcaaaaaggaaatggttaaatatgatatatttaccaagtgaaatactatgctgtcaataaaattataattatgttctacatgataaaaattacatatataaattcaaaagacaaactgagaaaaaaacatttgtaatacrtgatacatcaaagacttatttctttggcattaaaacaggagaaaagattaataactcaatagaaaagctagcaaaagatatgaatagttcatagaaaaggaaatacagctatcttttaagtatatgaaaatatacaacctcacttataagaaaaatggaaattaaagctaaaataaaatatagtttttatttttcacaatggcacaagaaaaatatttgatactgcatggtagagtcaagaatttgagaaagcaggcacttttatatattattggtagaagaatacattggtgcacactctctgtaaggcaatttg

SEQ ID NO: 658592 - DNA, 542 bp, Homo sapiens
gcatttcagttttgtacaagcccatattattatctcccattcccttgtgggatattaaccctgaaatctctaggagtctgaagccacattttctggattctaattccagttctcccacacactattgtgtaaccatgaacaaggtacttctcygtgcttcagtttcctcttctataaaatgaatattggtcctagttcttcccccacaggaatgttatgagtaataagtgaaccgactttattaaaattcatggaccagtgcctggcccattgggagtgctctaaaaatgcttgcacttacttactcagtattagcaagtgcctccatgttagtttaaggcttactcattcagttttagctcactgaacttctaaaaaaatggatttcaaggatttcctttattttctttcaagctgtctgttataatttatccagaatctagctgaattacagaaggaagctttttgactactcaatttatgtgttgtggagtctgagctgaaggcagcaaccaaggcaggtttaagggtttgccagggga

SEQ ID NO: 658593 - DNA, 573 bp, Homo sapiens
ctttatctgacataaggtggaagtctctgctttttgatttggtaaggtgttccaggctcatcttacacattcccagccttagacctacattcttttcactctccaaagccatctggttctttttactggaaagtggtatttcaaaaccgtaattctttttcctcatgtcagctctttttttgcttctcaaggatatttaaaaatgtgtttatccagaatgtttrgttatttgagagagaggattggcccaaataacctagcccactattcataccaactcatactgggacctttgctaaatccattcattggcaagtgtttcctctggttatttgcatggcttattttcctaattctgtaaaggctttgcttaaaattgagcttctcaatgaatagttccctgattgtacagagtgcaaagaagtgagtgttgaataaatgaataaatagtgcctaaataaaacacatgggaagcttattaaaagggaacacagaaaggtcagaaaaagagatctcaaaaaatttaggtatcataacaaaatgaaacatttagatataaatctggaagcacag

SEQ ID NO: 658594 - DNA, 518 bp, Homo sapiens
agctgtgatttctgctagagaaatggaattaaccccaggtaataccacaaaaggggataagggaatgatgatctcaaacccattctctaatttctcactagggcttgccattggatgaatcaaacatggaaccatgggcaagtaagcccactgatgagttcgtagaggtcagcccctaggacagagagaaggcagagagcagctctggaagtacagtatcacagagaatagtttaataaacaatctctgagkcatggatccagaggcctatagaaacttcccaaatccagatagactctattctatggttgtcataccccagtgcatctttacatcctctgtctgcctggataccttaaagaagcacagcagaagttctcccagcaacaccatattttgatatgactctctttcctttttctatttttagggaaagggtcttgctcttttccctaggctgggattttaggtatgtgccaccacatccagccatttctaaagaatttttgtagagatgg

SEQ ID NO: 658595 - DNA, 518 bp, Homo sapiens
agctgtgatttctgctagagaaatggaattaaccccaggtaataccacaaaaggggataagggaatgatgatctcaaacccattctctaatttctcactagggcttgccattggatgaatcaaacatggaaccatgggcaagtaagcccactgatgagttcgtagaggtcagcccctaggacagagagaaggcagagagcagctctggaagtacagtatcacagagaatagtttaataaacaatctctgaggcatggatccagaggcctatagaaacttcccaaatccagatagactctattctatggttgtcataccccagtgcatctttacatcctctgtctgcctggataccttaaagaagcacagcagaagttctcccagcaacaccatattttgayatgactctctttcctttttctatttttagggaaagggtcttgctcttttccctaggctgggattttaggtatgtgccaccacatccagccatttctaaagaatttttgtagagatgg

SEQ ID NO: 658596 - DNA, 470 bp, Homo sapiens
ggatgtatgcaaatgaacttcttgacaggatatagggcttacagcttctttggatgggaattcttcacttgtgaagcctgttttcctttgagggagaaaaacaatatttaattcaatttttttaaaaaaattaaataaaatggtcatatggttctccaggggrgacatacttcagattctgaaaggatgatgagttactctaaaacaagtagcttttgtataaattggaactgcttctgatgagatatgggggagggaatgagttgatgtactagtctaatgagcaatattgctaaaaatcaattctaaacatcagggtgtgttcacggcaggtagttgagtaaaatattcactgaggagagtattacctcagtaaatgctgctggtgttggtttattttttcatcaaccctcagtaaccccaggagatcagaaaacaggtagggaagaataattatttattgttaatcc

SEQ ID NO: 658597 - DNA, 356 bp, Homo sapiens
tgcaagtctaaatttattcccacaaatattttttcaaatacaatgtccatcacacacacacacacacacacacacacacacacacacacayggctcgcaaagaaaccagactgcagagcaggagctagcaaaaacattagacaagggaaacagactcataaagattttagattttaaacaacgaggctggctataggtttaaaaagtgaaagacaagtttgaagatctctgtagagaataggaaactatgaaaagtgctgtagtaaatttacaaatgaatctaaaataattctagagatagaaaatacaataaccttaattaaaaacccagaagtaaagcttctggattggtggaa

SEQ ID NO: 658598 - DNA, 356 bp, Homo sapiens
tgcaagtctaaatttattcccacaaatattttttcaaatacaatgtccatcacacacacacacacacacacacacacacacacacacacatggctcgcaaagaaaccagactgcagagcaggagctagcaaaaacattagacaagggaaacagactcataaagattttagattttaaacaacgaggctggctataggtttaaaaagtgaaagacaagtttgaagatctctgtagagaataggaaactatgaaaagtgctgtagtaaatttacaaatgaatctaaaataattctagaratagaaaatacaataaccttaattaaaaacccagaagtaaagcttctggattggtggaa

SEQ ID NO: 658599 - DNA, 558 bp, Homo sapiens
ctggtctggaactcctggcctcaagtgatcctcccaccttggtctccccaagttctggcatttaaagaactcagcccagctcatgtaatttttaaatattcccactccatgtgattacttcagtctggacatgtcagactgaactgtcatttcagtttacatgtcaatttgtctttcatgtaaaaagggggaraataggaatatatgcttatattttgttgtatctgcatttaaaaaaacacaagaaaccaaagtggttacctgagtaggggtggggaaggcagtaaagaatagtgtgatggggatgagacttccaaatagataactttttgtattattttgacccttgaaccatgtgaatgtattttctctaaatatatttagatttgtttttgaacaagaaaaaaattgatagcagctatgaacatttttttctttttttcattttcctccttgatataagttacattttaattgtcttttggattgttttcttcagaattttaatcataaaataaatgaaataaataaatgcaatcatcattccattcctatcag

SEQ ID NO: 658600 - DNA, 635 bp, Homo sapiens
gatttcaaaaatttttggaacaccataaacttgtactaacttgctataaaacatatgaacataatctagcttgtggcaccacaaaggataaaacgtcattttgaaaagagctcctatcaatatattctgctaaaatactgaatatataaaaataaaaggaatagacattaaaccccattcaattattttttaacttcatatactaattttattttataaactgtttttaaagaaacacataacaggtactagtattttaaaaccatttagttgtgagtggcagtaattgaaatattcatgcggcagcttttaaaatgaaaattaactttcttacagatactgaaaacatttgcaaaaatattactgacattcttggcaattaagtgaatacatgaagaaaggaatcttgatttaatgtggatgtgggtgtaaggtaatacaattctatgcaaataagaaaaactttcaaagagtttctgaagaatatatgaaaaacaaatcattactcaaagatataaaatgctgtttaatgaaggtactactcctaaaygttatagccaaaaggacagaagaaaatgatagaatgatgaaaagtggaaagcttagtagttcaatatttgaaaacaaaccaaaaa

SEQ ID NO: 658601 - DNA, 301 bp, Homo sapiens
gaggcaggaggatctcttgagaccaagcgttcaaggccagcctgggygacataacaagacccccatctctaaaaaataaaaataaaaacaagtccttgaaagccttccctttccttctactcccattcaatcacagtcctatggtttcatcttcttactccctctcaagtttttcattttttccattttcaccactacccccaaaccactactatgttcttctgggcttttaaaatagctggctgtgtggtcactcatctccaatcttgcctctcttcaatgtgttctccacacagcactc

SEQ ID NO: 658602 - DNA, 503 bp, Homo sapiens
aggcaagaaccttggacttgtcctcaggatacctagtttgcagattgggtgcttgttgtatctctgtgacttatgggatgcgaccgcacttctcttctactcagtttctttatctgtaaaagaatatttttccctcctgtagagatgtccctttgtgtcaggtatgacccccaactcatgtttctaacatggaagaagttttgaactgctccattctaggtccttcaaatacttttctgttgtatgcttgtgatcatgcatttgtggggctgggargctgggaggaagtctatggcatgagacctttaaataaagcaggggtcagcacaccaggtctgcttttacatggatcctttgaagaccatactctaatattctgagctgaatatgaaatacaggccaatgggactggggcctaaaatggtgatacatgaacacttaaaaatatacaagtcactcaaaggaatggttcaaatggctaataaatttggaacgaatacaaa

SEQ ID NO: 658603 - DNA, 571 bp, Homo sapiens
aaagtaattttaccttgtaagaaatgtgagaaatatattgagaaatacattggattcctcatcagaaaacttacaggtgagaaaagagtggacttaatattcatatatttaatatttaatatatttaatacactgaacagagacctgtggttctgtgccacaaatggagtctgccagccacacacccaccagtgccccgcccctgtgctgacacagctgccagtgcaaatgcatgcaaagatgccagtgtccttgacccctggcccatgccacggccaccaccaacatgaacatgcacacrgaagtcgctggtacttcccgcccccacactgacatcactgctggtgagactgtgcaaatggacatggcagccctgccgtcctccccatgccaccactgccctccttcccatgccaccactactactgctgtgaatttctactggaagccaaacactccagtgcctgccagcactcagccccagccaacaatcatgcaactcactgcgctgccactgctgctggcacatgaaaacaatcatgaattctgctgccattgcccaaagaaacac

SEQ ID NO: 658604 - DNA, 549 bp, Homo sapiens
ttttgctacttaaaaggagcaaggctatcctgttaccttttgacttttcttttttactttggacatttttttgctgctagtttcaaccagagaagctcttttttatgtgatctctcgcctcccccctcaacccccatcagaacacttcctgacagctgagtcatgtcaatggaaagctacttcatattctttttccccagggaaaggggccagagagctttcactgggcaccccggggactacagctcacaattcctgccaatgtgaccacaatcaagggttttgacatgcagttattgtttcatgatttgtatactcaaatcttttattaaatatgatttcttttgyttttgtgcaatctaatgcaaatcagattggatgaatattttatattgttcctgtaatgtgcagtataatttccttttaaatatttttcagataggtacttcctgggctttttttttttttggctttgctattttagtttttctattattattacaagttatactgttgtaattaaacattaagaacacttgtggatcaagg

SEQ ID NO: 658605 - DNA, 591 bp, Homo sapiens
gcgcattctaaataatttaagaattaaaagaaaaaaagtcggcttcaattttaaaatactttcaaggatgcattcaattttatagscattttcctaatttttgatatttgtaactgatcatcttaatgagagaaaacattttgcaactcattaaaaattataaatattgaataaaagtattttagtttattattctgacaattaactttacagtagattacatatatttaatttggctttgccagtattgacattctgcttgctttcttctgtgtatttcatgcttgcctctcaattcctttcactcataatattctcttacataggaggatatatatgtttctaattttaacatggaattctatccatcttcatattgtggctattatgtgaatgaaaaaaatcatttgaaatgacccagaattccaacaagccacctaacaatcttaaaaaatagtcatttactggggatctaaaaataattttaaatatttcaaatttgattgtaataaagaaatttcactgggatccttatttaaattattctaaaggactgaaattaatttctctatttgtagaactagcaacaga

SEQ ID NO: 658606 - DNA, 590 bp, Homo sapiens
accaagtaaagaaaacatgccatcaaactgagttcataagcaacatctaccaactggcttatcaatgacagccatctgtctacacgggcgtaagtatgtgtgtagatgtgttcacgtgtgtgctcaccacagaaaggctctccaagtatgtgagtttcctccagttattaaggaaaattgcttatttttagactaaatgacaagaggtcacactgaatgtgtgctctgtggtgtatgtcctaacttgatttccacagcaagtatacaaaataagcaccattatcattattttacagataagggaacttaggttacattatatgtctatggtagaggatcaaagttaaagcctctactcaataacccaatagattatattatctgggtctctcagagtagaactggctgaccttsaatgaatttaaatgttgacagctattagatacagtctctgccaggatctctcctctccactataaacccgtatcttcgcctgcctattagacattcctacctgggtttccacaaagctctcaaacttaccttgaattctatctggaaatgttttatcctgctcctccttccagcct

SEQ ID NO: 658607 - DNA, 668 bp, Homo sapiens
cccccaacacaatataatgcacatataatgacataataaatgcacaactgctatagatattgatggcagcggtggcccgtctggagcagccaatgcagggaaacaagctgcaatcaaggaggcayggctggggctgcacactccacagagccagcaggggctggaaaaaggtgggagtcccatggcctaccgagttggcagggcaggagccccacactcccaggtgcagctgcagccacttagccattgtgctggacctgggaatccctgcattctcaaggctctggaaagccttctgcccctccggctcagaagtgcctgctcccactccctgacctctctcccctcccagcgccctctccattgcagagcaaagtcatggccaaacctgggcacttttgtgacccagctgggtctgtgggtgcttggggtggtactgacatgctagcccccttgtgcctcagtctcctctggactttgggtgccaataagcataggagagaatctgggcggttctgagggtagcttgtcatggacctgcaggtgcccctttggtccaaacaacctgggcaccgtggacagcatgttgatggtgtcaggaggcagagaggttcctaggcgggaaagggcaggtccccctgaagcatcacattcaagccagggaccac

SEQ ID NO: 658608 - DNA, 668 bp, Homo sapiens
cccccaacacaatataatgcacatataatgacataataaatgcacaactgctatagatattgatggcagcggtggcccgtctggagcagccaatgcagggaaacaagctgcaatcaaggaggcacggctggggctgcacactccacagagccagcaggggctggaaaaaggtgggagtcccatggcctaccgagttggcagggcaggagccccacactcccaggtgcagctgcagccacttagccattgtgctggacctgggaatccctgcattctcaaggctctggaaagccttctgcccctccggctcagaagtgcctgctcccactccctgacctctctcccctcccagcgccctctccattgcagagcaaagtcatggccaaacctgggcacttttgtgacccakctgggtctgtgggtgcttggggtggtactgacatgctagcccccttgtgcctcagtctcctctggactttgggtgccaataagcataggagagaatctgggcggttctgagggtagcttgtcatggacctgcaggtgcccctttggtccaaacaacctgggcaccgtggacagcatgttgatggtgtcaggaggcagagaggttcctaggcgggaaagggcaggtccccctgaagcatcacattcaagccagggaccac

SEQ ID NO: 658609 - DNA, 554 bp, Homo sapiens
ggatgcccacaagtcccaaggtgccaggacaaggccggagttgcatgttgtcctggactaattattaatagtgttccctttcaaaccaatgagggtccygagggtcctggtttgggcaataaattatatggtcacccaacacattaaaaacaaaccggccaggcgcagtggctcacacctgtaatcccagtgctttggtaggccaagccaggtggattgcttgagcccaagaggtcaaggtcagccggggcaacatggcaaaaccctgtttctacaacaagtacaaaaattaggcaggcatggtggcatgcacctgtaatgccagctgtggtctcaggaggctatagtctttctgtaacacctgtagtcttaggaagctgaggtgggaggatggcttgagcctggaaggcagaggctgcagtaagccatgaaagtgccactgcactccagcctgggtgacagggccagaccctgtctcaaaataaaatatgaaacaaacaagccaaaaagatagttgaatggccaagccaagaggcagggatgcctatgggtgt

SEQ ID NO: 658610 - DNA, 554 bp, Homo sapiens
ggatgcccacaagtcccaaggtgccaggacaaggccggagttgcatgttgtcctggactaattattaatagtgttccctttcaaaccaatgagggtcctgagggtcctggtttgggcaataaattatatggtcacccaacacattaaaaacaaaccggccaggygcagtggctcacacctgtaatcccagtgctttggtaggccaagccaggtggattgcttgagcccaagaggtcaaggtcagccggggcaacatggcaaaaccctgtttctacaacaagtacaaaaattaggcaggcatggtggcatgcacctgtaatgccagctgtggtctcaggaggctatagtctttctgtaacacctgtagtcttaggaagctgaggtgggaggatggcttgagcctggaaggcagaggctgcagtaagccatgaaagtgccactgcactccagcctgggtgacagggccagaccctgtctcaaaataaaatatgaaacaaacaagccaaaaagatagttgaatggccaagccaagaggcagggatgcctatgggtgt

SEQ ID NO: 658611 - DNA, 519 bp, Homo sapiens
ttttgattctgattaatagcaggtgctcatgcatgtgttttccgtgcattgcttccacaagcctgtgtgaagcatctgtgtgggcgatgcttccggcaaagaatggatgccttcactgagggagaatgtgagcccaggttgcgtgggtttgtaagttggggatatagggtagaaaatggtgaggttcagacaaatagccagtgtattcatgtcccagtctgttcaaaaaaattcagagcacaactgatgggcaagaaatgccaaatgaaggctccttgcaacattggccctgggtcaggcagtagtgggtacaggcctaggcaggtgtctggcacttaccatggggctggggcccagggmagccttctcctatgatgctacccccagggacttgtctccaggaggggttgggatgcctacggccaggagggccacagaatgacagtgtctggaaacagaaggaaaggacatggggtggggtggggaggaggtagaatgtcccgtcagacaggaggccag

SEQ ID NO: 658612 - DNA, 669 bp, Homo sapiens
ttatgaaaactgtatccagagtgtgtttagatggaactagaggggagtatgtaagtatgtttgcaatctgttagggtaacccagatgtctgtcatgtttaaaacttggaaaattttacctactatctggattaagtgagaygctttggcaactctgaatctgaattcttgcatgaagaggttggctggagcaggcagcagctaccctcttcagactatatgtgtcctcccagttttacacagttcccaggagattcacctcatctcactcatttactgacctgcctgggctcttttggcatctgcatttttaaccttgacaggaactttggtttttaatattagtgtgatttaatttcaggctgaggaatcccagcgatgttaggtttgcttaaatcatttgtaactgagatatgagaaccaaatttgcattttggaaaggtaggacatagtgtgaaaggcggtttcacgaattctatattaaatatcatcattgttagtgcttgacctggtttaaatattgagtcactgttggtatgtgttaccttggaagctgagtttagaactaaaataatgggaaatactacagttacgaatcaaaaaggttgacttgcagtcctaatcttgaagactttgggtaatgtagaagcaaatgaatatgagaaatatg

SEQ ID NO: 658613 - DNA, 582 bp, Homo sapiens
aacttaaactcctccctttcttaaaataacataaatattagtaaatgccttggtatggtcccgagggactcagccttagaatttcccttttcttaatttgatcttagacctgaacccacttaaagccttcaatttcacatttgaaggtaactaaaactgcattccctcacctttctagcatgtctttttaatataycataaagaactcagtactgtattcagtatttcagcaaaaaggctgcttgttaaattcacagaaggaacgcataaaaggcagaagtaaataaacgagacatagaattctttttttcaaataaaagaactttaaaaataaattggcctgcaaaactacttttgcaattacagtgtcatatttggccccactatgtctcagaggcactgcataaatatgaacagaatcgtctaatgcactttttcaaaacagtgcttctcagccaggggctagtgtgaattcattctacagctaggtgccggtgacacttcggtttgctttactggcaacattttggagatgcgtcctatactaagaggaaggctagaaaccaagcacatgtcaagagc

SEQ ID NO: 658614 - DNA, 586 bp, Homo sapiens
ccaacatccaggtacccaaatccctagggacactatagagagccatgacattgtcttagggtcatataccaagacacagcagagggtgaggagccagaatgaaaagagaggggtgtggaatgcaacatggtaggaagaatcagttaaggaaaagctcayggaaataaaaattaaactatatgcatatgtaaagtgcttgaaaaatgtcctagaaggaataaccccaaaaagaacaataggaaagtagagataaaacaaattactattccaggagcctgacatctaatcgccactctagagagagacaaaagagaaaacactaaggaggaacttatcaactagtacatgaatattgaccagaaaggaagtacataagtgtcagattaaaaatacctagcacaataaatgggaaaaaaatccatatcaaggcatgtcattgtgaaatttcataacagcagaaataaaaatgtaatcctaaaatctatcagagagagaaagagaaaaaatatgggaacaacaacaacaggcagaagaggtcagatacaaagcctcaggaaagagcctggcatgatgaggcttcccaaca

SEQ ID NO: 658615 - DNA, 586 bp, Homo sapiens
ccaacatccaggtacccaaatccctagggacactatagagagccatgacattgtcttagggtcatataccaagacacagcagagggtgaggagccagaatgaaaagagaggggtgtggaatgcaacatggtaggaagaatcagttaaggaaaagctcatggaaataaaaattaaactatatgcatatgtaaagtgcttgamaaatgtcctagaaggaataaccccaaaaagaacaataggaaagtagagataaaacaaattactattccaggagcctgacatctaatcgccactctagagagagacaaaagagaaaacactaaggaggaacttatcaactagtacatgaatattgaccagaaaggaagtacataagtgtcagattaaaaatacctagcacaataaatgggaaaaaaatccatatcaaggcatgtcattgtgaaatttcataacagcagaaataaaaatgtaatcctaaaatctatcagagagagaaagagaaaaaatatgggaacaacaacaacaggcagaagaggtcagatacaaagcctcaggaaagagcctggcatgatgaggcttcccaaca

SEQ ID NO: 658616 - DNA, 522 bp, Homo sapiens
accccaaacaccaggcttcagaagcagatgagacgagacaaggagacaaacaagacaaatggcagaatggtgtggcagagagagagagagaagaaaaggaatractgaacagcaagaggagttcagctgggggcaatcgaagaggagtttggccaatgtatggccaaaactccaggggaaggtcatcctcttactctttcccccttccagttctccatccatcccactgagaaccacttcaataactacacattcacccttcaagctcatgtgtgacctgattcttctgggatgctggacaagagctcgggatgcagaaagctgtcacactggccgtttgcccttgtgggtaggcagaggattcactgagctggttaacacttaagccctctgcagatggcaaggctaaaagagcattgtaacactggggctgcaggcacccacccctggacactaccatggggctggagaccaaagcacacattctggctcctgcaactgctcatctccatgctcaccctc

SEQ ID NO: 658617 - DNA, 547 bp, Homo sapiens
tagaaactcacagattaagaatactgactcaagaagaaatggaaaaatctcaatcaaccaatagcaagtatagattgaatcagttattaaaaaccttcccctaaagaaaagcccaagactagctagcttcgctgatgaattctaacaaacatttaaataaaacaacacaaattctaccaaactcttccaaaatatagaagaggaaggaacacttcctaacacattctktgaggccaccatcacttgagaccaaagtcagacaaatatagcacaaaaaataaaattacagaccaaatcaattaatgtaatatatcctgttaataaaatggagggagaaaaccacacatgattatctcaatatatgcagagaatgcacttggcaaaatttaacactttttcatgattaaaaaaacactcagcaaactagaaatagaagccaacttccttaacgtcataaaggacatttgtgaaaaacccacaactaaaatcatcaacaatggtgaaagactgaaaactttaccctaagaatcagaaagaaggcaaggat

SEQ ID NO: 658618 - DNA, 578 bp, Homo sapiens
gtcacattaactacaatcaaaatctcagcaagctattttttggggaaagtaaaatgattttaaaatttatgtagaaatgaacaacaatagtcaaagcaactattgaaaaaggataaaataattgaaaaaaactaacatttgatctcaagaatgattatgaagctataatagtcaagattgtctggtaatggcatcaaaataaaaaaaaatagatctatgaaatacaatagaaattccagaaatagaactacatatatatgaacgactgatttttggcaaaaatgcccagtcaattcaatggcaaaaggagaaaasagatggtgctggaacaattggctactgtgaaaaataaaagcttcaatctatactccacgccatatataaaaattaactcaacatgaagcatagccctaaatgtaaacctaaaatacaaaactttgagaataaaacatagaagaaaagctttatcttattgggtcaggcagtgatttcttaaatatggcactattacaatggatgagaaatagaaattttactgtgattttgatttgcatttacctaattaattatgatgttga

SEQ ID NO: 658619 - DNA, 500 bp, Homo sapiens
gtctgggggtaaaaacatcagaataaaaataatgactaattatgtgcttataatccccttaggacataattataatataaaatagtttttaaacttagagtaggctttttaagagtttgagtactctatcaaaggttaaaaatggtttttcttaactactttcattgtctactcaacgttaagcatggttccataaattagggacatgctggttaracaacttgaagtgggttccattctgcagagctctttagtttctttattacatttatgactgccattgacgtccaaggaaagctgccttaagtatggttcctcacaagcagatcctgagatgaacatttatgtgcaaggcatttgccaagaaagagctcccagcccttccttgcttctttcctccttttccttctttctcttttattccttccattccttttaaatgctcaaagatggaagggaatcaacaatgtaagtaatggaaggcacaatgtagtatgaaa

SEQ ID NO: 658620 - DNA, 542 bp, Homo sapiens
gtagcaggcttcgtccaatccawtgaagaacaaagggcaaaggagtttccagagaagaaggagttctgcctcgagactgtgacatagaaacccacctgagtttccagccttctggcctgccctgtgaatttgagattccaaactacaacatcaattcttacctgaacttccaggctgtgcctgccccacaaatttcatattttccagtccccacaatcatgtgagccaattccataaaacacaggtccctgcagacataccatccatctatacagtatatctgtatagatatatagatagatagagatacacagatataggtagggttctgtttctccggagaacccggactgatacaagaggttacaggtgataattaatcatcctcccctccacactctgagaattgagaaagaagaagccagatagaaagagatgaagattagcctaaacactgatgaagttcatagaagggcatagcttagagctgcagccacaacaggactccctaattccgtctgtgcttccccagattaatttta

SEQ ID NO: 658621 - DNA, 542 bp, Homo sapiens
gtagcaggcttcgtccaatccattgaagaacaaagggcaaaggagtttccagagaagaaggagttctgcctcgagactgtgacatagaaacccacctgagtttccagccttctggcctgccctgtgaatttgagattccaaactacaacatcaattcttacctgaacttccaggctgtgcctgccccacaaatttcatattttccagtccccacaatcatgtgagccaattccataaaacacaggtccctgcagacataccatccatctatacagtatatctgtatagatatatagatagatagagatacacagatataggtagggttctgtttctccggagaaccyggactgatacaagaggttacaggtgataattaatcatcctcccctccacactctgagaattgagaaagaagaagccagatagaaagagatgaagattagcctaaacactgatgaagttcatagaagggcatagcttagagctgcagccacaacaggactccctaattccgtctgtgcttccccagattaatttta

SEQ ID NO: 658622 - DNA, 627 bp, Homo sapiens
acacagaggcactgaaatcacagcattgacaaagagcaacttcagtcggtttatcctaatgcatctaggaggaaaaaaaaatcatgtgctaagttttcctagaatcgttaaaagaatgaatttgttaaaatcctgttaaactccactagaaattttgaatacaggaatagtaaggaaaatgcataactgccaggactgaataaatttaaatatttcagtgtacatgttaacaaagcaaaaatttgtagcatttcctgaattactttaagtcaataataggttaatttttcaaattaattcgtaacacagataaaatgaggacatatattcaagtaaataaaactgcttggaatgacagaacaggttataaaattatggaaaatttgaagagaagtgattttaacaaatgtttaaagtttatgctttaaggcaagattgaaccaggccccagatcccttcagaacaatgytgtttcacttgagttaagatcatttaacacttgtttggcatttgattacgttttgttgattgattggagtctaaacattgactctatttctcccaccttgttagctgtaatctactcaaataagttatttagagaagaaaccctcaaaggttgtaagc

SEQ ID NO: 658623 - DNA, 627 bp, Homo sapiens
acacagaggcactgaaatcacagcattgacaaagagcaacttcagtcggtttatcctaatgcatctaggaggaaaaaaaaatcatgtgctaagttttcctagaatcgttaaaagaatgaatttgttaaaatcctgttaaactccactagaaattttgaatacaggaatagtaaggaaaatgcataactgccaggactgaataaatttaaatatttcagtgtacatgttaacaaagcaaaaatttgtagcatttcctgaattactttaagtcaataataggttaatttttcaaattaattcgtaacacagataaaatgaggacatatattcaagtaaataaaactgcttggaatgacagaacaggttataaaattatggaaaatttgaagagaagtgattttaacaaatgtttaaagtttatgctttaaggcaagattgaaccaggccccagatcccttcagaacaatgttgtttcacttgagttragatcatttaacacttgtttggcatttgattacgttttgttgattgattggagtctaaacattgactctatttctcccaccttgttagctgtaatctactcaaataagttatttagagaagaaaccctcaaaggttgtaagc

SEQ ID NO: 658624 - DNA, 641 bp, Homo sapiens
aggaattaaaaaaaattttttaatggagtaatacagatttcctaaatgcaaagctgaaagcataaatgcactttattttcttaactatctctgattgtcagaaggaactaaaactcttggtagaagagagattaagcaatattttgtttcaattttccgtcacaaagctgaagttacattagtctttatgctagccaaatttacatttattcaggcattctttccctcattctttcaacttactcatttttttccaagcagtatttaattaactaggtactaagtgtcaagttagcttttagctataggttattggaagatgagtgacattcagcttctgccattaaaaatcttcaagccttagtgtgagatgtagatacacaagaagatttttatcatcctgtggtaagrgcagtgatggagactgggctggtttgaatgcacatggagggttggctccctgaaattggtttatgtggtgaagggtaagagttcctgaaagaaatgttatgcattacattagtgagcttactttaaacaagggggaatgtaaaattagcaacactggagaagggagagggatgaggcaggaggacaatctaattctatgcatctttaaaattttaacgtatgagaacaac

SEQ ID NO: 658625 - DNA, 538 bp, Homo sapiens
ggctcttgaatatctgatagactcccctggcagctttcacctggtgtgtgcatgcacagatataatcaccttagtctttatcctgcagtaaacaaagttcaagagagatttctgaaatgaagataatcttcattctgccttttgccgctacctaaagttcccttggaggactctgtgaagttactcaggttatattttttataacaaatataaaccacagaatttgccagaatgagaaatattctgatgaacatcatgatttgactgaggatggaggaattgtagggaatggttaaacttgaagatactttttagaaaaacaggtcatgtgctacagaagstacttttaaaaacatgctttttcattaaatgtaaatttaccacattattttatatatcttcattaatttaataaaactcctgctaggcttttgtaaattttcacagatataatgttaccataggcatctatgcacatgtatttttgtacacttgtccaatattatccatagagttaaaatttttaacttgaaacttc

SEQ ID NO: 658626 - DNA, 658 bp, Homo sapiens
tatgtgtagcctaagaaaaatggggccatatcacttcctatgaagaaacacaccaaaattttaattcaattcttaagttgttgtcttgattatctaagttctgtctctagtctcctatggctatttttgtggctttgaccctagctgacccagcctattgtcagtagttaagaaggtagattccaagtgctcaatgtcatgttaagacttccttgctacctactaagggaagtcatttttttagccagctgttttaagttctcctaacctatttcatatgctatgttcccacaataaccattcccttctcttgccatttctttgtcctctctcctgcaatgtttcttctactgaaagaatacggcactactgaatctgtttctcctgggcagggcttgcattatcccacctgttccaaattctttttagaacygggccctttgggtgaatgatgaaccatttaatagccccatgtactatagaaatttaaccattttcaaccaaacctgtcatagataagaacaaaggtaagccatcatgtgtctagaaaaacatacaactgatttcctcacagacattacaagttcttactcttcaaatgtactttaaaggactgagagtgtaattaggaatcagcagaagttttgtggaaaagagg

SEQ ID NO: 658627 - DNA, 544 bp, Homo sapiens
ttgtctaagaacatgcccctgggcttctgacgcacctgcttttgaatcctgcctcttctgtgagacaaacctgcttattgctgaatctatttaatatttgaacttattatatataaatttactatctaccgcacagaatcatratgcagaataaataagataaaagtaaactattttatcacaccccttttcaaaggacaaatgtttgaccttccagcaatgtaacaatctgagcttatgcaaatgggacatcttgtaaatgcttataaacataaaatgagctcaaaagactgtaatttccaggactaacgccaaaactggaaataaaaatgagaatagcaaggagacactgaaagcccacagtgattggggactgggtatatgtgatggccaaatagtggtcgcaggtgcatatgaagtgaaagagctcggagcaagtgtcatgcctgaatcttaaacttcaactccactcactttccttgaacagtactgggaagcctggatgggaaaaacaagtcagccatgaggaatttgttcctttggc

SEQ ID NO: 658628 - DNA, 544 bp, Homo sapiens
ttgtctaagaacatgcccctgggcttctgacgcacctgcttttgaatcctgcctcttctgtgagacaaacctgcttattgctgaatctatttaatatttgaacttattatatataaatttactatctaccgcacagaatcataatgcagaataaataagataaaagtaaamtattttatcacaccccttttcaaaggacaaatgtttgaccttccagcaatgtaacaatctgagcttatgcaaatgggacatcttgtaaatgcttataaacataaaatgagctcaaaagactgtaatttccaggactaacgccaaaactggaaataaaaatgagaatagcaaggagacactgaaagcccacagtgattggggactgggtatatgtgatggccaaatagtggtcgcaggtgcatatgaagtgaaagagctcggagcaagtgtcatgcctgaatcttaaacttcaactccactcactttccttgaacagtactgggaagcctggatgggaaaaacaagtcagccatgaggaatttgttcctttggc

SEQ ID NO: 658629 - DNA, 544 bp, Homo sapiens
ttgtctaagaacatgcccctgggcttctgacgcacctgcttttgaatcctgcctcttctgtgagacaaacctgcttattgctgaatctatttaatatttgaacttattatatataaatttactatctaccgcacagaatcataatgcagaataaataagataaaagtaaactattttatcacaccccttttcaaaggacaaatgtttgaccttccagcaatgtaacaatctgagcttatgcaaatgggacatcttgtaaatgcttataaacataaaatgagctcaaaagactgtaayttccaggactaacgccaaaactggaaataaaaatgagaatagcaaggagacactgaaagcccacagtgattggggactgggtatatgtgatggccaaatagtggtcgcaggtgcatatgaagtgaaagagctcggagcaagtgtcatgcctgaatcttaaacttcaactccactcactttccttgaacagtactgggaagcctggatgggaaaaacaagtcagccatgaggaatttgttcctttggc

SEQ ID NO: 658630 - DNA, 544 bp, Homo sapiens
ttgtctaagaacatgcccctgggcttctgacgcacctgcttttgaatcctgcctcttctgtgagacaaacctgcttattgctgaatctatttaatatttgaacttattatatataaatttactatctaccgcacagaatcataatgcagaataaataagataaaagtaaactattttatcacaccccttttcaaaggacaaatgtttgaccttccagcaatgtaacaatctgagcttatgcaaatgggacatcttgtaaatgcttataaacataaaatgagctcaaaagactgtaatttccaggactaacgccaaaactggaaataaaaatgagaatagcaaggagacactgaaagcccacagtgattggggactgggtatatgtgatggccaaatagtggtcgcaggtgcatwtgaagtgaaagagctcggagcaagtgtcatgcctgaatcttaaacttcaactccactcactttccttgaacagtactgggaagcctggatgggaaaaacaagtcagccatgaggaatttgttcctttggc

SEQ ID NO: 658631 - DNA, 645 bp, Homo sapiens
tctctgcttggaaggtttgaggaaaattctgactatttttatatttcacttctatcacttctaaatgcatcttcttgtaaatacatcttctaaatattttggaagccatctctggttttcttaaattttctcttatgctaattttgtttgrttcttctttatttatctgataataacaacagattctttttattttaaattgttcagttcagtagtttacaatttaaagttgtacaatccagtagttttagtagattacagagttgtgaccactgtccctgctatcaaattccaggacattttcatcacccagaaagaaacctcatacccattactggttactctcaagtcctctcttcccctatcccctggcaactgcaaatctgctttctgtatctacagatttgcctatcctaggcattctgtataaatgtcatcatataatatgtagccttctgtgactagcttctttcacttagcatcaggtttctcaggttccttcatgtcgtgatatgacttaactttatcttatgaccgaatagtattccattgtatggatataccacatttgtttattcattcttcagttgatggagagttgggactggtttctttgttaataaactctcctgcctccttgatttc

SEQ ID NO: 658632 - DNA, 587 bp, Homo sapiens
ttttgaatattcatggctcaacgtgtgcaatgaaaacatggaacaagtaaaacagctgtcaacaacactacaaaattctgtttcttggattaagaccatagaatgcacctgcgggtaagtgttattactttttttttcctttgcgtacacctattaagcaaagagatattgtagtcattgattcctaaaaactctgttaataaccracatcatcaggtgcatgcaagcagaaggtagttaaacgcaacctgctactgccaagaacagtcccctggagcctctcctacctaatcgtttactcttacaaatacacagacaagtcagcgcagaactaatgtaaaacccagggggcaaaaagtaataggaagctcaactacttaagcttcctagatcgctggagaaaattacttctaaacaattacattacattttgttagtatcatcttctccaagccaagaaagagaacagtttttgattaataagcaaaagagaaattggaaattgtaaaactaaaatagtaaagtttaaattatgtttgtgaattaaataatagtctattctttttttctaagaccagcttattaaa

SEQ ID NO: 658633 - DNA, 587 bp, Homo sapiens
ttttgaatattcatggctcaacgtgtgcaatgaaaacatggaacaagtaaaacagctgtcaacaacactacaaaattctgtttcttggattaagaccatagaatgcacctgcgggtaagtgttattactttttttttcctttgcgtacacctattaagcaaagagatattgtagtcattgattcctaaaaactctgttaataaccaacatcatcaggtgcatgcaagcagaaggtagttaaacgcaacctgctactgccaagaacagtcccctggagcctctcctacctaatcgtttactcttacaaatacacagacaagtcagcgcagaactaatgtaaaacccagggggcaaaaagtaataggaagctcaactacttaagcttcctagatcgctggagaaaattacttctaaacaattacattacattttgttagyatcatcttctccaagccaagaaagagaacagtttttgattaataagcaaaagagaaattggaaattgtaaaactaaaatagtaaagtttaaattatgtttgtgaattaaataatagtctattctttttttctaagaccagcttattaaa

SEQ ID NO: 658634 - DNA, 530 bp, Homo sapiens
ggaattcccctgcccatttctctgcctcatcaccaaaaccagttccacatgtccttcatttcctgtgagcttccggtgcatatagcccmactcctggttccagtttatactgatattttggttgcagggaacatggggtcagttcatttcctggcacacggaaaggagaagaatgtgaagcttaggcacatgggaatccagaagtcaggcaaccagtcctcttgagagaacagaaaatttggcagagctgactcttcgaaagtgtatttgttcctgagggccaccataacaaagtaccaacactgaatggcctaaaacaacagaaatttgtctcctggttctggaggctggatgtcagggatcaaggagtcagtaaggccatactccccctgaaacctgtagggaggaatctcttccttgccttcctagttttggcaattcttggtgttccttggcttgcagctggagtacttcaatcactgcctccatcaccatgcggcatcctcctctggtgggtctgtgttttcaca

SEQ ID NO: 658635 - DNA, 590 bp, Homo sapiens
aatcaaactttcagtgtcatgtatttgttttttgttttcaactgataataattttgagcttcctgatttctcagggatgaaaacactaattcaaacatctrtgaagtacaaaataaagagaaaactttatttactgacaagttgctacaaaacatcccacaaggtttcaaatttgtgttatgtgcttcttgttcaatttaaatatgttttttaaactcagaagaatttgtcttcagactattttttagctttctcatttgtaaataatgaacattttctgccttgtatagcctggagagttgaaagaatgtgtgtagatttactttcagggagggcatgtccattgcaatatattgctgtttcatcacatcaacatattaatatgctgattgatctcttcctcttcagaacacacatagaactttgttcctaatcatatttcaggaataatcaatgtgaacctttttacaagcacttcttctgtctctactttctcctttgcaattgtagtaggtaagaagttagccatctgtttgtgacaaccacttgcccaaatagtctgggaattgctgacagtagagatcggttta

SEQ ID NO: 658636 - DNA, 580 bp, Homo sapiens
tgaagatattacagttatccttgcaattctttctttaaactctgcagttgtcaacgaggttgaacactgtttacttgacaggttccctatctttkggcttctatgaaattactcttgcctcattttcctctgaattctgtgaccccttctcctcagctttctttgttttacctgtttcctctctcttcccctcaaacattggttcttcctagggtttgactttcagcactcttggcactgcttctgctctctctgggtgatctcattcacttccaagtctccaaggctcactgatcatctgtcttcagctcagactgaacccaaaagctccagacacacatgtccaaatctctattgcacagccccctttggatgtatttttaacacctcaaaatcagtaagtccattgtatagtcaccctccccactcagatctgctccttctgtgtgttgcttctttactcactatctaaacatttgcccaagccagaaggctgaaaaaacatcttttatttttaccacacttcccctgcaccctcccacacagacatccaaccaatcactaagttccatcaaaaatt

SEQ ID NO: 658637 - DNA, 500 bp, Homo sapiens
tatgacaacagtttgaacaacagtctaacccagtgaactctaaaccatgcccatatcagtagttatccccagacttatttcagagacccataaattaatcayttaatacaattatttcagaaaatatttaggtttgaaagtacatgggtgtaccctactgatacattttggctgtgtccccacccaagtctcatcttgaattgtagctcccataatccccatgtgtcatgggaaggaccctatgggagataattgaatcatgggggcggttacctccatggtgttcttgtgatagtgagtgagttcttatgtgatctgatggttttataaggggccttccccgactttactctacacctctctttgctgccaccagttggtggcagcaactggggagtgctggctggcctggtgaagaaggacgtgtttgcctccctttccaacatgattgtaagtttcctgaggcctccccagccctgcggaactatgagtcaagtaaa

SEQ ID NO: 658638 - DNA, 620 bp, Homo sapiens
aatgggagtgttgaattctatggtactctgagtgccaataatccccacctaaggaggaaaaaactatctatttaactttaagcaaataaaatgtacacttgttgtcttggtgaaattattgatcacacccctttgactgtccagagagcctaatttggatgatcaattatatggataccatcagaaaatccaatttattattcaatcaaatattcattaagaataagtattaatagtgaagaacagacgaataaaagcacatggttatacaggaactccttataagggtaagagtggaaggtagaggccatccttcactccttcacataaaatctcctarccccacaaaaatcaaaagatattaaagtaagtgctccttaaaatgtattagtgagtaaggcatcatgaaaaagggcatcaatcgccatgtcctaattaagggttacaaatgatgttccctaacacaacaggtagaagatttacatttcagtgtttcactacccccatgccttcctctgcacttgcttggcaaaaatcatccttctaggatagcaacatcctaacaatcttccttaaaagggttaaagactatatttgtacacaaatgctcacacacaaac

SEQ ID NO: 658639 - DNA, 620 bp, Homo sapiens
aatgggagtgttgaattctatggtactctgagtgccaataatccccacctaaggaggaaaaaactatctatttaactttaagcaaataaaatgtacacttgttgtcttggtgaaattattgatcacacccctttgactgtccagagagcctaatttggatgatcaattatatggataccatcagaaaatccaatttattattcaatcaaatattcattaagaataagtattaatagtgaagaacagacgaataaaagcacatggttatacaggaactccttataagggtaagagtggaaggtagaggccatccttcactccttcacataaaatctcctagccccacaaaaatcaaaagatattaaagtaagtgctccttaaaatgtattagtgagtaaggcatcatgaaaaagggcatcaatcrccatgtcctaattaagggttacaaatgatgttccctaacacaacaggtagaagatttacatttcagtgtttcactacccccatgccttcctctgcacttgcttggcaaaaatcatccttctaggatagcaacatcctaacaatcttccttaaaagggttaaagactatatttgtacacaaatgctcacacacaaac

SEQ ID NO: 658640 - DNA, 620 bp, Homo sapiens
aatgggagtgttgaattctatggtactctgagtgccaataatccccacctaaggaggaaaaaactatctatttaactttaagcaaataaaatgtacacttgttgtcttggtgaaattattgatcacacccctttgactgtccagagagcctaatttggatgatcaattatatggataccatcagaaaatccaatttattattcaatcaaatattcattaagaataagtattaatagtgaagaacagacgaataaaagcacatggttatacaggaactccttataagggtaagagtggaaggtagaggccatccttcactccttcacataaaatctcctagccccacaaaaatcaaaagatattaaagtaagtgctccttaaaatgtattagtgagtaaggcatcatgaaaaagggcatcaatcgccatgtcctaattaagggttacaaatgatgttcmctaacacaacaggtagaagatttacatttcagtgtttcactacccccatgccttcctctgcacttgcttggcaaaaatcatccttctaggatagcaacatcctaacaatcttccttaaaagggttaaagactatatttgtacacaaatgctcacacacaaac

SEQ ID NO: 658641 - DNA, 535 bp, Homo sapiens
cagattttactgagacccactggctaccacatccatacctgtccccaaactgatccacttgaaaccccaatgcttattcataaaataaaaaataaaatagaggacaatagagaatgttagccttctttaattttgaccttgaaataaagagatgcatgtcaggggttcttcataatttatattttttaattaagtgtactgaataagagtcaatcaaccagacaacaatcaggcagtgtccctctcttactggctttgccatgacctttcatcatggcacacccatgcacacattcattygtgcatgtactcaataagtgtttgctgagcctttttctatgtcaggcctgtgttaagcccttcataagctttatttttttttttcatttaatctctgcaattgcatttacaagcaggtaatattagtgttcccatttcacacctaaggaaactgagcttctcaggtgtcagaacttgcccaaggtcacacaggcagtgagtaattgagttccagttttcctcctagcaaacttct

SEQ ID NO: 658642 - DNA, 594 bp, Homo sapiens
gagaacaaaatgatagcagtgcaaccccaatctatgtggcctgatttcatacatgaaagacaactctctcctgtaaaacacaccctcatctgcatagctgatgcctgagattcctttaactgggacagatagtactttattccacaatatcactagaagctaaaaacacaagtatttcggagaggtaactcattgatttatatttattctattatgtaaatgactgagatcaaatcccttcttgcaaggaggttttgttataagggaattacaattctgaaaaggaacaaaagtgactgttcctgagggaggtgaagttgttaagcaagggaaggcagatcactcaaggccrttgttctcagcttcaatattttgcctaaggccaccttgatagcagcactgctttcatatacattctaaagaagtaagctctgttgttgtttgaagctgaggaagcagactgataataaaaggaccatattctccatctcgattcgcaatatctaatacctattactatttctgcctagcagttgaagcactcttttcccaggaacagacgggaaaaatgaggagggagttgcttcaatgtct

SEQ ID NO: 658643 - DNA, 594 bp, Homo sapiens
gagaacaaaatgatagcagtgcaaccccaatctatgtggcctgatttcatacatgaaagacaactctctcctgtaaaacacaccctcatctgcatagctgatgcctgagattcctttaactgggacagatagtactttattccacaatatcactagaagctaaaaacacaagtatttcggagaggtaactcattgatttatatttattctattatgtaaatgactgagatcaaatcccttcttgcaaggaggttttgttataagggaattacaattctgaaaaggaacaaaagtgactgttcctgagggaggtgaagttgttaagcaagggaaggcagatcactcaaggccattgttctcagcttcaatattttgcctaaggccaccttgatagcmgcactgctttcatatacattctaaagaagtaagctctgttgttgtttgaagctgaggaagcagactgataataaaaggaccatattctccatctcgattcgcaatatctaatacctattactatttctgcctagcagttgaagcactcttttcccaggaacagacgggaaaaatgaggagggagttgcttcaatgtct

SEQ ID NO: 658644 - DNA, 435 bp, Homo sapiens
ctctcttcctcctgctcccaccatgtgagatgcctcgctcccccttctgccataattgaaagtttcctgaggccttcccagaagctgagtagatgccagcactatgcttccttacagcctgtggaaccatgagccaattaaacctcttttctttataaattactccgtgtcaggtatttctttacagcaatgtaagaatggtctaatacatataccatccacactctcagaccayagcacaataaaaacagaattcaatacaaagaaaattgcacaaaaccattcatttacattgaaattaagcatcctgctcctgaataacttttgggcaaataatgaaattaaggcagaaatcagtaagttctttgaaactaatgagaacaatgataacataccagaatctctgggacacagctaaggcagtgttaacaggaa

SEQ ID NO: 658645 - DNA, 614 bp, Homo sapiens
ggagtgcagtggctcgatctcagctcactgcaagctccgcctcccgggttcacgccattctcctgcctcagcctcccgagtagctgggactacaggtgcccgccaccacgcccggctaattttctttttttttwttatttttagtagagatggggtttctccgtgttagcaaggatggtctcgatctcctgacctggtgatccgcccgcctcggcctcccaaagtgctgggatcacaggcgtgaaccaccgtgctccgccgttatcaattttattaacagtggtaacggcctctcagacacatccacgtcttaatccccgaacctgtaaacatggaaaagtgaaattaagattgcagatggaactaattcagatgaccatgaaatagaaagatcatgctggattttctgagtggtctcaatgcaatgacacaggtgttcacaagaagaagaagaggccagggtgatgggacatgataagggcttgaggctggaggaaggaggccatgagccaagaaatgtgggctctctctactcaaaaaataagaaaatggattcttccctagaatctccagaaggaaatgcaggattgctgatgccttggttttagcccaat

SEQ ID NO: 658646 - DNA, 537 bp, Homo sapiens
aataaaatcaaagataaatagctgagacttaattaaactaaaaaacttttgcagctgggtgcggtggctcacgcctgtaatctcagcaccttgggaggcctaggcgggtggatcacctgaggttgggagttcaagaccagtctgatcaacatggagaaaccccatctttgctgaaaatacaaaacttacctgagcattgtggcacatgcctgtaatcccagctacttggaggctgaggcaggagaatcacttgaacctcagagtcagaggctgcagcgaggcragatcacgccattgcactctagcctgcgcaacaagagcgaaactccgtcttaaaataaataaataaataaaataaataaatgcataaataaagcttttgcacggcaaaaggaatggttagcagagtaaatagacaacccacagtgtgggagaaaatattcacaatatatagatttgagaaaggactaatatccagaatctatagtgaaattaaacaaatcagcaagaaaaagaaaaaaaaaacaaagaatcccc

SEQ ID NO: 658647 - DNA, 532 bp, Homo sapiens
tatctattaataattatttgtcttttttatcgtcttttagaatcttataaaaatttatgattgttgtaattaaaataactttttttggcatgatttgaattttctttctgctatggtttgactgtgtcwccacccaaatctcatcttgaattcccacgtgttgtgggagggacccagtaggaggtaattgaattgtggaggcacgtctttcccatgatgttctcatgatagcaaataagtctcacgagatctggtgattttaaaaaggggagtttccctgcacaagctttatttgcctgctgccgttcacataaaatgtgacttgctcctccttgccttctgccacgattgtgaggcttccctagccacgtggaactgtgtgttctccattaaacctctttcctttgtaaattgcccagtctcaggtatgtctttatcagcagcgtgaaaatggactaatacattttccttttaaaacatccttgtttgtgtgtctttaattactttcaccaatttttataaggtaatatct

SEQ ID NO: 658648 - DNA, 561 bp, Homo sapiens
tttaaaataatattcctggcttcctcctatccctcttctattctgccccttaggataaggaagtgagcataagtagcaatttctttgtttttcctctttctcttgggaacaagatgctcacagagagtgtacattcctgttcctgccacaagttttatagaaacaggctgtaaaatagtctcagaccaatgtagtctttgcctggatgggtrtgtctgtatgattctgagtttttgtattaggaatcccactttttacatggagaccaattctacaatttctgttttgtcagtaatagaagtaatatttcatgtgtcgtctacctcttttttctgtttctgaattaggttagcagttggccaagggatagtttactgagaattactttaaaaaagcagcttgttgctgttgcttgaaacatgtggcatgtggtttgttgttatctctttctagccttaaatagaacaagcccaacatcagaattatcatgtaaaatgtgatattaaatatgcaatattttgatttttaatctcaggaaagattttcatctcattaagtgac

SEQ ID NO: 658649 - DNA, 561 bp, Homo sapiens
ggagtgcttgtacactgctggtggaaatataaattaatacaaccagtatagaaaacagtatggaggttcctaaaaatctaaacatggaactatcatatgatctagcaatccctttgctrggtatatattcatgagaaaggaaatcagtatgttgaagagatacctgcactcccatgtttactgcagcactatttacaatagccaagatatggaatcaacctaattgtccatcaacaaatgaatgcataaataaaatgtgatatgtatacacacaatggagtatcagctaaaacagaaagaataaaatcaggtatgaaatgcatgattagcaagaagaatgaaaatggaggacattatattaaacgaaataagctaggcacggaaagacaaatattgcatgtttccactcatatatgggagctaaaaattgatctcatggaggcagtgaatagaatggtagttaccaaagactgggaaggatagtagagagaaggagatgaagaggggttggttaatgggtacaaaatattttttaaaaaaacaaaggaacttcattcttac

SEQ ID NO: 658650 - DNA, 561 bp, Homo sapiens
ggagtgcttgtacactgctggtggaaatataaattaatacaaccagtatagaaaacagtatggaggttcctaaaaatctaaacatggaactatcatatgatctagcaatccctttgctaggtatatattcatgagaaaggaaatcagtatgttgaagagatacctgcactcccatgtttactgcagcactatttacaatagccaagatatggaatcaacctaattgtccatcaacaaatgaatgcataaakaaaatgtgatatgtatacacacaatggagtatcagctaaaacagaaagaataaaatcaggtatgaaatgcatgattagcaagaagaatgaaaatggaggacattatattaaacgaaataagctaggcacggaaagacaaatattgcatgtttccactcatatatgggagctaaaaattgatctcatggaggcagtgaatagaatggtagttaccaaagactgggaaggatagtagagagaaggagatgaagaggggttggttaatgggtacaaaatattttttaaaaaaacaaaggaacttcattcttac

SEQ ID NO: 658651 - DNA, 591 bp, Homo sapiens
actcataaagtagttttgagaaatatttctcatgattgctttcttggagatcattaawttttttttctatttgtattctattcctttgttatttgactattccatttcttatcttttgtaaatatctagtccattaggttttcttcttccaaattctttccattcagatcgttcatcttgatgccatttttggatgtttctgtcctttcattttctgttttcaagatgacagaaatatttctttatttaatatgatcattttaagtttttccctcctataaaaggagttgtatcttttgaaaaagttgtatattttttcatttatttgggttaatagtctctggaataattttctggcactacagaattgtgtttagaaaccctaccccactcaaagtgcttactctggattcattaagtttcttcatatgaaaaacattctttcctatctggacattattgttcttattattttgccagtcagaaactgtctggtgaatcgtttaataagacactgaaaagactgccatgaaatatactatattttgctactttgaaatccaatgcgattttgagaaatagatttttcgt

SEQ ID NO: 658652 - DNA, 336 bp, Homo sapiens
caatttctaggtatttaattttatttgtgattgttataartggaattactttcttgatttctttttcagattgttcactgttgccatatagaaatgctactgattttttatgttgatcatgtatcctgaaactttactgaatttatcagttctaatagtttttggtggagcctttaggtttttccaaatataagatcatgtcatctgcaagcaaggataacttgacttctaactttccaatttagatgccctttatttatttctcttggctgattgcactagttaggacttccagtactatgctgaataagagtggtgaaactgggcgtccttgcc

SEQ ID NO: 658653 - DNA, 548 bp, Homo sapiens
cttctctgtgttatatagaatttcattgagttccctcaaaatagcagttttgaattttctatctgaaaggtcacatctgtttctcaagtattggtccctggtgccttatttagttcatttggtgaagtcttgttttcctggatgatcctaatgcttatagacggtctttggtgtcttggcattgaagagttaggtatttattgcagtcttggcttgttgtgcccatccttcttgggaaggttttccaggtattcaaagtgacttggccccaagcccaataatgctgtgttttttgcagactcatagaggtaccaccttggtggtctttgataagatccagaataattctctggatcaccaragactcttattcttttcccttactttctcccagacaaatggagtctctttctctctctctgctgagctgcctggaactggggttgtggtgatgcaagcacccctgtggctaccaccgctggttctgcacagggtcagacctgaagccagaacagcattgggtcttgcccaaggccgactgtaaccac

SEQ ID NO: 658654 - DNA, 552 bp, Homo sapiens
tatagtctatttattcaagttgtgaagtgcatcaataggttaaaaggaatggtttataaccattcccattcctgttgctcaktatactatgggggggaaaactccatgcctagaattgcttacttgagaaaaatttccataccaaagtttcaacttactttaaagaacattaacaatgcaaatatcaaagttacctctgacttaaagacttggtatcagaataagccaaataaagagcacatggaggaacttctagtttctgtttctgtttgtaaggagcttgtaatgttttcactgtcctaacaacaaataaaaagctgaacagactgaaaaagcgacaaattatcttggatctgtaaaagagggatgacacagggcaaacaactgcccccaagattgaagagacaggcaaaaacagggagtcacagcttatggagaagatacttatgaggggaaagcagtgtgggaaccagtgccagagtaggaaaacttgaccttcaaatgacaaattgctagaggatcagttaagaacaagtctgagagttataaact

SEQ ID NO: 658655 - DNA, 552 bp, Homo sapiens
tatagtctatttattcaagttgtgaagtgcatcaataggttaaaaggaatggtttataaccattcccattcctgttgctcagtataytatgggggggaaaactccatgcctagaattgcttacttgagaaaaatttccataccaaagtttcaacttactttaaagaacattaacaatgcaaatatcaaagttacctctgacttaaagacttggtatcagaataagccaaataaagagcacatggaggaacttctagtttctgtttctgtttgtaaggagcttgtaatgttttcactgtcctaacaacaaataaaaagctgaacagactgaaaaagcgacaaattatcttggatctgtaaaagagggatgacacagggcaaacaactgcccccaagattgaagagacaggcaaaaacagggagtcacagcttatggagaagatacttatgaggggaaagcagtgtgggaaccagtgccagagtaggaaaacttgaccttcaaatgacaaattgctagaggatcagttaagaacaagtctgagagttataaact

SEQ ID NO: 658656 - DNA, 564 bp, Homo sapiens
atcatatttaccagttaaaaaaagctcaaaactttcccactgagatcagaaacaaggtaaggatgtccactctcaccacttgtattcaacactgtactggaagtacttagataattcaataaggaagaaaagaaaatacatgcatacagattagggagaaagaaataaaactctttttgtgatgccatgattgtctatgtaaaaacccaaaagaattgaaacaaagaaacaaaaagctccaggaactaataagtgattatagaaatgttgtaggatataaggttaatattccaaagtcaataactttcccatatatcaacaatgaacaagtgaaattaaaaatgcaacaccatttacattagcaattcccaacaaygaaatacttaggtataatctaacaaaatatgtataagatctacatgagaaaaacaacaaaactctgatgaatgaaataaaaaagaactaaataaatagatattccatataaaggaatactcaatattgtcaagatgtccaatcttcccaacttgacctacagattcaaagcaatctcaatcaacttct

SEQ ID NO: 658657 - DNA, 608 bp, Homo sapiens
cactctcctctggcctgtaagatttattctctgttgagaagtgtgctgctcagtgtattagaatatccttctatattctttgcttctttcttcttgctgctttcaggatcctgtctttgtctttgatctttgatagtttgattrtaatatgtctttgggtaatcttatttggattgaatctgattgaagacctttgagcttcttgtacctgaatatttatatatttctccaggtttggaaagggttctgctgttctttatttacatatgctttctacccctttatctatctctattctctcttgaataccagtgaccaagaatttacccttttgatgctgtcccatgaatcctgtaagctttcttcgttcctttgctgtgtattttttgcctgtatattttcaaataatctgcctttgagttcatagattgtttcttctgcttgatcaattctgctgttgatattctcttttttatctttcatttagctcattgtatttttcagctgtgggatttctgggggtttttcaaattattctttcaatctcttaaatttctcattctggtcatttattgtttttcttatgttgttgaattgtttatctgttt

SEQ ID NO: 658658 - DNA, 608 bp, Homo sapiens
cactctcctctggcctgtaagatttattctctgttgagaagtgtgctgctcagtgtattagaatatccttctatattctttgcttctttcttcttgctgctttcaggatcctgtctttgtctttgatctttgatagtttgattataatatgtctttgggtaatcttatttggattgaatctgattgaagacctttgagcttcttgtacctgaatatttatatatttctccaggtttggaaagggttctgctgttctttatttacatatgctttctacccctttatctatctctattctctcttgaataccagtgaccaagaatttacccttttgatgctgtcccatgaatcctgtaagctttcttcgttcctttrctgtgtattttttgcctgtatattttcaaataatctgcctttgagttcatagattgtttcttctgcttgatcaattctgctgttgatattctcttttttatctttcatttagctcattgtatttttcagctgtgggatttctgggggtttttcaaattattctttcaatctcttaaatttctcattctggtcatttattgtttttcttatgttgttgaattgtttatctgttt

SEQ ID NO: 658659 - DNA, 583 bp, Homo sapiens
gctcgtttacttttcagagcagctgtacattgtgtgcgttcccattgtacaagcagtgaatcttcggctcagagaagtgaaaactgccccaagatcagtagttaataggaggttagccaatatttggactctagcttctcggactccaaactctatgtacttaagagttctaccatattttactattgatactttttattttcccaaatatgatttcaatattctttaagttatatacttgtaacttacattttccaaccaaggcccaattatttttgctcagatttggaaattatttcttaaattacaaaagactattgcagaggctccctgaacttgtacattcttctacttaagtgtwcatacagtatgggtagatagtcaagaaatatccatttccaaaggtcagaaatagtgttgaacagtaaagtataaagagttttttaaaaatgaatgatggaaaatgatagaaattgatagaaaaattagaaaaatataccatgtaagtaaagatatataatgtttttgcaggtctcattttacagagaaagtcatgtcttgacattttttaatggggctataa

SEQ ID NO: 658660 - DNA, 570 bp, Homo sapiens
cttcaactatgttgtgtctgtataatcattttacttctaatttgttgctattaatctattcagatgtgaagagcataagaacatgtttcctttaaaaaaaaaagatgtcctcatgctttttaagtttcacaagtagaagtttcaggcttttaggtcaatgatatggtggcttttctgtggtgaggtatactgggaaatagtagatggtataataaaaaaaactgtggattttagaggtttagagactgatttcaaaactcaatctttcctgttacttattgtgccatttaggcaaattgtttaacctctctaggtcttggtacttcagattctcaaacgggaatcattgtgtctatctcaaaatgggaaggaaaccatgattgtaagtcaagatacatcgttaccaccaccaccagggccaccaccatcatcattatcatccactstcagaatgaagtaaatgcctagaaagcaggtgccattaaatataggaaagaagtacagctgaaaggtctgtccttcctgttcctactttatgtccctgggcctacctattagatacttctcatg

SEQ ID NO: 658661 - DNA, 535 bp, Homo sapiens
gtaacaatgacaaggtaaagtagatgttggactattactagatgtgatactgcacttttctcatgtaaatctctctgcttatcttttaaaatctgtgccctttttataataaagtttcatattttaatcttacaattatgagcttttcattttctaaatataactgtgaaaatcttgatgaaatactctgatgagtttactgaggatatatctgcttccttactttaaccttgacaccaggggaaaattattactctaatggttcaaakaatatttttgttattgttttaatcaacataattataagctaaattgagaaatgtatatgacacttctcttaaagaaaaatagatttttttcctctcttgtctatgagttatctatttgaaaataagtaattgtgcttattaatgctatgtaaatcctaacattcattgagtatttactatgtgccaggttctgttccaactgctttgcatgtatcatttaatttagtcttcataacaaccctaagagataagtactaatattaacc

SEQ ID NO: 658662 - DNA, 559 bp, Homo sapiens
agtatggccattttcacaatattgattgttcctatccatgagggtagaatatttttccatttgtttgtgtcctatcttatttctctgagcagtgatttgtagttccccttgaagaggtccttcacatcccttgttggctgtrttcctaggtattttattctctttgtagccattgtgaatgggagttcattcatgatttgtctctctgcttgcctgttgtcagtataaaggaattcttgtgatttttgcacattgattttgtatcctgagactttgctgaagttacttatcagttcaagaagtttttgggctgagataatggggttttctaaatataaaatcatgtcatctgcaaacagagacaacttgacttcctgtcttcccatttgaataccctttatttctttctcttgcctgattgccctggccagaacttccaatactatgttgaataggagtggtgagagggggcgtccttgtcttgtactggttgtcaaagggaatgcttccagcttttgcctattcaatatgatgctggctgtgggtttgtcataaatag

SEQ ID NO: 658663 - DNA, 616 bp, Homo sapiens
tgaatgtggactacatgtgaaagagaggttcaagtatgacatacaccttttagcttaaataatgggatggagggtgaggccattcactagcatcctgatttctgggagaagatgagatcacagatcataaaatgtcagataacttccatcttgcctgccagctccattcagttggtagtggctgcgtagggccacagattgagaaggatcttaaagctcattgtagaatctttgatgatcaacaatttgacttaaaagtactgagagtgggttgtgtttctctatatcccgaattagttcttgctcttaaattaatacatatgtagctgaaaagttgccagtagagagaatgtttctgtaactgctcttgttagcgaatgccacctatgtgcttggtactgttgtaaatgtacrctctactttgtgccatttagtccttgaatgtagattagcatttagaatcatatagattgatattggacctattctgttcaagaataatttatataatttgggcctaataggcctttttatactgggttgttaatctgaaatgaggtgaattcctggtgtatagggaccctgaggataacattgtgtcatgccccttaatatt

SEQ ID NO: 658664 - DNA, 570 bp, Homo sapiens
agcgaccgagtgaaactctgtatcaaaaaaaaaaagaaagaaattccaaaaccgttttcaaagtggttgttttatatttccaccaatgatatatgagagcgtttgttaatctttatcctcaccgacatttagtattatcatagtggctaaaatgtgaaatcaagtgaaaktgtatcttgtgattttaacttgtattttccctgttattaatgatgttgaccatcgttttatataattattggccacttatacgtcttgttttgtgaatagcctgttcaaggtttttgcttatatttaactggtgtgtttatgtctgtattattaatgtgtcctttatattagctctttataagctctgagattacttattttacaattatatgtattactaatattttcccaagtctgtggcttgcatagtcatattttagtgtttttgatgagctctaatgttcattgaaattcaatttatacattcctttatgtgggattagagccttctgtgtccttacaagaaggaagttctacctgttccaaggttataaagaagttcccatttgctttctgtat

SEQ ID NO: 658665 - DNA, 570 bp, Homo sapiens
agcgaccgagtgaaactctgtatcaaaaaaaaaaagaaagaaattccaaaaccgttttcaaagtggttgttttatatttccaccaatgatatatgagagcgtttgttaatctttatcctcaccgacatttagtattatcatagtggctaaaatgtgaaatcaagtgaaattgtatcttgtgattttaacttgtattttccctgttattaatgatgttgaccatcgttttatataattattggccacttatacgtcttgttttgtgaatagcctgttcaaggtttttgcttatatttaactggtgtgtttatgtctgtattaytaatgtgtcctttatattagctctttataagctctgagattacttattttacaattatatgtattactaatattttcccaagtctgtggcttgcatagtcatattttagtgtttttgatgagctctaatgttcattgaaattcaatttatacattcctttatgtgggattagagccttctgtgtccttacaagaaggaagttctacctgttccaaggttataaagaagttcccatttgctttctgtat

SEQ ID NO: 658666 - DNA, 626 bp, Homo sapiens
gaactgattgttaaaaagagcctagcctctctctatatatatatatctctctctggcctgggcccctttcctctctttctctctgtctgtctttctcttcctgccatgtggtctctatatgtagactccccttcaccttccatcatgagtggaagcttcctgaggctcttaagagaagcaggtgctggtgacatgcttcttgtacagccttcagaaccgtgagcgaactaaacctcttttcttttaaattacccagcctcggatatgcctttatagcaatgcaaaaggactaagacattaacattttgttacctccatatgyaagctctcggctgttattcctcatggaccagcaatttgaagctatgaaatcataattccgtgataaaaggttaacattccatatgggctatatttttcctgactgaaaaagttagagtcttggataaagttaactgagaagaatctgttctctgaattacatgtatccagtaggtttcaattggaatgaagtatgttgagtcattagggtttttaaaattattatttctatttgatttataaggctacttggaaaagtgtgttaacaaaatcagtaccaaagtgttcttcatcataaggaattc

SEQ ID NO: 658667 - DNA, 565 bp, Homo sapiens
ttccaaggtttgttgaatgtacacagttggagaacgtacaacagcacaattacgtttcaagccattactatttaacttattttgatgaatgccatttgtggggggaaaaaaaagcaaagcagataagtacatattaagatgcctttagggagctccactttccctactaaaagcatttttctaagtaatatagcttcrgaacatcttgactgaaatagctttagaatatttacagcaaaagcatctcttttaggaaagttgaggtggctgaaagtgaatgtgtcttaatgcatgaagagcttacaggtccacaagattgtaggacatacgtgttcatgaagccaatgaaaactcagtaggttacaggacctacattctggttctttccaggagagttgacgtagagctggagtggcttcatctgcctctatttacaatgagagattatgagtacataattgcagtgttagcagaaggcatcacacgtgtgcctccgcattttagggaaagccaacttgccttccatttgtcatgtgtctatgaatacgcgaatacatataagagt

SEQ ID NO: 658668 - DNA, 565 bp, Homo sapiens
ttccaaggtttgttgaatgtacacagttggagaacgtacaacagcacaattacgtttcaagccattactatttaacttattttgatgaatgccatttgtggggggaaaaaaaagcaaagcagataagtacatattaagatgcctttagggagctccactttccctactaaaagcatttttctaagtaatatagcttcagaacatcttgactgaaatagctttagaatatttacagcaaaagcatctcttttaggaaagttgaggtggctgaaagtgaatgtgtcttaatgcatgaagagcttacaggtccacaagattgyaggacatacgtgttcatgaagccaatgaaaactcagtaggttacaggacctacattctggttctttccaggagagttgacgtagagctggagtggcttcatctgcctctatttacaatgagagattatgagtacataattgcagtgttagcagaaggcatcacacgtgtgcctccgcattttagggaaagccaacttgccttccatttgtcatgtgtctatgaatacgcgaatacatataagagt

SEQ ID NO: 658669 - DNA, 511 bp, Homo sapiens
tgcaaaatccatactgtgctgcgttttctggagtgcgtctttttcaaagtaacagctttgatgttcttttcacctgagacgaatcctgccaggggctctgtgctctagagcagccctgcggtaacaaagccttgtgtgcgggagcagaggaagwttctgccctcaagaaatcatttgtaccctcatgctctggagacagcatataaatcaggagcagaaacagagaaggcccccaaactcagacactttaaattcacatcagaaacattttgccactgtcttcttaggatacatatgtccattacagattagcccacacttaagttattgctgtgaccgatccttttcactgttgttgtccgtcaggtatttttaaaatatccatctgtttctgtatttactcacatatttattttcttaaaaagacacggcgatggtagtggatgtgtttggtattgggaatattactacgaaatgaggtcattaaattcctattggcttttttactgaa

SEQ ID NO: 658670 - DNA, 593 bp, Homo sapiens
  misc_feature 209, 210, 211, 212, 213, 214, 215, 216, 217, 218, 219, 220,221, 222, 223, 224, 225, 226, 227, 228, 229, 230, 231, 232,233, 234, 235, 236, 237, 238, 239, 240, 241, 242, 243, 244,245, 246, 247, 248, 249, 250, 251, 252, 253, 254, 255: n = A,T,C or G
  misc_feature 256, 257, 258, 259, 260, 261, 262, 263, 264, 265, 266, 267,268, 269, 270, 271, 272, 273, 274, 275, 276, 277, 278, 279,280, 281, 282, 283, 284, 285, 286, 287, 288, 289, 290, 291,292, 293, 294, 295, 296, 297, 298, 299, 300, 301, 302: n = A,T,C or G
  misc_feature 303, 304, 305, 306, 307, 308: n = A,T,C or G
ttgaggtcatttggcaaccctctgagatgtggcaattgtctttcctccagtggcattgctttgctgtaaaagggaacaaggaaaccaacgaaaataacaccattcccctttggaagaaagccggaaaagcagagagctggtgccgtctaaaccacacacacatatacacacacacattctctccctcacaaacacacatttgttgtttnnnnnnnnnnnnnnnnnnnnnnnnnnnnnnnnnnnnnnnnnnnnnnnnnnnnnnnnnnnnnnnnnnnnnnnnnnnnnnnnnnnnnnnnnnnnnnnnnnnncatggcaggcattgaaagagtcgtgtgtttgcaaatgattacctgccatatgtttctcaatttcttttttttctaaattatcatgaaaagcaaaaggctagaagggcaattgtggctcttagtcttagaaattataattttaaacaggaaactaraagggaagttggattttagagtgcgaaaactgaatcataatgcaatccccaattgaatgttcagaatcatattatcaaggacaatgcttttattctaatagctaattctgctgaactgttttcacagaac

SEQ ID NO: 658671 - DNA, 590 bp, Homo sapiens
aagcagataacccttaaagtgaagaactaggtgtctcaggtagttttaggtacytcacctgcttcctgtaatctctacagacatttgcttaaatatatactaatattgcctccattttataaataaggacactgaccccaagaaagtttgagtagctggtaaatagcaagtcatgatttcagtccagacttgtttgatttctaagcctgtgcaacacaataatattcttttatattcccagccagacctccaaattaattggaaataaaatcatttattttaaaaagtaacccacttgaagctgaaggcttttaataaatgattctttgatagtcatgttactatatttttcttagaatagattgagtgtttcttttagagtctcattaaaaatgaggtacttataagataaatcctttttctatacattttcacacattcctctttatacatctgcccacttcataaataaaattatatttaattatttttaaatatttttatacttacaaagtaaatattttaataaatgtggataaataaataaaattcctttattttggagttatctgtgttgttacatgaagtgg

SEQ ID NO: 658672 - DNA, 561 bp, Homo sapiens
gatatcttcacactggagactcagttttgaggattcagtaagaacaatttgttttcagccttctaatcccattctttccaagccccttaccttccawccagacccctaatgatcaccaaataatcactgtttcctatacttctgtctcaatcttgaccaagtaaataaccacatgctgcatcaaccagtgttttagtgacagtatattgtactgctcatctgtaaataaggcctgaggtttttcattcctatgtgatttggtcaaaattctctctcctaggagtccacaggtatgagctgagccagcagagatgcagcaggccagctctcatccccttcatcatggccaccccacatggtttctttatgttcatagaatgaggtgtttagtctgtatcaggacccagcagctaaccacaacagaacctctgtttgtcatagacattgacatataattgtatctgttggatcataaggcccttgtcataaggcaaagcagcttgcactgccatctgaatctgcagcagtcctctcttgcccaagactccaatcaaaactggt

SEQ ID NO: 658673 - DNA, 514 bp, Homo sapiens
atttgttgaataatcctttacacttggatgcattttacagtgtgcagcagaatgtaatcatgcttgatgacctttgagcattcttttagatcgggtcttttctaattgtagcctctgctcagcaaagacatgatatttcatatggcttaatacatagaaatgatcagttacatgaggcacagcttcttctcatccttttataggaggatgtcagatcatttgtccacaatttctgtaggatttgtgtaacatgaacttgaagmctgttttcatgaaagcctgcttccattttcatgaaaatgaaagtattgcattggttttaaacgatgaaatcggtgaatcagttctctgagaggcagatatatgcaggacgtcatggtgtgttttcttttctttgagacaggctcttgctctgttgtgcagggtggagtgcagtggcgcgaccatggctcactgccgccttgacctccctacctcagcctcccgagtagctggcaccacaggtgtaaaccac

SEQ ID NO: 658674 - DNA, 459 bp, Homo sapiens
ggcagcaagactaagcccctcacattgcctttttgcccttctgggctagtcagtcaagactggagtgcatacaacatcgtgacacttgtgtcctgagtaacacaggaaatgactytagttcagtccccaggacaaggtcagacatatgccaggggaaggtattggttagaggcatggagctctatttcgaatgtgaatggttttcctttccgtgaacttgttaaagttgttctgtgctgccacagtattgccttgtgcaaatcttctgatttgtgcaaagtcccagaagaaatgacgatagaatgctgctctcctcctaagtaaaatgaagaagtatctaagagaaacagatgattcaaaatgcttttaaaaatagatattaatgaagttgaaatgtttaggttatttcaactgcttggttgtattaccatttaaaatatctttaattatggatgtaat

SEQ ID NO: 658675 - DNA, 459 bp, Homo sapiens
ggcagcaagactaagcccctcacattgcctttttgcccttctgggctagtcagtcaagactggagtgcatacaacatcgtgacacttgtgtcctgagtaacacaggaaatgactctagttcagtccccaggacaaggtcagacatatgccaggggaaggtattggttagaggcatggagctctatttcgaatgtgaatggttttcctttccgtgaacttgttaaagttgttctgtgctgccacagtattgccttgtgcaaatcttytgatttgtgcaaagtcccagaagaaatgacgatagaatgctgctctcctcctaagtaaaatgaagaagtatctaagagaaacagatgattcaaaatgcttttaaaaatagatattaatgaagttgaaatgtttaggttatttcaactgcttggttgtattaccatttaaaatatctttaattatggatgtaat

SEQ ID NO: 658676 - DNA, 522 bp, Homo sapiens
cagtgagggctgggcagcaagactaagcccctcacattgcctttttgcccttctgggctagtcagtcaagactggagtgcatacaacatcgtgacacttgtgtcctgagtaacacaggaaatgactctagttcagtccccaggacaaggtcagacatatgccaggggaaggtattggttagaggcatggagctctatttcgaatgtgaatggttttcctttccgtgaacttgttaaagttgttctgtgctgccacagtattgccttgtgcaaatcttctgatttgtgcaaagtcccagaagaaatgacgatagamtgctgctctcctcctaagtaaaatgaagaagtatctaagagaaacagatgattcaaaatgcttttaaaaatagatattaatgaagttgaaatgtttaggttatttcaactgcttggttgtattaccatttaaaatatctttaattatggatgtaatacatgctttcctgctttcttcataaaatgaaaaaaaaaaaaaaggaattca

SEQ ID NO: 658677 - DNA, 550 bp, Homo sapiens
cagaattctttctggatattaagtttgcatcagtatacctcctgaaatcatgagagcctttgaaaagaaatgcaaaatgagtaaatacagatatttaggcaggtatcagaaacattgcacaggattgtgagttattctgmagatgtaaaaatataaaattcattacattattacttaaattaataggtcagcgatcgtaactgctgaaatctcagcaatttttacataaaaataaaataattaatctctccatgtaaactataaaaacatttaaataacctctcaacatatatggtgtgctgcataccaaattcaaagctaaccagttcattctagtcagctccaagccaacatttacctctaagcaccttcccctcaaagggcaataagaatgaaacccagagttccacaatctgctcatcttgttcatttttagagtcggggaggtgtaggcctcgtgaggactaacctatctctgtagtggcatatttgtgaccaggaccttatttctttcaaaatatatttgatcatctctaactccagaaaagtc

SEQ ID NO: 658678 - DNA, 576 bp, Homo sapiens
aggctggagtgcagtggcccaatcacagcttactacagccttgacctcctgggctcaatggatcctcccacctcagcctcccaactagcttgractacaggcatgtgccaccatgcccggctaatatttgtaatttttgtagaatcggctctcactttgttgcccaagctagttttgaattcctgggcccaagtggtccgcccacctcagcctcccaacatgctgggattacaggattgagtcacggcatttgtctggcctttttctttctactgataaaattaaacaaaacatagtgctacacaatatggtggaggcagaagattcaaatatacctggattctctgtttccaatcaaggtgaataccctgtctgccctgtatacttttagaaaaccagacgatcggtgcctgcagagagttcacctgtccttgtgatgttcatttacatgaaaaaatagttcagtaagaattgcaaagcatttctagtaggtcgtaggtccctgcataatgggatcgcaatcctagacatatccacactttctacattttaataattctgtgttgatggtgatgt

SEQ ID NO: 658679 - DNA, 576 bp, Homo sapiens
aggctggagtgcagtggcccaatcacagcttactacagccttgacctcctgggctcaatggatcctcccacctcagcctcccaactagcttgaactacaggcatgtgccaccatgcccggctaatatttgtaatttttgtagaatcggctctcactttgttgcccaagctagttttgaattcctgggcccaagtggtccgcccacctcagcctcccaacatgctgggattacaggattgagtcacggcatttgtctggcctttttctttctactgataaaattaaacaaaacatagtgctacacaatatggtggrggcagaagattcaaatatacctggattctctgtttccaatcaaggtgaataccctgtctgccctgtatacttttagaaaaccagacgatcggtgcctgcagagagttcacctgtccttgtgatgttcatttacatgaaaaaatagttcagtaagaattgcaaagcatttctagtaggtcgtaggtccctgcataatgggatcgcaatcctagacatatccacactttctacattttaataattctgtgttgatggtgatgt

SEQ ID NO: 658680 - DNA, 576 bp, Homo sapiens
aggctggagtgcagtggcccaatcacagcttactacagccttgacctcctgggctcaatggatcctcccacctcagcctcccaactagcttgaactacaggcatgtgccaccatgcccggctaatatttgtaatttttgtagaatcggctctcactttgttgcccaagctagttttgaattcctgggcccaagtggtccgcccacctcagcctcccaacatgctgggattacaggattgagtcacggcatttgtctggcctttttctttctactgataaaattaaacaaaacatagtgctacacaatatggtggaggcagaagattcaaatatacctggattctctgtttccaatcaaggtgaataccctgtctgccctgtatacttttagaaaaccagacgatcggtgcctgcagagagttcacctgtccttgtgatgktcatttacatgaaaaaatagttcagtaagaattgcaaagcatttctagtaggtcgtaggtccctgcataatgggatcgcaatcctagacatatccacactttctacattttaataattctgtgttgatggtgatgt

SEQ ID NO: 658681 - DNA, 576 bp, Homo sapiens
aggctggagtgcagtggcccaatcacagcttactacagccttgacctcctgggctcaatggatcctcccacctcagcctcccaactagcttgaactacaggcatgtgccaccatgcccggctaatatttgtaatttttgtagaatcggctctcactttgttgcccaagctagttttgaattcctgggcccaagtggtccgcccacctcagcctcccaacatgctgggattacaggattgagtcacggcatttgtctggcctttttctttctactgataaaattaaacaaaacatagtgctacacaatatggtggaggcagaagattcaaatatacctggattctctgtttccaatcaaggtgaataccctgtctgccctgtatacttttagaaaaccagacgatcggtgcctgcagagagttcacctgtccttgtgatgttcatttacatgaaaaaatagttcagtaagaattgcaaagsatttctagtaggtcgtaggtccctgcataatgggatcgcaatcctagacatatccacactttctacattttaataattctgtgttgatggtgatgt

SEQ ID NO: 658682 - DNA, 538 bp, Homo sapiens
gagaagggcatgaaggcactacatgtgaaaatgaaacaaagccaggagctagcatggaagggcraagtgccatcctgtcttttctgtgcaggaagggttcttggagctggagcacagggtacaggggtgtggtggggaagaggcagaggagaagagaatagactaaaaagagtaggaaggtaatccgagattaggaaaaacaaaatactggcaaaatgtggcttgccagtagtttttttttaattaaccagattaaaatgtatcaagaggattaaaaatattcctgttaactcagttctttattccacttcttccatgaagaaataactagaaatggaaagattgatgtatacaggtattcataaaatgtgatttgcaatggggaaatgcttgagatgacctgagtgcctaacgtcaaggggatgcttagacaaatcaggctcccagatagggccacatggtctggagtctttacaaaccccaaatgggtgatgtccatctctgttccacctgtgtgcaaagggggagaacattgtct

SEQ ID NO: 658683 - DNA, 538 bp, Homo sapiens
gagaagggcatgaaggcactacatgtgaaaatgaaacaaagccaggagctagcatggaagggcaaagtgccatcctgtcttttctgtgcaggaagggttcttggagctggagcacagggtacaggggtgtggtggggaagaggcagaggagaagagaatagactaaaaagagtaggaaggtaatccgagattaggaaaaacaaaatactggcaaaatgtggcttgccagtagtttttttttaattaaccagattaaaatgtatcaagaggattaaaaatattcctgttaactcagttctttattccacttcttccatgaagaaataactagaaatggaaagattgatgtatamaggtattcataaaatgtgatttgcaatggggaaatgcttgagatgacctgagtgcctaacgtcaaggggatgcttagacaaatcaggctcccagatagggccacatggtctggagtctttacaaaccccaaatgggtgatgtccatctctgttccacctgtgtgcaaagggggagaacattgtct

SEQ ID NO: 658684 - DNA, 538 bp, Homo sapiens
gagaagggcatgaaggcactacatgtgaaaatgaaacaaagccaggagctagcatggaagggcaaagtgccatcctgtcttttctgtgcaggaagggttcttggagctggagcacagggtacaggggtgtggtggggaagaggcagaggagaagagaatagactaaaaagagtaggaaggtaatccgagattaggaaaaacaaaatactggcaaaatgtggcttgccagtagtttttttttaattaaccagattaaaatgtatcaagaggattaaaaatattcctgttaactcagttctttattccacttcttccatgaagaaataactagaaatggaaagattgatgtatacaggtattcataaaatgtgatttgcaatggggaaatgcttgagatgacctgagtgcctaacgtcraggggatgcttagacaaatcaggctcccagatagggccacatggtctggagtctttacaaaccccaaatgggtgatgtccatctctgttccacctgtgtgcaaagggggagaacattgtct

SEQ ID NO: 658685 - DNA, 557 bp, Homo sapiens
gaattcatttttccaataaacataacytaaatgcagcattatactaactgtaaatgcattactctcattaaacattcctgagaccttctgattgaaagaccctagaaagtaaaaaaattttctaagcagagaaagtttccaggaagattcaaaatcacgcataactctatgtttccttataggtgtgcctgtggatttctatgtagagggtgacaataaggtgggtggagagaggtggggaaggagggaagtgggcagatgagaaaagactccctgagctgtgttagggaccagggagcataaactgtcctgaaataagggggaaccatgagaggggtttaaacaggggatgggcagggttttgtttttctttggaaatattcctccggcaggtatgtgaatacatttgagagaactgagaaggacagcacaaaattagttgacaagttactgcagtcatccaaaagggagtatgatgtatcaaaataagatgctggctttgggtatagaaaagaggacaccgatttacaaattacaagaacaacagctagctagag

SEQ ID NO: 658686 - DNA, 569 bp, Homo sapiens
gaattcatttttccaataaacataacctaaatgcagcattatactaactgtaaatgcattactctcattaaacattcctgagaccttctgattgaaagaccctagaaagtaaaaaaattttctaagcagagaaagtttccaggaagattcaaaatcacgcataactctatgtttccttataggtgtgcctgtggatttctatgtagagggtgacaataaggtgggtggagagaggtggggaaggagggaagtgggcasatgagaaaagactccctgagctgtgttagggaccagggagcataaactgtcctgaaataagggggaaccatgagaggggtttaaacaggggatgggcagggttttgtttttctttggaaatattcctccggcaggtatgtgaatacatttgagagaactgagaaggacagcacaaaattagttgacaagttactgcagtcatccaaaagggagtatgatgtatcaaaataagatgctggctttgggtatagaaaagaggacaccgatttacaaattacaagaacaacagctagctagaggtcaggatttgg

SEQ ID NO: 658687 - DNA, 542 bp, Homo sapiens
atactaactgtaaatgcattactctcattaaacattcctgagaccttctgattgaaagaccctagaaagtaaaaaaattttctaagcagagaaagtttccaggaagattcaaaatcacgcataactctatgtttccttataggtgtgcctgtggatttctatgtagagggtgacaataaggtgggtggagagaggtggggaaggagggaagtgggcagatgagaaaagactycctgagctgtgttagggaccagggagcataaactgtcctgaaataagggggaaccatgagaggggtttaaacaggggatgggcagggttttgtttttctttggaaatattcctccggcaggtatgtgaatacatttgagagaactgagaaggacagcacaaaattagttgacaagttactgcagtcatccaaaagggagtatgatgtatcaaaataagatgctggctttgggtatagaaaagaggacaccgatttacaaattacaagaacaacagctagctagaggtcaggatttggagaatatgaattc

SEQ ID NO: 658688 - DNA, 433 bp, Homo sapiens
caaacctgcacgttgtgcacgtgtaccctagaacttaacatataatttttttaaaaattgaccaaaaaaaaaaaagaaaaagaaaagaattgtttcaaggcatgtctgtgagggtgttgccagaggatattgaaattcgagtcagtggactgggtgaagaagacccatcctcaatgtgggtaggcaccatccartctgctgcccccatggctagaacaaagcaaaccaaagaaattgggataaactggcttgctgagtcttctggcttccatctttctttcatgctggatgttttcattcctcctgcccttggacatcagactccaggttcttcagcctttggactcttagatttacaccagtggtttgccaggggctctcaggtcttcagccacagactgaagcctgcactgttggcttccctacttttgag

SEQ ID NO: 658689 - DNA, 558 bp, Homo sapiens
attcaatcagtcacctcccaaatatttatttacctggtggttttcctctgctgtggcaacttcaaagtacatctgttcctatggggctgatgggctggggaattgggagagatgatttaggaaacaagtaaacagatatgtgaagaaagtgatttcatatatatatatatatatttttttttttttttttttttgccacagtgtgtcactgtgtcacccaggatggtgtgcagtagcacaatctcggctcactgcaacctccacctcccaggttcaaatgattctcctgactcagtctcctcagtatctgggattgcaggcagccgccaccacacccagctaatttttttatttttagtagataggaggtttcaccatgttggccaggcttatctccaactcctgacttcaagtgatccacccgmcttggcctcccaaagtgctgggattacaggcgtgagctgctctgcctggcctaaacaaggtgatttctgatagtgagcactactttggagaaaaaaatctaaaatgataagatagggataggagacactttat

SEQ ID NO: 658690 - DNA, 506 bp, Homo sapiens
tgttgtaggtttgctttctttctaggcatgtctctttggtgtacagatggccgtcttctccgtttcctctcacggggtttcctctacataccctcttgtctggtgtgtaaatttcctcttcctataaggacagtagtcagattgcatgagggctcacccgaaagacctcattataattaatcaaatacagttggattaggaggtgctgggggttagagcttcaacataggaattttgacgtaattcagcctgcaacaagcagggaaacatttcacacaacggaggcaacagcttttgtgaattacagatatgtagacgcaaagccatgtagagaatttatagcttcagtcctacaacttcagtcatgcgtcaaaagaagatagagaatcacaaaaatgtaytagtccagacctcaaagagctgttttcctccccagtgggcatatgatttttaattgatctgaggtcaccaagagataagtaaacacaagtgacttacacatagtc

SEQ ID NO: 658691 - DNA, 613 bp, Homo sapiens
ttttcttctttaggcagagacaatatcaaaagtaaacagaaacattactgtaatctgtagcacaggccgagcaacyttcctgtgtttttaaaatgttgagtttaagcgagctttcttaatctcaccaatttcttaattacttgatcattcacagggtttaatgtcttcctgggacaacattctttttggttgaaggtgggggtggggaatagaagtgagaccactgacatgaaacttgcccttgagaagcttcaaatctcgggggattgctgacttaaacaggtgaagtcactgcagaagatgggatagctcagcctgctacagacattcaacttgaagggaacttacagcaaggagtgtttagggtaggagagaggcggcccctgagtgaggtcttagatggattcctggaaaccttttgactgagatactcatgatatagaaagactttcatggtcccacagtaccagtgaagagtgtttcagctggagttattccagtgcagacttttagaacaatatgtaattcatagtcttatcagtcttgattaaaggaaaaaaataatctatgttttccccccagcatgatgacatcaccatgtgtttctaactta

SEQ ID NO: 658692 - DNA, 600 bp, Homo sapiens
tgtacgtgtgtgtgtgtgtctgtgtgtgtatatattaatatgagatagtgcaaatggagaacattttcatcattgcagagagttctcttgggtgacattgttctacttaatattttaatagctcatgtgataaatatcacttaaaatccgtcctgttcctgctgttttgctctgttacaatatgttgatactgaacagtattttaccaaggtaagaaatatgttaaatcttactctctccccacctagaaaacaaattatcccagcaattaaattctcagtgacaactagtgatggaaacttctcaggttaatgaaaagtttccattagaatcagaacgactcttcytaagtatcctgtcttcaacccttaagcctattatctaaaatacataaaagaaaaatgataactgtaaagattatactggtttctaaaaaatcccaagcaaataaaatatactattttcaaatattggctctattcaatatgttgtaaacattgttatttcagcaacttttttgaccaagaaaagaaaggaaaagagaagatttgactgagggttctgttaggcaaagcgtgagagaaaactaaagaagaagat

SEQ ID NO: 658693 - DNA, 500 bp, Homo sapiens
aagttacacagaagtgtcagaaaatagtactttcacatcaatataaacatgtatttacattttatcttccatttcccactggaaactaaatattaatctttatagagtaataattataaaatatattgcaaacaaatgataaaaccatgaaactttacatctttgttgtgcttcagattttgcaaagtattgtcacctacagtattaggaaagatagctaaacaaatgataatccaatatgtctgcaaaagctctttttgtaaattcgggaaatgaagctgcaaaggactttagaatctcatttttttcattrtttttgttctagttgtttttaatagatcatatgcatttgtgaggctgaagattttcattccaaatgttaaaaaaaaatatattatctctaggtgcctctgatgatcatagtaaaatttcaaagaaacttttatgtcatgatctgttatattatccacccaggtaaggattaaaagaaaaaactattt

SEQ ID NO: 658694 - DNA, 181 bp, Homo sapiens
cataacaagccaaaatagagtgttgtggggactaaatggtacattaatagtaggtacttaccagagcctgacatgtcgtaatcctcaggaacagtaaggcttggctgagaggtgatgacctgtgagcctaagaratgctcacagcctcttgatgcagagcagtagaggtaggggtggtttt

SEQ ID NO: 658695 - DNA, 482 bp, Homo sapiens
tgaaaaccaagcctcctccttcccctgaaggcttctcactaaatcctaacagtactctttctgatcatggctgaggagtcctgtcccttgctactatcattgtcttggccatagcccatatttcaactgacttgtgcctcctcaagaaagcaaagcccctgggataggaagtaactgactagtctttggaacagaaaattggcttaaaatatagtaaggctttttatagagtgraatacttgattgactttaataataattagaagatagaattgacatagaagtgagctgagagcacatacagcatctggtcttgaaatattttcctgggagcaaaattctccaggactctagttctgattaaggttatgaattgctaatccctccaggacaaactctaggtaaccagagttatccaccattaacatctttttgtttgtactcagtttattggtcttaaaatgaatcagaagccaggagat

SEQ ID NO: 658696 - DNA, 611 bp, Homo sapiens
acctcttttggtttatagtatctcttgtatctggctttaattgaaacctccaatttaatattctattacataagcttttcatgtagagccttttacagctcaaaaagtattttcacacacattgtctttattgatttaataaccatgtgaattgggtaaggttgggaatcctgtgactattttacacccaagaaaactatacaaggttcacagagaataagagaattaccaaaggaacagtgtgaggtgggctctcaaaccacatgttttgaaaaaaaaaatctaaagattttctccttctgctacatagcctcttctcttaacagggagctaaatatctttagttggtacatcattatttttaacactacttgctccgtagagtccctaaggcatttaaaatattttaaatgtgcaggatcactgtcatccttttcttctaagatgttcttatatttttctttgatttatgttttgaaggctccatctttgttgaggccatggatgcygctgacacatcctttggtaaatgtcatgttatagatgttccagccatctattaaattccatctcatggtatcaggataagaagagctgaaaattagctgaaa

SEQ ID NO: 658697 - DNA, 779 bp, Homo sapiens
gggtgaaatcgcccacatgattcagttacctcccaccaggtccctcctgtgaaacatggggattatgggaactaataattgggtggggacacagccaaaccatatcagcggggcaagcccaaatttgtaaatgttggaagtaatcaagagaaagagaggacagtggatgttttttacttcactagactctgcccttttgtgaagcctcctattatgcaatcagtaatttttgcttattgaatattggatttgattgattaaaaggacaaataaagtacaagatcctggatatgtacattaattagcaaaagttgatacagagctgtactgtccaatatgtcagccactaggcacatatgactttttaaattttcatgaattaaaattaaagaaaattaaatagtcagattatcagccacagtggccacatttcaaggactcactgggcagttgcaactagaggctgctgcattcattgtagtttagagcattcctgtcaacagaaaattctcttagatagcactagttcaggggattctccctggggcagtcaggtgcacctgtttggatttttagaamtagtaagtgtatttttctaaaactaggaagaaagagctggaaaaaagttacttggctattgcataaatggggtgtatggtagggatcgaggggcggcatactgcggcaattcaagtgttagtaaagttttatggctattgagcccaaagcttagaaatcagacaggccttgccttggtcatgcagtcagcagtgacagat

SEQ ID NO: 658698 - DNA, 578 bp, Homo sapiens
atagacaggcttcagcctgacggcaactacagctagtgccacttgtcctcaggctgagacgcttctacgtgtaatataaaattctattatattttataagtctgtcttcaatatctctgaatacagcatttctcctcaagtttacacccattctaaatgtaaaygcagattgaatcatgattttaagtgtagcgtttgatctccaggcaacatctgtgtttaatgactagagtgtagtgtatttggaaccatcaagaagggactagtacagcagtaatacagcaaataacagctccaacccctgtctttgtccagggtagaaactggtggatgcaaagtaagtgtgtaaaaagaacacactttgcatgcagttcctttctttctctacacattatttgtgagattgcaatacaaaagaaaatacgccaggaactcagatcactgagaatgtttgtacgtattctgggataatgagtcagtacaatatctgactcattatcaaactgagaatggatttcctgtttttgataaggtaaccaagttcctcttcctagatgtgtgacctttggcaagatcct

SEQ ID NO: 658699 - DNA, 517 bp, Homo sapiens
acactcatacaaattacaatacacatacacattaagatactgtaccattattaaaaatcacattttcaaaagaaaatgttcatagcataagcgaaaaaacagtgtattagcctgtcctcacactgctctaaaggactgcccaaaactgtgtaattaataaaggaaagaggtttaattgactcacagttctgcatggctggagaggcctcagtgaacttacaatcatggtggaaggggaagcaaacaygtccttcatcacatgatggcagcaaggagaactgccgagcaaaaggggaaaaagtccctgataaaaccatcagctcccctgagaactcattcacatcatgagaacagcaggcatgggggtaactggcctcaggattcaactacctcccaccgggtccctcccgtaacacatggggattatgggaactacaattcgagatgagatttgggtagggacacagccaaaccatatcaaactgtatacaaaagagtatgagggaatgttgtataa

SEQ ID NO: 658700 - DNA, 579 bp, Homo sapiens
aacgtggtgtaaaggaacaaataagcttacaaatgttgcagggatgcattgtgtaaacccattttcacctgagaatgaggccaatccagtttaaactagaatcatgttatttggattttgcctgttccctgatgtcctctttggtgtctaccatctctggtctagctggggctgttgtgttgtccagttaatatatggggatgcatttgtgtgcccagtcattgagatacaggagggaggggagcccactgttccctgttgtataacgcacttgcttgtttgccccataaagccaacttgaaagctaattaggctatgtatatattggttaactcagttcccctgccatgaaattttgaaaactacctgaytggaacaaaaggaaccgacaacatatcattcagtcaatgtggggaagggagaaatatgaaaaaggaggagaaaagattcgtttgggattgtcacattatcacagtggacagctcttaagcttgtcctgtgagccgacaattctttttggtgagatttaaataaggttcttggtatatgtttgaagagactgtaaacacatatgtttat

SEQ ID NO: 658701 - DNA, 530 bp, Homo sapiens
cttgtgtgcgggagcagaggaagtttctgccctcaagaaatcatttgtaccctcatgctctggagacagcatataaatcaggagcagaaacagagaaggcccccaaactcagacattttaaattcacatcagaaacattttgccactrtcttcttaggatacatatgtccattacagattagcccacacttaagttattgctgtgaccgatccttttcactgttgttgtccgtcaggtatttttaaaatatccatctgtttctgtatttactcacatatttattttcttaaaaagacacggcgatggtagtggatgtgtttggtattgggaatattactacgaaatgaggtcattaaattcctattggcttttttactgaattcaggaatctgcatgtgaagaagtgagatctgtccaggtgctctaggttggggatttagaggcctgtgacaaaatgcaggaatgtagagtctttataccatacagtgctttccaagacaaaacattcattcatgggggtttatttatc

SEQ ID NO: 658702 - DNA, 483 bp, Homo sapiens
agggtaagagctatggctactgctgtagtagcaaacaacaaccacacgggatggctaaggctttattccacagacccagtcatggcttctgcaaagccagaaaggggtggagaatgtgaggtgcgtctagaacctagccttaatataaaggtattatcattttaaaaatattaacaaataatcccttgatcccaaggttaacagtcttatacctgtgttatttaaacttctcatttattgcatcttttttcaagttgatgtcaggaataaagcatactaatcaggaagacaaaaatgtaataagcagatatttcttcwgatgagaaatatttatttagcattgcagacagtatataacaggttttcctattgtttttctaaaacaaactcgacttctacttgtcaacattaagctcttcctaatggttatttacatcaatccttggctttcatggatacttttttttaaagtgccacaagaga

SEQ ID NO: 658703 - DNA, 598 bp, Homo sapiens
gaattccagacctcaagtgatcggcctgccttggcctcccaaagtgctgggattacaggtgtgagccagtgtgccctgcctaaaattatttctaaaatcgtaatagagtgatggaaaacctgaaacgatatatctgggcatcaacactgtgtcttctcttgatgtgtttgtaagtgaaggacccctggggtctgtattgcagtcactcacctgcctcccacccactcagtggctttaggtgggctgttgaaygcctccacaacacgagttcctgatgtgtcaagtgggatcaacacccttgcttaggctgtgaaggtgagtgtgtcagtgaagcagctggcactttcacacatgcaccttcttcatagcctttcataggacagcagagtaacagggggatttgtaacttccagaacttcacttaaatacaatggcacagttgaagtagaaggaaatctctagtggcatgtgaaagcactacctgtttagtttctttttgtttcagacattttccatctgcttgtacaaaacacagaaggaatgcatagcagacttggttctgagcttgcaggaacaacggatgccctgagtgacagac

SEQ ID NO: 658704 - DNA, 534 bp, Homo sapiens
tcattctggaaatgtaagcctctcctccctcttcctgattccccttcacaccccacaaccatgtcagttgtgcagccattttctggtttaaatttcagaacacatgagagggcccagctcgccgcatgttaagataatcctttaaaggttgctgtctggccatgtgagcttgcaagataaggcaccgagcgtggggctttcttcatttgaaagagtattttgagaaccttctttgatgtttgaagccccttttcttctgacctcccacttgccaagtagatactttctttctttcttttattttatttattttatgtttttatwtgggggacattttactcccagggtagttatagtcaaaaggaagaaaagtttggaatttcttctgtttgaacaccactgtgtaattggaaggcgcaagtctccacgacactgatgacaactcaaaaaagctcaaattaaggaaaagtccagttgaaaggtcaaggtatggaaacagtacagataattatttgggtattattttaaagagca

SEQ ID NO: 658705 - DNA, 558 bp, Homo sapiens
ctaagttgccaaatttataggtagaaaattgctcagaatattctcttatccttgtgggatctctacaatgtgtagtgttgtcacttctcttgtttctgacattggtaatttgtatcctttctctttatttcctgatcagcctgacaagacagtataatttttattgatcaacaaaaagaacaaagttgtggtttcatggtctttttcctattgttctgttttctcaaccagtgatttttcaccttgatcgttattgttttcttttttcttcttgctttgcttttcatttgctcttcattttttgtttgtgaaggtggaatgtgaagacaattggaaacttttttctgtttagtcccaaaaaattttctttgyatattgctttagctgcatcccctaaattttgttatgttatgtcttcattttcattcacttttgaattttattaatttccattttcatttcttcttttacccaaggcttgtttagaaatgcattttcattttttcaatatttcataataaactttcatttcttttgggtaatacctaagagtggaat

SEQ ID NO: 658706 - DNA, 477 bp, Homo sapiens
ggatctgcctgctttcctgggaagtgaagagcaagagaagacagacaggaaaaatctgattgccagtgaggttcccacaactcctgtagtggggccaggtaatacttccgttttatactttgaattttgctgaaattattggacaattagttaatgrcattagtcctaataggagatctaaagtcagaataagttccatttggaggggagacgcatgtgtgtgaataaattcgatctcagctggcgagggatgctgtgggtgccttacgtggtatcagaccacagggcctgtgtgtagccatgtcaggccttttgtgtaaatatagactgataaatagcaataattccatgatatcaaggcaatcgagtaaaaagtttaaaattctgtcaaaccccagtataaatggtgcacacataacaactgaactgattcattattttggccctaagtggacacagcctaaatcttcctctggt

SEQ ID NO: 658707 - DNA, 454 bp, Homo sapiens
tagtggatctgcctgctttcctgggaagtgaagagcaagagaagacagacaggaaaaatctgattgccagtgaggttcccacaactcctgtagtggggccaggtaatacttccgttttatactttgaattttgctgaaattattggacaattagttaatggcattagtcctaataggagatctaaagtcagaataagttccatttggaggggagaygcatgtgtgtgaataaattcgatctcagctggcgagggatgctgtgggtgccttacgtggtatcagaccacagggcctgtgtgtagccatgtcaggccttttgtgtaaatatagactgataaatagcaataattccatgatatcaaggcaatcgagtaaaaagtttaaaattctgtcaaaccccagtataaatggtgcacacataacaactgaactgattcattattttggccctaag

SEQ ID NO: 658708 - DNA, 597 bp, Homo sapiens
aacattatttcatatgtttgttggccatacactgaaatgattttaagcattttgtatgaggaaatagagtttaacagatttagaaggaactgaaaatgaatgaatgatactgaagatattgaagacagccctacctactttacagaccatagacagtggtacagtaagtatrccaatgagtatagactgatcagtatgctgataaaagcacactggctgggcacttctgccaacatgtctacttatgtcgtgagcacagagaggtggacaatccaaggtgggatgtttgaaatagagcattgggctcagagccagaaaactgaggctgcaggcctggctctttcatttcccaattatgcatcagacttgacttgggtaagttactaacgccatctggaatgtttcctcacttctaggtatgtgcttaaaggatcatagagtcattcagtagacacaggggagtgtgttttatgaacaggtccctacagtaggtactacagacacagttgcagtattttttcttaaagacggtattgtctggtaacagagagcaacgcatacaaagaaactacaatacgacgtgataagtgcagtctt

SEQ ID NO: 658709 - DNA, 555 bp, Homo sapiens
aataggatcgtgttggtatgagtgtgccttataaagaaaaggaaggggtggttcgccttgaactgagctctcattggtaggctttttacagcgatgctgtccccagtggctgctgctgcctccgtgccctcttcgctgacatccaggtatgacttgtggatggcttttgataaatataggcccttggttggtgacattccagaaagatcagctttgacctggttgaagagatctgtcacccctagagrttttaacagggaatttagctcatacttagtttcaagtttgaatcgggggaggtgtacttcaacttctctttccatcatgttagaagagcttgtccactcatgaaacgtccccgaattcagctgcttttctatctaagagacaaaacacagacaagcccacatgagtcaaacacacgacctctacattaaatatcatatgtttttataattctcagtgtgagtggttcaacttcatcactttttctacctttaatacagtctacttacctgggaacaaaatcataccattagccacattttccctttt

SEQ ID NO: 658710 - DNA, 555 bp, Homo sapiens
aataggatcgtgttggtatgagtgtgccttataaagaaaaggaaggggtggttcgccttgaactgagctctcattggtaggctttttacagcgatgctgtccccagtggctgctgctgcctccgtgccctcttcgctgacatccaggtatgacttgtggatggcttttgataaatataggcccttggttggtgacattccagaaagatcagctttgacctggttgaagagatctgtcacccctagagattttaacagggaatttagctcatacttartttcaagtttgaatcgggggaggtgtacttcaacttctctttccatcatgttagaagagcttgtccactcatgaaacgtccccgaattcagctgcttttctatctaagagacaaaacacagacaagcccacatgagtcaaacacacgacctctacattaaatatcatatgtttttataattctcagtgtgagtggttcaacttcatcactttttctacctttaatacagtctacttacctgggaacaaaatcataccattagccacattttccctttt

SEQ ID NO: 658711 - DNA, 555 bp, Homo sapiens
aataggatcgtgttggtatgagtgtgccttataaagaaaaggaaggggtggttcgccttgaactgagctctcattggtaggctttttacagcgatgctgtccccagtggctgctgctgcctccgtgccctcttcgctgacatccaggtatgacttgtggatggcttttgataaatataggcccttggttggtgacattccagaaagatcagctttgacctggttgaagagatctgtcacccctagagattttaacagggaatttagctcatacttagtttcaagtttgaatckggggaggtgtacttcaacttctctttccatcatgttagaagagcttgtccactcatgaaacgtccccgaattcagctgcttttctatctaagagacaaaacacagacaagcccacatgagtcaaacacacgacctctacattaaatatcatatgtttttataattctcagtgtgagtggttcaacttcatcactttttctacctttaatacagtctacttacctgggaacaaaatcataccattagccacattttccctttt

SEQ ID NO: 658712 - DNA, 642 bp, Homo sapiens
tccagaccaaatatgacattcccataactaacatcatactgaatggggaaaatctgaaagcttttctatcaagaactggaacaaagcaagaatgcccactctcaccactcttgctcaacatagtactgaaagtcttagctagaccaattaggcaatataaagaaataaagaacatccaaattsaaaagtagaaagtcaaattgtctttgttggcagatgacataatcttatgtatagaaaacctaaagactctaccgaaaaactaatagaactgataaacaaattcagtaaacttgcagaatataatgtcaatatggataaaaatcagaaatgtttctatacaccagcaatgaaccagctgaaaaaaattcgagaaggcaatctcacttaaaatagctacaactaaaataaaatacctaggaataaatccaaaatgaggtgaaagacttctataagaaatattataaaacactgatgaaagaaattgaagaagatatatacaaatggaaagatatcccattatcatacagaaaaagaattaatattgttcaaatgaccatactacccaaataaatttgtagattcaatgcaattcctatcaaaatgcccatgacattcttcacagatatagaaaaaaaaaat

SEQ ID NO: 658713 - DNA, 587 bp, Homo sapiens
tctgttctattctgctgtcctgcactttgaattcagggcttggtgtcagcatggaaagcaccagcgttctgatatggcagcctttggttatgttcccctcaagggatttatcatccacaacctactcaaatccctcccccaacagctaccaaaaattcccctggtgagaaatgctattatgagaaggggtggtggctgctttatgactcacactgtttcattaaaaagatttttttttcaaacaaattttcagtagaggaatccaaaggttttccaaagccacagcaaaacagaacagctcataatactatttctcaaaggtctgccacttcataggagattcctatacctcaaaaaactggagacatttagattcactatccttttgtgctgcccttggcctctgggttgaggaagcaagtaggaaatggatcaattaaacacagccaacatgactgggctcgtcagatattaagatggayggcagctagcttgcaagtcagcccttatcacaggtcttaagacttgcttatagctttccagggcactggctgcaatggcatgaatgtttcagtcatagctaacca

SEQ ID NO: 658714 - DNA, 551 bp, Homo sapiens
tgcccacattttgaggggattctttgttttttttttctttttcttgctgatttgtttaatttcactatagattctggatattagtcctttctcaaatstatatattgtgaatattttctcccacactgtgggttgtctatttactctgctaaccattccttttgccgtgcaaaagctttatttatgcatttatttattttatttatttatttattttaagacggagtttcgctcttgttgcgcaggctagagtgcaatggcgtgatctcgcctcgctgcagcctctgactctgaggttcaagtgattctcctgcctcagcctccaagtagctgggattacaggcatgtgccacaatgctcaggtaagttttgtattttcagcaaagatggggtttctccatgttgatcagactggtcttgaactcccaacctcaggtgatccacccgcctaggcctcccaaggtgctgagattacaggcgtgagccaccgcacccagctgcaaaagttttttagtttaattaagtctcagctatttatctttgattttatt

SEQ ID NO: 658715 - DNA, 504 bp, Homo sapiens
caggaagaagaaaattgacaccagaaataaggtggttagatgcaagaagaagtgacaagcaaacaaactgggaaacttgtaggtaaatctgaacaagcaactctataaaacaatgatatctaatgtgtatgttttaaaataatttaaaatggagctaaaatactaggcaaaaaaatagcatgcagaactattactattagagatttctaaggtccttgcayttgccaaaaaagagtaaagatatcaattacatttagggtttcccatattaagtatgtacagtaaaatcactataaaaggaaaaaatagggaaaaacagtcaatccaaaataattttaaaagaagaaaaaagaaacagtaaaagcagaacagatatatcagtaattacaataaatataagcagactaaatttgccagttcagagataaatagtatcagattggataatgataaagattgaactcgctaggaggctataataattctgtgcttagtaacatagcc

SEQ ID NO: 658716 - DNA, 578 bp, Homo sapiens
cctcctacctgaaatcacaattaacttgtcaacctcaatttagagaaataagtatatatttttagaagcaaggcatagacattgatcattggaaagggaaaataacattctaagaaagatcttacaaaatttaattgaaacacacataaaatataaaacaaaaataatatcagraagggtagctgaggtgaattataaatgctatattttgtaagcctacatattgaaaagaaaaagtgctccaaactaaattcaatcattttcaatcaatttctaaaatactgagtgattttctcctaactcaacaaggtttctacttatgaaaaccagattatttttcttctcaaaccactttcatggaccatgctggctctcaatcctaatccaaattaaaaacagcaaattcttaaaagttgccttttgaaagaaatttggctttgcttatttttcaaaatacaaaacatagttgagatttcaaaaaataacagaataaaccgaaattttgtttgggctggatttcattctttcctcagatttaccaaatgtctttatttgatacgataaagataattaaaagt

SEQ ID NO: 658717 - DNA, 632 bp, Homo sapiens
ggctttataacaaagtagatagagctctgaccttttatttacatttttctctagtgggttttgtccttaataaaaattaccaggttaaattaaacaggaaatatgagaaagatgctgagaggttatgtgagatgtcaaagaaagatgctaagtgggtatgtctggtctttttccctgaaaatgttcattaatccttttatatttaaatcccaggakgacaaattaaaatttataaggggaaagaattagagacacattgcctgtaggtaatctacaagtgcaactaaatgtgtatctactcaaaattcaagatgactattctttgttctgcgtgttttttttgtttttgtttttgttttgttttgccccaaaggccaaggcctgtgaagatactgctgcttcatagacaaatgtgcacacccaaggctttctttgctgttctctgtagataagaaagctttttctattaaataaaaccaatgctgctggcaaattttacacttgggtcatttgactcaattagctgagaaaaaaactaaaattaatgtttctaggagcttatcatttttaaactatgaagccaggttttttttttttttcagggaattataaccagttataagaattctggg

SEQ ID NO: 658718 - DNA, 538 bp, Homo sapiens
aggtagctacataaaaattcaattgcatttctatatactggcaataagcaatcagaacttaaaagaaaaacaatgtataataaattcaaaatatktgaaatatttagaaaaaaaacaaaatatgtgaaaatcctgcatgctgaagatgataaaacattgctgacaaaaattaagaaaatctaaataaatgaagctaccttctatatgagtcagaagactcaataatgctaagatattaaatattctccaaattgatctgtaaagtcaacatagtcctaatcaagattctagcagacattttctgtatgaattgtgacacaatgattctaaaattcatatgaaaatgcaaaggtcctagaatatcccttaaagactttaaaacagaaggacaaacttggaggtctaacatcacctgatttcaagatttttaagattgtgtgatactggcattaagatagacaaatagataaacagaatggaaaattcagaaacacacctacacatatatatatacaactgattttttaaaataactatg

SEQ ID NO: 658719 - DNA, 634 bp, Homo sapiens
aagcttcatctcgccctagttgtgaatgcaaccagatggccagtcacacatgccactgagaaacactgaagtggttttgtcttttttaaaacaaactaggttttgattattccaagatgaaagctattatggaaaatgttcattgagataggacaacaatgaagctgacaaaaaatagcacaagaaacaaataaaaatgagaggttttgtggggacaggcacaaagcaggtttccaattctgctttagttacccaggtaaatggaattttataatacaagagctggacaggactattgaggctccagtcttcttcactatacaaatgaggaaacaattcagagatgaagacttccctgtgtcctttaacctataccaccaaagcatttttatttatttcaaaactgatgcaagtcataccaaaataaacacgtatatgwgcactatcttactgatttttaaaaataaacttctttttaaaccaagacataacatagattcagaaaagtaacacttagcattgtcaatattctaattgatgaatatttacaaaatgaattatgtaaaaatgatgcagtaaagaaaaagaacattatcagtaactcaaagttcttcttatcctctttcccattcac

SEQ ID NO: 658720 - DNA, 543 bp, Homo sapiens
ttcatatttttctgcaatgcctaataaggattatccttccttattagatttgattctctttcctcatcaattttatttagtagccctatcacctactcccgtctaaaaagaaaatgaaagacactattccctgggtggaagagggagkgttaaactttcttctagcatttctttctgttttccaagagaaggtatctaactaactggtggatcgaatcccagagcactgactgggccatgcacacccaagtgttaggtttctgtgtgtaagaaggccattcatattgtgatggtcaattttatgtggcaacttgactaagccatggtgcctagttgcttggtcaaacaatggtctacttcttattgtgactattttttggctttaataacatttaaatcagtaggctttgagtaaagtagattactcttgataatgtgaacgggtctcagtcaatcagctgaaggcctttaagagcaaagactgagattttcaaaagaaggaattctagctcaagactgtaacttcaattcttagttcaatct

SEQ ID NO: 658721 - DNA, 543 bp, Homo sapiens
ttcatatttttctgcaatgcctaataaggattatccttccttattagatttgattctctttcctcatcaattttatttagtagccctatcacctactcccgtctaaaaagaaaatgaaagacactattccctgggtggaagagggagggttaaactttcttctagcatttctttctgttttccaagagaaggtatctaactaactggtggatcgaatcccagagcactgactgggccrtgcacacccaagtgttaggtttctgtgtgtaagaaggccattcatattgtgatggtcaattttatgtggcaacttgactaagccatggtgcctagttgcttggtcaaacaatggtctacttcttattgtgactattttttggctttaataacatttaaatcagtaggctttgagtaaagtagattactcttgataatgtgaacgggtctcagtcaatcagctgaaggcctttaagagcaaagactgagattttcaaaagaaggaattctagctcaagactgtaacttcaattcttagttcaatct

SEQ ID NO: 658722 - DNA, 583 bp, Homo sapiens
ctgcccctgaggaaaccggccctgcgagactcatcccgggaagcccacagtgtctcccctccgcctccctcactcctttttccatctttagggcctgtgccacgcaggcgttgacgttaggatgcaaagtgtctgattggagggttttcctgtagctgcagtaacaacggaaatacattctgaaaaatcagttttaataaagcccagrcactgaccccaggcacgtaagtatttatattattgacttctgtatgaggtgattttttaggagagaaaaaaactctgtctgctcttgtcttgagacctgaggaaaaaaataacaaaaattagagaaactggagataaaaacgcggtgagtggaataacgccaatgcccctgggaggctcgcctgccgcgctcattccgcatctcatccgttctgcaagtgtgatagctctttcctgtttgatggtgtcattacgtagacgctacacattcgattccatttacaagtcaatggtgtgagattttatgacaattcttttttagtgagtcgattctgtacgatcctactcagttaagaaaaaatatatgaaaagaatt

SEQ ID NO: 658723 - DNA, 595 bp, Homo sapiens
ttcaatcttgtgccttcaatatagtagacagtcaacgtacagtgatccaagtgaactcactcatgattgtactgtctatagtatacagcttagcacataycattctatcacatatataattctattttgcatatatatgatatatgtatgtgtgtatatatacacgtacatatatttatgtatatatgtacatatatgtgtgtatatatgtacatgtgtatatatatatgtgtgtgtgcatgtgtatgtatatgtaaatatatatacataaaacgctactatcccatacatgcagtagtatttttccagctgacctgaaacctcttcctggtaaatactgcaaaacagcaaacaaactaacaagttgttaagcacttgttaggtgccatctgagtctgttttgtgttttcatgagtattttctcatttaatcctcacaacaacatggtgtgataagtaagatgacagcactctgctatctgttatagagactaccttccgccaggctgagtagagatgttttgtaaatgttttgaattattatttcaaaagttatttgcaggttatatgaagctatctcaattacaaaaagcaag

SEQ ID NO: 658724 - DNA, 595 bp, Homo sapiens
ttcaatcttgtgccttcaatatagtagacagtcaacgtacagtgatccaagtgaactcactcatgattgtactgtctatagtatacagcttagcacataccattctatcacatatataattctattttgcatatatatgatatatgtatgtgtgtatatatacacgtacatatatttatgtatatatgtacatatatgtgtgtatatatgtacatgtrtatatatatatgtgtgtgtgcatgtgtatgtatatgtaaatatatatacataaaacgctactatcccatacatgcagtagtatttttccagctgacctgaaacctcttcctggtaaatactgcaaaacagcaaacaaactaacaagttgttaagcacttgttaggtgccatctgagtctgttttgtgttttcatgagtattttctcatttaatcctcacaacaacatggtgtgataagtaagatgacagcactctgctatctgttatagagactaccttccgccaggctgagtagagatgttttgtaaatgttttgaattattatttcaaaagttatttgcaggttatatgaagctatctcaattacaaaaagcaag

SEQ ID NO: 658725 - DNA, 595 bp, Homo sapiens
ttcaatcttgtgccttcaatatagtagacagtcaacgtacagtgatccaagtgaactcactcatgattgtactgtctatagtatacagcttagcacataccattctatcacatatataattctattttgcatatatatgatatatgtatgtgtgtatatatacacgtacatatatttatgtatatatgtacatatatgtgtgtatatatgtacatgtgtatatatatatgtgtgtgtgcatgtgtatgtatatgtaaatatatatacataaaacgctactatcccatacatgcagtagtatttttccagctgacctgaaacctcttcctggtaaatactgcaaaacagcaaacaaactaacaagttgttaagcacttgttaggtgccatctgagtctgttttgtgttttcatgagtattttctcatttaatcctcacaacaacatggtgtgataagtaagatgacagcactctgctayctgttatagagactaccttccgccaggctgagtagagatgttttgtaaatgttttgaattattatttcaaaagttatttgcaggttatatgaagctatctcaattacaaaaagcaag

SEQ ID NO: 658726 - DNA, 623 bp, Homo sapiens
ccctgtgctcttgtgggcctgggaagctcccttcccctcacaggctcagaggtgtctgctccctctgcctggcctctycccactcctggcacctgctctgattttggagcaaagttgtggctgagcctgggtgctgttgccactcttccaggtatgcctgaactcctggtggcactgacacaccagtcccctgctgccttggccccctccagaccttgggtgcccaccagcacaggagggaggccaagtagtggctgagggtaactcagcacgggcctgcaggtgcccctcagcacaaacagcctgggagccatggatgacatatagatggtggcaagggacaggtccctggtgaaggcccaccttcaagccaaggatggcctgaagcctgagggccaggctgtcagttctaggtggaatctgcaacccagagtgagaacttacggtgcttttcccgggctcacccatggctgcccactgatcagttagcatgcactccctcccttctgaagcctataaaaacccctgactcagtcagacccacagagagaacaggtcaacctgcctgcagataggagctatccactccgggtctcctctctgctgagggctgcacacttgtc

SEQ ID NO: 658727 - DNA, 623 bp, Homo sapiens
ccctgtgctcttgtgggcctgggaagctcccttcccctcacaggctcagaggtgtctgctccctctgcctggcctcttcccactcctggcacctgctctgattttggagcaaagttgtggctgagcctgggtgctgttgccactctkccaggtatgcctgaactcctggtggcactgacacaccagtcccctgctgccttggccccctccagaccttgggtgcccaccagcacaggagggaggccaagtagtggctgagggtaactcagcacgggcctgcaggtgcccctcagcacaaacagcctgggagccatggatgacatatagatggtggcaagggacaggtccctggtgaaggcccaccttcaagccaaggatggcctgaagcctgagggccaggctgtcagttctaggtggaatctgcaacccagagtgagaacttacggtgcttttcccgggctcacccatggctgcccactgatcagttagcatgcactccctcccttctgaagcctataaaaacccctgactcagtcagacccacagagagaacaggtcaacctgcctgcagataggagctatccactccgggtctcctctctgctgagggctgcacacttgtc

SEQ ID NO: 658728 - DNA, 336 bp, Homo sapiens
atagttaacaatactccattgtgtattcaaactgctaaaaatggatcttaactattctccccaccccacccccacacacatgtacaaggcaaacatatgaagtgttggatgtgttaactagcttgataatagtgatcatctcccaatgaatacttatatcaragcatcacaatatatacctcaaatatgcataattttaatttgtcagttatacccaataatgctgaaacacaaccaactaaaaaaagtattaacaaaatgttctgaacagtgcttggttcaggttatattataattctaaaacacaaacctaatttcattaaacttgtcaggtaa

SEQ ID NO: 658729 - DNA, 570 bp, Homo sapiens
ttatttacattaggtgtatctcctaatgctatccctaccccctcccccgaccccacagcaggcctgtgagagcagagactgcttgttttggttacacactgcattttacagcacctatttgttgccacagtaaatatatatatggcaaaagctattcatctgtaaattataattcagccttttactgaattttctattaataaagattaccaattgcttgactatttcatctsttggtacccaatagtaaataaatttcattcaacttttacagtgtgactttctacttttaattactctactcttcaattttagtttgttttaattattttatatatgtcatgtgttttggtggcctcttactgctttatcacactttcaatttctacttttacttctttaaatatgtcagtcatattctaatatctgatccttggaactttatttactttggctaagcttagtgcctcacctatgaaacatattataactattcatcataaacatagtgagataaaatttaagttgtagttgtatatcattaacagatagttatttcagaaagaaaac

SEQ ID NO: 658730 - DNA, 514 bp, Homo sapiens
tctatctatatagagaacccaaatacaacctgattgcatggacccacagcctgagccaccacactcttcatgaatatagatcgtgggtcagtggggttatttctgctccacactcaggcagatctccaggaattcaaaacacctccttgcctgaatcagcagcctgagtcagccaactctttctgtgcatagatcatggtacagtgggtccctctttcctgtacatgtaaacagatctttaggcatttggatcacccactgacatggagcctgagtcatcacctttctgtgaagagatctgggtgcaggagggccctctctatgccatgctcagggagatctccagacatttggagcacctgctcacccataacagaagtctgagtcagcctacccctcctgtgcagagagcctggtgcagggaggcmctctccactccttgcccaggcagatcttcaggcatttggagcacccacttgcatggactagcagctggaatttccctaccctcctt

SEQ ID NO: 658731 - DNA, 565 bp, Homo sapiens
gtgcaccaccacacctggctaattttttgtattttcrgtagagaaggggtttcaccatgttggccaggctggtctcaaactcctgacctcgggtgatctgcccgccttggcctcccaaagtgctgggattacaggcgtgagccactgctcccagccctgcgcctaaatttcaaaatattttttttcctttgcagcaaattgttccacactctatctcctttgctgtgtgtctcttgtttaaattattttaagctaagaagacaagaactgaggtctcacagcagccgtcaacagtctaactttggctagggagagcctatagaaacttctatgctgtgagtttctatttgtgcaacctcaaattttgtttcttctcttttagatcaaatggaggttcccatgattttctttttcctcatggaaacatgtttggtcagaagggaaacaaaccaattaaggtgataccaaaggatgatccttgatacagttgtattttggtggagcgttgagattcgccagtgaactctaacagtgaggatggcactggaataaaaagagaagaaac

SEQ ID NO: 658732 - DNA, 562 bp, Homo sapiens
ctgtgttcaagggcaggaagctgagcatagggctagaagattttctgtgacttcctcttattagggaggaaaaatttttcctagaaggtccaagcagacttcttatattctccctaatctatgtcacattcccatccttagaccagggactatatctacattccctaagaataactgaaccccatctgatgcctgtccaaagtgggttacccttgctccatccaaaaggcatggaagatcaggggctggcacttttggggactgtaccttctactgttaatgggatccaggtagactgagtgccactggatcagagcagaaccatcaaggccagcataagcaggaggctgctggggctgccagttgagagaaaacaatctgtcccaggcaggcatsctctccaaatttagaagcaagagctagcctttccagagggctctttgaaaatgttagaaaattataattagactttgtgcttctaccaagccttttgtcccagaagctcagggcacttctctgcatcatctcattaatcttcaccacgccattcgaggcagcctgc

SEQ ID NO: 658733 - DNA, 583 bp, Homo sapiens
caatggcttgcctagtgtcatatactcagtgaggcaccagcagctgaggacaggaccaaaacttatcactgaagacccgggacaagtacatggatggcatttacttacccagaaagcatgagacttgcaaggtgacttgacagaagaatgtcaaagctctgtgcaaagaggtgagaggaacagaacacaagctgtgatttactatccaaggaaccttgggcaagtcacttacactttctgaacagttcctcatctaaaaaatgaaagtaacatctaccacatcgaacttcacttggctgtttcaaagacaaaagaagtgttttaaacaaaccatgtgacctaggacatttgataaaatctaagtcaacataaggcattgttatttgagaggatttgtagaatcaacatttaaaatgagcctgcagctgttggcacacaatgataatcctgaattgcaaccagacaattatagaaaatgcwtcctaagagatgactaagaagttcctttttgccattcaatgtgctatgatcattttcaccacttactctatggaaagtgctacaaagcatgcaaggacaactg

SEQ ID NO: 658734 - DNA, 578 bp, Homo sapiens
gaattcccttaccccttgctcttccggatgaggcaatgcctcaccctgcttcggctcatgcttggcgcactgcacccactgtcctgcacccactttccgacactccccagtgagatgaacccggtacctcagttggaaatgcagaaatcacccatcttctgcgtcgctcatgctgggagctgtagactggagctgttcctatttggccatcttcgattttatcttatactttaaagttrcatataatgcttagttttgtggtctgcctaatattttcggtaaaatgtacaataggaattaatttttttatttttcttctttatcacagctttcattaaaggcaatgtgtgtgcatacacatacacacacgcacatatatatacacacatatatctgttaaaatatcaagtaacattagtatgcaaaagaacacacaaaacaccttacatggagatatcattagctactatgattttattttgataaataatgaaacaggtttggagtactgacataacaccctggcaacaaaattttaattgcagttttcacttgaggttaaattttcagaggcacat

SEQ ID NO: 658735 - DNA, 541 bp, Homo sapiens
tatccaattctgtaaagtgtctgttcagatattttagccaatcttctgttgagttcactgtcttttatttattacaatttaagtattcatcatatacatgtattatattttactttatgtatgttggggtgaatatctttctccactactrgtttgcataatgttttttgaaacacagaagtcatcattatcaatataaatgaactaattgttttaattattaatttgtgccctggttaagaaatccttatgagaatattgtatcaggttccccttcctttcaggacttcaatctatctggaaatgactgtgtatggtttgaggtaggagtcaatatttagttactttttaaaaaaaatttcaattaatccagcattgttctgatcacattgtgtatttcaatgtagacgagcacactaataatgaaggattatttatatctgtggtgagaattgcaaaataaagcccagcatagaaggtcaaatagtattacctcaaaggatagattaatacaatgaaacctgatggataagtgtaatat

SEQ ID NO: 658736 - DNA, 606 bp, Homo sapiens
agcacttacaagatgcgtgggtcttgtgaggctcaggttggactaatccttcctgtccagcctccatggtggagaggaagatggaggaggaacatgggtcttatcctcatatcactttccaggtcctaacatagattttctgataagatttgaagaagtatgtctctttctatgtaaaaactgccattttttaaaccaatattttattgagatggaagagctccttcatacagttagacaaatggcatttaaggttttatctgtttacttcctgttctatactaggaagatggaaagtgatgcttaaaaccttcagcagctatacatcaattggttaggccaattacagaggagtkttcacattgttatttcacctccttccccatacactcaagtggctcaggtagttccaagataccaccccattgaaaggctgggaggcaagtctatctatgctgctgtgatttgggaatccatctgtggtttctacctgtggcagagtctgaggttagaaggatgattaggagcatttatcagataccctatcaaggaaataagactttaaggagaagggagtgtttttaaaactaaagttatgtttattga

SEQ ID NO: 658737 - DNA, 596 bp, Homo sapiens
cataacagtgcattcttttttgtcttaataaaattaggattctctggaccacccaaataaatgttaacagaccaaatacaataaatcaagtaatttatccrgccatatataatgaataaagcctaacattatcacttctagaagctgtataatcttttattcaacactgatatatagaagacttggtttctccatttagtttaatagggatcttaattaagtccatgctttgagtaaccatctataaacgaatagtaccaacttcaggtatctttgccacaatatttaagtcatgagtgagtaccttattgtcagtagtttaccatgtaggcagcccttatattctacatttttaacatcctctcctacatatgtttccctagatcctgtctgtatatactaaataggcccagagatttatttgttgacttggtaatttcttcctagagaagagtttattttttattctctggctaaactgagctacaggcactggattgcaacaagaagggaggaaaactgatggatcttttggagaaaaacatcatttataaggcacttgcttctagtgagattattttatggttcatagtcaa

SEQ ID NO: 658738 - DNA, 616 bp, Homo sapiens
ctcagatattttgctctgtgttcttatatttaactagcaagacttgatttttacattgcttatgttggctttacttctgcacaattaaaaccagaggagaagaagaagaaaaaatctaacactcaataattagaagtatgatgtagatttctctaaccctggctattcagagctgagtggtgatcaaggcaggattaatgtattaacatacaaggcaagtatgttaataaaggaaaaaggtcctacrgttttaggacacatatcaacaaaaatttctacatacttgaatggttgcagattaaaccttatttatgaaactagctccagagagcagtacaactttgaacttggcatggactcctgaactctcccagttgtatgacaggagccattttgactgattatctcccgtcttccacactgccttgccctgcctatccaaagtctactctccccagcaagaccatccaccaagctgtacgctgaggtgcctcacaggcagaagaggtcatgcacctcagtgtcatcctttgttttctactcatatcttctctagttcaaagattcagttggtggcagtgaagtccttctttatttgggaaagtacaccaactac

SEQ ID NO: 658739 - DNA, 607 bp, Homo sapiens
gaagaaaaagcctgaaggactgaaagacaggctgaaaggtggtcttaaggacaaaggaagagaatgaaccaatggttggaaatagtaggacacagatgaggtatggatagatggatgtcagttaagctcagaaatcggttatgatactgagtaattcattgagggtcattcagtcaacaaatgcttattgataatttaatataatagttactattgattgagctcatgctttgtatcatgtactttactgagcactttattgatttaatccccacaatgatcttattatcccctctttacaaaaagaaaacagaggcatggagatctcaaatagacatttttccagatctcagcttgaaagccagggttgaagcatagggcttctaactgtagagcacattctcctagttactgcattgtaccacgtgctagactttgagctgtagtggtgaacatggcagacatagcctttatcctcagagagacagagtccattctttgtattcttctgtacagctaagtgcatagcactaggctggggmtagatgttctaacaaggagagcagtcatctcacagctctataattttttttttgcagaattgcaa

SEQ ID NO: 658740 - DNA, 616 bp, Homo sapiens
cttttggcttttgtgaatagtgctgctatgaacatagatgtacaaatatctccttgagatactgattttaattcttttgggtatatatccagaaagagaattgctggattacacagtaattcaatttttaattttttgaataatcaccatactcttttccacagcagctgcatcatcctacagttctaccagcagtactcaaggattctactttctccacatccttgccaactcttgttattttytgtttttttgatagtagccactctaatgagtgaaaggtggtttgcatttctctaatgattagtgacattgagcatcttttcacgtgcttgttggtcacttgtataatttctttggaaaattctctctttaagtcctttgacaattttttaaaaattttattgatacaaatagatgtatatatttttcaggcacatgtgataacttaatacattcatataatttgtaaagctcaaacaagtgtaactgggatattcaccacctcaaaaaaatgctacatcaaatgtagcatcaaatgtggcatcaaatgccacctcaaaaaaatacctacaaaaaagaaatgctcatcccttgttagaatactagccctact

SEQ ID NO: 658741 - DNA, 616 bp, Homo sapiens
cttttggcttttgtgaatagtgctgctatgaacatagatgtacaaatatctccttgagatactgattttaattcttttgggtatatatccagaaagagaattgctggattacacagtaattcaatttttaattttttgaataatcaccatactcttttccacagcagctgcatcatcctacagttctaccagcagtactcaaggattctactttctccacatccttgccaactcttgttattttctgtttttttgatagtagccactctaatgagtgaaaggtggtttgcatttctctaatgattagtgacattgagcatcttttcacrtgcttgttggtcacttgtataatttctttggaaaattctctctttaagtcctttgacaattttttaaaaattttattgatacaaatagatgtatatatttttcaggcacatgtgataacttaatacattcatataatttgtaaagctcaaacaagtgtaactgggatattcaccacctcaaaaaaatgctacatcaaatgtagcatcaaatgtggcatcaaatgccacctcaaaaaaatacctacaaaaaagaaatgctcatcccttgttagaatactagccctact

SEQ ID NO: 658742 - DNA, 612 bp, Homo sapiens
aacccaataaatgagaagttttggagacagcattaattgtgatgaagggttcataaagcagtggatgttcaattttcccatttggggtggtaataacaggtctaatcatgacacctccataaagtcatgggaagtccctaatgaaagtttctgaattcagatatttaaatgatggtagggtaagtcattatgccaatgggagaatgaggcaaaaagcggagttcatccttgtgctaaccaaagaaaagatgaaatggtgagggctcatcaattctgggccaggaggaagataggcactagtaggtctgatctgtctggaggattcctttaaraaaacccaaggttctggaggtcactggcaggctggaatttcagcccctcagagtgaagggatgggcttctttggttgagttccggtgtctgttaaccccccaccccttgttctttgtgtgaaaccagcacccactggccaaaaagcccgggttggggtctctgtgggttgatggatataaaccatcttctttacttagggcacaaagaagaaccaagacaggagaggaagcctgggccaagcctgcctagggagtctatcgtggtaggaacaagagctac

SEQ ID NO: 658743 - DNA, 464 bp, Homo sapiens
gatctttgtagttagaataacattactttycattctaaatatgtgcctgtaagagacaaagtataaaatacagagtttcaccgaatttattgaaatgataatatgccaaagttaaccattttcccaaattccttagttagcaggctgcacaactttctagaatgtatagaaatggcaataagagattttaagaaaaacaagatttccttaggacaaggtttgttatttgccaaagacaaaataatgttgacttctacatctctgcagaagtgttctctgtctctttccaaatctgcagggaaaaacagggtattaaaacagttgaaaaaataacaaaagttaatttttactttacctgtaaaatttttattgactgcttcgttaccaaattttccacctatgtcaaagtgagatgatatcttcttaaccagaattggtgaataaataaaaagtccaacaattat

SEQ ID NO: 658744 - DNA, 582 bp, Homo sapiens
cttaagttaaccttaatgctgcattagcttaaatgtattatctgacaatatgcgataaatttgtttcttgttccattctttctctttgctctcatgtgtttgggttcttgattgattatctgctaagtatgaatacttagaggtcctgctttgcttcrttaatactctggatgttctatgttatggtacagaggacacgcatacacattgtggagccagactgcatgggttaaaattccagcttggtcacttactgtgtgaccatgaggaagtcaattaacctcttcgtgcttccatttcctcttttacaaaaagggaataatagtagtaattaactcataagattattgtgaacgttaaatcctgctatacaaaaagcacttagaatagtgagtagctccctaaaaggctgtttaacttattttgatatgtgaactttcatatctttaaagagaattataaggttgtggagggtagaagaaatagtctatctggatcagaaaaacatattcctttccagtaggcatgtttattttggaaacatcagtgagtgtctacttgtagttaaatatttattggcag

SEQ ID NO: 658745 - DNA, 480 bp, Homo sapiens
ttcccttctttctttctttctttttttttttttagaaaggtaatcattagttgaaagatatggatatttaaaattatgaaagatataatcagactgcctctggaaaagtagaattaatttacctacccccctccaccaacagtgtatgagaatacccagttccctacaatttactgattactgcttaacttctttcatctttgccaacctgataagcaaaaattatytcacttttaaaaatcattccttcaattcctaataaaataaccatttgatgtacatacagaacattgctatttctcttgtgaaatacctcttcttaaatttttggctacgtttttctctatcttacaggttttcagattgtctttttattatggatttgtaagagctctttataaagaaaatacatcttcatctgaatatatgtcataaataataattgccagtgtgtaatttgtatttcaatttttttgatgc

SEQ ID NO: 658746 - DNA, 615 bp, Homo sapiens
aatttgtcagatgtggaacttatcccgttgcctttagaaccccaagtgaaaattagaggaataattccggaaacagctacactgtttaaagtaattgtgatggatatttaatgtgtatgattggaacctaattcttaagctagatcagagatactaccttggaaaactattacattgcagagatcacatctataattctagttgatttagtaaatgctagattgaagggtaccttttatttatcagtgtgttttgatttaagatcttcttttgttaccrgtacatgggcatttttatgtaacatgtgaaatacttttatatctctgggttgttttttaatatttaatttttttattgttttatttttgtagagatgggtcctcactttgttatccaggctggtctcatactcctggcttcaagcagtcttcccacctcagcctcccaaagtgttgggattacaggcatgcgccaccatacccaacataatatttagtttttcaagctaattgttaatcagagctgtaactatttttctttatgtaaatttttttagagggcaaattgcaaacgtatcatgcattcattcagttcattagttcagatggttagata

SEQ ID NO: 658747 - DNA, 508 bp, Homo sapiens
tctctcttctcctctcagaaatctcactctgaataacttaatgaccatagtactcacacttttttaattaaagtgatgtgtcctcacaaatacatttctcaaactcaaaacatcatgcttgaaatatcactgaacttgtcaccaaagaagtcacatggcaatgataataaagaaatatgcagactacactctgaggatagagctctaaagagtaaaaacaatggaatttggaaaaaataggagtaaagaattgctttgagcaataaaaactgagattgataagccactttyctttttgatataggcttgtcactcacagccaaaatctctcagcaaaaccacagctactgtttaccctcctgagagatgctccttcctcacccaacacgcatcaaccttcctagaaaggtttatcctctttacaattcttgttaaggtggcactgaatacaaagttactcatgatcaacttccttactagttgtcagtgtctgcccttctagaatttc

SEQ ID NO: 658748 - DNA, 567 bp, Homo sapiens
gatctgaagtggagtctaataatttgcattttaaaaaagtttccagctgttgctcatgctggcgatctggagacctcacttgaagaaccattggcctattgcatattcattttggataaacattacatgaaaagtatctgggaaattctaaaatcacgaatgtttggcccccacctctgggcaactcaagcattatctgcaggtatggcacagaatttatgtttaaaagtggattccatgtgattctgatgtatatccagagtcaaggtagcatgctaagagaaaatcaactacaacagctctttgtgctaccatatagcacacaagtaaaatgctattttcatgaaaaaacatcaagaatttgaaacaaaactcactgtaagttgtttccatataatgcccccccccccaaagcaatagtaaaataaaaaaaatyagtgaaacatattatctagcattatctaggtcaaaacaatattttaaaaccctaggtattctgcagaattgaactttataagcaactctcaactatattgaaactttgtccaactgggacattcatgtaaa

SEQ ID NO: 658749 - DNA, 471 bp, Homo sapiens
tgtcaacaaacagaaacaatttcacttcttcctttcctttatggatgcctcatttctttttcttccctacttttttggctaggactctagtagtatgttgaatagagagatgaaaggggcatcctcatcctgctcttgttcttagagaaaaacttaatttttaaccattaagaatgatatttgttctgggtttttcatgtatggcttttattattttgaggtaaatttcttctatatctgatttgttcagagttcttgtcatgaaaatatgttcaattttgtcaaatgtctttactgcatctattgagatattcaaatggtgttttacttccactttaatayaatatattacatttatggatttgtatatattgaaccattcttgcaccccagggataaagcctacttaatcttgatgattttttaatgtgctgtgaatttagtttgctagtattttgtcaagggtttttg

SEQ ID NO: 658750 - DNA, 603 bp, Homo sapiens
ctaatttgtgtgtttgtgtctagtttttaacaaaagaaaaattaaagcaaaaataaatattttttaaaataaaaaactttagaataaagatgtaaagaaagacaatatttttctaatgctgtacaatatgtgttctaagtgttactacaaagaatcaaaaagtttaaaaatatttaaaagtttataaagttaaaaaagtacagtaaactaaggttaattaaacattgaagaaataaaaatgtttgtataaattgggcgtagcctaattgtctagtatttataaagtayacattagtgtacagtgatgtcataggctttcactttcactcatcactctcactgactcacccagagcaacttccagtctcgcaagctccattcatgccaagtgtgctacagtagttttactatgctttttctatgtttagatacacaaacatttatcattaagttacaattgtctacggtgtttaatgcagtaacctgccgtacaggttttagcatagaagcaatgggctataccatacagcctaagtgtgtagtaggttgcaccatctaggtttgtgtaattatactgtatgatgtttgcacaataattaaacc

SEQ ID NO: 658751 - DNA, 595 bp, Homo sapiens
tttattgcatgttatctatatattagttcctgagattaaaaaaattttcaaaacaaaagtatccctgccctcttggatttgaaatctggctctaaatacagcacaaatagcccagagtaaayataaaacagaatttcctaaataatattaccaagggtatcttcagtgtttctgtttttgcttttaaatgaaaaagtaatccaaactctaataactttaggacactctgcatgctgtatcactgtcttagaggtaggtgcacatcacacattagcttactaaagtcaatgagaagtcttattattaggaagtattagcattttccaaacttaattgatgtcagattttttcccaaaaatttttttttttcattaacaccctgaaagacaccagtattccatgaaacataggttaggaaatgttgccctggagaaattctttgatatttaatccttttgttgattttttttttttctctgaaaaaagactaaaattctgggcattggtgttttcctagtactccaaatctcatacagggtatcttacagcagctctcctatgaagtatggtaatgacttattcctccaaaatgttt

SEQ ID NO: 658752 - DNA, 595 bp, Homo sapiens
tttattgcatgttatctatatattagttcctgagattaaaaaaattttcaaaacaaaagtatccctgccctcttggatttgaaatctggctctaaatacagcacaaatagcccagagtaaatataaaacagaatttcctaaataatattaccaagggtatcttcagtgtttctgtttttgcttttaaatgaaaaagtaatccaaactctaataactttaggacactctgcatgmtgtatcactgtcttagaggtaggtgcacatcacacattagcttactaaagtcaatgagaagtcttattattaggaagtattagcattttccaaacttaattgatgtcagattttttcccaaaaatttttttttttcattaacaccctgaaagacaccagtattccatgaaacataggttaggaaatgttgccctggagaaattctttgatatttaatccttttgttgattttttttttttctctgaaaaaagactaaaattctgggcattggtgttttcctagtactccaaatctcatacagggtatcttacagcagctctcctatgaagtatggtaatgacttattcctccaaaatgttt

SEQ ID NO: 658753 - DNA, 581 bp, Homo sapiens
tgatatttaatccttttgttgattttttttttttctctgaaaaaagactaaaattctgggcattggtgttttcctagtactccaaatctcatacagggtatcttacagcagctctcctatgaagtatggtaatgacttattcctccaaaatgtttgccctgcacctcatgataaaaaagactccatattcagtcctaaccccctgcttctcttcctttcattgctatttttctttagagttgtgctttccccattacttcaccattcatttttatttttttcacaatatgttcttttctgcctgcctaataggttcagttgtgtggtgaaggctgaggaggagcaatttggagggatttgcagaggttgttcaataggcaaataaaatttcaaggaatttttaacattagggaagaggatagaaaagagatgagctgtttacctttaaagttgtctgtgaacaagtagaamcaaaaataaaagtttacctcagctggaaaagatcattcccaggtgatggagattgagaagtgaggtattgtgggtagtttatttttttctttgcttagctttattgagtt

SEQ ID NO: 658754 - DNA, 640 bp, Homo sapiens
cctaaatgtacattttactctgtcctgttcttaattgataacatttgttagagatatgtaaaatttttcatatcacatcctttagggggtattaacaatatgctagcttgacatagtttagtcactcttgtcaaagcctggtctccagctgtagaatttgaaaactcatagtatagtcagatatgactttatccagttattcaataattatttgcttgtactatatgcccagcaccttgctgataaattttgctagtaaattttactttgttatcaagttttcctagtaaatgacctttgtagtcatttgttttgtctgagatattggcaacstcgctgagctacagatctcttctgtgaatgaatcctacgagtctatgtcgggggtctgtgtctgcccgactcatcattgtgctgagactgagaagttcctgcctcgtcagatgtttacaacatctacacactcctatttcctttcaaaagtcaactgcctcctagcctaggagatttttacagaggtgggaaaagttgtcatttctcatcccatattcccccaaatctacagggagttatttctgtttctctggttacgaaatagacttttaaaactcaaaagccaaaaattgaatcccagtttgtt

SEQ ID NO: 658755 - DNA, 527 bp, Homo sapiens
tgacagcatgctggcagccctcactcactctcggagcctcctcagcctcagcacccactctggccatgcttgaggagcccttcagcccaccgctgcactgtgggagcccctctctgggctggctgaggccggagccagctccctctgcttgcgcagaagtgtggagggagaggggcaggcgggaaccggggctgagtgaggcactcacaggacagtgcgagttatggttgggcatgggcttggcaggccctgcactcagagcagccagccagtgccactggccccaggcagtgaggggcttagcacttgggccagcagctgcagagggtgcatcgggtcccccagcagtgccagcccaccggcgctgtgcttgacttcttgcygggcctcagctgcctcccggtggggcagggcttgagacctgcagcccaccatgcctgagtctcccctcaacccccgccattggcccctgtgcgtcctgagcctccctgacgagtgctgtcccctgctctgcagtgcctggtccc

SEQ ID NO: 658756 - DNA, 574 bp, Homo sapiens
gagactcctgtggtccctctgtgggacactagagtgtggccagctgtggcctcccagctgttggaaggctttcaggaaaactcagtgatgatcgctactagctaacatccacagggctgacataacattccagacaagcctctaagtactttacaagtagtaatttatttttcataaccatcctcattatatagatgaggacatgtggccctgaaaagtcaaataatctacccaaggtgtcacttcaggcaaatagaacaccgagaaattgaacttgggtatctgcttccaggccaggattctttccctgttagccaaactgcctcaaatcctcaaaggaactctttttaactgcttcaaatagctaggcaaaatataacctgttactagcagtactagatgttcaaactagtaattatttagtatttaaaaaattgataatggtaattgaytaactccttaattagccttttctggcgtggattccttagcactttcaaatgtggcattatgttttaattcatataatggctcaatggagtttccattatttactcaatttttagcagatgaa

SEQ ID NO: 658757 - DNA, 271 bp, Homo sapiens
ctgctgttccccacatgacgtcccttttcagcaggaagtagccagaaagagtcatcatccaacaccccttaacwgcagttagggttaccactccagagaggggaatgatagaggagttaagaagaaatcacttaggcagatagcaagggtgtaacagtctttggtaatgcttttctttttaatgaaacacagccccaaatcatttactaacaaagagtagcctgtaaagttgacctgcagacatagacaagcaagctgggagtttgcatcg

SEQ ID NO: 658758 - DNA, 580 bp, Homo sapiens
ctgaaagaggtgctgctgacatctagtaggttgaggtcagagatgatgtcaaacattctacaatgcataggaaagaccacctgaaaatatatgtatattcagttcaaactgtcaatactgctaaggttgagggcctttagagttagcctgaactcacaaaattttccgataaaaggcactttcctttcccttccaccttataagctttaattcatccttaaaaggttttggtgaagataattttctttgtaaaggagaaaacatgtaagctttggaaccaggaaaggatgattgtgcatcactacttactagccccatgtttgaccaactttgtttccttgggcgctataacaaaatacaataaaacaggtgccttagaacaacagaaatactgtctcacagttctggaggctagaagaacaarttgcaggaccatgctccctctaaaacttgtagggaaattcttccttgcctctttccagcttctgagggtttgacagcaatctttggtgttccttggcctatggatgcatcactccaatcctccatcttcacatgaccttctctctgtgtatgtctg

SEQ ID NO: 658759 - DNA, 545 bp, Homo sapiens
tacacgttcctctgaacttcgccaatacttacagtattgtacaatacttatttgtgacttctcatcaacaccccaactggttagatgctgttatttttactggttgtatattaagacaataaawaatttcgtacttgggtagcaaagaattgttactgactagttcatatttctaggttccccaccaccatttccaaaagagggactttttcttcttcccaaataaaactgtgcacagatgccaaatgcataaggcaaatgaaagtaaaaccactgtatttaaagtaagcacagtgagcacagagccctactaatttacttccccctcatctccaattttagcttctgaggcaacacaatgtgtaaaccagtgatctggttcaacttgctcaatttacgaataaggaaacatagcctaaagaggtttagtgacatattcaaagtcaaacagcttattagaagtagagccaggataaaaacaaagtctgtgaaccctaatgctgttttctatacactatgctacctgggtggtacacgaattaaat

SEQ ID NO: 658760 - DNA, 538 bp, Homo sapiens
atgagagtggaagaactgaaaagagtgaaacacatcagagaaaaatcttagtggcataaatgatagtatttgttcacagattaaatgcacacataggaaggaagaaataaaaccaggataagtcccaaatttctgggaagaccaataaatcaggctcataccattgttataaatcacgtttgggtcagctggaggctgggagtatggatgagatcaagatttcagtgggaaggtaagtatatacgaatttgaagctgctgaaaatcccagcaaagtttttattgtgaattaattattattttgtggttttaaataatacttyctgttatcttctagggaatatactctttcttgttgctatttacttgttttttaaaatttttttattcattgctgtcctataaattgcagattttttttttttatttttaagcttccttgaaaactactgctgtgatttttattagattagcacttaattaaaatattgatttgtggagattttccatctttgccatactgatccctttcatcataa

SEQ ID NO: 658761 - DNA, 566 bp, Homo sapiens
aagggataaatgtttgagaccatggatattccattctccatgatgtgctgatctcacattgcatgcctgtatcaaaacatctcatgtaccctataaatatatacagctactatgtacccaaaaagtgttttaaaaattttaaaaaaattccacatraccctgcttgaaggaccctttagaagctggaggtagcatatgcaggacaaataatgtagtgactccaggtccctcatacagaaaaaatatgcatttatttatttaatttacttcgtatctttaattacttcatattttaggcatccacattctattttatataaagaaaagcacctcagtgataatataattcctgaaatactacttaactttctgatttctaagaacattttcagttctaatgattttctatccacctatctacctacctatcttatataatgggtcctatgatatacgtatatatgtatacatatgtatatatatgtacatatgtatatcataggagggttagggttggatatgtacatatccatgtacatatgtatattataggacacattatatat

SEQ ID NO: 658762 - DNA, 207 bp, Homo sapiens
gcctggcgaggagcagcctggggaggaagggagaggtcagatgggtctgtagaaaaggaagattagaaagactcagtgacgcttggggttggtactgaggggacaggcgggagggaragaaggaagatttgggacgagttgcactgggcacagagactaggaagggactgatgtgtaaaagaatgcctggacgtcaggcacctcaga

SEQ ID NO: 658763 - DNA, 207 bp, Homo sapiens
gcctggcgaggagcagcctggggaggaagggagaggtcagatgggtctgtagaaaaggaagattagaaagactcagtgacgcttggggttggtactgaggggacaggcgggagggagagaaggaagatttgggacgagttgcactgggcacagagactaggaarggactgatgtgtaaaagaatgcctggacgtcaggcacctcaga

SEQ ID NO: 658764 - DNA, 207 bp, Homo sapiens
gcctggcgaggagcagcctggggaggaagggagaggtcagatgggtctgtagaaaaggaagattagaaagactcagtgacgcttggggttggtactgaggggacaggcgggagggagagaaggaagatttgggacgagttgcactgggcacagagactaggaagggastgatgtgtaaaagaatgcctggacgtcaggcacctcaga

SEQ ID NO: 658765 - DNA, 567 bp, Homo sapiens
accccaagctcgagttgagatttcagcctgacatattttaaccttattctkgtaagcagagaattcagtaatatcatgtgtaaacttctgtcctatggaattgtgagacaataaatgggggttgttataagctgctaaatttgtagtaatattgtcatgcagaaatagaaaactaatgaaaacaaagagtaaacatcttacaacactagatataagcaataaaatacaacactgagattagaaacgaggtaaaccctatacttttcctcacttttccctgtactcataacttctccctctcatccttcatgttcattttgtcatgttttacctttacaaatgtatacacacagaatgtatttttattatttttgctataacaatgtcagtatttttaaaacaaaatcagaagaaatacatttattactttcattttttcccatttccagtgctatttatcttttgtgtagatccaagtttctttttcttcaccctttttgaggtttaattggtattcaaaaaaataaagatatttaacggataaaattttgtgagtctggacatatg

SEQ ID NO: 658766 - DNA, 567 bp, Homo sapiens
accccaagctcgagttgagatttcagcctgacatattttaaccttattcttgtaagcagagaattcagtaatatcatgtgtaaacttctgtcctatggaattgtgagacaataaatgggggttgttataagctgctaaatttgtagtaatattgtcatgcrgaaatagaaaactaatgaaaacaaagagtaaacatcttacaacactagatataagcaataaaatacaacactgagattagaaacgaggtaaaccctatacttttcctcacttttccctgtactcataacttctccctctcatccttcatgttcattttgtcatgttttacctttacaaatgtatacacacagaatgtatttttattatttttgctataacaatgtcagtatttttaaaacaaaatcagaagaaatacatttattactttcattttttcccatttccagtgctatttatcttttgtgtagatccaagtttctttttcttcaccctttttgaggtttaattggtattcaaaaaaataaagatatttaacggataaaattttgtgagtctggacatatg

SEQ ID NO: 658767 - DNA, 567 bp, Homo sapiens
accccaagctcgagttgagatttcagcctgacatattttaaccttattcttgtaagcagagaattcagtaatatcatgtgtaaacttctgtcctatggaattgtgagacaataaatgggggttgttataagctgctaaatttgtagtaatattgtcatgcagaaatagaaaactaatgaaaacaaagagtaaacatcttacaacactagatataagcaataaaatacaacactgagattagaaacgaggtaaaccctatacttttcctcacttttccctgtactcataacktctccctctcatccttcatgttcattttgtcatgttttacctttacaaatgtatacacacagaatgtatttttattatttttgctataacaatgtcagtatttttaaaacaaaatcagaagaaatacatttattactttcattttttcccatttccagtgctatttatcttttgtgtagatccaagtttctttttcttcaccctttttgaggtttaattggtattcaaaaaaataaagatatttaacggataaaattttgtgagtctggacatatg

SEQ ID NO: 658768 - DNA, 567 bp, Homo sapiens
accccaagctcgagttgagatttcagcctgacatattttaaccttattcttgtaagcagagaattcagtaatatcatgtgtaaacttctgtcctatggaattgtgagacaataaatgggggttgttataagctgctaaatttgtagtaatattgtcatgcagaaatagaaaactaatgaaaacaaagagtaaacatcttacaacactagatataagcaataaaatacaacactgagattagaaacgaggtaaaccctatacttttcctcacttttccctgtactcataacttctccctctcatccttcatgttcattttgtcatgttttacctttacaaatrtatacacacagaatgtatttttattatttttgctataacaatgtcagtatttttaaaacaaaatcagaagaaatacatttattactttcattttttcccatttccagtgctatttatcttttgtgtagatccaagtttctttttcttcaccctttttgaggtttaattggtattcaaaaaaataaagatatttaacggataaaattttgtgagtctggacatatg

SEQ ID NO: 658769 - DNA, 626 bp, Homo sapiens
tgccttcgaggttgtacaaagtaaatgtttcactctgaactggatttctcccagtggcatagtcctccatctttccttccatctctatttcccagccagttattgaaagactgtaaatgcaaatattaactgatcagccaaacaattaaaaaggcaaatcagctgcttaaaaactaaacaatgcatgtcaaagactgatggaaataatgtttttatgattcttgatgtgggaatttttccagtgctattttcccagtggcatggataaccaagagttaaccataattacaggcttatagctgctgaggagtatcattagtttatttttacttcttcctggacacgcatacttaagcagaaaagaaaactaagagaattaaactaaaygatatcaaaaccatggacagcacaaatcttgattcaattcaacaaacattattcaacatccagttgaatttgcaaggcatattagtaggcattttgggggatagagaaataaagaaaacatgaggcttgtccctaagaagttgtcaatatagtggggaattggagtatgtccatgagagtgtacaagagagaatggggcatgtgctgaaaagatcaggagtacagaataaatgcttaat

SEQ ID NO: 658770 - DNA, 612 bp, Homo sapiens
atataaagaactcctgcaaatcaacttaaaaaggtagacaacctaatgaaaaaatagtcaaaacaggcactctacaaaaagaatgtccaagtaaaaaggtgctcaacatcatttgtcagcaggtaaatgcaaattaaaaccacaaggagaaaccattatactcagaagaatgactaaaataaaaagactggcaataccaagtgttggtgagaatgggaatagctagaactctcatatgatgctggtaggggggtaaattggtgcactactttgcaaaatggtttggcaatatctaccaaagctaaacatacatttatcatatgctgtagcaatcctactcctggatacatatccaagagatacatatgcttacrtctaaaaagaggcagatgcaagaatgttcataacagttttactcataatagctccaaattggaaacagcccagatgtccatcatagtagaataaataaatgttgatatctttataccatgggatactgcacagcagtaaaaaagaatgaagtactaggacactaaagaacagacagatactacagagctgatatttaattaaagagtcaactataaaagagtacttgtgatatggctc

SEQ ID NO: 658771 - DNA, 609 bp, Homo sapiens
atagaaaaacaaaaacaaggaagtcagctcttcttgaaagagaaacttctccactcagcaactttctactcaccctctttcatttaacaagcaatgttgattgcttactgtgaacgtcagactcagattacaattggtggctgggaagagtgaaaagagcatgggcctgatccatggtcaaatcccagctctggctyatgtaagttgtgtgacactgagaaagttacttaactcctctgagcatcagcttctttatctgcaaagtgaagatctttatgccagcctttcagagctgatgtgagaattagcatttctcaaacatctagctgaggccttcaagtcagtccttaagaatactcactgcttttaccatttctactactaatcatggttaataagacatgctcactgcactaaaaaggtccaaagtgttactggtggatgggaagcctgttatctatagtgggatccagtgaggaagaggtcaactctaccgggatggaatgggcaagacagacttcaagggagactcatgagcacaatcttttcaaaacaaaaggtctgtggcaagaggcttaaaacgtagatacatcctgagaagtacaagct

SEQ ID NO: 658772 - DNA, 554 bp, Homo sapiens
ccaagctgttcctctctgactctgctggcgcaggggctcctctgcttcaggccctctgatccctgcaccactcaagtctggagccacggacagggtgactgggctgctgccctagcctgtaccagtccaattaattcaattccatgcagttaaatgatgtttttgtgtggatcctgtgctcatctttgagggttgtatgacactgtaagagacaaggcacacgagctttatrgtaaaagagacacagctgttctgtaacccaaagctgagtgctggaaaatgctcaagagagggctgagtgacagtgttccactcagggatatgggagacagggccagggatcctccttggcagcatcagaaaagctttatagaagaggagcacacttgcctgggcctggagactaagaaggcccttgatagtcaaaggatgagaaaggggcatttaggccgagggaaggtgtgtggggaaagtgctgttgcctgtggtggctagaccacagtaaggaaaggaggtgagagaagaccagggcaagataggtgggctgaggtcgt

SEQ ID NO: 658773 - DNA, 554 bp, Homo sapiens
ccaagctgttcctctctgactctgctggcgcaggggctcctctgcttcaggccctctgatccctgcaccactcaagtctggagccacggacagggtgactgggctgctgccctagcctgtaccagtccaattaattcaattccatgcagttaaatgatgtttttgtgtggatcctgtgctcatctttgagggttgtatgacactgtaagagacaaggcacacgagctttatggtaaaagagacacagctgttctgtaacccaaagctgagtgctggaaaatrctcaagagagggctgagtgacagtgttccactcagggatatgggagacagggccagggatcctccttggcagcatcagaaaagctttatagaagaggagcacacttgcctgggcctggagactaagaaggcccttgatagtcaaaggatgagaaaggggcatttaggccgagggaaggtgtgtggggaaagtgctgttgcctgtggtggctagaccacagtaaggaaaggaggtgagagaagaccagggcaagataggtgggctgaggtcgt

SEQ ID NO: 658774 - DNA, 390 bp, Homo sapiens
taagccatctttgagtcctgctggttctaactcctcaatctctcccaattctgtccacttctcaccatctctgtttctactaccctattcaagccatagtcatctctcaactgagcttccacaatggcctcccaaccagtctccctgcactcgtcctcatagaagatgtgaccccagccctggtgacaggccccagcatggctcagccactctcagcagccccatttccttttgctcgccattctttcctttcctcaaacactccattctgcgtgaccctgggctttttgctctctctgtgtctcagctgccttctctgcaaaagmacaagaattgcccaggccccccagatccaagattccccaccaaggatcttccaggtggggagga

SEQ ID NO: 658775 - DNA, 390 bp, Homo sapiens
taagccatctttgagtcctgctggttctaactcctcaatctctcccaattctgtccacttctcaccatctctgtttctactaccctattcaagccatagtcatctctcaactgagcttccacaatggcctcccaaccagtctccctgcactcgtcctcatagaagatgtgaccccagccctggtgacaggccccagcatggctcagccactctcagcagccccatttccttttgctcgccattctttcctttcctcaaacactccattctgcgtgaccctgggctttttgctctctctgtgtctcagctgccttctctgcaaaagaacaagaattgcccaggccccccagatccaagattccccacyaaggatcttccaggtggggagga

SEQ ID NO: 658776 - DNA, 510 bp, Homo sapiens
aattctaagaagccattaggctggtcaagaaaagcttacagaaggatcaagctttcatctgagtcttaaaaatgtgttggccatgaagtactagagatggatgggaagracataggcagggggaaggtctgagcaaaggtgcatccaggaaaataaatgcatgaggacttgatgtttgttgcacacctgctgagagctagacacttggtatgcctaccaactataaactaagactaatattattgcctccattttacagatgagtaaactgaggccaaggagctccaactagctctttggctgctcaagaacagggacaaatatgtcttacttatctctgtatcctgagtacagagttccagaacaggcctctgataaatattcacggatattaaaggccataaagcagagccaggattcaaactcaaaatccccccaaggcctgtgttatccagttattggagtgagtatgaaagtgtttctaaaagaggagtgggcagtaaatgtcca

SEQ ID NO: 658777 - DNA, 587 bp, Homo sapiens
ggatcctcaatgcctggccctggaatatagtaggcactcaactatcacctgatgtgtcaattttagataacgatggttggtacctatacagatcatttccagaggcgtcttgctgacagcaagggactggraggaaaatagctgatgtgaagagatggcaggagatgtaggaattcagggaggaattagttgtttttttctctgtgttgcaacacttggctcatctgtttgggcaccttctccctgtcttgattggcatattagcttcctacagctgccattgcaaagtaccacaaatggaatggtttaaaacaacagaaatttattttctcacagttctggaagctagaagtctgaaatccaggtgttggcaatgttggctccttcttgggggctccaggggtggaatctgttccatgcctctgtctggttcctggcttctggtgattgtgacactccttggtgctccttggcttgcagctgataagtccagtctctgcctccgccctcacatggctatcttctctctatatcttcatgtcttcacagggtggtttccccactctgtgtgcctgcttgtgtctcct

SEQ ID NO: 658778 - DNA, 587 bp, Homo sapiens
ggatcctcaatgcctggccctggaatatagtaggcactcaactatcacctgatgtgtcaattttagataacgatggttggtacctatacagatcatttccagaggcgtcttgctgacagcaagggactggaaggaaaatagctgatgtgaagagatggcaggagatgtaggmattcagggaggaattagttgtttttttctctgtgttgcaacacttggctcatctgtttgggcaccttctccctgtcttgattggcatattagcttcctacagctgccattgcaaagtaccacaaatggaatggtttaaaacaacagaaatttattttctcacagttctggaagctagaagtctgaaatccaggtgttggcaatgttggctccttcttgggggctccaggggtggaatctgttccatgcctctgtctggttcctggcttctggtgattgtgacactccttggtgctccttggcttgcagctgataagtccagtctctgcctccgccctcacatggctatcttctctctatatcttcatgtcttcacagggtggtttccccactctgtgtgcctgcttgtgtctcct

SEQ ID NO: 658779 - DNA, 631 bp, Homo sapiens
cagtatggaggtttcactctaaaaacgaaaaacagaactgcattatgatccagcaatcgcaccaccgagtacatttccaagagaaaataaaccagtacatgaaagagataactgcactcccatgtttattgcagcactgttcataatatccaagataggaatctacctacgtgtccatcaacagatgaatgtataaagaaaaattggtatatgtacacaaggaaatgctatctagcttttaaaagaaggaaatcctgtcatytgagaccacatgggtggacatgtaggatattatgtacagtgaaataagccaggcaaataaattgaatgttctcacttatatgtaggaacaaaaaattgaatctcgtggaagtagaaagtagaataatagttcccaaagactgagaagggcatgggagaaggcgagataaagagaagttggttaatgggttcaaaaatacagttaaatggaaggaataatttccagtactcagtagtattataggaaaattatagttaaaataatttattgtatatttcaaaatagctagatgagaagtagtataatgtttacaacacaaagaaaggataaatatttgaggttgtggatatcccagtgaccttgacttga

SEQ ID NO: 658780 - DNA, 645 bp, Homo sapiens
caagtggcattgttgatgttcacccaaaacctatgcatcacagtttctaaagaaattaagggtaaatttataaagttccaccctccaccctaagaaagaccaattcgcaatcatagaagaaagttttaacatacctctctcagtaattgatagaccaaggagrgaaaagacatgaaccagaatagggaagctctgaaaattaaaatcaacagtcttgatgtaattaacacacgtggtaccctacacctgaagaacatatattaactttaagcacacacagaatacctatggaaaataaatgtccattaggaactaaaggaattgtcaacaaatttcaaagaactactgtcataccatgtatctgattgattgattacagtgcaattgtgtaaaaataaacttttaaatgacaaccaaaaatatgtgtttagaataaaatagtattgaaacataacacaaaatacaaaataaatatccatagcacgcactgttgactgaaaaacataagggagaagagacaaatcaatcatgcagaagaattccaaataattcagagagatacttccccataaagaaggagaacataagtcattgctccttaagtgggtgttgctcatagcgactgaaagggcaacaaaagagtaa

SEQ ID NO: 658781 - DNA, 645 bp, Homo sapiens
caagtggcattgttgatgttcacccaaaacctatgcatcacagtttctaaagaaattaagggtaaatttataaagttccaccctccaccctaagaaagaccaattcgcaatcatagaagaaagttttaacatacctctctcagtaattgatagaccaaggagggaaaagacatgaaccagaatagggaagctctgaaaattaaaatcaacagtcttgatgtaattaacacacgtggtaccctacacctgaagaacatatattaactttaagcacacacagaatacctatggaaaataaatgtccattaggaactaaaggaattgtcaacaaatttcaaagaactactgtcataccatgtatctgattgattgattacagtgyaattgtgtaaaaataaacttttaaatgacaaccaaaaatatgtgtttagaataaaatagtattgaaacataacacaaaatacaaaataaatatccatagcacgcactgttgactgaaaaacataagggagaagagacaaatcaatcatgcagaagaattccaaataattcagagagatacttccccataaagaaggagaacataagtcattgctccttaagtgggtgttgctcatagcgactgaaagggcaacaaaagagtaa

SEQ ID NO: 658782 - DNA, 645 bp, Homo sapiens
caagtggcattgttgatgttcacccaaaacctatgcatcacagtttctaaagaaattaagggtaaatttataaagttccaccctccaccctaagaaagaccaattcgcaatcatagaagaaagttttaacatacctctctcagtaattgatagaccaaggagggaaaagacatgaaccagaatagggaagctctgaaaattaaaatcaacagtcttgatgtaattaacacacgtggtaccctacacctgaagaacatatattaactttaagcacacacagaatacctatggaaaataaatgtccattaggaactaaaggaattgtcaacaaatttcaaagaactactgtcataccatgtatctgattgattgattacagtgcaattgtgtaaaaataaacttttaaatgacaaccaaaaatatgtgtttagaataaaatagtattgaaacataacacaaaatacaaaataaatatccatagcacrcactgttgactgaaaaacataagggagaagagacaaatcaatcatgcagaagaattccaaataattcagagagatacttccccataaagaaggagaacataagtcattgctccttaagtgggtgttgctcatagcgactgaaagggcaacaaaagagtaa

SEQ ID NO: 658783 - DNA, 435 bp, Homo sapiens
tatgatcctttggaggagaagaggcattctgatttttggaattttcagccttttctgcactggtttttcctcatcttcatggatttatctaccttcggtctttgatgttggtgacctttggaaggggtttttgcgtgattgttctttttgttgatgttgatgctattcctttctrtttgttagtttcccttctgacagttagtcccctcttctgcaggtctgctggagtttgctggaggtccactccagaccctatttgcctgggtattaccagcagaggctgcagaacagcaaagattgctgcctgctccttcctctggaagcgtagtcccaagggggcacctgccagatgccagccagagctctcctttatagggtgtctgtcgacccctgctgggaggtgtctgtctccccatcaggaggcacgggggtcag

SEQ ID NO: 658784 - DNA, 602 bp, Homo sapiens
tatattatgtttagtctttctttatatacrtttcctatgattacactacttgtttttacaatttagcatatcttgttacctttttaaaatgtaaggaatttaaagattgattatttcacatacttctgtcactacctaggatatttcagaaaataacatagttatctaataaacacttgttgaaaaaagtagtatgaaatcgaagaatttattaagatagtgtcacaagagctgatcatcattcataattctggaactgagtagactatgcggagacatgtatgtgatttcttaaaaagagaaagaacatcaaaagctaggctgttcaacgtgatctttgacactacaggtctttggaattttctcttgtagcataaaattaatcacagaaacctggccagaaatatatgaagtgggatgttttcttcccagtgtcagagagctcaaagcaacagaattatcttgataagaagcacatatatacacacacacaggtgcagcagtataaagactttgaaatttgctattcctttggtacttttcaaattaaaatggcttaagaaagagccaggccatttatttaagataaagattgcttcttg

SEQ ID NO: 658785 - DNA, 602 bp, Homo sapiens
tatattatgtttagtctttctttatatacgtttcctatgattacactacttgtttttacaatttagcatatcttgttacctttttaaaatgtaaggaatttaaagattgattatttcacatacttctgtcactacctaggatatttcagaaaataacatagttatctaataaacacttgttgaaaaaagtagtatgaaatcgaagaatttattaagatagtgtcacaagagctgatcatcattcataattctggaactgagtagactatgcggagacatgtatgtgatttcttaaaaagagaaagaacatcaaaagctaggctgttcaacgtgatctttgacactacaggtctttggaattttctcttgtagcataaaattaatcayagaaacctggccagaaatatatgaagtgggatgttttcttcccagtgtcagagagctcaaagcaacagaattatcttgataagaagcacatatatacacacacacaggtgcagcagtataaagactttgaaatttgctattcctttggtacttttcaaattaaaatggcttaagaaagagccaggccatttatttaagataaagattgcttcttg

SEQ ID NO: 658786 - DNA, 538 bp, Homo sapiens
actatagttaatattaattgtacattttaaaataacttagagtgtaattgaattgtttgtaactgaaaggataaatgcttgagggcatggataccccattctccatgatgtgcttatttcacattgcatgtctgtatcaaaacatctcatgtaccccataaatatatayacctactatgtacccacaaaaattaaaaataaaaaaacataaaaagagtttaatatccatggcaaaattatgtaacctaaatataggacaaattatctgtctttattgtgtgagactaaaatcggctattttgacacatgaaatggtttgctccatatccacaaaccacaaattctaattagaaaatttatctatgtggttagggttcagaatttatttctgaaaatgagaaatatttaaagtgatctaacttaagaggtttacataaacttgccaaaatgtgtttaaaaggctattcctggcactttaaaaattatatttcaacatatattttttctactaaggactatggcaattagaatatgtatt

SEQ ID NO: 658787 - DNA, 645 bp, Homo sapiens
acagcaatcatttcccctttccagatcacctcagtggtcagtgtctcttcagtattcttttttccatttatgtgtgcaactcttctaagctcctttaagccctcatctagctgattgttgataatcagccaccgagcagactccaccatcttcctgatgaaagaagacaacataggtatagtaaacaattacttatttggcacttaacctttaacatgaaattcctttcccctttgatttaatacagacattataaattatagtagagtcatttctgamcaaattggcctcctctgctggactcctagggtgaaggatgtatctggccatcaataagtgtttgttaaagtgattatacagaaccatgagtgtgttagtccattttcacactgctgataaagacatacctgagactgggtaacttataaagaaagaaagtttaatgaactcatagttcagatggctaggggaggcctcagaatcatggtggcatgtcttacctggtggcaggcaagagaagcaaaagggaagcccttataaaatcatcagatctcatgagacttattcactaccataataacggtatgggagaaaccatccctatgattcaattatcgcccactgggtccctcactaaaccagatc

SEQ ID NO: 658788 - DNA, 579 bp, Homo sapiens
gaaaaaataaaacccaacctccttacttttgcaaaaaacataccttcagagtctatcagcaagctggaagaagtggatatcaaagaaattattcacaccaatagtgaggctccagttgttcattcattgactgaygggttctgaatcaaggtgattgtagtaatagtaatgatgaagatgatgttgacactgcagaaaaagtgtctatagacaacatggtgaaaatgtgtgatgagattattgaaggactagagcagtgtgtattcacaacagaacaataaataacgtcagtttataaaatcaaagagagacttctaaggcaaaaactgttgttaatgaggaaaatgactctggagaaaacaacttcaaaagccatctagcaaaatacctcctcttccttagagggcccacttcctggtccctcaattgcttctgatgctttttcttaccttagaaataaaattcagtgtacattaaaccttttaatcaaaacacatcataggtggacctgaaagcctgctgttatttgctgttgctgttgttgaacagtggatacaggtattgtggtgatgctactgt

SEQ ID NO: 658789 - DNA, 528 bp, Homo sapiens
tttcgttctcaggaagctcaggtgtcatggagaagacagacatgcaaacaagaggggcagccttgcaatggcaagccttgagaggcaagaggtgccatgttctagaagccctagcgtctcagaatccagacttgaggaaacttccccaaaacagccccaccygcccatacctgccagatgggtaggagcagctcgggggacaggacaaagggaatgcagggtgtaccagacaaaatggcacatgcaaaacctggaggccaggtaaaagtttgcagttttccattgagacctgtctcatggacagcagtaagctccaggagggcaagcactctgtttcaactcagggtccctagcacttgcccagtgctagccagggcctgcgcccttaaaagacgttaaatgaatgtgtgcctgcctgaatgaagcctgtgctttggagccagtcataatgatgaagagtaggcctcctccttcctaccagttccctgcatgctctacctcttctgcctgtgtcaaaagcttcatcca

SEQ ID NO: 658790 - DNA, 608 bp, Homo sapiens
cataattcttctttactattataattcagtggaggtcagaatgactatcacttaaacttaattgtacaagttttcttgtacaattaaaaacttgtacaggartatatctggagtatgttaaaataattctagatatcatttcacctgtaaatactttagtatgtatctctgatgtataaggacttttttcttagtataatactaatattgtttccaatattatttaatacccagtatttgttcagccttcctcaatgatgtcaaaaaaattttgttgtttggaaaactataatggttttggttttgaaaaatcttttaataattctgccttttgaaaaaataccctttatttatttattgggggaaaaaactaaactattcgtccattaggctttcccacactctgaatttggcttattttaaatggtcaatattttacagataagtttcagttaagttaataaatttacataagattataaagtatccaggtgtgattttaaaaaagaaaagaggaaaaaaatattataaaataataaggatctattttttatgggagtaaaatgtgtgcttttgtgatttgaagcttattttttttaaaaaaatgt

SEQ ID NO: 658791 - DNA, 589 bp, Homo sapiens
gcttgctaacgtcgcaacgcccaggagagttaaggaggagygcgccagcctgctctggtggaggggctgtgctctgggccaggacagggtagggaagaggtgcagagaagctccgtgaagtcgaggagcagtgccctttgggctgagggccctgtctgcgtatctgttatgagagatgagggggaaaactggccatctcttttaatggctctgtcaggcctgtacctgggcataggtgtaccccacaagtcgggattttcttatgaatccccaagatttgcctgactccatctagaggttcagggaacagaggcctatcactacccttgctgtgaaaatccctcttgtcctcagttgtccgccagcttggcatggaaatctggcccaagggatcagagccttggttgtaggaaggaaacctcccagagaggcaaaggtgagctgcctaccaagaatcctgtacttagagtccaaaaattccttctagagattatactgtctagacacttgcctgtgtggtttgggacagaacaatatgtcaccattctattctaggatggggagagatagttacagagagaggacaaca

SEQ ID NO: 658792 - DNA, 537 bp, Homo sapiens
tctccagtctgcttccagctgtgggatccacagaggtgtcctgaagggacagcatgctggccagtgtacctgcctcatgcaaggccttgctagtttgtggtagtgttataaataaggttcaaaggcttcaatagcacaattaccagtctacacatgactcaattatgtgaaaaataaaggttcttaccattgattttactgatagagcaaactgtagtcatcaaccaaagagtaatygggatcatctgcaaaaggcagaacacagaaaacaacagtaacatcaatttttcataataagatctcacccttttcaagccagggcatttcacttacagattctggtgtctatccttttgtaaagagaaaatagatctgccaacaaaaactataaatggtagtcacgactccaaaccagaggacattctggaaatcactattctgacttctttgccctttttcatccatgctcaggtacagtacccacagtaaaatcatctttaaaaatggacagaaatagcatcctacattaccaagtgg

SEQ ID NO: 658793 - DNA, 537 bp, Homo sapiens
tctccagtctgcttccagctgtgggatccacagaggtgtcctgaagggacagcatgctggccagtgtacctgcctcatgcaaggccttgctagtttgtggtagtgttataaataaggttcaaaggcttcaatagcacaattaccagtctacacatgactcaattatgtgaaaaataaaggttcttaccattgattttactgatagagcaaactgtagtcatcaaccaaagagtaattgggatcatctgcaaaaggcagaacacagaaaacaacagtaacatcaatttttcataataagatctcacccttttcaagccagggcatttcacttacagattctggtgtctatccttttgtaaagagaaaatagatctgccaacaaaaactataaatggtagtcacgactccaaaccagaggacattstggaaatcactattctgacttctttgccctttttcatccatgctcaggtacagtacccacagtaaaatcatctttaaaaatggacagaaatagcatcctacattaccaagtgg

SEQ ID NO: 658794 - DNA, 526 bp, Homo sapiens
ccgcaggtggctataggacagattcccagtgggaaggcaccactcatagctaacaagtagattataccagactgaagccagtatccctgggaggctataatgggtcctgacacrttctctggactgggctttgcatagttattagattcaaatgccaaaaatactataaaagagctggaacagatgataagacatcaacttggaccaccaagttttatttcttcaggccaaagaacacatttatggcccacagtgtcctataatggacataccatgttgcatattgtcttcatctcctagggctgccataacaaagtgccacaaaccatgtggctgacttacaaaacaaaatgcactgtctcacagttctggagactagaagtctgagatcaagttcttggcagggctggttccttctgagggttgtgagcaagaatctaatccacacttctctcctagcttctggtggtttgctggcaatctttggcattcctgggcttgtagaattctgccttcatattcatat

SEQ ID NO: 658795 - DNA, 526 bp, Homo sapiens
ccgcaggtggctataggacagattcccagtgggaaggcaccactcatagctaacaagtagattataccagactgaagccagtatccctgggaggctataatgggtcctgacacattctctggactgggctttgcatagtyattagattcaaatgccaaaaatactataaaagagctggaacagatgataagacatcaacttggaccaccaagttttatttcttcaggccaaagaacacatttatggcccacagtgtcctataatggacataccatgttgcatattgtcttcatctcctagggctgccataacaaagtgccacaaaccatgtggctgacttacaaaacaaaatgcactgtctcacagttctggagactagaagtctgagatcaagttcttggcagggctggttccttctgagggttgtgagcaagaatctaatccacacttctctcctagcttctggtggtttgctggcaatctttggcattcctgggcttgtagaattctgccttcatattcatat

SEQ ID NO: 658796 - DNA, 526 bp, Homo sapiens
ccgcaggtggctataggacagattcccagtgggaaggcaccactcatagctaacaagtagattataccagactgaagccagtatccctgggaggctataatgggtcctgacacattctctggactgggctttgcatagttattagattcaaatgccaaaaatactataaaagarctggaacagatgataagacatcaacttggaccaccaagttttatttcttcaggccaaagaacacatttatggcccacagtgtcctataatggacataccatgttgcatattgtcttcatctcctagggctgccataacaaagtgccacaaaccatgtggctgacttacaaaacaaaatgcactgtctcacagttctggagactagaagtctgagatcaagttcttggcagggctggttccttctgagggttgtgagcaagaatctaatccacacttctctcctagcttctggtggtttgctggcaatctttggcattcctgggcttgtagaattctgccttcatattcatat

SEQ ID NO: 658797 - DNA, 526 bp, Homo sapiens
ccgcaggtggctataggacagattcccagtgggaaggcaccactcatagctaacaagtagattataccagactgaagccagtatccctgggaggctataatgggtcctgacacattctctggactgggctttgcatagttattagattcaaatgccaaaaatactataaaagagctggaacagatgataagacatcaacttggaccaccaagttttatttcttcaggccaaagaacacatttatggcccacagtgtcctataatggacataccatgttgcatattgtcttcatctcctagggctgccataacaaagtgccacaaaccatgtggctgacttacaaaacaaaatgcactgtctcacagttctggagactagaagtctgagatcaagttcttggcagggctggttccttctgagggttgtgagcaagaatctaatccacacttctctcctagcttctggtggtttgctggcaatctttggcatycctgggcttgtagaattctgccttcatattcatat

SEQ ID NO: 658798 - DNA, 420 bp, Homo sapiens
gtcatagttaccttgggagttaattgcttctgaggagttgacaagggctctcggtaatgtggtgcatattaacacaggttatattaatgaataaacaatgcatgaactgtgaaatgtaagaccatgcagagtatattattaataaataataatgattatgtactacgtatttaycttttgacagagaggtgcacaacaaaaacaaatgttgatattcttgaaaattttgaagtcaagtctcaacaattaaatataaattttgtctttccatgtaagtgatagactaatgaatctacagatttgcaagtttataagctgaagtgaatgagtgcctccttctgaaaattattattgggcttatgagtttataagtgcatgcatttcaccctggttggcctaagctggcaatttcctccaagt

SEQ ID NO: 658799 - DNA, 499 bp, Homo sapiens
ttcacagcaaaactgagcagcaggtatagatttcccatatactccctgtcccccacacatgcatagcctcccccataataaacatcccccaccagagtggtgcatttgttacaattaaagaacctacatgatacatcttatagtttgcattaaggttcacacttgggcttggacaaatttacaatgacaagtattcactattaaaatatcatacacgtactttcactgccctaaccatcctctgtgctctggttattcatccctctcttcctcctaactcctgggaaccactgattttttttttctatttctatagtwttaccttttccagaaggtcatagttggaagtgacagtatgtagcctttttagattggcttctttcattctgcaatatgcatgtaagcttcctctgtgtcttttcatggcttgacagccatttattttatcactgaatggtattcagttgtctggatgtaatacagtttgtttaattattca

SEQ ID NO: 658800 - DNA, 623 bp, Homo sapiens
tggctttcttcaagccaaaaactggaagctgaacaagtttttctaagtgcttgtcccatagattatttcttctaagttctttcattttatacacaagaaacagaattgtttattaaaagttaacttatgatgtctaagtatgccacatttagcaatgcagaaagagtgtccttcaatttaggaccacttgaggaggcacaaaaggtatggttcaagctctgaatacttgctttagcattgttctcattcttcctagagagggcatctctatcaatacaaatttagttgatctgaagtagaaaccagggcagccctacatgacatagcaaagctcttaagtttagagtgatcaattttcccatttcaatgggatctcaactgtaggatcttccaatagctaagtatccacagtctggccgtcccatcttgtcaatgaatgactcaaagtgtcacagkgttgtaatacctgcctcagtcttcaaaattacattttacagcctagtggcagttgcaattttgaaaagaaatgtattaaattttatcacactaaacttgtatgacttcagaaagttttgtaaggattaatggattttaggcattactttataagacttcgtaaagta

SEQ ID NO: 658801 - DNA, 594 bp, Homo sapiens
agggtgggaggcctcattgtacctacttccagctcctgcaggatgagtggagcccaggcaggactttcaccccccagctccgcgcccattcgccctggcctcccctccccgcgcctggacccatagggcacacagccaagtgcagccaagtccctgcccttagggagcccccgccagagaccgagtaaagaaggacagccccagggaaaggtctggagcaacaggtgcgctgagcacttcactgggcttccctttcgtaggttcccgcccttttcctgggctcaagagcaggtaacgagaatccagcgtgtgggaaccactcccaaagtcaaacacctwtcccagttctccgcgcagctgcccaggagcgaagagagaccgggtcggagaggcgggaatagagatgtctgagcggcgccgggtgttagttcccagtgaatggggaggcgggcggagtcgggcccagccaggcaccacctagcgggcgcctgggcaggagggcggggcgggtcccgcaggccgcggggatctcctgatgtgcaggaagtggccaatctctgtgcaggaaaaagccccaactgtccgggagttttc

SEQ ID NO: 658802 - DNA, 594 bp, Homo sapiens
agggtgggaggcctcattgtacctacttccagctcctgcaggatgagtggagcccaggcaggactttcaccccccagctccgcgcccattcgccctggcctcccctccccgcgcctggacccatagggcacacagccaagtgcagccaagtccctgcccttagggagcccccgccagagaccgagtaaagaaggacagccccagggaaaggtctggagcaacaggtgcgctgagcacttcactgggcttccctttcgtaggttcccgcccttttcctgggctcaagagcaggtaacgagaatccagcgtgtgggaaccactcccaaagtcaaacaccttycccagttctccgcgcagctgcccaggagcgaagagagaccgggtcggagaggcgggaatagagatgtctgagcggcgccgggtgttagttcccagtgaatggggaggcgggcggagtcgggcccagccaggcaccacctagcgggcgcctgggcaggagggcggggcgggtcccgcaggccgcggggatctcctgatgtgcaggaagtggccaatctctgtgcaggaaaaagccccaactgtccgggagttttc

SEQ ID NO: 658803 - DNA, 656 bp, Homo sapiens
gctgctcggcaactcagccaccttgtccagctaagcagccgacctaggacattcattttgtatccctgctgagtggtcacataagcctctatgttcaagaggcctgactgaatcagaattattaacaagtataaaatgtggagacgtcacatggtatggtggttataggcagctgttttaaagacaggcagacctgagtttagggcttgattctaccacttgctcattttgatgaattgatgtaaattatatatgagcttacattttaattttttcttcggcaaaatggtatctcaatatgtaccttgtggagttattttgaacattaaatgagatacgtaaagtacctagtatagcacctactatataatacatgtccactaaagagtagtaatgatagtaatagtagctattattatcatctcctgtcttcgctcaatacaggggtttaagtatatattaaatgaatgtttataatagttacgatgaagctctgtgaaatactcggaagccaaacagaatcaagtgataattgaatgctgaccctgagcaactcactgatagatrccgtgggggaagtacaaagagttataaggtaagaagaactcatggtatcactgagcacagatcatactgagtaatatactgagcaaaga

SEQ ID NO: 658804 - DNA, 533 bp, Homo sapiens
ggctcctaccttgaccctcagtaccatcattgacgattttatactatttgtactcaaaattttctatatgatcatatattttttgtttctctctctcctatactgtctttttctgcactaaatggatattttctagtgtaagatttgttctttaatattctcccatgtgttttttaaattgctttcttagtagttaataccagatttaccatatatatcttattgttatctatttgatttatactaccttatatctagtgagatacagcttctatatagccatatctttcttycctttttatatgctattatttttattcatatatctatttagttataaatataatagttttagttataaagtcataatataagttatggctttatataattcatgcttactaatgaaactgagaaaagaaagtatgtatttatacagttttttattttaacctcttatcatttctggttctcttcatttgtccctgtagatttaaatgatcatgattaccatttgatttcacatcttcatt

SEQ ID NO: 658805 - DNA, 485 bp, Homo sapiens
gacttatgaaacacacatatacatattgcgtgtatgtatatgtttkcatgtgtgtgtgtcagcatgtgtgtatcagagagagaaagagaagaaagagaatgagaagagaaagagagagagagaagaaagagaacgcaaacgagaacgagaaagagagagggaaggggaagtctgagcccacctgatctcctttgtcttgctcattctgtttccaatcaaagacctttaaaataaacaaaaacaaaaacttggcacatgacacgtctatttcctaaaaattaaacaaaggtaagaaactaggtaaagttttattaggaaatcaggaggaaaaaagaaaaccaaagcatccagacttttaaactactaaatgccatttattcttctgtaaattcaactcataaaagattattttgatttaacgaatatccctaaaatgcaagtaacccagagggtcttagaaattttcaataatttttggattaatg

SEQ ID NO: 658806 - DNA, 609 bp, Homo sapiens
gttattctctgtatttctttatacaacaggtgacatttctcatctcctgttcatggtaaagaagataaatggtaaagaatgtgtgatagtctaatacaaagaacatacagtacataaactacacttatagcataattacatgtaatcagaggcaaattgtggttctttcattaattggctatggccctaaagaagtcatgtaatatactgaattccacggttttaagtgggtgtataattaggaagcaaaascagaattttaaaatataatgactttgactacctttaacacattatggtgccaaggttttaatgacattctcctcaatcatttagcagttttctgctgtactcaattagacaaagattacttggctgaggctcagtgctttgggtgttctgaccttgatttcctgttggtagttctttaactctgggtcatgatacttgtatgttggtcaagtccagtgttttttttccggagcaattgttaaaagtacaaatgcatggactccccaaagacaaactaagtcagaatttttaagagtgtgatcataatattattttttaaagtattgctactggattaaaaatgcacttaaagttgaa

SEQ ID NO: 658807 - DNA, 609 bp, Homo sapiens
gttattctctgtatttctttatacaacaggtgacatttctcatctcctgttcatggtaaagaagataaatggtaaagaatgtgtgatagtctaatacaaagaacatacagtacataaactacacttatagcataattacatgtaatcagaggcaaattgtggttctttcattaattggctatggccctaaagaagtcatgtaatatactgaattccacggttttaagtgggtgtataattaggaagcaaaaccagaattttaaaatataatgactttgactacctttaacacattatggtgccaaggttttaatgacattctcctcaatcatttagcagttttctgctgtactcaattagacaaagatwacttggctgaggctcagtgctttgggtgttctgaccttgatttcctgttggtagttctttaactctgggtcatgatacttgtatgttggtcaagtccagtgttttttttccggagcaattgttaaaagtacaaatgcatggactccccaaagacaaactaagtcagaatttttaagagtgtgatcataatattattttttaaagtattgctactggattaaaaatgcacttaaagttgaa

SEQ ID NO: 658808 - DNA, 609 bp, Homo sapiens
gttattctctgtatttctttatacaacaggtgacatttctcatctcctgttcatggtaaagaagataaatggtaaagaatgtgtgatagtctaatacaaagaacatacagtacataaactacacttatagcataattacatgtaatcagaggcaaattgtggttctttcattaattggctatggccctaaagaagtcatgtaatatactgaattccacggttttaagtgggtgtataattaggaagcaaaaccagaattttaaaatataatgactttgactacctttaacacattatggtgccaaggttttaatgacattctcctcaatcatttagcagttttctgctgtactcaattagacaaagattacttggctgaggctcagtgctttgggtgttctgaccttgatttcctgttggtagttctttaactctgggtcatgatacttgtatgttggtcaagtccagtgttttttttccrgagcaattgttaaaagtacaaatgcatggactccccaaagacaaactaagtcagaatttttaagagtgtgatcataatattattttttaaagtattgctactggattaaaaatgcacttaaagttgaa

SEQ ID NO: 658809 - DNA, 589 bp, Homo sapiens
tgatcctagctggtccatcagaatgcagggtctaaaaaatacctgaagcacaaatcttagggtttacaatagtgatgtgatctttaggagtaattgcagaggctaaaaatcttgtgtcctctgtctatatgactcctaaactataattctaaccttgtgactaatttgttagttttagaaaggttgattcagttcttgagcaaggacaaggttagttttgggaagggactgttatcatttttgttttgaagttaaactataaactttatcccatagttagcttggcctacactgaggaaggaactagggcagcttggaggttagaagcaaaatggagtcaggttaaatttttctcacwgttataatttttgcaaaggcagtttcagtactattatgtctattaagtagatacagaaacagtagcttactgatggatggagagaactaactctaagcaatagagttttagatgagacctggctactcatctatagccaacacgtacgtttctttccacaagttcttgttggctgtcttgatacaattcatagcactataagaatggcaaaaagtgcacacagaatagtga

SEQ ID NO: 658810 - DNA, 589 bp, Homo sapiens
tgatcctagctggtccatcagaatgcagggtctaaaaaatacctgaagcacaaatcttagggtttacaatagtgatgtgatctttaggagtaattgcagaggctaaaaatcttgtgtcctctgtctatatgactcctaaactataattctaaccttgtgactaatttgttagttttagaaaggttgattcagttcttgagcaaggacaaggttagttttgggaagggactgttatcatttttgttttgaagttaaactataaactttatcccatagttagcttggcctacactgaggaaggaactagggcagcttggaggttagaagcaaaatggagtcaggttaaatttttctcacagttataatttttgcaaaggcagtttcagtaytattatgtctattaagtagatacagaaacagtagcttactgatggatggagagaactaactctaagcaatagagttttagatgagacctggctactcatctatagccaacacgtacgtttctttccacaagttcttgttggctgtcttgatacaattcatagcactataagaatggcaaaaagtgcacacagaatagtga

SEQ ID NO: 658811 - DNA, 586 bp, Homo sapiens
ctgcaataacaaacccactccccctgataatggcattaatccattcatgcctaatcacctcccattaggccccagctcccaacactgttgcattgggcgttaagttttcattgcatggttttggggcaacacattcaaaccatagcacaaggtaataagtatcagactcactgtaaaaggattgaggaaaggaggataacaggacaaatttaagagacagaaagatagatttaagacatatatggatggatttaagatacacatgtatgtakatattttcctttttaagtaaaaaaaaattgcgacatacttaatgtatctcattaaacatattgcaatgataattagttcaaaagattaaccatgtaatgctactggtataattaagggataaatatttgagaatacgaattaagataagagtaataatcttcagggatttttttttatttaattgtgaaagaaaggccagtatctattttagagacttggaactgaaatgtgggtgagaaattaagatgaggggaaaagatactgggagcactggggtatgagtggtagcagatgcccagggaatcactgagtc

SEQ ID NO: 658812 - DNA, 667 bp, Homo sapiens
ctgtggctttggtaaattgctttctagtctaccagaactctgattttgctacttctgatcaattccggtgatataaaacattttcttcattaagaaaaagagcaaaacttagaactgtgaagacaagccccaaatgatgaatagttggaaatgaatagaaataaggatgagtacttacaccactctagctggcttcctggcagcagaaggcagtggctgataaagatttgcccacctccacgacaagggagagtgcttctcaggagatggtgctggagggaggcacctaacagttatatactcagagccccactctgctctgtgtgtttgtgggctcggctttctcctcccacttcaggcatcaatgccaaagcaacaccaaggaactggtcccctggcttcagtacccgatgtctctctctctgttcttgacasagtaccaactgctttgccacagtttccacagcattccaaggtctttgaccagcaataatcctaccaaaatgcatctttttcttctcctgtttcctctggcccctactcatatttttggaaagatttacaactgaaaaggatcaacacggtgtcaaactaaaaaccatggggcaggttgctgctgtgtggactcggaagctaagcgactgctcctggggtgaaattttcttag

SEQ ID NO: 658813 - DNA, 605 bp, Homo sapiens
ccaaacaggttctctggcaggattcactcatttttctttcaacgaatatttattgatcacatcctatttgccaggcactgttctagatgccagggctacagtagtgggcagtttgggggtggggtatacggggaggggcagggaagaaagaaaaagtctttaccttcatgggaatatattctagtgaggagagacagataatacagtcagaggtgtctgaagaattgaagaaaagtaaagctgaacccacaaataggaagttttagggatgacagtgtggttgcaattttaaattgggtgataatttaacaaatgttaactatagatttgcaatttaaataggagaggaagactcaatatcatctaaatccttacctatgcatatattttgtcatatttcctttgtataaatcattccttttatttgattagtaagttatccttccaattctttgaatgctgagcagtaattagccaacaagtttttgraatctgtatctcaatcccctcctgggtctagtttccctaatatactgagaaagcccatgttctctgcaaaaagcatcaaaagaaaaactgagcctagatggttcagttaagtggtc

SEQ ID NO: 658814 - DNA, 653 bp, Homo sapiens
cttgctttgacttcccctcttggctagaggaaatgcccttggaagtaaggggaggagaaacgtcccaaggttgctcagagtgggagtactcataaatcaatgttctaaccagcacaactcgtaatcactccttctggttcactttctcatgagagtgaacgagctcatgatgtaactttcttgggggtatcaattgaacagatgaaatcctctcttgtaatcttgctggttttaatttttatccttttggtaatggacagtcttttgtctttctcagcgaaatggtccaaaactatggtaattgcaaaagtcagattaccatcacaaaacattgagtacctataayatagctttagttaaatcttaattagtgtataggcttcctaagctgtaatgcaagtcagctaaatgagtttctaagagaacagccatgctcacactattatggctattctttccccaccagtagcaatccatattagaaatgaaattctccttggcatggagaactgtgaataatacaccttatatatggctttaaaaacagaaattctataattacagtgaatgtccagcagctctattttattttatttttcctcaatatggggcatgctgtgactttttaaaaattctataaaaccattaagaaa

SEQ ID NO: 658815 - DNA, 653 bp, Homo sapiens
cttgctttgacttcccctcttggctagaggaaatgcccttggaagtaaggggaggagaaacgtcccaaggttgctcagagtgggagtactcataaatcaatgttctaaccagcacaactcgtaatcactccttctggttcactttctcatgagagtgaacgagctcatgatgtaactttcttgggggtatcaattgaacagatgaaatcctctcttgtaatcttgctggttttaatttttatccttttggtaatggacagtcttttgtctttctcagcgaaatggtccaaaactatggtaattgcaaaagtcagattaccatcacaaaacattgagtacctataacatagctttagttaaatcttaattagtgtataggcttcctaagctgtaatgcaagtcagctaaatgagtttctaagagaacagccatgctcacactattatggctattctttccccacmagtagcaatccatattagaaatgaaattctccttggcatggagaactgtgaataatacaccttatatatggctttaaaaacagaaattctataattacagtgaatgtccagcagctctattttattttatttttcctcaatatggggcatgctgtgactttttaaaaattctataaaaccattaagaaa

SEQ ID NO: 658816 - DNA, 586 bp, Homo sapiens
tattgaacccacaccgagagtggttctatataattattatatataatcatgaattatatacaaaatacattatcaattttgyataatatgtagtgataagaaatatatctattttgagcatctactctgtgccaggcactcacccaggtatggcatattgcattgaaataaaatggaaaagtctgcactctcataagagcttacattctagtggtagaaagcatcaaaaacacaagtaaaccaaaaatacatcacatcatgtcaggtgatggctgggactgaatgaactctaaagcgtgttgaggggatacaaagtgatgagtactatttcagatggggtggtcagtcaagagacaaataaggtttgggtaaaacttgaagtgggtgtagaagtgatatggtttggatctatgtccaacgttgaaatgtaatccccaatgtgggaggtggggcctagtgggaggcaactggatcctgggggagtatttctcatgaatggtctagcaccatcccctggtactgttctcatgatagtgagttctcatgaggtctggttacttagaagtgtgtggcacgtccccctttg

SEQ ID NO: 658817 - DNA, 527 bp, Homo sapiens
gaatttccacacgtgacccctgagatagaatgcagagataactgcccacgtccaaggactttccagccctcccctttagaacccacccctgccacaactttttctaataaaactactacttcaaaaagccagaacaaaaagacagatttgagcttgaccctcctgtctccctgcaagtcgatttgcaataaaacctttctttttctcaaaatccagtgtcatagtattggcttctagcgcattgagtgatgagccccttttgctccagaacactaggatcacagaagaaacagaccccaaagctacattatcactcctccccctcactgggaatgaagtctgtgccttgtatcctttaagtttccttaagggccatgtgttttctcttccttcccatgatgtgacttctatcaatacccattatcttacatggattgcacagccagatgtccttaggcacagggmtgaggtgtgaggcattgtttatcttgttgcttagttacaccttatatatacacagaatgcaa

SEQ ID NO: 658818 - DNA, 536 bp, Homo sapiens
gaaaccacagcccagagcctgcgataggggtggggagtggaggctggagctgtgctcaaggtcaggcttctcctctcccctcccagggcactggagctccagcagtgaacccagagtgaatattcgctctgtcatccaccctgggcaatccctttaaaccaggagtcaacagcgaggacagaaacatgaatgtgcttttaaaagtcctaaaagttcagaggatgatcatcaaggtttcctacagccctgggcaaaccctaggagtactttgtctccaggttcaagcatgtgcctgtgagaggcgtggccctcaccttccctccaccacaggttgagggaaccctaaacctcttttgcacaatatcaaggagtgctgactaatccaacgcagaagctgtgatgtttggcagatgcagaggcagaaaaggtgttttgggaaagatcatctttaaacaacrcggcaccctcatagcccatagagacagttctcaccactacgccaataaacttggaaaagaccaaaccaaactttacac

SEQ ID NO: 658819 - DNA, 585 bp, Homo sapiens
tgttagcatttcactttaaaggcctggggatagagggcttaacccaggaaaggggccttgaaaaacaaattagaaaccaccaaataagtaggcgccttaaaaatagttccatgtaaagcaaaaaatgcaagaaaagctaaaggtcttaatttactttgtttgcacttagaaatacaacattttctttaacattatactttcaccttctctaatatgatcggttcttaaaaagaaaatgttgaaaacaaattggtttyggtagcatataaccatttcaatacctgataaataactccttcatgtgaatgatatatttagtttcttttagagtcttgtaatctttttgatcaaataacattttattatatctgtgctacagttttcccttcccttgcaattttattttatttttcaacttttattttagattcagtgggtatatgctcatgtatgttacccatgtatagtgcatgatactgcagtttgggatacgaataatcctgtcgtccaggtactgagcttagtacccaacagttagtttttcaaccctggcctctctccctccccactcgagtaaccctcagt

SEQ ID NO: 658820 - DNA, 422 bp, Homo sapiens
gatgggtgcatgaaagcccagacttcaccagtacacaatatgtgcatgtaaaaatatgcatttgaagcccctaaatgtacagaaattaaaacaaattacatataaaatgtttagacaattgcccattgatattttaagtgcattatttaggtatttcttttttaattttaacatttattattttcatttatttctgttttctttcctgtatttttttattttttwaaaaacatgttactttctctaaccaaacaaagcaatggacattagaggaaaagcaacttttccaggtattctgagacatagactatgaaatccactaataagagatcagagcaaagttttgaaaaatgtcctaattttccaagcttggaagaatagactctaaccttatttataatattaatatatataaaacaaga

SEQ ID NO: 658821 - DNA, 593 bp, Homo sapiens
tgtaatcccagctacttgggagactgaggcaggagaatcacttgaacctgcgaggcagaggttgcagtgagccaagattgcaccactgcactccagcctggatgacagagtgagactccrtctcaaaaaacaaacaaacaaacaaccatgtttttctcttcttaaaaagcatgtatacttagatataatacagaatgttttacctactgtaatatttaagtaaatttaaatacatcacatatatacagcaagttttacaggtatacaggtacatccatatagatgtatttaccctgctcttgtttcacacattattataattttgatatctatgttaacatatacaaatctaatttatttattaaacgaccatacaataatattctgaacaatgaatatattaaaattatctattgatctattattaaactttccccctagttctttgcattaccagcaatcccattatgaatgtttctgtgcacatctcctcaaatacaagtgaaaaaacttcccttgtagacatggcttgaagggaaattaaactgtgtgaaggcatgcagattttaagctttacagattattgacaaatt

SEQ ID NO: 658822 - DNA, 605 bp, Homo sapiens
ttaaacctgtaatctttctaaagaagactatacaattgcccacacttctcttttttgttgttgattttgttttgggacagtctcactctgtcgcccaggctggagtgcagtggtgcaatctcagctcactgcaacctctgcctcctgggttcaagcaattctcatgactcagcttcccaagtagctgggactacaggcacccgccaccaygcttagctaatttttagtagaggtggggttttgtcatgttggtgaggctggcctggaactcctggcctcatgtgatctgcctgcctcaccctcccaaagtgctgggatttcaggcgcgagccattgtgcccggccgcccacacttttcaatcctctcctcccaagttagggagcctacaaagcaatgacagaatctgaaccctagcctctttctctctggagtctcaataggaaatcctgaccatttcaccctcctctacctctgcttccatcttttgcccacgattacaagctgctgccagagatgttaaccatacaatctttggttttcttgtggtataacacaaagactgaagcatttatttatttacatcagctaacttcaggaatctcat

SEQ ID NO: 658823 - DNA, 562 bp, Homo sapiens
caagaggagcatttatatatttttaaaaagattcctcagagttttaactccaaaagctgccaagaaaattagattctgctaattgcatcatcagcaaacactgaaatctgttcattcaatattggcttccttctgtattcaatgaactgtcttttctttaaaaaatatctttaagaaatagtttggtacctgcaaaactttgatcactttttttcttttttaacaggtggtgctttgcatatcagttgatgtatctcaagactataaccaagtagagaatgtcataaaacaagtaagaggttgggctaattggaattcaccaatgtgcttgacttttgatttgttcttgccattttgctatgtggcttggaatggacacaacttctctrtaggtttaatagttttgtaaattttatttatcagcatggatttgctgctgagtggtttttcttctctgtttcttaatgcctgctctgctacatttttctaggcacaggagaaactgggtccagtggacatgctggtaaattgtgcaggaatggcagtgtcaggaaaatttgaa

SEQ ID NO: 658824 - DNA, 578 bp, Homo sapiens
gttggggggtgtggggggaatatagatagggcagtagggtactgctagggtaattcactgtaattaaattaarttacagtaatttaattatatatttagctctgccacttattagcaatgtggtcttgggcaaacatcttgaattctctccgcctcagtttcctcatccataaaatatgtataatattaacaatgagaatttagaaatgtaacatatgtaaacattttatgtccctgacacactataagtacagtatgcattagtttttgttgttatataagggttagctattcctgttgtagtacagtcatgatgtcacacaggatgtttaggtcaataatggactgcgtatatgacagtagtcccataagattataatgaggctgaaaaattcctgatgcctagtgacatcatagtcatcttaatgttgtagtgcaacccattacttgcgtgtttgtggtgatgctggtgtaaacaaatctgtgctgtcactcatataaaagtatagcacatacaattatgtacagcacataatacttgataaatgactatgtttctgctttatgtatttactata

SEQ ID NO: 658825 - DNA, 578 bp, Homo sapiens
gttggggggtgtggggggaatatagatagggcagtagggtactgctagggtaattcactgtaattaaattaagttacagtaatttaattatatatttagctctgccacttattagcaatgtggtcttgggcaaacatcttgaattctctccgcctcagtttcctcatccataaaatatgtataatattaacaatgagaatttagaaatgtaacatatgtaaacattttatgtccctgacacactataagtacagtatgcattagtttttgttgttatataagggttagctattcctgttgtagtacagtcatgatgtcacacaggatgtttaggtcaataatggactgcrtatatgacagtagtcccataagattataatgaggctgaaaaattcctgatgcctagtgacatcatagtcatcttaatgttgtagtgcaacccattacttgcgtgtttgtggtgatgctggtgtaaacaaatctgtgctgtcactcatataaaagtatagcacatacaattatgtacagcacataatacttgataaatgactatgtttctgctttatgtatttactata

SEQ ID NO: 658826 - DNA, 572 bp, Homo sapiens
tgaattttttatgaccagagagcaaacaggttgaatgtcccatagaactgggttgggcttgctttctgctgagctccccatttctgcactgaatatgagctacaaactacgcagaaacaggaacacaaatggacccctgactattcattctctgtccaatgacacctcttccaggaaggcttctcccaccaacctgagtcagaattagtaccccctcctctggcttccctcagggcaacacttcttgsagactctgttacactgcagtcatgcagtttgttttctttttttaaaaaaagtattttctttctgactattcactaaatacaataaaaactcacctaacaccatcaatatgattttagatatacttccttttaagcttttttgtatgaatactcacacagacatccacacaatgtacattcagatgctttacaaggtgggatcataccatacaagctaattttaatctctctttaatttagtaaaatagcatgcttttaaatggttatgtagatttataattaatctcctactgatggacacagcattgtttctaatttttcact

SEQ ID NO: 658827 - DNA, 515 bp, Homo sapiens
tggtgtgagctgccaattccagcacacaaccaggttcaggggtagacttgatargccttgctaatggactggccatgggagtgaggaaaatggaagaattgatggggactcctaggactgggacttgagtgatgcgaagcacagagaagccacttcctgaatcgctggcctctgctcagtccctgccttctagaatcctgaaaggcagggggctagggggaaaagcacacccactaggccctgggctctctgagagttgatcacaggccttaatcctccctctttctcacccagcattcagcctggtgcacagacagaacttaataaagggcaaatgcaagaacaaatgagtgacctcagcttcctcatctgtaaaacggaatggccacattaacaccctccaagggtaactgtgagaatcaaatgggaaataatataacagccagcagagtcgagagctatgtggtccacaggcatgacatcaggatccgcaaattaaccctgtgaaattttac

SEQ ID NO: 658828 - DNA, 560 bp, Homo sapiens
cagattggatcatgtgcactgaagcaacagcagaactgaaaggtgaaaattctgtagatgctaaaagaaacctctatggaacttacacgaagggtataaaggagacctgagattaacatttcctaaatcatagacttgtgaaaaattgcttgccaaaagaaaactttgtataagtgaacagacacttattgagcacctatttgagtcaacctgggaataaaaagatggttaacatggtgtctatccaatcaaacaattcaaaaaactatacaaaatagacatatataacattgagtatcatatactatgatatgttagttgtttaaataaagtattctgtgaaaacaaaagaaagagctgtctaagggaggggagaaggaaacagagaaaaaggctagtctttgacctaggcttcagaggacacaaacagcccawacaacatatcctcaaccttgagtgtagccttcaatagaaatccaagttttaggataattccaaagcatgatatatgaaagtgattgagattaaagatatatcataaatatctgaagtgatgagta

SEQ ID NO: 658829 - DNA, 506 bp, Homo sapiens
tctttcttttttgacacctttatccctgtgttaatatctaatctaaagcctaatatcagtgtctgttctaagaaagctgctttttctttagttgaataacacctttcagatgagaccttattttatatccacagggatgggggcagatcatataaaataacaaagaaacactaatctggtagttaagtaacctaaattcttgycctggttttctcaccaacttaaattctgaaatctcatctgcaaaaataaggtgattaaccttgtctgtctttaaggtccatttaagttctatacttctatgaccattattaacaaacattattgagatccttctaggtgtagagtgtttatcaaacaatctatcctcattttttacaagataagaaagctcagaaaggccaagtgacttgctaatgtcacacttccagtaaatggcagagctcagattcacttgcatgtcttgtccacaaaacaaatgtctttgcaaatgccacactgttgtc

SEQ ID NO: 658830 - DNA, 590 bp, Homo sapiens
cttccttgcctatgtctaagtgcctcaccatggaggtatctcaaatccaatgactggtcagttgggggttacaaagatttggccccctgacttcaagacaggacactataagctatcatttcatctgcagagctcctgtcagatcttctgagacctctatggacctgtatcacatagttcaagttctgccttgcctttttagtcaatcgttattgactgttgtcctaagcatccttcccaacaaatctgctgcatgcaatatgcctgccagcctgttttcaaggaaacctaayctaaaacgtcattcatccttaaggctagaagaccataaaaggcaaataagtcatcagttcccctcaaatgactgtttctacaccaatctgtggccaaagcttagtcagttactacatactgaagaacgaggcaaaaaatcttaatttaatccatgtctttggtcccttagtcactatctgaaacaaccataactaaatccacttatggagagtttactatattccaagcaccacacataccacttaattatatgttttggattaatattcagagtaactccatggagaagttgctat

SEQ ID NO: 658831 - DNA, 554 bp, Homo sapiens
ttgagcaattaaatttggctagtacaggtgaagaactgaattcttaatactatttcactttaatttaaattgaatagccacagcacagatataatgggtcaaatcaaacatagaaccaaaaatgataattaaaaagggcaaaattattaatgccatataaacatatgataacctcttgagagtagagatgggtaatgaactttgattataaaattccagaaaggcttcacagagaagaaggcagctgaaggatgtagagattccaggggttagagaataggagaatggcattccaatatgaggaagccatatgcacaaaggtacttggtttattcctgaataagtagaagggatcatgtcttatgcattyatcccttatacattcatactcactgccaaacctctgcatccctctaatacttttcttgcacataatagatctctaatgcatttctagtgaattgattttaaaagcaaacaataaacacataatttgttttaatatagcaaatcatgtaggaatcaaaaagacagcattcttgtatgtattgttg

SEQ ID NO: 658832 - DNA, 576 bp, Homo sapiens
ccttggcacagaagaaaattattccaatgtgtttgcagtgctttatggcttgaaaaatgacttcatcaattctcactgagtttcataytaaacaggcgagggaagcagaaccgtctttgtgtgatgtgcacgccgggtggtggatgcttcctctctgccatttctagaccttcttgggtcccctctctgcacctggagcccaccactttcctccttttccacccttgttgcccaacacacctgctgtctttagccaacagagcacaaatcacattttgcacatttcaaccttgttgcttagaccatggaaacagtggggacaaaggacagctctcatgggaactgtggtggctgtgcattgagccctcgccatttaccaagcattgtgctttgtgctagataaccatgacttcatttgatccacaatcagtgctattattattcccattttcagaagtggaaatagaggtggcaaagctcaaataacttgccaaacctacatggccaataaatggcgacaccagaattcaaacccaagcctgataccatagcccatggccataacaattacattac

SEQ ID NO: 658833 - DNA, 644 bp, Homo sapiens
gtacttagtatttgtcgagcatctgctaaactcttaacattcattaacattctcattaaatcctcattacctgaggtaggtactactgtgggtaattatctccattttccagataaggaaacggaggctgagaggggttggctaccttgccccagaccacacagtgaatgactgttgaagcctgcacttgaacccaaatgtgtccaactccaaggctcgggcacttaaccactgggcacactgtcaccacccacccctggaggagccccccggcctagccccctgagaagccagtgtcagatgggaggcagctcggctgtcctggccccttaccatgtcttggcgtctgcagtgctctgtggttgctgtccctcygtaccaggcaccccctgcacacacatcagagggaaggcttgtcactccaagtcccagctggcttcttcctgggaccggcccagctgtggcacaagaggtggtggtgctgtttcctcttgcgggtggtgggcagggagggtgagtctgggccccgctccccactggctatctgttgaatgacagcaagccagagtgtttgggtgggtggtgagctttgagggcccaccggagactgttaattttggctctgagtccgcagtggagctaaa

SEQ ID NO: 658834 - DNA, 556 bp, Homo sapiens
tacatttagaagagataataagtaaaaataatataatagttggtttggggttagtagaattttataggtgacataagaaatattattttttaaatgttctctttaaattttcacacagaagctcttgtaatttctarcaggttagattctgaaaggctcttcctgtgcctgaagtaatactgcaccaactatcaatttgtacatagccctgtaaaactttatcatctttactttatttacactacaatagcaagactcttcttaccaccacttttaacactccctctgctgtggagtttaaaggcaatgcagaaatatgtcgaacaaaggaggaggcaaacaaaataagatggaacactaaggctagagcgaaaatgaccctggaaaccactccagccacctgtccatggccggcagagctaatgtgtttttgccttggccggaagttttgcttatgtgtctgaaagctgttaggtggaggggagtctccactttgcccaaaccagaacacatggtctagaaacacagctgggacttgactcagccaccctctaaa

SEQ ID NO: 658835 - DNA, 643 bp, Homo sapiens
tcaatcttagtttcttaaaactgtctgatcagaccttattttatgcaacatcattctgaaatatgactttccagtaaaagcctttgttatataacsaatttgtccaattataccctgctatgaggaagacagactcctattgaagtatataaatatttatattgccatgaaacagagaacactcaataagacacaccaaatttttcctttgggaaggcaaaatgttaataatgttaatattccttgtttcctagggggattagtgagaaagaaaaagataaatgtttttcttctatttatactacatttttatgagttatagatagtttaatacagaagggaaaggagttatcacatccagaaaatagaacattgaataaccagcaacgttccaaacagaagccataaaaattattatcattttttatcagttcattcagtcccatgtaattcatgattattctacttgatccggggttagcagttttacaaatccatcagcttcttcactagagttctgaaaatctttattcagtctagtgggatggtctcaaaataatttaaagactaccatcaacagcctgtacccacaagtacctattatagctttcgaagtttctttcagaccatccctttttgttta

SEQ ID NO: 658836 - DNA, 643 bp, Homo sapiens
tcaatcttagtttcttaaaactgtctgatcagaccttattttatgcaacatcattctgaaatatgactttccagtaaaagcctttgttatataacgaatttgtccaattataccctgctatgaggaagacagactcctattgaagtatataaatatttatattgccatgaaacagagaacactcaataagacacaccaaatttttcctttgggaaggcaaaatgttaataatgttaatattccttgtttcctagggggattagtgagaaagaaaaagataaatgtttttcttctatttatactacatttttatgagttatagatagtttaatacagaagggaaaggagttatcacatccagaaaatagaacattgaataaccagcaacgttccaaacagaagccataaaaattattatcattttttatcagttcattcagtcccatgtaattcatgattattctacttgatcyggggttagcagttttacaaatccatcagcttcttcactagagttctgaaaatctttattcagtctagtgggatggtctcaaaataatttaaagactaccatcaacagcctgtacccacaagtacctattatagctttcgaagtttctttcagaccatccctttttgttta

SEQ ID NO: 658837 - DNA, 583 bp, Homo sapiens
gctacggccagaatcttgagctggactcatttactcaatacgtgattactgagtgtctaggataagccaggaaccattccaggcttagacagagaccctgcccttaagaagcttgtattctatctgagaagactggaaacaaacacgtatataaagccaacacaggtaacaaggagtgtaggctaaggaggtgctattttatgcagacacaccaacgttgccaggaattatcagcctggcggcacattagaatcacctgggagtcatgaacaaaattgaccaagcctttcaactcaccttcagcgattctgctttaattagtcagagattctgatttaatatgttgaggcctgggctctgttgtagtttaaaaacttgccaggtgattcttatgtgcagccagaattgagaagctgtggtctaaaagtaggagggataaggacgtatcagcaaaagagacagagactgtggttggcgaggtaggaagcagacaggagagcygtggtgtaggtttcaactgaagaaaatgtttctagaaggaaagagttacccagcaaatacaagcagaaggagagagtgggcc

SEQ ID NO: 658838 - DNA, 584 bp, Homo sapiens
cctaattcaatgtaactgatgtccttataagaaaaggaagagataccggggatgtacatgcacagaggatgcacagaagaaagagtatggggagaggcagcaagaggatggttatctgtaagacaaggataaaggccttagagaaatcaacctttctggcactttgatcttggacttcccctttagaactgtgagaaataaacttctgttattgaagccagtctgtggtattttattatggcaggctgctgtgatttgggtatggtctgtttgtccccaccaaatctcatcttgaaatttaattcccagtgtggtggtgctagggggtggggcctagcaagaggtgttttggtcatgagggtggatctcttatgaatagattgaggcccttgctaggggttgagtctcactctgttagtttctcactctgttagtttctgarcaagcgagttgttaaagcctggcagccctcctctgtgctctcttgccatgtgatccctgcacacctcggcttgcctttgatgtctgccactagtggaagcagcctgagaccctcaccagaagataaccagatgccagcatca

SEQ ID NO: 658839 - DNA, 614 bp, Homo sapiens
attcctcaggagacaaatgataactggtttgtttgtttgtttgtttcttctttgagagggagtcttgttctgtcacccaggctggagtgcagtggtgtgatctcagctcaccgaaacctccacctactaggctcaagcaattctcgtgcctcagcctcccgaagagctgggattacacgcatrcaagaccgtgtctggctgattttttgtagagacaggatttcaccatattggccaggctggtctcaaactcctgacctcaagcaatttgcccacctcgttctcccaaagtgctgggattacaggtgtgagccgctgggcccagcctggttatctctgtttttgtgatgttagcactctggatactcagtactagacctactaactcatcagaattacaaaacagtgatactaaaattttatcatttaattttcatttactgattggaatactttcataaagaggcaatcaccctcctctactaggtgattacccctggtgcagtctgtacagaaaaggtaagagaaatgctagattctgtacttctatttaaccagttttcaaaataatgcattgattccctattatatgttgaatgtggtcaattagtttg

SEQ ID NO: 658840 - DNA, 614 bp, Homo sapiens
attcctcaggagacaaatgataactggtttgtttgtttgtttgtttcttctttgagagggagtcttgttctgtcacccaggctggagtgcagtggtgtgatctcagctcaccgaaacctccacctactaggctcaagcaattctcgtgcctcagcctcccgaagagctgggattacacgcatacaagaccgtgtctggctgattttttgtagagacaggatttcaccatattggccaggctggtctcaaactcctgacctcaagcaatttgcccacctcgttctcccaaagtgctgggattacaggtgtgagccgctgggcccagcctggttatctctgtttttgtgatgttagcactctggatactcagtactagayctactaactcatcagaattacaaaacagtgatactaaaattttatcatttaattttcatttactgattggaatactttcataaagaggcaatcaccctcctctactaggtgattacccctggtgcagtctgtacagaaaaggtaagagaaatgctagattctgtacttctatttaaccagttttcaaaataatgcattgattccctattatatgttgaatgtggtcaattagtttg

SEQ ID NO: 658841 - DNA, 604 bp, Homo sapiens
aggtctctgatggactctaaaaaatatgattttgtatgccatttgggctgctgtttcttgttagaatgggagcaatgtttttctgrgacacttaatattctaacctaaaacctcttgaggatcataacattttatatagttcaaatctattttatagtggacaacatgaagccaatagagtatatgacctgtttctggtggaatagcatgttctgtaacagcatgcttcacaacccaggtctccaaatttcaactgagggttcttattcttaactaggattcacataatgaggtggtttattctgttcttttccacaacatatttgccttaatttgaaaaacccattttacttcctggacattcatagctacacagaaattacagtacaaaaacctaggttttaacttttcacttcgaccatgccaccttgtgtccttatgggaaaaagtttgaactaacaagtaaccaagaagttgttctttaaagtcatgttttcctcataaatctacaaagtatttgcattcttcaaagaaggttgctttaaatccaaaacatctggtaataaattgcttatacaatcatgttttctcaagtgatactgtg

SEQ ID NO: 658842 - DNA, 604 bp, Homo sapiens
aggtctctgatggactctaaaaaatatgattttgtatgccatttgggctgctgtttcttgttagaatgggagcaatgtttttctgggacacttaatattctaacctaaaacctcttgaggatcataacattttatatagttcaaatctattttatagtggacaacatgaagccaatagagtatatgacctgtttctggtggaatagcatgttctgtaacagcatgcttcacaacccaggtctccaaatttcaactgagggttcttattcttaactagrattcacataatgaggtggtttattctgttcttttccacaacatatttgccttaatttgaaaaacccattttacttcctggacattcatagctacacagaaattacagtacaaaaacctaggttttaacttttcacttcgaccatgccaccttgtgtccttatgggaaaaagtttgaactaacaagtaaccaagaagttgttctttaaagtcatgttttcctcataaatctacaaagtatttgcattcttcaaagaaggttgctttaaatccaaaacatctggtaataaattgcttatacaatcatgttttctcaagtgatactgtg

SEQ ID NO: 658843 - DNA, 604 bp, Homo sapiens
aggtctctgatggactctaaaaaatatgattttgtatgccatttgggctgctgtttcttgttagaatgggagcaatgtttttctgggacacttaatattctaacctaaaacctcttgaggatcataacattttatatagttcaaatctattttatagtggacaacatgaagccaatagagtatatgacctgtttctggtggaatagcatgttctgtaacagcatgcttcacaacccaggtctccaaatttcaactgagggttcttattcttaactaggattcacrtaatgaggtggtttattctgttcttttccacaacatatttgccttaatttgaaaaacccattttacttcctggacattcatagctacacagaaattacagtacaaaaacctaggttttaacttttcacttcgaccatgccaccttgtgtccttatgggaaaaagtttgaactaacaagtaaccaagaagttgttctttaaagtcatgttttcctcataaatctacaaagtatttgcattcttcaaagaaggttgctttaaatccaaaacatctggtaataaattgcttatacaatcatgttttctcaagtgatactgtg

SEQ ID NO: 658844 - DNA, 606 bp, Homo sapiens
cttcctgctgcttctatttgggtccaggtaaatttaggccaaataattcactaaagggccgcatgcagtgtggaaagatgtatgaaagtcagcagtgactgactttggccagtgctgtgtgtgggggagaagggagtatacagaccttcagtgaggctaatagactagaagaatcattgagaaacactcatattctttaatgctgtccctgracttggctggtcatggcaacaacattcttagtaaaattgtttaactgtaagattttttttaaaaagcattttttatacaatctctgtaatatggtatcaatgtgtattatgtcttaatttatagggtgagtaatctttgtctattgaaactccaggaatacttgctatgaacagatgtttcctattcccttggcttatcaatgcaaaactaaatagaaggcaaagggtcattaatcaagccaaaataaaagggacaggcagaaacactgtgaatttgtggatcaacaagaattttgctaagccaaatcatttggagaattgatttgcaagctaaggtaagctgcttacgggaaggagtcttagtcaatccaaatcatacccatatgattaacta

SEQ ID NO: 658845 - DNA, 600 bp, Homo sapiens
cttagtcaatccaaatcatacccatatgattaactataacacgaagaaaggaaaagaaggaaggaaaatgttctctttctgtaattttattctgttgggtattatgagatgttcctaaatggacagtcaaacttctaaatgaccatgtaattccccatctctgcatggcaggaagaagaagagtataaatatgcaaaagctgttccatttcatggtcgcatggataccaagcagatgggtagatgaacatgaaactattctttataaacattgagggcccctgtcaatccaagctgtatccatctggytatacagctacagcactgctttatctaagaaagacaagagtggattagagaaagcactattgagagagaaatctgtttgatctttggagactaattaatattaacataataaaatagctttcaattatataaactttggattatgcactcctgtggatgaactctggatactgaaaatctttggataatgtatttaagtggtccatttaataatcccagtgctacttactagcaagctacttaaactcaaagattccactttcttatctataaaaaggggatgacattaata

SEQ ID NO: 658846 - DNA, 600 bp, Homo sapiens
cttagtcaatccaaatcatacccatatgattaactataacacgaagaaaggaaaagaaggaaggaaaatgttctctttctgtaattttattctgttgggtattatgagatgttcctaaatggacagtcaaacttctaaatgaccatgtaattccccatctctgcatggcaggaagaagaagagtataaatatgcaaaagctgttccatttcatggtcgcatggataccaagcagatgggtagatgaacatgaaactattctttataaacattgagggcccctgtcaatccaagctgtatccatctggctatacagctacagcactgctttatctaagaaagacaagagtggattagagaaagcactattgagagagaaatctgtttgatctttggagactaattaatattaacataataaaatagctttcaattatataaactttggattatgcactcctgtggatgaactmtggatactgaaaatctttggataatgtatttaagtggtccatttaataatcccagtgctacttactagcaagctacttaaactcaaagattccactttcttatctataaaaaggggatgacattaata

SEQ ID NO: 658847 - DNA, 594 bp, Homo sapiens
tatagccaaatcatttttgacaccaaggcaccaagaacatactttggaggaaggracagtctcttcaatagttgttgctggaaaaactggatactcaaatgcagaggaataaaaccaggcttttatctctcattattttgaaaaatcaaatgaaaatgaattaaaaatttaaatttgagacccaaaactataaaactactagaagaaaatattggggaaatacttcaggacactggtctgggcaaagttttttgggtaagacctcaaaagcataggcaagaaaagcaaaaatagacaaatgggattacatcaagctaaaaggtttctgcacagtgaaagaaacgatcaacacaataaagagacagcttacagaatgagaggaaatatttgcaaactgcccatctgacaagggattaataactaaaattatctaagaatctcaaagactcaatagcaaaaatccaaataatctgatttaaaaatgggcaaatgatttgaatagacatttctcaaaaaagacacaaatgactgacaggtgtatgaaaaaaaaagatcaacatctctaatcatcaggtaagtgcaaactgaaaccac

SEQ ID NO: 658848 - DNA, 445 bp, Homo sapiens
aaattttgttttatgattatttgccagcaggttctccaatagaaagtgtttatggagaactgggaatttttaagtggcttatgctgtagaggaatagatgattgattccccaaactttggagagtagctcctctgagccaggatactctgctagggctagaaactgggagatgaaccagacccttcttartgagctcgtcatcgggcaaggagtcagacttaccgagataatgttgagtaaatataaacctatagagttataggtgggcacgcaagtcagatggaactgaaaatgtaaagccatagaggagcagatgatcatggtgggttcagaaggccagaagccatccaatgttgctaaagcattaagagcaaagaagaaaaaatggttggagacgagtctatagggataaatggagacccaacagaaaaggctttgggggcc

SEQ ID NO: 658849 - DNA, 481 bp, Homo sapiens
taaagaaaaaactattactaaattaaaaagtcaacatttaattctgtaaaatccacacttttaacagcttagtcactaagtatatgaatattagttggctacaaattattttctgggtttgatttaaaaaaccaaaggacagaaagagatatcgagcaacttaattcatccttccatcttcagtcagctccacaattgwctttctagagtcagaagaaatactttctattatttattgcaaattacctcaggtacttcatgaaagtaggtggaatataaaatgttccacatgcattgtattaggcattttatcaattcatttaaaacccaagtcaggcagggcgcgttggctcacacctataatcccagcactttgggaggccgagacaggtagatcacaaggtcagtagttcaaggccagcctggccacgatggtgaaactctgtctctaccaaaaatacaaaaattagccaggcgtgat

SEQ ID NO: 658850 - DNA, 599 bp, Homo sapiens
gggttgggatgtgcagagacagtggcagtaggagttgaggcagcagtgtcagtggtgggctttatggtcacgagaaacatgtgagccattattgggctgctccggaagggaaatggggcacataaccagggcctagcaggacaggaagtgtatggtgcaaactgggtcaaatacactgtgtttggggaattacccttctttggagccacagtagaaagctgcaccaaccccaccattggagcagaaacccctttcccagtgtttcttgctgttagggtaccacaaggctgccttctaggccatgctgtacttatcaaagtcccactctagacttcaacttagaaactaaagaggtcaagaagtggggacatcccmaaatccattctggtgaggaaaagtcagcaggagaagctatatcagctcccaggagctgtaatgcccagtggctagcattggtagtattaaggacacacgtgcatgtctatgcgcagaggtggcagtatcatcatgggataaaccaatttagttacttaattttggacgccagtcttatttcggccttccaagtctggttctttcagccttcctgagatattgtg

SEQ ID NO: 658851 - DNA, 627 bp, Homo sapiens
caactgcaagtggagtcataatatggttaaacttgtgataatccatggttattctccctgatccatctgttttttcacaggctaaataggcaagctgcatgaagatattgtgggaatcactatccctgactctttcaagtccttgatgatggcattaactgcagtcctttcargaatgtaggagtgcttctagtttactagctccaggaatgacttccacttggccttttccttccataataagcctcactccacaggtcaaggagcaaatgcgtggattttgtcagttgacaggttatgtctattccaactgcatactctggaaccagggaaataaacacaaggattctgcaacccattggacccctgtgagatgaaccagaacctaaaattacattgatcactttgatagttaattcagtgtgtcaccttggctaggccatggtacccacatattgggccaaacacttagatgtttctacgaatgcatttttttagagaaaattaacatttaaatcagtagactttgattaaagcaaattatcccgcataatatgggaagtcctcatccaatcagttgaaggcttcaagtgaaaaaatactgagctcttctgaaaaaagggaatt

SEQ ID NO: 658852 - DNA, 480 bp, Homo sapiens
caaaaaatcctgagtgaagcactaaatataacaagggaagaccattcccagccactacaaaaacacactgaagcacacagatcagtgacacaataaagcaaccacataaataagtctgcaaaataaccagccaacatcatgatgacaggatcaaatttacacatattttattagtccgttttcatgctgctgataaagatatacccaagaccgggcaatttacaaaagaaaggttttattggacttacagtttcaggtggctggggaaggctcacaatcatggtggaaggcaaggaggagcaagtcacgtcttacatggatggcagcaggcaaagaaagagcttgtgcaaggaaactttcccttatrgaaccattagatcttgtgagacttattcactattacaagaagagcatgggaaagacctgcccccatgattcaattacctcccaccaggtctgtcccacaacatgttggaattc

SEQ ID NO: 658853 - DNA, 601 bp, Homo sapiens
accacgcctttgtccttattttcatgagtcattttaaaaccaaaagacaacaaaaaccctttatctcccaaagcaggccttatgaccacattctaatcctatcataggttattatagtaccttttttttaaagcctatctcccaccactctctacttccaaaaatcccctcactatatccagtgaaacccattatcattcatcagaaaaaaaatcctgtatatctttaacctctactctgaatatttcctatgttttcttgcttttatggaaaccagtttttcttagagcactttttttccttgtcagtcttttcaagtggggaaagtctatactcctctgctctacatgggagacagatgtgtcccgtgatcttcattgtcagtttcaaataaaccttcttaaaatcccacaaactttgaatcttattccataagkccataatacgctttacttctttttaccatacttatctatgagaaataaaagtgaaaattctaagccctccaactggctgaatgggtcatctcttggccatggggaccatggaataagcttggtcagccctgaaagaggttaggaggtcagacatgccctcttac

SEQ ID NO: 658854 - DNA, 603 bp, Homo sapiens
tacataaggccaatccttctgcttatttgctagattgcatcccctctcactttctcaaaggcatcaatcccataattgctacctcctttccaagcatcatacatttttacattttactgaatcattctctttagcataattaacatgctaagataaacgttagcttaaaataaaaacaaagaagttttgatactccctatttctttgcttccttttagtgtaaaacttttcacaaaaagattacatttattttctccaattgctttttttctgttttatggtggtagttctagcagtagctactgttaagatcaatgatccttcctttgccaaatctaatggtggattatctgttctcatgtcacctcgtgtatgaaggttattttcgtagttctatttataatactatcttcccttggactctgtgacatcaacttccctttgattttcctttgacttaatgtgtttgtcttttctgcctttttgctggctcctcattctcttttgacctctaaattttaarttacttttgagccaagttccaggacctcttattttctacatctatataccaaccctctaggtcaactcatattatttcat

SEQ ID NO: 658855 - DNA, 548 bp, Homo sapiens
gaagtgctttctgatgacccatgaagtcaraattatttcaaaatcatcatgtgcattttctactgttgtcatttgtaataattatatcaaagcaatggctggaaaactgcagattccttagcatgaatcaagcagtgctaccaaactgtactatttgtcatcatatgcttctctgccatgcactcactcactgccatgcacttccatgcaccttgcaaggaaggtgatccatgcaaaataggaaaccatctttttctcactgtaagagaaaaagatgaagaaaaaggggaggaagaagaggaggaaaagccagtttcacttaagaataactgacaaagtggtaaaaaaatacccatgtaatatatttgttattttcaaatgaatagatacatattttaaatacatctgcattttaattcctaatacaataaataccaatagacagagatctctttagagtcctcaataatttttaaagggagaaaagggtcctgagaccaaaaagtttaaaaatcactcttaggaaatacagggtctgtgattatttt

SEQ ID NO: 658856 - DNA, 548 bp, Homo sapiens
gaagtgctttctgatgacccatgaagtcaaaattatttcaaaatcatcatgtgcattttctactgttgtcatttgtaataattatatcaaagcaatggctggaaaactgcagattccttagcatgaatcaagcagtgctaccaaactgtactatttgtcatcatatgcttctctgccatgcactcactcactgccatgcacttccatgcaccttgcaaggaaggtgatccatgcaaaataggaaaccatctttttctcactgtaagagaaaaagatgaagaaaaaggggaggaagaagaggaggaaaagccagtttcacttaagaataactgacaaagtggtaaaaaaatacccatgtaatatatttgttaytttcaaatgaatagatacatattttaaatacatctgcattttaattcctaatacaataaataccaatagacagagatctctttagagtcctcaataatttttaaagggagaaaagggtcctgagaccaaaaagtttaaaaatcactcttaggaaatacagggtctgtgattatttt

SEQ ID NO: 658857 - DNA, 548 bp, Homo sapiens
gaagtgctttctgatgacccatgaagtcaaaattatttcaaaatcatcatgtgcattttctactgttgtcatttgtaataattatatcaaagcaatggctggaaaactgcagattccttagcatgaatcaagcagtgctaccaaactgtactatttgtcatcatatgcttctctgccatgcactcactcactgccatgcacttccatgcaccttgcaaggaaggtgatccatgcaaaataggaaaccatctttttctcactgtaagagaaaaagatgaagaaaaaggggaggaagaagaggaggaaaagccagtttcacttaagaataactgacaaagtggtaaaaaaatacccatgtaatatatttgttattttcaaatgaatasatacatattttaaatacatctgcattttaattcctaatacaataaataccaatagacagagatctctttagagtcctcaataatttttaaagggagaaaagggtcctgagaccaaaaagtttaaaaatcactcttaggaaatacagggtctgtgattatttt

SEQ ID NO: 658858 - DNA, 598 bp, Homo sapiens
cagggcacagaagaaaaataatacaaatgtgtttgcagtgctttatggcttgaaaaatgacttcatcaattctcactgagtttcatactaaacaggcgagggaagcagaaccgtctttgtgtgatgtgcacgccgggtggtggatgcttcctctctgccatttctagaccttcttgggtcccctctctgcacctggagcccaccactttcctccttttccacccttgttgcccaacacacctgctgtctttagccaacagagcacaaatcacattttgcacatttcaaccttgttgcttagaccatggaaacagtggggacaaaggacagctctcatgggaactgtggtggctgtgcattgagccctcgccatttaccaagcattgtgctttgtgctagataaccatgacttcatttgatccacaatcagtgctattattattcccattttcagaagtggaaatagaggtggcaaagctcaaataacttgccaaacctacatggccaataaatggcgacaccagaattcaaacccaagcctgataccatagcccatggccataacaattayattacactgtctctgctcagaagaagg

SEQ ID NO: 658859 - DNA, 628 bp, Homo sapiens
gttctctaaatgcagaactgcttctgattccattctcctcagtatttttgatgtattcttacaaggcagttttctgtttattagttagtgccataagctttcaccatctattcaagccaagagcaataatatcttgtctctttgaatttgggttttaactgtcataaggctgttttctttatgcttgatggaagttgcattctagcaaagaactgatttcaaattgccccatcaacttgctaaaatgatgatacactttccatagaattctatcacagggagtttccaatatgtggctagactcttcatagaaatatcagtcataaaatgtgcactgggtatttattttttcatcagggtcacagaaatgcacctgaactgaattcttcttcttgtstctgtaccgttaaggtattgacaggttcagaattgctgggtttgaaattttaagagtagctaactcataacatttcactttctgctccagggcagggtgagttgcttataaatcagcctgcaaatatgatgaattggatgtctccaactcaattagcttaatgtgggtaggaggatttccaggctttatggtctctgttttactaatctactgagcagactgttatataaa

SEQ ID NO: 658860 - DNA, 646 bp, Homo sapiens
tctttttcccctttcattatcaaaattagaattcaacaggataattctatttggcaatttaattgtgtacttgtaaaaaaattgggtatgtaaactatccctcatattttacatactttaaaatataatatgttaaatgctgaaagatagcattactaggctttcaatgtagacttctaaatagccatttttctaggaaaaaattaatatactttcctgagaccatgccattttcaaaagataaaattccataataacaaaaaattctataatattatatttcacagtcacaattttataaatctatttaaatgacagtaaactaggtaccttcctgggcatatatatctactagtatgtttattggtataatttttagattcataagtaaaaattcatattatgcttctaraacataaaaggcatttgttcctttgcactctaacacacttgacatgatctggaattttaaattctctaaccaaatatgtataaaataattgtatacctttatcagtatatcctgtaaaatataacatctcataaactaagattatacaactactggtttatttattatacatgtaatatgggacatgtttctcttctaatttagcaaatggaaaaagataaccaattaattaga

SEQ ID NO: 658861 - DNA, 504 bp, Homo sapiens
atttctcaaaatgtatctctgatgctaagccatgtatgctgcagttagcaatgcagggctggatgtgcagactggcattctgctgggcatagttccttatttactgccttcaaacaggctacaaaaaaaaacgtttatcaggcttggtcctgttaattgttaatagttaacaattaactattatagagatcaaccaaagtgcaatcagtgctttcacctgggttgttgttggggcaagattactgtgatttagtaagtcaggtgtccctgccatmggctcatcactaagaaacaaagataagaccctgcctctccttctgcaccaggaaatcagagccacagacctaagtgggactgtcaccaggcagacaagctaagaaacatccctggtggggtcacatgcctccgcatctcaacacttcttgcacactcacttttgcattcgaatgctgcatttgcaaccagaggcctaagttcaatcctaagttgcatcatttctaggct

SEQ ID NO: 658862 - DNA, 602 bp, Homo sapiens
agaagaaggcagagtggagggggtctcccaaaagctaactattttactctgggtatggagggagatatgtcagcttccggcacagcactaaaaatgcaaaccaagtgtcttcattaatatgttacaacttctcaaatgaaagagaaatgtagaaacacctggrtttctgttcttaaacttttcctttgattttagactcttcttttaactcatactgacccgaaattctcacccattttataagtgttctgttacggtgagggtgagaagccaggcggttgaacaggtaacttgcatttcctccacatttctgctctctgtgtgaactttcaattacagcagcaaatgggtcagctacaacatgtgtgctcaatctgcgcataccgagcttccctgccagccttgataagggaaacaaaaaaggtgttattttacagatgaatgcatttatgctacacatattgaatgtaatgtcttttcaaactagttattgataaaagtgaaagaaaatgaagagatcgtaggagatgtaaagactaaactgagtcagctgtcactaagttccttagtgaattcactttgcttccctgaatctatttcac

SEQ ID NO: 658863 - DNA, 597 bp, Homo sapiens
gattcgctgcatatctcaggagcacgctctgtctttcattctctctgaagttctctcttccctagtactctgcactgtaatgtctagtctttttttttttttttttctgctttgtcttattaaygcagagaactttctggaatctttttagtttcttcctccctgtgccactgcatgggatattctttccaggaaataagctgatgaaattttagggctcacttccttggttttctgagtctcacagatcgctgttctttgtttcttgatgttcaatatcttgaaaactgtattttcatatattttgtccagttttttttttaactattttatatggtagagtaaatctgttccctggtccctgtttctccattttggttgatggtgggaatcttgtcaaaaagttttactttagaagatatttacaaacaatctgtttcaaattcaatttcattataggtgagttattcctcctttctacactctagtaattatgattagcataaaaatgtactttacctttaaggttacaaaaagttcctcccaagtcatttaatatctattttcacatagtctaattgggtcccagcccagagt

SEQ ID NO: 658864 - DNA, 518 bp, Homo sapiens
attattttgttttgttaactattggatctctgaggcctagtkcagtgcctggaacaaaggcacaattaataagtatttgctaaatgaatacctcccatttttcaatattaagacaatagttatttttatgtacctatgtcttgattcctaaattacaccataatatctttaaggaaagagacagtatctcaaacctcttgattaggggttataaaaatttgcctctaagtaaatatcaagtgatatagtttatgtatgtacgtatttatttattcattcattcatatttgtttttcagaactgcagttctttttttttttttttttttttttgagacagggtctccatctgtggccaggctggagtgcagtccagtcatggcccactgcagccttgacctcctgggctcaagtgatccttccacctcagtctcctggctaactggaactacagatgtgccacaaccacacctggctagttttttgtatttattggagagacaggatttcaccacgttg

SEQ ID NO: 658865 - DNA, 518 bp, Homo sapiens
attattttgttttgttaactattggatctctgaggcctagttcagtgcctggaacaaaggcacaattaataagtatttgctaaatgaatacctcccatttttcaatattaagacaatagttatttttatgtacctatgtcttgattcctaaattacaccataatatctttaaggaaagagacagtatctcaaacctcttgattaggggttataaaaatttgcctctaagtaaatatcaagtgatatagtttatgtatgtacgtatttatttattcattcattcatatttgtttttcagaactrcagttctttttttttttttttttttttttgagacagggtctccatctgtggccaggctggagtgcagtccagtcatggcccactgcagccttgacctcctgggctcaagtgatccttccacctcagtctcctggctaactggaactacagatgtgccacaaccacacctggctagttttttgtatttattggagagacaggatttcaccacgttg

SEQ ID NO: 658866 - DNA, 580 bp, Homo sapiens
cagattccttgagcctagtagttcgaaaccagcctggaaaacctggtgaaactcccatctctacaaagaatacagatattatctgggcataatggcatgcacctgtagtaccagctactcaggaggcagagataggaggatcaactgagtttggggaggtcgcaccactacactcgrgcctgggcaacagagtgagaccctgtgtcacacatacacacacacgcaaataaatgaaaccaattatattgaaatatagttatcaaaatattaaaaagaataaattgtgatatagtaatagaagtatttctttattgacacatttgataatagaagcaaatctaataactattgtaaattcaaaggaataataagcataaatgataatttgaggtatctgtaacaattgtaatgtgacatgaaaatatatattacttctatccatgacacagttccaggtattattaatagtattgtggtttgctgtttataatcacaattggaggaaatgctaaattcaagttggctgttaataaaaataaagatataatctttctcaactgagtttatagatcctcaaatt

SEQ ID NO: 658867 - DNA, 580 bp, Homo sapiens
cagattccttgagcctagtagttcgaaaccagcctggaaaacctggtgaaactcccatctctacaaagaatacagatattatctgggcataatggcatgcacctgtagtaccagctactcaggaggcagagataggaggatcaactgagtttggggaggtcgcaccactacactcgggcctgggcaacagagtgagaccctgtgtcacacatacacacacacgcaaataaatgaaaccaattatattgaaatatagttatcaaaatattaaaaagaataaattgtgatatagtaatagaagtatttctttattgayacatttgataatagaagcaaatctaataactattgtaaattcaaaggaataataagcataaatgataatttgaggtatctgtaacaattgtaatgtgacatgaaaatatatattacttctatccatgacacagttccaggtattattaatagtattgtggtttgctgtttataatcacaattggaggaaatgctaaattcaagttggctgttaataaaaataaagatataatctttctcaactgagtttatagatcctcaaatt

SEQ ID NO: 658868 - DNA, 580 bp, Homo sapiens
cagattccttgagcctagtagttcgaaaccagcctggaaaacctggtgaaactcccatctctacaaagaatacagatattatctgggcataatggcatgcacctgtagtaccagctactcaggaggcagagataggaggatcaactgagtttggggaggtcgcaccactacactcgggcctgggcaacagagtgagaccctgtgtcacacatacacacacacgcaaataaatgaaaccaattatattgaaatatagttatcaaaatattaaaaagaataaattgtgatatagtaatagaagtatttctttattgacacatttgataatagaagcaaatctaataactattgtaaattcaaaggaataataagcataaatgataatttgaggtatctgtaacaattgtaaygtgacatgaaaatatatattacttctatccatgacacagttccaggtattattaatagtattgtggtttgctgtttataatcacaattggaggaaatgctaaattcaagttggctgttaataaaaataaagatataatctttctcaactgagtttatagatcctcaaatt

SEQ ID NO: 658869 - DNA, 579 bp, Homo sapiens
  misc_feature 572, 573, 574, 575, 576, 577, 578, 579: n = A,T,C or G
tccagaactgtgagagaataaatctgtattgttttaggaggccaaatctatgttaactttgtttcagcagcctgaggaacctgatgtaataatgtaatgaaatcatgaggataacattctattaactttcacagataacagtaaccaaatcaagagagcrtttgtcatattctgtccatgggaagcaagtcacagcttcctcccaccctataggggaaaggactgactggggatcaccttaggatatgtctgccacaacaatgcaaggttatagtgttttatcttatgaaagtgggcctctttattgtgtaagaattcagcagctctatctaattcccttcacaatctctagttatttcaaagttatatacacaggtatttgttttattgaaaagtttcagcataactgttatcttcttaaatgattgctctgttcttcagagtccatctatcttgacatttaattgtgctcttgtcttttaaaaattgatttgatgatatattagctgtaggttgttttaaatatggaagttagctgatcatttgaaaatataaagcagagaaacagagannnnnnnn

SEQ ID NO: 658870 - DNA, 539 bp, Homo sapiens
aaagctgcatttactttctgtgtttttctttgtggttatcaaattacaaccttgctttcaatggcatccacagaaatgttttcatttcctcttgaacaagtaatggttaaagaccagatactgatttccaagatttcccacatagttaaaaccttcttacatgtatgatggcacacatgaaaacttgaaagggtcaaccatcttcttatttctcagggaygacgctaggtcataatgtggcatgtttacccgttttcctatctatgtggagaaaatttcacaaaggccatttccagcctttaaaatactaacagtcatgttggtggtgaggaacatttgatttggtcaggcctgtctctgcaaggtaaggttgaaatctggcaagtttgagctgtgaagaagacaaccattctttataattctgagagaatatacatttatttcctttatagggtaaataaacccaaaattaatttaatcacatctttaataagttatttcaattttcatattaatcagatttgtaatgccactaacag

SEQ ID NO: 658871 - DNA, 539 bp, Homo sapiens
aaagctgcatttactttctgtgtttttctttgtggttatcaaattacaaccttgctttcaatggcatccacagaaatgttttcatttcctcttgaacaagtaatggttaaagaccagatactgatttccaagatttcccacatagttaaaaccttcttacatgtatgatggcacacatgaaaacttgaaagggtcaaccatcttcttatttctcagggacgacgctaggtcataatgtggcatgtttacccgttttcctatctatgtggagaaaatttcacaaaggccatttccagcctttaaaatactaacagtcatgttggtggtgaggaacatttgatttggtcaggcctgtctctgcaaggtaaggttgaaatctggcaagtttgagctgtgaagaagacaaccattctttataattctgagagaatatacatttatttcctttatagggtaaakaaacccaaaattaatttaatcacatctttaataagttatttcaattttcatattaatcagatttgtaatgccactaacag

SEQ ID NO: 658872 - DNA, 578 bp, Homo sapiens
catcagtatatgctcatttgtagtccaatgagacacaacattcttttatctctgtgacctctgtcttagagcactggggaaatgaataagtatctcagattgtgtaataacccttcagaataacacttgatctaggccctagaccatttttgctaattacctcatttatttaaaagaaaacaaactccctgccatttattgaatcattttctgtatcaagctcytttacaagcattatcatagcaaccatgccatttaggtatgagtatccatatattttagaaatagaaaatgagcctcagagagataacttgtcaccagttagtaagtgacagaactcaggatgtaagcccaggtatttggactcttttacattatactccctccctgcattaggacatttcagatttgttcaggttctgagaacactggaactaaggcttgcaatgtcataggtgcctcttttccccagtggttgggatatttcattagtatttcacctatttggatttagaacctagattgcaaaatgcaactgggatacttgtatattgactaaactgtggtaaattgcttaa

SEQ ID NO: 658873 - DNA, 226 bp, Homo sapiens
aaattataagatatttactgacctcaagatggatwaggtagaaaacgaaaaataaaaaatattgcctatcattcaaaaaataacttaaaaacaaaagtaatcatatacaaaatgttaaaaaaagcgaattgaaattttgcaaaagtagacaaaaattaatatccagatattaagaatgtataagtagtaaaataaaaataataaatgttgcctaaaggcagaggat

SEQ ID NO: 658874 - DNA, 226 bp, Homo sapiens
aaattataagatatttactgacctcaagatggattaggtagaaaacgaaaaataaaaaatattgcctatcattcaaaaaataacttaaaaacaaaagtaatcatatacaaaatgttaaaaaaagcgaattgaaattttgcaaaagtagacaaaaattaatatccagatattaagaatgtataagtagtaarataaaaataataaatgttgcctaaaggcagaggat

SEQ ID NO: 658875 - DNA, 528 bp, Homo sapiens
ccctattttaggaaaagaccccattatgaaagaaaacaaattctcaagaattctcagcttctctttcatgatggctggcaaagagaaaggcatctggattcagacaaacagtgatgatttctcctggctttacaatgtgtacaaatcttaccccctgcactctgctccatcagttcaatttaatttaattcaattcaagccaacaaatatttttaagtaatattagaacctgggtatatgataattaatggaacatgtgctgtctttacagaaatttcattgtgtgctrgggcactttatctgcatccccagaataaatttatccatagatacatttgtttagtatttactattcagttatctctctccatgttcttttcacatttggcattactgaaataaaccatgtaccaaaaaacgtgccaagctaaacaagtgaaacagcatgcattctgaaatttttagaggtaggaagaacttattgaatgttttggcagtcaaggaagcctcctttgagaatgtgattaa

SEQ ID NO: 658876 - DNA, 557 bp, Homo sapiens
gaccagagggctacttaaagcttttccttgatgttcacattttctgagttcatacaygtaatgtgtttttgaaaagtgcctggcattactaagtgttcaataaataataggcattaatattcttgtttatttctattcttgttatactaatgatttaactattttcctggcatattgctagaacttggtaaatggccaataatggttaattctctctctacctgtgtgggataaatatacttccaagtcacaaaagaacaaagaaaagagagctcatttcaaacagctaataaatggtacagctaggagtattttctccttgcatatcactttaaagatcatatttttctaaaaatatactatatttatttcagtagactagataaagtatgcatacaagtattgtcaaatgttaaataaacatggaatggacaactgagtgggacagaaaagtttacatgaaataaaaggaaaggttaagtaagctaacctaaacagagcacttaatgagagacatttgtgataaacacattctcagacaaaatctcattgaattc

SEQ ID NO: 658877 - DNA, 579 bp, Homo sapiens
tttattcaccccttaagagaaccaagtctccatgtaagttcaggtaggacacatgacacaactggagaaacttcattcaaagcactttaatcatacacctaccatgtgctaagaggtcaccaaaagcaatacttgcttctatccaaataaccacacagcctccctactagggtgtctcagaggcatcctggtgacaacctgttcacaactgaacttaagcatttctgccataatccctgctttctttgagtctctttctcggataatgttacttctatctacccacttatttaagccaaaagctgagagtcatcttgacactgcttcttccacaacttccataatcaataattaattcatggaaatttattgaattcatctcgtaaacctctcttaaataggtccaagtttctctatcactcttgttaccacccaaatctgtcacccatcatttgtaatcaggataatgtaacaatcggcttattatgtctccttctcmtatttctgtattcctttaatcctgtcctcaatttactgctgaagttcaatcagaaaggcaaaataaggtgttttggttaa

SEQ ID NO: 658878 - DNA, 576 bp, Homo sapiens
agagtgctagatggagtagctgtctggagttgagagtccaaattgcacagaaacacacatattttaaaactgaaattatactaatctcactagtattcttctcttactgagaggtattttgaataccccaagcacaaacacttcaagtagaataacacatggaagcaccttctatgttcttttcctcctttaatttgttttttatttttaaaatttaattcactgaattattaactctttgattatttttgttcaagcatacttatatgaattctagtaggtgagaaacatgcattttgtgactttacagtagaagtagctcaaatctagctcaataaacattgttcatgtgatcatatatggaatattctgttgtgtgttcaggatayaaatgacttgaattgttagcagtacttataggaaagttctaatgttttacacctgcttattataggttttaatggtttactgagttttactgtagactaggatgggagccgttgttgctctgctgttccctacagattgccactctgggcacctgttatgtttctgttccaccttccctatttactg

SEQ ID NO: 658879 - DNA, 576 bp, Homo sapiens
agagtgctagatggagtagctgtctggagttgagagtccaaattgcacagaaacacacatattttaaaactgaaattatactaatctcactagtattcttctcttactgagaggtattttgaataccccaagcacaaacacttcaagtagaataacacatggaagcaccttctatgttcttttcctcctttaatttgttttttatttttaaaatttaattcactgaattattaactctttgattatttttgttcaagcatacttatatgaattctagtaggtgagaaacatgcattttgtgactttacagtagaagtagctcaaatctagctcaataaacattgttcatgtgatcatatatggaatattctgttgtgtgttcaggatacaaatgacttgaattgttagcagtacttataggaaagttctaatgttttacacctgcttattataggttttaatggtttactgagttttactgtagactaggatgggagccgttgttgctctgctgttccctrcagattgccactctgggcacctgttatgtttctgttccaccttccctatttactg

SEQ ID NO: 658880 - DNA, 527 bp, Homo sapiens
atgttgatggctgctgcatgatccgcagtggtggtaactggaggttgaggtagttgtaacaatttcttaaaacaagataacacatctgttccatcaattggctcttcctttcacaaaagttctctgtaggatgtgatgctatttgatagtattttgcccccagcagaactcwttcaaaattgagtcaatactctcaactactttatcaattagatttatgtaatattataaatcctttgtcgtcatttcaacagtgttcatggtatctttactaggagtagctttcatctgaagaaactattgtctttgctcattcttaagaagcaactcttcatatgttcaagttgtatcatgagattgtagcaattaagtcacatcttcaggctccacttctaattcaagttctattgctcttttcaccaaatttggtgttacttccttcactgaagttttgaaccttttaaagtcatccatgagggctggaaccaactttttccaagttcctgttaatattttgatgtcctccc

SEQ ID NO: 658881 - DNA, 693 bp, Homo sapiens
atagtattttgcccccagcagaactcattcaaaattgagtcaatactctcaactactttatcaattagatttatgtaatattataaatcctttgtcgtcatttcaacagtgttcatggtatctttactaggagtagctttcatctgaagaaactattgtctttgctcattcttaagaagcaactcytcatatgttcaagttgtatcatgagattgtagcaattaagtcacatcttcaggctccacttctaattcaagttctattgctcttttcaccaaatttggtgttacttccttcactgaagttttgaaccttttaaagtcatccatgagggctggaaccaactttttccaagttcctgttaatattttgatgtcctcccatgagtcacaaatgttcttaatgaaatctgaaatgaatcctttccagaaggttttccattgcctttgtcatcagaggaatcactatctatggcagcaacagctttatgaaatgtatttcttaaataataagacttaaaaatcaaaattagaccttgaaccataagctacagaatggaggttgtgttagcaggcatgaaaccaacaattaacctccttgtacatcttcatcagagctcttgggtatacaggtatattgtcaatgagtgataatatcttcaatggaatttttttctctaagcagtaggtctca

SEQ ID NO: 658882 - DNA, 564 bp, Homo sapiens
catacaaatatcagtatagtgttggccccttacatacagttttactttccatgttttcagtcatccgaggtcaatcatggtctgaaaatattatatagaaaattccagaaataattcataagttctaaattgtgtgccattctaattagcatgatgaaatctcatgccatcctcttccatccagctgtgatgtgaatggtccctttgtccagtgtctttgcacttatactctrcctgcctattagtcatttagtggccacgtgggttactggatccactgtagagacagcacagtgcttgtgttcaagtaacccttattgttcttaataatgcccccaaagtgcaagagtcgtgatgctggtatattgttataattgttctttcatattatttttgctaatttcttactatgcctaacttataaattaaactttgtcataggtatgtatttttgtataggaaaaaaactcagtatagttaaagtttgtcactatccatggtttcaggcatccactgttgatcttcaaatgtatcccctgataagggaaaactactgtagctagc

SEQ ID NO: 658883 - DNA, 553 bp, Homo sapiens
taaacctgtccccattcagtatgtttgctgtgggcttgtcacacatgactttcgttactttgaggtaagtcccttctatgcctagtttgttgagggtttttgtcacaaaggtatgctggattttatcaaatgctttttctgcttttattgagataatcctgtggtttttgtttttaattgtttatttgatttatttactgacttgcatacattaaaccatctctgcatccctgagatgaaacccacttgatgatgatgtattrtcttgctgatgtgctgttggattcagttggctagtattttgttgaggatttttgcatcagtgttgctcagggatatggtcttcagttttctttttttgttaaatcctttcctggtttgggtatcaggatgatactggattcatagaacaatttagggaacatcacctctttatattttggaatagtttcagtaggattggccccagttctttgaatgtctggtagcattcagctatgaattcatctggtcctggatttcttttgttggcaattttttcgttactgattca

SEQ ID NO: 658884 - DNA, 605 bp, Homo sapiens
gaaagtaattttcttatatggagtcagttgtcttccctagttataaagttaaagtcaatgtggtaatttgctggatgttgtgtactaatattcagtgtcttcaccacccttctatggttgcccttacaccatgggatctgaaagcattgaaaatgcgtaactcagtcttcccttccaacagggagctagattcagacaatgacagagaatctctggcatgagtccattttcatgctgtcgataaatacatacccgagactgggaaatttacaaaataaaaagatttagtggacgtatagttccacatggctggggaggtctcacaatcgtggcagaaggtgaaaggcacatctcacatggtggcagacaagtgaagagtgagagcaaagtgaaaggggtttccccttataaaaccaacagatctcatgaggcttgttcactaccatgactacagtaggagggaaaccaccaccatgatccaattawctcccactgagtcccacaacaatgggaattatgggagatacaattcaagatgagatttgggtggggacacagccaaactatatcagtggcacagaagaaaacttcatccctatcaccca

SEQ ID NO: 658885 - DNA, 561 bp, Homo sapiens
tgagaaatttaaggtgatttatctaagctcatacagatacgtgagttgcataccagcctccagcctgtgtgatcatgaagactaagctctccatcatgacagtacacaaagacagactttgctgattccccagtgtgcctggagccttgctcatgagggtttcctggtggagctccaaagtttgaaaatcccccagaaatagtttgataggtaactggagattctgggattttaaaaaatattcgttacccacactcccttttaaagtgcaatgatcagaacctggggttacccatttttgagcaaatatatcagtcrgtttggttaatgagcttcaggaccacagatagaaacagctctccacagggagtaaaacctgtcagcccattagtcagccaaaggctttgctgacagtagtttccctggggaaaactgcccagtcagtcccgtaaaaagttctgattaaataatgtgttcctagtctgctgaacaacgaggcttccttattccctattttaatctgccatcaaactgaaaatgattgataattgctttttatct

SEQ ID NO: 658886 - DNA, 561 bp, Homo sapiens
tgagaaatttaaggtgatttatctaagctcatacagatacgtgagttgcataccagcctccagcctgtgtgatcatgaagactaagctctccatcatgacagtacacaaagacagactttgctgattccccagtgtgcctggagccttgctcatgagggtttcctggtggagctccaaagtttgaaaatcccccagaaatagtttgataggtaactggagattctgggattttaaaaaatattcgttacccacactcccttttaaagtgcaatgatcagaacctggggttacccatttttgagcaaatatatcagtcggtttggttaatgagcttcaggaccacagatagaaacagctctccacagggagtaaaacctgtcagcccattagtcagccaaaggctttgctgacagtagtttccctggggaaaactgcccagtcagtcccrtaaaaagttctgattaaataatgtgttcctagtctgctgaacaacgaggcttccttattccctattttaatctgccatcaaactgaaaatgattgataattgctttttatct

SEQ ID NO: 658887 - DNA, 618 bp, Homo sapiens
ggctaatttttgtatttttagtagagaccgggtttcaccatgttggccaggctggtctcgaactcccaaagtgctgggattacaggcgtgagccactgcgcccagcctacctacacatacttataagtagagacatgtagaatatagctattttgtgtatgtgtgtttgtgtgtgcattgtgaaaacatttccatgaataatggaaattaattttttgcatctccattttttgtagctctcatttttttctgatttaagtttattttcatttaaaggtttgctgcattaacttgatcagctacattttgctgagatactgatatttctatrttagttccttcagtgcgacataatatttaagcttgggtttgtctatgaaagctggcatgtatgatgacaatacctattaccatgacaaaactgaagtcagtttaagttcagaggttgtgtagacattgacttcatttatacttgggggaaataaaaataatgaagaattgatgatttttgcacctgaatgtctgcttacctcctcctacaatatagctgaatggtaattgatcttaacacatttggtcttattccattggtcttataaaatagtctttgtggacttc

SEQ ID NO: 658888 - DNA, 396 bp, Homo sapiens
taacttatttgtgtgggcagaaaatttaaaaagtatcaaaatacacacatgcatagacatatccatacctgtgaacatacacacaaacacagatttgcaatagtcattaaatatrtttttatgtcccagccatcctcttaatagtgatggaacctttgtccagggaaatgtcatggcctagtatttagaaaatactaataaaagattggatattgttctaatattgactctttttttctcctgtgtattcttgtgctgataactaattttaaatgatgtccctctatcctttagttatataaacaaaaatatttcttctatgaatctattgcttctgcacccaggagagtagggccccaatgcagatggtggcagcgaacaatagctggtgaaacc

SEQ ID NO: 658889 - DNA, 572 bp, Homo sapiens
tttacctgccttgtatgaaaatcaaacaaatgctgtgaaagaaagaacaaaaatgaagggctgcaaaaactttttaaaaaatcacttggacacaatggaaagaaaacatatttatttttgtcattcagctgatcctaatgctttaggccttgaataaaccttaaaagtgatcttttctggctaagtgcagtggctcacacctataaatcccagcactttgggaggccaaagtaagaggatttcttgagcctgggaattccagaccagcctgggcaacatagtgagacttcmtccctataaaagataaacagaaaattagccaggtgtggtgacacacacctgtagtctcagctacttgggaagctgaggtggaaggatctcttgagcgcaggaggtcgaggctgcggtaagccaagattgtgccactgtacttcagcctgggggtggcacagtgagaccctgtctcaaaaaaaaaaaaaaaaaaaagagctttcagtgcttgaatttcctcaatcatatccctacccagggaaatggttccttagcctctgatcactccagatatatggcca

SEQ ID NO: 658890 - DNA, 515 bp, Homo sapiens
cagaatcttatgataaatttatttttacaacttttaagaaacaatcaggtagtcaaatgaggggaattaattgagtcaatgtgcaggaaatgatccttttattttattttattttattttattttattttattttttactttctctttaaarccttgtaagggctgggtgaatggaagatttttattacaacttgccaaaataagctctgtaagacattagagctaggctggatttttattttacagctgccatcttttcgtctatctggtctcatatattgcacagtcatctgtactcacttttgcagagtgacattgttttacgtgatcccctttttcccctcagtgatataaaattttcctctctttgatttctatatataacttcatgaagggctcaatcattgtaaagtcaagagaatcaacagctaattccatggaagaatttagtgtctgcgagaacttctaagaacagcttcacaagttgtagtatattgatgacacactaatagct

SEQ ID NO: 658891 - DNA, 445 bp, Homo sapiens
ctcagcctccagagtgctggaattacaggcgtgagccaccacacctggccaggagattttcacattccaaaaaaccatacagttcttcaaggtagcagcttggatacttggacatatatctccttttgaaagatgcatacacacaacayacaacacacatgcacacacacacatacacacttcatcaaggtgtatgtaagtggatttttaaaaacctcatgagatatgagttttgaagagtgtgggtattggtgaaggaccccatcctgatgggctttgtaattttgtgagaaagcatgtaaaagtatttgcaaatattagcttcaagatatgacagatctgtcattactgtggggcctccctagccatgtggaactgtgagtccattaaacctcctcttttataaattacccagtctcaggtatgtctttattagcagtgtaag

SEQ ID NO: 658892 - DNA, 609 bp, Homo sapiens
tttctcacattctttattgttttttctttatttttatgtgactgagttattttggagaactagtcctcaaactctsaaattctttcctcagcttggtctattctgcttctgaaattcttgaagtgaatttttcatctctctcagatcagtttggttctttcttaaaatggcgattttatctttcatctcctgtatcattttattgtattccttagattcctcagattgagtatttgattttcacctgaatctctatcttcattcctatccatattctgaattctatttctgtcatttcagccattttaccctagttaagaaccattgcagggaaactagtgcaattgtttggaggtaagaagacactctggctttttgagttgccagagttcaagctcatgaaaacagctaaaattcaaacagacgagaatgtagacctactcatacattgctaatggtaatatacattgttaaaaattattgtatggtttttatttctccttcacaactaataagcagttgggagaaacactttataagaatgtaaacatgctgcttcttataaaaatttctgcctcgattaaacatttaactgataagttttgcctg

SEQ ID NO: 658893 - DNA, 587 bp, Homo sapiens
gagcataaaagtttgaaaaatctgcagcctgataatgcagtagaaaagcaaaatccattttctggggagaaattcaagcctgcttagaaatttgcataagtaatgaggagctaaatgctaatcaccaargcaatggggaaaacatctccagggcatctaagagactttgggggcagaccctcccatcagaggtccagagacctaggagggaaaaatggttttgtgggctgggccaaaggctctgctgctgtgtgcagcctaggaacttcgtgccctgcatcccagccactccagccatggctaaaagggtccaaggtacatcttaggtcctggcttcagagggtgcaagccccaagctttggcaccttccacatggtattgggcctgtgggtgcactgaagtcaaacgtagaggtttgggaacctctgcctagatttcagagtatgtatgtaaatgcctggatgtcgaggcagaggtgtgctgcaagggcagggccctcatggagaacctctgctagggcagtgcaaaagggaaatgtggggtcagagcccccacacagagtccccactggggcactgcctagtgga

SEQ ID NO: 658894 - DNA, 633 bp, Homo sapiens
gtcatgggagggacccagctgggaggtaactgaatcatgggggcaggtctttcctgtgctattttcatgatagtgaataagtctcatgatatctggtggttttataaaggggagtttctcyacacaagctctcttgcctgctgccatgtaagatgtgactttgctcctcattcactttccgccatgattgtggggcctccctagccatgtggaactgtgattccattaaaccttctcctttataaattaccaggtctcaggtatgtctttactagcagtgtaagaatgaactaatacacaggtcaagtcatggcctaactttccaatcacattgtcactcattttcactacatatgaatgaagctttattcaggctgctgtaactgtcaacaataatcacacacgcacagccacacacacacacatatataactatatatacatatatatgtatttatgaacatatgattataatcatatatttatatgtttaaaatcactggctgcttttgagtatccaataaaatttattaactacaagggcaaatgtgcacaaaaatttgacaaaaagaaatcaaactctctgaagcataacattagaaactttaagactctaggagcaccaaattaaga

SEQ ID NO: 658895 - DNA, 633 bp, Homo sapiens
gtcatgggagggacccagctgggaggtaactgaatcatgggggcaggtctttcctgtgctattttcatgatagtgaataagtctcatgatatctggtggttttataaaggggagtttctctacacaagctctcttgcctgctgccatgtaagatgtgactttgctcctcattcacyttccgccatgattgtggggcctccctagccatgtggaactgtgattccattaaaccttctcctttataaattaccaggtctcaggtatgtctttactagcagtgtaagaatgaactaatacacaggtcaagtcatggcctaactttccaatcacattgtcactcattttcactacatatgaatgaagctttattcaggctgctgtaactgtcaacaataatcacacacgcacagccacacacacacacatatataactatatatacatatatatgtatttatgaacatatgattataatcatatatttatatgtttaaaatcactggctgcttttgagtatccaataaaatttattaactacaagggcaaatgtgcacaaaaatttgacaaaaagaaatcaaactctctgaagcataacattagaaactttaagactctaggagcaccaaattaaga

SEQ ID NO: 658896 - DNA, 539 bp, Homo sapiens
ctttgtgttagtacaatatgaaaaaaaaatctatgtgggtttataactgaaacatgatttcaggacacaraagatattaggttcagcaatttagcttagaaaactgctttttggtagggaaaaatatgtactaagagaaattaataagttggttttaaagtaaggttatttgttagtttattttatgttaccatatatgtttgaaaataataaagtgaaattcctccaaaatattacatgaaaaagtttagttaatttagattggtatcttttgagggagaaagcccataatgtgtccttaattatgaccaacaaatcttagcattctgtttgatcattaatttgataagcctctttcataaatctgaaccttctgtcttacagaaaaagactaatatgctttgtagaaaaaactaatatgcgttggatttaaatgaactcttttaactaatgtaacataaactcttaatgaatgaattattatatttataaaccctcttagtatgagaaacactatggattaggcatatagaggcagc

SEQ ID NO: 658897 - DNA, 392 bp, Homo sapiens
ttacaaaaatacagatgctgactcaacagatctggggcggggcctacaattttttctgcatttgtaacgagattcaagatgatgctgatgctgatgctgccaatcctgggtagcaagactaatttaaagagcctgaaggctttcatcatygaacagcacacataaaatacttttcactatttgatcccaagttatcatcctgaatcaagaatctatttatcttaacacgtgtgttcctttcccagaacaaactacccagttcccagtccttaacacctgtaagaaacctttagagtaagaaaaagaatatggatattattacagagacatccctgtagtttttatactataaaagaaatgaccacaaagtagtaatggataaaattgtttta

SEQ ID NO: 658898 - DNA, 574 bp, Homo sapiens
ttcagaagtgaagaaagcactgatactacatgtttgatctggcaacagaaatacacaaatatttgcattggaaactcaatccatcacttataagaaccaaggagcaatcccagcactttgggaggctgacgcgggtggatccctaggtcaggtgatcgagaccatccaggttaacgtggtgaaaccccgtctctactaaaaatacaaaaaattagccaagcgtggtggtgggaacctgtagtcccagctactcaggaggctgaggcaggacaaaggcatgaacctgggaggtggagcttgcagtgagccaagattgtgccattgcactccagcctgggcaacagagtgagactctgtctcaaaaaaaaaataagcaaggagctgagcgactgcatataataccttctgatacttttggaaaagtaacaaacatagtaagtttggctgttcactcctaatktttctggacaaagtggtgaaaaaaaaaaagaatgagctaagaggttccaattcccagtttttatgtggtagaaatgacctaacgtcttctatgtgtgttctgaaggaaacctgt

SEQ ID NO: 658899 - DNA, 395 bp, Homo sapiens
tcaactaataaattctagctcaagaaatggagaactactaaaaattttgatgagaactgtctaaacaataatgccactcagatggcttagccacttaattaaaggtcaatttgatgatgtgttattatgtacaatgcawataataaatgcaactggaattttcagaaagaacacacacacatacaacacacacaaacacatgcacacacatgtttctttatttggtctcctggattcctgagtctccatccatctatcattcctttggttgacatgggacttaatgtttcatttcatgaccagttcaaagaagagctgggcagagggattaacaacgctcaaaaggtaatcaaatagctgccaatgtattgttatgttatcatggatggatattc

SEQ ID NO: 658900 - DNA, 649 bp, Homo sapiens
atataattgctatatcattgaaatgctgaatatgttttttcaagctacccatctctctgtgccccatcaaaactcctatgttgaaatcgaatccgcagtgtgttggtgctaagaggtagaacatttgggagttgactaggycatgaggttccgccccataaatgggattaagaccctcataaaagaggtgagggagccagctagcctttttgccatgtgaggatacagcaaaaaggacccacaccatctatgggtcaaaaccctcaccagatatcaagtctgctggtgctatgatcttggacttctcagcctctagtactgtaagaaataaatttgtcttatagtctatggttttacagtattgttttttattttctatgatattatgttgtagcagtccaagtggattaagacagaaattggtaccaagaagtggggagatactgtaacaaatacctaaaaatatggaagcaactttggaactgactaatggataaaggctggaagagatttttatgtacattaccaggaaaatagttgtaaggatgattttgttgagggcttagaagaagaggagagctgtagagaaagcctcaatcttcttagagattacctgtgtgactgtgatcagaatgttgttagaaatatg

SEQ ID NO: 658901 - DNA, 638 bp, Homo sapiens
ttaccttaaaaagaatagcaagaaatgaaaatggttttaagtaccaataaagtggaaagatgtctttaaatcctgttgatcagcttttcaggtatatttcctcaattagaacaggaaaataatcttaattaattggaagggctcaatgtaggaaatgttttattaaccacaattagagcaaacacaaagggagaaaggaatttgagtttgtatattatgtgtgagaagaaaaagaaagaattagattcatataagagtttggggaaaaaagaaaactgcaggtgagtatttgttcaaactgcgtaaatrtcttcaaggttacaaaattaatgagggaagggaattgctcagtcttggatgatgagagcaagaagccacggctcaaagctatgggaggaaagctcagactagctgttaggaaacacagtgagttagaaagaacatttagtggtgaaacatatacacagaaaagtgactgtgaagcaacaccagcagaatcattacataatcagtgaggaaagattatgtaaaacagagttggcattagctggtcatcttgcataacaaggggcttctgatcagcttttgctggagtgagttttcaattccttttttgccttttgattcttaaggacata

SEQ ID NO: 658902 - DNA, 482 bp, Homo sapiens
gaggaggctgggtcatgcagccagagtccttccttttcacagcctcagaagtcacttttcttcctctggggaggcatgagtcagggagaatgaaagaaaagccaacattctctttgaaatccttcagaaaggaagaacatttctattttackcacaaaggaagggatgcaggaaagggagaaaaacttcctcctacactcccttttcaaggctttactccgaagtgatctctcttatcctgttcactcgctccctgctcacttattcctgccagcattcacccagcgcaaacacttcacatcacttcaagtctgtttctctgtaaggccaccattcccttcctctaatttcttctctccttttcagcacacagcttcatctccgattccctgcacaaccctctccaaaatactgctttgtactcaccgctttcacaaaacaactcaggttttcgtaacttcatgtagtcaatttcaaaaggt

SEQ ID NO: 658903 - DNA, 621 bp, Homo sapiens
agctcactgcaacctccaccgcccaggctcaagtgattctcctgcctcagtctccatagtagctgagattatgggcatgcaccaccacatccggccattttttgtacttttagtagagacagggtttcaccatgttggccatgctggtctggaattactggcctcaggtgatcctccygcctcagcctcccaaaatgctgggattacaggcattagccactgtgcctggcctcattattttttctatccagcttctgagcagtcctggattgaagttggttgatattcttagtttttccttttcaaaatcaagaacaatcccctaatattgatttctttaaattgttaaaagtataattttttaaaacaaagtcatgactctcaggcaaatataaatgaacacatcaaagattttatttaaattttgaggaaactagtcagatgttaaaaaccagttcaaaggaattgcaaagggaagtcatctctaggcaatcacaaatgctgaaacgtatctgacaataaatgcaaagtggtttttgttgaggaggaaagaatcactcacatttctaaaacatagacaaaatctatttgtgtctctacagacacaaataatttgcatta

SEQ ID NO: 658904 - DNA, 623 bp, Homo sapiens
tgatggaattagtagaaaaggtattaaagcagttaatgtaacaatattctgtgtgttccagaaggtagaagaaagcatgagaatgtcaaggagagattgaagatacaagaaaacacaaggcagacttttagagaggaataaaacaatgtctgacagttagaaaacacacatgcactagatgggaataacagataaataggtagtgcagaagaaaaatgtaaactcaagacactgaaagaaatactgaaaataacatgaacagaacatcagagagatatggaacaatgttgagtggctgaatatttgtgtcactggagtacttacaaaggagtttggctgaaaaaacatttgaagaaataacagctatttttcccccaatttttatgaaaaccatataccatagacccaagaagaacaataagcctcaaaccaattaactagacaaaaaaatacactaaggtatataataatcaacttggtggaaaccagataaagagatcatcttaaaatgagcaggtgtggggaagattacgtacaaatgaacaccagcatgartgatctcagagtatctttaaagcactgaaagaaaaaaaaaaacaccctgtcaacccagaattatatat

SEQ ID NO: 658905 - DNA, 594 bp, Homo sapiens
ctgtaatcccagctacttgggagactgaggcaggagaatcacttgaacctgcgaggcagaggttgcagtgagccaagattgcaccactgcactccagcctggatgacagagtgagactccgtctcaaaaaacaaacaaacaaacaaccatgtttttctcttcttaaaaagcatgtatacttagatataatacagaatgttttacctactgtaatatttaagtaaatttaaatacatcacatatatacagcaagttttacaggtatacaggtacatccatatagatgtatttaccctgctcttgtttcacacattattataattttgatatctatgttaacatatacaaatctaatttatttattaaacgaccatacaataatattcygaacaatgaatatattaaaattatctattgatctattattaaactttccccctagttctttgcattaccagcaatcccattatgaatgtttctgtgcacatctcctcaaatacaagtgaaaaaacttcccttgtagacatggcttgaagggaaattaaactgtgtgaaggcatgcagattttaagctttacagattattgacaaatt

SEQ ID NO: 658906 - DNA, 452 bp, Homo sapiens
aactcatttaatatttggcaatgctaacgagtatatataatgttaaatttggaaatatgttaagtgtcatgttgggaataaccacgagaatatgaaacatatatccagtgatatggtttggctctgtgtcgccacccacatctcatgtcgaattgtaattcccaatgttgggggagggacctgagggaaggtgattggatcatgggggtggatttccccactgctcatgatagtgagtgagttctcacaagatctggttgytcaaaagtgtgtagcacatccccctttgctctgtctctcctgttgccatgtgaagatgggcttgcttcccctttgccttccgccatgattataagtttcctgaggcctacctagtcatgcctcctacacagcctgtggaactcgggagtcagttaaacctcttttgctttataaactatccagtctcaggt

SEQ ID NO: 658907 - DNA, 611 bp, Homo sapiens
gagttagaaaaactattttaaaattcatatgagacccaaaaaaaaagagtctgatgagtgaaagtaatcctaagcaaaaaagaacaacactggaggcatcayactacctgacttcaaactatatgacaaagctgcagaaaccaaaacaacatgggactggtacaaaagcagacacatggaccatcggaacagaatctctattccagagataaagattgctgtaacacagaaataaagctgcacacctataaccatctgctctttgacaaagttgacaaaaataaacaatggggaaaagactccctgttcaataaatggtgctgagatagctggctagccatatgaagaaggatgaaactgaatgcctacctttcaccatatacaaaaaactaactcaagatggattaaagatttcaatgtaagacctcaaactataagaattctagaagaaaatctaggaaacatcatgttcgacattggccttgggaaataatgcatgactaagtcctcaaaagcaactgcaacaaaaacaaaaattgacaagtgcagccgaattaaactaaagagcttctgcagagaaaaaaaaaaaactattaacagagtaaacagca

SEQ ID NO: 658908 - DNA, 611 bp, Homo sapiens
gagttagaaaaactattttaaaattcatatgagacccaaaaaaaaagagtctgatgagtgaaagtaatcctaagcaaaaaagaacaacactggaggcatcacactacctgacttcaaactatatgacaaagctgcagaaaccaaaacaacatgggactggtacaaaagcagacacatggaccatcggaacagaatctctattccagagataaagattgctgtaacasagaaataaagctgcacacctataaccatctgctctttgacaaagttgacaaaaataaacaatggggaaaagactccctgttcaataaatggtgctgagatagctggctagccatatgaagaaggatgaaactgaatgcctacctttcaccatatacaaaaaactaactcaagatggattaaagatttcaatgtaagacctcaaactataagaattctagaagaaaatctaggaaacatcatgttcgacattggccttgggaaataatgcatgactaagtcctcaaaagcaactgcaacaaaaacaaaaattgacaagtgcagccgaattaaactaaagagcttctgcagagaaaaaaaaaaaactattaacagagtaaacagca

SEQ ID NO: 658909 - DNA, 611 bp, Homo sapiens
gagttagaaaaactattttaaaattcatatgagacccaaaaaaaaagagtctgatgagtgaaagtaatcctaagcaaaaaagaacaacactggaggcatcacactacctgacttcaaactatatgacaaagctgcagaaaccaaaacaacatgggactggtacaaaagcagacacatggaccatcggaacagaatctctattccagagataaagattgctgtaacacagaaataaagctgcacacctataaccatctgctctttgacaaagttgacaaaaataaacaatggggaaaagactccctgttcaataaatggtgctgagatagctggctagccatatgaagaaggatgaaactgaatgcctacctttcaccatatacaaaaaactaactcaagatggattaaagatttcaatrtaagacctcaaactataagaattctagaagaaaatctaggaaacatcatgttcgacattggccttgggaaataatgcatgactaagtcctcaaaagcaactgcaacaaaaacaaaaattgacaagtgcagccgaattaaactaaagagcttctgcagagaaaaaaaaaaaactattaacagagtaaacagca

SEQ ID NO: 658910 - DNA, 615 bp, Homo sapiens
gtggtaggctcagacagaagggattggtggaagaagtctctttgaaaatattattataatctaagaaatctttaacctattgctccccaatactgttggtcactggggcttgacttttccccttaaggctccatctccatccctggctttccctcttccttctcagcatctagtcttgtaatgtagaatttaaacacaggaaccagggatgaccccacaccagggcatagcctactgcattcagcatgcaaacattaatcacaggtataaggccccttgcacagacatgctttggagaagtgtgtctaggacttcttggatttgcccatggtggttaccagacacccaaartagatccaaaaattttctggaactcctgaacatgtgtattcaaggatgaataagcaacttattgcctctatttttgctgttttatagagaaaaaaattaaggccctggaaactgaagtgcttttctcaacagtggggtaaatgtcagagtcaacactttgttttaatatcctggctttccctaatacatcccaccctggagttctgttgtgccgttcctttgtgtgacttcctaaagcctgaaaaaaggtgataccatatccaa

SEQ ID NO: 658911 - DNA, 615 bp, Homo sapiens
gtggtaggctcagacagaagggattggtggaagaagtctctttgaaaatattattataatctaagaaatctttaacctattgctccccaatactgttggtcactggggcttgacttttccccttaaggctccatctccatccctggctttccctcttccttctcagcatctagtcttgtaatgtagaatttaaacacaggaaccagggatgaccccacaccagggcatagcctactgcattcagcatgcaaacattaatcacaggtataaggccccttgcacagacatgctttggagaagtgtgtctaggacttcttggatttgcccatggtggttaccagacacccaaaatagatccaaaaattttctggaactcctgaacatgtgtattcaaggatgaataagcmacttattgcctctatttttgctgttttatagagaaaaaaattaaggccctggaaactgaagtgcttttctcaacagtggggtaaatgtcagagtcaacactttgttttaatatcctggctttccctaatacatcccaccctggagttctgttgtgccgttcctttgtgtgacttcctaaagcctgaaaaaaggtgataccatatccaa

SEQ ID NO: 658912 - DNA, 615 bp, Homo sapiens
gtggtaggctcagacagaagggattggtggaagaagtctctttgaaaatattattataatctaagaaatctttaacctattgctccccaatactgttggtcactggggcttgacttttccccttaaggctccatctccatccctggctttccctcttccttctcagcatctagtcttgtaatgtagaatttaaacacaggaaccagggatgaccccacaccagggcatagcctactgcattcagcatgcaaacattaatcacaggtataaggccccttgcacagacatgctttggagaagtgtgtctaggacttcttggatttgcccatggtggttaccagacacccaaaatagatccaaaaattttctggaactcctgaacatgtgtattcaaggatgaataagcaacttattgcctctatttttgctgttttatagagaaaaaaattaaggccctggaaactgaagtgcttttctcaacagtggggtaaatgtcagagtcaacrctttgttttaatatcctggctttccctaatacatcccaccctggagttctgttgtgccgttcctttgtgtgacttcctaaagcctgaaaaaaggtgataccatatccaa

SEQ ID NO: 658913 - DNA, 536 bp, Homo sapiens
gtttttttatttacatccccctgatgattagagacggtaagaattttttcatatatttgttggccatttgtatctgttcttctgggaaatgtctactcagatctttgcccttttttttttttttttttttgagatggagtctcgctttgtcacccaggctggagtgcagtggcgtgatcttggctcactgcaagctccacctcccaggttcatgccattctcctgcctcagcctcccaagtagctgggactacaggcacccgccaccatgcccagctaattttttgtattttttgtatttttttttttttttagtggagacagggtttcaccgtgttagccagatctttgcccatttaaaaaaaaattcaacttttattttagattcaggagatgcatgtgcaggtttttacattggcacattgtgtgatgctgaggagtatgaatgatcttgtaacccagatagaaaacataatacccaatagayagtttttcaggcttttgtccccaccttcccttccccctctagtagtcccc

SEQ ID NO: 658914 - DNA, 552 bp, Homo sapiens
gaattccaacttcatatttctaggagaaaaaaatttgtttggctcagcttgggtgatatattcattgctgaccccaatcaataatgaggttctctccaaaaaatctctttcagagaccagcttctttagatgtggggttagttyttaggagagagagaaagagagacagaactatgctagcaagtatcttacctctctgagcctccttttcttcatctgtaaaatggagataacgctaccaaacccaaagattattttgaggactaaataagacaatgtatacaaagtctaacatagtaccaggcaaaaaggatatttaataaacaatgaatgaatggatgtatataaactaacagtatatcactccatttatcagagactgcaagctcaagataaagctggataagtaggcaaagttctgatatgaaggctactgggtttcaatgttatacaactgcattgctcatgctgcagtcctgaaaacctgaggatgttatgcattaaacaataaaaatattaggaatttaaaccctaacatagatttgcaggctt

SEQ ID NO: 658915 - DNA, 594 bp, Homo sapiens
tttattcgattgaaacattttacagaatatttttcactcaaagtcttaaaaattactttggagaatttccaacatataaaaaggtagagcrcatagtaaaccaccctaatcccatcatccaggttcaacaattttcagtgcatgaagttaaataaatttaaataaagtttaacagctggggtttgacaaatctctgtgactatatagttcttacattactgtagacaggagaaatagattatgcatggggttgtaaaattgaggcaaatgctacccaaagaaactccaagacttgctgaaggttgcaaaattagtttgtgggaaacctggactagaaactaagtctcttgactcttaatttaattcttcttccatgttgctcttttgtcttcttcagattaattaaagacagtcagaatactttaagcagctactgtgcttatcactttttaggaaaaaacaagtgctacctttcatgaggagcttagagatacttcttaagtgataaaatttacaaaacagaaataattagaaagtggaaaagtagagcattgttaagacagtatttgtattagtccgttctcacactgctat

SEQ ID NO: 658916 - DNA, 596 bp, Homo sapiens
atcagagaggatggagaccaaagagcccctgccttcgtagagtgtgcattctgggaaaggggaggggaacaacaacaacaaaatggagataagtgaactgataaagaagctaaggcttggaaaaattttaagtgatcctgcccagggacaaaaagctaaaaagtgatagcatctccagctatgcttttttactcaaaatcattttcctcggcactccacgctgtttaaacaaagtgagtatcagattagctcattatgttgtgtattaacagttctggttgtgaccaagaaagatggctgagacctttggcaaaaatgagatccatgtagcattcatgcctttgggatactttgaattacctttccctgttgaatagagaattgatgttcaatacacagtctaaattggacttttatccttgtttgcaaagctcatgtaaaggcatgattgtaagcacagatgtgcagggtcttaggaataattctttttatatagctctgtttatagygatataataaatggtcctcttaaagctacgctggcttgcattgttcattatgtggccacaaagctaatttatgataggtatataact

SEQ ID NO: 658917 - DNA, 500 bp, Homo sapiens
tctgttccatttatctatttgtctgtctcggtgccaacaccttactttgttgattactgctgcttaataataaatcttaggctgagatactgtaacttcttcaacttggttttttwttcaaagttgtttggttattctagatcctttgtattcacattccatattttcagttctatgaatttcagaatcaagttgaaaagtagttctccttcaatttattggaagagcttttttttttttttctcttttgagacagagtctcactctgtcacccaggctggagtgcagtggctcgatctcagctcactgcaacctacacctcctgggttcaagcaattctcctgcctcagcctcctgagtagctggcactacaggtgcatgcctccatgcctggctaattttttgtattttagtagagatggggtttcaccatgttacccaggctgctctcaaactcctgggctcaggcaatcctcctgcctcggcctccggagtgctag

SEQ ID NO: 658918 - DNA, 551 bp, Homo sapiens
tacccaacttgcccacagcttgcacgggacagagccagaattcaaacccagggggctaggctccagagtccagggccgttgctgcagcagttctgctggaaaaaaagagagatggacatgatgaagcagagaagcttttaatgaattgatgctgcttatcaaactgaaccccctgaccaattccctctgccttaggggagtggtgagtgggctgaggagccccaaggagcytgaggaaatagcctggctgtctctgtgggtctggtaagatggataattgctacctctgcaaatggaccacaggtagaggccaggctctgaaccctcccagcgaggaggatgcacagggtcagccgggaatttcagtgactcagaaaaaaacagctaggccagcagcacagccttcttctacgttcccaagggaggccactaggtgaagtgaacctcctcagcagcaagagagaatgaaggtagccttaaggaggatctcccagggaggactcatcgcgggagaaggttcctgaggaatggggagaagagtaaacttgaca

SEQ ID NO: 658919 - DNA, 572 bp, Homo sapiens
ctgtaactgtaaacaaggtttgggacgttgttgggatctgtggttatttcacacacagtggtggaggcaaggctgatggagaaagtgacctggaaatagtacatgtgttaggaattatggcttttcattggctgaatttggttaaagaaggaagttaaactctctcagtttcctaggacaaaaatccttctcagactcacagagccaggcagtggaggtaagagaatacgttatctctagccagcggagctgtatttgatgagtgagcaaaggtttattcatgttgctataatttggatgcttgtgccctgaaaactcatgttgaaatttgatccccagtgttggaggtagggcctaattggaggtgtttgggtaaagggggcagatagcgcatgaatgccttggtgctgtcctcttggtaatgagtgaattcttgctttattagtttccatgagagctggttgttagaaagagcctggcacctccccatctttctctctctctgcttgcttctttctctctcactgtgtgatctctgtacacgctgamtccccttcccctcctgccatgag

SEQ ID NO: 658920 - DNA, 584 bp, Homo sapiens
tgaccattgtctcgccatgaccaaccaaacttgggtaattaagtaacttttaagaataattttatttcatagggaagaaaagcagtctctgaagcctccattggttccaaacattttagcayttgtcaggttaaatcaaaatatgtgtcactctctttcagtctacatttaatcattatattacattaatcagtctacatttaataaatataatttaaaatgtaaattcctgattctatttctcaggaacctttttcatttctttctgggactgaacataaatgaaattatgaaattaattatttgaatgcagcctcagaagaaaagcctccttgtaatctggctccaggtattttataatactccatatatttggataattgtctccaggaaaaaacccaggttttggaatggtaaagttctgagactaaatctaacacttaatagttttctgaattgctgaaccaatcccagtctcaggtccataatctgcaaacaacacatcagccctgctatgttattcaaaagattaaatcagaagagcctaatgaagtgcttaacacaatgtgtggcacaaaacctct

SEQ ID NO: 658921 - DNA, 584 bp, Homo sapiens
tgaccattgtctcgccatgaccaaccaaacttgggtaattaagtaacttttaagaataattttatttcatagggaagaaaagcagtctctgaagcctccattggttccaaacattttagcatttgtcaggttaaatcaaaatatgtgtcactctctttcagtctacatttaatcattatattacattaatcagtctacatttaataaatataatttaaaatgtaaattcctgattctatttctcaggaacctttttcatttctttctgggactgaacataaatgaaattatgaaattaattatttgaatgcagcctcagaagaaaagcctccttgtaatctggctccaggtattttataatactccatatatttggataattgtytccaggaaaaaacccaggttttggaatggtaaagttctgagactaaatctaacacttaatagttttctgaattgctgaaccaatcccagtctcaggtccataatctgcaaacaacacatcagccctgctatgttattcaaaagattaaatcagaagagcctaatgaagtgcttaacacaatgtgtggcacaaaacctct

SEQ ID NO: 658922 - DNA, 610 bp, Homo sapiens
gggtttctccatgttggtcactctggtctcgaactcccgacctcaattgatcccctcaccttggcctcccaaaatgctgggattacaggcatgggccactgtgcctggctgagcttcatctcttttcatgtttattgacatccagtttattttgtctgataaaattgttttttatgcatgattttgttttccatttgtatggtatatctctttctgtttcttccttttcagtctatacttacaagtgaagtgagtttcttgtaggcagcatatttgggtctttttttaaaatcagtttagctagtctatatcttttagttggaaaacttaaattatttgcattcaaggttgttagtgataggtgaaaakttacttctgtcctttcactagttggtttctgaagtgttttgtgtatgttttgttgctttatctcttaatgtttatttttctgatttgggtagtgagcaaaatttataaagttcgattcctttctctttcctatttgtgtatctaacagtgagttttatactttctgtgtgatttatgacggaaaatatcatcctttcaattccagatgcagattttcctttggcatttttctgtagtgcca

SEQ ID NO: 658923 - DNA, 572 bp, Homo sapiens
tttttatttctaaaaatgcacattggtttatgtcactgctgactttaaatcactcaggggcttacctatattgtcaatatacagctcaaagctcttagcatgactgtcaagactttcaggttttgacccttactatttctctgatctcaaattttaacatctccaaatgtacctgcattctactcagatatgctgttcatatgtttgtgtctttcaacttgccctctatctgcaatgtttttggccaatgtcttctggccagtagctaccatctttcaagactcagctcaaacatcacctcctccaggaagcctttcctctgacccattctcaggataaggtggcagccstttttatgagctaccaaccatcatgtcctcacccatattatgaaacatttgcctgacattgtaatcattatttgtcttgatcttcctctcccactagactatgagcaacttggaatcatactccattcatctatctgtctgcagagcttagctccatgcttggcacaggctttattgaatacataagcaaaataacaacgaaaagaaggagaagtgtcacta

SEQ ID NO: 658924 - DNA, 581 bp, Homo sapiens
cttgaggagataacatggggtggcaacaagctgcctaaaaaagtaaatgggtggtttataatgaagctcttgaggcagataagaccagggagagagggtaccagacaacatgtgtgtgcgtgtgtgtgtgtgtgtgtatcagagagagagatttagagaccaggattcactagaggacacggtgggggtggggtgggggtgggggtactgttttttctggtaaataatctaaaaccttgttgtccatgctgagacctcgacaagaaaacaggttccagtatgtgatatgattcgaaacccaaagaattaacctgagtatcagaaaccaggagtccttctaggagttttgttccctgcctcagggaaacactttgtttctgattgacaatagaagatataaaggaacttttggaaaacccaggataacatcaccttgttctggaaattactgaagaggaaccaaagtgtacggagccatgtcgtrcttatttgatttaatgtgattatttctcctgtcctttcttataggatactcactttgtttccaaatgccatagctcgaaaattactgctgatgttga

SEQ ID NO: 658925 - DNA, 587 bp, Homo sapiens
tggttcatatgagtaaagggcaaacaaaatatattatttttcacttataaaaataaattttaataaaagtttcctgtctattagaatttagagaaatagtcactagatttggtagaagtagtataaattggtacagcctctggagggtacctgagcaataagtatcaaaagttatcattattatatcctttacacagtttyctctccaaaataccttttaatcctacagatatattcacaataatttacagtaacattgtttatattagtaaaatattgaaaacaatctaaatgtcaccaatgggtgggggaaagagtctgattaaacagagtatgaatgcaactgttcaataaaatataatacaaacaataaaaagagtgaggcttctgtcttcatactgatggagacaaatcacccccaaacatgtgaataatatgtatgaataagacatacattgtcttttgttgctgggggaataaagtatatgaacataatatgttttcgaatgcaaggcaagtcttgtaaatctggaagaataacatgaacttgtaacagtggtgatccccagggaaggaaactgaagatc

SEQ ID NO: 658926 - DNA, 569 bp, Homo sapiens
gtttatcttttaaaacacaaacttttccttttacgttttgtactgttttcttagtttcaattaattatttctcctctgatctttatgacttattttcttctactaactttgggttcattttactcttgcttagattattgattcaaagtcttttactattttaatgtagatatttattgatataaacttccctctttgtactgcttttgctatgtcctatagatttygtacattatgtttccattttcatttgtttcaatacatttttaaatttacttcttttgtattgactcaatggtcattcatgagcagattgttcaatttctgtgtattttatagttttcaaaatttcttttattgatttctagttttattcctttgtggtcagaaaagacaccagatactatttcaacattgttaaatgttttgagactcattttgtggcttaaaatattgtctacactgaagaatgttttacatcctcttaagaagaatgtgtattctgaagctgttggctgaaatgttccctagatatctattaggtcagtttggtctgtagtgcaaattta

SEQ ID NO: 658927 - DNA, 492 bp, Homo sapiens
gttctggctggtggtggctggaagcccaggcctgaagatcttcctggtgagaagatatgggaatggaaacccacgaaacactctggccacttttccatagggctgctgttttatgcttgggggctgctccrgtacctggtcacctcagatttcccagaacctggaggtgtcaccagtgaaggctgtgaaacagcaaagacagtggcttgtcccttcctctgagagctttgtcccagggaggtatgcagttttggtggcccaaagcagctgtaggaagtggctggagagcctagttgagaggttccacccagtgaggaggaacaggattaggaaccacttgaaaaagcagtctggccacgttttggtagaacagctgtgctgtgttgggggtctacttcagtcctcagtcgtctcagatacttcaaagcccaaaggctggagttgctaagtcattaaaacagcaaagatggtaacccacttctccctctgtga

SEQ ID NO: 658928 - DNA, 529 bp, Homo sapiens
tatagtcaggtcattctaagatatctttttttcatattttaacaaccaaagttgggatgtatgcttcagtcaatggcatcttggcattgtgtcatcgttcaattggaaccatattttctttttcatgaagtaacagggatcttacaatatatagcatcttaaatccaatgaaatatggtattaggcacttaactatgtgccaagaacccttctaagtgtcttacacrtattcctccaaacgtccaaagtaatcagtactactattatccccattttaaaaagtggaaatggtgacccagagagcttcaataattttctaaggtacacagctaacatgctggatgaggatgaagacttaccttctcttttagagaggcatatcaagccactatttttagcacctgctttttaattgacaattaatccttctccttataaagtaaactcatacaagattgttatctccaacaatatggtagcccagatactttaaatacttctccataagaacaattttaaaggatgaata

SEQ ID NO: 658929 - DNA, 574 bp, Homo sapiens
tggaatattttgtctggatgtaaatttttrtgtggatataatttttttttcaatggattgaatgtttgtatttccccactccccaacatttatatgttgaaatcgcactctcaatgtaatgtaatgacttcaggaggtaatttaggtcataagagtggattaatacccttataaaagacacaccagaagctctctagctctcgttccaccacgtgaagatacaagtcggcagcctgcaatgcagccaaggctcctcaccatgctgccatgctgatctcagacgttcagccttcagaactgtgagaaatcagtgtcgttatttataagccactaagtctatgttattttgttatagctaccagaactgactaagacagttttcaaacatttaggtaaaatcctagtagcatgattgctgaatcataaattaagactatatttaaatttagctctgtaagaagctgcccaattgtcttccaaagttgctattgttttccattcccatcagcaattaatgaaaattcttgttgcttcacatccttgtcagtatttggtgttgtctgtgttttggatt

SEQ ID NO: 658930 - DNA, 388 bp, Homo sapiens
cagattcataaagcaagttcttagagacttacaaagagacatagactctcacacaataatagtggtagacttcaatactccactgagagtattaaaacgatcattgaggcagaatattaacaaagataattcagatctgaactcaacactggtccaaatggatctgataaaactctacagaattttccaccccaaaacaacagaatatgcattcttctaatcactacatagcatatactctaaaattgaccacrtgatagaacatataacaatcctcagcaaatgcaaaagaactgaaatcatacaaaacacactctcagaatacagcacaatataaatagaagtaaagactataaaattgctcaaagccacaaaattctttggcaat

SEQ ID NO: 658931 - DNA, 596 bp, Homo sapiens
tgatgctttcctaactcctcatcaaygaggtgagtactccttgctcctactattccttatatatagttatttccttaattacatgatgctttagaaggcagtggtataaaagcttgagctacagaagaaaacaatgaagacttgaaatttttcagaataaaatattaaaaattggaagaacataaaggatcaaaatatattttaaaagatcatgggctatgtgaacagaaaaacctaggttctaatgctattcttctgttcacccactgtgaagcctggagcaagtgatttatcctctctaagccctaattccctcacttgcaacgtgagggtaataggagtccccacatcatgttttttgtgaagattaaatgagatgacttagctaaagcactcaacgcaacaactgacaaatattaagcactcagtgctgttattattaggtgagactgcaatcatccatagtagaagaatgaacaattgaaaggagttgcattgaagaacctcattgcttgacaggtatttggagggtaactgggtttaatgagggtgggaagttagcccaagaaaacattagaaggaaggtgacagaaccc

SEQ ID NO: 658932 - DNA, 599 bp, Homo sapiens
cacttctttgcttaagttaggcagaatgggtttctgttgtttacaaccaaaagcaagcaaagtatacaatgaaagcctaacctgtagtgctgagagrgcattatcgcagccaattataaggcttgcaagaacaagtagtgttcagatttatttttctattgttccattaacataggaaaacatctataaataaagctattcattcttgcaagacacaaaccctagctgtttcataggtcactattacatataaaagagaacccttcagacacaaacagaaattttgatataatacaatttatcaatttttttatttggttgcctctgcttttgatgtcgtatcaaaaagaaatcattgccaaatccaattcactaggcttttccttgttttattccaagagtgttgttgttttaggttttacgtttaagatccatttttagttaatgtctatatggtgtaaggtcacaaatataaatttaagatctaatgaaaagcatggcaactatcattaataacactgtattgtatccttgaaattagccctcatactacatcttaaatgatctcaccacaccaaaaaagtaactatgtgagatga

SEQ ID NO: 658933 - DNA, 599 bp, Homo sapiens
cacttctttgcttaagttaggcagaatgggtttctgttgtttacaaccaaaagcaagcaaagtatacaatgaaagcctaacctgtagtgctgagagggcattatcgcagccaattataaggcttgcaagaacaagtagtgttcagatttatttttctattgttccattaacataggaaaacatctataartaaagctattcattcttgcaagacacaaaccctagctgtttcataggtcactattacatataaaagagaacccttcagacacaaacagaaattttgatataatacaatttatcaatttttttatttggttgcctctgcttttgatgtcgtatcaaaaagaaatcattgccaaatccaattcactaggcttttccttgttttattccaagagtgttgttgttttaggttttacgtttaagatccatttttagttaatgtctatatggtgtaaggtcacaaatataaatttaagatctaatgaaaagcatggcaactatcattaataacactgtattgtatccttgaaattagccctcatactacatcttaaatgatctcaccacaccaaaaaagtaactatgtgagatga

SEQ ID NO: 658934 - DNA, 535 bp, Homo sapiens
gatctgatgctgctgttttggtctcatggatacaggtagaagacacgaaactcctggatcatagaccaagaactttataactcaaggcacagcaagcagcaagagtatcaattcattgcattagttctccttgctcccaagtccaatggggataatggggaaggtccaatttttgacttttcctcagaccatagggaatctgctaccaggccataagcctgaactgagggaggagtgtcagagcaacagatgtaagtgtcataggattctgggatacctattcatataaactaccatggtctccagacctgctcaggtatgatccctgatatgccattttcatcatgtaatggattactatgtatgacttgatgagtctgacaacattcttgatgggcaactgcagttacaaagctgcttaatatcccatggtctctattagtctctgtgtatagcaacagcataacaggaactgcccattgaacagtgaccagtttttrctgcagaaggtgtgtacttgctctagaacttagat

SEQ ID NO: 658935 - DNA, 586 bp, Homo sapiens
gggactgaggtggaagaatcttttgagcctgggaggccagtgttgtagtgagtcaaggtaacaccacaaacaaacaaaacaacaacaaccacaacaacaacaactaatatgatatgtratttactcctcacaagtaatttgttcggaagtaacaggccaaaatatcaatatgcagagatatagaatgtcaaaggccacgcagagaataaatagtggaacgaaaatgaaaacttaggtctgtctgactccacttaatgatactttttcttaaccccttttattactttaccatcatggactacagagtatggaaaattgtatatgtcatgcatagaaactatttattaaataatgacttatttttccatttattaataaaatatgataattctagctaagatttatgatcagcctaagatagccagcttttccacaatgatttggcataataattattaaaaaactcaatgtcttattcattcagctttatatcaggattacatttctatgatgcttagaaaattacaaagtcttaaaaatgagtgtttccctgtaataccagcactttgggaggccgaggcaggcg

SEQ ID NO: 658936 - DNA, 587 bp, Homo sapiens
tggttcatatgagtaaagggcaaacaaaatatattatttttcacttataaaaataaattttaataaaagtttcctgtctattagaatttagagaaatagtcactagatttggtagaagtagtataaattggtacagcctctggagggtacctgagcaataagtatcaaaagttatcattattawatcctttacacagtttcctctccaaaataccttttaatcctacagatatattcacaataatttacagtaacattgtttatattagtaaaatattgaaaacaatctaaatgtcaccaatgggtgggggaaagagtctgattaaacagagtatgaatgcaactgttcaataaaatataatacaaacaataaaaagagtgaggcttctgtcttcatactgatggagacaaatcacccccaaacatgtgaataatatgtatgaataagacatacattgtcttttgttgctgggggaataaagtatatgaacataatatgttttcgaatgcaaggcaagtcttgtaaatctggaagaataacatgaacttgtaacagtggtgatccccagggaaggaaactgaagatc

SEQ ID NO: 658937 - DNA, 580 bp, Homo sapiens
caatatttgaagtgtctggtctgggatttccaagtagttgggcagaatcaattgagttagaatccccaaggctcttttatgcagggatggggtagggggatcagatccctctcactaatacctgaggctaacttttcacttatgcagattagtttaaattttttgtttgtttaaagacagggtctcactttgttgcccaggcaagagtgcagtggcatgatcatagctcactgtagcctccgactcctggcctcaagttatcctcccacctcagcctcctaagtagctggggctacaggtgagtgccactatgcacagctaagtttctaattttttatagagacagggtctcactatgttgtccaggcttttcttgaactcctggcctcaagtagtccccttaccttgtcattaggcttttaaaagtcaccttcctttcacttagtgtgagtgagcttaaaatccagtcctggcagagtttctgataaaasgaggagactgctgggaaataggggaagaagaatcaacgtatttgaactgggatagagacatgaaagtagaccaggaaaacagagcacct

SEQ ID NO: 658938 - DNA, 564 bp, Homo sapiens
ataggtagcatattgttggatcttgactttttattcaatctgaccatctctgccctataattggcagattttaatgatttacatttaatgtgattattggttaaatttataacattttgctattagtttcatatttttctaatctgttttttggtccattcctctttttgccttctgttagaataattgagtattttttatgatcttatcttctcttttcttggcttactaggtgaacagttttgttcttataatggttgctttagggtttattcaatamaacttgtctgtgttccattaatattacgcagctttctatatagtaaaataaacttaaaacagtttatttcaattttccctttttaaatagacctttgtgctgtatttgacaggcattttacttctacatattctatagcccatgattttttttctacttttattttaggtccagggggtaaattttgtgtcactgagactttgtgtgcaaatgatcccatcaccaaggtagtgatcatagtacctagtatgaagctttccaacccgtgtccctttctcacctcc

SEQ ID NO: 658939 - DNA, 524 bp, Homo sapiens
tcctttgaatccttgccgttgattccttttctagtcctagtkactttcctcacatatatgcactgagtagtattcaatcgaagtctccaaaggaactctctgcaaatccccagagctctctgtctttgcaggcctctcttatctgtgaagcagtttcgtgcctggttgttgtctctgtaagttaaagccaccttggaatgtacaagttctcaactttctctggtcacctcagggagactgccaggcactgtttggatttccctttcctgcaaaacaacgtaaaaactctccagctagtaaattggaaaacataagcctcctctcatctgtttctgttgtctcattctcttgcatagcctctttccaaatgtctgaaaaccattatttcatatattttgcttgtttgcttagtttttttaaggtaacaaggtaaatcatttcccttatacttggtcatggcctaaaataaaagctatgaagtactttatggatactaatattctaaggaacataatatattgaaa

SEQ ID NO: 658940 - DNA, 621 bp, Homo sapiens
aagcttacataaactagctttcaatagagtctattttcctccaattgtctcacgtgccttttccctgggtagtcatgcttcatacttttagaagctcagatcccaacagctggagataaaactcccagtgtaatggaagaaaacatgttgatagttttaattggtcccyaaagtgaaacccaaggaatgatttattggttgatggttttgaggcttccaacttagcagagctgggaaacatatgggaaagataaacacgctagaaatttgtggctatttgttagaaagttaattttagttcattcagtttatgataatcgaaaaatctctttaaattttatttattattattgaagttaatgatgcatctacttacctgcaggcatgaacacctgcatcttagaccatgctgtggttttctaccagtcttgaatcctccaaaggtcctaaacctattgacccaaatagccaaaatgtctattcccaaccatacaacttcattattcaagtgggaaatatctggtgaggctgaggagctctgtaagcactgagaggctggccatcaaagacacatgagaacttccaatactgtatacccacattcatcaacaattgttgcca

SEQ ID NO: 658941 - DNA, 582 bp, Homo sapiens
aaccattctaacagatgtaagatgatctgtcattgtggttttaatttgcatttcccttgtaattagtgacgtcaagcatttttccatatatgtgttggccatttgtatgtttttttgataaatgtcaaattcaagaccctagaaatatttatttagttcaggcttttcatgatttagagaaggaacatgataactgagaaatcaagggacttaacaaaaattatggaaaatcgtaactcctaatttcagtcatttaaaccaagtccactagtcaaacctatgaaagacgtgtgtgtatatatatatataaaatatatttatatgtaatatatatacagtacgcagtgaaatagaatatcaatatgttatagatcacaaatgtataacaaatataatrtagaattataatatgtaggctgggcacagtggctcatgcctgttatcccagcactttgggaggccaaggcgggtggatcacctgaggtcaggagttcaagaccagcctggccaacatggtgaaaccctgtctcaactaaaaatacaaaaaaaattagctgggtgtgtggcaggcacccgtaatcc

SEQ ID NO: 658942 - DNA, 582 bp, Homo sapiens
aaccattctaacagatgtaagatgatctgtcattgtggttttaatttgcatttcccttgtaattagtgacgtcaagcatttttccatatatgtgttggccatttgtatgtttttttgataaatgtcaaattcaagaccctagaaatatttatttagttcaggcttttcatgatttagagaaggaacatgataactgagaaatcaagggacttaacaaaaattatggaaaatcgtaactcctaatttcagtcatttaaaccaagtccactagtcaaacctatgaaagacgtgtgtgtatatatatatataaaatatatttatatgtaatatatatacagtacgcagtgaaatagaatatcaatatgttatagatcacaaatgtataacaaatataatatagaattataatatgtaggctgggcacagtggctcaygcctgttatcccagcactttgggaggccaaggcgggtggatcacctgaggtcaggagttcaagaccagcctggccaacatggtgaaaccctgtctcaactaaaaatacaaaaaaaattagctgggtgtgtggcaggcacccgtaatcc

SEQ ID NO: 658943 - DNA, 582 bp, Homo sapiens
aaccattctaacagatgtaagatgatctgtcattgtggttttaatttgcatttcccttgtaattagtgacgtcaagcatttttccatatatgtgttggccatttgtatgtttttttgataaatgtcaaattcaagaccctagaaatatttatttagttcaggcttttcatgatttagagaaggaacatgataactgagaaatcaagggacttaacaaaaattatggaaaatcgtaactcctaatttcagtcatttaaaccaagtccactagtcaaacctatgaaagacgtgtgtgtatatatatatataaaatatatttatatgtaatatatatacagtacgcagtgaaatagaatatcaatatgttatagatcacaaatgtataacaaatataatatagaattataatatgtaggctgggcacagtggctcatrcctgttatcccagcactttgggaggccaaggcgggtggatcacctgaggtcaggagttcaagaccagcctggccaacatggtgaaaccctgtctcaactaaaaatacaaaaaaaattagctgggtgtgtggcaggcacccgtaatcc

SEQ ID NO: 658944 - DNA, 553 bp, Homo sapiens
taacttctattaagctattgaaaccaccaaattttatccaaagcattttctctgttgaaattttatttatttattttatccttgacattttttctaatgattttgagttcagtttgaaattcaacaatttggtatgtcagaaagatgattttgtgccccgccccccacaaaaaaaaacctagctttttatatggggcaagataaggttggttatgctgcagaaacaaattagttcaataaagtcatagcttattcaaaatctgggaatcctttaactacagggccagtttttaccaatagcgatttagtcatcctggctgctcccatcctgtggctgtttggtctgaattaggtactccacaaytgctgcagcaaagcaagagaaatctacaataatcattcaatggctcctaaatatctgggccctaagtcacacacatcattatggttacagctcattggccaaaactggtcatactgtgctgccctactgcaaagggctaagaaatgtgaggctagggcaggcataatagatagtcagtgagtcaatata

SEQ ID NO: 658945 - DNA, 627 bp, Homo sapiens
tgcaatgagttaagactttgggggactgttgggaagctacaattgtgtcttgaaatgtgagaaagacatgagatttgtgagaggccaggggcggaataatatgatttggctctgtgtccccacccaaatctcaccttgaattgtaatccccataatccctatgtgtggagggagggacctggtgggaggtgattggattgtggaggcagtttcccccttgctattcttgtgataaaattcttacaagatctgatggtttaaaagtgtggcacttccactccccctttccttctgccttgtgaggaaggtacttgcttccccttaattgtaagtatgtataccttctgccataattgtaartttcctgaggcctccccagccatgcagaactgtgagtcaattaagcctcttttctttataaattactcagtctcagaaaattatttatagtagtgtgaaaacagataatacaatagctttcttttatcgtgcaccaccagatagtgaactcctaaagagcctcttatttgagaagcagaccctctggtcattgagaacaggaccttagaatcaggccatcacaagccaaggcccactctgccattttctagatatgggattagagta

SEQ ID NO: 658946 - DNA, 702 bp, Homo sapiens
gatgtagtcatgggcctcagctatggcccagggcccaatgaccaattctgtctctgtaagctaagtagcccctgctcacctgtcttgtactcaatgtcatatgataagttataagaaagggaggctgaaaaacaaggcccaggtgaccccacaagaccagccactctgtttagcacatgaagccttggtasagtcattaagggcaatccaaatatactcattttccacttaatttattcatttaattattcatcttttatttctcttcagttactgtatgttaagcagtgtgtgaattcctgaggatgcaatgatgacttctctacgttcagactttagtatgaaaggaaggtatataaacaggtcatctgtaatacaagaagaatcagtgctataatttatttcaacaaacataaaattgacatttactatgtgccaaacattatgctagacaactggataagctcagagtttagtagaaaatgtattataaaagaaagacatgttattatagtagaacattagagatacaccaacaaaagtatatgaagtgtaaaatagtctccatgagtaagtagtatctttatttagagataatcagagaaaacctgcggagaaggcgacattgcagtcaattttaagagatgcttagagattcgcgacatgaactgctgggagaaggctgtttcagcatatgaaaga

SEQ ID NO: 658947 - DNA, 617 bp, Homo sapiens
gaaatggttgcattttttgactcctccagtaaaagtggtgggaaacagcagtacaaaatatctaggatgttcttcctgtagatgcaggagaaaaagagggccaaaagatggagagagataaaattgtaattgtattttaaaacagtctytatagtggaaggttggaaattgaactgcagagaatgtcccttctccttggccacagaaatccttccaaaggccaaaagtgagcacttaatacaattgaaaacaatatgaatcctttctaggatgatttttttctgaaaccaaggaagacatccctttcttcttgtgttgttaagttaggttgacatagctggttctacaatgtcttctgctatatggagcaagcctgtctactgtaaaactgagtaaaacagtaatactagagcatggtaggggtgtcagaaagagagagagtgaggagaagaaacacacagagagagagataactgaagtagttcttgttgttctagtatctggatcctgttgagtgtgaagccagccccatctccgtccatgatgtccttcctgtttaaatcatttgagttgtgtctgtcacttgcagctaagggctttgactcacacagaaaggc

SEQ ID NO: 658948 - DNA, 621 bp, Homo sapiens
tgggcaaggacttcatgactaaaataccaaaagcaatgtcaacacaagctaaaattgacaaatgagatctaatagttttttttcttttggatatatacccagtaatagggttgttgaattaaatgatgcttctgttttgaattctttgagaaatttataaactgctttccacagtggctgaactaattgacatccccactgatggtgtatacgccctcccttttctgcacagccttgccagcatctattgttttttgactctttaataatgccattttgacaggtgtgagatgttatcgagttgtgattttgcatttctstgatgagtaatgatgtgatgcatttgtcatatgtttcttggccacttgcatgtcttcttttcagaagtgtctgttcatgtcctttgcccattttttaatggggttatttggtttttgcttgttgctttaagttccttatagattctggatattagagctcattgggtgcatagtttgtgaatattttctcccattctgtaggtcatctgtgtactctgttgatagtttcttttgctgtgcagaagctcttttgtttgactaggtccacttgtcaatttttggttttgttgcaattattttt

SEQ ID NO: 658949 - DNA, 558 bp, Homo sapiens
tttccaaggaggtcactgcaataatacaagtgatgtaccatgatgactcaaattagtcatcatagaaatagaaacggatgaatgtgaaagatgctaaggaatccatctacaccagtggttttcaaagtgtggtctctgaatcaacaggatcacttgagaatttgttggaaatttaaattctcagaccctatcccagaaaccctgaagctgaggccaagcaatttgtgttttaacaagcccacaaagtaattttgatgcatgctaaaatttgaaagccaccaagctatggaaattggtgattggatgtgcagattgaaggagagaaagagaaataaggataatgtccaatttctggcttgagcaactgggcagtaaagagaaaaataaaaatccagataaacaatgtgcaagtgctttgtaaattgggttctactcacagtccatwgatacctcggcagggaccagtttagtcttgagcaatctctgaacagcagagtctaccttcaaagctcatgaaaatgttagaggttttacactgtcctccaaatttgactttcc

SEQ ID NO: 658950 - DNA, 550 bp, Homo sapiens
ctattcacatgaagaagaaagacatgctgggcagacaaaggaagcatatgtcctttgcacagattatatatggaatcatctctatcattcaatttatggcattcaacaagaaagaaaaaycaaactggatcctgtgtatgcatacaaatctttaaataattaaaatgaaataaaatattcttaacatgggaactaaatgaccacaattttgtattccacatcctctcacacctacagaaatttcctaaatatttgtcaaaatgatggataaatttattaaattattagagatgtggcttataatttcataaaaccaagagttctttatacacattacatcatacttattacatatctaattttactggcaaaacaccaataattatatgttatacatgtagtatacattccatatgatatagattatttatatgatatagattacatcaatatctgcttatatgtcatataattatgtctattatatatattatatataatatatcaaatttaaaagtatacattgcaaatcaccaataatagagatttc

SEQ ID NO: 658951 - DNA, 550 bp, Homo sapiens
ctattcacatgaagaagaaagacatgctgggcagacaaaggaagcatatgtcctttgcacagattatatatggaatcatctctatcattcaatttatggcattcaacaagaaagaaaaaccaaactggatcctgtgtatgcatacaaatctttaaataattaaaatgaaataaaatattcttaacatgggaactaaatgaccacaattttgtattccacatcctctcacacctacagaaatttcctaaatatttgtcaaaatgatggataaatttattaaattattagagatgtggcttataatttcataaaaccaagagttctttatacacattacatcatacttattacatatctaattttactggcaaaacaccaataattatatgttatacatgtagtatacattccatatgatatagattatttatatgatatagattacatcaatatctgcttatatrtcatataattatgtctattatatatattatatataatatatcaaatttaaaagtatacattgcaaatcaccaataatagagatttc

SEQ ID NO: 658952 - DNA, 503 bp, Homo sapiens
cattcaccatatttggacttgtgttctcatttatcttttttaaaaatgtgttttgtcttcagctggattataagtatcttgaagtaagttactttcttttcatcctttttgaattatgaaccatagattctcttttgtttgctagagatttcagggcaaagccaccgatgatgtatgcccaagtttggcacagaacctgctgggtaactgccaaccactttctcagatttttaggcaatgagagtgcccaggrtacctgtctcaaatgttaactatagtaactagttagagaagaaagattaactacaaacatttattaaaatccctctatcagctaggacccatcctaggttctggaattaatcagtgaataagacagacacagatcctgccctcatggagcaaatgcactgaagatctttcactcttggaagactatgaacccaaccttgaaagctgagaggtaaaagaaatatgagtggccatttggaattctggacata

SEQ ID NO: 658953 - DNA, 497 bp, Homo sapiens
agaagaaaagatgggaaaagaactggaagtgagtgtctggctataataaattaggaagacaaacatctgaactattagaaaagtgattcaatgtaagccatgctgtatgtttgctcgatgcctaattcagtttgatggtctcagattgtcagatgaaaggcattatctgtaggcaaatgtggaactggatttctttttattcatatctaggtttcctgagatattaatttgttgctactaactttagcttgaaaaaaattttcaattcagtctttttagctttttatatgaaattaaataaaatagtgcatataaatctgatratacaaagcttagtctatactggaatgataataattatgatcactaataataattgagctcttattataagccagacactaagctcaacattcttattattgcattaaatgtggagttcagaaagtattaagttcctttatgtgcaattatgactcacttttgcatttagtttt

SEQ ID NO: 658954 - DNA, 608 bp, Homo sapiens
ccaggaatgagcatctgtggagccctaaacaacagcctttttccttccacttatatatgggtcccagccaagggtaagaacttctttgtttttattttgaccttcatagtttctgcttaatgtccctgattagacaccaagtcaagcttagggtattgccgtgaatgcctggctcttacaaggtttctgttccaaagctgaattctgctcccctatatttctaccyaattgtgagaaatccacatggacaaacctagtgtctattgctctttgcctcttccagatatcattcaccactgggatcttcatccctgtgtgccacagttcagatagacactggcaattgcctgaatcacctcaggtcttgaggctttttggagtttctgtgtccgagatgcccccgctcgtgtcctcctacattatggtgacactgatgctactgaaatgttttctcacctctctacaaaagatgtcttagtgtcccaacttgcatcttacctcaccttttctatgacaacactgattttccagactaggctgcaaatggactgatctctaagtacaaactatgggattagagtagaaagaaagagggtcatgagctgcat

SEQ ID NO: 658955 - DNA, 585 bp, Homo sapiens
tgctttgtatactttgaggctctattgtctgttacacatacattcgtggttgctacaatttcttgatatattatttctgttaccagtatatgattgctttttaaagtatacctttacagatattcagatgcaaaaatatattttgacaaatattaaaattgctgtcatggctgtcttttgcattattttgcctgatacacattcttacatttcactcttttcaaaatgcattcttttgaatatttccagtaaacagcatactgttttacttcatttwaaaaaaaaatccaatgtaattgtctttaatttttatttatttcaaataccattatttcttatctaaatattcaataatttccatgttacatacttcattttcattttcccttaccaccgtcttacttttcattggatatatcaaattttattttcctgctttttaagtatcatagtctatttgtagggttttggagtttacccctaacttgttgagagccatatttatgcatatttttcctatcaaactcacacagacacacacacccaccccacaactccctttctggacaaatacataagcaagtt

SEQ ID NO: 658956 - DNA, 568 bp, Homo sapiens
gttggtcttttgctggcagtttggacattgaacagtatcaaaagatagtctagccttgatcagagggaccccaaacttagagcccatgcatagccttcacctctgtcaccatggctactcagttcatggctctattgcatagtcacaagagtggctaagggtagaggcttgctgacaaccagtggatgcatcatcttgtccacccagttaagtgctgcytctgcaatggatggtctgtggtggacattattaacattagataaaaagatcaacatggattttgaccacttccatgggtacatctacatacttctttcccagctccccttgtctctgatctaatctttctctttcctagccgatgaccaagcatccatgccttttaggagtcctcaaagatctgtgtctgtcgttattttgaggtacttctccattcctgcaaagggaatgatccagtgtactgctcatacttccagtgtagaggattcactctcactactgtcctttagtgccaagtctagatggggctgtattgatgtagcagtccattttcagctcaaatcagcat

SEQ ID NO: 658957 - DNA, 609 bp, Homo sapiens
attcaataaatcctgattgaataaatgcataccctctgcatattaaccttgacctcacctgactccagcagtggcttattgcaaagtaaaatttctgaagctttaaactgttaaagaaattactgttttacaagagccagaaacatacagaaatgacttcgcactcaatacctgggccaactttttgttctctgggctttttawgggtgggaagagatctcagcgttcaaccctgaaaaaaaaacaaagtcttaactttgctaacatattttgaaaaagactggccttggaagtaaaggcaggatcttggatcttggattcactcttagtaagtgcttctgcctgagttctgaaaaaactgttgcaggaaaattgccaataattccagtatataactaagacaagcattttctaaaatgtctgttgctaaagtcagatcatagctcactcataatgctcttaatatttaatttaatcaattaatcgcctggctagtaaacgtcgtcttcatcttaaatctgttctcttggactgtcataatagtctcacaggttcagaaatgcataaaatttctcactcctcccaacgctcagtgcagaatgaaaactc

SEQ ID NO: 658958 - DNA, 609 bp, Homo sapiens
attcaataaatcctgattgaataaatgcataccctctgcatattaaccttgacctcacctgactccagcagtggcttattgcaaagtaaaatttctgaagctttaaactgttaaagaaattactgttttacaagagccagaaacatacagaaatgacttcgcactcaatacctgggccaactttttgttctctgggctttttaagggtgggaagagatctcagcgttcaaccctgaaaaaaaaacaaagtcttaactttgctaacatattttgaaaaagactggccttggaagtaaaggcaggatcttggatcttggattcactcttagtaagtgcttctgcctgagttctgaaaaaacwgttgcaggaaaattgccaataattccagtatataactaagacaagcattttctaaaatgtctgttgctaaagtcagatcatagctcactcataatgctcttaatatttaatttaatcaattaatcgcctggctagtaaacgtcgtcttcatcttaaatctgttctcttggactgtcataatagtctcacaggttcagaaatgcataaaatttctcactcctcccaacgctcagtgcagaatgaaaactc

SEQ ID NO: 658959 - DNA, 578 bp, Homo sapiens
tgaaatccttggctcgcactttctttgagttttttgaaaaggtttctccactgttatctgtctttgcatgttgcagtagggaaatcttatgccaatttgatttcctttataaataatgtggggctttttttgttgttttgctttgcagaccatgaggacaattttcactacatattatacaccataggtccttttaatttatgcaaataggtcttttatttctgaaaaaaaaattggattgtgatctaaaatgttgttctattgtgttgtttttttgtttttggtcccccagagactccaattatatgtatattgcatctgctttgcctatgccaaatactttcccttgatccttttaaattatttcctttttgttatttttattctctgccctgtttttattttcttgactattcaattgtccctactaaatttcaatccaatgttttctcattcaggcaatytgtaatgtcttcacttctaggatgaatttgattttttctactatttctttcctgtgttcagtcattttacatcttcctaatttttgttcatatttgctatgagttttacctttc

SEQ ID NO: 658960 - DNA, 585 bp, Homo sapiens
ctacatacttcataggcctgctatgggatttcatgagacagcaaatacttaatatgtaataaagccagcaagaacttcggtctctacaagtttactgccccctctctctagtgtttcacttcacccatttccctaagcccagtagaattagtctcgtccctcaccaacctcccatagcatcttctcaatagcatttttagggcactcatcccatttcatctgagctataaacctggataagaatttaaattttatctatctcagacacacacatatatatacacatacacacacrtatatatataaaactgtgtgtgtgtatatcttccaggtgttttgcaagagggaacaacagtaatcatagaacaagggctttggagtcagaatctcagggtttgagtcctagatcacagcttgttaactgtatggttatgggaaaattttgtaacctttcttgtgtctcagattgctcgtgtctaaaatgaaagtaacttcagtctctataggaatgttgcaacaattaaatatattaatatatataaaccatttagcacagcgtctgctgtataataagagctcagtaat

SEQ ID NO: 658961 - DNA, 323 bp, Homo sapiens
tatcacacatgatagattcagcagtaaaatattatccgttaacagctggaactcataaaagcatagcacaatgtgaagatggaatttgctaaaataaaccatctgctgaaaaatactattctgcaaatttaaaaataaagtttaaatgttatttgtcttatttaataggtctgtgaaaaaatgcgatatttgaaaagtaggtgctaccttaattagttctttatattagacagctggttacagtaatgcacagtaaggtgytacatagaaatattgctaaattttctgcatatactatgtatttagttaaattatttgaaatt

SEQ ID NO: 658962 - DNA, 323 bp, Homo sapiens
tatcacacatgatagattcagcagtaaaatattatccgttaacagctggaactcataaaagcatagcacaatgtgaagatggaatttgctaaaataaaccatctgctgaaaaatactattctgcaaatttaaaaataaagtttaaatgttatttgtcttatttaataggtctgtgaaaaaatgcgatatttgaaaagtaggtgctaccttaattagttctttatattagacagctggttacagtaatgcacagtaaggtgttacatasaaatattgctaaattttctgcatatactatgtatttagttaaattatttgaaatt

SEQ ID NO: 658963 - DNA, 473 bp, Homo sapiens
ataatgaggaaaattcaatattagcttaactcctcaaaagtgctgtgagcaagagaagatattgtctcttaggtcaattatactgggtgcctaaaagagtgaagccatatgtccttgagaccattcttgtttttggagcctggtaaggttgagtggtgtctgcaaacctgagtgacttcattctgggagacatattcatacgagaggatggtraactgttctaattttgaatgactgaatgagactctgataatacgccaatacctctttacttttataatccttttcctataaaagatatgtggtcaaagaaaagcgggtaatctgaggtaaaacaaaagcatttagtctttgtccctggtttctcctaaaaaccttagaatctcttgcgtgataagagttagaatattaatgagaggactcatggctgagcggaccctggatatcttgagaatgggggctggctgccagag

SEQ ID NO: 658964 - DNA, 473 bp, Homo sapiens
ataatgaggaaaattcaatattagcttaactcctcaaaagtgctgtgagcaagagaagatattgtctcttaggtcaattatactgggtgcctaaaagagtgaagccatatgtccttgagaccattcttgtttttggagcctggtaaggttgagtggtgtctgcaaacctgagtgacttcattctgggagacatattcatacgagaggatggtaaactgttctaattttgaatgactgaatgagactctgataatacgccaatacctctttacttttataatccttttcctataaaagatatgtggtcaaagaaaagcgggtaatctgaggtawaacaaaagcatttagtctttgtccctggtttctcctaaaaaccttagaatctcttgcgtgataagagttagaatattaatgagaggactcatggctgagcggaccctggatatcttgagaatgggggctggctgccagag

SEQ ID NO: 658965 - DNA, 473 bp, Homo sapiens
ataatgaggaaaattcaatattagcttaactcctcaaaagtgctgtgagcaagagaagatattgtctcttaggtcaattatactgggtgcctaaaagagtgaagccatatgtccttgagaccattcttgtttttggagcctggtaaggttgagtggtgtctgcaaacctgagtgacttcattctgggagacatattcatacgagaggatggtaaactgttctaattttgaatgactgaatgagactctgataatacgccaatacctctttacttttataatccttttcctataaaagatatgtggtcaaagaaaagcgggtaatctgaggtaaaacaaaarcatttagtctttgtccctggtttctcctaaaaaccttagaatctcttgcgtgataagagttagaatattaatgagaggactcatggctgagcggaccctggatatcttgagaatgggggctggctgccagag

SEQ ID NO: 658966 - DNA, 562 bp, Homo sapiens
atatttttatgctgaaaacttctgtaaaaatagaattccaagastattattgcaccaaaaggcatggacttaaaattcttgatacatgatttcaaaatattttctttaaggtttgaatcagtctatattccctccagcagcgtataaaagtgccaatttctctgatccttagccagtttgggtaataaaaattgtaaaacttttttttctttttttttgagacagagtctccctctgtcgccaggctgaagtgcagtggcgcaatctcggctcactgcaacctccgcctcccggggtcaagctattctcctgcctcagcctcccgagtagctgggactacaggcacccgccaccaccatgcccagctaatttttgttatttttagtagagatggagtttccccatgttggacaggatggtctcgatctcttgacctcgtgatccaccctcctcggcctcccaaagtgctgggataacaggcgtgaacaaccatgcccggcctgtaaaactttttcctaatgtaacagaaacataatagtattacattttatcatatttcttt

SEQ ID NO: 658967 - DNA, 562 bp, Homo sapiens
atatttttatgctgaaaacttctgtaaaaatagaattccaagactattattgcaccaaaaggcatggacttaamattcttgatacatgatttcaaaatattttctttaaggtttgaatcagtctatattccctccagcagcgtataaaagtgccaatttctctgatccttagccagtttgggtaataaaaattgtaaaacttttttttctttttttttgagacagagtctccctctgtcgccaggctgaagtgcagtggcgcaatctcggctcactgcaacctccgcctcccggggtcaagctattctcctgcctcagcctcccgagtagctgggactacaggcacccgccaccaccatgcccagctaatttttgttatttttagtagagatggagtttccccatgttggacaggatggtctcgatctcttgacctcgtgatccaccctcctcggcctcccaaagtgctgggataacaggcgtgaacaaccatgcccggcctgtaaaactttttcctaatgtaacagaaacataatagtattacattttatcatatttcttt

SEQ ID NO: 658968 - DNA, 451 bp, Homo sapiens
gacattagcctcttatcaaatgtatagtttgcagataatttctcccattttgtaggttatcacttcactctgttgactttcttttgctgtgcagaagctttttaggttgatgctattccatttgtgttttgttgcttttcttgcctgtgctttagagtcatatcataaaatattattgcccagaccaatgtcttggagttattcccctgttttcttctaggagttctatagtgctaggtcttacatttaagtctaacttattttgartttatatttttatatggtatgaaataagggcctaagatcaatcttgtggacattcagttttctcaacaccattttttgaagagactgttctttccccatgtgtgttcctggcacctttgttgaaagtcaattgactataatatgtagatttatttatgggctctttattctgtgtaattggtct

SEQ ID NO: 658969 - DNA, 611 bp, Homo sapiens
tacaacaaaatggaaagatgaacattgaaatgttaactctaatcatcgctgaatgttgggttacagatggttttaacttctttgtcttttcttttctttttctttttcttttttttttcgagacagagtctcactctgtcgcccagtctagagtgcagtggtatgatgttggctccctgcaacctctgcctccygggctcaagtgattctcctgcctcagcctcaccagtagctgggattacaggcgcccaccactacacccggctagtttttgtatttttagtagagacagggtttcgccatgttgggcaggctggtcttgaattcctgacctcaggtgatctgcccacctcggcctcccaaagtgctgggattataggcgtgagccactgtgcccggccagcttctttgttttcttctgtatgccccaaatttttaataatggacatgatgacattttaaatcagtaagtaaatgtcattgaaactaatggatttcctgaaaaactgttccttagttattgctgtgagtctggggtcatatctgggagctgaaagcaacagctttagtctcatttaggatggaaaatacctccccacagcccagtttct

SEQ ID NO: 658970 - DNA, 611 bp, Homo sapiens
tacaacaaaatggaaagatgaacattgaaatgttaactctaatcatcgctgaatgttgggttacagatggttttaacttctttgtcttttcttttctttttctttttcttttttttttcgagacagagtctcactctgtcgcccagtctagagtgcagtggtatgatgttggctccctgcaacctctgcctcctgggctcaagtgattctcctgcctcagcctcaccagtagctgggattacaggcgcccaccactacacccggctagtttttgtatttttagtagagacagggtttcgccatgttgggcagrctggtcttgaattcctgacctcaggtgatctgcccacctcggcctcccaaagtgctgggattataggcgtgagccactgtgcccggccagcttctttgttttcttctgtatgccccaaatttttaataatggacatgatgacattttaaatcagtaagtaaatgtcattgaaactaatggatttcctgaaaaactgttccttagttattgctgtgagtctggggtcatatctgggagctgaaagcaacagctttagtctcatttaggatggaaaatacctccccacagcccagtttct

SEQ ID NO: 658971 - DNA, 611 bp, Homo sapiens
tacaacaaaatggaaagatgaacattgaaatgttaactctaatcatcgctgaatgttgggttacagatggttttaacttctttgtcttttcttttctttttctttttcttttttttttcgagacagagtctcactctgtcgcccagtctagagtgcagtggtatgatgttggctccctgcaacctctgcctcctgggctcaagtgattctcctgcctcagcctcaccagtagctgggattacaggcgcccaccactacacccggctagtttttgtatttttagtagagacagggtttcgccatgttgggcaggctggtcttgaattcctgacctcaggtgatctgcccacctcggcctcccaaagtgctgggattataggcgtgagccactgygcccggccagcttctttgttttcttctgtatgccccaaatttttaataatggacatgatgacattttaaatcagtaagtaaatgtcattgaaactaatggatttcctgaaaaactgttccttagttattgctgtgagtctggggtcatatctgggagctgaaagcaacagctttagtctcatttaggatggaaaatacctccccacagcccagtttct

SEQ ID NO: 658972 - DNA, 533 bp, Homo sapiens
atttataagtgggagctaaatggtaagaacttatgaacacaaagaagggaaaaacagacactggagtctactcgacggaggatagtaggaggagggagaggagcagaaaagataactattgggtactgggcttaatacctaggtgatgaaataatctgtacaaccaacccccgcgacacgtgtttacctatgtaacaaacctgcacaggtagccccaaacctcaaataaaagttaaaaaaaaggaaaatagttaaaaaaaaamaaaacaaaaaaaaacaaaaaataaaaaaaagaatttcaaaagaaagtcaatccagaatcataaacaaaagccttgaacagatcctttttcatcagaggatatccaaccacaatgagataccacttcacacacactaagatggctagaattcaaaaaacagggccaggtgtggtgggtcacgcctgtaatcccagcactttgggaggccaaggcaggcagataacttgaggccaggagttcaagaccagcctgattaacatggcgaaaccc

SEQ ID NO: 658973 - DNA, 349 bp, Homo sapiens
ggcagtaacttagggaacgcccattagaaggatctggaggctgggtgtgggggctcacatctgtaatcccagcactttaggaggccaaggtgggaggatcgcttgagcccaggagttggacaccagcctgagcaacatagcaagatcctatctctacaaaaattttaaaagtttaaaagttagcygggtgtgatggcatgtgcctgtagtccccccagctactcaggaggctgaggtgggaggaacacaccatcccaggaggcagagactgcagtgatctataatcaggcgactgcactccagcctgggtgacagagtgagaccctgtctcaaaaaaaaaaaaaaaaaa

SEQ ID NO: 658974 - DNA, 623 bp, Homo sapiens
tagcgcttgatagatcatgtcgggttggttgcgagagggatttcaagggcttgggaaaataaagtcagtrtatgtgtagtttcatttttgagagaatcactttattactgatcacaggacagttgttgagctctgacagctctaagtgctgaaaacattagagaaggtccatttttttgtttttgcccaattatgaactgtaacttggtgagagaagcaatagaatctatttacctaacctaatggtaatgcttcattttaactaaaatgtcaacacatagtggtctctgcacgtatttcaccagcatctaaattccaccatggggttcaaattttttaaatgaaatcttagacccttggtagaaaaagagccaaggatttatatatcaatgtaaaaatggcctatcttaaaatatacttatcacaaatataagaaattcctaaaatttggggttttcttctatggctttctcaaaggtcagaatgcaatgtttctattcaaatgaacaattcaactagttaactaatacgaagccccttttcttatcttctgctaacctctcacctttgaaatcagttgtctaacttcaagtgttgccttcccaattaatgaagttatctac

SEQ ID NO: 658975 - DNA, 623 bp, Homo sapiens
tagcgcttgatagatcatgtcgggttggttgcgagagggatttcaagggcttgggaaaataaagtcagtgtatgtgtagtttcatttttgagagaatcactttattactgatcacaggacagttgttgagctctgacagctctaagtgctgaaaacattagagaaggtccatttttttgtttttgcccaattatgaactgtaacttrgtgagagaagcaatagaatctatttacctaacctaatggtaatgcttcattttaactaaaatgtcaacacatagtggtctctgcacgtatttcaccagcatctaaattccaccatggggttcaaattttttaaatgaaatcttagacccttggtagaaaaagagccaaggatttatatatcaatgtaaaaatggcctatcttaaaatatacttatcacaaatataagaaattcctaaaatttggggttttcttctatggctttctcaaaggtcagaatgcaatgtttctattcaaatgaacaattcaactagttaactaatacgaagccccttttcttatcttctgctaacctctcacctttgaaatcagttgtctaacttcaagtgttgccttcccaattaatgaagttatctac

SEQ ID NO: 658976 - DNA, 623 bp, Homo sapiens
tagcgcttgatagatcatgtcgggttggttgcgagagggatttcaagggcttgggaaaataaagtcagtgtatgtgtagtttcatttttgagagaatcactttattactgatcacaggacagttgttgagctctgacagctctaagtgctgaaaacattagagaaggtccatttttttgtttttgcccaattatgaactgtaacttggtgagagaagcaatagaatctatttacctaacctaatggtaatgyttcattttaactaaaatgtcaacacatagtggtctctgcacgtatttcaccagcatctaaattccaccatggggttcaaattttttaaatgaaatcttagacccttggtagaaaaagagccaaggatttatatatcaatgtaaaaatggcctatcttaaaatatacttatcacaaatataagaaattcctaaaatttggggttttcttctatggctttctcaaaggtcagaatgcaatgtttctattcaaatgaacaattcaactagttaactaatacgaagccccttttcttatcttctgctaacctctcacctttgaaatcagttgtctaacttcaagtgttgccttcccaattaatgaagttatctac

SEQ ID NO: 658977 - DNA, 618 bp, Homo sapiens
attaaattgtcaatatttgtatctgactacaaaaaaacagcaatttcacctagtttagcctaggtgaaattaatagttaaaacacacctcacattaatcacatctcacaattgatggagatgtaactattttaacgggttagagaactaatgttctggaggaggaatttgtttcttcaaaaaaatcttgtatttaattggaaaacaacttaccttgataaaaagcattttcaaatcataagcacatatatcttcccargttttatacgacttttttagtctcagcttttgtattagtccattctcacactacgaataaagacatacctgagactgggtaatttataaagaaaaagaggtataatggactcacagctccacatgactggggaggcctcacaatcatgatggaaggtgaaggaggaacaaaggcatatcttccatggcagcaggcaagagaccatgtgcagatgaactgccctttataaaaccatcagatctcatgaggcttattcacaatcataataacagcacaggaaaaacccactctataattcaattacctcccaccaggtccctcccaccacatgtggggattataggagctaaaattcaagat

SEQ ID NO: 658978 - DNA, 611 bp, Homo sapiens
ggttcaaaatctgtttttcttgtaattttatacctggttttcccattatgtaaaaaaatgaaaagtgctttttaggaaacttatttaaccataaagaaacaggttcagacaatgaaattaagcagttttatataagggtagcatttttttaaatgatggagctactatctaaaattctaaagttctttaattctgtttctttagtaaaaaaaagcactagcaattttgttttgatacatttgtaaagagagtcaaagacattgaggaataaaacaatatgctcatagttcaaaaatgtctctagctgccttaatgaatcaaaatgtttgctcttacacgtacttcatacaaaatcaggcatgccctgttgacgttagccagctcttgtcgtgtcttgtcctgccttagagcaaggaaaattcttttgttcatctttgaaaactacaggcaggaaataagcagcaaacaaagaaaaacaaaaaaagaaaaacacatgaacagtaatcagttaaatggaatgtaaaccaatatagagaacayatattgctgactattgcaattattctcagccctggctgcaatttggaatcactgggagagctctttaggaa

SEQ ID NO: 658979 - DNA, 561 bp, Homo sapiens
acatttccaaaatctgtttacagaaagagactcaattacctcaaagacactacttgaatcagaggaaactgaaataccaatagatgacatgagtctctccacttcccttccttttttgactagggatgaggtgctatcaagaagatgaggtcagctacagaaattaaagtagttgtgatktattcacctatctgcaggcttctgtgtaactctgctgtcttgccacgcaggcatgctctctataggctccttgaggggagtggtagtgccttgtttctttggaatcctccagtgccatataaacctctgagaacagttacccagaagtcatgtcagaacccaggctcgaaggtgtgtgtcctgttacatggtcattcagctaattccaaggaggatgtaaacttgcacgatctctggccaggcagactttttggtagctcatgaggctgtggtccttcctctatagaaagtactcatatgtggggctgcctttatagagcaagccagtgtctcgatgcttcctgggtgtgactcccatctttggagtcaatcttaactgtc

SEQ ID NO: 658980 - DNA, 561 bp, Homo sapiens
acatttccaaaatctgtttacagaaagagactcaattacctcaaagacactacttgaatcagaggaaactgaaataccaatagatgacatgagtctctccacttcccttccttttttgactagggatgaggtgctatcaagaagatgaggtcagctacagaaattaaagtagttgtgatgtattcacctatctgcaggcttctgtgtaactctgctgtcttgccacgcaggcatgctctctataggctccttgaggggagtggtagtgccttgtttctttggaatcctccagtgccatataaacctctgagaacagttacccagaagtcatgtcagaacccaggctcgaaggtgtgtgtcctgttacatggtcattcagctaattccaaggaggatgtaaacttgcacgatctctggccaggcagactttttggtagctcatgaggctgtggtccttyctctatagaaagtactcatatgtggggctgcctttatagagcaagccagtgtctcgatgcttcctgggtgtgactcccatctttggagtcaatcttaactgtc

SEQ ID NO: 658981 - DNA, 376 bp, Homo sapiens
gtgcattccagcccagatgctatgcttttcccacagtcttcacaacccagagactaggaggagrttctcttgggtgtctacacaaccagggccctgggtttcaaacacaaagctgggtggccatttgggcagacaccgagctagctgcaggagtttcttttcatattccagtggcgcctggaatgccagtgagagagaaccgttcactcccctggaaatggggcagaagccagggagctgagtgctcttgctcagcagatcccacctccacatggcccagcaagctaagatcccctggcttgaaattcttgctgccagcacatcagtttgaagtcgacctaggaggcttgagcttggtgtgggaaggggtgcccgc

SEQ ID NO: 658982 - DNA, 527 bp, Homo sapiens
taataatgttcttacattttttaaaacattttcctagtgataatttttttaattatttctatttgtgtgttaatacaaacaatactgcaatggatatttttgtatgcatttatgtgtataaattctgggagtatttctgtaggaaaaagtttcttaaatgcttgatctctttaaaaaattatcagttactctactactgctttctgaaagtgtatgcctgtttccacacacccttgcaagtatggtattgtcaatttttataaagattctactaattataagaatgaaacatcttgtttttggcttcatttgtatttctttgcttattagagatgttgagtaatttgcaaataattttttgttttttatcaaaaacacttgtcctttttctgtcttttctgtctctgtttttttttttttttttggtttgttcattttttctcctattgatttataggagtcctttayatatgtagccaaaaccctcttccattaaatattttgtaatgttttctaacagtatcaca

SEQ ID NO: 658983 - DNA, 434 bp, Homo sapiens
ggtctctgtcagcaactattcaactctgctgatatagcttgaaagcagccacagataatatgtaaatgaatgagcatggctgtgttcccataaaactttatttatggacagtgaaagtygaatttcatataagttttacaagtcatgaaatattattcctcttttgattgtgttttccaaccatttgaaaatgtaaaagacaatcagagctcatgggctatgaaaaaataggtggtgagccaaccagatttggcctgtgggccataatgtgccaacccatgagttaggggttagtgagaataaaaatgcaacctttgtttaccatccaggtttgtaggccccagattaagaatcgccatcttagaggagactgggggaaattggcaaaccccagagagggaacctcagcagaggtccaggctcatgaacagcct

SEQ ID NO: 658984 - DNA, 377 bp, Homo sapiens
caactagttttaagaataattttagaatccaagtttgttttgaaatatttatagaaaaggagaggacaaatgttaaaggtagtattttctttgtctgtaatttggattattgttgaatcctgtaagaattaggtctatattgcaggatcccaacatgagatcctagtggtgaaagcactgcccatccaagatggaagatggcttccagctaacttccactgaaaataagactcaccaacagtactgggatagtaaatggttaggcaaatgaaattacatgccttcatgragctgtttttgtcactagcagaagatcttgctgtgcaatttggttccttactgaacacacctattacaaattacctttgcctatgtta

SEQ ID NO: 658985 - DNA, 515 bp, Homo sapiens
cacaatactttgtggatggtgccccagctcatacattgtggcttctgctaagacagaaatagccagctttcaggtaaaataaatctatttgatttattcctgaccaaaattatgattcatattggttgccactctctttaaaatatttaatatttatctgtcaaattgaattaatcaaacttgctatatgatggtccagtcatgggcttgcattagagatactctttacctaacttgcattctcatataatccatacaaatgctgataaccatgcacatgatcaccagaaattaagtaagaaaccaagaaataaagcattaacaatgtatagattcatcaatttataaacattrctaaataagggtttggaataaattattcaaaatttatggttcggaaagtatttctgtgattctgagattgtttcagaggaattgataaaaatccccgttagttttgcatgttttacagttcagcagagttacctaataaattaaacatttttctgtttata

SEQ ID NO: 658986 - DNA, 587 bp, Homo sapiens
tacctaacttcaaaatatagtaaaatctatagtaatcaaaatagcatggtactggyttaaaaacagactacagaccaatggaagagaatagagagcccagaaataaacccatgtgtttttgttcaattgattttagacaaaggagccaagaacacacaatagagacagaaaagactcttcagtcaatggtgttgagaaaactggatattcatatcctagtaaatccttataattttatgttgcattgtcttgtattataaatgtaagatggactttctcacatcaaaagtaaggcttatttacctttaatggtttccagctcttcacctcccagttcctcaaggaggtagaccaagatatttgctgtaagcaactgtctactggtgacccaatccctatggatcggccatataagagtgacttcactcaccccattgaacccttcgcttcacatagattgcacggatatgctgcagtgatgatacctctgtcaggatgactccagagaattcatgcctgcttgctccaaactcaacaattagaactttctgtgagaaatctccttggataatgccctactttttggg

SEQ ID NO: 658987 - DNA, 612 bp, Homo sapiens
taactcaaaaaatttaaaaatatatatttgacatcctggaaaaatatatgtttgaaaatgtactcttctatttaacataaaaaagtttakttatttttggagaatatgtattttcccaaaatgtatggggcgaatatactagccatgttgctggaagaccacagcctcaacttcaacatgggtctaggaagctggcaggcagagactagttgagagaagccctgtggggaggaagggtaataataatctcaaagtagaggcttgtattggggagaggaaatatttaaaattggagcaaaggtgtaatcagtattgattttctccttgtggctgtttccccagaagagacttggtgccctagggcatttcctgtccgtgtccacccttgccccatcctgctcctccctcccaccatgtttaaaggttgtcttcattttcagccaagcagtctctggagctctccaccaatatggagatgacctgcttggtcatctgcaaataaagagccaaatgaagttagatgggggagagggtttgtgtgtgaggtttgagaccaagaaggggtatggggagaggatgtgaaactgtatccttttatcctattcaacaagt

SEQ ID NO: 658988 - DNA, 612 bp, Homo sapiens
taactcaaaaaatttaaaaatatatatttgacatcctggaaaaatatatgtttgaaaatgtactcttctatttaacataaaaaagtttatttatttttggagaatatgtattttcccaaaatgtwtggggcgaatatactagccatgttgctggaagaccacagcctcaacttcaacatgggtctaggaagctggcaggcagagactagttgagagaagccctgtggggaggaagggtaataataatctcaaagtagaggcttgtattggggagaggaaatatttaaaattggagcaaaggtgtaatcagtattgattttctccttgtggctgtttccccagaagagacttggtgccctagggcatttcctgtccgtgtccacccttgccccatcctgctcctccctcccaccatgtttaaaggttgtcttcattttcagccaagcagtctctggagctctccaccaatatggagatgacctgcttggtcatctgcaaataaagagccaaatgaagttagatgggggagagggtttgtgtgtgaggtttgagaccaagaaggggtatggggagaggatgtgaaactgtatccttttatcctattcaacaagt

SEQ ID NO: 658989 - DNA, 426 bp, Homo sapiens
ctttttctgaactgtttgtgagttactttacagacattactcccctctactcctttggtgtatatgctttgtaaaaccaaggacattctcttagataagtatagataatcatcaaaattaggaaattaactttggtaccaactattttatctaatccacagatcttattccgatttcacaaatttttcccaataaagtttttttttttttcttttcagagrcaaggtcttgctctgttgtccaggctggagtgcagtggcacaatcatagctcgcagcagcctcaagctcctggcctcaagtgatccttccacctcagcctcccaaagtgctgggtgtacaggtgtgggccactgtgcctggccccagtaaagttctttaaagcaaaagaaagtccaagattagacaccacatttagttgtcatgt

SEQ ID NO: 658990 - DNA, 605 bp, Homo sapiens
ggactgcaggtatgagtcactatgcccagcccttcctttccaaacttcatagaaatgacctatccctagtaagctgtttacagatagaaataacagctctcagcattattaacaaattattttaaggtaaactccatgaagggagaacaattagatgtaaaaataaaaatgggctgtttgtctatttcaccactatttttccatactctttctgaataactgataaattatcttgctgtgtttgagcattagacttagacatttgtgattasaaaacccctcaactagtcatatataaccaaccctgagttctggcatttttcataggttactattggcactttcattttcttgtgtaaataaacccaaggcaattaaatgacatctccctctatcagcttaaaacaggatgaaaggcatgattcaataactttctccctatacccaggctccacacaatttcctgttgctattttgtgaagagactttgatgtggtttggttctatgtttccacccaaatctcatctcaaattgtaatcccccacatgttgagggagggacctggtgggaggtgattagatgatgggggtggatttgcctcgtg

SEQ ID NO: 658991 - DNA, 599 bp, Homo sapiens
tcacagagccctttgaggatcatataaaatctacagaatttctcctcagtgaaatagacatgtaggcatacacatgaaaatttatgtggaatttcagggggttaggaatactttgaagattattaggcaactgtggtgtctaaaataagaatgctgatctgaaatgtaatagccttctttgtatatttaagtataatgaccttttggaattgcagattccagatgtttgtgctttgctgttccaattcattgattctttatgtaatccataactacattctttaagtttcaaggtctttcaaccgtttagaactatcagatagatttatcatttaggatgcttttattggtaagtaacaagaaatccaactcgaactagtttaaacaacaacaaataagtatttatttgtcacattacttaagtccaaaagtaaagcgggctttggacaggatttgatctgagttctagctgtttttctgtgattttctattctatccagctttgtcctcaggctggcrtttctaagatcacaaaatagctgctgcaaatgtatatcagcacattacggtccaagaaaaagagtatctatgacagaatt

SEQ ID NO: 658992 - DNA, 571 bp, Homo sapiens
aaaaaataaaaaagaagaaaaaacaacttaaataaatagtcaggcatggtggtgtacgcctatagtcccagctactcaagaggctgaggtgggaggatgggttgagcctgggtggtttagctgagccataatcataccactgagctccagcctggatgacagagcaaaaccctgtctcaaaaatataataaaataagatcaaaaagaaatatttaaaaaaacaaaatacrtcaattgctttcatagcataaaattatgtccagagcaatggcataaaaatgtaatatatagtcttaattgcaggaaaatataatctaatcatctgaaaatatgtcagaaaatctcaaaggtaaatttaatttagcattacttaaatttaactctaaattgtaaataaaatgattgaaaatgatagaacaactgaaggttatagttcgtcatttgtcaacagagtgccaaataaccatttggctcatttttttctaccacgttttgagtaaatctgccaggtttagttttctttgttttcttgaaggtcagtgtcttcaaaacacagtattttttatgtgta

SEQ ID NO: 658993 - DNA, 620 bp, Homo sapiens
agtattgaacataacctacattttccatgtattttgtgaaggatagccattcataaattcccatagccttaatgttaattaatgtttattcaattatgacattaaatttatttttctaatgtagagcttaacttcattgtaacacaatctacaacccaaattccacttgtgtgtgtgtctgtgtgcatgtttgtgtgtgtatgtttatgcgtttgtgtgcttgtgtatgtatttgtttggacttgcttgaaagcttttatatcaagtcaattaacaagcaggctatatatactaactgcatatggcatcttaagcagccaagtgacatcaccaagttatgccatttcaggattttttttttttttgctattatgcaacatagagataaagctacagaagtatagctcttacacataacaacatagtttggtacaaaagattcacacacaaggtacagygttcaaagcaacaaaatatgaaatgacatctgtcttttatctgccaataattgacatactgatagcattttttcaattttgagggcagtgtaacaggccacttttacttgtagaattcttggtagaatgaatttgaataacattttaatggcctttcaccca

SEQ ID NO: 658994 - DNA, 602 bp, Homo sapiens
ttgtgacagctaaaaatctctccagacattgccaaatccaaatgtccttgggggcggtgggggcaacattagctgaatttgtcaaccactcttctaagtggaacctgagtgactggaacagcaagtgaggggagccacataggagttgaggctggaataacaggaaggggccaggaaatatcctgtgggatttgtgtgttggttctaaaagaagtgaagattgtgaactgatgagtgatgtttaaattgttttcttttgaaaatgattgctttggctcctgtgttaaatcactttcccaagatggtggaatcccgaatattgtgactcgaaataasatgctattaactaatgagcagaactttcttcagggtttatagcaataaaatttatcatgagccactgcattatattctgggatcaaaatcctgaggccctcacaaaagaagccagaccattgttggggactagtttccaaaggaacaataaaatttcacttaaaacttttctctcaacaccccccaccccaataaaacaaacagaaaacgcactcccctccaaacaaaaatagcaacaacaaaaggatgtaagacccaaccaaaaa

SEQ ID NO: 658995 - DNA, 583 bp, Homo sapiens
gataaagggttttaaaaaaatcagcattatctaaaatgtttggcagagaaagtgaaaatgaaacagtaagaactacataggcacagaagcaaataaaaaactaaggcaattagtaaggccagagaaacaaaaagctatactggaaaggatatgtaattgtagaatactatatggttctactataaatatttatatggtcataataataaaagctctgaatttttttagcttttcttcacattttattttatgaatgtatttttaaccagaaactatgttataaagtattaggaaggtagaaggaaaaggaagaactggcagagaaagagtacataaaagagctagctaaatctttttccactttaggaagtcaagagataatatcaaaatttttactatcaaaaacagcaatatggataatcaattttagaaatgtggagagaaacagcagaaaagcagataaaacattaatgatgattgtctctagggaaatgggagttagaagtagagaatggcagaaaagaagattcatgtttatctrtaactctttagtactatgaatgtatttttaattcattatatt

SEQ ID NO: 658996 - DNA, 554 bp, Homo sapiens
agtgttggcttataaaaatgctactaagttttgtatgttgattttgtaccctgcaatttactgatttgtttatcagttctaatagttttcctgtggagtctttaagtttttccaatatgagatcatatcatctgcaacaaggataatttgactttgttatctccatttggatgccctttatatctttctcttgtctgattgctctaggtaggattttcagtactgtgttgaataatagtggtgacagtgggccatccttgttctgttccagatcttagaggaaaggctttcagtttgtcctcattcaatatgatactagctgtggatgggtcatatatggcttttattatattgaggtatgtttcttctatattcagtttttttgaggatttttatcatgaaggatggtgaattttatcaaatgatttttcagcaccaattgaagtgataatatggtttttatttttcattttgttgayataatgtatcacattgattgatgtgcatatgttgaaccatccttgcattccagggataaattccacttgggcatg

SEQ ID NO: 658997 - DNA, 387 bp, Homo sapiens
tggatcttaggaagacttgtctgagattctccagagggcctccaggmggggaggaagacaccaaaaccctcttcctcctcagggacttttgtgatgtcaaaggagaaaactggaattctattcacaactctttctctgtggaagagtagatgtgtcatgcccagtgcagctcagattccagcagaaacagaaacaagaacatgcccagaggggctcagcatcagtgaagaagcccagcaaaggaaagcttgcttctcccggtctggctgccttcagaggcacccagcttcaagccagctgggctcagttagaaagaccacatgtgggatattagtttggtttcaaatcccacacttaaagcgggacatttccaaatgcagacagatg

SEQ ID NO: 658998 - DNA, 393 bp, Homo sapiens
ttatgcctagctattctagagagattatgaggtggtcattcaggggtaaggtagaatacaaggcaatctcatgacaggctgacttggtggatagttaggtgctggtgggaccttcctctattctttcattagtgttctgaggaaacttaaagctcactcacaccctgtctttctctcacccaagaaaagagcagacctatgtgcagaagtgctggaaggatgtgcgcgtgggagacttcatccaaatgaaatgcaatgagattgtcccagcagacatactcctccttttttcctctgaccccaatgggatatgccatctggaaactgccagcttggatggagagacaaacctcaagcaaagaygtgtcgtgaagggcttctcacagcaggtag

SEQ ID NO: 658999 - DNA, 544 bp, Homo sapiens
ttggtatactttcttattttaaaaagatgattaatgaactgggcatttaaactcaagaataagaaatggaagacagaaagccagtgatggtaaaggataaaagggtaaactaatcggaaactatctcacgtgttttttttttttttgcctctgcttaacactaaggcagagatagacttttcccagttttaggccatcagaaacctcatgggcaactttcccctttcactgtctttctagtttgttttccttgttggtcagacctgtttgagtaaattctcatagtaagttcttctcttccataacaaatagaacttaagctaaacactttttcagaattaaaaaaaaaaactgtactgttttcatttttgctttattttgtttggggttggtggtggttgaatgctgcaagtggcakttatctcatttaccatggattttaatggtatattaaataaaaagataatcacagaaaattttcctgtatattttaatgtaaattagagtaacaggtcaagtaatttaatatcttgaaggatttctt

SEQ ID NO: 659000 - DNA, 555 bp, Homo sapiens
aacaataaccacaatttcaacatctccttgatagcaaaatgttaaattattagtttagcaactaarttggttattattggctagaaaatgaatattccctgtattagtctgctcttgcattgctataaagaaatacctgagactgggtaatatataaagaaaagagatttaattggctcatagttctgcaggctgtacaggaagcatgatgctggcatctgcttggcttctgaggagaccttagcaagcaaagttagaatcatggtggaaggcaaagggggagcagtacttcacatggccagagaaggagcaagagatagagtgcagaaagatactactcacttttatatgaccagatctcatgagaactcactcactattgcgaggacagtaccaagggggattgtgctaaaccagtcatgagaaatctgcccccatgatccaatcacctctcatcaggccccacctccaacattggggattacaattcaacatgagatttggtggggaaacagatacaaaccatatgattacacctctgaccccaaaatctca

SEQ ID NO: 659001 - DNA, 627 bp, Homo sapiens
ctggggcatgcctaaggcctgtgtgtgccctgccctgcctgccactgaggtttgtttagagcccaaggccactacagtaggcctgcagtgagtttagtctatcatgctgagtttagtccgtattgactggaacataagtccattccactggggctgcagtttcctgtctagtgctagggtgggtctggaggttctgtccatgggtaccagcctgatgtcaggtgccaagaggttctgtctggtgctagtcttctggctggcctagtactgttctgcaaagcaaagttttatgctcatttctctcctcttcccccaaatggacaatgtctctgcactgtggtgcgtagggttaggggaggggtagcataggtaatattaaactgttctttctatcctcttcaatgtgtcttgtcttattattatgctaaaaccaagtactggtatacaaggcgatctcttaccttgttgtccgatctcctgtgaaggctttttcatgtatggatagttgtacacatkgatgtttttgtggggggatgatcctggagagttctactgtgccatcatgctgagtttagttctggggttgttttcttaatttcttttttgaaaagtttgtttcagagtatg

SEQ ID NO: 659002 - DNA, 462 bp, Homo sapiens
acaatatgctttttgcagccatcattcagatacattttctatatttggtagtgattatattattagttagttaatagaatgttattacatactgttattgtattatattaactaataactagttattagttaatagtatgttattacatactgttattatattaaataactaataacataaccactatcaaatatttccagtgagtgcaaaaaagcaagtggcaattgatgtctagaatatcaagatatagctttccactcctcctttggggtttccgggtgattcccattgggaacacaaagaggcattggcgccagtgaaattatttcctgattttggggaactggctcacaaactcaacaattgcttgtyttttttcctagggtataagcctttgctaaagccattcacagattattgtactatggattttcttgtaaggaaagggaaagggttaggac

SEQ ID NO: 659003 - DNA, 422 bp, Homo sapiens
ctcctttcaaacttcacttaaggataaagatcaaagtgcaaatattcttttcaagagtagctccttgacccaccttcacaactaggtataaattacagctaccaggatccttatgagaggagaactggggcctgaagagaagcactgaggcatgaatggggtggggggatggtttgaggagtcagtgaaagggaagactagggatggtarcagtagtcctcagcgtgggacagttttagggattggaatgggaggagaaccaacacttggagagagagaggtacatgctaggcctctccattgggtgaagtctttatcctgctgctttgtagcagcctcaactctgcagacacttttggacatttttaaaggaaatgttcattttaaccatttaggcaaggcatacttttgaaagcaacatt

SEQ ID NO: 659004 - DNA, 605 bp, Homo sapiens
cacatgttctcacactgaagatctgcctgatatgtagcaccagctgtgtacacttttctcctaattgctgattttatcagacctcattctcatgttcttcacatagctggtctgtgttgtgctgtgttatgagccatgtcaagttcccttttgctactgatgcctgtgacagatgttataggyacttggggactttttataatccctaaaatcatacctatccaggaccctagtattatcaattcatgaaaaatatccagtgtcagaatttacatttctaatgtatggctctatttgaaattttactttgccattttgtaaagtagctgaataccttgcgagaattagcttcccatttcatagctaggtgatgcataccatagcaacaagacatgtttatatgaatgagtagtttatatgaatgagtagtttttattctgttgcatatctacaaatcattaattaagttaccaatagctttactgggcttgtaaaggtcaatgtgttatagttacctattaatatggtttggctgtgtcctcacccaaatctcaccttgaattgttcctataatccccacatgtcatgggagggacctggtgaga

SEQ ID NO: 659005 - DNA, 605 bp, Homo sapiens
cacatgttctcacactgaagatctgcctgatatgtagcaccagctgtgtacacttttctcctaattgctgattttatcagacctcattctcatgttcttcacatagctggtctgtgttgtgctgtgttatgagccatgtcaagttcccttttgctactgatgcctgtgacagatgttataggcacttggggactttttataatccctaaaatcatacctatccaggaccctagtattatcaattcatgaaaaatatccagtgtcagaatttacatttctaatgtatggctctatttgaaattttactttgccattttgtaaagtagctgaataccttgcgagaattagcttcccatttcatagctaggwgatgcataccatagcaacaagacatgtttatatgaatgagtagtttatatgaatgagtagtttttattctgttgcatatctacaaatcattaattaagttaccaatagctttactgggcttgtaaaggtcaatgtgttatagttacctattaatatggtttggctgtgtcctcacccaaatctcaccttgaattgttcctataatccccacatgtcatgggagggacctggtgaga

SEQ ID NO: 659006 - DNA, 563 bp, Homo sapiens
catatgtgacagacccacagctagtatcttactggatgggaaaaaactgaaagcctttcctctaagatctttatgacaaggaggcccactgtcactattgttattcaacgcagtactggaagtcctaactagaacaatcagacaagaggcagaaataaagggcatccaaattgaaaagaaagaagtcaaattatccttgtttgctagatgatatgaccttatacttggaaaaacctaaagactccaccaaaaamctaatagatctaataaacaaattcagtaaagttgcagaatacaaatcaatatacaaaagaccaacatacaaaaatcagtagcatttctatataccaacagccaaacaatctgaagaagaaattttttaaaatcctattaaaaaagccacaaataaaattcactacctatgaattaatcaaagatgtaaaagatctctataatgaaaactataaaatattgatgaaagaaattgaagaggacagacacatacacaaaacggaaagatatcctatgatcatggattggaagaatcaatatcggtaaaatgt

SEQ ID NO: 659007 - DNA, 527 bp, Homo sapiens
gggacaaattatgtttgggaaggcaggcagaaactgatgataaacattatcataaaagtgacaacaccaaatgctggtgaggatgtagasaagctggatcactcacacattgctggtgtgaaagtaaaacagtacagctactctggtaaaatagtttgacattttgttaaaaaactaaacatgcaactaccataaaacccagcaattgtactcttgggcatttatcccagagaaacaaaaacttatatttatgcaaaaacctgtacacaaatggtcataacaattttattttagtagccaaaaactggaaacaacacagttgttcttcagtggatgaatggataaattttggacatctttgtaaagaaatactattcaacaaaaaaggagaacaaactatttatatacacagtaacctggatgcatccttagagaattatgctgagtgaaaaaatgtcaaaccccaaaggttaaattttgtatacttttatttatgtaacattctcaaaatgacaaaattatagaaa

SEQ ID NO: 659008 - DNA, 671 bp, Homo sapiens
atggtaccatctgtgtactgcttcagtattcttaaatgttgacatccactcactaggatctaaacacaatttaaatacacagtgatttaaccactgaatgagaattgtctttactctagctaagttaggtgctaaagccccattttcatcctacttcttcccagaaatattcctaagtcattgcaacttctgaacagagacagcaattttaggaagcaagttaggatgaattaaagagccaggaaaagtataccattggcagtagtgatcagctcagtagcatcaggggtacctaactttagaaaaatcacattgtatttgagtagcccagcaatttattactcagtgaggcagctagtaagagagaatgytacctgcccacgggggctttaaaagaccatgcagtgcataatctctccatgagctctggccttgccagccctgatccttcttccattacacacacatcaaacaagcctgtggttatttatttccccttcaaggttctctttaatgctcattttaactgattctctctctgaatcttgataaagatagaagatggaggctgcaaaagggaaaaggaaagtgagattcaagttgtattcacaactctcagataaatagtcctgaggcagaagaagcggcctactggtaataattgtacaatt

SEQ ID NO: 659009 - DNA, 671 bp, Homo sapiens
atggtaccatctgtgtactgcttcagtattcttaaatgttgacatccactcactaggatctaaacacaatttaaatacacagtgatttaaccactgaatgagaattgtctttactctagctaagttaggtgctaaagccccattttcatcctacttcttcccagaaatattcctaagtcattgcaacttctgaacagagacagcaattttaggaagcaagttaggatgaattaaagagccaggaaaagtataccattggcagtagtgatcagctcagtagcatcaggggtacctaactttagaaaaatcacattgtatttgagtagcccagcaatttattactcagtgaggcagctagtaagagagaatgctacctgcccackggggctttaaaagaccatgcagtgcataatctctccatgagctctggccttgccagccctgatccttcttccattacacacacatcaaacaagcctgtggttatttatttccccttcaaggttctctttaatgctcattttaactgattctctctctgaatcttgataaagatagaagatggaggctgcaaaagggaaaaggaaagtgagattcaagttgtattcacaactctcagataaatagtcctgaggcagaagaagcggcctactggtaataattgtacaatt

SEQ ID NO: 659010 - DNA, 622 bp, Homo sapiens
ccatttttcacatttctcaaatgtctgattacccttgcctatctatttatatttcaaagagaagcagtaaaatactgattggaatcagtgtgtttggatgggacatatagactgatggatattatcaagatggctagcagtcttttccctccaaatatgagtttctgttgatttttattctggaacgatcctcagaaaaaggattttccaacttccttcctgtggggtgcagtgatggcttttagcatattgactctgggcaggcagaggggcttagggattttattgttttttttatgcagataaaattgaatctccagttttcagtaaagcactgtgccccagcctcctctgtgcttgatgtcccattcaggcactgggttagtagttgggtgagatgggagaggtatggttgcccagctgtagagacagggacctgaagttttcactgctccytatatggactttcaaactggcttaaataatgactgccatctccatttcctgagaatttccagggttctgaggatcagattggcttgcttctcattgatgtcatgccagtaggttttatcttcctgatgagtcatttaccatttccccatatgctttctgcaatcat

SEQ ID NO: 659011 - DNA, 571 bp, Homo sapiens
tttaccagtatgcaagtctgggtaagttgtgctccacactcagcctcagtctccccatgtataaaatggcaattatacttactcaccaggactgtagacattaagccatccaacaagttctattgagagtccaccagatgtgaggatagctacgaagccctttcctggttttaaagagataaaccatagatagctaagtcataacttgtatatataaagcaatcattaaagtagcattccctaaaatgggtcccattaacatgtactttaagcaaaaaaaaatatgattaaataaattttggagcgattgggtacacaaaggtacacaarttatgttgacataggacttctcagagcaaataaaatactaacatggactgtgcaactagaaggtaggggagagtatattgaattgcctaaactattttactcataaaaatttgggagctcaaatttttttaatactttaagttctagggtacacgtgcacaacatgcaggtttgttacataggtatacctgtgccatgttggtgtgctgcacccattaacctgtcatttacattaggtatt

SEQ ID NO: 659012 - DNA, 439 bp, Homo sapiens
agatcttttagtggcattcagggattacttcccttcggggttttaataagccctgatgcttgaaacacagtgaaggtgcttctggagacaaycacctttcaggctgggaccatgggacccttttgggggcccagatggttgtgtctggagagcaccccaggatgtgctgcagatggcagatcactgaagcagggtgtccacgggcctgaatgatcaggaagcaatcaatagagggatgggtttctgtgcagtcaatagagggtgcttcctatgatttctcaacccacttgactcacaacccacaaatcctcctgtaaatggttggatttgaatctatgaccagccagaattgctaccactaaagtccatacagtccagtgcttatcagaacccctatgatgggacccccacccctgcacaatgggggcactagcatggc

SEQ ID NO: 659013 - DNA, 404 bp, Homo sapiens
gaattcagaatccacactgtttgctgttccacagaaactagaatgagttcgtcgtgtcctgcatttattggtgaccttaatgaaatcacttgatgaaagtcatgctaccrcagtcagttattttgaggggtattttgggagttttttgtttgtttctttggaccagttctatagtgaactaaattagttaattaatgtcagctccttcttctctaatttacatataacccatttttgtatgcttatctgggaacaattcattattgacttagcttggaacagatataatgtactcatcttagtcatcagaaatatgccctacttggagaaattttccatttactttatttctcaaatccacagaccactttgaaaagtccttatctacaaacaacagcggggag

SEQ ID NO: 659014 - DNA, 526 bp, Homo sapiens
gaattcatatatttaagcactaatcccaagtaactcagaatgcagccatatttgaagrtaggccattcaagaagtgattaagtaaaaatgaggtaattagggtgggtcctaatccaatctggttggtgtccttataagaagaggaaatctgcatgcacccagagatgccagggatgcataagcatagaaaaaagactgtgtaagaatcattaataaggcagccacttattaacaacaacagaggcctcagctcagcatggtggctcatgcctgtaatcccagcactttgggaagctgaggcagaaggatcacttgggctcaagcgtttgagaggaggtggttccaagatggccgaataggaacagctccagtctacagctcccagcagaagatgggtgatttctgcatttccaactgaggtaccaggttcacctcactggggcttgtcggacagtgggtgcaggatgtgggtgcagcacactgagcgtgagccagagcagggtgagtcatcgccttacccgggaaa

SEQ ID NO: 659015 - DNA, 526 bp, Homo sapiens
gaattcatatatttaagcactaatcccaagtaactcagaatgcagccatatttgaaggtaggccattcaagaagtgatkaagtaaaaatgaggtaattagggtgggtcctaatccaatctggttggtgtccttataagaagaggaaatctgcatgcacccagagatgccagggatgcataagcatagaaaaaagactgtgtaagaatcattaataaggcagccacttattaacaacaacagaggcctcagctcagcatggtggctcatgcctgtaatcccagcactttgggaagctgaggcagaaggatcacttgggctcaagcgtttgagaggaggtggttccaagatggccgaataggaacagctccagtctacagctcccagcagaagatgggtgatttctgcatttccaactgaggtaccaggttcacctcactggggcttgtcggacagtgggtgcaggatgtgggtgcagcacactgagcgtgagccagagcagggtgagtcatcgccttacccgggaaa

SEQ ID NO: 659016 - DNA, 600 bp, Homo sapiens
gtggtaaaagtggtagccagaaggaaatcataaataaaatgtgacttggaatagtccataaagtaaggggcaagtggtcatggaaagggtatctacaagagcacgagcaccagtgcatgttttgggaagacctgctgtttgattttaccatytgtgtaggtcaataccatgagaagacatcagaaagctctgaataatcagtgttttaattatcaaactaagaagttttttttttttaattcaggatatacaatatgagaattacaggctcatagcaacatgacagaaactctgacagcagtatgaaagaagatatttcaaagggaggagaaaggggacaaggcagagagatgagttttcagtattctggcaagagaaggtgagagtccaaattgtggtgatgagaatgggactgtcaataagagcacagacataagaaaaaggcacccatgtggcgagtcactcagctgaacttggcagtggattgaatgggatgagcaagggagataaagaagaccaatattcctcaagatttcaatcatggtttgatcaagttaatggtgattcagttacctgatataagagggtgaaaaaaaaaag

SEQ ID NO: 659017 - DNA, 642 bp, Homo sapiens
ttttgtttcaatttgtgctgacttcattgttggatataactttctccactgcaggaatatcaccaggctaattactaggaaatctctctcttttttttttggtatatggagtaatatgtatggatgaaaggaccttaaaattggaggatttttcaatctaaaattagatgctcatacaagagaacctctttcctactatagactcccttctccttcccctaatccccatcctgttcttagcagatggtgactgggcttatgctaaaaacttccagggacagagactttgctacttgtacacaggaagactattccattttgacacaactcaaattactagaaagttcaaccttatgagacaatttctttaattttgaaaatcatatctttggccatacttctgttctttgtagtaggaaaaatttatgttctctcttctgtatagtggtatttaaaatatttaaaaagattttcagaaatgctctacacctcaaagattttttattttctagggaaaaagtttctaaatgatctcttaatagttcctttaataatttgatttccaactctcttactgtctktctcactttctctgaatgattgatagtgtttagaggcccctctatgttatcaataactgat

SEQ ID NO: 659018 - DNA, 441 bp, Homo sapiens
tatccatattattatattacctcttcagttaaggtggctgtagttttactgatgatcctttctatgtcagcttccagggaggttaagttgtagaactcaaaaaatacaaaatttatagtcaaaatatttgggtagatttctgatttttctacctcaccctaggattcaaccttttatttagtgttctcatctataaagcagaaacacttataattcccacaaaaatagtggatgcatttttgagttatctgcttaacttattacatctcccttgttctggagttgccccctcrcccacaggtgagccatggcagccatttttgtggtagatggctccgccctgctggccaaagacaatagaactaggaaaagataacttttcaaattggggtgatcagagctacattctcctggtaatttggaattgaaactgagtaacga

SEQ ID NO: 659019 - DNA, 425 bp, Homo sapiens
gacttccagggataaccctggtcaaatagccatgggctggtcaatgattttgagttactctttgagagggaagcttggcttcagagaaggaaaggccagtgcaagacatgtgagcagcagttaggtgcatcctattcctagacacatacataggataaggaagtcaggtattgggactgtagctttggaatggactatacttgcttcagaatattatcagggggagtttgagaagcaagggctttccttcgttgattctcctttcaccagtcttcctggaaagaatattctgcagttacaaaataggttccttggctgcmagtctgatacttgtgctaaaaccaaatagatgaaaaagtatcaacatgaattttaaaaaatatattgtgtgagcttgtatagctaagaattcccagccccctaca

SEQ ID NO: 659020 - DNA, 545 bp, Homo sapiens
ggattctctccagaacttccagaaggaatacagcactgttgctatcttgattttagcccagtgagacccattgtagacttctgacctccagaatcttaagataatttgtgttgttttaagccgtcaagcttgaggttaatttgttatagcagcaatagaaactaatagactttgctatattggtttgagtctgttctgcacatatgtagctcagtgattattctgtaacttttgcaggttcatgcacagatttaagggatcctcttttctgattctctcccctctgggatttcccccatgctgtatagcctacagggtctacttctggtttctctggatagaaatatgggactcattggaattttacctgttggcatttccacaccactctgtgaccaaagcctgccttcagggcaaagtagagaarggaaatggaacaatattaaaacagaaactcacccctgtgtgttttgcttcagcaagtttttgaccctataacctattataaagtgaaatgaaaatgtggacacctgtgaagcggtccg

SEQ ID NO: 659021 - DNA, 571 bp, Homo sapiens
gtttgtggcgattttattgaacataattgccaggaataatgaaggaataatgagaattgactatacctctgaaacaaaaatcataagattggttgaaaatctgaaaaagaaatagactacctaatcctaaccccacaaagccaaattcattaaatttctcccatcccaacagcagatggggggaaaaaayttgaaagaaaggcaatgcagaaagcagaatattttttaaaagaaatattagttaaaccttcatagaaaataagaaaaaatgttgtacccacaaaatatgaataggatgctatgataaaggcataattagagaacaagaactcttggagattcaaaatatgagagctgaagtctaaagactagaaaataaagttgaggaaatcttccagaagatagaagaaaagacaaagagatgaagaatagccaacatctgactaccagcagtacagaagcacagaacagaggaatggagggaaagaaataatgagagaagtgatacaataaaattcccaagaattgaggaacatttgtttccagattgaaagggcccactgtaaacagc

SEQ ID NO: 659022 - DNA, 413 bp, Homo sapiens
gaattcaatgcttgggtcacctccagattcattttcacagtctttcatgttttggtcatattacattgtattttgctgccatatgactgatctytttttgttaaatgtgagatacttgttaaaaaatatttagcaatgaattgaggcctagtggcatgttatcttgctgcagaagagatgggagtctacttctgggggatggtcacgggtcctccatacaggctgcaattgaggtcgtcggtgcaggctcagtccctacaaaggccagggtatttcctgtctacctctattctgatgcatgactcttctgggtctcaaccagagccagtggatttcagtacgggtcgctttcattggcagaccctcaatccacttgttttccatctaatcccacgcatgtgtgcaaaagctgc

SEQ ID NO: 659023 - DNA, 410 bp, Homo sapiens
gtcacctccagattcattttcacagtctttcatgttttggtcatattacattgtattttgctgccatatgactgatctctttttgttaaatgtgagatacttgttaaaaaatatttagcaatgaattgaggcctagtggcatgttatcttgctgcagaagagatgggagtctacttctgggggatggtcacgggtcctccatacaggctgcaattgaggtcgtcggtgcaggctcagtccctacaaaggccagggtatttcctgtctacctctattctgatgcatgactcttctgggtctcaaccagagccagtggatttcagtacgggtcgctttcattggcagaccctcaatccacttgttttccatctaatcccacrcatgtgtgcaaaagctgctgtgcttctttg

SEQ ID NO: 659024 - DNA, 581 bp, Homo sapiens
tttttcctgacgtccatagatttattaagaatctggtattttaaacagtaggaaatacacatagaaatatcaaatccaagttgtgctagaccagaaacttttagaagacatccttaggagagagaaagacttacaagaataaagtgaggaaaacacggagttgatgcacaagccccaacatccaacctcgactcctctttcgtagatgagaaactctgtggagttgtgtgcactatagggatccccgcggtacacaatctgaaagagagattggaggctgttgaggtacaaatgcaatgtaktaagaacccttctcatgcactctgcttctccacctctggggagcaaatgtccctgcctgagggaccctttctagagtacagagctgatgctgtcatgaccaagtcgcatcctatcacatcttcattcaaggacctatcagaaatctaatgcttgctgcatcagatctcaacaacactctcttggatccttaacattcctccttccatctcacagctggccccacctgacttaggcaatcccaccactcatcttctgctacagccagtcggcttctgact

SEQ ID NO: 659025 - DNA, 427 bp, Homo sapiens
gaattcaatgcttgggtcacctccagattcattttcacagtctttcatgttttggtcatattacattgtattttgctgccatatgactgatctttttttgttaaatgtgagatacttgttaaaaaatatttagcaatgaattgaggcctagtagcatgttatcttgctgcagaagagatgggagtctacttctgggggatggtcaggggtcctccatacaggctgcaattgargtcgtcggtgcaggctcagtccctacaaaggccagggtatttcctgtccacctctattctgatgcatgactcttctgggtctcaaccagagccagtggacttcagtatgggtcgctttcattggcagaccctcaatccacttgttttccatctaatcccacgcatgtgtgcaaaagctgctgtgcttctttgca

SEQ ID NO: 659026 - DNA, 624 bp, Homo sapiens
  misc_feature 123: n = A,T,C or G
tgaacttttcaaatattcattttgttcatttttttttgtttattttttcttctcctgactcttcaatattggattggtggagccttctttattcccctgttacttccctctgaggtagaagtnatataggggctatttcgtggtatcttatttggttgtgtttgttttcttcattttggtatttttaatagtacttatctgatcacactaagacttgccaaagagtaacttagagaacgactccaaacctccctattccccaattctatccatgttatggctgccaagtattttactccactttgtttttgtgattttaatgcttatcaaaacaacaataacacgtctacatagtttaaacaggtaaatcatattataaggcttatcacaaaacagcagcctactgtctgactaccctgtcttctgattcttgcttcacggaagcaacagattttcaattatttgggctctctctccacttctatgttcctccataytactaagtaacctgtttatattgagaagtcttacaaatcacaaaaaaaggatagccttgggagttaaaattgcagctgtcagttactcaggtaaaagataaatttcaaaacggcagttgtacaacat

SEQ ID NO: 659027 - DNA, 533 bp, Homo sapiens
ttagttcaccacttcctcataagaaggtaataaatagtttggtgaaataaaatggtagcactgagtaattgcgggcttctggataggcagtcaggttgatttcatgttgctactgctggacttgagggctggcttggctgtggtggcagacacagcagcagctcaggatgatggtgatggtccaygccagccagaaccaccaatgttcatagtagtagttacaacactgagactgcccatagcagtgtcctgttgtgtcacagatgtagctttgattgttggtacacacacaggcttccttatcctgtgggggttcagccctggctgacacagggctgggcagtgcctagaggtgcaagagctccatgccacccaggagtcttccctccatactcctcctgctcctccgacccagcgtgggcacctccctccacccttgctgcacttctcctctaccctcttcttccttcttttgttcttttcctgtaatatgttttgaagtcagattgtgaggccttcagctttgttcttat

SEQ ID NO: 659028 - DNA, 617 bp, Homo sapiens
catattcaggcttcactactaattctaattctcttgcttttccaccacagcttcagtgactttctccactgaagtcttgaacccctcaaagttatccatgagagttagaatcaactttttttcctgccaggcatgatggctcacacctgtaatcccagcactttgggaggctgagaagtatggatcgcttgagttcaggacattgagaccactctgggcaaaatggcaaaaccctgtctctacaaaaaatacaaaaattagccgggcatgggggcaggcacctgtagtccagatacttgggggtctgaggtgggtggatcacttgagcctgggaagtagaggccacagtgagtggagattgtgccactgtactccagcttgcacaatgggagtagaccctgtttcaaaaaaaaaaaaaaaaaaaacacaaacaaaataaggagaatcaactatttcaaaacttctgtcattgttgatctcctcccatgaatcatgaatgttcttagtatcatctagaatggtgaatcctttctatgaggttttygatttactttgtccagatccgtcaaaggaatccccacctatggcagctatagcctcacaagatgtgtttttaa

SEQ ID NO: 659029 - DNA, 585 bp, Homo sapiens
tagttttaattgacaagaaataatggtatatatcatggctacaatgtgacgttttggtatatgtttacattgtggaatgattaaatcaagctaattaacatatctatcacctcacatatatgtcaattgaaaatgatttgcagggtctctctattaaaccttaatttaggaatgtgtagagtttgtctataagatacatgaggttttaattttaatgtaaaaccctgaagatgggaaagattatgtagaattatgggaaaagtagatattttggaatcagatggatcttcctttaaattctgactctgcttcttcttcttagctgttgagayctatgcaagttgtttttaaaaacttcagcttcagtttcttcatccataaaaagagaataataacacctacttaattcagcattagagaattcagtaaaatgacagatgtaagcctcctggcatttggaatgcactcaactgacttcagtctccttccacccacgctctgtccactttaaagtgtatccgatgaacacacagccaaggtttatgcaggaggccctgtttgatgtacccaagagctgttgctgtc

SEQ ID NO: 659030 - DNA, 532 bp, Homo sapiens
tgttcactgcattatctaatccacacaggattgtaaccactcaaaggcagaagagaccttagtggcatttaatataatcgcttaattttacagaagaaacagatgctcagagaccataactggtgatcagaggtcagccatctggttagagggcctggaaagcagaccttcactcccctctccgttactccccactggtggccatgcctacttcacagcaggtggtcagaggtgcagtgggaaattacctccctggaagtgcttttaataaaaaagaaggaaattctgcaatacgcaacaacttgaatgaacctggaggacattatgctaagtgaaagaagccagacacagaggggcaagtgctgcatgattccacttctatgagrtatctaaagtggccaaactcatagatgcagaaagtaggatggtggtggccaggggctgggggcagggggaaatggggcgtttgctagttgatggacatcaagttctagttaagcagataaatccattctcgagacctgctgcatga

SEQ ID NO: 659031 - DNA, 553 bp, Homo sapiens
attatcattcatatatatcaacaatgaattagctggaaaagaagtcaagaaagtaatcttttttataawagccacagcaaaaaattacatacctaagattacattttaccaaggaggtgaaagatctctacaattaaaagtataaaacactggtgaaagaggacataaaaatattgtaagatgactaggcacagtggctcatgcctgtaacctcagcactttgggaagctgatgcaggaagactgcttgagcctgggagttcaagacccacaacatagcaagggacaactctacaaattttttttaaaattagtcaggcctggtgtcatgcacctgtagtctcagccactgaggtggcaggattgcttgaacccgggaggttgatactgcagtgagccatatttgtgccacctcactacagcctgataataagaaaagaaagaaaaaatagtaagacaacccacgctcatggattgaaagaattaatattgttacaatgaccatactacccaaagcaatctcaggttcagtgcaatccctattaaaatttcaa

SEQ ID NO: 659032 - DNA, 583 bp, Homo sapiens
tatataattttaattataataaagtgacaaagtggagggtaaaactgtcagtctttttattcaaagacctttcattcaaaccctgatatttccttaagtgacttaaataaactccaaatgacttctcatggcatttaagatcctgcacaatctaattcctactatacttccaaaattattttttttctcctttcatcattcctcaggacacacctgtacatttcagtgttgtgaagcatagctctggtatcagactgcctaggttcaaatctcagctatggcactcattagctatatgaccttaggtaagttactcagcctctgtgagccttagctttgacttctrtaagatgagtagaatacgattgctatctccctgggtgactgtgaaaatcagacgagatcatggatatgagagggcagcattcatactaaagtaagatatgacttacttggaagtattaatgactacattataataaaagtttatgtgtgtattcatatatatatattctatatttaatctaacagtgactctgttctgagtcagaatatatcttaatgccacatagtaagccttaga

SEQ ID NO: 659033 - DNA, 489 bp, Homo sapiens
ggtgctgggaaaactggatatctataygtaaaataataaaactagacccctatctctcaacatatatacaaaaatcaatatgaatgaaagacttaagtgtcagacctgaaactataaaattgctagaagaaaacgtagtaaaaacactttaggacattggttaaggcaaatattttgtgactaaagcctcaaaagcacaggcagcaaaagcaaaatagacaaatgagattccattaaaccaaaaagctttttcacagcaaaggaaacaataacagactgaagagacaatgtgttgaatgagagaaaatatttgcaacttcagccaggggccatggctcatgcctgtaaccgaagcactttgtgaggctgaggtgggaggattgcttgagtccaggagttcgagaccaaaccagcctgggcaacacaaagacatctcatatctacaaaaattacaaaaattagccaggtgtggtggtgcacacctgtaat

SEQ ID NO: 659034 - DNA, 482 bp, Homo sapiens
aaaaaaaaaaaagatgagaccacaatgtcaaggaagacrgcaagactgcaatgtgtgtgtgtgtgtgtgtgtgtgtgtgtggtgtgtgtctttggaagattatgtttcttacaaagatatacacacccacactgatttttgtttcatttaaagccatgggaatagaagatattgcttagagagactgtgcagagtgaaggaaagcaaaagcctacaacacaggcctgcagtcacttaagtctcatggataaatgtggtcagaccagaagaaagaaaacaatatgctttcatgtctgtttatcccattaaaataaaaactatgcccccattgccaagcaaaccttcttttatgaaattgtgtcaataaatatttaaagaattcattttttaagttttaaggtcaggggtacatgtgcaggtctgttacacaggtaaacttgtgtcatgggggtttgttgtacagattatttcatcacccaggt

SEQ ID NO: 659035 - DNA, 687 bp, Homo sapiens
ctgatttgttcactgcgccttcttagagctcgtcagagatggtccatttgcacagcaaasctcctgcccagcttctggtcccacccttgcatcctccattggtgtgaaaatcctgcactagagccaggctgtggtcctggcatctcgagttgcctagatatccaagttcttctctgaatagcaagagatgggacacacatactttgtctcttgtccccccgcccccccagacactgcctgaagccttgttcctaatggaccaataaccagggatcatgacattgctgctcttccagtatttccctgttacatgggaatccacccaaaccaaggcttttactcagcctcggagcaggtcagcttgagttaaaacccttctgggcaactaatatgcacccattaaatatttattggctgaattgggtccatggaggaggaaaaacttgattgaggcttgagcgtgggacttttagacaagtggctagaagtgcgaaggcattctccctaaaggcaaagctcagagtcagcatcttgttgtttattgttcagaggacaacagtttctcttctttcactcttgatggccaagtttagaccgccattgcccaacagtctccaggacagctcatcagggcccttggtagcccaggaggcccttggtcactcaggaggccctagtgatagaccc

SEQ ID NO: 659036 - DNA, 687 bp, Homo sapiens
ctgatttgttcactgcgccttcttagagctcgtcagagatggtccatttgcacagcaaagctcctgcccagcttctggtcccacmcttgcatcctccattggtgtgaaaatcctgcactagagccaggctgtggtcctggcatctcgagttgcctagatatccaagttcttctctgaatagcaagagatgggacacacatactttgtctcttgtccccccgcccccccagacactgcctgaagccttgttcctaatggaccaataaccagggatcatgacattgctgctcttccagtatttccctgttacatgggaatccacccaaaccaaggcttttactcagcctcggagcaggtcagcttgagttaaaacccttctgggcaactaatatgcacccattaaatatttattggctgaattgggtccatggaggaggaaaaacttgattgaggcttgagcgtgggacttttagacaagtggctagaagtgcgaaggcattctccctaaaggcaaagctcagagtcagcatcttgttgtttattgttcagaggacaacagtttctcttctttcactcttgatggccaagtttagaccgccattgcccaacagtctccaggacagctcatcagggcccttggtagcccaggaggcccttggtcactcaggaggccctagtgatagaccc

SEQ ID NO: 659037 - DNA, 537 bp, Homo sapiens
gtaggcagcaatagtggcaatttgaatggtgtggcctcatgagcaacttgattctgttgcatccaatcrgtgaatacagccttactgtggacccctacatgagtggtatagacagttctatcagcaccatgatttatttcaatcattcatggccccaaaagaattgctttattctgccagtcagtaattttccaagtagatcaaatagctaagccagtaccaacagtccaggagtcaataaaaattaaagaaaggttcattgatgtgactattggattgttctatgagaaaaaccttgagttattcccactgagtagaacaagcatgtccattgtcagtactgaatagcttgcattaggttgaactgcagcagtcttgtagacaccactgagtttcatcttagctgaatatcaaccaaatgatctaggcatttagaggaactgctgaactgagagcctcgctgagccagtatctttgtttagtgggtggaataggaaataaagtttgccccagagtgagagctgattatatattttt

SEQ ID NO: 659038 - DNA, 643 bp, Homo sapiens
ttgtaaccttttaaagtttacacattcatttttaaaatatgtagatttctaaaatattctctaattaaataattgtcagctgcaagtaataatgttttcacttaatcttttccagaatgctttgtattttattctatttttgctttattcaatgacttcatttcatccagttcagtgttgaataaaactgcctctaatgaagatcggtttttttctagttattttgaagaaaaactttagttttttgtttggttgtttgttgttggtttgccattgtttctaagaaaccagtaaatagtcttccctcacaccttaattcttacattttaaatttggttcactggaatttcaacatttaatatcagcatcattaatgcagagggtttttctggaaagctgccctgtccagccacttggcaggcttagaaataccaggaaattaacacctcaagaagcagcttttaactacttactgaatcacagtsgtatataaatacttctttcccttgagtcatgttttttgaagcatttccctatttctccattgaattaagcttcaattacctactgtagaagactgctcaaaaatctactctttattgagttccttccctgtatccctttccctcttttctaccgttgt

SEQ ID NO: 659039 - DNA, 577 bp, Homo sapiens
tttatagctgcatagtttgtaggtaaaattaataatatgagaagagtaggaattgaacatggatgtcatatagcagagaaayatatataactgaatatatgcttcctagagcttcagttaaaaagtatgacaaaatgggaagcttaaaacaacataaatttcttttcacaattctggagaatagaagtttgaagtcaaggtgtcagcagggccatgctttctttgcatgctctagaaaagactcccttccttgcctctccctagcttctggtcataaaggaccgttctcaacatcccttagctagtagctgttaccctccaatttctgcctctgtcttcatgtattacagctgtctttcctctgtgtgtgtctctgggtaaattttctctcttcttatgaaagcatcagtcattggatttaaagcccagcctaatccagttaagatgaggtcatgtgcttgtttagatgagagtacatttatgtcctttagggaatggtcacacaataaagagtgaacccctacttagtatcttactcttcagactagtgtttctttcagtgaattagactttgccc

SEQ ID NO: 659040 - DNA, 577 bp, Homo sapiens
tttatagctgcatagtttgtaggtaaaattaataatatgagaagagtaggaattgaacatggatgtcatatagcagagaaatatatataactgaatatatgcttcctagagcttcagttaaaaagtatgacaaaatgggaagcttaaaacaacataaatttcttttcacaattctggagaatagaagtttgaagtcaaggtrtcagcagggccatgctttctttgcatgctctagaaaagactcccttccttgcctctccctagcttctggtcataaaggaccgttctcaacatcccttagctagtagctgttaccctccaatttctgcctctgtcttcatgtattacagctgtctttcctctgtgtgtgtctctgggtaaattttctctcttcttatgaaagcatcagtcattggatttaaagcccagcctaatccagttaagatgaggtcatgtgcttgtttagatgagagtacatttatgtcctttagggaatggtcacacaataaagagtgaacccctacttagtatcttactcttcagactagtgtttctttcagtgaattagactttgccc

SEQ ID NO: 659041 - DNA, 577 bp, Homo sapiens
tttatagctgcatagtttgtaggtaaaattaataatatgagaagagtaggaattgaacatggatgtcatatagcagagaaatatatataactgaatatatgcttcctagagcttcagttaaaaagtatgacaaaatgggaagcttaaaacaacataaatttcttttcacaattctggagaatagaagtttgaagtcaaggtgtcagcagggccatgctttctttgcatgctctagaaaagactcccttccttgcctctccctagcttctggtcataaaggaccgttctcaacatcccttrgctagtagctgttaccctccaatttctgcctctgtcttcatgtattacagctgtctttcctctgtgtgtgtctctgggtaaattttctctcttcttatgaaagcatcagtcattggatttaaagcccagcctaatccagttaagatgaggtcatgtgcttgtttagatgagagtacatttatgtcctttagggaatggtcacacaataaagagtgaacccctacttagtatcttactcttcagactagtgtttctttcagtgaattagactttgccc

SEQ ID NO: 659042 - DNA, 577 bp, Homo sapiens
tttatagctgcatagtttgtaggtaaaattaataatatgagaagagtaggaattgaacatggatgtcatatagcagagaaatatatataactgaatatatgcttcctagagcttcagttaaaaagtatgacaaaatgggaagcttaaaacaacataaatttcttttcacaattctggagaatagaagtttgaagtcaaggtgtcagcagggccatgctttctttgcatgctctagaaaagactcccttccttgcctctccctagcttctggtcataaaggaccgttctcaacatcccttarctagtagctgttaccctccaatttctgcctctgtcttcatgtattacagctgtctttcctctgtgtgtgtctctgggtaaattttctctcttcttatgaaagcatcagtcattggatttaaagcccagcctaatccagttaagatgaggtcatgtgcttgtttagatgagagtacatttatgtcctttagggaatggtcacacaataaagagtgaacccctacttagtatcttactcttcagactagtgtttctttcagtgaattagactttgccc

SEQ ID NO: 659043 - DNA, 461 bp, Homo sapiens
cagagtatcgacacaaaggttctccaaggccccaccagagcagctagatacagagtgtcgattggtgcactcacaaaccttgagctaaacacagggtgctgattggtgtgtttacaaaccttgagctagatacagagtgccrattggtgtatttacaatctctgagctagacataaaggttctccaaggccccaccagagcagctagatacagagtgtcgattggtgcactcacaaaccctgagctagacacagggtgctgattggtgtgtttacaatccctgagctagacataaagactctccacgtccccaccagactcaggagcccagctggcttcacccagtggatcctgcaccaggccgcaggtggagctgcctgccagtcctgcgccatgcgctcgcactcctcagcccttgggcggtcgatgggactgggcgcagtggagcaaggggcaacgct

SEQ ID NO: 659044 - DNA, 461 bp, Homo sapiens
cagagtatcgacacaaaggttctccaaggccccaccagagcagctagatacagagtgtcgattggtgcactcacaaaccttgagctaaacacagggtgctgattggtgtgtttacaaaccttgagctagatacagagtgccaattggtgtatttacaatcyctgagctagacataaaggttctccaaggccccaccagagcagctagatacagagtgtcgattggtgcactcacaaaccctgagctagacacagggtgctgattggtgtgtttacaatccctgagctagacataaagactctccacgtccccaccagactcaggagcccagctggcttcacccagtggatcctgcaccaggccgcaggtggagctgcctgccagtcctgcgccatgcgctcgcactcctcagcccttgggcggtcgatgggactgggcgcagtggagcaaggggcaacgct

SEQ ID NO: 659045 - DNA, 461 bp, Homo sapiens
cagagtatcgacacaaaggttctccaaggccccaccagagcagctagatacagagtgtcgattggtgcactcacaaaccttgagctaaacacagggtgctgattggtgtgtttacaaaccttgagctagatacagagtgccaattggtgtatttacaatctctgagctagacataaaggttctccaaggccccaccagagcagctagatacagagtgtcgattggtgcactcacaaaccytgagctagacacagggtgctgattggtgtgtttacaatccctgagctagacataaagactctccacgtccccaccagactcaggagcccagctggcttcacccagtggatcctgcaccaggccgcaggtggagctgcctgccagtcctgcgccatgcgctcgcactcctcagcccttgggcggtcgatgggactgggcgcagtggagcaaggggcaacgct

SEQ ID NO: 659046 - DNA, 453 bp, Homo sapiens
tgtgagcttgttttgcgtaagtgggatttgcaaacaggagctattgtggagaggagtttcctctaaacttcagggcaggaactgcctgactagtgaaaacatcactatccttggtgacccaggatgttaggaaaatcaggttcagttaggtaaatcctaatgggggctggaagcagcattcaaagaaaaagtacagaagtaagttggctggggagaaggcatttgggcttatgggtggctggaaagagcagtcctcttcacccggacaccaatacttgcctcttgcttctgtatcartgcacctacagcaaagtcattttgttttgttcaggaagatggcgtgcagtgtgtaatgctgtttaggactcaagcttttagacacaagaggggaagccagtgcacgaactgtgtcatatccactgtttgtaatgattacagaggaagggagaggaa

SEQ ID NO: 659047 - DNA, 621 bp, Homo sapiens
atattggtggagatttgggggaagggagagtcaagacccccagacttccccacatgaattctaaaaatagagtctactttcttgccatgaagtacaaacattttgggaaaatgaggttaaaagtacaacttttcattctaggcaggcagaacggctttcatgtgtggccctgagctggctcttgtgctgctcccagtggtgagtgggtggaatcttgagctgcatgtccctcccaaaggcaaatactgcaatgaccaggccagggatggaactgaagccacctatggcaggagggacctgaaagttagttttaagttgcagatcatagtggagggtggtaattccaggtctttggcacrtgtctttggtacatgtcatccacagctcaggattagccaacatctcctcctgcctttgtcttgggcaatgtgggactctggactctgtttagaaggttactaagggaggagccatacctccggagcatttaagtgaggaaggtctatgtatttccttgagaaaaaaatagaagaaaattaaaatgtctgagctattcttaataggaaattcaggaattgaatattctgaatggttaaaaattatgtctggaggccgggcaca

SEQ ID NO: 659048 - DNA, 438 bp, Homo sapiens
tgcaatgcacatggaagtgcagatatctctttgatacactgatttcctttttttttttttttttttttgctatgtacctatcagcctagcagtggcattgctggtagttttatttctagttttytgaggaacctccatactgttctgcatagtggctgtactaatttacatttccaccaacagtgtacaagggttaccttttctctgcattctcaccagcatttgttattgcctggcttttgcataaaagccatcttaactggtgttatctcattgtagttttgatttgcatttctattgagcatgtttttatatgtctgtttgcaatttgtattcttttgagaaaagcctgttgacatttccttttgcccatttttaaatcagattattacatttttttctctttgagttatttgaccttcttatatattctggtta

SEQ ID NO: 659049 - DNA, 439 bp, Homo sapiens
gaattctattcattttaattttatctcccacagattgtctgaagtgtttgatatctgatgttacctctatacgagaacataggataggtctgggtcggaccacagtgaaccagctggtcagttactttctttaactgtctctagatcttctcaaagagctccttcacttccagaytggctgctgcccgaaaaacttgagagtcactgagagccactgctccagagaaagattactcttcaggagcagggaaacctgggatccgggtgtggctctctactaacccacctttgaccagcagcctcatctcactgggcctcagtttcccagtcatgtttggggtacaaccacgcctgcccccatcctacctgacagggctgatacaggctcaagagtgtgatgggtgtggaagagcttcctgaaatgccagctcgatatgtt

SEQ ID NO: 659050 - DNA, 509 bp, Homo sapiens
agaaaaaagtcagtcataaaacatttatatatttagggtcctatgatctgtgtaatttctagaagagtttcctttaagctcgaaacatactgtactgtaggaaggattttgactgaacacaactttcttgagaatcctgtgtaggtaaaaagtgggagggagataccaaggtaagatgagtcaataaaataaattgcttttatataaaagcatatacaccacccatcttttgccattttgagtatttgccattattattacatttattgaatatgttgcctatcattctcgtgaaacttcaaaaagccaaatttcacgtcagaaatcgagtctaaatattaatcaatattcatgattaaatattaacctcctatcccctgtatattccatattgtggctagtaaatgtgagctctaaraaaatgctcatagctataagcatagagctttggtcgaaagctcttactcttttttgaggagtggcatttatgggtagaaagagaaatatgc

SEQ ID NO: 659051 - DNA, 507 bp, Homo sapiens
caccagcatggaagtaactaaacacagacacgacttatattaggatttgtttgtttgtttgtttgtttgttggagacagggcctggctctgtcrcccaggctggagtgcagtggcatgatcatagctcactgcagcctcaaactcctggcctcaaaccatccttctgcctcagcctcccaactacctaggactacaagcacatactaacaggccaggctaatttttaaaatttgtttttggagatggggtctcgctgtgttgcccaagctagtcttgaattcctggccgcaagagatcctcccatcccattctcccaaagtgctgacattacaggaatgagccaccatgctcagcccctatcaatatttttaataaccgtttgtagcaaaacttttttttgagacagggttttgctctgctgcacagtgtaacaaaacttttaagaaaccccaaaacatggactgactgagctacctaaaagtattagtcacccaatcttcagcaaa

SEQ ID NO: 659052 - DNA, 587 bp, Homo sapiens
ctacttcatttttatgttttcattggtgctgaatataacacaaaaatcccagatatataatagataaattaggccattttattttactataaaatagcctttcctttaaaaaaaaaaaaaagattcatggcagaatttattttaaaacaaaaacaacagcatctctaatatgttttaaatatattgtttgtggatatactctctcagaaacacataaagttctacacgtactatgattaagaattcccaagtttcattcattattcatgaatgttactgggatgttttytagatgttaaactatttcttgacaaaagattgaaggagtttttaaatccctcataacaattatattactataataccacaattatattaaaatgtttatatttcttagtctttatagttaacttgaaatatacatatgtatacagcttaacgtagataaatttgttctgctttttcacagatcagacattatacccttttttctgttttactatagagtatttatggtgattaattttaattttatttagttgatcatatattttctgagtctctgaatgttttccagttgatggttt

SEQ ID NO: 659053 - DNA, 587 bp, Homo sapiens
ctacttcatttttatgttttcattggtgctgaatataacacaaaaatcccagatatataatagataaattaggccattttattttactataaaatagcctttcctttaaaaaaaaaaaaaagattcatggcagaatttattttaaaacaaaaacaacagcatctctaatatgttttaaatatattgtttgtggatatactctctcagaaacacataaagttctacacgtactatgattaagaattcccaagtttcattcattattcatgaatgttactgggatgttttttagatgttaaactatttcttgacaaaagattgaaggagtttttaaatccctcataacaattatattactataataccacaattatattaaaatgtttatatttcttagtctttatagttaasttgaaatatacatatgtatacagcttaacgtagataaatttgttctgctttttcacagatcagacattatacccttttttctgttttactatagagtatttatggtgattaattttaattttatttagttgatcatatattttctgagtctctgaatgttttccagttgatggttt

SEQ ID NO: 659054 - DNA, 530 bp, Homo sapiens
caggaagaggtgtgctccacaggtggatccctgatggagaatctctgtcatggcagtgcaggatggaaatgtgaggttkaagtccccacacagagtccccactggaacactgcctaatggagctgtgagaagatggccactgtcctccagaccccacaatagtagtcccactgacagcttgcactgtgcacctgaaaaagccatagacactcaacgccagctgtgaaagcagctgggccagggagctctaccctgcaaagccacaagggtggatctacccaaggtcatgggagcccacctcttgaatcattgtgacttggatgtcagacatagagtcaaaggaaattacttaggaactttgagatttattgactgccctgttgaattttggacttgcatggggcctgcagcccctgttatgaccaatttctcccattcggtatgggagcatttatctgatccctgtatccccattttatcttgaaagtagcaaacttgcttatgattttacaggctcataggcagaaagg

SEQ ID NO: 659055 - DNA, 530 bp, Homo sapiens
caggaagaggtgtgctccacaggtggatccctgatggagaatctctgtcatggcagtgcaggatggaaatgtgaggttgaagtccccacacagagtccccactggaacactgcctaatggagctgtgagaagatggccactgtcctccagaccccacaatagtagtcccactgacagcttgcactgtgcacctgaaaaagccatagacactcaacgccagctgtgaaagcagctgggccagggagctctaccctgcaaagccacaagggtggakctacccaaggtcatgggagcccacctcttgaatcattgtgacttggatgtcagacatagagtcaaaggaaattacttaggaactttgagatttattgactgccctgttgaattttggacttgcatggggcctgcagcccctgttatgaccaatttctcccattcggtatgggagcatttatctgatccctgtatccccattttatcttgaaagtagcaaacttgcttatgattttacaggctcataggcagaaagg

SEQ ID NO: 659056 - DNA, 586 bp, Homo sapiens
tctttgggttaaatctgcttggtgctctataaccttcttgcacttggatatttatatcttcctctaggtttgggaagttctctgttatacatttgaacaaactttccatgttgattttctttgagtttcctcaggatcggtccctggtgccttatttagttcatttggtgaggtcatgttttcctgaatggtgtcaatgctagtaggtgttctttggtgtctgggcattgaagggttaggtatttattgtaaccttcactgtcagggcttatttgtagccatccttcttgtgaaggcattctagatatttaaaaggagttgggtgttgtcatctaagctgtatctgctttaggaggcactccaagcctagtaacactgtggttcttgcagacttatagagataccaccttgattgtcttggaccggatctgatagaattctctagataccacgcagaggcttgtgttgtcttttctcactttctcccatacatgcagagtttctctctctttgctttgagtcacataaagctagggtggagtgatacaagcacccctgtggccrccactactatgactgcactggg

SEQ ID NO: 659057 - DNA, 589 bp, Homo sapiens
ccaatcagcaccctgtggtctagctaaaggtttgtaaatgcaccaatcagcactctgtaaaacagaccaatcagcactctttaaatggacgaatcagcgctctgtaaaatggagcaatcagcaggacgtgggtggggccaaataagggaataaaagctggccacccgagccagccyggcaacccacttgggtccccttccacgctgtggaagctttgttctttcactcttcacagtaaatcttgctgctgctcactgtttgggtctgcactacctttatgagctataacactcaccgcagggtctgtggtttcattcctgaagtctgcgagaccacgaacccaccgggagaaacaaacaactctggatgcctcacctttaagagctataacactcactgtgaaggtctgcgacttcactcctgaactcagcgagaccacgaacccactggaaggaagaaactccggatacatctgaacatctgaaggaacaaactccggacacaccatctttaagaactgtaacactcaccacgagggtccgtggcttcattctagaagtcagcagaccaagaacccaccagaaggaac

SEQ ID NO: 659058 - DNA, 585 bp, Homo sapiens
ttatttatgagtgcctgaaattggaaagggcctaattatcaataataataagctggttaaattactatttaattctgggccttccatacattggactcttacgtaacaattaaaaagatgatgtagctctacatttattttcaaggaaatacgtcctgacrtactgctaactgagaggttatataacagtatatactgtataactctattttaataaaaacatatatttatgcataaaattattggaaagctaaaccacaacatgttaatgatgttatgtctaggcagagggattagaaatatatatatgttttatttcttttggcttgcctgtgttttttaatttttattttaaagttatggattactttgggaacatatagagttccaaatacatttaagtaaggctccctatgtgctcattaattaggctcacctttgctattcttaggttgcttgtttttccctaaccctccagaacagaccagcccccatgttctgacccacctctccttcctcccctttttcaccaactactggggactggagatatgcctgagtccttgaatcaaatagagaatacag

SEQ ID NO: 659059 - DNA, 600 bp, Homo sapiens
agtgaatcatattctgggtgttaacaattcaccaaatgattcctatgcacatgaaagtttgagaagcatgggcctatcatgagatatttcttggtcctcatatctgttgagtcaagaatatctagtgcttcatctctccctttttagatamtcctttatctttcaaatataattttctcctggttttccttctgtctctgtgactatttcttctcaatctgcttttttgtagtctatagctaaaatcctccattaggttttattttctcctgtttccacaccacatacttgtattgtttaagattagattcaacaggaaataatagtaagcccaccaaaacaatggtttaaacaagataaaagaccattttttctcatgtcaaatgtaggcagtccagtgatggactgctaaactgctccacaaaccttttagtcactcaagctacttctattctggttcttcatacttcatagcttccatttccaaggtcactgaggtttaaataccacagatatcacatgtgcacatcagcttccaggaaggaggaagggatgcacaaaaaaagggcaaaaggcagctgccaaattctaaaatctgcc

SEQ ID NO: 659060 - DNA, 522 bp, Homo sapiens
ggggctgactgacacctcatacgactgggtgcacctctgagacgaagcttccaggggaacgatcaggcagcaacatttgctgttctgcaatatttgtggttctgcagcctctgctggtgatacccaggaaaacagggtctggaggggacctccagtaaactccaacagacctgaacctgaggctcctgactgttaaaagcaaaactaacaaacagaaaggatatccacaccaaaaccccatctgtacatcaccatcatcaaagaccaaaggtarataaaaccacaaagatggtgagaaaccagagcagaaaagctgaaaattctaaaaatcagagcgcctcttctcctcaaaaggaatgcagctcctcgccagcaacagaacaaagctggatggagaatgactttgatgagttgagagaagaagccttctctcaagtttgttataggtaataacaaacttctctgagctaaaggaagatgtttgaacccattgcaaagaagctaaaaaccttgaaaaaagat

SEQ ID NO: 659061 - DNA, 522 bp, Homo sapiens
ggggctgactgacacctcatacgactgggtgcacctctgagacgaagcttccaggggaacgatcaggcagcaacatttgctgttctgcaatatttgtggttctgcagcctctgctggtgatacccaggaaaacagggtctggaggggacctccagtaaactccaacagacctgaacctgaggctcctgactgttaaaagcaaaactaacaaacagaaaggatatccacaccaaaaccccatctgtacatcaccatcatcaaagaccaaaggtagataaaaccacaaagatggtgagaaaccagagcagaaaagctgaaaattctaaaaatcagagcgcctcttctcctcaaaaggaatgcagctcctcgccagcaacagaacaaagctggatggagaatgactttgatgagttgagagaagaagccttctctcaagtttgttataggtaataacaaacttctctgagctaaaggaagatgttygaacccattgcaaagaagctaaaaaccttgaaaaaagat

SEQ ID NO: 659062 - DNA, 476 bp, Homo sapiens
gtactctttgtgttttaggacatctattttggaaactattttgtcragtggagttcgcctcaagaataagatgaggaactgataaaatctgtttccaacttgtctattggtttcaatatcaaggtgacattttcagacaatttctcttttaattttattcctcctagaaaaccatttttccattttgtactaaacatggtcatcttacttttagtctgttccacgttgggtcgtatattttacatactttgaagtgcaaattttttaagtctaaattgtgttcctttattgctgaatcagaattacttactacacttttgtgtttttataatatactgttttcctctactacttcttttataaaatctgccccattgagctggcattattatttggctccaccgctagattgaaagctctttcaggagagactatgcattattcatgttttcattctgcagaaactttcatagcat

SEQ ID NO: 659063 - DNA, 319 bp, Homo sapiens
agaaccataaccccaaatctctaacataccaaagtagagggaatcatacagcaaacacctatgtatccattgcccatattagattgcatcttttcttttaaacagaatatctgaggattgccatgtttctaatatgttaaatacaggacyggtttgtgtcagagtgcaaatcaattattcctgaaatgatggagagatatttcaccaacttgttctccttgaggtttttctttttttttttttttttattgatcattcttgggtgtttctcgcagagggggatttggcaggatcacaggacaatagtggagggaaggtc

SEQ ID NO: 659064 - DNA, 319 bp, Homo sapiens
agaaccataaccccaaatctctaacataccaaagtagagggaatcatacagcaaacacctatgtatccattgcccatattagattgcatcttttcttttaaacagaatatctgaggattgccatgtttctaatatgttaaatacaggactggtttgtgtcagagtgcaaatcaattattcctgaaatgatggagagatatttcaccaacttgttctccttgaggtttttcttttttttttttttttwattgatcattcttgggtgtttctcgcagagggggatttggcaggatcacaggacaatagtggagggaaggtc

SEQ ID NO: 659065 - DNA, 443 bp, Homo sapiens
gaattcttgaggaagaagaagcaggtggaggagaagaatggcatttcctgaccttgcccacattttctgtatcagaaactggaactgatggtgaagatgaggagtacctattttcaaaattctccccagataactgtgatgagcaaccatatttggatatttgattcagcagttctggagtcagagactttgcatttctaatcagtttccaggtaatgctcaagatgctgatggcagaatcacattttgagaaccgctggcctaaaccaatgtttctgaacactggttgcacrttcagatcacttaggaatattttaaaaattcaatgtctagactgtgacttcatccacttacgtcaactctggcgtgggactccaggtatctgtggcttctaaagctcctcaaattattctagtgtgcagccagggttaaggatgtctttg

SEQ ID NO: 659066 - DNA, 602 bp, Homo sapiens
tctggacaacaatacaattatgatatcagagaactcttaatttctcaaaaacacttcactgactctcacaycaactagaacagcaagtatcaacagagaaatctgaagtccagagcaggtgagtaaatcttccaaggtcacacagcctgtaaacaacaaggtctggtgactcttgcctgggatccttttgcagttccttggcaattagttgaggcaggtatattagttatctattgctgcgtaacaaattatcccaaatttgggagcagatcagctgagtggtcctgactctgctgagattgcactgaagctgtcaactgggacaaaccatctaaggcttgtgtggggctgcaggatctgcatctaagctcggttgcatggactttggcagaaggcctcagttcttccccatgtgaacctctccacagggacctctccacagggcttcttgcatttccttatggcttggtagtggcttccactagagccagcaataagagagaaagagcaggacagaagcttcaatgacctgtattacctaaatttggatgccactacattctgttggttagaagtgagtcagtaatttcagctcatactca

SEQ ID NO: 659067 - DNA, 637 bp, Homo sapiens
tgcttttataagcactgaaccaaatataatggcttaagctacagaaaaatattttcttggaatttaaaaaatttcctaattaaattttaccgacataataattacatcaagaagtattttggttaagtataaaggtaaatcttgtataaaccaaatgttcatgaatactgtttgtcatcatttaacaacaggtaaccctttcatttctttttgagacagagttttgctcttgttgcccaggctggagtgcaatggcgtgatctcggctcaccgcaacctccacctcccrggttcaagccattctcctgcctcagcctcccgagtagctgggattacaggcatgggccactacgcctggctaattttgtatttttagcagagacgggatttctccatattggtcaggctggtctcgaactcctgacctcaggtgatccacccgcctcagcctcccaaagtgctgggcttacaggagcaagccaccgcacccagccaggtaaccctttaacagtggtttctgtatactatttcctagttctatcagtcattaagattttataacactctagtagagctgctaaaaattaaaatttatgaaaaaagtgttttttggttttgggttttttttttgaggcag

SEQ ID NO: 659068 - DNA, 540 bp, Homo sapiens
atctctactcccactctgttcaataaaatcctatacatccttcaaatgtgcccttaaatctcaccacatttgtgcatacttccctgtcctgacagctggaatcactgaatctcttctttatgaacccatagaattttaaaatttctacaccactgatacttattatgctgtgcattcatgcttggatctctaaccatggcactgaaaatcctggagagcagattgaccatctttcgatattgcaaaacccgaggcttatttctccacctttaggatacaataagagctcaagattttatggtggaaataaattcaaattaaggctccttcttcctctaaaatgccttatcatgtattwgtgaattagtgctgcatactgatgaacttactctatactcaactccaacttccagtaaataatcaatagattgttattggaggagaaaattaacattattgtgcatatctgttgtaacaagtttcagcctggattattatgctttcataatcattctcattttcttaagaaatactaccttg

SEQ ID NO: 659069 - DNA, 571 bp, Homo sapiens
aatgttttcccccttttttgaaagcagaaaatttcccccaaattctccaatacctttatttgttagtttttgctttatttttgtaatcaaataacaatacaaaaacacacaaataccccgccagcatcaggtgcaccacaatcatgaaagataaaataacccccatgcaattaaatgaccatcagctacagaactttgcagcagctacaactgacccattctggcttcacattcctaatatgcatctctgcatattattcataaaatacattctgaatccaaaaattagatgaaatcatgggcaactcaggagtcctaatcttcctactcatctaccttttgcactagcaggaaaaaaatgggaggaagggaataggatatatctaataatttccaaagcatyattcccataggaatgagtagggaagatgggacctcagttatcagatccatataccaattatgtcaagaggcaaaagaaaactgtcagtaccaaagctaagaagtctcagtactccttaatgacaaactgtccttggacactggctcagatttagtgagttaattatta

SEQ ID NO: 659070 - DNA, 619 bp, Homo sapiens
acgctctcctcctactccacctgctgacacctctcatgggagcagagtagggatttcactaatgtggtgccagcatgtcctaattttaatttttaatcatgaggaagatagtggtgaccccaggtaagaagtcctgggtcccatgcagagaaaacaaacatgagggtttgcagatgaaaagaagatggttaaagacctccactgtattccagaacaagaagaatcttaagacaatccacacagaagggcatttagaaaggccaaaggtgtaatctgaccacagttgataaagattttaggcaatttcattccattcttactcttagctccttaatgtttatttggatttgggaggtcaggaaaagataatggaatgtgtgatgtagagatatctattagaaaaatgaaaggtaattgtgacctaataatagaattaaaatttgtgacagctggastatacatagttcatctctaaattctttttctcaaacactgcaaaaacatacactcaaggattctgaatgtccaccaaatgccaaaaatcagtcctttacatagtcccttaaatacatatgcatgttcagcaataagccatctctctcctccccttcctctccca

SEQ ID NO: 659071 - DNA, 584 bp, Homo sapiens
ctaaagtgggaagctccttataaaaccatcagattgcatgtgaactcactatcacaagaacagcatggagaaaaccacctcccatcattcarttttctccacctggtctcacccttgacatgtggggattattaaaattcatggtgatatttgggtggggacacagagccaaaccatatcattactcctattagctgttggttttgcagtgattcatttgcaatgaatatctttttccactcttttactttgtctgtgtgtgtattttacacataaggtagttgcttctaagtagcatatagttggatcatgctttttaaaattcattctgccaatctataccttttaagtggaacatttaatctatttaaatacaggattaatattaatatgtgaggttttgttccggtcatattattaattgttttctagttgttttataagttatttctttctttttctctgtttgactttctggtttggtgaaattctgtcatgttgacacttgatttctttttcttccttatttgtgtgattttttttataaggcctgtgatttatattattttctgtggtttcatgat

SEQ ID NO: 659072 - DNA, 406 bp, Homo sapiens
gttgaaaaacttataaataagttaaatatacatttcttgtctggtaacaatgtgaataaaaacaatctcaggaaaatatttagaccagctcttgacaaccaggattcctcaaaagaattaaggcctacaaagaatgatttgagtaactgtcttctcaattctctcagggatgatacattctgtgtgcacagaagagaaattaattcattacacacaataggtgccttgggatgttagggcttagttatctggaatgctggttgagaagggctgatactgattgttattgcacaaatctaaaccataagtatgaaaaagacttaaatcagttttcagtcagatcttaggaaggatagtatcacatattgrttaggccaatccattaatgagctggtcaaatatttaa

SEQ ID NO: 659073 - DNA, 541 bp, Homo sapiens
gaattcctttataatgtctgcatttaataaagtaaaaggagtgagaaaaaagatctgggaacagggcactggctatgtaaggagggcaaggtgggggyagggagttgggggcttggaatttggtgtttgatgtttgaaaggagccatggctagggcacatgtcaatacattgtgtaaaccaaaaattaaattctaagctcccgactgactgatgatggacccccattctcagccaaggacattccaaagtaaacctgaaaaactagttcaggccacattgacaagggagggttcaacaggccacatcataccctcctgcctttggaatttaggcacaactgaccagcattaatattaaaacagagatcttaagaccgacaaaatagactctttgtaataataaggtatccaattccaacatgactccagtataacatcacatggcagatagcaggtccttaaagaaactgaagtattttacctccaaatatatttctttgaaatattttgaaatggtcctgcaaatcaatctcttacgggg

SEQ ID NO: 659074 - DNA, 541 bp, Homo sapiens
gaattcctttataatgtctgcatttaataaagtaaaaggagtgagaaaaaagatctgggaacagggcactggctatgtaaggagggcaaggtgggggcagggagttgggggcttggaatttggtgtttgatgtttgaaaggagccatggctagggcacatgtcaatacattgtgtaaaccaaaaattaaattctaagctcccgaytgactgatgatggacccccattctcagccaaggacattccaaagtaaacctgaaaaactagttcaggccacattgacaagggagggttcaacaggccacatcataccctcctgcctttggaatttaggcacaactgaccagcattaatattaaaacagagatcttaagaccgacaaaatagactctttgtaataataaggtatccaattccaacatgactccagtataacatcacatggcagatagcaggtccttaaagaaactgaagtattttacctccaaatatatttctttgaaatattttgaaatggtcctgcaaatcaatctcttacgggg

SEQ ID NO: 659075 - DNA, 581 bp, Homo sapiens
gaaaaaatagcaagtctgattaaaataatcaggtccttcaggtgtgtgagttaaaccatcaactaaggctgaagggcatatgaagtcaattgatttggtaatttgctttgtttctgctctgatatgggtcaactatgatagtctcttcaacaggcacccgctacccttcatagatgaaccaattattctctgtttctgttagagakcaccaagatagagaaatgagacaagggtctggctggtcattccagtactgtgtgccttttaaaagcagcaagggtatcccaggatgacattagcaccatttaacaaactgtgcattcaaaaatggccatgtcaaacttctccactagactgtgagcttcttgaggatagagtcatgtctgtctgacttagcaaaacccctagccctagtctaatcatgagaaaaacatcaaacaaaccccagttgagggacatcctacaaaatatctgaccagtactcctcaaagctgtcaaggtcatcaaaaacaaagaaagtctgggaaatggccacagccaagaggagcctaaggagatgggacaactaaatgtagtgtggt

SEQ ID NO: 659076 - DNA, 581 bp, Homo sapiens
gaaaaaatagcaagtctgattaaaataatcaggtccttcaggtgtgtgagttaaaccatcaactaaggctgaagggcatatgaagtcaattgatttggtaatttgctttgtttctgctctgatatgggtcaactatgatagtctcttcaacaggcacccgctacccttcatagatgaaccaattattctctgtttctgttagagatcaccaagatagagaaatgagacaagggtctggctggtcattccagtactgtgtgccttttaaaagcagcaagggtatcccaggatgacattagcaccatttaacaaactgtgcattcaaaaatggccatgtcaaacttctccactagactgtgagcttcttgaggatagagtcatgtctgtctgacttagcaaaacccmtagccctagtctaatcatgagaaaaacatcaaacaaaccccagttgagggacatcctacaaaatatctgaccagtactcctcaaagctgtcaaggtcatcaaaaacaaagaaagtctgggaaatggccacagccaagaggagcctaaggagatgggacaactaaatgtagtgtggt

SEQ ID NO: 659077 - DNA, 610 bp, Homo sapiens
aaaatttcatttctagaagtgtttgtatccaaccaaaatatagctcttttatttttttattttttgagacagaatcttgctgtgtttcccagtctggagtgcagtggcgtgatcttggctcactgcaacctccgcctcctgggttcaagcaattcgcctgcctcagcctcctgagtagctgggattacaggcatgcaccaccacatccggctaatttttgtattttgagtagagacagggtttcaccatgttggcctggctggtcttgaactcctgacctctgaagattccaccagcctcggcctccctaagtgctagaattgcaagggtgagccactgcgcccarcctagctcctttaatttaagagacttttaaaattcaatttattaatacgctctggatatacaaaaacatcaaatacacaatgaaaggtagttttctgaattatagacacctagacttatgatcccgtagatagtttatagcttcaattctaccattttagctgctactcataaaaactcacagttccaagtatcaaagagctcttgtctttcctagtaggcacaaaattattatctcatttacatagacaaatggacaaacaaa

SEQ ID NO: 659078 - DNA, 610 bp, Homo sapiens
aaaatttcatttctagaagtgtttgtatccaaccaaaatatagctcttttatttttttattttttgagacagaatcttgctgtgtttcccagtctggagtgcagtggcgtgatcttggctcactgcaacctccgcctcctgggttcaagcaattcgcctgcctcagcctcctgagtagctgggattacaggcatgcaccaccacatccggctaatttttgtattttgagtagagacagggtttcaccatgttggcctggctggtcttgaactcctgacctctgaagattccaccagcctcggcctccctaagtgctagaattgcaagggtgagccactgcgcccaacctagctcctttaatttaagagacttttaaaattcaatttattaatacgctctggatatacaaaaacatcaaatacacaatgaaaggtagttttctgaattatagacacctagacttatgatcccgtagatagtttatagcttcaattstaccattttagctgctactcataaaaactcacagttccaagtatcaaagagctcttgtctttcctagtaggcacaaaattattatctcatttacatagacaaatggacaaacaaa

SEQ ID NO: 659079 - DNA, 621 bp, Homo sapiens
taattgttttaaacacatgccagccttagatttctatccatgttgtaaacatactcttcaagaaaaaaaaaaaaagatataaaatgtgtgaaggctgacactggggcactctccacccaagctccctccagggagtgtgatccaaatgtcctcccttcccgggctgctgcctcggttgtgccggaccctcacatcactgcctgattgattcatcactgcctgattcggctgcctgattgtggcctttgcctggccttgctccctattttaaatgacactctcgccacaccttcacatacccatgacaacaaactgggtttacttctgtctactcatcatgcctgactttcccctttgcaaacatcatgacgggatgtgatattcctgatcctagattctgctttccctttctttccctctccattaccatttattgagtggacacctactgtgtcaggcactgtaattggtgttttacaaacattattactattacccacaaccctacaagacagatattgttcccacttcacagctgaaaaaagattacaggytgactaccccttctctgaaatgcttgggaccagaagtgttttggattttggaatacttgcattgtat

SEQ ID NO: 659080 - DNA, 570 bp, Homo sapiens
acgtattgattgatatcttatgtctccctaaaacgtgtaaaaccaacctgtagcccgacgacctttgacacacgttctcaagacctcctgaggctgtttcactgatatttctttaactttgaccaagtaaatttctaaactgattgagacttttctcagatacttatttgtttataggtatcactggatacacttaaggaattgaagagatttatgacattgagaaaaggaggaagccagggtgtgtggacatagagagagagagagagagagagagagagattgtgatgtatgtacaggactaacactgagacctggttatgtaatggtgtagtactgagtatcatccccaaatagtgaggtttcattccatgaagactatgcatgtatctcatttgggaaaacagcttttgcaggtgtaaattaaggagcttgaaacagggagatggtcttagattaatcaactgggacttaaatgcaaactcaagtgtcctaawaaaaacaagaggtagagagacatttagcatagactgaagtggagaaggcagtgtgaacacagagacagagatt

SEQ ID NO: 659081 - DNA, 610 bp, Homo sapiens
ccttttttttttcaccctcttatatcaggtaactgaatcaccattaacttgatcaaaccatgattgaaatcttgaggaatattggtcttctttatctcccttgctcatcccattcaatccactgccaagttcagctgagtgactcgccacatgggtgcctttttcttatgtctgtgctcttattgacagtcccattctcatcaccacaatttggactctcaccttctcttgccagaatactgaaaactcatctctctgccttgtcccctttctcctccctttgaaatatcttctttcatactgctgtcagagtttctgwcatgttgctatgagcctgtaattctcatattgtatatcctgaattaaaaaaaaaaaacttcttagtttgataattaaaacactgattattcagagctttctgatgtcttctcatggtattgacctacacaaatggtaaaatcaaacagcaggtcttcccaaaacatgcactggtgctcgtgctcttgtagatatccttttccatgaccgcttgccccttactttatggactattccaagtcacattttatttatgatttccttctggctaccacttttaccacctgtgctc

SEQ ID NO: 659082 - DNA, 586 bp, Homo sapiens
tattctttctgaaaacaaagtactgctgaacattataaaattggttaagcaagttcagtcctccaatgacaattgaattccactataatttcctaagaaagaatacattggacaaaatttttaaaagccaagctatatgatatataaccactatttacacaaactagaaacatgttaactttatgacctactaaagttgatttcatttctctatgtttatatttagaagttatcccatttgttttttatgttttcatatatgaataaatarcattctttttgcaaaatacacttgaagtgcttagaaaatactaactatacaatgccatcttaggaaattatggcaacagattgtcatactaaacaaagactattctctttctcacctacagacaattgattagtcaaagccacatgatatttgtggctctggatcttatgaatttccattgataatatggctagaaacacacataaacacatttacagaaatacacgtaatatgttatcagtttatatatatgtgtgtgtatacatatatgtatatagattttgtatatgtattctgtatataaattctgtatat

SEQ ID NO: 659083 - DNA, 586 bp, Homo sapiens
tattctttctgaaaacaaagtactgctgaacattataaaattggttaagcaagttcagtcctccaatgacaattgaattccactataatttcctaagaaagaatacattggacaaaatttttaaaagccaagctatatgatatataaccactatttacacaaactagaaacatgttaactttatgacctactaaagttgatttcatttctctatgtttatatttagaagttatcccatttgttttttatgttttcatatatgaataaatagcattctttttgcaaaatacacttgaagtgcttagaaaatactaactatacaatgccatcttaggaaattatggcaacagattgtcatactaaacaaagactattctctttctcacctacagacaattgattagtcaaagccacatgatatttgtggctctggatcttatgaatttccattgataatatggctagamacacacataaacacatttacagaaatacacgtaatatgttatcagtttatatatatgtgtgtgtatacatatatgtatatagattttgtatatgtattctgtatataaattctgtatat

SEQ ID NO: 659084 - DNA, 513 bp, Homo sapiens
acatgttttttttttaagttaaaagaggaacaataataaacaggcagaaaatgaataaaaaataaaatgtcatatcagaagtgaagataaattaaaagtggtcaaaggagaagagatctaaatgcaaacttaagaaggggcaatttttttttttttttttttttgagacgcagcctcactctgtcgcccgggctggagtgcagtggcgtgatcttggctcactgaaacctctgcctcctggattcaagcgattctcctgcctcagcctcccaagtggctgggattacaggcatgagccaccatgcccggcctagagtcatcatggaaattaaacaacctrcttccaaatgacttttgggtaaagactgaaattaaggcagaaataaaaaaattatttgaaactaatgaaaacaaacatacaacatcccagaatctctgggacacagctacaacagtgctcagaggaagtttctagtgctatatggctacattaagaagctagaaagatctcaa

SEQ ID NO: 659085 - DNA, 511 bp, Homo sapiens
cattgcctgaaaccaaaggtgtttccttttttctgatttaagtgttgcattttcttttctcgctctagcttctgcttagggatggtttctttgtcttactctattatatttctctaatctgccctttttgcctaggtgtggagagatggytgtcataaaagcctatctttttaacagaataagttcctaggagagcttaatttttaaaagatttctcaacgtgcaaaatttttaagctctatggctgttcatttgccatgttaagcaacgtcctttctattggaacaatttggttatattttatcttgttttgtttctttttttttttttttttgagatggagtctcactctgtcacccaggctggagtgcagtggcgccatatcagctcactgcaacctctgccccatcccccggttcaagcgattctcctgcctcagctgggattacaggcgcatgccaccaagcacggctacattttgtatttttttctagtagagatggggtttcac

SEQ ID NO: 659086 - DNA, 538 bp, Homo sapiens
aaactgttcacaaaaccaccatttccaatggcaaaatttatattttgatttctaacgaaaaattccaatgaactaaaacattttcattcttttgtttaattcaattaattcaaacttcttagccttggaggcatcaaaaactagtaaaatccaaaataaagaactacagaaaaaaacagtggggggtgctgttgcctggtgtcactataagctagggagcatctagactttggaagagaaaaaatgttgcagtcagccaaggccgtttcttgctgtctgatatttaacattattctttacttttccacttttcatagcagaccaaattcaaatttactgaattctaatttatcaaataaactcccctgagaatttaaagatgagrtcaagtattggataacacttaatgtttggtttttgtttttgtattcttgttttcataccctagactgcaactatcccttctacctagtcatttcagaaatctaagtgtttccagggtgggtacaagtagagaagacaaaaactgagcttcaga

SEQ ID NO: 659087 - DNA, 576 bp, Homo sapiens
aaaggttgcagtgagctgagatcgctccattgcactccagcctgggtgacaagagcaaaacactgtctcaaaaaaaaaatatataataatttaatggttacagagtttctatttgaagtcatgaaatggttttggaaatagataatggttatggttgtacaatattttgaatgtaactaataccactgaattgtacacttaaaatatttaaattggcaaaatttatgacatatatttgtccacaatttaaaaaatgatgtaatacacaaaatccactgaattttatacttyaaatgggtgaattgtatgatatgtgaattatatcccaatatagctgctaaaaatgtgcaaacatgattttctttggctttatgttcttctgtggaaaaatggaagaacttaagaggaagggaaataacatttactcagctaagcactgtgataggtgcaagagctacattcccttctctacagtactgtagcttgaatgttcagggtaagcttctgtgttggacatttctggcagcttgacatttttctggcaatgcaaagatttgataaggtttgagaactggg

SEQ ID NO: 659088 - DNA, 534 bp, Homo sapiens
ggaggatggcttgagcccgtgaattcaagaccagcctgggcaagatagtgaaaccccgtcttgattttttaaaaatccaattaaaatgacaagaaaagaaatacccaaacaaaatggttacacaattttatgttcccaccagtaatgtatgtgggttccaattcctccacatcttcactgacattttttttttctagataggggcttgctctgtctctcaggccgcagtgcaatgatgccatcacagttcactgcagccgtgacctcccaggcacaagtgattctctcatctcagcctcctgggtagctgaaaattacaggtgtacgccaccatgcctggctaatttttagatttttctgtagtggtgggattttaccatgttgcccaggctggtctcatactcctggcctcaagtgatctgcccacctcagcctccctaagttctggaattacaggctgccaccatgcccggccttcaccaacatttgycattatctgttttttttttcttcctttataccttaaagcagtat

SEQ ID NO: 659089 - DNA, 647 bp, Homo sapiens
tcacttcctcaggcacactggtcacatttcaggttcatgtgtagtaagtacctaccatattggataacagagaacatttgcatcattatggagagttctgctggatggcactcagttagggagagccttccaaatcaactcagtgtcagtcagctcatggcacttttctgctcaaaaccctgttatgtcttgtcaattcatcacgagaaaaatccaaagtcctaactgtcatccacaaagtcatatgcactcaagccccctgtatctccctgacactgtatcctaccagtttaggtcttgctcactctggtttagccacactggctccctgatgctctgccaacactcaaattttgctcccaaagygggtctttacactggctgttccacttcttcaactatctgcatctctctcttacctccttcaagtctttgcctaaatttcacctcctgtgacctcgatattaaaaaatttaatcagccaccaaccagtcagtcttccaattttccttatcttattccaaacttacttagcacttgtggcttcatttacaacatcattgacttatttataacgtttattgtgttttgttttctcccccactagccacgagagtacagaactgtgttttctctctgatgtatcc

SEQ ID NO: 659090 - DNA, 586 bp, Homo sapiens
gtggtgctttggggataaaactgttccacctcagatcatcacgcatgagattctcataagtaacatgcatmctagatccgtcacctgtgcagttcacaacagggttcaaactcctctgagaacctaacgctgccactgatttgacaggaggtggagtttagtctgtgatgctggcctgctgctcatctcctgctgggcagcccagttccttacagaccacaaacaggtacttgttcatgacctgggggttggggacccttgtgctaacagatatgtcctaacattaaaaaataaagccctactctgacctctggtagtgtattgctgaaattaatcagaaagcagcaccctccagcatgtaatatacgctaaaggaaaacacagaagaactgtcatcagtggctgctacctggccccatggttcaggtggtaaaactcttgccgttttttcattcttccccataatttgtttgccagcagtgattgagcagtggttgagctatcatctgcaagggaagctgtagggaagggcttcttcccttcagcaccactgacattttggatcagataattctttgtggtgagg

SEQ ID NO: 659091 - DNA, 439 bp, Homo sapiens
ctgcctcagcctcccaaagctgggatacaggtatgtgccactatacccagctagtttactttttctcttttatagaggcataaactcattttgttgcctggggttggtttaaaactctgggatccaacgatcctcccacctcagcctttcaaagtgctgggattacaagcatgagccactgtgtctggccttgctgtaagaattataatctaaatatgaacaagcatttagaacaatttctggtccataaagtagaggcaatagtgacacatacctacactcaccgcctcttgtgtactcattaccttgtgcaattattatcaaaatttgggcattttctttcaactctacacctgcacactttattcccttcactagaatgttctaaagcmaactccaaatgtcagctttttatccacaatgatttgggatgtgtaaa

SEQ ID NO: 659092 - DNA, 479 bp, Homo sapiens
cccatagcaatgtactcctgggctccccttcccctgacaggctgccctctgggcaggatccctttaaaatgacctcaggctaacgtctttaccacagktttcacagccagccctggggctcacttccgtttgccctgctgtgggaggtgatacagtttatccagactccgccctccatcctacaaccctaggcctccttaattccctcagtaatagatcaggacttttgtcattgtcttgaagcaaaaaatcatactctccaaggggttttgttgaagcccttctcaccacacttacgatgatgcacagatacacatgaggggcagagggacaggggatgcacccccacagttctcccaatataaattctcctcagaaaattctcctcagaaaattctctctcagattttacccttgaattttttatacactcaatgtaagtgagagaattcaaaagttatataactcattttgttata

SEQ ID NO: 659093 - DNA, 611 bp, Homo sapiens
gaatatgaggatccctaaagcccttgccctaataacctaagcagtcactgtcactgccataatccctgcagcctagaccactgagacacttacagtcatcactaacattgatgacaaatgaagaagctgcatggtaattataccactgcacctatatggaatcagagccattgcactctgttgaactggcaccctcaggcccatatgccagtgaaagtcttttataaaagccactctttaaagtttggaagagatgactataccaccagatgcagaacatcaatgctggtacataagaaacaaacaaacaaaggaaatgtgacaccacctggggaacacaataattctccagtaactgaccctaaagaaacaaaaatttacatcaagcagaagaaagaatttataaacttgaagatagttcttttgaaatgactsttagagaaaaaaatgaaaacagaaagaaaagagtgaagacagcctatgagacttatgggacatcattaagtgaacaaattttcacattatgggagttccagaaagagaaaagagagagaaagggaaaaaaggcatatttaattacataattgctgaaaaatcttcaagtcttagga

SEQ ID NO: 659094 - DNA, 578 bp, Homo sapiens
aaagctgaaagaaaaaaaaatagcatcctactgatacctaattccctcatttatacctgaagcttagcctcaccctgtctttccctgacccctttacagtagtcaataaattcccttttggcctaaactggtttgaattmggtttcagtcagtcacaactagagaagacacagtaaattcctactgcatgtaaatcattacagaaatctgtgaattatattaaaaataaccaaacttagttattcaaatgttttctaaaatctgtttgccataaattgatattattcaaaaatatatatatgttccatatttgtcctagaaacattaacattgaagctacttaaaatgcaaagattgcctaggaagaatgtctctttgcttgtttttacaagggacttatcaaattagaaagcaaaattagaaatcataatgagttccatgttctctggtgaacactatgaggtaccattaaaaatgttatataaaccaggagcagcggctcacacctgtaataccagcactttgggaagctaaggcaggaggatcacttgggcccaggagtttgagactgcagtgac

SEQ ID NO: 659095 - DNA, 569 bp, Homo sapiens
atagtaaacttctttgacaacagaacaaaggtaatgtaatggagtaaagatagtcttttcagcarattgtggtgttcttctcaaacatacatggcacaatctccaggacaggtcacctgttggggcacaaaacaagccttaaatttaagaagactggaattgtatcgaatatattttctgattatcatggtttgaaactagaaatcaataacaggaggaatttcaaaaaattcacaaatgggtggaaattaaacaacactctcctgaacaatcagtgcatcaatgaagaatttaaaggggaaataaaaaacatcttaagacaaacaaaaatggaaacacaacataccaaaagcttatgaaatacagcaaaagcagtaagatcaatgtttgcagcaataaatgcctatatcaaaaagaagaaagagctcaaataacataatgttgctcctcaaggaactaagaagagaacaaactaagaccaaagttagtagaagggaggaaataataaagattagagcagaaataaataaaatggagagtaaaagaaatagaagaaataaaaaaactga

SEQ ID NO: 659096 - DNA, 565 bp, Homo sapiens
atggtgatttctcaaataactcaaatcagaaatacaattcaacccagcaatcccattattggacatatattcaaaggaatataaatcattctaccataaagacacatgcatgcatatgttcattgcaggactactcaaaatagcaaaaacatrgattcaacctgaatgccatcaatggtagactggatcaaaaaatgtggtacatacacaccatggaatactacacagctataataaaaaacgagatcatatcctttgcagcaacatggatggagctggaggccgttaacctaagcgaactaacacaagaaaaggaaaccacgtactgcattttctcacttataaatgggagttaaacattgaatacatatggacacaaagaagggaacaacagacactggggcttacttgtgggtggagggagggagggaggaggatgaggattgaaaaactacccatcaggtagtatacttatcacccaggtgacgaaataatatgtacaccaaatttccatgacatgaaatttacctatataataaacctgcaaatatacccctgaacctaa

SEQ ID NO: 659097 - DNA, 570 bp, Homo sapiens
tgaagccttaatctccaatgacatgatattagtaggtggggcctttggggggtgattaaataataagggtgaagccctgcatgggattagtgcctttacaacaagagaccctagacagcttgcttccactctttctttgctcttcaccatgtgaggacacagcaagaaaacagacaactacaaatcaggaagagggcctaatttgtgccaaccatgctggcactcttctctaacttcccagcctccagaactgtgagaaataaatttctgttgtttaagtcacccagtttatggtagtttggttatagttgcccatattaagacagcaggatgcaaaattgtggccagtatgattgctttgacatgaaacaaattttaagcacaaattgcaaaaagtaaccaaaatatatcaatccccactgctggcattaacactctaaaacaaactttgtatattgggggattttatttatttatttatttattttttttgctgaccatagtgrctcatgcctataatcccagcactttgggaggccgagttgggcagatcacttgaggccaggaatt

SEQ ID NO: 659098 - DNA, 564 bp, Homo sapiens
cactctctgtgctgttccactttataagttttgacaaatgaatgaatgaccacgatcaaaatrcagaaacgttccatcatggccccaaattcctttgggctggctctttgtcattaactccttctcccattcccaaactgattttcaccactctgcatttgtgccttttgtagattcttacgtaagtggaataatatagtctatagcctctttacttttttcacttagcaaaatgcatttgacaatcagccctttttattgctgagtaataatctatgaatgtactatagctttttattcatttacccatagaaagatatttggttttctcccgattttttttttccaattagagataaggctgctgtcaacattcacttcccggtttttgtgtgaacataagatttcatttctcttgggtaaatgcctgggagtgggattgatgggctatatagcaagcctgtgtctatgttttaaaaaattgccaaacaatttttaaagtggctctacaattttgcatttaccccagcaggcacagtgtataaaaatttcagttttttcacc

SEQ ID NO: 659099 - DNA, 670 bp, Homo sapiens
ttaaataaagcctgtaaagcagaagtagtgaacaagcctgggtactaaagttaaatattacagaggcagataaaataagtctgagaaaaattcatgcatttaattctatctattttgcccacatagttatgctgatatttcattcacttggattcaccaacttaaaatttgtaactataatggagaatcttttttctgtatttgaaaaaagtgcactgagcaaattaatagtataaatatgatttcaaggataactaagagaatatttatttctatgtatggttaatcaacatgcccccttccatattccatgtgccctttgactaattatctccaattcatctttcaggtcacaattyaagtataaataataaattagaagtacatattactataaaaaattgacatgtgaattatgaatcaatctcctcaatttgttaaagaatcttctaccaagtactcttttcttgaataaacttttacccatattacagttaccatatctttgtaacaacattaagggagcattgattttactatattaaatagacagttttctatttcaaatagacttggctgaattattttgattagctcaattaaaaaatacaagattctaataagagactttattacttactaaaggcattgtgagctattattaaaataa

SEQ ID NO: 659100 - DNA, 541 bp, Homo sapiens
ggaagtggaggttgtgatgagccaagatcatgccattgcactccagcctaggcaatagggtgagactccgtctcaaaataaaataaaaaaaaatacaaaaattcaaaataaataaataaataaataatgtttatggaatttgaaccatcctatatatcagatggtccccctaccatttcttggcaaaattactaactattcttaattaaaggctctgctcaccttggtgcttgctacacagagaaaaatctccactgcaaccaatgcctgcagtcttgaagttcctccttagtgactttggattttaggggaggggaaactcctatttaaactatacttggttttctctggcccaagtattttagtacatgggacttacatgtcctgatgatagttccaagggcttcttgtgcttcagtttcagctgctgcagagtaagaccacctgtatgtctgagaaacaacaycctcaaatgaggtttgtttatgccatagaagcttatgtcttaattgaggccatcctgaatgtggtctcaaaattt

SEQ ID NO: 659101 - DNA, 286 bp, Homo sapiens
atattataaaaatacctattattaaagaaatgtataattatcttcataataccataattactgagacatgaaagtcaacagaaaaggttttaaacgtasattaaaacaagaagattttatgtaaccacgaaccaaaaaggttaattactcagcacagccccagctccttattaattttgttaattgggtgtaccggttttgggaccccctcccaaaacatatgtacaccagaaactgtgaatgtgactttagttggaaaaaaaggatctttgaataagtaattaag

SEQ ID NO: 659102 - DNA, 297 bp, Homo sapiens
tttgagaccagtctggccaacatggtgaaaccctgtctctactaaaaattcaaaaattagctgggcatggtggcgcacacctgcaatcccagctactcagctgtctaackcagaagaatcacttaaacccaggaggcagaggtggtagtgagccgagatcatgccactgcattccagcctaggcaacagagcaagactcaaagaaaaaacaaaaaacaacaacaaaaaaaaaaaaacaaaagaaaaacatttatagagcactccacctaacaatagcaggatagacatttatttcaa

SEQ ID NO: 659103 - DNA, 558 bp, Homo sapiens
gcaaaagaaagatgaaaatgataggtagtaaattattttcatttaagtctccaaagttcatcacaaaaatatttgtacctgacctgcttaccatttacacaaamatttttagcaatagcatatgagttgatcacttcttacatgcctcatgtcattcacctctctgcacaaaatttttaaaaaatattaataatgaccaactaaaaaaagtactagagctacagactatcaggtgtcctaatttaatcatagataaacataacaatgtcccatcaaccaggaaaaaacacttcctataacaatgaatgtgaaggccatattttcaaaattgtgaaacaaaatgaaatttaattataatctacctcttttgtcttattttatttcttctctattgaccaatccccatcaacaattataaacctttaaaacatgaaattgatacatttggtgtgcattttacagattattaaaaatgagtttaaggtatacattttatttgacatcgttttccttaattaaaacaaagactatatttgttgagattaaatattagtaaat

SEQ ID NO: 659104 - DNA, 401 bp, Homo sapiens
tctgctccccttggctcttcattggtaactcactgtgctttgagactctgggaagaggcttttcaggttctagaggtccttcagagaagagagaggcctagagatgtgggcagatgaggacttggaataaagcagaatgtgacaatgcactgggctctggagtgtggggcccagaaaaaatactagatttttgggctgtccttgaggtcctcattcagaagtggaagaaaataatgtctctgaatgctgttaaagtgtttaatgagtgcacagcacactcaaagaggctgaggaaaataggaatcaagggaggtttccgaggttacttttatggcccttggagtcttcagatactgctccttttcccaggggtccttgawtagccactgccttgagaattc

SEQ ID NO: 659105 - DNA, 387 bp, Homo sapiens
gaattcctcaaactcttgcatatttaaaattacatttttgaaccttgatgcttgaagtgtagcttgggtaacgggtgggctttaagccaattttggcatgcaaggggttgagtttattaggcatcagcacctctgaaaatcgtggggatgcaggcttaatttcaacactattctaaatacttgraagatattatataactctttaataaactcctgtgtctacaaatggttcacattaactcaatatccatgattaaacatctataaaatcaaggcactgttatttagtggagacttgctggctattctatgagaggaggtattgttattgtaatctcatcctctcataaaagtgtatcatattactcataaccagcccttcatatt

SEQ ID NO: 659106 - DNA, 587 bp, Homo sapiens
actatcagtaataatctttttgctaaattcagcaagatttgcagtggagaatttctattattagtcaagatcatttataaaaataataagcattcattacatacactacttacgtagttgggtttacttacaacatacattcattcaacacagtcatcaagcctttatgtcacatactatgctgtgttctgtggaggaacaaatttatgagagacattagtgaggcctgtgctaagggagctaattgcataatacaagagttacataactaactagtttatagtggagaacataatgaatacttatatggtttggatttgtgttctcgcccaaatctcatgtcaaattttaatccccaatgttcgtggaggggcctggtgggaagtgattggatctgggggtggacttttcccttgctgttctcatgacagtgagttctcatgagatctgtttgtttaaaagtgtgtagcatctccttcttccccctctccttcctgctccagccacttgggatgtgcctgcttccccttygccttttctaagtttcctgaggcctctccagtcatgcttcctgtacagcctgcaga

SEQ ID NO: 659107 - DNA, 592 bp, Homo sapiens
tagttggctctgcaaagaaaaaaacaaaaaacctttctttgggatcacatgtcttttctcaaatcggccaccttaaaaatgcatgcagttaagaagtcacagagagaaaacagacacggctcagggacatctgccactgctctgggaaaaactatccaatgccaggagcaagattctgtgatctgcacgggccctcgaggcaccgaaattagacagtacattattccatgtgttcaaatgatcagtcaaaaatcatgagcrctcccaagaaaattgatgaaaagaatttttttggtcattatgtgatacaagtttgctggcctgacactgaaactagtgcaaattttcttccatatttgcaggggtcagtaaaaatcaagattatcatggcatcagcctatcagtctttcttaactttaggatttattatgattttcctaatattcaataacacttctaaacactcccaacatttctctcttctctttcattccacattttatttagtggagtcattcatgttttactcatttcagggttagaactttgaaatagtttctggaattaaatccattttcttaacctggcattg

SEQ ID NO: 659108 - DNA, 585 bp, Homo sapiens
taatgcaaagcactatactaggtttcataagtgatacaaaaacaagtgcaactgcctcagtaaccaacacatttgcagtctaatagaggaaaacaagccctgttataagaataattatagtaaaaggctatataaaatacaatccattttgacacacaccttcaactctatttgctaaytctcattttcactctttagtttatttttagattaaatagttattttcacaaatcagtctgaggacagagttttttgttttgtttttttgtgagtcatcagcactatgcaattgcatatacctgttgtgtttggtctacagaggctaaacattatgtaatagtttttatgcattttgttcataggttactgggtgctttaaggcaaaactgaatgagtttccaatagtcagtacaaaactacgagaaatacagacacaaagtgcctggggttatcctcaaatgaagttagatttgaattgcattcaataaccttttttacaatgtgtagatgctcaaagcaaatacaatagtttctctttgcctctgtgacttgagttcatagtgctgtgtttaaatataacttttg

SEQ ID NO: 659109 - DNA, 585 bp, Homo sapiens
taatgcaaagcactatactaggtttcataagtgatacaaaaacaagtgcaactgcctcagtaaccaacacatttgcagtctaatagaggaaaacaagccctgttataagaataattatagtaaaaggctatataaaatacaatccattttgacacacaccttcaactctatttgctaactctmattttcactctttagtttatttttagattaaatagttattttcacaaatcagtctgaggacagagttttttgttttgtttttttgtgagtcatcagcactatgcaattgcatatacctgttgtgtttggtctacagaggctaaacattatgtaatagtttttatgcattttgttcataggttactgggtgctttaaggcaaaactgaatgagtttccaatagtcagtacaaaactacgagaaatacagacacaaagtgcctggggttatcctcaaatgaagttagatttgaattgcattcaataaccttttttacaatgtgtagatgctcaaagcaaatacaatagtttctctttgcctctgtgacttgagttcatagtgctgtgtttaaatataacttttg

SEQ ID NO: 659110 - DNA, 585 bp, Homo sapiens
taatgcaaagcactatactaggtttcataagtgatacaaaaacaagtgcaactgcctcagtaaccaacacatttgcagtctaatagaggaaaacaagccctgttataagaataattatagtaaaaggctatataaaatacaatccattttgacacacaccttcaactctatttgctaactctcattttcactcttyagtttatttttagattaaatagttattttcacaaatcagtctgaggacagagttttttgttttgtttttttgtgagtcatcagcactatgcaattgcatatacctgttgtgtttggtctacagaggctaaacattatgtaatagtttttatgcattttgttcataggttactgggtgctttaaggcaaaactgaatgagtttccaatagtcagtacaaaactacgagaaatacagacacaaagtgcctggggttatcctcaaatgaagttagatttgaattgcattcaataaccttttttacaatgtgtagatgctcaaagcaaatacaatagtttctctttgcctctgtgacttgagttcatagtgctgtgtttaaatataacttttg

SEQ ID NO: 659111 - DNA, 552 bp, Homo sapiens
aagatattttcttgaccacttcatgggactcaggacaggggtgccccatttactcagcccaccccactcaacctctcccaggagggagcacgcgagcaaatgagtgcaggaaccagagcaaacaattgcaggaaccggccagcagcttcagtgccagcaggagcaaactccactcacttgggtccgccttgatgcaccactggagggagggagtgtgtaggcgagtgcaggaacggggctggcagctttagcgacagcaggagcaaactctgtgcaggccccatggcagcatccaggtgtgggtggktgcctgtgatcccaaggccccagaggacttgttacattgccctcttaactctgttgtccacagacacagtgtgttatcagctcagtggaccgtttgcctcattgtgagatggctgccctctgccagcaaaggcaaaaggccagtgtgaaagcctttttgggtacctgcatttggtgcatcccaaattcttgtccggtgcccaagaggaatgaggtcatgtggatgaactgaaggatggtgaattc

SEQ ID NO: 659112 - DNA, 345 bp, Homo sapiens
aattatgtctcttttcttttaaattatccaatctcaggtatttctttatactaatgcaagaatgaccaaatacagcatatatgccacattttctttctccattcattcattgatggacacttaggttgattctaggctattgtgaatagtgctgtaatwaacatgagagtccagaaatctctttgacatactgatttaatattctttgaatatatacccagtagtgggattgttggattttgtgatgtctatttttaatgtttttggaagttatattgttttccataacaattgctctaatttacatttccaccaacagtgtatgaaaattcccctttcttcaca

SEQ ID NO: 659113 - DNA, 345 bp, Homo sapiens
aattatgtctcttttcttttaaattatccaatctcaggtatttctttatactaatgcaagaatgaccaaatacagcatatatgccacattttctttctccattcattcattgatggacacttaggttgattctaggctattgtgaatagtgctgtaattaacatgagagtccagaaatctctttgacatactgatttaatattctttgaatatatacccagtagtgggattgytggattttgtgatgtctatttttaatgtttttggaagttatattgttttccataacaattgctctaatttacatttccaccaacagtgtatgaaaattcccctttcttcaca

SEQ ID NO: 659114 - DNA, 345 bp, Homo sapiens
aattatgtctcttttcttttaaattatccaatctcaggtatttctttatactaatgcaagaatgaccaaatacagcatatatgccacattttctttctccattcattcattgatggacacttaggttgattctaggctattgtgaatagtgctgtaattaacatgagagtccagaaatctctttgacatactgatttaatattctttgaatatatacccagtagtgggattgttggattttgtgatgtctatttttaatgtttttggaagttatattgtwttccataacaattgctctaatttacatttccaccaacagtgtatgaaaattcccctttcttcaca

SEQ ID NO: 659115 - DNA, 606 bp, Homo sapiens
actaatatactatctgacagtgatgaaacaatggttacctattaacrtcttagcacaagtaaaattaaaaagtagccaaacatatgacaagatttcaagagactgccacttcaggtaggtaagtttttgtgtgatagctggaaaggtctacatagagccagtgagtttaagcttattccatgcttgtccagaagatgaggagtcaaaatcattgccagacaataaaattgcatcaatagccatgaagagtcaagaaggtccatctaaatagatgcgactcaaacatgaatccagcgcataaggcgaagagcattgaatctagatttcttctactggtaaacttgctaaacatcaaagttttatgatgtaatttaaaaaaaattaatctgaactactactcaaattcatgtaattagttacttccagcttctttacttgtacagtgttaattaatccagcctgccagcatgattcctggaaggaactcatataataacgatagcagggccagatgctagtgcctgacacatccacagattcatgtggactagaaaaatgtgaaggctgggtgtgatgggtcacacctgtaatcccagcaatttggga

SEQ ID NO: 659116 - DNA, 401 bp, Homo sapiens
tttatttaggctattcaattttttagtgtatagttccttatgttactctcctacaccccttttttactccaaaaatttgttagtaatatacccattttatttttgagtttagtaatttgaatattccctttctttcttagtcaatctagataaaattttgtcasttttgatatttttcagagaacaaactaggttgtgttgatttttgatatggtttttctattctctatttcacttatttccactgcaaattttatcttttttttaatttttgctagttttagttgtccctctttaatagtccctctttttctctctgtttttagttccttaggagtaaagttgttgatttggtatcttattttttataatcatttatagctataaatttttcccttatg

SEQ ID NO: 659117 - DNA, 401 bp, Homo sapiens
tttatttaggctattcaattttttagtgtatagttccttatgttactctcctacaccccttttttactccaaaaatttgttagtaatatacccattttatttttgagtttagtaatttgaatattccctttctttcttagtcaatctagataaaattttgtcacttttgatrtttttcagagaacaaactaggttgtgttgatttttgatatggtttttctattctctatttcacttatttccactgcaaattttatcttttttttaatttttgctagttttagttgtccctctttaatagtccctctttttctctctgtttttagttccttaggagtaaagttgttgatttggtatcttattttttataatcatttatagctataaatttttcccttatg

SEQ ID NO: 659118 - DNA, 401 bp, Homo sapiens
tttatttaggctattcaattttttagtgtatagttccttatgttactctcctacaccccttttttactccaaaaatttgttagtaatatacccattttatttttgagtttagtaatttgaatattccctttctttcttagtcaatctagataaaattttgtcacttttgatatttttcagagaacaaactaggttgtgttgatttttgatatkgtttttctattctctatttcacttatttccactgcaaattttatcttttttttaatttttgctagttttagttgtccctctttaatagtccctctttttctctctgtttttagttccttaggagtaaagttgttgatttggtatcttattttttataatcatttatagctataaatttttcccttatg

SEQ ID NO: 659119 - DNA, 401 bp, Homo sapiens
tttatttaggctattcaattttttagtgtatagttccttatgttactctcctacaccccttttttactccaaaaatttgttagtaatatacccattttatttttgagtttagtaatttgaatattccctttctttcttagtcaatctagataaaattttgtcacttttgatatttttcagagaacaaactaggttgtgttgatttttgatatggtttttctattctctatttcacttatttccactgcaaattttatcwtttttttaatttttgctagttttagttgtccctctttaatagtccctctttttctctctgtttttagttccttaggagtaaagttgttgatttggtatcttattttttataatcatttatagctataaatttttcccttatg

SEQ ID NO: 659120 - DNA, 486 bp, Homo sapiens
gtttttcataattcatttttcttttgtgagattgtttattaagataatttcctttctttctttttttttttttttttggtggcagcatctcactctgtcacccaggcttaagtgcactggcatgatctctggctcactgcaaccacctccacctcccaggttcaagggattctcctgcctcagcctcccgagtagctgagattacactcatgtgccaccacaccaggctaattttgtaatttttggtagagatggggtttcatyatgttgcccaggctgatctcgaattcctgacctcaagtgatccgcctgcctcggcctcccaaagtgctgggattacaggtctgagccactgtgcctggcagagaccattatttttccttatatccctgagcatggttataatagtagcttgaaatttttgtctactaattctaacatttgagtcatctcagagtcagtctgcttttctttcaagtgtaggta

SEQ ID NO: 659121 - DNA, 489 bp, Homo sapiens
cacccttctttttctttatttagaggcttgttttgctttgtaggaatcctactgcacacacaatctcctgtttagtattcaattctcattcatatgatttttccatgccattatcatcatctttataaccatcctctttaatggttatgtaatattctattgagctgcctaacctgttttcatttgctggaaatctaacctatttgcagagcatttaggagagtcaggcrtgtggcaactacttcctaagcgttggctattattactatttcacatacaatgcataaaacatatacaatattcatatatcatttaatataatgtattttgtacatattttcctgtatttacctctgtttaacttctcagatgtgtattacttccccaaagtgcatgactatttttatgcctttggatactgtattagtccattttcaaactgctatgatgaaatacccaagactgggtaatttataaagaaaaagagtt

SEQ ID NO: 659122 - DNA, 489 bp, Homo sapiens
cacccttctttttctttatttagaggcttgttttgctttgtaggaatcctactgcacacacaatctcctgtttagtattcaattctcattcatatgatttttccatgccattatcatcatctttataaccatcctctttaatggttatgtaatattctattgagctgcctaacctgttttcatttgctggaaatctaacctatttgcagagcatttaggagagtcaggcatgtggcaactacttcctaagcgttggctattattactatttcacatacaatgcataaaacatatacaatattcatatatcatttaatataatgtattttgtacrtattttcctgtatttacctctgtttaacttctcagatgtgtattacttccccaaagtgcatgactatttttatgcctttggatactgtattagtccattttcaaactgctatgatgaaatacccaagactgggtaatttataaagaaaaagagtt

SEQ ID NO: 659123 - DNA, 489 bp, Homo sapiens
cacccttctttttctttatttagaggcttgttttgctttgtaggaatcctactgcacacacaatctcctgtttagtattcaattctcattcatatgatttttccatgccattatcatcatctttataaccatcctctttaatggttatgtaatattctattgagctgcctaacctgttttcatttgctggaaatctaacctatttgcagagcatttaggagagtcaggcatgtggcaactacttcctaagcgttggctattattactatttcacatacaatgcataaaacatatacaatattcatatatcatttaatataatgtattttgtacatattttcctgtatttacctctgtttaacttctcagatgtrtattacttccccaaagtgcatgactatttttatgcctttggatactgtattagtccattttcaaactgctatgatgaaatacccaagactgggtaatttataaagaaaaagagtt

SEQ ID NO: 659124 - DNA, 507 bp, Homo sapiens
caggggtcttgactttctttgctggactctgttcttgcttcctaccattgatacccatcagctgccccctggtcattgagcctcagcaaccccttgattttttttcttcagatgcatcacctcacacatggcaaaaaacagaaccaaattctaaaattagttcaggcttatcaccccctgtgtcagttcagtttagtcttagcatatatgtggtaagtgtgtgctgtgtactaagcctggtgccaaatgctacaggtacaaagagttgagtctagcaggaaatagaaacatgtgaatgagtcatttcaatagaattggtgaatggggtctgcctctgactatgtttctttctgtaaatattctttctgcttgatagggagatgctytcagatactgatactaataatgtgagtggatgtttgttactcagcctccaaaggaatagtagcaacatcccactgaggcatatatagaagctatcaagggcaacccagaaaatcccatagg

SEQ ID NO: 659125 - DNA, 489 bp, Homo sapiens
gaaaggaaggaaggaaggaacgagaagaaaaaagaaaagaaagaaaagaaaattattttctcactactttgaaggatgctataggtaaaggcatccctagagaatatgacaggcatgatttttttaaaagatcattaagtgccctcaaaaatccactacattgtcttaaacatgtgcaaatcattgaaataacagatgttgtgataggagtagagacwccaagaaacatagaaagtacaaattaaaagcagtattaaaattaaatgtggtagataaaaatagatcaacgtacaataaggttatttaatataaactgaaaacaaccagaatgattttttaaaatacataacataatactgctggttaaaattccttaatggcttccaatgcatttagaatcaagttccaacaattggagttttagttgtttaaaatgactctgtgtgtctgtgtgtgtgtgtgaaaaactgtgtgtgtatgtattctatg

SEQ ID NO: 659126 - DNA, 485 bp, Homo sapiens
atgtaaaaatcaattaaacatggattaaagacttaaatctaagacctcaaactatgaaactcctacaagaaaatattggggaagctctttagaacactggatttggcaaaggtttcttgagtaataccccacaagtacaggcaaccaaagcaaaaatggacaagtaggatcacatcaagttaaaaagattctgcacagcaaaggaaacaatcaacaaagagacaacccatagaatggaagaaaatatttgtgaaccatccatctgtcaagggattaataaccagaatatataagggattcaataaccagaatatataagggattcaaataattctmtatgaaaaaatcaaataatttgattaaaaagtgagtaaaagatttgaatagacacttctcaaaaaaagacaaatagcaaacaggtgtactaaaatgtgctcaacatcactgctcatcagagaaatgcaaatcaaaactacaataagata

SEQ ID NO: 659127 - DNA, 485 bp, Homo sapiens
atgtaaaaatcaattaaacatggattaaagacttaaatctaagacctcaaactatgaaactcctacaagaaaatattggggaagctctttagaacactggatttggcaaaggtttcttgagtaataccccacaagtacaggcaaccaaagcaaaaatggacaagtaggatcacatcaagttaaaaagattctgcacagcaaaggaaacaatcaacaaagagacaacccatagaatggaagaaaatatttgtgaaccatccatctgtcaagggattaataaccagaatatataagggattcaataaccagaatatataagggattcaaataattctatatgaaaaaatcaaataatttgattaaaaagtgagtaaaagatttgaayagacacttctcaaaaaaagacaaatagcaaacaggtgtactaaaatgtgctcaacatcactgctcatcagagaaatgcaaatcaaaactacaataagata

SEQ ID NO: 659128 - DNA, 554 bp, Homo sapiens
cattaatcctattcacaagggctatgtcctcacggccaaatcacctcccaaaagccccatctccaaactgtcacttgggggttaggatttcaacttatgaatttgggggtaacataaacattcagtccattgtaccctctaacctgtgaattcctttatgacaaaggcagtatcttgctcatctttcaaaccctaatacctaacacagtgattggcacaaaaataactcaataaatgcttgcaaaataaatgagcagtggcaactaccccatgtagagcctaggggagcataaaatcatagccagccattgcttaataaatgtgaacttgatcgtcctttctgaactgtmattccagctctaggtttatcctaggaaggcttttccaggggcaccaggaagacaggaagattgccaaaatgtttatagtaggattgtttataagagccccaaatggaaacaacccaaatatctacaaacagtagaacagataagtgtattgtagtatagtcattcaatagaataccatatgtcaatgtaaatgaatgaattaca

SEQ ID NO: 659129 - DNA, 541 bp, Homo sapiens
atgaaattactcaatacctgacatcaatattaagcatcattcttactaaaagatatgactaacaaggtggctttactcagtttaggtaccagtttttattaacactaaagcttatttgaatcacagtttggcaatcaccaaatgtattagttaaaaaaaaaaaaaaacaggacaacgtaaggagaaaccatgtacagactttcttcattgcatgcattaaagccctaactttagcacagaatatttaagcttcaaagtatttcatcaatagatcaataaacccctaaattaggaagcctggtttcattttattccccatttaatctctgttttccttttctctcccatccctagtaatagacttttctgattctcacctattgttgtttctaaggttcttaggcttagacttaaggctyttaagtttatctgtctgattactattcaatcacttagcaaatacttattaatttcccatgttatgtaagattccatgctaagcactgatcatattaggactggctgaataagatagacaaaa

SEQ ID NO: 659130 - DNA, 445 bp, Homo sapiens
catatttgaaatgaattgttatcattttgaaactgttcaaattgatgtagtattttaaaatgataagctgtcctgtgctgcattgaaaatcccttgaaaggtgtgtggggaatgtgctattggaggcacaaaaatgtctggttttaaaacaatagtaacaatagatacatatttgaactttaatgattccaagtatttttcttataatgtttcttataattctcatattaaccctttgaggtatgtggtatttttaccccgtagagaatcaggatagtccagtaaataaaagcttatgtcttggatccagactgggttttaaatctgggctctgttacttaactaaatgtgtgagcttgggcaagtgtttaacctctctgtgtcttgtatttcttaytggtgaaacgggcacttatctttatcgatgattaaatacattaaaata

SEQ ID NO: 659131 - DNA, 589 bp, Homo sapiens
  misc_feature 1, 2, 3, 4, 5, 6, 7, 8, 9, 10, 11, 12, 13, 14: n = A,T,C or G
nnnnnnnnnnnnnngctaagttctttggaggccatcagagctgttgcttgccttggattagatcatttattgagaagagaacaagcactctgatggtcctctctccatttgggactttctgtaaggagatcaaattctctggccctgcatggggtgaagttccaccgcgagtaactacagctgggctggtcactattgtacctggcaaaggctgatagagaggagcataagtaggaggtgaaacaagcttagattctacagaagactctgatagtgtggggatgctgcggattctacaggaggtgtagrcccctgagggtccctatctgaagttggtgttgggctgttgggtctggggtcccttccccttaataagagatgatcttctaatgcttctgaggggctttgtggcttactaggctttagcccacaggtgcctgcatagagttgggttttgttgtcaggccataaaggtttgcacataggatatttcagaccattttccttgatttttacagaaaagatctagctgtaggagggtgttaaagttcacagtctcattccccagccatgttttgtgagttaatct

SEQ ID NO: 659132 - DNA, 411 bp, Homo sapiens
ttcctagagaggaaaggcctgctttttgtctatcagccacagctctgggttgtctgcaaatcctgagaaagctttgtgagatctgagagcagagatgacctctgtctggaaagagtggtgaggaggtggagggagagggctgcagagagcctgggcataaatgccatagaaacagtcatgaagtctcccataatgttgggtggcacagaaatgtaaggccagatcctgtgtctccatctgtggtatagaagcagtcaagatatccaccaaccagaaagagaacacatgtacagaagtgtgtgaccataggtggcrtgtgtgtgtgtgtggatgagggagcaccccaagaggatggcagcatctcattggatgctgaagtgaacagatgacatctaggaccaggtgctcccc

SEQ ID NO: 659133 - DNA, 582 bp, Homo sapiens
atctgggctttgtgaggtgcctcagagctgcaaagggagcatgagaggtttagtagacatgctgggaaatattctccctgaatcaactaaggataacatactcgtatataatttgtaaagcaatattttgtgaaagacaaatgtcagagaataaatagcttccactattggaaaaaaagtttgaaatctctgttcttttttatcaattaggaaatatcttcctaatcacatagggatctctgggctgaagacctacagatgtgggtttcttccaatgggcttcaaggagggatcttggacttctgagtataaaatcatgctattccatagtgtctagttattgacatcaataggacatacagggttgactgggtctttaatgcaggactatgtgccttattgagtgtctaggataagaatgatgtacttacaataagcatacttattagaaggttaaattrtaggtcaagaatgaatagctgaagagttaggttcagaaaaatgaggacaaaatagcaacagggttctttgtagcaaaataatactaataacactaataataatagtctgtctcttcaggca

SEQ ID NO: 659134 - DNA, 582 bp, Homo sapiens
atctgggctttgtgaggtgcctcagagctgcaaagggagcatgagaggtttagtagacatgctgggaaatattctccctgaatcaactaaggataacatactcgtatataatttgtaaagcaatattttgtgaaagacaaatgtcagagaataaatagcttccactattggaaaaaaagtttgaaatctctgttcttttttatcaattaggaaatatcttcctaatcacatagggatctctgggctgaagacctacagatgtgggtttcttccaatgggcttcaaggagggatcttggacttctgagtataaaatcatgctattccatagtgtctagttattgacatcaataggacatacagggttgactgggtctttaatgcaggactatgtgccttattgagtgtctaggataagaatgatgtacttacaataagcatacttattagaaggttaaattgtaggtcaagaatgaatagctgaagagttaggttcagaaaaatgaggacaaaatagcaacagggttctttgtagcaaaataatactaataacrctaataataatagtctgtctcttcaggca

SEQ ID NO: 659135 - DNA, 570 bp, Homo sapiens
gatttaaacacgtttcccccagaactttagtgaaacagcgctggaacaaccagcgatagttaaccaggtagtctggaagtgccatagtattcactgcaagaaaagggaaactgaaattaatgaagcagacaaacctctctccgggccatggcaaaagaaatgttgatggctgatgtaataccttggttcttatcttcttagcttaaaagaatttaaacaggaaacatgcagcaaaagaagtacagcatagagtaatttattgcacacaaaaaagaaaagaatacgttgaaaatcaagtgcagaatagacggtacagtctgagaaagagattccagggcagcctgctcataagagtgagacagcattaatygttgctggagaaaccctccttctgggagttttacatgattattcataagaaggtggaaagaagtgttatagaaggcatgctttgactggtcttctgggtgcacatgtgcagtagctgtacatatttttgcatatgtttcatgtctcattagcatgcaatgacatttcacccaggaatgtgtttttacttgttaaaatgag

SEQ ID NO: 659136 - DNA, 557 bp, Homo sapiens
tttagtgaaacagcgctggaacaaccagcgatagttaaccaggtagtctggaagtgccatagtattcactgcaagaaaagggaaactgaaattaatgaagcagacaaacctctctccgggccatggcaaaagaaatgttgatggctgatgtaataccttggttcttatcttcttagcttaaaagaatttaaacaggaaacatgcagcaaaagaagtacagcatagagtaatttattgcacacaaaaaagaaaagaatacgttgaaaatcaagtgcagaatagacggtacagtctgagaaagagattccagggcagcctgctcataagagtgagacagcattaattgttgctggagaaaccctccttctgggagttttacatgattattcataagaaggtggaaagaagtgttatagaaggcatgctttgactggtcttctgggtgcacatgtgcagtagctgtacatatttttgcatatgttkcatgtctcattagcatgcaatgacatttcacccaggaatgtgtttttacttgttaaaatgagcaaaggttcagc

SEQ ID NO: 659137 - DNA, 567 bp, Homo sapiens
ttctaattgttcagatcccatttttgtcctccagtacgattttattttttacatgggtcctattcctttgtcatataatttattcctattttatgatttttgttactattatgaatggaatagtttcctcattttcgtttgtatgtgggtatggcttatatagaaaaagctaatcatactatatctttatgttgtatctacccaatccatcaaattctttyttttacttctatttactttttttactagagtttcttgatgatatcaggtataaaattatattgtcagcaaaaagtttcacctctttctttccatatttatgctgtgcatattaggtttattgcatttactaaaatatctaaacaatattaaataataatagtaaaagtaggtgtgatttgtaaactatatatttggtcttcatcctgttttctggcatacaactcctaaaatccttggaatccccaaagtgataaatgtctttttgtatgctaataagttgactggtggctggcagcccctagatagcttcatgatgggggctggtcaccagaaaaaccaatggtc

SEQ ID NO: 659138 - DNA, 678 bp, Homo sapiens
atctacacaggcaggccttgctaggtcttcctactcactctattagcagtagatcatactgttttgtccaatcatatttctaaaaagctgcccatactttgttgaacctaagcataaaaatggacaatttcccatgtatttttgggtgttcattctgagggttcttatgtcatataaaactatgatcaaataaatttgtatgccttttctcctataaatctgcctcttgtcagtgaagcacatttttgcagctgagcagttttgtcagcctgcttcctcctattcatagaagttcgggggtgcaaccttcattttgtattatctctatcccttttggtctaagctggtggtgtttctgtggatataattctcttaaaaacactgttaaccttattggggyttacttcacttggcaaaagccacactcacaaatcatttggagagaaactcttctctgccttgagcttttgctgagttgacgacataacaagacccttaagcttcttggaagtcctattatttgattgacaggatctgtgagacccacccttaaactctttagaagacctttggtctgagtggacagatcttgagatagacctttggtctttctgatatcttagaaaataattctagagtcatacctttggcctcatctttagaccaagctttcctgat

SEQ ID NO: 659139 - DNA, 678 bp, Homo sapiens
atctacacaggcaggccttgctaggtcttcctactcactctattagcagtagatcatactgttttgtccaatcatatttctaaaaagctgcccatactttgttgaacctaagcataaaaatggacaatttcccatgtatttttgggtgttcattctgagggttcttatgtcatataaaactatgatcaaataaatttgtatgccttttctcctataaatctgcctcttgtcagtgaagcacatttttgcagctgagcagttttgtcagcctgcttcctcctattcatagaagttcgggggtgcaaccttcattttgtattatctctatcccttttggtctaagctggtggtgtttctgtggatataattctcttaaaaacactgttaaccttattggggtttacttcacttggcaaaagccacactcacaaatcatttggagagaaactcttctctgccttgagcttttgctgagttgacgacataacaagacccttaagcttcttggaagtcctattatttgattgacaggatctgtgagrcccacccttaaactctttagaagacctttggtctgagtggacagatcttgagatagacctttggtctttctgatatcttagaaaataattctagagtcatacctttggcctcatctttagaccaagctttcctgat

SEQ ID NO: 659140 - DNA, 504 bp, Homo sapiens
attctttaacggtcccatttcaaaaggagaacctggtccatactgatttatagcttgtttaaattttttgagtaatttaaaaggaaaaggctcaaatgtagctataatatttccctgttgatctgcggggtgtattcaaacagcgaactgccaagcctctaaatcccacttttgtctagcttgctgaattcctgcctgaatagaactaagagcagtcgctcaaggcgctgstcgaacagtcaccagggcaactacttttcacccagtgtcctccagaaaagaaagatctggagggtcgttttcttcaaaataataatgagggggtgcagaagggtagggatgaacctctccttccttttctgctttagatttaggtggcaaataaacctggtctgtaacctctactgttactttgttatactctccttcctcctcatcatcagtgtgaaaaagttccaaggtagaacgaaccacagcccacacttgtcccattgttaccctgaa

SEQ ID NO: 659141 - DNA, 544 bp, Homo sapiens
gtaacactgccagagctgtaacactgctgcttcgataaagctgttttcttctaccctaccactggcttgcccttgaactctttcctggaaaagccaagaacccttccttgcaggctaagctccactctggggctcacatgccctgcattattactacatkgttttgcagtcttctgtctatgcatctgtctccttgctgaagttaagagttctagacatcagaatctatgtaactaatgcttagcattcaggaggtatatgctcaaatgtttaattaatgggttaataaaatagtgaaaaaatctctgatgataagggcattgaaatctcattaagaacagtctgtgcttttgtttttctgctttattgaggccatatgtgcctaccaaattaaaaataataattttatttctctactcccaattaaaccttgaagtgctatgaaaccactgctcaaaaatgagtctaacacttgaaatgactgtggttctccagacacttgctttttattcacatttcttaaaaatttccatattctgaacaa

SEQ ID NO: 659142 - DNA, 467 bp, Homo sapiens
atctgacacaagaacagaaacaagatttctgtgttttagtggctgctccaagaattctttctctgtagtggggaccaagataactattccatatgtgtgggattcacttctgggaggtcttccagcctgcagcaagcgtgacctagagcagaatctctaatccattgaggtaactggtcacctctggacagaaaatctcagagccctgagaggtcagtgggcaggcaggggttatccctcatcctacctctgttccccttggctgccctgtggggcrggaggggaggtatacacagagccgctggatacactgacatcgctggacacagaggtgaccactgtcagcttcacctccctgttctgggagaatgagggcagggaggtggcaggcataaactgctcagccctgcgaccagggaggaagagggaacaaaaaatctgccccaaatggcactgctgaaagagtg

SEQ ID NO: 659143 - DNA, 623 bp, Homo sapiens
cttccttcactgactctctttttggactcagcctgcctgcacccaggtgaaataaacagtcttgttgctcacaaaaaacctgtttggtagtctcttcacactgatgcactgatgcatgacaatgccatgctgtcagtaagcatgtctatgagtcctgggccccaggttgccacaggagaatccaatggatccttacaggctgcttaaaagggatagtttgttgtagtcctgaattartaaagtaatgtcctattctccacttaccatgtagtactgcttttgttaaataatccactggggcttgggtagtttatgtggcatttttgatatgccccactgttatggcttgaattctgagttgtcaaaaagtatgtcccctcaggcaatggtgatttttgtgctacaagaagtcgggggctcaataccaataatgcactcacaagtgagaaccatggtcactgacatccaatatggaccaaagccatatcacaggtagataagcactactggtcaatgcattcattctaaaaccttccagtgtcaccagtttttctccctaagaggacctggaagtattatgtggactcctgtatcaaaaaaaaaagtctgaatttctttctttt

SEQ ID NO: 659144 - DNA, 623 bp, Homo sapiens
cttccttcactgactctctttttggactcagcctgcctgcacccaggtgaaataaacagtcttgttgctcacaaaaaacctgtttggtagtctcttcacactgatgcactgatgcatgacaatgccatgctgtcagtaagcatgtctatgagtcctgggccccaggttgccacaggagaatccaatggatccttacaggctgcttaaaagggatagtttgttgtagtcctgaattaataaagtaatgtcctattctccacttaccatgtagtactgcttttgttaaataatccactggggcttgggtagtttatgtggcatttttgatatgccccactgttatggcttgaattctgagttgtcaaaaagtatgtcccctcaggcaatggtgatttttgtgctacaagaagtcgggggctcaataccaataatgcactcacaagtgagaaccatggtcactgacatccaatatggaccaaagccatatcacaggtwgataagcactactggtcaatgcattcattctaaaaccttccagtgtcaccagtttttctccctaagaggacctggaagtattatgtggactcctgtatcaaaaaaaaaagtctgaatttctttctttt

SEQ ID NO: 659145 - DNA, 402 bp, Homo sapiens
gaattctaggagcatccctagcacactcaatggggcaggacctgtaagttttccaggcatgactttgcccaccctgcatttcagtcaccccagattgcccacagataaagatgtagccctctggcacacacagaccccctgtgctagtattatttatgaggatgaaggtattgrcactcactagctaagtctcattgatggcagtagttgcctgagttttcctcatacattttaccccatacaatcctaaagcctctatgcagagggctagcactctccgatacttgttctcttcatcatcatgagcacacatctttgtaattaaaggagcctggtgcatcaaagcacctgcccaccaaagattcattagttgtggtcatgacatttttccacaaagttatt

SEQ ID NO: 659146 - DNA, 402 bp, Homo sapiens
gaattctaggagcatccctagcacactcaatggggcaggacctgtaagttttccaggcatgactttgcccaccctgcatttcagtcaccccagattgcccacagataaagatgtagccctctggcacacacagaccccctgtgctagtattatttatgaggatgaaggtattggcactcactagctaagtctcattgatggcagtagttgcctgagttttcctcatacattttaccccatacaatcctaaagcctctaygcagagggctagcactctccgatacttgttctcttcatcatcatgagcacacatctttgtaattaaaggagcctggtgcatcaaagcacctgcccaccaaagattcattagttgtggtcatgacatttttccacaaagttatt

SEQ ID NO: 659147 - DNA, 402 bp, Homo sapiens
gaattctaggagcatccctagcacactcaatggggcaggacctgtaagttttccaggcatgactttgcccaccctgcatttcagtcaccccagattgcccacagataaagatgtagccctctggcacacacagaccccctgtgctagtattatttatgaggatgaaggtattggcactcactagctaagtctcattgatggcagtagttgcctgagttttcctcatacattttaccccatacaatcctaaagcctctatgcagagggctagcactctccgatacttgttctcttcatcatcatgagcacacatctttgtaattaaaggagcctggtgcatcaaagcacctgcccaccaaagattcrttagttgtggtcatgacatttttccacaaagttatt

SEQ ID NO: 659148 - DNA, 559 bp, Homo sapiens
gacaaaatggaacattggaggagctagcgatctttcctctttagtttcttgcttaaactatctcagttagtaaagatttgactgttactgtcattttggcttattgttttaattagctatttcaactccatggcagcttagctcttkacagcattctggaaagtacataggattctagacatttttactgcttttgttatatgaattacatgtcttcataataaggaattaaggctgggagtggtcacttgtaatcacaacactttgggaggccaaggcgggtggatcaactgaggtcgggagtttgagaccagcctggccaacgtggtgactgaaatcccatctctactaaaaacgcaaaaattagccaggcatggtaaagtgcgcctgtagtcccagctactcgggaggctgaggcgggagaatcacttgaacccgggaggcgaaggttgcagtgagccgagacgatagtgccatttcactccagcctggacgacagagcaagactctgtctcaataacaataataagaataataaggatttaatatccaaaccatt

SEQ ID NO: 659149 - DNA, 512 bp, Homo sapiens
tactcttctacttttacaaccatacctttctctactatcttctaccctccttaccctctaggcactatgccatccctttctgtttcttggagatattgatctgatttctgtttcagagcctttataccagctgttcactctgcatggagaactaatcctttccccaggcttctcacatggctggtttctccctcttcaaatctgagtaaatgtcagctcctcaaaaggctttccccgatcaccctatataaatccccctgtagcacacacagatacacagctattctctctcacactattacacttattttctttatcgcatttatcacatctggaattatcttgtttgcrtgttgtttacttgtttgttgttcatctccctcatgagatagcaagcagattaagatagatttcatccattccttcattcctacgtcctttttgccaagcatataggaagtgcttaaaatatgtgttgaataaatgaatgaatggtctctctgtttctaatc

SEQ ID NO: 659150 - DNA, 591 bp, Homo sapiens
agcggtttttccgtcttcagggacatgcaatcagcaatctcattctacctccatacactcctacctggcaaagagtaaggttcactaactcacaggcaaggagaaaaggagaagaggtaaggtcctggctgaatcgacaccaagccacgttgtcaaagctttgagagtttgttatcccaagtcycccctcctcagtggaaagtgtttgagagagagggcttgggacccagactggcaaggttcaaatcctagctccatcacttactaagctatttcacctctctgtgcctcagtttcctccatggaaaaatgagggtaataatggtttttctctcataggagttgggtgggtcacattgagttaatgtatgtgaagctatttattagaacagtgcctgtaaactgtactatgcatgtttgctaatattctaggcatacagtaacaacagaagatcaagtcttgctaagaaggagttctctgagcatccctttaacgaacatgtcagagagagtgtttttttgtttgttgtttttctgtgtttttttgagattgagtctcgctctgtctcccaggctggagtgcagtggcac

SEQ ID NO: 659151 - DNA, 591 bp, Homo sapiens
agcggtttttccgtcttcagggacatgcaatcagcaatctcattctacctccatacactcctacctggcaaagagtaaggttcactaactcacaggcaaggagaaaaggagaagaggtaaggtcctggctgaatcgacaccaagccacgttgtcaaagctttgagagtttgttatcccaagtctcccctcctcagtggaaagtgtttgagagagagggcttgggacccagactggcaaggttcaaatcctagctccatcacttactaagytatttcacctctctgtgcctcagtttcctccatggaaaaatgagggtaataatggtttttctctcataggagttgggtgggtcacattgagttaatgtatgtgaagctatttattagaacagtgcctgtaaactgtactatgcatgtttgctaatattctaggcatacagtaacaacagaagatcaagtcttgctaagaaggagttctctgagcatccctttaacgaacatgtcagagagagtgtttttttgtttgttgtttttctgtgtttttttgagattgagtctcgctctgtctcccaggctggagtgcagtggcac

SEQ ID NO: 659152 - DNA, 591 bp, Homo sapiens
agcggtttttccgtcttcagggacatgcaatcagcaatctcattctacctccatacactcctacctggcaaagagtaaggttcactaactcacaggcaaggagaaaaggagaagaggtaaggtcctggctgaatcgacaccaagccacgttgtcaaagctttgagagtttgttatcccaagtctcccctcctcagtggaaagtgtttgagagagagggcttgggacccagactggcaaggttcaaatcctagctccatcacttactaagctatttcacctctctgtgcctcagtttcctccatggaaaaatgagggtaataatggtttttctctcataggagktgggtgggtcacattgagttaatgtatgtgaagctatttattagaacagtgcctgtaaactgtactatgcatgtttgctaatattctaggcatacagtaacaacagaagatcaagtcttgctaagaaggagttctctgagcatccctttaacgaacatgtcagagagagtgtttttttgtttgttgtttttctgtgtttttttgagattgagtctcgctctgtctcccaggctggagtgcagtggcac

SEQ ID NO: 659153 - DNA, 591 bp, Homo sapiens
agcggtttttccgtcttcagggacatgcaatcagcaatctcattctacctccatacactcctacctggcaaagagtaaggttcactaactcacaggcaaggagaaaaggagaagaggtaaggtcctggctgaatcgacaccaagccacgttgtcaaagctttgagagtttgttatcccaagtctcccctcctcagtggaaagtgtttgagagagagggcttgggacccagactggcaaggttcaaatcctagctccatcacttactaagctatttcacctctctgtgcctcagtttcctccatggaaaaatgagggtaataatggtttttctctcataggagttgggtgggtcacattgagttaatgtatgtgaarctatttattagaacagtgcctgtaaactgtactatgcatgtttgctaatattctaggcatacagtaacaacagaagatcaagtcttgctaagaaggagttctctgagcatccctttaacgaacatgtcagagagagtgtttttttgtttgttgtttttctgtgtttttttgagattgagtctcgctctgtctcccaggctggagtgcagtggcac

SEQ ID NO: 659154 - DNA, 364 bp, Homo sapiens
aggctggtgcccctctgggatgaagcttccagaggaaggagcaggcagcaatctttgctgttctgcagcctccgctggtgatactcagacaaatagggtctggagtggacctccagcaaattccagcagacctgcagaagaggagcctgactgttagaagaaaaactaacaaacagaaagcaataacatcaacatcaacaaaccaaggacccccctccaagaaaccccatccaaagatcatcagcctcaaaaatcaaaggtagataaatccaaaaagatgargaaaaaccagtgcaaaaatgctgaaaattccaaaaaccaaaatgcctcttctccaaatgactgcaactcctctcccgcaagg

SEQ ID NO: 659155 - DNA, 638 bp, Homo sapiens
tcttaaactgaccttaagtatacatgttaactagtggggtatgtacatttattgtaatcgttgtttagttgggttttttgtttttgcttcttgtttgtttgggttgggtggggagaaagactttcctagcatctgaaattgttttacttaaatatctacctacatcttttcttgtaaaacctatctttattctcttatactgggctctgctctttattgtacagctcatagtcacttcctgcttcagcctccaaactgagccttctaaatttgaggacatacctgcccaggggatgccaacccattttggtcagtttctacagcagcataaattagggttctcggagccattcagaaattgagccctcatctggcaaatacaatcctcccagggaaactcagaaacaaaaataatatgcacmgaagaaaaatatgtaaaatattttttaaacatacatttggacaaggattggaagatatatgtaaaattaaaatatcaagatggtggagttatggatgtacttctttttgaaaatgtggatattatatttttaaggttaaaaaaatgaaacatgttaagaaatgttaataacttttaacaagaatatcctgaaaggataaattttgattatgaagta

SEQ ID NO: 659156 - DNA, 565 bp, Homo sapiens
caaaacacaaggttcctgccctcatggagctggcaccccaggggcgagcagcttcctcatcccaatgagaagccagcttccttatgaatcattccgtcttcatcctagatggccttttgcatggaaacctaaaaacacagacacagatggaagaaactaaaggtacccaggggagtgaggacctaactccaagagtcaatggcaggactatgtagggtatttgtgggagcaggtgattctcaggcccaaatagtttccaattttcagtttaggggaaaagaataagagagacttttggaaatgcatgtactccaaagtttatttcttcaacacagggcatctccctccctctccttccttctttctatcacacacaaacacacatgcacacacacacatacacaatagcccaccctcccaagtatcaaaacgtaggcacacacacaaatatacaagctacaacaaactacacaaatacacaaactacacgatgggaaaatcaggtggaaaaatcaggaaaggaaatygctcgccacttagaagctgactctggtgtacacatacc

SEQ ID NO: 659157 - DNA, 596 bp, Homo sapiens
atctcccgggttcaagcagttctcctgcctcagcgtcccaagtagctgggattatggacatgcgccgccacgcccggctaattgtttcgtatttttggtagggacggggtttcaccatgttggccaggctggttttgaactcctgacctcaagtgatcctcccacctcagtctcccaagtgctaggattacaggcgtgagccaccacgcccggctgacgtgtgcttttaaaataccatgaaagaggcatttccataccaaaaggggaaaatcagaaataagaaatgggtgatgggtcccaagcaagtctgaaacctagcaaggaaaatttcattacattttaaaggatcaggaataattctctttgtctccagkctccctggggtggctctgtcttccgggattatcagggcaaggatcctgccccctccattttgggcagtggccctgacacctctggaattcagggggagacagcactctaccccaggcctgtgtcctctgggtctgtggtggggcggtagcagttctgtggatgcctggactgccttctgggtcattcttcctttttcttgaaggataacacatgttcactgc

SEQ ID NO: 659158 - DNA, 303 bp, Homo sapiens
tgtattacactgattgatttttaaatttgtatttgtagggtaattccacttggttaattgtctaacttttttctaattttctttaatttttattagtggtgaggcctcactctgtcccccaggttggggtggagtggcacagtcacagctaactataacytcaaactcctgggctcaagtgttcctgccacctcagcctcctaagtagctgggactacaggtgtgcaccgccatgccaggcttgtctaacatttttatgtgttgcttcctccagtttgctagagtttttggagatttctgcct

SEQ ID NO: 659159 - DNA, 303 bp, Homo sapiens
tgtattacactgattgatttttaaatttgtatttgtagggtaattccacttggttaattgtctaacttttttctaattttctttaatttttattagtggtgaggcctcactctgtcccccaggttggggtggagtggcacagtcacagctaactataacttcaaactcctgggctyaagtgttcctgccacctcagcctcctaagtagctgggactacaggtgtgcaccgccatgccaggcttgtctaacatttttatgtgttgcttcctccagtttgctagagtttttggagatttctgcct

SEQ ID NO: 659160 - DNA, 401 bp, Homo sapiens
attattctcttctctcaattttccatctttcattttgtttcacatctgaaattttttttcaactttttctattgttcctattgaattgttcatattgactaggaatttacaggagctctctttttaaaattctctctcctttttgtggtaccatcttgttcttttttgataccttatgtctttgaaaatgttagtaatagtttttcatagtctgttttccaagttcttttagtttgtttgttttttatcttcatctctggcttttatatttattagagagtttcttcagatacctggtgattttttttcatattttaaagtaggcacaaataaaactgttyggaaactctttgcatgaggtgagcttgtttatatggtttcagtgtaagatgatcagtatc

SEQ ID NO: 659161 - DNA, 484 bp, Homo sapiens
gtttttttagtgcatttatgttagaattcttggttgcaagcaaacaccaaatctagttaaggtggggaggggggggaaaaagagacaaaaagtaaattcactggaagacagcaagaaaagctgcggacccaggatcaggatggccaggaatcagggcatctctgcgtatctaggtagcaggagctaccgaacaatctcttcagggcatcaccattgagatggatggactgcaactactttaggtcttgtgttgctccactcacgagccaatttytgaaagacagctatataataactttatcctttcatctgaagggatacttaactgggaatcttaaaaaaaaacattcacaaagagagaagagtagttctccaaaataaaatcaaggtgctatagctgatgagccaataaaaacaacaaatacccactagtgacccttcattggatttccttctccacctctctcccttgcagggggaggcc

SEQ ID NO: 659162 - DNA, 493 bp, Homo sapiens
tccacccagaagaaatagaatgtgcaaaaacctgtaatgaagastgaacatggtatattcaagaatctgaaataaggtatttttggttttggtaagaatgcagagtgaaatttcaaaggtaacaagccattcggcaggagaaataaacaaaggcaagatcacgaatggatttttacattttgattaacttttcctttattaaaaaaaaagagaagccactgaaagatatcaagtagggtaagaaatgatggctacttgtttaggaagtataatttgggggcagaggaaactaagggacagaggtcaaaaccaaagacaagagaataacataggaggctactgtagtagttgaggtagaaaagcacggatgtataccctaaactaatgccagaaagaattgcaagaagcaaatggacttgctagatgtctagaaagttgactcatcaaaactttgcaaaaatttggatgatgtctgtggtagcaataacaacag

SEQ ID NO: 659163 - DNA, 451 bp, Homo sapiens
acatttcatatgatgaaactggtgtctaaagaggtaaaatgacttgaccaaaggcatacaattagtaagtaataagatctttgtagtttttcaaatttgactaggttctaattcaaggtccctcctgctacaacaatttgtcaactcattaaacattgaataatagagaacsatttaggttccattaactattgatatgatttgacctgtgtccccacccaaatttcaaactgtagctccataattcccctgtgttgtgggagggacccagtgggaggtaattgaatcatgggggtgggtctttcctatgccgttcttgtgatagtgaataagtctcacgagagctgatggttttataaaagggagttcccctgcacatgctctctcttgcctgccatcatataaggcatccctttgctcttccttcatcttctgccatgattgtgagggc

SEQ ID NO: 659164 - DNA, 618 bp, Homo sapiens
gtgtttccactattgaataaaaacagtgataatggacttccttgtcttggtcataacatcaggaggaaagcattgaatatcaactgctttttctgcctttattgaaatgttcatttgtattttttaatgttactgtgaattaccttggttarttttcaaatgttatctaaatggccaattgtccttctggaccccactgactccagttgggatggcactgtaagaagagaggcagagtcagtgaaggagacaaggtttattcaggatttacatacaagggtggtccggtggtggagggctgacctggagaactgctaccatttgtaaaaagcacgtagtctatatagcattttcacttagcactctccttctagcaacctccatttaaccccaaagggccttgatctgtacagcgtaagatacgggccagggatgtggatgtccttcatagataaggagtgaatctctgggttggctgctcctggattccttagcccaggactccaaacgtaagttcttcttagaccatagggttagtctcaggtatgctccggttatggctcagccatacactaatgtgtgtacaccagcctctgccatgcaccaatacacatatat

SEQ ID NO: 659165 - DNA, 610 bp, Homo sapiens
aacaatgcatgttaagagactcccagggttgatctcaatggtacggttatcaaatatttgtgtaaggacttgctaaactctaaggttaaatacgcatagccacaagacattttgtaaaatagaagaaaatgaagagaaattctcaatataaagaaagaaaaatagtatatatatatatatatatttgataaaatacaaaaattataaacgaactaattgtttgataactgaccataattcttagatgtttggacctgctttaatttacatgttgaccacaatgtttgatatcatttcaagccacgggtcagacagacatataaatgaacactggcmtatgtacagactgttggtattgatatgaaatgtaggataatataatttgatgtagagatataaagatttagagagctgaaatcactcaacccccaaaagtatatcatacgtgctgaaatttatatttttagttcgtactctgtgatttgacttaagcaatccacttctattttaattaccaccgattttaataacttacaattcaatctaatttcaatctacatagaactatcatatattttaccttaaattaaaaatattataccccaaacca

SEQ ID NO: 659166 - DNA, 451 bp, Homo sapiens
atgaaaaggaagaagtaatttctatttctggaaatatgatggattatcctgtaaaaattccttaaaaaactagaaacactaaataaaatataataagcatccttctaaagggtaatggtcagccataaagaaaattatcccacatggaaacatgggaattcaagttggaagaaccaaaacagtggtttaaaaaagtagaggaatctaaataaatattragtccaaaacaataatagtaatacattgtggtgtttaatatatatagaaaaatgtaagttaacaataatacaggcaagaagaagataaataggactaaagtgtgataaaatcctagattttttcagaagtggtaaaagtactaaattatatcacactggaagaagttaaggatgtgtgttttgatttttagaggaaccacaaaaaaacagtaaagttgacaacttaataagtg

SEQ ID NO: 659167 - DNA, 594 bp, Homo sapiens
  misc_feature 1, 2, 3, 4, 5, 6: n = A,T,C or G
nnnnnngtccccaccccacccgaacacaagcaaaggctgagtggagagcttagacttccaccttcctgaagttgcaataaggtatccttaaacctctgccaggtggtttctgagaaagttaagtggggascaaagactttcttcttgttggcaggtatcaagagttccccacaccaaagtgtcagtagagatattctgtagaaagcctagactttcacctccatccagcagtaaagaggcgttccactttctcaccgctgtggtagtatcagaggaagctgagtagaaagtcagtactttcaacattgcctaacagtattggggtcacctcaatatgtgtcagtgaagaccctgtggggaccatgaactcccatgcctgcccagcacttatgaggagctcctccccttatgtgtcagctgagaccaaatggagagtctggacttttcttactccatctagcagtagcaaggcagttcctccccttgccctgttggagtggtgtcagagatggtgagctaaagcagagtttaaataagatctggcatctcaaaacataatacaaaaatgtcaggtttcaacagaaagttactcgt

SEQ ID NO: 659168 - DNA, 594 bp, Homo sapiens
  misc_feature 1, 2, 3, 4, 5, 6: n = A,T,C or G
nnnnnngtccccaccccacccgaacacaagcaaaggctgagtggagagcttagacttccaccttcctgaagttgcaataaggtatccttaaacctctgccaggtggtttctgagaaagttaagtggggagcaaagactttcttcttgttggcaggtatcaagagttccccacaccaaagtgtcagtagagatattctgtagaaagcctagactttcacctccatccagcagtaaagaggcgttccactttctcaccgctgtggtagtatcagaggaagctgagtagaaagtcagtactttcaacattgcctaacagtattggggycacctcaatatgtgtcagtgaagaccctgtggggaccatgaactcccatgcctgcccagcacttatgaggagctcctccccttatgtgtcagctgagaccaaatggagagtctggacttttcttactccatctagcagtagcaaggcagttcctccccttgccctgttggagtggtgtcagagatggtgagctaaagcagagtttaaataagatctggcatctcaaaacataatacaaaaatgtcaggtttcaacagaaagttactcgt

SEQ ID NO: 659169 - DNA, 409 bp, Homo sapiens
tgtaaatgtttcctcgtcgtcactgttttttcacagcagtgggtgtttacacgtagtgtatggacaacctrcatcggaatgacccggggttctttatgaaccacagcaccccagttccccattccaaatatggctgagaaaaataagtcaggaagatgcacttttactaacgttccctgagtcttgtgaaaattaatttttgctttaaaaaacacatttttatgtatgtacacatacaattttacataaatatatgaatgaaattatatcatatatgctgtctttggtatttacatacaatattttggttttttgtgcttgtcttcctatgtatgtatatacacatacaatttttatgtatatacacatacaatttttatgtatatacacatacaattttacataaata

SEQ ID NO: 659170 - DNA, 543 bp, Homo sapiens
atccttagcaaactaatgcaggaacakaaaacagcatgttcacacttataagtgggagctaaacgatgagaacacatggacacatagaggggaataacacacactggggcctattggagagtggaggatgagaggagggagaggatcaggaaaaataactaatgggtaaaaggcttaatatctgggtaatgaaataatctgtacaacaaacccccatgacataagtttcctatataacaaacctgcccatgtacccctgaacttaaaataaaagttaaattaagaaaaaaaaaaagatagggctttctttctttcaactcctttttcttctctgctggagttctaagccagaatctgttacaacatacaagggaatatattatttcctcttgtccctccttccacctggctgggccaggactagaccccagttgtggccccagttgtggctgagggaaagcacattcatgtcatgtccctctgtggtgtcttccagccaggtcctgacaggtgtgtgttaggtcagtctctaatgagagctct

SEQ ID NO: 659171 - DNA, 606 bp, Homo sapiens
ctgcaattgcattttcctcacccatcagggtgatcagtattccacatcgttctaatcatgtgaatccttgttgtccatcagctggcaatgactcaacagtagactctcgtttatttttcccaggaccgcttctgtttgctaactgccctaattttggtttcccagaggtcaagtctgatcagggattgaagtacatgcaatttgttgagagaatgcccttaagaaataactgagggaaaaggggaatgaagatagggaagggaaatgctgagtaaagatgtaatcacaggtaaagtctagtcttggcctgatccatgggggtattcctgccttaatttgccccatgaagttgtctttgctacttgaagcaaggagattgccagtcatgaactgtgggctgcctctggtcaatggcgtttcctttggatgaaacagttcttgtcctyctagggcatatgatggaaatggagagcacctgtgagctgttagcagccagagttcatagcaacttcacttgactagtaaaggggcctgggtggggtgctcagagcatctgctacattaacttgtatgatctcataacaatcctatgaggaagaagtcatt

SEQ ID NO: 659172 - DNA, 568 bp, Homo sapiens
taggtctaggtttctgcaaaaaaaaaaaaaaaaaaaaaaaaaatgtagtgaaactatatagaaccacttaaggaagcactgtattaccaaaaatagaaaagaagaagatgactagcagatttctggctatggaaacagggcaattgttggcattttaaactgaggtaaggattactgaaaaaagagggactattggtaagaaatgagtaaaaatgataagtgaaatctgaatgtattaatttcatttgttcatatgacactggacacagatgtccaraaacttattcgtaagtgtcatcaagtccaatgctcttctttaaatgcatgataatactaagattaagaggaaggaagtaaatttagaaagatcacccaaagtcttacagagctggaattgaaacaggaagcttccgagagtcaatccagaatctttttctctgagtcaaagcttaccatgtcttgctgttgtttatttagttagttaaaagaaaagttggttgccctaataacaggattttaattccaggaaggattttgcttgagtgttgcctttttgcctaagttattg

SEQ ID NO: 659173 - DNA, 561 bp, Homo sapiens
aatcatggcttcatacttgctgtgtgaactttgtaaagttatttgacctctctgtgcttcaggttcttcatctgtaatatggaagtgataatatctacctcataggataaggattgaatgagttaatacatataaagtacttgaarccaggacctggaacttttattaccatttcagtgtaattttttggtactctctgttatgtagctcagggctaggtggacacatttacatatccactaaacatttggtgcatctttgaaccaatattgtcatcagtcacttggaggacaaattgagcccatcttggaggaaaggtgaagaactgctgtcagcagccctctattccttctctattgttctgggtatttctgctttcatatgtcccctacatgtagtgtctttcctaagtgagagctcgcaaagtaccatttctccatttcattctagttgctgggtcattccagcagctcttggcccctggaagctgccggctggtttattccttaagctggcttcgataccctatagactcaactcataccaactcttttgtgctcc

SEQ ID NO: 659174 - DNA, 561 bp, Homo sapiens
aatcatggcttcatacttgctgtgtgaactttgtaaagttatttgacctctctgtgcttcaggttcttcatctgtaatatggaagtgataatatctacctcataggataaggattgaatgagttaatacatataaagtacttgaagccaggacctggaacttttattaccatttcagtgtaattttttggtactctctgttatgtagctcagggctaggtggacacatttacatatccactaaacatttggtgcatctttgaaccaatattgtcatcagtyacttggaggacaaattgagcccatcttggaggaaaggtgaagaactgctgtcagcagccctctattccttctctattgttctgggtatttctgctttcatatgtcccctacatgtagtgtctttcctaagtgagagctcgcaaagtaccatttctccatttcattctagttgctgggtcattccagcagctcttggcccctggaagctgccggctggtttattccttaagctggcttcgataccctatagactcaactcataccaactcttttgtgctcc

SEQ ID NO: 659175 - DNA, 544 bp, Homo sapiens
atgtacatattttcagagtacctgtgataatttaatacatctgtataatttgcaaagatcaarttagtgtaattgggatagccatcatcttaaatatttgtcattttttatgctaggaatattcaaattattctctttcagctattttgaaatatgcaatagattattgtaaactacagtcaccctaatcaccctgttgatctattaaacactgtcttaaatatattcttgatatgaatccttttttgtactatgtattaccaaattttctcacattctgtggcttttttgtttactatctttatagtgaagaacagaaattaattttattgagactcaatttattaaaaattttattgatcctcaatttattaaaaactttttattttgctattatagggttttttgtgcactgttgaagaaatctttgcctacccataggtcaagaatatattctcctacatatcttttataagccttcttattttaccttttacattcctatctatactgcatctcaaattaacttttgagtgtgatatga

SEQ ID NO: 659176 - DNA, 637 bp, Homo sapiens
gtgttttcaaaatttgtctactaatatttggaagaaagacatagcaagactgattttagtggggttgaaattcaagaagggtaagaatgaaaaattttgatggaagaaatcaagatgttctaatattcacaggattcccaagtgcactatacaggtagaagaattgggacttttgtgacattacactattggcattgcctatagatgaatctcactgtacttgaacaatttaatcttgatctgggagagatttttatggcttaaattaggaaagattctacacaatcacttttcttctgttcgaataaacaaaaagtctgcaaaagacatgagttatacacaaactatttaagtcccttacaagtatatttgattaaccttaattagattttctaataagatatgagatacatattttaattattttaggaacaayttttatgtcctagcttttatttcagaagaatgaagcaatattataattggatatttaagctatcatatatatgatcattttcatttgcatgatgctaaaaaggacaggttacatatttgtgttttgccatcttttctctttctttttttttgcgtgttgttttctacaataacttaaagataagaaataacacatatgtag

SEQ ID NO: 659177 - DNA, 477 bp, Homo sapiens
ctcaccatgtacaaaatcaattcaaaattgattaaaggctgaaatgtaagatctgaaatgataaaactactggaaggaaacctaggagaaatgcttcatgacattggtctgggcaaggatttttttggataagaccacaaaagcacaagcaagaagagcaaaaatagcaaaatggaattacatctaatgtaaatgctcctgtacaccaaaggaaacactctamagagtgaaaatagaacttacagaatgggagaaaatatttgaaaactatgcatctgacaagaggtaatatacagaatatatcaggaactcaactcaatagcaaaaacccaattaatccaatttaaaaatatgcaaaacacctgagtagatatttctcaaaagaagataaacaaatggcaatgggtatatgaaaaaatgctcattatcactaataatcagggaaaagcaaatcaaaaccacaatgagatatcacct

SEQ ID NO: 659178 - DNA, 481 bp, Homo sapiens
tctttcctccattcctccagaggagagaaattaattttccagtcatataagtggacacaagtttatggctttctgatttatgagtcacagatcagaaaacagactaaagatgttataaagttattattatagctgttgtttagatgtctagaaaatggcatttaattttgtcattcatctacttccagcagggaaaatcataaattatatttataataaaatgatatttacctcagtagagtttattagactgtcattcaacaaattttgatcagaaattgcaattaaattacctccgattgcagtcaagggcaagtaacattttctcagatttcagtatcctggtggcaggtgtcttcaactcttgactattccatgggkgttaatgatgaactagattaaattatcggtaacagttctaaatttgttttatctttccttgttgaagtaaaatcatcaacatatttttgtactcaaatat

SEQ ID NO: 659179 - DNA, 516 bp, Homo sapiens
gttcctcactcagctgcacctgctgcctccacacttaccccattccacaacccaaagaatatcttcaattttaagcttcatcgtatgagacaccacaaatttccaaaacaagcaattgtctctttaagaaaatttgactttcaaatgaccttcacatataaatagccacttcctgccccttttaattttgcacccataggtaccagggttagtcctcttatgccttcttaaggaagccctctgtcccccaactcccccacctyccactcttataagactcagatcccaaaccccacttccagccacaaatgtaccaattctcataggagtatttttctagtaggagccactggaatctataaactctatttttggtggccaaacctctgccccaccccttccccaaacctgtacctaactactcatccatccctcaatctgtctaaaaagaccctaaatgcaatgggaaaaacactgaaattaaaagacatgtatttataaatatacaaatatata

SEQ ID NO: 659180 - DNA, 660 bp, Homo sapiens
tatggttaacaacagagggaaagaaaaaagctgcattggtcttctgagagccttgagatctgcaagtaagtcttagtcatctgtttatctccagcaggtactacagtattggaggctgtgatggttcattttatgcctcacctgcactgagtcacaggatacccggatatctggttaaatgcttgtactagtccgtttttacgctgctgataaagacatacccaagactaggctatttacaaaagaaagaggtttaatgggcttacagttccacatggctggggaggcctcacaatcatrgcagaaggtacaaggtacatctcacatggtggcagacaagagaagagagcttgtgcagggaaactcccctataaacccatcagatctcgtgagacttattcactatcctgagaacaacacaggaaagaactttccccatgattcaattacctcccacagggtccctcccacaacatgtgggaattcaagatgaggtttggatgaggacacagccacaccatatcaacgctatttctgggtgtgcctgtgaggggtttccagaagagattcacatttgaatcagtggactgagtaaagtagattgccctccccaatgttggtgggcatgatccaatctgtcaagagcctgaatagaacaaa

SEQ ID NO: 659181 - DNA, 611 bp, Homo sapiens
tagtgtgtctcaaagctctatatgtttacatattatttctgtagattgttttcaggagaaagttttgcttccatggtaagagtgagcactttggcttctgtgtaagttagaaataattgttagtttttaatatgtacttcctggggaaatttcttagatgtttgcaagcaagtgaaaacagttagggccagtggtactaactactttataaaattttatttttatttgtaagaagtcatctacttaaggcccagttaatataagtggaatcatcgtagtttaaggaatacccagagattgctgctgttctatttattttacagaaaggatagctagattgaaagctcttcagtggaccttgagctaatagagcttttaccactaaaagagcattattctcatgtcataatgagaataatcatttacatacttggcataataaatgcctaaaagacattttattttctgaatctatcgttttcttgctataatggggatattgtaarttatgcatttgtattaatggtatttcttaaagcaatctatgtaactgtaaactaaaccaatctacaaactattgtaggcatctgtaaattctgtcgtaggtatta

SEQ ID NO: 659182 - DNA, 582 bp, Homo sapiens
tacccctaacagttgtatagacttgagcaagtttctttcttttctaagcctcatttattttgacttggaagatggaaatgtaacaggacgtctctgatagggattttaagaatattaaatgaaatcatgcctatgaagtactttgtagagttcctataattaataaacacacaataaatactatattgttgccatgtgagtaaaggtgcctgggagaaaaggtagtatcaaaaatatggcaaacttaacacattttggaatcaactttgtgaaagcttatgratatcaaagatctctgttcgttcatacaaacaagatctagagaacagaatatccgcaaattagcaattggcaaatactgaagctcagtttaaccactctctgttctccctaatattctctggtgtatagagcaggcagacaaaggttcccaagtgtgtgttggcttgcgtatactattgaaacaactgtgttttgtgtttgtggccactaagaatgcttgctgctttggcaaccatgtcacatggtatatattccttccagtggtatatctacctttacccacatcttccatattgatct

SEQ ID NO: 659183 - DNA, 592 bp, Homo sapiens
ttgctcatctttgaattttatagcttatgaagcacttttctgctgatgatctcagttggtcttttcatcagccctgacagggagggacagaggagaacagggtggggggcgggcggggatgttattcatgtcattttgtatccaaggatatcgaggaccagagcagctctgtgatgtgtccagctaatagagcagagtagcatgattctagaactaaaatgtaggtcactgactcttaatgtgggattccttccagtaatactttttattatctgaatggaactgattgtaccagacctaggtgttctaatatgtataatcctagcagtcccgacaatattcytaagacaaggtaaggtcctcaggcttgtaggatttggaggcttgcttctctgagggtttctgctgatagatacctccaccatttgtcattaagatgtgggttgtcgtggtaatgggagcaagagggctgaactggaaaaggaattacaatatatctaatggtatagtaccaaatgagaaatgaatataattgctgtaaagggaaaaagcattgtagatttggtaacttcacttttggtctggatatctc

SEQ ID NO: 659184 - DNA, 225 bp, Homo sapiens
ttaaaaacatgattcagggaataatgcataggtttcatcgactgtcaaaggggtccatggctaaaaaaggggtaagaagccctcatyagatggataatgttaacatctcttcccttttctttgattacaaacacattcttataagattttattttccttagtgattgacgctttagaagtgggtaagatgatcaagagagatttctttaaaaaagagaatagagt

SEQ ID NO: 659185 - DNA, 225 bp, Homo sapiens
ttaaaaacatgattcagggaataatgcataggtttcatcgactgtcaaaggggtccatggctaaaaaaggggtaagaagccctcatcagatggataatgttaacatctcttcccttttctttgattacawacacattcttataagattttattttccttagtgattgacgctttagaagtgggtaagatgatcaagagagatttctttaaaaaagagaatagagt

SEQ ID NO: 659186 - DNA, 225 bp, Homo sapiens
ttaaaaacatgattcagggaataatgcataggtttcatcgactgtcaaaggggtccatggctaaaaaaggggtaagaagccctcatcagatggataatgttaacatctcttcccttttctttgattacaarcacattcttataagattttattttccttagtgattgacgctttagaagtgggtaagatgatcaagagagatttctttaaaaaagagaatagagt

SEQ ID NO: 659187 - DNA, 225 bp, Homo sapiens
ttaaaaacatgattcagggaataatgcataggtttcatcgactgtcaaaggggtccatggctaaaaaaggggtaagaagccctcatcagatggataatgttaacatctcttcccttttctttgattacaaacacattcttataagattttattttccttagtgattgacgctttagaagtgggtaagatgatcaagasagatttctttaaaaaagagaatagagt

SEQ ID NO: 659188 - DNA, 496 bp, Homo sapiens
attaattttaaatatttttatttactgcatttatctataagtattaaaactaacccatatttcatgcaaatgtgcaaatatattgcactctagtttagatgtaagtcagctactgtaagataataaatatwtctggaataaattcatattctcataattgcatttgaattcctactataaaggaatattatatgtacttgtttggggatatggtatacttttctcattaggccatgtgcatgtcttttgtatttgacaaggcagtcccagataaaagtctctattaagtagcattatgacttcccatcttattcacttttctagtaagatatgtgtatgtttgcatgtcaacatttatcttatgtctgtataaatatatattttatatatacatatatattatttcaagacttttgaattacataatgagttttattctctgacttatcatgcttattttatgaagtgcaaagcacatttattgtcaatttgatct

SEQ ID NO: 659189 - DNA, 584 bp, Homo sapiens
tgtattcgtcttcaccaaggctgatctattgctaccattgctgaatgtccagtctgagagcagtgcatatccattgcagagtcttccatgtgacactacttttcgggagtttaagcagcctcttggtgacagagctatgaaataagaccccttccaccagaaagggaataaggattgtccttatcagaacaaatgcacattctggatatgagtttgcctttttttgcacagtttttcaatcaacaccatcatttaagggcttaaaaaatgcctgatatctcaacagagcatttcatgtgggattgctttagaacaaggagcctgctttatcacaaaggaggtatgttgatgcataggtaatcacaagattcgtggggcttactactagtattctactacactgatagaatgaagactcagttaaggagccagctcagagaaaaaatcccagggtgttgtcttctagtgtacactatatgcactgaagcataggtctgggaggtaaggagtagaagtgggatcccctgcttgccattattcccagttatttttaacrtattcccatgctcaaaatatagtgcttt

SEQ ID NO: 659190 - DNA, 545 bp, Homo sapiens
gggtctcattgtgttgctaaggctggtctcaaactttaagcgatcctcctgcctcagctgatactcagcctagatctctacttctaaatgccatttttccactaaaagactcagggcttcttgagaaatggctgattccagccctggggctggaaaaacacgaaagtatcctggaataccttgtggtaccagaaagccaggaagtgaagaagacatgtgaaagggatcagaagccagcttgaaggaatttccactggccacatcagaggaagtctaaacatcaaatggattgtaactcagataaaatagaaaaccattaatccatactgatataaataaaggaagaaatcaaaatctgaatgaacaggaaatttaaatcgtttcaaayggtcttcctcacaaatacctattaagtatacagtaagtcctcacttaatgtcctcaataggttcttgaaaacagcaactttaagccacatgatgtactatatgccataggaacttaactcttgtttatatcaactggcctatggtaaaactggtttt

SEQ ID NO: 659191 - DNA, 635 bp, Homo sapiens
gcctctacaaataaattttaaaaattacccaggtatggtggtgcatgcctgtagtcccagctactcaggaggttgaggcaggaggatggcttgagcccaggatgttgaggctgcagagrgtggtgatcactccactgcactccaacctgggtgacagagcgagaccctgtatcaaacaaacaaacaaaccccagtgttctgttgatattccttggctataactagacatagaattgatgcttttagttatcactgctaaagtggaatgctgaactaaagaagtgctgtttaattaaatgccatgtataattcaaggaaaaagactaataacgcttctgaattttcatcagtatctgtgattttgccagcattttttggtattacttattatttaaatggctatttgccttattaagagaataaaaatttatttcaacaaatagaattaaattaacatctggatttattttgaaaatgtgtttcttttattgtgagcctaagaatatctagagtttctgtttgccctactaatcagtgtccacaagaaaataacgaaacaagatgtgaaaaattcaaacagctttctagtatcatagtatgatagaagccctagatacctcacctagtatctagta

SEQ ID NO: 659192 - DNA, 488 bp, Homo sapiens
tctacaaaagcttaatcaacactacagttgtaaatcaccaggctgaagctaggacattagtatttcaaagcctcttctattactrtatttataactttatttctgaaatatatatacagatttcattacattgccagttatttatatttgtttcatgtccacagaaaatagagtatcattacaaaattttaggttcatcttttttttaattgaaaactagtgaaattatctgaatgttttaaggaatatgctattttaattactgtatttttattggttattgtcaatattttagttatgtttgttattgattagttaagaaaattcatttaaaaataatccaaaaccatttcccaatattgccaaaaaatggaataactatacatttactggaaacatttaagataaagttgtagatccattaaatgtaaaatttttcaaactacttctctagtcatatgtcctcttagaggataatatctagaatt

SEQ ID NO: 659193 - DNA, 369 bp, Homo sapiens
gaattcaaaatgtcaaatgttaacatatcctttaatttttacaactggcactttcttttttattatatttyatttcaatagtttttggggaacaggtggtttttggttacatggataaattctttagtggtgatttctgagattttggtgcacccgtcacttgagcagtgtacactgtacccaatgtgtagccttttatttctcaccctcctctcacccttccctgccgagtccccaaagtctattatatcatttttatgtctttgcatcctcatagcttagctctcacttataagtgagaacatagggtatttggttttccattcctgagttacttcacttagaataatggtctccaattccatccag

SEQ ID NO: 659194 - DNA, 584 bp, Homo sapiens
ttcatctcctatttactcttttttgctttcccagcatcagtttctctgataagtgtggctgacagcctctcatgggcctagagcctttggattacagagcgggtatgaagtgcactcattgtcattttgtaaggggtgggaaaagatagaaggcagaaggtgcagtcatggcttgagatgagaaaacactccccagggagtttttgaccctgatttctttttaaggactcctctcatcctgcccatgagcagaacaggcttcacataatccaaaggtgaaatatgtagcacctcctaagttgggaacacgtgtggagatagaaagatrttaaggagggggaagggaagtggaagggtaaaaaaacagtttccaagatcagaactgatcatcctgcaaatgacttaaggttattggacgaattaaaagggaatgtggaagggcagggagtagtggggatctgagcccctgggaacctgatttgtggtcttgcctagtgtgttggttaataatgagtgtcaacttgattggattgaaggatgcaaagtattaatcctggatgtgtctgtgaaggtgttgccaaagc

SEQ ID NO: 659195 - DNA, 558 bp, Homo sapiens
aagacaaagaggaacattatataatgataaaaggccttgtccaacaggaaactatcacaatcctaaacatatatgcgcctaacactggagctcccaaatttataaagcaattactaatagacttaagaaatgagatagacagcaacaccatagtagtgggagacttcagtactccactgacagcactagacaggtcatcaagacagaaagtcaacaaagaaacaatggatttaaactataccctggcacaaatggacttaacagatatatacagaacattccttccaacaactgcagaatatacattctatttgacagtgcatggaactttctccaagatagacaatatgataggccacaaaatgagcctcaataaatttaagaaaattgaaattatatcaggcactctcagaccacagtgaaacaaaaccggaaatcaactccaaaagaaaccttcaaaaccatgcaaatcatggaawttaaataacctgctcctgaatgatcactgggtcaaaagtgaaatcaagatggaaatttgaaaattctttgaactgaatg

SEQ ID NO: 659196 - DNA, 482 bp, Homo sapiens
tgaagcaggaatagtaaaattgagtaatatgttcaaatttaaaaatttgtatatgttccaaacaaagtcatgtgtcatcttcaacttaaacttttcctcacataaaagattaaacaattgctcctaatagtctttaatgtactttctgtatcttgagttctcagttattcccatcattaactttgataacatcagtactgtgtccaagatagtatttttgactctttaactgaccatgataaatataaggagaatgagacttaagtgcactgactatatctccattcctttgattaaaatwttttttaaaaattgaattgtaatggaacaatgcaaacctgcagaaaactttttgcatgctatttttcatctgaaagtaaaataatacctgaatactctttgtctcaccagctttttacagaatgaatggcacttacagggctattttttctctgtaattattgagaaagattttaaggcaa

SEQ ID NO: 659197 - DNA, 641 bp, Homo sapiens
actgcaagtggagtgggctgagctggaattatggtgtagaaaatgactggttgagaaaaacccaaacaaatatttctataatgtcatgtgcataagatacctgtagatgttatcaaggtatatacataaactacctgtcattagagctaatttcttagcaaattattcataaaagtttataactttgtgaggcattacagacaccaaaagtaatgatttggcatttccrtggccctatttgtctaaagaactatcttttacactttactgttttttaataggcaatacagtgctcaaaaagtattttataccaagtccagtaggttgataacattgagtataactgagcattgctttgtgtctaccctcaggcaaatctggagattttctcaagcctctttatgaaaatggagagacctcacaagagatgctaatggacagctgaccctgctccctgctccatcacaggttgtagagtattaattctcaagttacccagacatttagttctgaatgtgcaaaaatggtttaggttcaaatgttttcaactactgacaagctcaagaattcagaggaggtagtactaagggaaatgtaattaatatataatatcaaaacttaagcatagcaccataacacct

SEQ ID NO: 659198 - DNA, 548 bp, Homo sapiens
atcataagagaagcccaaataggtcttattttaatggaatatttttccactggacttcaactggtttatcttatttatccgtccatctaagatcagttgaaaaaagagacttgcagatgcaatattttagctaatatatccaatctcctatttgaaatctcctgcgtrtctaacagaaaactcaaatttagtatgtctgaaatcaagctgactgctgcacatgttcacactgaaacaaagcaaaacaaaattccttcaacagctttcttatctcaataaatggtactacactgtgcctgtatgactcatgcccaaaacctagaggtcgacctaggttctttttttccccatgactctccatttccaagatttccatttcttccgtgaacacttctcaaagccacacccatctctctgtcagaataccacaatgcattgcaaatctgcctccccacttgtcatctcctccctaaatgctctattttcacggtagtcagagtggcttttttttttttaaagcacacaagatcttgactcttcattcccta

SEQ ID NO: 659199 - DNA, 617 bp, Homo sapiens
gctgcattttcccttgagtgtgacaacatttttaatgtaactgtgtcttgcatcttgcagcacaaaacccctgaaaatgaatttctgatggttaagaatgagtctcatgaggaaatcaggaaaatttttaaaaatatgatatgaatagctcttacaatggatctttaaaaaaataaaatgtgttttgaaagaaaggtttgtttgggcttatctcgccacaggactgtctgggtttctacccccagtggaaaagcgacgccgctctggcttcccgcctccttttgttctgtggcaatcatccatccacgtctgcaatgtgcctacagtttccaatcacacatttctttcttgctgccactgtggagttaaggcatatgatagcatttggaagaaaataaacatcccttgtaataggccaatatggcaaaccctggtgagtgggatctatcaaaagcaaacttgggtaatgatcaagggagaaaataaaacctttattcttggctgctgagagtggtgacttccagctaggctgttctttcattttattgttagggtgagttcaagtacacctaacaccccaaggggatcacwtcgttgaaagactctatacttaaaag

SEQ ID NO: 659200 - DNA, 573 bp, Homo sapiens
ttgctatggtaatgttccttgtgtagcaccctgttcttatttaggaatccagggaattctttatctgtgatcatattattaaatttttttaagtgatttcttctgtttctagcttaccactattttttcttttctttttctttgatatgtttgcctcctttggccttttatgtagaaggttctcctcaagtatctggccttataaagtcgattctatctcagtgctctgacagaatgtgttgactggtgggtgacaactgtagtgtaacatgtggtaagctggcttttgaatgagaaaccctgcaatagtactaatctgatgtctgtagtttggctagaataaaatcctaatcttgcagtgtaaggctattcctttaggcatttactgctgctactaaaatgtctctccatatacttygtattattctcctgtgggtaacatgttttggggggtagatttaatattttctttttatcctttttatttatatttccacttctaggtatttagttgtagatttacctttatttattctatgtattattctgatggcactttcaataagagggctc

SEQ ID NO: 659201 - DNA, 485 bp, Homo sapiens
tattttggttcagataagctcagtttatttggatatatgacagaaaaaatgttaatcaggaaggaatgtaaagttaagaagatgagttttggagcccgctctgttgcttttggctctgtgttggctatgactctcagtaagaatgagtatttaaaagtgacagaacccagctccatgacctagaatgtgctagaagctacagggtagtagagagataatcctgactctacttcaaaagttttaatggaaattacagaacagacaatcctgaatctagaaatgcaaaggcagctcctattgctattttacagtttcagaatagatttttagtcatcttctgacttatgatggtgatatgaggggattattgatacagatatcatgtctcaccactttaaagatcaactrtagattttgtagaaatgctttaaaaatgaatgaaaaataaatatataagcctccagtatttgatcttcaaataatta

SEQ ID NO: 659202 - DNA, 535 bp, Homo sapiens
ggaagtcgatgtcctgtctttgcttttcaaagttctgacacagaaagtgatgagctatcagaagtacttcaagacagctgctttttacaaataaaatgtgatacaaaagatgacagtatccygtgctttctggaagtaaaagaagaggatgaaatagtgtgcatacaacactggcaggatgctgtgccttggacagaactcctcagtctacagacagaggtatgtgtcttatttctccttaaatctgtggttggctggcttcatagtttagaacggggctcctcaaagcagctggtcaaggaaccgtctatcatcagtctgtagtgaaggaaggggttgtacactgggtataaatcatactgcttccttcattgaggaactcttgctacaaaacaaaacagacagctgaacaaaacagtgtgcttgatgctggctggtgtttctctacaaacattagaccagaacctcatgctggtgaatgttactattcctcacatgaaaatgaacatctctgaacagatgatggggtgagatc

SEQ ID NO: 659203 - DNA, 538 bp, Homo sapiens
gtaggcagtctcgaaggaagtcgatgtcctgtctttgcttttcaaagttctgacacagaaagtgatgagctatcagaagtacttcaagacagctgctttttacaaataaaatgtgatacaaaagatgacagtatcctgtgctttctggaagtaaaagaagaggatgaaatagtgtgcayacaacactggcaggatgctgtgccttggacagaactcctcagtctacagacagaggtatgtgtcttatttctccttaaatctgtggttggctggcttcatagtttagaacggggctcctcaaagcagctggtcaaggaaccgtctatcatcagtctgtagtgaaggaaggggttgtacactgggtataaatcatactgcttccttcattgaggaactcttgctacaaaacaaaacagacagctgaacaaaacagtgtgcttgatgctggctggtgtttctctacaaacattagaccagaacctcatgctggtgaatgttactattcctcacatgaaaatgaacatctctgaacagatga

SEQ ID NO: 659204 - DNA, 547 bp, Homo sapiens
tggtagaaatttaaggaccatccgcatataaattagggatcaacaaactatagccctcaggtcaaatccagccaactgcccattttctcaataaagttttattggaacacagcttctctaatttgcttgtatattatctatagctgttttctagtataaaatgaagagctgagtaaatgcaacaggctgttaggcacacgaagctgaaattacttactatctagtatagaacatatttgctgcctctgatatacacagtagaaatcaccagaacacatgagatcctaataattttaatataagaaattctagtattcactggagtttaatagaatactctgtttactcttatcattacattggcacatctataacatactaatattcggaataaaaatacagagttcctctatgatcctaaaatatctcttggatcaccaagaaaaaattattctccatataaaaatactcctaaatatcatgtgtttttgtctagatatttggaaagcsgttctccttttatgatttatatttgattttctattaa

SEQ ID NO: 659205 - DNA, 605 bp, Homo sapiens
tttctttagagatacttctatttgttatttatgttgtaggtactgtgatttctcattcacaaataatagctcatatctgggattggcaattatggccagtggattaaattcagctagccatctatgtttataagttttattggagcatgggtacattcatttagatattgacagttcatatgctacattggcagaattgagtacaggcatacctcagatatattctgagtttggttccagaccaccaaaataaagtgagttacacaaatttcttacaattttacggtgcacatatgtattgactacgctgcagattattaagtgtgtaatagcattatgtctaaaaagatattaattttaatttaaaaatgctgtactttgttgctaaaaatacaaaagatcatctgaaccttcagcagtcataatgtttgcaggtggaagttcttgtctcagtaatgatggctgctgattgattagagtggtggttgctgaaggttggggtggctgtggaaatttcttgaattagacaataatgaaatktactgtattgattgactcttcctttcatgaaagatttctctgtaccatgtgatgctgtttgacag

SEQ ID NO: 659206 - DNA, 540 bp, Homo sapiens
caggctggagtgcaatggcacgacctcagttcactgaaacctccgcctccctggttgaagcgattctcctgcctcagcctcccgagtagctgggattagaggcatgcaccaccacacccagctaatttttgtatttttagtagtgatgggatttctccattttggtcagtctggtctcgaactcttgtccttgggtgatccacccaccttggcctcccaaagtgctgggattacaggtgtagccaccgcgcccggccacttgatacctttttatgttgcacgtgtttcatttcattcaatattatttaagactgtaggaaattacacatataggttcgccaaatggcttgtgcttgtaccccaattaaatcaaagacaaaattatacttttgatgcaatgctcatttaatgaatgtttactgagcacctatgttaggaatgttataggyattatgtgtataggaaaatgaataaaacagacagaaatctctgcccatataaggcttattttctaggtgggagaatgagcccaacattcat

SEQ ID NO: 659207 - DNA, 595 bp, Homo sapiens
catgctccttgctgtggggaaaacttaggaatagcagtccaggtgatcagaactctttagatacatatcactgctctcactgctttctgcctcctcaaatccctaaactcagtaatgatcctaacttagaatcagaataaacattggtactatgagagctccttctcctgctcctagacctaattactactsctatcatttgcatttgtcctctgtgtgagtatcatacacacgatcatgcatcagcacacatatgcacacagattcccacttaaagtgtaagccccagggacttttgtcacgttggtcatagaaatatccctaatagatagaatggagtgcctcccacttagtgagagcccgataaatagcatgggtcatcatatagttctatatttttgtctcctatataaccactttgtagttaggaagtgattgcttctctctgtggagaagactggcttcccaacaaccacctgctgacccttccataagctttgcatatggatagaagtcaactgatttggtcctaaatagtaaaagaggatagaagtcaactgatttggtcctaaatagtaaaagaggatagaagtca

SEQ ID NO: 659208 - DNA, 470 bp, Homo sapiens
gcagatggtaggaggtggtcacagatgagcttctggagtgttggtgatttttaaatttcttgatctggawgctggtcaaatgcgtatgtttacttcatgacaacacattaagctgtatacctggaatttttgtacttactatatttatgttttattccaatattttaaaaatttacatacaatatgcgctattaaatttggagaccacagacaatattcatgaaaaatgagattaaaaagaaacacatctctatgtgggcagataatagtaaaacttctcaaacaaggtgaaaaaaatattctgccatcagccaagatgaggaaactgtgactggatttacccttctgcctaaaacagctaaaatcccagaaaaaatctctgaaacagaaattttttagacattggaccttaggccgcatgggacagttatacctgggagaggaaaagcaaataaagtgaacattatgat

SEQ ID NO: 659209 - DNA, 576 bp, Homo sapiens
cttgcagcatggacggttgcctaattaatattccaagattcaggttctctttaatgatgtttttaaaagctctccatcttaggaagccaaagataatcatagagtagagattgaattacatggaaagaatgaactttaagatgtggcatctcttccaagttgtattaggaaaatatatatgggaaaacattatcgtatactttgtaataggtactttcccgccctctgtgaagagtttaaaaatcagtacttacactggatagttttcaagcatcattttgtgagtgaataatctgagccaaagagatgtaacatagtccatgaacaccagacagttaaaagattcttctactttagaggttttttaaagactgatttaaaattaaaaaacagatatctatttattcatcacaattttgtgctacaaatttgaagaagtagaggataacattcttttgggtacttaatgaatatttttcaaataaatatctgaattactaatrcatctcttagattcatattgcagctagagaaataactgcatcatttgctgaagaacatttgaaaatgtagaat

SEQ ID NO: 659210 - DNA, 582 bp, Homo sapiens
aattcatgttctaagatgactgttgtggaagaaaaaatcatgaaaattgttttttaaggacatctataaaaagtgaactagaaatagaatttgagtttttattattagttttaaatatatatcatacctacctttcaaaaagtcatctattcatttctgactaacatagcctggtatctctrgtatttcaaattgatttggctttattaaactttcagttaaaaggtaggtaaatttatcagaagcaacagctgtggtatctatagatacataaaagttaaatcttctaaatagcacacacagttcaaactcttttggtcatcttgtgatgagatcccctacaatcttggataaaaactgtaaataaacttcatgcaatcatttacttattcaacaaacatttatggagtgcccactatgtgccagatcttaggccagtttcctttgcgtattctcagtgttttatcagttttcaaatgtaactcatgttctggaaccaagtctgatttatgaccaaatgatcacagcaggatactagcagaactcatttttcaaaacagaattttgtgccctcagaatgag

SEQ ID NO: 659211 - DNA, 574 bp, Homo sapiens
cttccagctattttaccctgtactaaagttgtggttttcataagccaaaggagataggaggtaagtacaatattgtggctgaggcgagaagatcacttgagcctgggtggttgagtctgcagtgagccgtgatcatgccactgcactccagcctgggcaacagagcaagaccctgtctcaaaaaataataataataataataattattattataacttattacatagaagtaaaatataaactagatgtcatcaaaaatttgagaattatctttttctaccttgaatttttttggctagaaagaagtatttggttctgcaaagccgtaagaatgatacartgggttttagggactcagcggaaagggtcagggagagtaggggggtggttagggataaaagactacacattggggtacagtgttcattattcatgtgatgggtgcagcacagtctcagaaatcaccactaaagaacttatccatgtaaccaaacaccacctgttccacataaaactattgaaataaaaaataaaataaaaagaaataaaaaataaaaataaacagaaaaaaaaa

SEQ ID NO: 659212 - DNA, 574 bp, Homo sapiens
cttccagctattttaccctgtactaaagttgtggttttcataagccaaaggagataggaggtaagtacaatattgtggctgaggcgagaagatcacttgagcctgggtggttgagtctgcagtgagccgtgatcatgccactgcactccagcctgggcaacagagcaagaccctgtctcaaaaaataataataataataataattattattataacttattacatagaagtaaaatataaactagatgtcatcaaaaatttgagaattatctttttctaccttgaatttttttggctagaaagaagtatttggttctgcaaagccgtaagaatgatacaatgggttttagggactcagcggaaagggtcagggagagtaggggggtggttagggataaaagactacacattggggtacagtgttcattattcatgtgatgggtgcagcacagtctcagaaatcaccactaaagaacttatccatgtaaccaaacaccacctgttccacataaaaytattgaaataaaaaataaaataaaaagaaataaaaaataaaaataaacagaaaaaaaaa

SEQ ID NO: 659213 - DNA, 567 bp, Homo sapiens
acatggatgaagctggaaaccatcattctcagcaaaataacacaagaacagaaaaccaaacactgaatgttctcactcataggtgggagttgaacaatgagaacacatggacacggggagggggtatcacacactggaggctgttgaggggtgggggtttaggggagggagagcattaggagaaattcctaatgtagattatgggttgatgggtgcagcaaaccaccatggcatgtgtataccgatgtaacaaacctgtatgttctgcacatgtayctcagaactggaagtataatcataataataaaaaagtccaaccacacacttgatcttgcaaggcactgcttggccctcttccaagtgtactttacttcctttcgttcctgccctaaaatttttaaataaactttcactcctgctttgaaacttacctccatctctcattctgccttatgctccttggtcaaattctttcttctgaggaggcaaaaattgaggttgctgtagactcatacagctttcccactgctaacatacttttgtgcactgctcacttccacaaagcaa

SEQ ID NO: 659214 - DNA, 567 bp, Homo sapiens
acatggatgaagctggaaaccatcattctcagcaaaataacacaagaacagaaaaccaaacactgaatgttctcactcataggtgggagttgaacaatgagaacacatggacacggggagggggtatcacacactggaggctgttgaggggtgggggtttaggggagggagagcattaggagaaattcctaatgtagattatgggttgatgggtgcagcaaaccaccatggcatgtgtataccgatgtaacaaacctgtatgttctgcacatgtatstcagaactggaagtataatcataataataaaaaagtccaaccacacacttgatcttgcaaggcactgcttggccctcttccaagtgtactttacttcctttcgttcctgccctaaaatttttaaataaactttcactcctgctttgaaacttacctccatctctcattctgccttatgctccttggtcaaattctttcttctgaggaggcaaaaattgaggttgctgtagactcatacagctttcccactgctaacatacttttgtgcactgctcacttccacaaagcaa

SEQ ID NO: 659215 - DNA, 567 bp, Homo sapiens
acatggatgaagctggaaaccatcattctcagcaaaataacacaagaacagaaaaccaaacactgaatgttctcactcataggtgggagttgaacaatgagaacacatggacacggggagggggtatcacacactggaggctgttgaggggtgggggtttaggggagggagagcattaggagaaattcctaatgtagattatgggttgatgggtgcagcaaaccaccatggcatgtgtataccgatgtaacaaacctgtatgttctgcacatgtatctcagaactggaagtataatcataataataaaaaagtccaaccacacacttgatcttgcaaggcactgcttggccctcttccaagtgtactttacttcctttcrttcctgccctaaaatttttaaataaactttcactcctgctttgaaacttacctccatctctcattctgccttatgctccttggtcaaattctttcttctgaggaggcaaaaattgaggttgctgtagactcatacagctttcccactgctaacatacttttgtgcactgctcacttccacaaagcaa

SEQ ID NO: 659216 - DNA, 626 bp, Homo sapiens
gagaaaatgttacacaagaaagcataattactagaagtagcataacagtaaactaacttcaattaactacctctaaaacatattaaaaatataatatgtgcatgtatacatacatatgtgtgcagtaatcatttagagatcrtagatactaaaaactagattgttgaagtcataaattcaatagatgcctacaaagcaaaatgcacctgggagaagaacgattaacaagctggaagtttaagtcaaggaatcttaccagaatgaagcagaaatgaataaatacatgagtatgacagctaaatgaagacacaaggccaaaagttttatcatctgattaaaaagagttcaagaaaagaaaataaagaaaatgtaagggagtaaattcatgaacacacagaaaaaatttccaaatattgagaaaaaaaatgaataagcccttttgattaaatgggcttagcaagtatcgagtagaataaagatccaacatgcacatacatgcacatacacacttatttacatcacagtgatatttcaggacaccaaagaaaaaagagaagattctaaaatcttttatgggaaataaaagagtatacacaaagggacaagaataaaagaggaagcagaac

SEQ ID NO: 659217 - DNA, 368 bp, Homo sapiens
agtgggacactaaagaaaaaagtgtgtgtccttcaccaataaaagtcgtatcttgtcctctacttcctccttctgtaggcaaataaagacaattctaaaggactagctttcctcatcatgccaaataattaaaattccaaacagattattaatcctattctaacaattaaaataaatgatraatctgctttgtaactactgacaactgtattttaaataacttacggcctcttgaatttaaatataaccgattaaaaatggcagcaacatcagggttaagaaacaaaatgaaacactattagtctccagaatattgaacaaaacaatatctaaaataaatatgacttctcagaaggaaaaaagttatc

SEQ ID NO: 659218 - DNA, 368 bp, Homo sapiens
agtgggacactaaagaaaaaagtgtgtgtccttcaccaataaaagtcgtatcttgtcctctacttcctccttctgtaggcaaataaagacaattctaaaggactagctttcctcatcatgccaaataattaaaattccaaacagattattaatcctattctaacaattaaaataaatgataaatctgctttgkaactactgacaactgtattttaaataacttacggcctcttgaatttaaatataaccgattaaaaatggcagcaacatcagggttaagaaacaaaatgaaacactattagtctccagaatattgaacaaaacaatatctaaaataaatatgacttctcagaaggaaaaaagttatc

SEQ ID NO: 659219 - DNA, 368 bp, Homo sapiens
agtgggacactaaagaaaaaagtgtgtgtccttcaccaataaaagtcgtatcttgtcctctacttcctccttctgtaggcaaataaagacaattctaaaggactagctttcctcatcatgccaaataattaaaattccaaacagattattaatcctattctaacaattaaaataaatgataaatctgctttgtaactactgacaactgtattttaaataacttacggcctcttgaatttaaatataaccgattaaaaatggcagcaacatcagggttaagaaacaaaaygaaacactattagtctccagaatattgaacaaaacaatatctaaaataaatatgacttctcagaaggaaaaaagttatc

SEQ ID NO: 659220 - DNA, 538 bp, Homo sapiens
tagtgaaacccatctctactaaaaatagaaaaactagccaggcatggtggagtgtgcctgtaatcccagctacttgggagactgaggcaggagagtggcttgaacccaggaggcagaggatgcagtgagttgagatcgtgccactgcactccagcctgggtgacagagtgagacttggtctaaaaaaaaaaaaaaaaaaatctgctggggaagagagtgggggtggagaaaggatgttgagcagcatggttcccaagtagacctggggcatagatctgatttgctttatctcctggagccccgtctccctcctggccaccagcccttggttcataagccctgtagttggccctagtctggtccaacttgtcmgagccaagccatgactcagtttcagccatggctttgactgcagacgtctgaactgagtgaaccccatgtgaaatctgatggcctaaggaatagacagacagacaggctgagccacaatccccagatcaaaggacaggagaaaaattgaaatttggaattcagaagc

SEQ ID NO: 659221 - DNA, 630 bp, Homo sapiens
gtaatgtgatttgccccagaaaggcaatagcaggaaagagagtataatctccattttaaaactcaatctggtggtctttcatcaaatctgtggtaagtaatgaaaaaatactctttgtgaaatgagtgagcctaaagtctctagcactccaagataaattttcaaattttatggttattttgtaaatcacataacaagccatctcaagagcaaaagtagcatgttagrcagaataatgcccctcaccctaaagatgccaatattcaaatcccagaacctgtaaatatattaggctacatagcacaagggagttaatggttgcagatggaattaaggttgctaatcagattaccttgaaataggacctggattgtatgggtaagcccagtgtaattccaagagtccttaaaagtggaagagggaagcagaagaggaggccagaggaaaatgtagctacagaaaaaaaggcatagatgaatgcaacgttgctggctttgaagatggagagaggaagctctgattgaagaagagtaggacctctaggagctggaaaaggcaaggaaatcattcatccctagagctacccgaaagaaacaaccctgcaaaacaccttgattttgagccagtgag

SEQ ID NO: 659222 - DNA, 602 bp, Homo sapiens
caatattgcacctaaaaagtaataccatatttcacaagataattcttctaaggtgttgttctaaagtataaagctcatgtacagatttccttttctttgatattgaagctctttaaaaactgttctagcatcatgtttttatgtaaagaccaaaacttttctaaattgaggtttgactacaccccttaaaaatgatatcaaaacatcccagatatgtctttctcaatatctaacctgttgtatgcaattttacatttctctggccagactaataaggcagctttcaatgaattttttaaccatggtcactaatgttagacatcaaagctcaaattttagagttcaaaagctattaaagtaagaatattcaaacctagagagagtgaaaaaatgcatgatttacttcctctctgttgtggtgtgttttttcttgaaagcaaggcaagttaagtcctttgccatgcctcatgatcttatagatttagctttctagattgctcagtctgttttttccacacatattcactgtggacccyatgacataataatcaacacgaccctttagaaatcatttaagagtttaagacctaaaattcttgtca

SEQ ID NO: 659223 - DNA, 523 bp, Homo sapiens
ttgtgacaaatagaatgattgctacttgttattgatcccaaacatctttgtccaatcatagatttwaaaaaaaaaacaccaacttattcataagaggactagaacaatgttttttaaaacatttttgcatacttccccatatgccgactgctgatacattaacaatagattcacatcagaacattccttactacttcagcaaaatattgaccacaagcacaggtaattgttcttccataatgtacacttttaatacttacctgattttagctccttccactgtcttctacacaagatgttccagtcggatcttctttctcttgcccagaaaggcctagcttttgctttccaaagagacctttcatgaacttgtcccactatcttcacatgaatagaggcagctgtcctgtttccctcagtcacttccttcttgttagccagatgtcaattaaaagtctctcctcagtgagatctgtcttctcaatcgatatgaccacacccctggtcactcactgtcacatgc

SEQ ID NO: 659224 - DNA, 512 bp, Homo sapiens
gtgaaaaaacaaagaaatccctaaaatagaagaatgtatttggagactcataaaagtaaaaccctaaagtctcagtgaaactcaaaatcttatctggatgtctagtcatattcaacgtttcttcctgtattatttctgcagttgctaaaaaaaggtttattgctatggatgtacttaacatattttagaaatttgtatccctaaaggttatactagccatacamaccacaatttctagaacttaaataatatagtccacagataaaagtaaaccactgtctcctagttaattatgttttggtgtgagacatcctaatgccagatcagtttaaattatctttttaaatgagggagagagagattacttcagggagagatgacaagtaattgtttatctgaagcacatatggccagacaccaaagagactaagtcaactagcatagttaattaatcactataagacaagatgtgggtggtttaatgcagagttcttgggccaaagatataggag

SEQ ID NO: 659225 - DNA, 591 bp, Homo sapiens
aggatccaatactggttctagtggtaaattcaataaagttggaataattgccttatcatagtaattctagtgtttgtttacatcactcttgaaaagctgattgtctttgaatatcactatgggctccatatcaacttgagaagacaaaagaataatcagggagcatcaacctcaattgtcacattgaaccttcagaatgtgttcagcatcagaggtgacggtgaagcagttctctccttctcaagttctgtcagcctgtaagcaccacatcagataccaaagtgttttctgtcaaattgaggtgatcgtccagcaagatttcagtgaacataaataaagaacactgttggagaacaatggttttttgactattttttcttgtccctcttaatraaaaaggtagctgaaagaatgtgtacttcagggagatttttataattctgctgaaaagacaagggaatcagattaaatatatgtctatataagacagatgttcaacaaaaattaggtgactgactaaaggctcttttcccttagtgtttattcagaggattgacatgtcagttctcaccaatcaaacagggtttaaag

SEQ ID NO: 659226 - DNA, 534 bp, Homo sapiens
agatctcaaattaacaatctaaaattaacctagaagaacttgaaaaacaaaaaacccaaagctagcagaagaaataacaaactcaaagcagaactgaacaaaatcgagacccaaaaatctatacaaaggatcaacaaaaccaaaagttgcttttctgaaagaataaacaaaatggatagaccactagctagattaacaaagaaaaaamaagagatgatccaaataagaataattagaaatgacaaagatggcattacaaccaatcccataaagatacaaagatcctagagactattatcagcacccctatgcacacaacctagaaaacctagacacacagaccaaaggaacagaatagagacccgaaaaataaagccatacatctagaaaatctgatctttcacaaagtcaacaaaaataagcaatgaggaaagaactccctattcagtaaacagtgctgggattgatggctattatatgcagaaaaatgaaactagacccctacctatcactgtatacaaaatttaactcaaa

SEQ ID NO: 659227 - DNA, 534 bp, Homo sapiens
agatctcaaattaacaatctaaaattaacctagaagaacttgaaaaacaaaaaacccaaagctagcagaagaaataacaaactcaaagcagaactgaacaaaatcgagacccaaaaatctatacaaaggatcaacaaaaccaaaagttgcttttctgaaagaataaacaaaatggatagaccactagctagattaacaaagaaaaaaaaagagatgatccaaataagmataattagaaatgacaaagatggcattacaaccaatcccataaagatacaaagatcctagagactattatcagcacccctatgcacacaacctagaaaacctagacacacagaccaaaggaacagaatagagacccgaaaaataaagccatacatctagaaaatctgatctttcacaaagtcaacaaaaataagcaatgaggaaagaactccctattcagtaaacagtgctgggattgatggctattatatgcagaaaaatgaaactagacccctacctatcactgtatacaaaatttaactcaaa

SEQ ID NO: 659228 - DNA, 549 bp, Homo sapiens
aaaaaaataccagttggagactaaaagctattgtagaaccaggggaaaagaacaacatcctataaacacagaataaaaatataccatcaaaataatctaatatccagaagaaaatatcagaaaagtatgaggaatcgtaaagaagaccgtctctatgaaatacaaggtaaaatcttaagaattagctaagacaaaaagagaacagaataatatttaaaaggggrtatgattaagatgaaaaatagaaaagaagcaaaaatgcagagcacaataaaaattcataatggaagtggcaaagagcaaaaatgcaaatcagtgatgttgtaaaccatcccatatactcagaggacaaaaacaacacatgaaaatatgagaaagaaactagaaatatgaaagaatgataaaagagctacaaaagtgaaaatggaaaataaatgctaaaaaaaggaaaacaatattagaaataaactaagcttaaactttttaagggaaaatttaaaatgttgatgtcttactgtatcctagcacaaacagaaaaaaagagaatta

SEQ ID NO: 659229 - DNA, 549 bp, Homo sapiens
aaaaaaataccagttggagactaaaagctattgtagaaccaggggaaaagaacaacatcctataaacacagaataaaaatataccatcaaaataatctaatatccagaagaaaatatcagaaaagtatgaggaatcgtaaagaagaccgtctctatgaaatacaaggtaaaatcttaagaattagctaagacaaaaagagaacagaataatatttaaaaggggatatgattaagatgaaaaatagaaaagaagcaaaaatgcagagcacaataaaaattcataatggaagtggcaaagagcaaaaatgcaaatcagtgatgttgtaaaccatcccatatactcagaggacaaaaacaacacatgaaaatatgagaaagaaactagaaatatgaaagaatgataaaagagctacamaagtgaaaatggaaaataaatgctaaaaaaaggaaaacaatattagaaataaactaagcttaaactttttaagggaaaatttaaaatgttgatgtcttactgtatcctagcacaaacagaaaaaaagagaatta

SEQ ID NO: 659230 - DNA, 653 bp, Homo sapiens
aggtgtgagctagtacactgggctgacagttccttctaaagcaaaacatgcaacgaccatacaattcattagttgcacacctgagwatttattccagagaaatgaagacttatgttcacactaaaacttgtacataaatgtttatagaagctttatttacatagtagcaacaaataatactgggaataaacagatgtccttcaacaggttaaatatggcacatcagtggttaaactgtggtacatccatatcatgaactactactcagcaattaaaaggaatgaattgttgatatatacaacacttatctgtaatcttcagggaattatgctgagtggaaaaagcctatttcaatatataacatttatatatcattggtgaaatgaaaaaattatagaaatggagaacaacttagtgattgcccagagttaaggagtgggtgtgggtgggagggaagtggctgtgaacataaaaaggcaatatgagtggcgctggacatgttccgatattgatctatgtaagtatatcctggttgtgatactatactattgttttacaagatgctacccttgggtgaaactaggtaaaggatacataggatctccatgtattatttcttacaatgcatgtgaatctctgagcataaaaaagaa

SEQ ID NO: 659231 - DNA, 653 bp, Homo sapiens
aggtgtgagctagtacactgggctgacagttccttctaaagcaaaacatgcaacgaccatacaattcattagttgcacacctgagaatttattccrgagaaatgaagacttatgttcacactaaaacttgtacataaatgtttatagaagctttatttacatagtagcaacaaataatactgggaataaacagatgtccttcaacaggttaaatatggcacatcagtggttaaactgtggtacatccatatcatgaactactactcagcaattaaaaggaatgaattgttgatatatacaacacttatctgtaatcttcagggaattatgctgagtggaaaaagcctatttcaatatataacatttatatatcattggtgaaatgaaaaaattatagaaatggagaacaacttagtgattgcccagagttaaggagtgggtgtgggtgggagggaagtggctgtgaacataaaaaggcaatatgagtggcgctggacatgttccgatattgatctatgtaagtatatcctggttgtgatactatactattgttttacaagatgctacccttgggtgaaactaggtaaaggatacataggatctccatgtattatttcttacaatgcatgtgaatctctgagcataaaaaagaa

SEQ ID NO: 659232 - DNA, 653 bp, Homo sapiens
aggtgtgagctagtacactgggctgacagttccttctaaagcaaaacatgcaacgaccatacaattcattagttgcacacctgagaatttattccagagaaatgaagacttatgttcacactaaaacttgtacataaatgtttatagaagctttatttacatagtagcaacaaataatactgggaataaacagatgtccttcaacaggttaaatatggcacatcagtggttaaactgtggtacatccatatcatgaamtactactcagcaattaaaaggaatgaattgttgatatatacaacacttatctgtaatcttcagggaattatgctgagtggaaaaagcctatttcaatatataacatttatatatcattggtgaaatgaaaaaattatagaaatggagaacaacttagtgattgcccagagttaaggagtgggtgtgggtgggagggaagtggctgtgaacataaaaaggcaatatgagtggcgctggacatgttccgatattgatctatgtaagtatatcctggttgtgatactatactattgttttacaagatgctacccttgggtgaaactaggtaaaggatacataggatctccatgtattatttcttacaatgcatgtgaatctctgagcataaaaaagaa

SEQ ID NO: 659233 - DNA, 614 bp, Homo sapiens
cactaattatcagagaaacacaaatcagaaccacactgagatactgtctacaccaatcataatggctattattaaaaatcatacaacaacagatgctggcaaggatgtaaagaaaggagactacttacattgctgggagygtaaattagttcagcccctgtggaaagcagtttggagatttctcaaagaacttaaaacagaattaccattctacctagtaatcccgttactgggtgtatatccaaaggaaaataaatcattctgccaaaaaggcactcattatgttcatcgcagcactattcacaatagcaaagacatggaatcaagctacctgctcatcagtggcaaattggaaaaagaaaatgtggaacatatacaccatcgaatattatgcagccattaaaaaaccaaatcatgtcctttgcagcaacatggatgaagctagaagacattatcctaattgaattaatgtagggacggaaaaaaaatcaaaggccacatgctctcacttataagtaggagctaaactttgggtacacatagacataaatatggcaacaatagtggggaccactaagggggtgggaggactgaaaggaatgtttgttggaaaa

SEQ ID NO: 659234 - DNA, 478 bp, Homo sapiens
aagcacttttctaagatgtggagtgacacttgggtcttctgtagggcactttagatttctcagctgaagctaaacattgtcaggttaagtgctgactacaccaggtgtaattgcctagttcactttccctggaccaaaagtagtggtgaagaccctgaaatccggcagtttgaggtcaagtttggcattggtctgaaaaaacatacttgcctygggagacctgtgcgtagagacagtactggcttcccaatcaaggaaggccgtggagggtgtgtgtgggtgggagctggggattttgttgattctagccccatttgagagagaaatcctgatttatatttgaaagctgtggttttagaatcaccatcagaggcaacctgaaactaataaaactgggacagagaagatgtgtaataaagaaatgaataaataagggaataaaagagtaaagaaatgaaaaatccaaaagtcttccaac

SEQ ID NO: 659235 - DNA, 433 bp, Homo sapiens
agatgggcctaacctaccagcccacatctttctcccgtgctggatgcctcttgccctagaacatccgactgcaggttcttcagttttgggtcttctctccttgctcgtcagcatgcagacagcctatgtgggaccttgtgatcatgtaagttaatacttaataaactatatatatatagagagacagagagagagagaaagagagagtgtgtttattagagtttatatatatgcttattataagtrtatatatatatatatatatatatatagagagagagagagagagagagagagagagagagagagagagagagagagagagagagatctcctattagttctgttcctctaacagaactctaatacagaaattggtaacagtagagtggggcattgctgaaaagatacctgaaaatgtgaatgtgacttt

SEQ ID NO: 659236 - DNA, 597 bp, Homo sapiens
gcagcactgtgagtcagagcatgcacgtaagaggcaaatttgatgaagcgggagtgaaacagtgatcagaatcaggagcatcagacttcacaacatcagagtcatggcctgggctgcagctctcttgggagggatttcagtcaacctgggaatgtggtcttgcacttcatgcaagcagccacactaggaaaggactgaggtaaaaaactcataggttcttgtttgatgtgattactcttccagggctgatgaataagggttgaaagcctaatagagaacagaacagtgaacttttgtttcttgcctattatatataggctgatgcaaattggtcttctttgygtttaattaaactatttgatctatagcaaccagtgtcgttatgaggaagtgtgttcacctgcttgattcattcaattactcagcaaatatttactgattatatgtgcaagaaattttgctgctgattctaagggatacgtaaataaagcagatatataaattgttttgtattcaaactctcagaaggtaatatataaacataaaaattatactgtattttttaataatacatgcaggaatatatactaattataa

SEQ ID NO: 659237 - DNA, 490 bp, Homo sapiens
tcccagctactcaggaggctgagggttgcagtgagctaagatcatgccactgcactccagcctaggcagcagagtgagactccttctaaaaaaaaaaaaaaaaaaaaawgacataaacctatagtgtcaagaagcttactgagccccaaaatagtataaatctaaagaaatccatgccaagacatcttgtagtcaaacttcagaaaattaagaccaaattttttttttctaaatcaattcagagagaaacaacacattacctaagaagaaaatcaattctagggacagtgaatttctcatcagaaatcatggaggtcagaggaagtagcagaacagttttcaagtgcttaagaaaaataatttccaaaatatatccttcaggattgtagggctctcaagacaatctgaaatgaaagaaagctaagaaaattcgttgccagctgacctaccttaagtgaatgattcatggaaactctaaacagaaaaaaag

SEQ ID NO: 659238 - DNA, 490 bp, Homo sapiens
tcccagctactcaggaggctgagggttgcagtgagctaagatcatgccactgcactccagcctaggcagcagagtgagactccttctaaaaaaaaaaaaaaaaaaaaaagacataaacctatagtgtcaagaagcttactgagccccaaaatagtataaatctaaagaaatccatgccaagacatcttgtagtcaaacttcagaaaattaaraccaaattttttttttctaaatcaattcagagagaaacaacacattacctaagaagaaaatcaattctagggacagtgaatttctcatcagaaatcatggaggtcagaggaagtagcagaacagttttcaagtgcttaagaaaaataatttccaaaatatatccttcaggattgtagggctctcaagacaatctgaaatgaaagaaagctaagaaaattcgttgccagctgacctaccttaagtgaatgattcatggaaactctaaacagaaaaaaag

SEQ ID NO: 659239 - DNA, 490 bp, Homo sapiens
tcccagctactcaggaggctgagggttgcagtgagctaagatcatgccactgcactccagcctaggcagcagagtgagactccttctaaaaaaaaaaaaaaaaaaaaaagacataaacctatagtgtcaagaagcttactgagccccaaaatagtataaatctaaagaaatccatgccaagacatcttgtagtcaaacttcagaaaattaagaccaaattttttttttctaaatcaattcagagagaaacaacacattacctaagaagaaaatcaattctagggacagtgaatttctcatcagaaatcatggaggtcagaggaagtagcagaacagttttcaagtgcttaagaaaaataatttccaaaatatatccttcaggattgtagggctytcaagacaatctgaaatgaaagaaagctaagaaaattcgttgccagctgacctaccttaagtgaatgattcatggaaactctaaacagaaaaaaag

SEQ ID NO: 659240 - DNA, 490 bp, Homo sapiens
tcccagctactcaggaggctgagggttgcagtgagctaagatcatgccactgcactccagcctaggcagcagagtgagactccttctaaaaaaaaaaaaaaaaaaaaaagacataaacctatagtgtcaagaagcttactgagccccaaaatagtataaatctaaagaaatccatgccaagacatcttgtagtcaaacttcagaaaattaagaccaaattttttttttctaaatcaattcagagagaaacaacacattacctaagaagaaaatcaattctagggacagtgaatttctcatcagaaatcatggaggtcagaggaagtagcagaacagttttcaagtgcttaagaaaaataatttccaaaatatatccttcaggattgtagggctctcaagacaatctgaaatgaaagaaagctaaraaaattcgttgccagctgacctaccttaagtgaatgattcatggaaactctaaacagaaaaaaag

SEQ ID NO: 659241 - DNA, 642 bp, Homo sapiens
gttgttatttgtaaatatccatcacaaaagataagtaaaaataggataaatacttgtatcaaggaaaataagtctgaagtgaaatgatataatgtctacttctctgagatttggcatttactagtggtaactcaatgtcacatttcatcatctgtaaaatagaattaatgcctaatgcacatactatttcaagtattaagttgatatttataatatccrgtgcaaatagttgctcaatagatgtcatttaaaatgaaatttaaatacaccaatagccttgtaattaaagttaaatgatcagattatttctaattaaacccattgttttagtttatcacttttatttctttttgtggtgtatgataatttatagagcatatataggaagaaaaagggatggatcaaaaagatgagggaagcttcctcattagagtttttcttggaaccaccattgtaaaatgaagaaatacggattatggtttgattcttctacatttaactgatatcaaaaaacagatttattaaagctgatttaaagtgaagtaaataaaccagtgtaaggacatagtcaataaaactagaaatatctgtccagcttgctatcccaggaagtttattgttttttgtctattttaaatatca

SEQ ID NO: 659242 - DNA, 538 bp, Homo sapiens
tagcctattccttcccccgcctccccaaccctccctggcccccacccacggctatctacagcacattctagatcatgctattatgaaaagattcagtcccctggtgctggctttgtagcaatagctgactgtactctgatgaggatgctttgytacttaaatatcttcctagcagaggactcacagcagttttcaaatggcatttccattcatcactgcagcactcctgagaggcaacagaggttcaagcctcattacttctatttaagaaagaggaagggcaatgactggagaactaccctctgccaaatattaaggagcaaagcagctgtggggttgatgttgtggctcagctcagatccccctgttgctagctttttacattagaccatttaattctatccttcagtgtaagttgggaactaacatatgcccgaaggttttagaaataaaccaactcaatcccaactcaacaaacagggcatatttgttacgctaagtaaattgttttcaataattattaatatgaagtttattt

SEQ ID NO: 659243 - DNA, 558 bp, Homo sapiens
acatgtgtgagacgtgcaggtttgttatataggtaaacgtgtgccatgatggtttgctgcaccctattaatccatcatctagattttaagcccttcaggcattagttacttatcttgatgctctccctcctgaccccaacaggctccagtgtttgttgttcccctccccgagtccacatgttctcatcattcagctcccacttataagtgagaagatgcagtgtttggttttttcttcctgcattagtttgctgaagatatcagctttgggttcatccatatccctgcaaagagcatgatctcattcatttttatggctccatagtattccatgtgtgtatatataccacattttctttatcccatctatcactgatggacatctgggttgattccacgtctgtactattgtgaatagtgctgcaatgaacatacaaatgcatgtatctttatagtagaataatttatwttccaacgtatggtaattttaaatcagttttggtattaaaaatcacgtaattttggaaaatattgataatggaaaaacccaaattctgc

SEQ ID NO: 659244 - DNA, 643 bp, Homo sapiens
atgtgtcaccatgcccggcttattttgtaattttagtagagacggggtttctccacattggtcaggctggtctcaaactcccracctcaggtgatccgcccgcctcagcctcccaaagtgctgggattacaggcgtgagccaccgcacccggccacgatagtaacttcttagattaataaagagatttgaattgtctttagaaaaacaatagagttttgtcttacaaattgtttttagaaaatctatagagttttgttttataaatctcttggattctcctctcctacctcctacccttcaataccaggaccaaagagaagcagcagatcccaagcaccatgcactggcctattagcagggactggcagttggccatgtgtcaagtccaatcagccaccagattcttgtgaggtctgccaactaaggacgaatttcacatcttaaatgattaaaaaaaaatcaaaagaaaaatgacatgtgaaaattatataacattaaaatttttagcgtccacaaataaagttttattgaaacacagctatgtccctttgtttatgtgtagtttatggctgttttgccgtaaaacaacagagttgagccattttggcagagacagcatggtccatggtccacaaatcctaa

SEQ ID NO: 659245 - DNA, 647 bp, Homo sapiens
tgttaggtccatttggtgtagagtttagtttaaatctgatgtttctttcacaatttgctgtctgaataatctgttccttactgtaaagtggaatgtggaagtcctctactattattgtattgcagtcaacttatttctttagatctattaatatttgctgtatatatgtaggtgcctcaatattgggtgcatttatatttatgattgtcacatcctcttgctaaatgatcccttttatcattatataatgacctttttmtcttttctatggtttttaatttaaagtttattttacataatacaagtatagctactcctgctctcttttggtttccatttgcatggaatatcttttcccatctcctcaccttctatctacatatgtcattactagtgaaatgtacttgtaggcagcacatcattgaccctggtttttaattcattaagccaccctttgtcttttaattagagtctttaatccacttatatttaaggtgattattgataagtaaaaactttttactgccattttgttaattgttttttagttgttttataaatcctctattcttttctgtcttcctttgtgactaagttattttctctagtagtattttttatttctaacttttaaattttgattgtat

SEQ ID NO: 659246 - DNA, 592 bp, Homo sapiens
gtctgtgatccttgattgctgttttatgtakttaagaatgaaggaataccagcctgggtagcatagcaagatcccccatttctacaaaattataaaagttagctgggtgtggtgagacatttctgtagccctgcttccttgggaggctaaggcaggaggattgctttagcccaggagtttgaggttacatgtagtgagctatgatcatgccactgtattccagcctgggcaagagaccctggctcaagaaaaaaaaaaaaaagtaaagaatataaaggaataaaaagtgcaaatctctgtgaacttgagtgggtcttgttgactaaaagactttgctttagggcaagcaaaaagctgatcattaggcttaaagactgtaagtgccaaaataaaagaggcattgtttttctaagacccatccttagttgcccttgctgtcccttgctagttagtacatgttaagagtggatagttaggtgagtgagtgagaaaaacttactatagagatgtttacatagaaaatagagttgtgaatacaaggctatttcatctatacatgtttgataaattattttgttttagccccagactc

SEQ ID NO: 659247 - DNA, 613 bp, Homo sapiens
gtctgctattgttggatggagtgttctatagatgtctgttggttcaatttggcttatagtcttctatttctttgtttaggtattctatttccttctgctaatttgttccatccattattaaaagggggtattgaagtctccaattaatacacttgaattgtatatttcttgcttcatttctgtcagtttttgctttgtgtattttggtacttttttgttaggtgtatatgtgcttatagttgttacatcttcctgatagagtgacattcttcttctttaaaaagttgctttttatctttagtaactttttgctgttcttttaaaatgcacttaagaatctgttattaatatartcacttggctattcttctgattgctgtttgcataatacatgtttttctatccttttactttccatctatttatatctttgaatccaaaatgtgcctcctgtatacagcaattagattgggtcttatattttttaaaaatgttttttgacagtgttactaactggatcttggtttttaaatccagtctgacaatttctacctttgattggattattgaatcctttcacatttaatgtcattattaatagagtttatgtctg

SEQ ID NO: 659248 - DNA, 533 bp, Homo sapiens
ttggcatgtccttgcatattcacagtttctgggaattatggcatggacatcttttggggagtcattactctacctaatacagtctcccttgcttgcaaataaaggagcagaggtaggttgaagaggtaagttgcatcagggaacagagtggggggcaagaaagggcagcagccagaggcctgcgattaggtttgraaagggaaggggatgcacacagatgtggaggtttgtggcagcatcacatcagtgactcgaacgtaagcaacagctgatctcacaaggcttcccagtccaggcctccccatggtgctgctcccttctgcctgggaacttctctccatctcatccgcatttacctacctaactcctcctcatcctttattgattagcctagtggtttttttttttttttttttttgagatggagtcttgctctgtcaccagcctggagtgcaatggaatgatctcagctcaccgcaacctctgcctcccaggttcaagtgattttcctgcctcagcctcctgagtagctg

SEQ ID NO: 659249 - DNA, 523 bp, Homo sapiens
aattggccagtgagtgaaatagtgagaagtggtggttgcctgtttggtctcatgcactgaaatttttaagaactacactgggtcctctctcatctgcatggtatgtatctgtcctggacagagtctacagcattagaaagctggcttctgaattttgagaactctgacacaactgtgactcaataacatttttctttgaggtacgtatctgttctggacagagtctacagcattggaaagctggcttctgaattttgagaactctgacacaactgtgactcaataacatttttctttgagacgaagtttcactcttgttgcacaggctggtgtgcaatggtgcgatctcggctcactgcaacctctgcctcctgggttcaagtgattctcctgcctcagcctccgaagtagctgggattataggygcccaccaccatgctgagctaattttttatattttaagtagagacagggtttcaccatgttggccaggctggtctcgaactcctgactttcaggtgac

SEQ ID NO: 659250 - DNA, 603 bp, Homo sapiens
aatttcactcctgtttgaatacatagtatcaaatatttgcctttttgaaatttattaagactttctttacaacttcacatatgtctattttggcaaatatctcatgtgtgcttgaaaaataatttttttctttttttctagttttgtggtggactattgtatataggccaattagttcatatttgttaacatgttgttcatattgtctatatccttatttatttttgttttgtgttttgctgtatgtttattttttatctgcttatcctatttattactgagactattgagttaaaatctccagctgcgtgacttttttgttttctgttttttgtttttgtttttgtttttgttttttgagacagaatcttgctctgtcacccagggtggagtgcagtggtgtaatctcgggtcactgcaacctctgcttcccaggtacaagcaattcttatgcctcagcccccaggtagagtagytggaactacaggcacgtgccaccatgcccagctaatttttttgtatttttagtggagatcgccatgttgtccaggctggtctcaaactcctggcctcaagtgatctgcccacttcagcctcccaaag

SEQ ID NO: 659251 - DNA, 567 bp, Homo sapiens
ggctctcgcctgtaatcccagcactttgggaggccaaggcaggaggatcacttgaggtcaggagttcgagaccagcctggccaacatgttgaaaccccatctctactaaagatacaaaaattagtgggcatggtggggggtgcctgtaatcccagctaatcgggagrccgaggaatgagaattgcttgaacccaggaagtggaggttgcagtgagccgagatcacaccactgcactccagcctgggtgacagagcaagaatatgtcggaaaaaaaaaaaaaaaaaaaaaaaaaaaaaacctggtaaggctttgccttcacaaagaaaaattgaataatttctagcatttcacacaatttaagaatgaatttattttccacttcataatgtggtatattatcattcataatgtagaataacatgctgtggatttacagtgtcttttaaatcattacgcctaacccaaaggatgtagacttccaatttttaactattataaataatacttgataaatgtctaggtgcataaagcatcttcttccacagcattattttttgaatgagaga

SEQ ID NO: 659252 - DNA, 429 bp, Homo sapiens
cactaggcatggacatacatcactgttataccttgacctgacatagccttaactcgaattcacttcagtatgctatcagcacagccatcttttgtagctcatctttcttccagattttccacccttaggatccttaatgctgaaattatacttcttgaccacaggtcaagtcccccacttcctcattctttctgaatgttgtttactgcgtcatgtattccagttcctcaactctctgtatcttccaggccatctgctgtttattcacctccatactgaacctagacgtcagagtcagctctttgaatcgtgttctcaacgctgctttagaatctctaactgccttaaccatctcccggcttggtaacccttagtcaattttaytttaaaatcctagaggattctatgagtgttgttttagtatgttat

SEQ ID NO: 659253 - DNA, 550 bp, Homo sapiens
ttagtgctggaccaaaaacaaaacaaaacaaagatcccgaaacttaaagaaattgttgtggatgcacgatgattttgtagctcactgtagctattggggacttagcactccagaaaacagcctctcagagtgatggtcactgtcagtgaatagactttgagtgaagggtgtaattgcagcctatactggaataaagtggatgtttctgtatcggtgccaagtcagcccacacttagtcagcatgcagaaggaggctcaccgtgatgctctctctcctctgggagctttgccaattaagcatcctcacttgcagaggttataatgatagatcttgagatgagaaaaaatgataatttcactgtattatataatagtcttaacgttctgcatctggggcttttaccctatttgcatttgaatatgtgyttttacaattcgggtgccacattgtgggagggtatttggcaacatttggaacatagaaaatatatccagtgtctctccttggcaagaggaaaaaaacacatctgagaagtctcagagcttgttc

SEQ ID NO: 659254 - DNA, 456 bp, Homo sapiens
caagccaggcacagaaggaaaactattrcatgattttacttatatataaaatctaaaacaacaaaaagaaattcaaatgtacaaagaaaaagaccaaaccagtgattaccaggcgtggggcagtggggaaaagacatggggaagtataggtctgaggatacaaagtagcagatatgaaggaccaataagtctagaggtataatgtacattatgattatgtgtaataagttgtacttcatatgagattccggctaaattagtagattttagctactcttgccacacaaattttaaacgtgagtaattggccgggcacagtggctcatacctgtaatcccagcactgtgggaggccaaggcgagtggatcacttgaggttaagagttggagaccagcctggctaagaccagaaatcccatctctacaaaaatacaaaaattagccagatgtgatggcg

SEQ ID NO: 659255 - DNA, 213 bp, Homo sapiens
tagctagacacaaagattctccaagtccccaccagattagctagayacagagtgccgattggtgcatccacacacccttagctagacacacagggtgctgattggtgtgtttacaaaccttgagctagatacagagtgctgattggtgtatttacaatcccttagctagacataaagtttctccaagttcacactagactcaggagcccagct

SEQ ID NO: 659256 - DNA, 213 bp, Homo sapiens
tagctagacacaaagattctccaagtccccaccagattagctagacacagagtgccgattggtgcatycacacacccttagctagacacacagggtgctgattggtgtgtttacaaaccttgagctagatacagagtgctgattggtgtatttacaatcccttagctagacataaagtttctccaagttcacactagactcaggagcccagct

SEQ ID NO: 659257 - DNA, 213 bp, Homo sapiens
tagctagacacaaagattctccaagtccccaccagattagctagacacagagtgccgattggtgcatccacacacccttagctagacacacagggtgctgattggtgtgtttacaaaccttgagctagatacagagtgctgattggtgtatttacaatcccttagctagacataaagwttctccaagttcacactagactcaggagcccagct

SEQ ID NO: 659258 - DNA, 660 bp, Homo sapiens
gggaaaagctgaaaatgtttcctctaaaaactggaataaggcaaagatgcccacttgtaccattcttatttaagataatactgtaagttctgccagtagaatcggtcaagagaaaaaaaaaagacatccaaattggaaaagaggaagtcaaattgttcctctttgtggcgacatgatcttatatatagaaaaacctaaagactccggcaaaaawctcttagaactgataaataaattcagtaaggttgcattatacaaaatcaacatatacaaattggtagtatttctatacaatagcaaactagctaaaaatgaaatcaagaaggcaatcttatttacaatagccaatagctacaacaaattcttagaaataagattatcaagaaggtgaaagacttttacaatgaaaactataagatgccgattaaagaaattgaagagaacacaaataaatgtaaatatattacaggctaatagatctgaataattaatattgttaaaatgatgatactgtccaaagcaatctacagactcagtgcaaccactgatcaaaatatcaatggcatttttcaaagaaatagaacattctaaaatgcacatggaactacaaaagaccctgaataatcaaagtaatatgagtagtaatcaaaacagcacggt

SEQ ID NO: 659259 - DNA, 544 bp, Homo sapiens
agctgtttaaggctgggtgcggtggggcactcctgtaatcccacctactccagaggtaggagaatcacatgaacctgggaagcggaggttgcagtgagccaagattgcaccactgcactccagcctgggtgacagagtgagactccgtctcaaaaaaaaaaaaaaaaaaaaagttgtttaacagcccagtaattttgggcagatgattcatgtgatcttaaataaaagtacttgtaktacttttacagtttcagatcatatctgtgaactgtgttccaaaatactagattattaaaaaatttacttatgtcatattttaaattacttttgttttaaccacttctaggtaatctgtgattttctgtttatctattcctcacctcaccctaattaggccagttaattaagagttgactgtagttgagtgcaaagtcattagttttaccatattttcaaaaactgttcccttatttgccatgcatctacaaatattgtcaatgttttctataataatatttgtaaccattttttgagctagaaatta

SEQ ID NO: 659260 - DNA, 512 bp, Homo sapiens
gaaagctgagctgctgaaatccagacagtttaagagcttatctgctctgctctgctcccacctaggaggactcctactacaatgcaaagactcaagtttcaccttaattaggtctttcccaggccaagtattagtgaccttgggaaaaaagtttacgcttctcagcttcagatcttcctctgaatattagcactgtggtaattggcacagtggtacctaaccctttgagggtccaggattgttttaatggtgagtgatttamaaactgagtttaaaagagcaaggaggatccaattttgcaaaatttcattaactctgcttaagaaaacagtatattatattagcttagatcaggagttgggaatccatagcctgctaccatttattgtgtagcctgcaaatggtttttacatttttaatacattggaaaaaaaattaaagaagattattatttcgtgatgtgaaaattatacatgttgaaaggaaaactttagagtttaattgagtaaaga

SEQ ID NO: 659261 - DNA, 578 bp, Homo sapiens
atcaaatcggtgatactgggccacaagaaagttgtgtttctagatgacatgcacctatttttcatatacttttttaaaattggattatcaaaaatttaacaaacattcattacaaacaggcagagcaatttccagtgtgactacctgaataccttctgtttgtaatcatcatctgaatgaagattcaccacatggttacctaaacaatgatgaattatttatacctttaatgaaacttgtatgttaaaatgttagtaattgcattttaaaaaaatagacacacaaaacagaagaaaatcatctgactgagaattaagatactgtgatacacataagacagcttttcacarctttatgatgtattgttgatttaatagcaattgcttttttatataaaatatattttatattagtacacattaattgaaatttgtcctcaaatttagaaatgtttcaatattttttaaatgtgtagtttttttggtagaattgtagcacctggtcattactagatgtttatgtcaaagagaatgaacaacaaaaacagcagatactgttgcatgttttagttgttctac

SEQ ID NO: 659262 - DNA, 439 bp, Homo sapiens
ctccacaggagacttgggattcaatgcatatttcccacacagtttatagattgtctcttcttgacagagtggctatcatgtctttgttgcctacctaataacatttcagccaacaacagagaaaaatcagtgtccacctgagattatgactgacctttctaccaaagtagctctttcagwctctaaatgccaggctcaggctgctgtgaactcctaactccccttcacaattctggcagcttcacaaatttgtcagtcactttccaggtcatgctgatacacaagagtcttttcttgatctcatttctctgttcctaatttcagggttcatttataaaagaaaatctctgctaagtttttttttatcttctacttttaggtttagtgagacacctcgaccatattacctcactgaaatctcacttttaagttcagaatt

SEQ ID NO: 659263 - DNA, 573 bp, Homo sapiens
caatgttagcttgtttttgtgcagattttctccatcaagtaggtacttatatatatattttttctatgtgtttatattttaaatttatatcatctttaggtacactgaaaagagtcacacagaagagtgggcacttttttacttgaatatgaagaatcattcagtgaatggaccattatttagcatgaacaatttttccaaatataacttggttagtattttttatttacatcccaatctagttttaaggatagcaaaatctctaatatattaaaatgtttttgtaatgataaaatgctgaatagtaataagatatcacatttggaaacgtttttaaagggataacaaggctcagtattttaaggacatggtaaaatggatacactcattcgctgatggtgagaatgtaaattcctacagggatttggagggygatttaaaaatatgtattaaagttcaaaaagcccataccatttttttttctgcaattccaattttagaaatttacttcatgaggacaattggataagttcacagatttgtatgtttaaggatgttcatcttactgtttat

SEQ ID NO: 659264 - DNA, 574 bp, Homo sapiens
tgctgaagcgccttttgaaatattttcttaaaaaattagattgtttttgtattattgaattttgacaactctttgtatatgctggatacgggtccttgattagttatatgatttgaaaaatttcagtctgtagcttgtcttgttctctctctctttccttcatgtagagattgggtctcacaccattgccccggctgcccttgaactcctgggctcaggatcttcccacctcagcctcctaaagtgctgggattacaggcatgagccaccgtgyccagtctgtggtgtgtcttttcagtctcttaatggtgttttccaaaaagcaggagtttttaacttgatgaactccaacttatcaatgttttctttcatgcgtgatgcttctggtgtcatagctaagaaatgtttgcctaaaccaagatcacaaaggttttctcctacattttcttttaaaagttttatagttacgttacaattatgtaacgctcttacatttaagtcaaggattcattttgagttaattttctaatatgctacaaagtacgcatcaaagttaatctgttttgtacatgca

SEQ ID NO: 659265 - DNA, 574 bp, Homo sapiens
tgctgaagcgccttttgaaatattttcttaaaaaattagattgtttttgtattattgaattttgacaactctttgtatatgctggatacgggtccttgattagttatatgatttgaaaaatttcagtctgtagcttgtcttgttctctctctctttccttcatgtagagattgggtctcacaccattgccccggctgcccttgaactcctgggctcaggatcttcccacctcagcctcctaaagtgctgggattacaggcatgagccaccgtgcccagtctgtggtgtgtcttttcagtctcttaatggtgttttccaaaaagcaggagtttttaacttgatgaactccaacttatcaatgttttctttcatgcrtgatgcttctggtgtcatagctaagaaatgtttgcctaaaccaagatcacaaaggttttctcctacattttcttttaaaagttttatagttacgttacaattatgtaacgctcttacatttaagtcaaggattcattttgagttaattttctaatatgctacaaagtacgcatcaaagttaatctgttttgtacatgca

SEQ ID NO: 659266 - DNA, 570 bp, Homo sapiens
tttttcttgattataaaaacaatacctattggctatggaaaattgaaaaaagcataaataaacaaaaataaccaacaggaccatcatccaaatgaccactgctagcattataggttagtgcccccccccacccttttttaaaaacagaaagcaggattatagtgtgtatgagtttgtgtgtatgagggacacacacacacaggtctggtgttaytgtacagttttatgacctgcctatttcatgtatgggatcctcagtatttttatacaacaccatttttccatcatatcatttaaaaataatgagatgtaccataatcctgaaccctgtggggaaggtgttgttatctggttttgtgtgacaatctccctttacacacattcgtggctgttttcctggacaaaggttcttaaccattcttgtggtggggacccactgctgtctagtgaaacctgtgggcctcttgtcagaacagtatttccaaatgtttaaagcaaaatacataagattacaatggaaacaatattgaaatattatcaaaatattaaaaagaacaaatttataaaaca

SEQ ID NO: 659267 - DNA, 577 bp, Homo sapiens
gtgcatagacattaaaaattattgtatcatgtcttcttggggaactggcccatttatcagtatatattgcacccatttatccctgattatcttccttgttgtaaaatctattttatctgatattaatataggtgccccagctttcttttgatttgtattagcatggtatatcttttttcattcatttcatcttaacctatctgtgtctttataaatatatacatttgtgggtcaggtgcagtggctcacatctgtaatcccaacagtttgggaggctgaggcaggcggatcacttgaggtcaggagtttgagaccaagctggccaacatggtgaaatcatgtctctactaaaaaaccccccacaaaaaaaccaaaaaaccccacaaaaattagccaggtgaggtggtgggtgcctgtaattccagctactcaggaggctgaagcagaagaatcacttgtacccgggaggcagagtttgcagtgagccgagatcatgccactgcatgccagccttggcagcagagtgagactctgtctcaaaaaaawatatatatatacatgcacacacacatttatg

SEQ ID NO: 659268 - DNA, 415 bp, Homo sapiens
gtaaattgagtccctaatttttcagtgcattatgccaggtgttgtaagaaataaagatgagtaaaattagctcctcattttggggaggttctaatagaactgggagatatgagacaaatacacagaatgagatataaaccaagttaacacgaagagtgactatgcagaaggggtgaaagaaagarggtgggaaaatcacacattattcagaagaggctggaatgccaactacacttacccaagtagatcctgaattctcaagcttttgtcaggactcatgtaaatttcttctattttttcattctttttttttgtttgtttttttgacagagtctcattttgttgcctaggctggagtgcagtggcacgatcttggctcactgcaacctccacctcctgggttcaagcaattctc

SEQ ID NO: 659269 - DNA, 415 bp, Homo sapiens
gtaaattgagtccctaatttttcagtgcattatgccaggtgttgtaagaaataaagatgagtaaaattagctcctcattttggggaggttctaatagaactgggagatatgagacaaatacacagaatgagatataaaccaagttaacacgaagagtgactatgcagaaggggtgaaagaaagaggrtgggaaaatcacacattattcagaagaggctggaatgccaactacacttacccaagtagatcctgaattctcaagcttttgtcaggactcatgtaaatttcttctattttttcattctttttttttgtttgtttttttgacagagtctcattttgttgcctaggctggagtgcagtggcacgatcttggctcactgcaacctccacctcctgggttcaagcaattctc

SEQ ID NO: 659270 - DNA, 582 bp, Homo sapiens
gcaacatagcacccctgagtaagggagaacatttgcttcctgttcagcctttagggtatggtgaacacctgccggcctgatctgcctaggaatgtttctcattcttttagctaagaatgctgtttttcccctgggaactctcccttccccactttacccccaattccatgaaatcttcctgggactctctagtggggattcaagctagccaatctctccttaaaatctgaactgtgagtagaattatgcaaggccagaaattgttggagctgatgcattttacagtaactccctgagaagattgcttattacttccagtgccactcctagccctttgtgatgcttagaaaagacatggagctcagggaattgaagcatctttcagcaaagaaaaagtcaccctttctccaggcagacaaaaccccctacagagaggcaagccttggtgagcagacagcaaactaaatccaccctaatttacctggtcagccaggtgccctgatgaccctgaaacccctataycctttcctctacttttggaaacctagttgttcagattgtctttcaattctcttactgccc

SEQ ID NO: 659271 - DNA, 452 bp, Homo sapiens
atcccatttagtcacagctgtcatttgttgagtgcctactatgtacctgatgttttatttgtattatctaatttaatcctcactacaacctgcaacagagttggtactatctccattttacagaacagaaaactgagactcagtgtcttgtcaaaggccartaagtggcagagtagctttgaccttgggtatgtctgattcctgtccagaatttttctcccagagcacaaggttgtcattcccctgattcccctgaggaatctgggagtccaagagacttagagctcttgagtcatctggtacaatcatcctcttcctcaactcattagctgaagtcaagacctgtgcacaatgcagttagctaatttgtttattcattgtatgcttatgtaaatggattgaaatctttcctcgacatcattatctgccagaaaataggggccgcatactta

SEQ ID NO: 659272 - DNA, 452 bp, Homo sapiens
atcccatttagtcacagctgtcatttgttgagtgcctactatgtacctgatgttttatttgtattatctaatttaatcctcactacaacctgcaacagagttggtactatctccattttacagaacagaaaactgagactcagtgtcttgtcaaaggccaataagtggcagagtagctttgaccttgggtatgtctgattcctgtccagaatttttctcccagagcacaaggttgtcattcccctgattcccctgaggaatctgggagtccaagagacttagagctcttgagtcatctggtacaatcatcctcttcctcaactcattagctgaagtcaagacctgtgcayaatgcagttagctaatttgtttattcattgtatgcttatgtaaatggattgaaatctttcctcgacatcattatctgccagaaaataggggccgcatactta

SEQ ID NO: 659273 - DNA, 576 bp, Homo sapiens
tttctcggactttttcattacacatatcaaagttatgtgctgtcattatgatgtatcactgttgatttgagctttgatcatctatcagaggtggtgtttgtcagttttctccactaaaaagatgctttcttttctctctttccatagtgtacgctttggaagacmgttgctataaaaaagttcacatctaaggagtagagactttgtgttccactttctgtgtctgtaatacctacgtaaattatttgtaaaattcttctacaagggaaatttgacaattctccatttattagttcttagtttatatatacagacaaacagatcttatttgaattaaatattttattataaaaatcaataaatatataggatataggagaattgggttctctcccaaaggaaaaaatgatttgctgataaagtgacaaagaaggatcctagatgtggtggctcatacctatcatcccagcagtttaggaggccaaggcaggaggatttcttgaggccagaagtttgaggctgggatgagctatgactgcagcaatacatgccagcttgagtgacagagcaagaccc

SEQ ID NO: 659274 - DNA, 417 bp, Homo sapiens
tgtccttttgcagtgtttcagataccatgacagaaagcacatcaaggaaacatggtttaccacaaagtccttgtttttaaatgtttcctatttgttatccattttcacacactttgaacatggtgtcttctttgttctggagcttgtttacttagattttagcctggaaatgccctttgctgtgaatgctaacaactccgagattcatggcagctgtcagtacctacatcctgggtccaaagaaagtgccctggactggggacccaagaagaggtggctctccatgcacttgagatgcctgtcygccccctcaccctcacctccttcccttggcacccaggcacgctggcctcctttctgcccctgaaacacaatgactctgctaccacttccaggcctttgaacttgccattcctc

SEQ ID NO: 659275 - DNA, 462 bp, Homo sapiens
accatcatatatagccaaggtttttgtagttgtttattatccagtaaaagataaccggtacattacaatatttttgttttcagagttcattcgctatcgtttctgaagaaacattgaaaagttgctttcatgttagtagcaatatgaaatcaatttctttaaataatggaacaaagtgataaaagtatcctgactgtcaataagccataaaaaatagaaattcaaggagtacttaatagtacagagtttctctttgaacatatttagcttctctctttcactactatgactctaaagccaatgtcacgtggcagagacaaggctacctgttaaacacatcatttcttctttctggaaacagaagayttcatttactagcttttgttgcagtttggctagggtcatgtacttgaatttttacaaataagtatatgagagaaacgctatattttttcatagtcc

SEQ ID NO: 659276 - DNA, 545 bp, Homo sapiens
cttgcaaatatttcttcccaatctatggattaccttatggctctgtggatgatgtcttttgatgcacacttaaaaaaatttataagtccaatttgtgtatattttcttgcgctgtctgtgcatttgatgtcatttccaagaaatattactgccaaacccaaatcttgaggcttttgtcctgctttcttctaaatgttttatagttttaggtttaacacttaagtgatagattcacttagaactagtttttaaacatcattttagttaacaatcccattccattctgttgcatgtagataaacaattttcccaatgacatttgttgaaagtactgtcttttcctcactgaggtctcaatacccttgttgaaaataagttaaccacatatttgagaatttatttctgggccctctatyctattccattggtctatatgtctgttgttatgccaatagatgtggtttggctgtttctcccctcccaatctcattgaaatgcaatccccagtgttggaggtggggcctggtggaagctgactagattgc

SEQ ID NO: 659277 - DNA, 563 bp, Homo sapiens
gctattgtcaataatgctgcaataaatgtgggaatgtggatatcttttccacatactgatttcattccctttggatatatatctggtagtgagattgctggatcctatggtagttcaagttttaattttctgaggaaccctccatactgttttccacagtggctgtgctaattcacattcccaccaacagtgttcaagggttccttttcgccacatccttgcccacacttttatcttttttaaggctttcagtccagcaaatttttaaatgatacacctactacgaatactaataaaaaatgacaaaatttccagaatactttacagaagaaggtaaaaaactaaataacatgttttcattgaagcattttttcctaatatccaaagactagaaaccacacaagtagaagkgtccaccaataggggattgaccatataaacctaggtatttaatatatccacaaaatgaaatatgtgatagctgtagctgactgtgaggaacagtactggatgcggccgagagaaggagtgtgttttcttgttgcattttgtgtggtagatgc

SEQ ID NO: 659278 - DNA, 586 bp, Homo sapiens
tacagtaatgggcagggtagacatacctcactagcgtactctcaaaatttcttgcatgcatatgctttctccggcatgcatatgctttctactacaatgtgaacaagcctacgaaagctagcctaatggaggatgagagaccacgtggaggagagctgaagtgccccagccagcagctagcctacacccacagctattttgcttgtgttccactcgtcctatttgcataatattgttctttaagttaacccattcttaatttattgttttaatcttaagcaataatattcaagaactaatgagttttgtgtattcattatatttttccataatatatattatactaataaatgcccattcaaatttttgtttgagtgctcaagtgggtatcatttaaaataatcttatatactatatataacagccaaggtttgggcaacacaacagaaactgcatgagtttattttatcagaattttttaaacrgtatgggagaactaaaaaagtaaaaaagggaacccttgagttaacaaggagataagaactacgtaaagcagttactgtcctgaaggaataaagggaagagc

SEQ ID NO: 659279 - DNA, 483 bp, Homo sapiens
cttatctcaactgcataagacagatactcccagagcggccgtttatatacctccccccaagaatgcaattcttttcccagagtattaattatcaatattcattgctaggaaaagaatttagygatatctctcttatgtgcacatccatttataggctctctgcaagaagaaaaatatggctctattctgcccaaccctgcaggcagtcagaccttatggttgtcctcgcttgttacctaaaactgctgttattctgttctttttcaaggggcactgatttcatatttttcaaacacacatgttttacaatcaatttgtacagttagatacaattatcacagtggttctgaggtgatgtacatcctcagcttatgaagataacaggattaagagattaaaataagacaggtgtaagacattataaaagtattaattttgggaactgataaatgtccacattaaaatgaaatcttcacaatttat

SEQ ID NO: 659280 - DNA, 483 bp, Homo sapiens
cttatctcaactgcataagacagatactcccagagcggccgtttatatacctccccccaagaatgcaattcttttcccagagtattaattatcaatattcattgctaggaaaagaatttagtgatatctctcttatgtgcacatccatttataggctctctgcaagaagaaaaatatggctctattctgcccaaccctgcaggcagtcagaccttatggttgtcctcgcttgttacctaaaaytgctgttattctgttctttttcaaggggcactgatttcatatttttcaaacacacatgttttacaatcaatttgtacagttagatacaattatcacagtggttctgaggtgatgtacatcctcagcttatgaagataacaggattaagagattaaaataagacaggtgtaagacattataaaagtattaattttgggaactgataaatgtccacattaaaatgaaatcttcacaatttat

SEQ ID NO: 659281 - DNA, 606 bp, Homo sapiens
tcaacaaagaccactcaggagaaagctgatgaaaataaatggactgaccgtgtaaccgtaggtattcagtgggtgcctgctggcagctataacattttctaattctacgagtctggaatatgaaactactatcaaggctgtcascctgtaccaaatgtataaatagaaatatatgagagaggaaatacatatgcccatagtgcaactgggttgaaggagagaggaagaaaggagacgagaaattctatatctatggcaagtaaaatggtgattctgaattggatgtgctattgctcattgtctgtggtatccctctgtgggcttgcaggcagatacaagcttcagtcgagctgttggacctatcaggtcctagcttgccagtcctagagcagtaatttcaatgtaggaaactgatattagggttttagctcaggtgcacatgctcaggaatgtcagctgcgtgagaccaactgaggcagttcggtggtcatctctggtgccaccactggaagctgtgttttaaaggaaatttcctgaagggcactgtcctttactcagtgactatgctggagagaggtggaggagaggagggaacttcccagggct

SEQ ID NO: 659282 - DNA, 634 bp, Homo sapiens
gtgggtactgtgctccacttttctcagctgagattcctgccttcactgctaattttacatttatcacattctattagtacttctctcagaggaatatcagcttccctatcatacaacttttccttattaaaaaaatctggacttaccgtaaaaaatatagaacacataggaaaacatgcaagaaagaaaaataaatgtctcccataatatggccacctaataaaatcattctagtcttttttctatatctgtgcatatatgtgtgcagaacttaactccacatgctttacataatgcttctttcactaagtatatcttaaacayctttattattatttcaaaaaggtagttttgaattactgtatttcatcctatgtgctatataattcatttaatcaactccctattgatgaggttttaaattactcataatctagctctgttagaaataggcttgtaataaatattcttaataaatagttgttgcctaggttcattaaaatatccttgggatcaagttctgctttgatatgtactttcttatgatatgtacagccaaattgtcttccaaagagttgtacttccagagtgcccatttctctacattcccaagtaaaccttggatatagttttt

SEQ ID NO: 659283 - DNA, 441 bp, Homo sapiens
gcacttttattatcacagcactttgtactctctattggaattgcttttaaaattgtctcaatgaaagattttacatgcccctcaagggtagggatgtgccataatccctgtagtcatcccagtactagagtactctggggatgtatatttgaataaacwaataaatgaatgaattactcaattgctgtgcagatgtaagcagttgccatcatattggtcaaccaacatttagagtgtgactatcttgtttcaggttctgtattaagggctgggaatacaaagatggacaagaaccttccttctgcttctcactcatagtagagcatgtaagtggataattactacagagtgcagctccatggacttaagaaagaggtaaagaagtgaccccttcagaaagtattgtaggacactgatgtaaaggcatgattcattttcact

SEQ ID NO: 659284 - DNA, 574 bp, Homo sapiens
gaatgtgtttccaaattataaaaccaaaaatacctggccaattacctctgcaataattgtgaaactaatttatatatcattgttattaattgtttctatcctcaattataagaatatgaacktttattttaggaaccaaacttcctcatttggatgggtgattcagttggtcctatgactgacactaacaaaggcaccagaaggcatttttcagagagaatgattggtcctagatggcatctttctcaacagtcagggaattgaccacgaactttcacatccccttctaaagaatgtgtcatctagcctcttagtctgcacttggaaaaaaataaacagaaagaaaaaagaaacatttttgagagcaaagatcgtcattgttctgaatcagagatttcatgaaggcctggagtccttgaggttaaaagtgattgggttctctcagagtacaatgcaggcatctactgcatattccaagcaggctcttttgctcaagcctcttcttgaatactcctaataacagagagatcactgttttcaaggaggcccattctaacatttaaataattattta

SEQ ID NO: 659285 - DNA, 561 bp, Homo sapiens
gtggtgggtgcttgtaatcccagctactcaggaggctgaggcaggagaattgcttgaacctgggaggcagacgttgtagtgagctgagattgcaccattatactccagtctgggcaataagagcagaactccatcttaaaaaaaggaaaaaaattaaatagaatttctagaactgaaacaaatgaacagaaataaaaagtttactgaacaggtctaatggaagattggaaatggcagaagaaaaagtcagtgaacttgaacatagataataaaaattgccccatttgaaggaaagaaggataaaagattgaataaagtttaaaagaaccccagggctctgtgtgaaaatagcaaatagtctaacacatcagcactaagagagaaactagtgaacaaaatgcaaagaaaatatttggcctggcgcagtggttcacacctgtaatcccagtactttgggaggccaaggcaggcggatcatttgagttcaagaccagcctgaccaacctrgtgaaaccccatctctactaaaaatacaaaaaacttagccaggcgtggtggcca

SEQ ID NO: 659286 - DNA, 575 bp, Homo sapiens
tggctttacttctttaaaaagaaagaagggccgggtgtggtggctcatgcctgtaatcccagcctttgggaggccgagacaggcaaatcacttgagctcaggagtccaagaccagcctgggtaacatagcaaaacctcatctctacaaaaaaatacaaaaattagctgggcatggtggtgcatgcctatggtcccagtcagtcaggaggctgaggtgggaggayggcttgagccctggaggtggatggaggctgcagtgagcagtgattgcaccactgcactccagcctgattaccagagtgagaccctgtctcaaaaaaaaaaaaaaaaaaaaaaaaaatttaaaagaaagttctcctcatattactccccacactaacattcttccacagcactgcactattaaaattcttcatttatatttaaaaccttcagtatccaactgcatcccactacctagaacaatgttcaaccacatcttcacctttaaccacaaaccctatcctatagccccatctatctgtcatttcctatcttcttacctccatgcttttaagtttcctcttagtatgccc

SEQ ID NO: 659287 - DNA, 581 bp, Homo sapiens
agtggttccgagatttaaatgagattgtgcaggattggcatagagtctggcacatggcaaacagtaaaacatctcagctacmattatgaccactttccagagcagaaaccaaggctgaaagccagtatatgccttgtcctaggtcacaaaaaactgaaaaatagaactgggatttaaacctgctgttgtttaataccaaagttttttttgttttgttttttgactagactgcttttctgtcttttttagtctagctctttgttcaaaaggcctccagggaagttagtacagtgtagaaaattatatctctcacccaggcaaacacatgagtaatgtgaagcaaacacagctcactggtgcagcctcaacctcccgggctcaagtgatctttgcgcctcagcctcccgagtagctaggactacagatgtaccaccatgcccgactaattttttatttttgtagagacagggtctctccacgttgcctaggctggtcttgaactcctagcctcaagcaatccacctgcctcagtctcccaaagtgctgaggttacaggcatgagccaccatgtctggccaact

SEQ ID NO: 659288 - DNA, 581 bp, Homo sapiens
agtggttccgagatttaaatgagattgtgcaggattggcatagagtctggcacatggcaaacagtaaaacatctcagctaccattatgaccactttccagagcagaaaccaaggctgaaagccagtataygccttgtcctaggtcacaaaaaactgaaaaatagaactgggatttaaacctgctgttgtttaataccaaagttttttttgttttgttttttgactagactgcttttctgtcttttttagtctagctctttgttcaaaaggcctccagggaagttagtacagtgtagaaaattatatctctcacccaggcaaacacatgagtaatgtgaagcaaacacagctcactggtgcagcctcaacctcccgggctcaagtgatctttgcgcctcagcctcccgagtagctaggactacagatgtaccaccatgcccgactaattttttatttttgtagagacagggtctctccacgttgcctaggctggtcttgaactcctagcctcaagcaatccacctgcctcagtctcccaaagtgctgaggttacaggcatgagccaccatgtctggccaact

SEQ ID NO: 659289 - DNA, 581 bp, Homo sapiens
agtggttccgagatttaaatgagattgtgcaggattggcatagagtctggcacatggcaaacagtaaaacatctcagctaccattatgaccactttccagagcagaaaccaaggctgaaagccagtatatgccttgtcctaggtcacaaaaaactgaaaaatagaactgggatttaaacctgctgttgtttaataccaaagttttttttgttttgttttttgactagactgcttttctgtcttttttagtctagctctttgttcaaaaggcctccagggaagttagtacagtgtagaaaattatatctctcacccaggcaaacacatgagtaatgtgargcaaacacagctcactggtgcagcctcaacctcccgggctcaagtgatctttgcgcctcagcctcccgagtagctaggactacagatgtaccaccatgcccgactaattttttatttttgtagagacagggtctctccacgttgcctaggctggtcttgaactcctagcctcaagcaatccacctgcctcagtctcccaaagtgctgaggttacaggcatgagccaccatgtctggccaact

SEQ ID NO: 659290 - DNA, 581 bp, Homo sapiens
agtggttccgagatttaaatgagattgtgcaggattggcatagagtctggcacatggcaaacagtaaaacatctcagctaccattatgaccactttccagagcagaaaccaaggctgaaagccagtatatgccttgtcctaggtcacaaaaaactgaaaaatagaactgggatttaaacctgctgttgtttaataccaaagttttttttgttttgttttttgactagactgcttttctgtcttttttagtctagctctttgttcaaaaggcctccagggaagttagtacagtgtagaaaattatatctctcacccaggcaaacacatgagtaatgtgaagcaaacacagctcactggtgcagcctcaacctcccgggctcaagtgatctttgcgcctcagcctcccgagtagctaggactacagatgtaccaccatgccygactaattttttatttttgtagagacagggtctctccacgttgcctaggctggtcttgaactcctagcctcaagcaatccacctgcctcagtctcccaaagtgctgaggttacaggcatgagccaccatgtctggccaact

SEQ ID NO: 659291 - DNA, 542 bp, Homo sapiens
atatgatgctaccataagctactggtcattgcgacaatcgtcatcatttagcattccttaagcagcctaacaaagcatgaaattagagattcttaactacaagcaccctgtttatcattttttctcttccatgcatatattccaagtcatgtataacaagactatgttacagaaacattaaaaatgtacacccattaaagcaacatggacccagtctgactgccagcagcaaatccagctgccaccaacatggctccagagccttttagctcctcaccagtgccaaaagaccagtcataagaaaagacaaattatggcaattagcatctggcatgtataattctaaaattaattgtattagattttaagctcctttagaacaagaataatattttcctcatttttgtgttccacgaagtgcctatttcagtgcttggtaaatatatctcctccctccagtaggctaggctgcaggactgacaaggaaagggatttttttttcccttatgktaaatagtatacccattatctaacatgcattt

SEQ ID NO: 659292 - DNA, 521 bp, Homo sapiens
cagatcttgtccctctttgaagctccaggctcagccctggccctcagaccccgatccccaaaccttgaccctttccacctcctacacccagtcgagccttatcagcactgacccaggtggggctcacacttactggtccgaacctgcttccacttccctgcaggtggagtgcgagcttgcagggtgtacttagcgatggggctgtggttgtcgaagccacggctccagctgagctggatggtggtgtcgccaatgtccctcaccaccacacctcctgggggacctggcggacctgcaccaagaggtcagagcacagtgggtcagaattgggcagcttccaatttgagccaacctcctcccagccaggcttgagctggtacagtaccaagacagggcagcagaggaygcagtgaacacacacccaggcgggagggcgggcaaggggtgtgggcagttggggcgggtgccagttgttgggtggagggatgtgtctcaaggctgggggagctcacagaggctgt

SEQ ID NO: 659293 - DNA, 575 bp, Homo sapiens
actgacaccttaactaaaacttttaggtggaaacaaaagactggttagaaaaaatgtgaagctaatttggatgttagaatttttttgtgttattttattggcagggtgtgtatgactaaaattattagattcaatgtgtgatcaattggctaaccaagggacttttcagaacataatcatgttaaatgtctcttcctggtatgtgagatatgaattcatacgatatcaaccagtttaaaggcttttttttagtgaccaactttatccccatctttactattaaaaatcacctatcaggataattttttcttttctctgcagtctgtgccagtcatattttagtacataactctatcaaatacacaggtaattacttgtatattttcattgtgttctctcattgctttagttggggacattccttcagtatagttttctattacaaatgctaatttttatyagtcccacattcatgtgtggatgtatataaacctcttagctaattttttaaaaaagtgaattcttgatgaatcagaactaatgaaagaagcttagtgtgacatgaaataaatgca

SEQ ID NO: 659294 - DNA, 526 bp, Homo sapiens
gtcatgatattctagtattctaactcaatattaatgagggggcagcaattgcttctattttcaagagcagayctgccagaagaagagaaaggtgttaacatatgaaatatatccttaaaaagtaataatatccatgatgagaattatacagttagtacacattacccttatgctttgatgattataatatatcagtcaaaggcaagtgaaaccatgcattaattactgagtcatttgttaaatacaaaattgtgaatcaattttaatcaaaagaaagagagttcacctgaatttagagaaagtgatgactaatagtgcatctaggtagacttaatccaatttacctaaaaacattacatatatatttatctttgccagtgcttttaatcccagctggatccatgttacacaagtcatttttaccttttgggtaatttgtcactatgtaaatttaagtgaaattatttatacagataatgaaaactgaaaatgatttaaatttgtggattaattataatgagaatat

SEQ ID NO: 659295 - DNA, 596 bp, Homo sapiens
atgtggttttttgtttttagttctgtttatgtgataaatcayatttattgatatgtatattttgaacctaccttgcatcccatggataaaacctactttatcatgctggattcactttttgatgtgctactgaatgtggcctgctaatattttgctgaggatttttgcatctatgtttatcaaggatattagcttgagtttttttgttgtttttgtgtcactgctggtacaattggtatcagaatgatgttgacctcatagaatgagttagggaggagtccatccttttcaattttttggaatagtatctctaggaatgatttcaactcttctttatacacatggtaaaattcagcttttgaatccatctggtcctggtttttttctggttggtaggctttttattacgaatgaaatttggaactcgttattggtctgtgcagggattcaatttcttcctggttcaatcttaggaggttttatgattccaggaatttattcatggaaatgaacaaatgcttgttcattatagtctgtgagggctttctatatttctgtggagtcagtggtaatatctgctttgcactttgtcactt

SEQ ID NO: 659296 - DNA, 608 bp, Homo sapiens
ttcaaaaacaaataaaacatgtatataatgattccttttattcaaaactttacattgaaatctgaagtaatgtattaaaaagcagtgacaaaaatgaagaacatgttgcagtcactctgttttactcactgttgatgctgcttcactctttcatattagcttaccccattagacaccactgttgtggatgaccttagtatccttgtttcaggcacagatacactcttatttgcttgctggatgtgatgtttgtatctctgccttgcagtgtgtgcacttggactaccttgcaacatacttccttgtagttaattgtagagccattatatttttagtgaccttgtgaaatgaaacattaaaaaaaatcacacttctgcatgcacacacaatcacatgcacatagatgcatgcaagttcatcagatatataacctattggtttttatactcctgtgacycatttctgacaaattgctgttttacctgttaggaagttaataacatttgacataaacttgaagtaaatttgcataagaaactttgatatttaatatggcatcacctgtcataggtagatatatatttttaaagatcttgccctatatatat

SEQ ID NO: 659297 - DNA, 596 bp, Homo sapiens
aggatctgggcttaatgaaatagagccccaacttgggagaggaggcttggtgaccagtatcaaatccttttctgagatctgtgtttggagtgaaggtggacagaatgtatgggaaaaggatgttgaaaggaaggacagaggacaacggaaaacctggcccacctacagtgaagtttttgctgctgctgctgctgctgctggaaagttcatcttagagcttgtgctggttccctggggtaggagtcrgggtccttctgcagacatggtgatgccctggcctgaccttataatcctgggttatgcaaaaggtctgctgtcagaggccctgggtcctgaaatatcagaggagagagagctggacacctgtgtactgggacaaatatattaaaataattggaagatgatagatatcaacccaatagtattaacagagcaaagactaattggtatccctcaagtggggaaacaagtggcaccaaaaattaaagatataatagggaaaaaaactttccttaaattaaggcagaatcaaatctacacatggaaagaaccttccaagcagaccatattataggaaatttgatacaaaataggca

SEQ ID NO: 659298 - DNA, 536 bp, Homo sapiens
tttgaattttaccattcatgtcaaccccaggaaggacagacttctaaacagtgaagtagcccaaaattagcaatggaagagagagaaggacacagataatcccaaaactatgtaatcaaaacttgcaggcagcatttgggcagggtggagaagtcagtctgccatgctgtctttttccagaccacacagctgcggtgagaggacaagggataggagagctactgcaaaaggcacatccagttcagaaataattgtttttttcctttaacttgagcctttttcagagcagttattttgtctgtttatggaatagacattctttcatcctgcaaaggaaataatcattktccagctcagaggtgaattatggagtatcagggaagtagaagtgaaaatttttagatattctactttcaagaagtaaataacagaccaagtgtgatgatgcatacctgtaataccagccctttgggagatcaaggcaggaggatcgcttgaggctaagagttcaagaccagtctgagaaacgtagtaag

SEQ ID NO: 659299 - DNA, 556 bp, Homo sapiens
aaggttaggattatgagaagggcctaaactctgataaaccataggygtagtttctataatcccttactgttcaggggtcatgtggccagaggtcacaagatttgtgaatttcccaagtgatctcacagataacatcactattgtagaatctaatattggtttgtttgagatgtttttcagactgaccccatctggactcatgacccatgactcaactgatcacgtggccccacccagagatggactcatcatatgaggaccatttatacacccatatgattcatttcccaaccaatcagcagcacccattccctagcccctgcccaccaaattgtccataaagatccctaacctctgatccttcagggagattgatttgagtgataattccagttctctcacatgggctggcctcaagtcaactaatgttgtagtctcagtggattgattttatctgtgcaatgggcagaaagaacccattgggcaattacatatagtggctcatagtgatcattgctaaacataaaaaataaaagtcagcaaggggatgggtagt

SEQ ID NO: 659300 - DNA, 473 bp, Homo sapiens
tcactgcacctggcctcattactattcttttttagaaatgccaccattgcagtttttatgcccactttcacctaagtgttttttttttttttttacaggctcatatctgaccaatcctcattgttgtttaatagacaagatttaaattttcacctgtaaaggcctttaaaatattttgtagytttattgtattgtgataagaattatgccttatttttatttttatttttagagacaggggtcttgctatgttgcccagactggcctcaaactcctgggctcaagtgatcctccagccttagcttcccaagaagctgggactataagcacataccactatgcccagctagaattatgttttaaagcacttaacagttaaaatgttttcctcctagaacatttaagtgcaattgacacgggaagatgtgctatattcacctggtggcatctcatatcctctggcttacaaccac

SEQ ID NO: 659301 - DNA, 473 bp, Homo sapiens
tcactgcacctggcctcattactattcttttttagaaatgccaccattgcagtttttatgcccactttcacctaagtgttttttttttttttttacaggctcatatctgaccaatcctcattgttgtttaatagacaagatttaaattttcacctgtaaaggcctttaaaatattttgtagctttattgtattgtgataagaattatgccttatttttatttttatttttagagacaggggtcttgctatgttgcccagactggcctcaaactcctgggctcaagtgatcctccagccttagcttcccaagaagctgggactataagcacataccactatgcccagctagaattatgttttaaagcacttaacagttaaaatgttttcctcctagaacatttaagtgcaattgacacgggaagatgtgctrtattcacctggtggcatctcatatcctctggcttacaaccac

SEQ ID NO: 659302 - DNA, 610 bp, Homo sapiens
attttgtttaaggcattctgatgaatgtgacctgtctcactatgatattaatttacattcccatgatataactaagatattgtcatctacttatttgccatcttttatgtcctcttttttgatgaaacgcctgttctatgtctttggtttattttgtaatcattttttttcctttarataatacagttgtgtttggagacttcctcacaccttcttgtcagatgtatgatttgcaaatattttcttctggtatttactttcttgttttatccagctaaaaggctatttcacagagtttgggtttttaattttgatgactttccagcctcccgaaatgtgagaatgaatgtatattgtttataaacacccccagtctatgatatgttgttacagcagcctgaacagagtaaggcaaggtataaacacagaactgctgaactaaacacagcagcatgtgatttacagcaattctgtgcaggttgatatctcttcatctgagtctatgtcacatttaaaatgtactgcactacttttaacttattagttgaataagtaatcaaattcagcctttgaattatacaaagaaaaaataaaatgatcatagactttg

SEQ ID NO: 659303 - DNA, 526 bp, Homo sapiens
ctccatcaacatcactggaagtttacccttctcattaatcttttagaaaaagctgctgttgattctctaagtcttatttacatattattggtttttataccattaatatttataattttcattattttattctttgttttagctttctccattcttttttcatcttaaatggttgctagtttattattktatttctctaatttgttttctcatgtgtctaagctacaaaattctatgtactttttttaatgcagattttgacagctcatgttttcattgccatttagctgtatttttaatttctcttataatttgcttttttaaccaaatagtaaattgtattttatttagtttgcagaaatgttatattctttgcaatattttgaaaacttgttaacgtgtgtatttattacattttaaataaagggcatatgctgtacattgttgattctttgagaaaaataagacttgttttgtagattattttgtggtaaacattaaaattttcattggaacttaatgcaaa

SEQ ID NO: 659304 - DNA, 526 bp, Homo sapiens
ctccatcaacatcactggaagtttacccttctcattaatcttttagaaaaagctgctgttgattctctaagtcttatttacatattattggtttttataccattaatatttataattttcattattttattctttgttttagctttctccattcttttttcatcttaaatggttgctagtttattattttatttctctaatttgttttctcatgtgtctaagctacaaaattctatgtactttttttaatgcagattttgacagctcatgttttcattgccatttagctgtatttttaatttctcttataatttgcttttttaaccaaatagtaaattgtattttatttagtttgcagaaatgttatattctttgcaatattttgaaaacttgttaacgtgtrtatttattacattttaaataaagggcatatgctgtacattgttgattctttgagaaaaataagacttgttttgtagattattttgtggtaaacattaaaattttcattggaacttaatgcaaa

SEQ ID NO: 659305 - DNA, 526 bp, Homo sapiens
ctccatcaacatcactggaagtttacccttctcattaatcttttagaaaaagctgctgttgattctctaagtcttatttacatattattggtttttataccattaatatttataattttcattattttattctttgttttagctttctccattcttttttcatcttaaatggttgctagtttattattttatttctctaatttgttttctcatgtgtctaagctacaaaattctatgtactttttttaatgcagattttgacagctcatgttttcattgccatttagctgtatttttaatttctcttataatttgcttttttaaccaaatagtaaattgtattttatttagtttgcagaaatgttatattctttgcaatattttgaaaacttgttaacgtgtgtatttattacattktaaataaagggcatatgctgtacattgttgattctttgagaaaaataagacttgttttgtagattattttgtggtaaacattaaaattttcattggaacttaatgcaaa

SEQ ID NO: 659306 - DNA, 520 bp, Homo sapiens
ttaagtatttgatttaacataatggaaatcattaataattgtgaaagtacaatgtcacatttccagtgactgagattgaataattcagattaaaatagacttcaaaggatatggagattttcatttaggtaatatggagaattatatcaacacatggctamaaaatagttcacaaagctcaaacaacagcaataacatttctctaataaatacacaaacttacacaaaagtagggatatcattaagggtcaaaaataaaggcaaagttgaaacacataggagtttgccaatattacaattttcattgtcctggaggcacttgttaggccctatatccaggagatttgggtttcacggactgcagtgacagggctcattaccttgacctatcaaaagagaggggctggaactaagacccttcagaaaatgggacactaactgtaaaggcaaaacaggaagaaaaagtacattcttaaaagaatttttcaaaaagttaaaaaaaaacacagaaatttcttag

SEQ ID NO: 659307 - DNA, 620 bp, Homo sapiens
agaacttaaagtataatttaaaaaaaaagaataactcagcctgatagatggcttcagacatgtgcatgggaatgttagatgtagtattgtttacaatattaaaaaattggaaaaccactaaaacattcagtaataaaagataagaaaattctggtacatttttacatgatgaatactgaacatccattaaacattatgttgtagaaaagtatttttagcacaaaaaaattacaatatactgataaatgaaaaaaagctggtcattcaaatactattttttaaaatataagaacagggtggactgactaaaagtcaccacactttggatctggttcccttctttatgccactttttccaaggtgggccatgacctctttcaagcagatagtgaagccaycctcacagggttaactagaattctggacagaaatctagttattaagcattaatcaggctgtgctttgacccccttctttggaactgtaagtcagttagcactagatcctgaccatttgcatcccaactgttgctatagataggatctctgacagtagaatcataaggcttttctttaaagatcaccggagatattttttgatgcaaataattgagtagaatc

SEQ ID NO: 659308 - DNA, 599 bp, Homo sapiens
taactggcatttctcagcctatgacataagcagtagtgttagttgtaatatctgagcatcacagcgcacatacaggaaaaatatggggcccctctcctagctycctttatgattcccaatgctggaatgaacctggggaggtacttcagaaatgtttctcctaatagcaggactcacagccaatcctaggagttcagacagtgaggggtgaagcattttgttggtctgtaaacaggtgactatttattcaacattctatgcccttgccagaaacacaccagctactccttcctgggattgttctacactgaggctgttggaggaggaggagaaaatggcctccacttctggacaatgtgcagagaacctagagagtgttgcttccactcctggtggttctctctctggcctcggctgactctggacctgcagtgaagctgagggggtgtctgtctaaggcaagtggtgatttggattccacctagaatggcttttgacactgcaaaaataattcttatgtacagctcacattgtctggctcctgtccacagaatagctagtgtactcttgcatagaggattgtagaatcacaaaataca

SEQ ID NO: 659309 - DNA, 613 bp, Homo sapiens
tttttctattttccatgtcttaattgaggtaagacccttctgggttctctatcacatgccttgtgaattgtgctctccttttttgggaactggcactatttccagccctgtgtgagtgttgggtactgttctagctaatgctttcaagtggttctttcctggggtagttttttcacacacatgcacctgtgaaattaaaaaaaaagaagaagaagaaactttttatctgaggaatgtgagcccctttaaattatcaagcttggagaggcattggaatgaaactgcagtcacatcactcccccttgagtgattatcttgtaaagccacttgctatacgggctccagactaactgatgccaagcagccataaaataccatatgctggacaccacgactcatatcctatagttcaacagtgtataaccaataactaatccatgtcatctctgtaagccaatgaaaatttctatcaaagaactttgtatccatccacttcttcttacytttgcctttaaaaacctgcttgtaacaaaagctgattgagcactccctgagttaacttggaagtgtgtcctgggcagctgtgctcactttggctcaagtaaactcttta

SEQ ID NO: 659310 - DNA, 611 bp, Homo sapiens
aagcttaggcactttgggtgttttgagtcaaacgttgcattatcaaatattatttctctacatctctgatagttcaatatatttttaaaattaccttccttgtctcagagagaaaactctttctccttacattccaacaattgttctgtgaaagctcagtgttcactggagacaggataagggtttctgatagatcgacctggcttgtacccagcactgcaggctcttgcctgcactgctgggacctagggctggtagagctgtaactgcacagagaagactgcctgcttcttataggttggttgtcgctgtctggaagagtttagcgctgctctgcatcttctgcctcacctgaaatcctacgtgtatcctatgccgttcctatgaaaccagtttagaacaccaaacataccacccacagtttaaccctttttggcactcttagaagcccaagcacagagttcrgagaaatgtgagcacctgtatgaagagaagatgggtacaaaggaatgagtgggggttcctcttcaccatccctaaaactgtggcagtatttagcagcatcattgatgaggctggtctcagaactgtgcaaacatctgccctgcctg

SEQ ID NO: 659311 - DNA, 520 bp, Homo sapiens
gggcacatttgggataatggagaggggttagggcatggcaagcacagaaaacaacttgaaataagatactagatacaactgtgctgaaactccaccaaccagccccagcaagaagaatgtcattccggtgatgggtctccatagaayctatacattctaccacactagtgagtctcctctgtagtctgtagtcttccaccgtagacgacgttgcacaagttgctctctgaatttacaaatgccttttattttatgtgcagaacagctgtttctcttctgttgtgccctgctcttgctaaatatgcattttgaggaagaggcaatgttgaaagaagctaagaggggttgaaaattcatgtttcaaaccaaatggctcaagatggtgcacatctgtgttttcttctgaccaacttacatccctctttttccaataatggcaccccaattttgctttgagaagctatccacgccccttgaataatatgttggtggggttgttaaagagtttttctttcccaag

SEQ ID NO: 659312 - DNA, 594 bp, Homo sapiens
tattgggggtgggttcccccaatacttctgtatttttcagattctctttactgagcatatattatttttacaatcagaaaaaaatgaacggatttattttcaaatgccccccattgctcttctttaaatatacagaatatattctttacatataaaacactgctccttcagagccaagcaaaggatcactcattttccccttaactgagaacaagggctgcacatgaacaaaacgcctgctttaaaatgtacccatggcyggatgctgtggctcacacttataatcccagcactttgagaggctaaggtgggtggatcacttgagctcaggagtttgagaccagcctgggcaacatagcgaaactctgtctctataacaaatacaccaaaaattagctaggcatggtggtgtgtgcctgtagtctcagctatttgcaaggctgacgtgggaggatcactagagcccaggaggtcgaggctgcagtgacctgtgattacaccactgcactccagcctgggagacagagtgagaccctctctctcaaaaaaaaaaaaaaagtgtacccatatttgttttcatcaggtatggtaaga

SEQ ID NO: 659313 - DNA, 573 bp, Homo sapiens
cagtccagcctgggtgacagagcaagactcagtcccaaaaaataaaaccacctggacagagagaggaaaaagttgtcaattgtgttatatccaaattttatcatttctgaatttcagctagacagagggaagaacagcctccaatcaaaacactgcatgggagataacttggatgagaagaagaagcatgagccagtattgcacaggcctctttgtcatgtttgccttcccccatgatcctcttcctgcaatgccctccttcatatcagccatgggaacaactgataaggatcctgaactttgctgatgctcatgtaatcatgtgcaagctcacagagagaggggtacatgtgagaatgtatatgtgagagagccggtgtgttttcttaataatgggatcctactacgtacatttctaggtatcttgcttttctcacttaaaatatctcagctgagggtggcttgattccttacaggtttgtaattttagatgragtgtctatttcatcgaagctttatctatggaatgtgtggagcctgggttgaggatccagcactccagcaagtgcttct

SEQ ID NO: 659314 - DNA, 548 bp, Homo sapiens
taagtggaagaggggtgcaagtcaatggcatgtgcttctgcctatcagtgtgaatccagctgtgcatcaggacagcccacctgggaaatgggctgcctctgattgtcagggtgcagtcttatcaccaaggattaaagatggacaggatttagtggtctgaaggtttgcactctggatttccatgtcccaaggggacattaaagaactgatgctgtatttgaaagtccaagaagcatcaagccacaccatccaagaaggctggaataccaagggcaggagagaaagctgtgggctgatctggaaagagctggatttcccaggacyggaaggacaaagagtgataggttcctcatgcagagggagccttacctgttgacttctacccattaccccaggtatagcaagatctcaggggtaggtataagaaaaaaacctactagttagctgggctcattgactcatgcctgtaattccagcactttgggaggctgaggtgagaggatcacttggggccaggcgttcaaggccagcctatgcaacatgtcaag

SEQ ID NO: 659315 - DNA, 503 bp, Homo sapiens
agtcaggagctcatagataaaactaccatctccctgggacagagcccctggaggaaggggcagctgtgggcacagcttcagcagacttaaatattcctgcctgccagctctgaagagagcagtggatcctgacaaggagggttctcccagcacagcacttgagctctgctaagggacagactgcctcctcaagtgggttcctgacccctgtgcctcctgaccaggagagaccacccaacaggggttgacagacgcttcatacaggagggctctgggaggcatcaggctggtgcccctctgggatgaagcttccagaggatgaagcaggcagcaatctttgctgttctgctgcctccactggtgatatccaggaaaatatggtctggactggacctccagcaaactgcagcatacctgcagaagargggcctgactgttagaggaaaaactaacaatcagaaagcaataacatcaacatcaacatcaacatcaacatcaacatc

SEQ ID NO: 659316 - DNA, 548 bp, Homo sapiens
aaaatgttcatattcttgttaccaagagtgtatgtaccattctttgggaaacctgggtacaggtggtatttttaaggtccaattaaactaagttccaccagtccataattctaccaatggagtgatcrctctgatcttggagctttccaagtctcagtgccaggttaggattgaggctctctcctcatttcccaaagtcacagaacaattcttgctctcctttggagcatgacctcaaagttgtagggaaagaaatgggattatttttatttcaacatgacaagctctcccttggcaataattacccccaaactaaagccatgtgatactctatctgtgaatctctgattttttttaattgcaaatttttagctcaaagcttcatttccacccacaatcactgaagctacagtcagagttatagtgtcaagacagttgaatatatatctgaagtgaagaggggaatatgccttgtgcttagaatcaagggaccagtttctaggtctggtctgccagtaatttcttagtaatctcactgtggacaagtt

SEQ ID NO: 659317 - DNA, 555 bp, Homo sapiens
aacaacaccattaaaaaggttattaaggcaggaaagacaaaagattttttaaagaaaaggacattttggtattaatgatgagaaaaggagaaactttgagaaattatttcatgacctctaaggggacaaaaaggagcattgtggttggttctgtagtacatgtaaggggactcagaactaattaagcaactgtaaacaagggtgtggattaacaaacggatgtcaagcctggaagagggtctttagtggtgggctgcgtggatctaacacatttaacatcttgaagrcatggaagatacacttagtggatttgcaaataacaaaaataagagagccagcccaattgccaaggtcccttccagtgtgaaaccgtacccgcttatctaccatgcaggacagaatcacaatacccagcgacctcagaagtgtggggtgctgggcccatgctggtaagatagattggcttagttcttggccacatttatgtgaattgggacaaaatgtctttttgctttattattttatttctatatctttttacagttagaaaaacaa

SEQ ID NO: 659318 - DNA, 555 bp, Homo sapiens
aacaacaccattaaaaaggttattaaggcaggaaagacaaaagattttttaaagaaaaggacattttggtattaatgatgagaaaaggagaaactttgagaaattatttcatgacctctaaggggacaaaaaggagcattgtggttggttctgtagtacatgtaaggggactcagaactaattaagcaactgtaaacaagggtgtggattaacaaacggatgtcaagcctggaagagggtctttagtggtgggctgcgtggatctaacacatttaacatcttgaaggcatggaagatacacttagtggatttgcaaataacaaaaataagagagccagcccaattgccaaggtcccttccagtgtgaaaccgtacccgcttatctaccatgcaggacagaatcacaatacccagcgacctcagaagtgtggggtgctgggccsatgctggtaagatagattggcttagttcttggccacatttatgtgaattgggacaaaatgtctttttgctttattattttatttctatatctttttacagttagaaaaacaa

SEQ ID NO: 659319 - DNA, 611 bp, Homo sapiens
aaatttgaatgttaacataaagcaaaataaaagaaatgccaaatacatacaattttaaaactataacaacttcaaacttcaaaaagaaacttttatattattatgttatataatatttttatttttaaaggcatttttttcttgtgattaaaggtatgttttctcttaaaaacatgtatttctctacatttaaaaaaagattttttaacttaaaaaataaattttcttcctttttctattcctattttattttttttaatttttttagacttttggccatttttcttaactttatatagcactaaaatgacttataaaatactataattatataaattttgataggatgttagtggaaatttatatgctattctgttagtttattaaattaatgtttatttttatacaaacattaattattttcaaagtggctactaaaakgaataataagcaatcataaaataattatactaaattatatagataaataagggcagaaattgtatatttttatataattatttattttattttatttttttgagagggaatctctctctgtcaccctgtctggagtgcagtggcacgattttggctcactgaaaactcca

SEQ ID NO: 659320 - DNA, 446 bp, Homo sapiens
tcaccctccctgagcttccgcttccgcagggctgaggctccgtctgctgagcttgcaccctcaccctccctgagcttccgcttccgcttccgcaggactgaggcttcctctgctgagcttgtgccttcaccttccctgagcttccgctttggcagggctgaggcttcctctgstgagcttgtgcccttaccctccgtgagcttccgcaggctgagggctcctccgcggggctgagggttcctccgctgagcttgcgccttcatcctccgtgagcttccgcagggctgagagttcctctgctgagcttgcgccctcaccctccctgagcttctgaagggctgaggcttcctctgctgagctcgccccctcaccctccctgagcttccgcttccccagggctgcggcttcctctgctgagctcgcaccctcaccctccctgagcttcc

SEQ ID NO: 659321 - DNA, 600 bp, Homo sapiens
acgacaccaattggccagttatcattcaaattctctgttacttaatcctgccttttcctgacgtatgcaaatttgccctaaaaaattggacactttgttgcttactcattgtctttacacattttaaaatgttgctttaggccccaatccctaactacattttcaatgttttgcaagtggagtccatgtgttcttgatttacatgaagctcaaaataatggttatagtaactagtacttcataattaagcaaaaagctcttattgaaaaatgacagaactatacatagggatgacaacatggagagatatttcgtgagatcacaaacttatggtatagcagaagtagaacgctgagtagagactctgtgttccyaatcattatttctaccaccagctttctattttgatggtaataatgttcttatgtgggaaaccctacatatttgccaatgtttagttcattgacaaagaaatagaaagagcttcaagaacactcgaatctttaaaaaataaaatacctataattggccatacgaaataattggtacttgacatatactgagatcgttttattttgtgctagataaatgaagtcatag

SEQ ID NO: 659322 - DNA, 521 bp, Homo sapiens
ttgaatttccttgatgataaatgatgtcgaacacctttttatgtgattattgactattcatatagcttctttagcaaagctactgtttaaatctgttgccagttttgggaaaacctgtttgtcttaatattattaatctataaaagttttaaaatgatattttctgaaaacaacttctttatcagatatacataatagtgaatatatatatatatatatatatatatatatmtcttgtgatatatattgtgaatatttttatcctcaactgtgatagcctgtcaattttcctaggagtaactttcgaaaggcagacattttaaaatttgataaaattcactttatcgattttttattttatccttagttgtttagtaggttgtgtctagagaatgtgagcttacctaacccatggtcaaaaagatggtctcctatgttatcttctaaaatttttatagtttgaatttttacaatagatctatacattattttgaattaattttgtctatgatgtgaagttc

SEQ ID NO: 659323 - DNA, 533 bp, Homo sapiens
aacttctctttaattctctacccttcaattttactagggycactttgctttcatgtatgtttcaaatgcacttgcaatatcttttccttagtaagaatcctgtctgaatgaaatatttttcttttccagtccctgtccttttaacttgtttcttctattcactttcaaaccatctcttttcctatcaaccttcttagattaaaaataaaagttattcatcaatttcaatcagatcattttagtttcctatgctcttcagctaacattcagattgaacccaatttaagaaaatttgcatctcttctagttgaagaaatgtgcttaggggtttaaagtgattttgaagatatttcacttttgaaaatagatttcctacaaggtatgaaatccagtgaaacacatttagggcattaattttcggaaagtcagtatcaatctatttcctacaattcttgggtttttgtgtttttagaatattgatataaaagcaggaaatgaataagaaaatatccaagatcccaatcctgtgtttc

SEQ ID NO: 659324 - DNA, 592 bp, Homo sapiens
gtttattcaagtgcatgaggatggaccgcccagaaacaccaactccaaagggatggagtcggtgttgcaatgtagggaagttaagatttcatgtatatgggtggagacagaggagtttttggtgggattacattattcatacaaggttggcacatagttacagaaattaggttttaggcaatgtttcttttgagaagggtatattttaacatctttttgcagagggtatgatagtcacagattttctgtcatctggtttaagcaaagcaggacaacaaaagggaagttaatctttagcamgtgctattcattaaaaaggcgggaagtttttgtctctgattttgtttaattctctctagtcattgtacagaacaagaaaaataagaaagcaagttaatccatagtctgagaaccataaattgtaaccatatgtggctcagatcacagtcatctctatctaggcttaatttttttgggggggcgctgggaagcaggtcccaacagctttaaaactgtatttattttcacactttctctgcacagcttctcacactgtgagaggcttccttcccttttttttttttttttttta

SEQ ID NO: 659325 - DNA, 620 bp, Homo sapiens
aaaagtactgaaggatcacctagatcaatgaatccagagatgtaaaataatataccttaagcaaaaatcattgaataaatacctccatttctaaattagtcaatttcagctgcccccaaagtaagatttatgaaaactgtagatgttgccatttgtgccactgccttaaatctatttaatcctctactactatcagctgtgaagttaactctaccatcaaacaatgtgaaatcttggattttttaatacatcatgcataaaaatacagaaggaacaaatttattactatctattatgttccaagcaggggaaatatttaaaatgatcacactggtactawcatgacattgaccattcagaaaagatgctggtccttggatcatgagagtacatcctgactgaataacagatctggtcctagacagtttagtgttttgtactcaaatttattttcagtcatgtcttcatggtagacattgttttttccattttacaaatgaaaaccctaagacttaaagagataagtaacttatgcaagatcacatagcaaattagtagagctgggattcaaattagttttatttggctctaaattctatgccattttcagtgttctactg

SEQ ID NO: 659326 - DNA, 594 bp, Homo sapiens
tttggaagaacagatcattgtgctrattttggaatttcccccaagataagctacgtttctatgaatacttactaaacttttttcttccttattctatattaggacgtcttgcatggctggtatacttagttgggacagttgtaggaggaagattaacatataccagtacagatgagcatgatgctatggatggagaattatcctgtcggtaagtaagagctatgtaatttactgaaattcactaaatagttaaaaaaaattagttattgaactagtattatgagtgaagacattttgtatgtggccttttgaggaaggtattatttccctttttattggtgagaaaaccaaggctcaaaggttaaatgatttgtagaagtcaaatctctaataagtgatagactcaaaatattttgtacatgtttgtgcaaataatgtgataaagatttaggttgctttttattacttaggatgtgagcaagcacatacagttggtgtgtattggaaaggtggcaaaattgggtgacatacatccaatcagaaagtattaggtagtcagttacccatcgcaggttttgtcacctattggccaca

SEQ ID NO: 659327 - DNA, 489 bp, Homo sapiens
caactaaaaatacaagaaaaaaaaaatagccaggtgtggtggcacatgcctgtagtctcagctactcagtaggctgaggcaggagaactgctagaacctgggaggggggaggatgcagtaagtcaagatctcaccactgcactccagcctgggttacagagcaaaactctgtctcagaaaacaaacaaataaaaaataaataaataatgcaatttaaaaaagaagtccaatgctattctgatttcaaactacctgtagaacatctccttcctggcccaagttaatagaatcctctttttgtatccactgttctgaaatgtcctaacratgtagctttttggagtaattttcattcatttttctggatgcttgtttgtgaggagaagggtcttttatctgaaaactttttcttgtgctctgagaaggtctattaaattattgtgttttctgttctttccttaaaaacttccatgattttgatattgcacc

SEQ ID NO: 659328 - DNA, 569 bp, Homo sapiens
taaacagtaaacatttttaaaatgtggactctagaatcatccataggcttgagttctgttccactgtgtactaaatgcatggccttgggtaaattacttattacttctgtgtttggttttctcagatataatatgagggaaaaaagtacccgtttcatagagctttgtgagtttaagtgaaataataaatgtaaagcacttagaatagtgcctggcactagtaagccctcaataaatgttagccggtaatagtatagcaataaataatagttacagctatttccagctactagaggaattatatattagttatcatatatatagaaaggattacagatagatataaacatgagcagcaccattttaagagggccctggatattcctacttttggaggtccaattccgctttatatcaaatatacttaaaatgcaattataccccacattaaataaacattttatgtaactttaaagaaatgggtttttttwttggctatttgacatattttgtggacattgaattaaaaacattaattttgatttttttgttgtattctcctgagatca

SEQ ID NO: 659329 - DNA, 582 bp, Homo sapiens
gcccttgggtatgccctacttattttctagtgtcaactctttcgttgacagtttctctgtatttctgagaaagggatatcccagggagtcagaaagggaatcagccttacmatctctccagctactgacacttctcctctatagtgagccacagtgagggggaggccagtcagcagccatatggagtggggttctgcttccctgatccaaataggttgttttctctgtgtacaaactagacctttatagagcttcaagctgttctttactaaagagtcaagtgaacattcctgagtcacttggagtccataggcagagatcaggcattcagcttttggtctagtctctccccacctctaagcaagaggaaggcagaacctcacctcataagccatcagatgacaggctatctcaggagcaattctccgtttcttttacacaaaccaccctttagccctccgaataaagtttcagcccctagtttcttttgcatttcatagattttcttgcttaatatagccactggatgtacacatgtattctttctgcttttttgtctccatttgtctcttcagggagaga

SEQ ID NO: 659330 - DNA, 582 bp, Homo sapiens
gcccttgggtatgccctacttattttctagtgtcaactctttcgttgacagtttctctgtatttctgagaaagggatatcccagggagtcagaaagggaatcagccttacaatctctccagctactgacacttctcctctatagtgagccacagtgagggggaggccagtcagcagccatatggagtggggttctgcttccctgatccaaataggttgttttctctgtgtacaaactagacctttatagagcttcaagctgttctttactaaagagtcaagtgaacattcctgagtcacttggagtccataggcagagatcaggcattcagcttttggtctagtctctccccacctctaagcaagaggarggcagaacctcacctcataagccatcagatgacaggctatctcaggagcaattctccgtttcttttacacaaaccaccctttagccctccgaataaagtttcagcccctagtttcttttgcatttcatagattttcttgcttaatatagccactggatgtacacatgtattctttctgcttttttgtctccatttgtctcttcagggagaga

SEQ ID NO: 659331 - DNA, 531 bp, Homo sapiens
tcaagtaactcctcatttggccaaatctaacccagaacgcgcaagggaaggggattctaagaaacgaattccaacttaaccactgagatccaaaatctgctcaataaragtttgaaaaagaacacagaaaaaagaattgagaaaattatcactggagtgaaagaggggaaaagagagacacacgtcttcagattagaaggcacaacaaagacaaactcggttgtatttttcaaagacccacacctaaaacacttttgttaaattttgaaataccagtgataatcagaagctcataaatgcttccagaaaaacaaattatataaaaatatataatttgtttgaaggactttcactaaatgtcttatcacaaataccaaggaccataagacaaaatggcttggaagctagggttctacactccaagtgcaagggccaaggaggtcattttcacggcaaatatcaagatatcagtaagcttattttcaaaataccctttctgaagaagttgcatgagtggattttctaatataa

SEQ ID NO: 659332 - DNA, 570 bp, Homo sapiens
taactttatttcttaattgttaatatgttggggaaattatcaataagtatagaaaatgacaaagttattgtttctgaaaaactatgaaaaagaggatagccttacttatgcagagcctattaaaaagagagtactttttcttcttaaaatgcatagcttgaccagctccatttaacactgttttttaaaagacgtgttaatatcctaatggtataaatgaattcagtcatgactagttgagtcaaagagatttaaaaattatttgaactgttttatcaaatttctagctcattgtttagtgctagatattcacaaaacaaatagttaagttcctaagattattgttgcaaactgtgggaactaaaagtctttaattacattactttgaaagcaaaaagtgatttccatgcaaaatattttaaaggatttctacccaatgtcaaattttctcatctattcatttaataagaattgattaaatatcygttgtgtcttaaaaatcaatgacgaataacatcctaaacttcagcaagcatatggttgaacactaaataaagaacaaaaaccaag

SEQ ID NO: 659333 - DNA, 601 bp, Homo sapiens
agatgggatgggatgagataaaatgatgagatgaaatgatgagatgatgagatgaaatgatgaggtgaagtgatgcactgtcacgtgtgtgtctattctttttcccaaccaacaaaaattataattcattaattttaattttatttaacaatactcttaagagttgaaggaaaaatattatctacattatgggttacaatctaagtataaataatacataaatatattaaaacttacaaagaatatgttttggaatcgaatataccatgcttctgtgatgacagttatttcatgctggttgtcacaattttacrtgaaaaactaatgaaaaagtgtttttaactgtttctaaaaataagtttccaaaacagttttacattcgaaatatgaaaaagatgtctttgtgttccttaatctgatgagattttcacactctgcacatgataattgttagatttttattgtgttgataaattgtatatcaaataaaaaatgttattacctcttaaattaggatttttaggtgatataggcagaaaggaaggcaagtttttataactttgtctaaatgaactttctaaatgcctgagtatgaaaagat

SEQ ID NO: 659334 - DNA, 590 bp, Homo sapiens
ggtctactggctaagaaccttcctcagcctcacctttgcacattgcactttcagctctgtttgcaattttcctcctttagtgctgagggaatcccagtgttcratcctgaaatctataggttcctaatgggtggttaaaaaaaacctcagcgagagaagcagaaaatgtttcctcttcctgaaaaactgtagaaaggcaggcaccattctgggtgaggacatggtccttgcaaatgtctttgtgcttttctgtttgtttgtttttttttgagatgaagttttgctcttgttgccccgactggagtgcagtggtgtcatctctgctcattgcaacctccacctcctgggttcaagcagttctcctacctcagccttccgagtagctggaattacaggcacctgccaccacacctggctaattttttgtatttttagtagagatggggttttgccatgttggccatgttggtctcgaactcctgacctcaagtgagccacccgcttctgcctcccaaagggctgggattacaggagtgagccaccgcatccagcctgcaaacgtctttaaagacagcgtgtttcagaggctg

SEQ ID NO: 659335 - DNA, 504 bp, Homo sapiens
tttttttttaaaactagtttgactattagtcattttcccatctatcttcctttttctattaggcacaaatataatacatgagaatgtaataatctattctattttgaagggttctttttcacttgtttaaatggctagaaaacataagcattgatttctcttttcctgtttgcacagtagtatcacttattttcctctaacctatacttattggtacacaccctaagttatagtatctctcttctggagggagaataaatgggcagtacattgcttggaaaaatcaatggttatctatggatgtgctttggttaagaagcctatttaatgccttaattaaatgtaggccttcatgagtaaagcagccatattgaagagaaacaaaakgccacttaagtgcttgttactaatcattgcagttaatggattttttttacacctctaagaatgatgaattaatgatttaatatttttactacacttgaccttgtccaaaaggccaag

SEQ ID NO: 659336 - DNA, 589 bp, Homo sapiens
agcaagttgctaaacctctcattacctttcattacatagtctcatttgtgaaacagagcttacatttcagagttcaagtaacaaaatatttatatgtcttataatggatcctaccacacagaattgtcatgaatattgaatgaattaatatacatactatgaatratgcctagcataaacacaacataaaaatttaaacatctttattgttatatatacaactgagaagcttcaagattaaaacacgcaaatcacacttttaaaactttcttttatagagggaacaaagagaaagaaatgcctggaacagaaaaccaaaagcacgccaaggaatcatagcgagtagccaatttatattaattctgtcaacaaatatttgttgaatacacatgggttggatattcttctaggtactagggctgcagcagtcagtaaaaacaatctttcctctagaaggactttagagactagcagaggacatagcagttaattaaataatgcatccaagagtacacatttttatctttaaaaattgccacaaaggagagccacactggtgcaatgaacctaagttgaggggatttggctg

SEQ ID NO: 659337 - DNA, 574 bp, Homo sapiens
cgctttattcaaatttgcctcagcttttttatttctcaatgattaagattcatagcaacaagaaatatcacaaagccatttcacataattctttttaaaatgccttacacttgatcttgcataacagcttttaaatcttttttatatacatagcttgattaattattacaacattatgcaatgcagtaatacatcctgaaatttacactttatagatgagtaggctgaarttaaaggagttaaatgagaccaatgtccttattttctgttgagaaaaaatgtttatctagcattctgtcacacacaatcatttttacctggcctctacagagtgataaaaattgagacccttgaggaacccagaagcaactgacagaagtggattccttatcaacttagcagagagtaaacagtattcaagattgtcaatgtattttattttcccttaagtacaaatgggtactcaagacgtgataaaaatccagtatttgaataagcagaaaatgctagctcctgtcccccacacctcagacatacacaaaaaagttaagagtgcttatcttattattgaaaa

SEQ ID NO: 659338 - DNA, 386 bp, Homo sapiens
aactttaaccttaattatggcaatagttcactatcctgtacaatctgttttccacacagaagcttgagaaatattttacacacatttgtctgatcatatccaattacttttattagctctctctctctctttctgtctctctctctcatacacacacacacacacacatacttataatcctataatattctctggttcttcagagcataaaatccaaaagcaatgacatagcctacaaagccaggaataatctatgccttctctacctggaaattctctcttcctttcttttttcttttggagttttgttttgttttaagtatactttttattttggaatagttttggaattacagaaaatgtgcwaatgtagtacataggaatcc

SEQ ID NO: 659339 - DNA, 546 bp, Homo sapiens
gagtcctttccaaattcctgacccacaaagttgtgagcaaaataaattcattgccttaaactgctggtttgggggttgcttgttacacagcaacaatgtccagaacagacggcaactagtgttacaatataatcaatggaaacwtagcacactaacccaatgggcccgatccatgtgttggggtaatgtccgaattccttaccttcctgaggccagggcccaatccatgtgtcaggggtaatgtctggattccttaccttcccgaggcctacaggtagtcccgcaggtgctgttgacctcattttgcattcactcctctaacctccttttttaggtggcgtgtgacacgcttcaggatacccagaaataggttactgctgggaatcctaagggaatcttttggagttgaaagggtcctgagagaccatctcattttagagctaagatttaaagagccctaaggaggttcagggctagactgtggtcaggaggaagcctggcctgcaactcaagacaactatcagttacaccactttctagtcaata

SEQ ID NO: 659340 - DNA, 546 bp, Homo sapiens
gagtcctttccaaattcctgacccacaaagttgtgagcaaaataaattcattgccttaaactgctggtttgggggttgcttgttacacagcaacaatgtccagaacagacggcaactagtgttacaatataatcaatggaaacttagcacactaacccaatgggcccgatccatgtgttggggtaatgtccgrattccttaccttcctgaggccagggcccaatccatgtgtcaggggtaatgtctggattccttaccttcccgaggcctacaggtagtcccgcaggtgctgttgacctcattttgcattcactcctctaacctccttttttaggtggcgtgtgacacgcttcaggatacccagaaataggttactgctgggaatcctaagggaatcttttggagttgaaagggtcctgagagaccatctcattttagagctaagatttaaagagccctaaggaggttcagggctagactgtggtcaggaggaagcctggcctgcaactcaagacaactatcagttacaccactttctagtcaata

SEQ ID NO: 659341 - DNA, 596 bp, Homo sapiens
ttgaccattctgatatcttctctgtaaaatgctatttttaatgtatatatctttttattatggatttgtaggagtatgcgtaatatgttttagctataagactcttgttagataaattctttcaaaaaatttttttccaatctgtgacttattatttaaatgccatgaatgctggttcttgatgaagagaaatttgcaattttcataaagttcacttaagctttttaaatttctgttttcagattttgtgtctaaggattcttgtaaagaactccatatcttttaagaaaattggctatatacctaaaactattctactccccaagtatctctggctcaaataacttcaccgacaaattctgtaaactattgaaggaaatgtatcaattctacagaaacttttccataaatttgaagtacaaggaattttttttaaactcattcaatgaggttggcattaaaatgttaccaaaacctgatcagacaggaaaaagaaaagttcaaastgataacccttcatcaacatagatgcaaagattgcaaactgaatttcaacaaagacatcaaacaatagattaaaaaatacatcatgaaca

SEQ ID NO: 659342 - DNA, 596 bp, Homo sapiens
ttgaccattctgatatcttctctgtaaaatgctatttttaatgtatatatctttttattatggatttgtaggagtatgcgtaatatgttttagctataagactcttgttagataaattctttcaaaaaatttttttccaatctgtgacttattatttaaatgccatgaatgctggttcttgatgaagagaaatttgcaattttcataaagttcacttaagctttttaaatttctgttttcagattttgtgtctaaggattcttgtaaagaactccatatcttttaagaaaattggctatatacctaaaactattctactccccaagtatctctggctcaaataacttcaccgacaaattctgtaaactattgaaggaaatgtatcaattctacagaaacttttccataaatttgaagtacaaggaattttttttaaactcattcaatgaggttggcattaaaatgttaccaaaacctgatcagacaggaaaaagaaaagttcaaagtgataacccttcatcaacatagatgcaaagattrcaaactgaatttcaacaaagacatcaaacaatagattaaaaaatacatcatgaaca

SEQ ID NO: 659343 - DNA, 434 bp, Homo sapiens
gtaacctttcgaggaaggaacactaggttgggggtaaactgcaacatcctgaatctgtcagaaaacagctctgttaacagctcttcacatccctgagtctcaaatttctcatttatcaacgagcccactggagtaaataattcagaaggctccatccaagctctgatattctgaaatacaattttttcttgcttgcatttttgaaaaaattctgtgctagttacaaaaaacaaatgtttattgtgaaaaacttggaaagtacaaaaaaagaagaaaaaaaatccataatccttacacaagtacaacatagttaacttttgaatgagtaaaagagaaagacagacaaaaacaccaacaaagcgtctgtcagtttctttgcttttcartatcaaaacacgaagaaaatatgaataaccatttaataaccatttggc

SEQ ID NO: 659344 - DNA, 602 bp, Homo sapiens
tattatgtgcccatccctgtgccaaacaccaaagatatgatgacaaacaagatggacacagttcctgctctgagtctcatgaaactattccatatagacagaggacaggtcatgaacaaaccaaaagtacagaggaaagaggaagaatacctgttttttatatgaaaaggrtgggtgagtcagaaaagcttcagcaaagagatgatggctgagtggagtcatgaagaatgagtctctgtttagcagcatacaatggggacagggaggagcatggggaattaatctcgaacttggagaaaagcagtccatcagagagaagatcaccaccagaccgggctggtggttatgactggaagacatggtgcttgacagaccacaagagtgcgtgagaccaaaataagaggcccgctgaaaaaatcctagtactccatgccaggagcttacaataaatcatcagagcaagcaagcaagagtgatggaagagccaaacagagacatgactgacttagtcaggattttggaaacatcaagaggtgttgtgtgacggagttctgaaggcaggcactagccagatactggaaggtgatgtagggcaaagcaag

SEQ ID NO: 659345 - DNA, 500 bp, Homo sapiens
cctactgttttctgacattaattcatcatgtcagctgggcttacagattttccttctaagctaattacccaggaaagctgcaggaacacaacatattattattgtttttgtctcgtgctcatttcacagcagatggagtaagaaatatgttgcctgacacatggttattaaagaagttcgctggtcagtcacaaccaatcagctttttgtttacaaggctgaacatgcactagaagtttacattcaagkagttgtcttaacagtttacattgtcttcaactaaaacttgaggctgaattactttttaatttcagattttaaaacaaataatctcatttaaattcctgaaaactatatgtcaagaaaaaatgatttgttcatttttctatttattcaaaaactttcacagagtgtcaggcattgttctgaatgctcaggggtattgtgtgttattgaatattggtagaatattgtattctatcaaatcaaaggtagaggta

SEQ ID NO: 659346 - DNA, 610 bp, Homo sapiens
tcactatgttggccaggctggtcttgaactcctgaccttgatctgcccgccttggtctcccaaagtgctgggattacaggcttgagccaccgctcctggccccacctsgcaatgccacaaaacctttgagctctagatgccacaagttacttagaggacgaagatagctcctgggctcagaaacatacagaagtttaacaccagtggcagggtatagcgataagtaataaagaataaagaatactgcgggcaattacatgaaatttaggtgatttttctgttttctacctgcatggctctggtctgggatctcaagctgaaataccagcagagtccaggcaagtaacataattgagtgaagggatgggtaaaaacaaatggtctccttttcttttttaggagatggaatcttggtttgttgcccaggctggtctcaaactcctgggctcaaacaatcctcctgcctaagcctcccaaagtgctgggattacaggcatgagccactgtgcccagcctttttttttttttttttttttttttttttttttttttttttaaaaaaaaaccttttattttaggtttaggggtacctgtacaggtttgttatata

SEQ ID NO: 659347 - DNA, 460 bp, Homo sapiens
acatgaacttggagcagtgagggcacaggcaagaccatctccttatactgactgtctagacaataatggctatgcatggggggagtgggagacacatcattagtaaggattttcattttataagatttcataagctgtcaaatcagagcttgggctgccaaggctatggctgtgtacatttgaagtatagctctgatccaggaaagtgctggattatttcatctgggattagaatgtactttgcattcatctttctagtatctcaaaagatgatctrggaaaaaagatgagataaaatcttcaagtgttattcaagaaaactgagatactgtagaaacaactatggtatttcagggcacaaatattcattttgctgctattggaaataattaggtaaaactaacctatacctaggtgtgtgcaaaattaagtgacacaatacacaagccacacaggtaga

SEQ ID NO: 659348 - DNA, 614 bp, Homo sapiens
tcacctagtttcccctaatgttaccatcttatattacatggtacacttgctaaaactaaaaaaaaaaaaaaaaaaaaagggtacattatgattaactagcctttattcagatttcaccagtttttccactaacattctttttctgttccaattcaggaaatcacattgcattttgtgatttataatttttaagtttaagctctatttttacaaaagttaacatgtccacaattgaaaaaggaaatgatcatacatgacttatgaaaggcaatcttctgcccaaaccctccttgcttctaattttctccttccaacagcaaacaatttcaactttctcacttttttcaccctctctccctcggtccagccacactgktctctgaacattcctcaagtatgccaagcctattcacatttaaggccaaatctttgctcaagttttctctttgtcatgtcttcttcccaataaagtctacccagacagaccactctatttaaaattgtggagacttctggttctgaaatggcagaaccagaaacgagtgtagaaacaagctggtgtagaaacaagctggcttcactcaccccaaagaaaaccaagatcaaatatacag

SEQ ID NO: 659349 - DNA, 555 bp, Homo sapiens
aataacctatagcaaacatcataatgaaagaataagtgctttcctctgaggataagaacaagacaagtatgttcactatcactgcttctattcaacattgtactaaaggttctaaccagtgcagtagtgcaaagaaaaaagtggcattcagataggaaagaagtaaaactcyctttcttcacagatgatgtggtcatctatgcagaatatctgatagaagcaacaaataagctactagaaccaataattgagtttagtgaagttgcaggatacaatctcaagatacaaaaacctattatatatctatatgatgccaataaacaaccagaaattgaaattaataaacaataccattcacaataacatcaaaaatattaaatacttagagataaatctggcaaaagatgtgaaaaacttatactatgaaaattactaactactgccaagagaagttaaataccaaaataggccaggcatggtggctcatgcctgtaaacccagcactttgggagaccgaggcaggtggattacttgaagtcaggagttcaagaccag

SEQ ID NO: 659350 - DNA, 598 bp, Homo sapiens
gttatttatgaagacatttgcaaaatgtaaaatgctattctgtgaaaggacagcttctctttgaatcagcttgcttatttttgtttcagtgaacatgtgtgaattgaccgagtggaaccgaggcttcagcactgggtgaatgggtttgggactaaggctgtcaccaaatcaaagagaaatgacacccagtgagccatgggcaaagtatgcatatggagctgactttgaaacctycacagttgttaagggaatttgaggttaaagtcatgttttttttaaggaagcacctatttggtagaaagagcttcatgatcctcatgggcaaaccctaaactgaaacaaaatctgctcctttctttttcttattgtattttattttactttaatttattttttggagacagagtctcattctgctgcccaggctggggtgcagtggcgtgatctttgctcattgcaacctctgcctcccgggttcaagcaattctcgtgcctcagcctcctgagtagctgggactgcaggggtgcgccaccatgcttggctaattttttgtgttttttggtagagatggggtttcactatgttggccaggctggt

SEQ ID NO: 659351 - DNA, 598 bp, Homo sapiens
gttatttatgaagacatttgcaaaatgtaaaatgctattctgtgaaaggacagcttctctttgaatcagcttgcttatttttgtttcagtgaacatgtgtgaattgaccgagtggaaccgaggcttcagcactgggtgaatgggtttgggactaaggctgtcaccaaatcaaagagaaatgacacccagtgagccatgggcaaagtatgcatatggagctgactttgaaaccttcacagttgttaagggaatttgaggttaaagtcatgttttttttaaggaagcacctatttggtagaaagagcttcatgatcctcatgggcaaaccctaaactgaaacaaaatctgctcctttctttttcttattgtattttattttactttaatttattttttggagacagagtctcattctgctgcccaggctggggtgcagtggcgtgatctttgctcattgcaacctctgcctcccgggttcaagcaattctcgtgcctcagcctcctgagtagctgggactgcaggggtgcgccaccatgcttggctaattttttgkgttttttggtagagatggggtttcactatgttggccaggctggt

SEQ ID NO: 659352 - DNA, 621 bp, Homo sapiens
aataacaggaggagatgaattgttggaatggatatttacagggatatttacactctgtatacatatagagatagatgaggatgtagatatacatacaaatatattttgtatatacattacatttgtccaatatcagacttttgggatacatttatttatttttaattgacaagtaataatgtatattcatggggtataatgtgatatgtttgtctatatataccttgtagaaaggttaaatctagataattaacatatccatcacttaccaacttatcatttctgtatgtggtgggaacgttaaaatatctattcttgccaggcaaggtggcacacttgtaatcccagctacttgggaggctaaggtggraggatcacttgaggccaggggtttgaggctgcagagcattaagattatgcctgtgaatagccattgcacttcagcctgggcatcatagcaatatcccatctctttaaaacataatctatcctttaagcaattttgaaataggcaatgcattattactggccatggtcaccatgcactgcaataaattactaagacttacacctccagcctaactgaaactttgtaccctttgatcaacatctccccttacc

SEQ ID NO: 659353 - DNA, 607 bp, Homo sapiens
gcagcaggaccttctagtgtgtccctggatcaatgggttttggagtttttagaacatgattttaataatcacccaaattgataagtctcagagagacttattcatcttaatcaaaactaaaagtacacaagcaagaaacaaacatgactggaattctcctatcagctcattaattgtttttcttctttgtaggcaagatatgagaaatgaaattaatatccaagtttgcttactaagtaaaatcagaacattcctggctgcagtggttttaaactgtggcttcttctctygagctttttatctttctttatgttagataaaggaagactgaacctactatttctcagagaaataaaacaatctcttattatatctgtcaactactgtaagatgttgtcaaatcttcaacttttcaaaaaaataaagttaagtatctctcatatcctaggcactaagtgatatggtttggctgtgtccccacccaaatctcatcttgattgttgctcccgtaatccccatgtgtcaagggtgaaccaggtggagaaaattgacacatgggggtagtagtttcccccatgctgttctcatgataatgagttagttctca

SEQ ID NO: 659354 - DNA, 550 bp, Homo sapiens
tcccaaaacacaaactttctttctcctattctctttcaagataatgataatactaagaaaattttaaaatcagctgattttatgaggtatggacatttcatctcaaaagagatgcaggtatacctagattcactcaaccaacccatgataattttgtataagtttccttctcagtctytcttcatttcattaaacccaccaatgtacattaaatagctacacatttggaagcctcttgaaataggtggttagttcacttattcagaatttcaacaaatatttatcaagcacctgtttgttgacaatttccacgtgctggagagtggactctcaaaagagtatgtagcacaggactcagcctccccaagacttttatattcaaaaggcattgcttctggtaagtagaaaacacagttattctcagaactaaaggactccctactgtctatctgagtattgtcaatagctacccagttcagtcagaaccagattctccaactgtacctaaacaaattgccaagaagtgctaaggcctcccccaaaaaagcct

SEQ ID NO: 659355 - DNA, 604 bp, Homo sapiens
tttgtaattaaaactataaaacactgatgaaataaattgaagaggacaccaaaaaatgaaaaaatattccatgaaaaacctgaaaaagaaataaaaaagtaatcccatttataatagccacaattaaaattaaatatctaggaattaatgaaagaagtgaaagatctttgtaattaaaactataaaacactggttgggtgcagtggctcatgcctgtaatcccagcattttggaaggcaaaggcaggcagatcacttcaggtcaggagtttgagactagcctggccaacatggcgaaaccctgtctctagtaaaaatacaaaamttagctgggtgtgatggcaggcgcctgtaatcccagctactcaggaggctgaggcaggagaatcacttgaacccgagaggcagaggttgcagtgagccaagatcgcaccactgcactctagcctgggcgacagagggagactccatctcaaaaacaaacaaacaaagaaacacaaaaactataaaacactgatgaaagaaattgaagaggacaccaaaaaatgaaaaaatattccatgttcatggattggaaaaatcaatattgttaaaatttccatatt

SEQ ID NO: 659356 - DNA, 607 bp, Homo sapiens
gtttctatggtcattctaatgataaccacagagtaaattaaaagtccaagggaggtctgtcttcagacacagcttggccaagtacaacaaaggctgtctctttccatctcttagttctggtttgtttctctaactccttcatatttcctctctttccctctctgctagggtaaataatttggagttagattctaaattagaatctcatacccatcactaagtagctgagatttgaggcaagatatttaatctgtcaatgtcttagatttctcatccataaatgagaataataagagttcttccaacatatattttttgtgaaaattaacaatgtatagtctttggcaatgtggctgacacatatttccacaaagggaggaatgtgagggagttaggaatatatatccaacayaggaccaagagtcttgtccactcctccctttaccttctatattgtccctctgttttaccagtttcttctgcttctcatagaaattcccaaactgacttcctctttttttttcactatgtttattcttagccaatccagaacatgctgacttttacattcagaaaatataaacgctataatttttaaggaacacaa

SEQ ID NO: 659357 - DNA, 567 bp, Homo sapiens
tcccactaaaatacataagaagattccgtgagaacaaataataagaaacataaaaacttacagccgttccttgaatcagaagctaagaatttttactctgcatcagagtaggggataaaaatgaaaataactagcccttaaaaattcagagtgacagacacacgttctaaagatggtcattccaacatatcccatcccctgtgatcttacaamactgacactccttcatgaacatgggcctccttagttatgtactattaacaatatacagaggaaatcactgttggacttccatggctaggttagaaaagtcagtactacttccacctctctgtctctctctctctgtaccttgcccttggtactcagacactgtatacagggaaacccaagccacacagtaagtccactgttaggttttctagccaacaatcccagctaaggtctaaaccagcagccaggactgctggcaatgtaacagtaactactagatgtgtaaatgaggaggacttctgatgattccagctctcagactttgagatgccccagctggtgctgagtggagca

SEQ ID NO: 659358 - DNA, 529 bp, Homo sapiens
gaaaatcaatatacctatcataacacctcagcacacatggatatgtttacttatttattgtttgccttcccccagttaaaatgtaatgtccatgatattaagggttttgtctgttttgtttcctgatggtctccagcaactagaatagtgcctggcaagaggaggtactaaatcaatctttgctgactgactgagtgaatgatgtatgccatcaaattcacttcccaatatcccattacatgttgatacctgccatcaaattctaggtggtacttctgggtctgggactaatgacattattgtcatctagatactcaaataagcccttacaaaatggacagtggggtgttttgtatggccttttgatctgaactacacagctatgttcactaaaggggaactatgttagcatgcctcaacttacatcatttatggtycatacaatttttcttcaagtttttaacccatttttctttaggttttgatcaattattctattttacattatgatatacacttcacaacaatg

SEQ ID NO: 659359 - DNA, 478 bp, Homo sapiens
caatggttttatgagcccagttttctgatttactgcttgtatggtcaagccaagaagtgacatgctttttcagagactaaaatggtgttgatgcttgaaactacaagttccatggagcaaggctgaaataatttatcaaattagctagatatcccattaagatamcctgtcagattaaaaaaaatatgttgttgatgcttggtttgtgcatctatgttgaccagagtggcctacggtaggagggacagcagatgttaaaatgcctattccttgaaatgtaacatacggctgagcttcagagccttaaaagaataacagatctgaaataattcatggcaatggaattactgatatttaaacagatgtcaccttttttagcaaatggaaattgaggtacagatggtgagggctggtatgttttagagtagccattgtaaatgaaaaatgtacatttggaaaattaaatatcacaaaatat

SEQ ID NO: 659360 - DNA, 629 bp, Homo sapiens
agtccaagtccaaagtctcatctgagacacagcaagtccctttgcctatgggcctgtaaaatcaaaagcaaattcgttaccttttagatacaatgggggtacaggcatcgggtaaaaattcccattccacatgggataaattggccaaaacaaagaaactacaggccccatgcaagtccaaaatccagtgggacagtcaagtcttaaagctccaaaatgatctcctttgactccatgtctcacatccaggtcatgctgattattgatcatgacataagcagtgggttcccatggtcttgggcagcctgcccctgtggctttgcagggtacagccccactcctgtctgctttcawgagctgtcattgagcctctgcatcttttccaggcaaacggtgcaagctgtcagtggatctaccattctggggtctgaaggatggtggatctcttctcacagcttcattaggcaatgccccagtgggggctctgtgtgtgggggggccctaccccacatttaccttctgcactgccataacagaggctttccatcagggccctgccctgaagcaaacttctgcctgatatttaggctttttcataaatcctctgaaatctaggcagaggtttccaa

SEQ ID NO: 659361 - DNA, 482 bp, Homo sapiens
cttggccaaaaataacgtgctccaagtcatgaaaaatagcacacatgcacaattaactacagagttacacaagatggtgtcttttcattcgattttatttgaactcttattcttctcttttatgctctgtatccttgttaactcttccattttttcctcatcctatgaggtactttaaacattttattcaataactcttaaggcaatttttacaattctattcatatataaaactgtcataagcatgttttgtgagtgaaaaattctaatttgtaatgcatatcaagtgaaaagcctcagttcagcactcgtcatatccaaaawctgtgttatatgataatgtaaaagaaatattttcacacatgtagctcaaatgagattcttagttacatgtttcttttttttcttttcttttcttttcttttttttttttttgagacgtagtctcgctctgttgcctaggctggagtgcagtggcgcaa

SEQ ID NO: 659362 - DNA, 476 bp, Homo sapiens
aatacgcccattctataacacagagggaaaaagcatactgaatataaccttaggaactagtaaaaatataagaaaaaaataacatttacattattagaggtccagaatgaaaakaaaaaaagttggtctaaaaaagcactcaaataatgattaaaatttttcccaaatggcaagagacacaaaacccacagattcaaaaaactgaatgaaccccaaagaaattcactcattatagtcatagagtgaaaaatataaagatagaaaaatacctgaaagtggtgacagagtagtaacaccttacctatagataaaaagtgattctaattacagtggatttgttcctggaaattgtaaagaccagaaggaagtattacatttctcaagtgctaaaaaatgtcaaaccagaattctgtgtcctgtaataatatcattctgaattaaagaaaaaaatcaaaatattatgagacaaaagtata

SEQ ID NO: 659363 - DNA, 537 bp, Homo sapiens
gtggtataacttattgcaaatcagacaagacagtccagcccaaaaaagaaatcatggaatgagttatgtactggctgcaatggggaagtcagaaatgtggagttaagagacaaaaaaaaaaaaaaaaagaaagaaactacctaatttactggttaccaagaaaagtatagaagaagaaaacacagaagttttgtaaaaataacaatgtgctttgcgagagatgcgttctaaatttaaaagtgtaattgaaaatttaagtataattttacaatracaatgaatagcaagactgtcataatgtatttacagaccagataatcaaaatatataagtgtaattttaccaacaataccaactgtatgcatacatcaattttttctattttcaaaactgaaacaatgttaatgaactagttttactcagagcagtctgacatcaaatacatggtctcttttccaacactacatttccaattctctgacactgcctgggtgacctacaattcaattcaattctgacattatctatttgaaatta

SEQ ID NO: 659364 - DNA, 568 bp, Homo sapiens
tgtaaagtcaagactgaagctggcaagctaacaagatctcagttttgggacacactttggatctccaaaggaaaagggatttgtgtcagtttttgtcctccaggaagcagacaccaagacagaattagaagtacaagaggtttgttgtagaaaatatctgtgaaatataagggaagaggtcacagaaatagttagaactagttagaccatgccacaggtttggacactgtgaaaggagaggaggcagttgggaggatttgtggaagaacctcaaactgcaatgcagtttggagaaagtctagaccagcctgatggggagctttggtgcaaagattgccagttagaggagtcttgtgttgggcaggaatctcccagctccagtagccctgctgatctcagtcattggcygggagtagcctgggaagagggtggcctcagagagaacactgggatggatcccaaagatgcagcagctgaaggtggtccgctaactactttccttgcagcaggttctctcttgaaatatttgagtagtgtaccaccgtagaggccgcagaaggccatagga

SEQ ID NO: 659365 - DNA, 532 bp, Homo sapiens
acctatctagtactgtgcttattacctgggtggcaaaataatgtgtacaccaaacccccatgatgtgtaatctacctaacaaatcagcayatgtaccccgaaactaaaataaaagttaaaaaataataacaataatcaccctttaaacctatctttcaacatttaaagtttgcaaaggcaaagttttattcacctatggaacatggtttactaactgagcaactctgggcaagtactctcttggcctcttaagtggggataataacagggcatgcctccaaatcttcctgtgaacattaagtgaatggatacgtactggacactcagaaaaatgcttgggttgtagtgatatttaagtgccattataatggcagcattgtatgaacagtacatgtgaagaaatatttttaaaaaatctaatcattgtatgatataactagaaattttatttaagtacttaaagtaagaatatttctatttaaaattctagaggcagtgaaaataacattaaaaatgaaaataaagacatttt

SEQ ID NO: 659366 - DNA, 553 bp, Homo sapiens
caagagttcctgtaactccacatccttgccagcattggtgctgtcagtgttctgaactttgaccaatctaataggtatgtagccrtatctcgttgttttaatttgcatttctctgatatacattagggatcatctgttcatatggttacccactgccttatattttcttttgtaaaatgtctgtgaaggtatttggcccatttttttaatcaaggcatttgttttcttattgtggagttctttgtatattttggataacagtcctttatcaggtgtgtcttttgcaaatattttctcccattctgtggcttgcattctcattcttttggcattacctttcactgatcagaagtttttaattttaataaaatttagcttatcaattatataatatccaggttatttctttcatgcttttgactgcatatataaattcatcttcacacccaagatcatctaaatttcttctgttaccttctcgaagttttacaggtttgtgttttacatttaggtctgtaatttagtttgagttaatttttgtaaagggtgtaag

SEQ ID NO: 659367 - DNA, 629 bp, Homo sapiens
cctgtgagatatactaaaatcatagaagcacaaatcctctcaaagacagtgtttctgatagcaccccttccgtatagtttagaatgaaaagccccttctgggcagggagtccagcatccaggtaatgcttagtggcaccaatgctctagaataaaaagtgctaggaggcactgcagaattttcactcactaaatcccagtcccagagggaacacaggcttttcctagaatgacaaacatctgctttagggactcttagaggaaaaaggcagctgcatataagacgtaagtggttccaagtggctctttcattctccaatatccaatctcagtgacctttatagtatctgaatttatgatcaggtctttagctatacyctgagttcatttccccttatcttgctttactgttgacttgtctgacccaaactttctatttgtgaaagaaaaagacacagtcttagattcacagggcctagctttgagctggctcaattgtgtcctcagtctggcactttgaacgagaccttgaactgttcatgacttccatctcctcatcattaacaggccccataagattgatgtcgttgggctgtaagtgtttagcgaaaatgtctatgaattatggac

SEQ ID NO: 659368 - DNA, 564 bp, Homo sapiens
cagtttaactattatgtaagtacttgtttcttttmtcctcttatcatacaaggagtgctttttaaaaattttatttaaccagtttgaagtttactgagtgttttagtctgtttttgcattgctataaaaaatacccaaggctggataacttataaagaaaagaggcttcattgactcatggtctttcagtctgtacacaaagcatggttccggcatctgcctgggttctggtgaggccttggagattttacttattgccaaaggtaaagtaggagctagcatgtcacatggcgagagggggagcaagatagaaaaaggggaggtcttagactctcttaaagaatcagatcttgcatgaactaactgagcaataactcactcatcaccaagggaatggctataagccattcataagggatctacccccatgacccaagtatctcctactaggtcccacatttcaacatgagatttggagggttcaagcatccaaactatataattccacccctgtgctacccccaagatctcatgttctcctcactattcaaaatacaataatct

SEQ ID NO: 659369 - DNA, 424 bp, Homo sapiens
aggaaacaatcaacaaagtgaagagacaacccacagaatgggagaaaatatttgcaaactacccctctgacaagggattcatcaccagactatataaggagctcaaataactctataggaaaaaatctaataatccaatttaaaaaaatgggcaaaagatttgaatagacatatctcagaagatgtacaaatggcaaacaggcataygaaaaggtgctcaacatcactgatcagagaaatgcaaatcaaaactataatgagatatcatctcacccccgttaaaatggcttctatccaaaagacaggcaataacaaatgctggcaaggatgtggagaaaagggaatgctcataccttgttggtgggaatctaaattagtacaacagtatgaagaaaagtttggaggttcctaaaaaactaaaaat

SEQ ID NO: 659370 - DNA, 592 bp, Homo sapiens
ctggcttaaatacagtaaatatgaaccctattaaagtttagccttatgggctttttcatatatatgttaattaaataaaatgatatttttgaagaaaatggttctttggggcctagattaaaacataaaaatgaaataaaaattttaagaagtacagtcttactataattattttaatggaaattcaagaagtaagcctttatttttagacgattttcgaaaacttggattttactgcgcatacttttaaaaattttattagcattcaatttcctttgtaatgcccttttgctaatgatgcattgatattaatctttaagatattgatgcttctttaagcataataattataattactcaaatattcagacaccattttaaaagcaatactaaactcattcatgttgtaaattattgttctcakttttaggaagctaacatgatatttctcacttgaaatgacttatttcattgattttatgttattttaaaggctcttcccctgctaaattcttgaaaatatttattagctttgttatcatgggtttatatctgagatcttcaaactgtttagtgcacaatcatatatgat

SEQ ID NO: 659371 - DNA, 592 bp, Homo sapiens
ctggcttaaatacagtaaatatgaaccctattaaagtttagccttatgggctttttcatatatatgttaattaaataaaatgatatttttgaagaaaatggttctttggggcctagattaaaacataaaaatgaaataaaaattttaagaagtacagtcttactataattattttaatggaaattcaagaagtaagcctttatttttagacgattttcgaaaacttggattttactgcgcatacttttaaaaattttattagcattcaatttcctttgtaatgcccttttgctaatgatgcattgatattaatctttaagatattgatgcttctttaagcataataattataattactcaaatattcagacaccattttaaaagcaatactaaactcattcatgttgtaaattattgttctcatttttaggaagctaacatgatatttctcacttgaaatgacttrtttcattgattttatgttattttaaaggctcttcccctgctaaattcttgaaaatatttattagctttgttatcatgggtttatatctgagatcttcaaactgtttagtgcacaatcatatatgat

SEQ ID NO: 659372 - DNA, 620 bp, Homo sapiens
ggatgaattagtgaacagatagatggataagacaatcatagatagacggattaacgaatgggtggatggatgactatcctaggatgacaactgagtcagtctcagaaaatctagaaaactggaccaccactaggtctaatacagacartttctaagtcaaccaagataaattgtgacatctttctgaaaatctttgagcttaatatctccatcccccaaattcaggatgatggtgtcccctgggaatatgtaacatttaatttcttaaaaatacatctgaaaacaagaatggcaaaatattaaattttggtcaggactggggattgttacacaattttttatcatgttattttttgactttctttttttacatttgtggcattttacaataaaaaaggacaaatcagattccccattcagatactgagagttgagaaattgtcccaggaaactgtccctgggcaagaggacagctgaaatgaagaagtctgggaccaagtttacagggtttgggctacgggaacaggcaacctaccattttcaatgtcgtctccaagagctcctcttccgtcttctgtcgcaggcagtgaaccatgacagcagaggtggtggttttgcac

SEQ ID NO: 659373 - DNA, 462 bp, Homo sapiens
agacgtgacccagtagggtactttttctatattctggcactcttaataataaaccgattcatgtaattcatccaatcttttatcaaacaatcatttaacctctactatgtgtcctatgcacagtagatatagyagggaaaaagaagacaaagtgtttgccttcataaatttatattgcagtgggaaaaagtagaaaagttacatgaatttaaaaatatatatttttttatttccagctacaaagaaatgaaacacatgaatgaaacagcaagtgaccagtgactagatgggtagaggacaacattagtgtggttatagaaaatgttgctaaagaagtaaaacttgagctgagatctaattgatgaaaagaaaacacccatgccacgatgcaaaatacgtggcttcttagaggtgaaagaagaaccaacaagttcaaaagcccttcaataataatacctctgc

SEQ ID NO: 659374 - DNA, 591 bp, Homo sapiens
aggaggctgttcccgtgttgaaaaaactatctcttactcaacttcacattctactctccttatacagcatgctcaaaatcctgcccaattcatcaggtcccaactcctactggtatatgtcagctaagtcccatagcttcttccaggtacagagcttttccttccatagtacaccccgcactttcctagccaggttatgttstgactcatcttggcaattgatccaatttccactagcagaggtagaattgatgaaagtacatcatttcatcaaactccactctcaagaccccatgctttccctgtgctggcccagactttgacacacagacttgctgggagtagaatttcaacatatcttctctgaagctttgctactcttctaattaagtcctgagcctgatccttagctttttctgccttacagtaacagaagtgagagtttctttatgtgcttccaaggatatctcctgaatttcacaatttacttttgattgatgattaattactctcagtttttctttgtctttctctaattcatcaatggcccccatcagcagccatatcttttcatggcccttattagaattt

SEQ ID NO: 659375 - DNA, 571 bp, Homo sapiens
aagctcacttcacttctgatgagttcttccttcagggccctagatatttcttgctagagacctaagtctgaattatctccatccatcagcatggcttaaaataaggattggtgaacttattctgtaataggctagatagcaaatattttaggccctataggtcatttgagttatttggtttctgttgcaactactcacctctaccatcacagctagaaagcagccataaacatagacaatataaacaaatgagcatggctatgattcaatacaactttacttatgaacaccaatatttgaatttcatagaattttcacgtcacaaaatattcttcttttaatttttttcagccattgaaagtataagttctcctattcaagtaggtgtagttagaaataaacaaaataaagtcattcttagttcactggtcttacaaaaacaggaggcagccagatttggcccttgggctatagcttgctcacttctgcaatactaatttgttgaacttaaaaagaaataggrggtaaatctggcaagatggtggagtagaaaataccaggaatctatctc

SEQ ID NO: 659376 - DNA, 533 bp, Homo sapiens
gccatccatgcctggcatcacagggatccatccagagggcagccagagccagaggtgcaaggggtaaaactctacagggagaagaaaatctctagctgaagtttgtaacaatttgaatggggtgagaagcctcctggccagaactcaggggagggcacacatctggcgtgcagactccacaggtggagtagaaccaatccctttcattcacagctgggaggtgggtagcctggggcagattttcaagctcatcttgccctccaactgaaaatggactcaggctgttagagggtgggagacacagtgagagtgagactagccatttggtttgggtttgcgtggaagcagagtgaggcctgtgactgctggctttcccccacttccctgacaacctgcatgactcagcagaggaagccataatcctcctaggtgcacaactccagtgacctgggaatctcacycccatcccccatagcagccctagcaagactcacccaaggagagtctgagctcagacacacctagccttgccc

SEQ ID NO: 659377 - DNA, 526 bp, Homo sapiens
taatattcctctcaaccagaagatggtgtgtgttatgaatagtaacagctctgttataggcctggtgaattgcacagcctcttacataagatttaaactgtaagtctccaagcaggtgccaatgtattggatatcgccccaaccggaaagcctggccagcatggaatacctgttaagcccagaaatcacagttatttagtaatagctcagatgttgagctcatattttcttgtttcaaaaaatatctaattttatattattattaatatatttatttcttccaaatttttcatgtttattatttgaaaatgttattgaacccccaacccaccatgttttatacaatgtatagcagaccacacttattacaaaatgaatgaaagaatgtaaaaagccatctttgactcttctgctttttgccttggtatattagtaaacttttgtgttttaggaaataaaacatcttgaaagacttcttttcctcttttactttactttgcttcktatgtaataacaagaaacattt

SEQ ID NO: 659378 - DNA, 582 bp, Homo sapiens
taacttactaaaaataaatcagatcataacttctactttcttacttcaaacacttcattacctctttagtcactttctaaagccttttatgatatgactcatgactctgccttcctccctccaacccctaaacaaaaccaatgtttcaaactctcttgaacacacgcctgtgcaatttaaggtaaytgtttgtacactttattcttctgcctagaacagccttcccttgatgtgcataccagataaccttaaaatgtagctctgctatctctttcctgaaacgtttcttttttgactactactccacagtgatccccacaaggcagagttaattgcgtcttcctctggcctatccctgtaccttatacttgttcctaatactctattacattacatagttgaccctgctataaaaaaactcagaatttgtgtttttcataatggtattcatgaatgattcacgcagaaatacactatatttgacacattactttaccataaaataaaagcatgttgaaggcaagattagaaaacacttttacaaattttgaaagaataaatcaggaatccttaatcagaaat

SEQ ID NO: 659379 - DNA, 555 bp, Homo sapiens
tccagttctagatgggatgacaataagatcattcataaatttacatttcccaggttctttcacagccagtagtggccatgtgataaaatattaaacatgaaaaggaaagcagaagtctgttagggatttctgtaaaagtcttgttttattgrtataattgtttacccctttctcctaactacctttttcttcacagaatatgaacaggataaaaggaactgcagcagccatactacaatcatgacagagatactcaaagaattacagagatattggatctgactttttgagctactgaagcaatactagattctttttttccatagcaagaaatcttttattagttcaagccactatttaactgagttctcttttacccacagctggaagtagtgtctacctgatacagcttcattttaaaattgttaatttatctcaaaataagcatttgaagaaaataaccaatgatatggtaatctttactaatagggagggctatcttttgagcttcagtgtatctattatattcgaatgtgtttctactaagaaataata

SEQ ID NO: 659380 - DNA, 531 bp, Homo sapiens
tgaaatcacattttagtaatttatcaaatcattttaattaaaaaatctatatgaaaagagtaatccaattatatatatattttaaaaacccaaactaattcctttgaaaaatgttaaacatgtcatactttggtaaatgagaacccctggagagggttggggcaacaatagtgaaaaggggaagaaatggtatggcctttaattagaaaattgatttggcggttttctctaaaatgtaagaaatagaaagaatactcayagaaactaaattttcattgtaaacctagttgactgatataaagacaattttgattgataattcctcttaaattttcaagtcatatattatttattagtataaataataaggttttatctgctgccttggggtaacacatacatctaaaccatggggttagctcctattcactaactttatgatcttgggtttttgtgttgcctttttctctaattatgccagtctgctagagtgctgagcagaaaattgtattcagtgatcagccactgact

SEQ ID NO: 659381 - DNA, 586 bp, Homo sapiens
cggggaacaatcctggaacttcccacacctagagaaatatatcaatatctaagtagaaaaaagttatagaacaccaagcacatttaacccaaataatactacctcaaggaatttaataatgaaactcccaaaggtcaagcattaaaaaggaatccaaaaagcaacaagtgattataaacaaatttttttttaggaagctctaatatgtgtgacagaagacagtggaaaccctacagtacaggagagagtggcatgacatatttaaattgctgaaagataacaactttttaccctagaatagtatgtttagcaaaaatgtccttcaagaatggagaaataaagatcttacagaaaaatgaaagctaagaaatttcatcaacaccaacctgtcccacaagaaatgaaamacgagttccttagtctgaaagaaaggatggtaataagcaagaagaaattacctgaaaaaacaaaactcactggtaatagtaaacacacagaaaaacagaatattataacactgcagtgtaaactactcttaagcaacaagaccattaaataatgagccaagctaaaaaaataactacaa

SEQ ID NO: 659382 - DNA, 538 bp, Homo sapiens
tatgccaaaatgtgtccagtaggagaaaataggtgaatagtatctgggaactatttgtatcatttttgtaaccatatttgaatgctaaaatgatttccagttaataagttaaaaaagcatggttcagaagagtgtgctagtatgctagtattttttttaagtattgggcatctaattttattaacattttatttacttttttaagagatgaggtctttgttgccaaggctggactcaaactcctgggcttaagcaatcttcctgcctcagcattccgagtcctgaggagggactgcagaagtcatcttttaagtagctaatattaacagatacaactaagaatgttattgacagactrtaaaaaaatgtactatcaaaaagttgctggagtccaaagagacatagatcataattagctgagatagtgattaattgcataatggaaaaaataggcatttatttaaaaatgaatacaattctgaaatgtgaaaacttttggattaggtcaagtaaaagggagcattagggggaagagtag

SEQ ID NO: 659383 - DNA, 529 bp, Homo sapiens
cccttccagtggggccactcatgccacaagtattctagagccatgtcgagtttactaaagattttgtacagaaatgcaggagggttttacactgtagacctccacagtaaaacctgstgagctcccatgaatagatcccctctcccaagtctttccatctccctgctgattgacagcttctcttcttcctctctttgcttcacagttcgcaggctcactcactggatgaacttctgtcttcctcactttccatatctcccccttccctgcaggcccctaaacactgtccacttcctccttgcttggacttaggtcctccaaacttgtaaacctgaagccatcaggtactctgaaaacaaggaaacttctctccccctcatcctggctccttaccttggaaaacacaagcaattcagcaatttgttatttaggttggtgcaaaggcaattatggtttaaaaataatttctttttggctgggcacggtggctcatgcctgtaatcccagcactttgggaggcctaggcagg

SEQ ID NO: 659384 - DNA, 591 bp, Homo sapiens
ataagtgctcagtgatagcactaacacacaagttgtgaatgataccagaataccagctgagtttgaaaacttagagttgcttttttccacatttgttagaataaccaaatattccctttcagcacttttgctgatttctgaaattgtgactctcttcattgaagttacataggggtaatcccccatcaatataggtttttaaagtagctggaagggtacaagggtcactaaccggattaattaaatcaaacaatgaagctttctcagggtgaaaaatactgcattatactctttctcatgtgactacttcaacttttgttgatcacattagcatttgtgaagataggaggcaaaacaacttgcaggttgcttttctagcagctaaagaaascctacaggatttttgcaattgaaattaagacctattggttaggaatcattaagattgtaaaaatttgagcctgaaagctgatgatgcaacatccctgagtaggaaagactgagttgatattaccattaatatgtgtttctgaaaagccagagtggaaataatttcatatgtcagaaatcacaggcattttatcagcctcc

SEQ ID NO: 659385 - DNA, 591 bp, Homo sapiens
ataagtgctcagtgatagcactaacacacaagttgtgaatgataccagaataccagctgagtttgaaaacttagagttgcttttttccacatttgttagaataaccaaatattccctttcagcacttttgctgatttctgaaattgtgactctcttcattgaagttacataggggtaatcccccatcaatataggtttttaaagtagctggaagggtacaagggtcactaaccggattaattaaatcaaacaatgaagctttctcagggtgaaaaatactgcattatactctttctcatgtgactacttcaacttttgttgatcacattagcatttgtgaagataggaggcaaaacaacttgcaggttgcttttctagcagctaaagaaagcctacaggatttttgcaattgaaatkaagacctattggttaggaatcattaagattgtaaaaatttgagcctgaaagctgatgatgcaacatccctgagtaggaaagactgagttgatattaccattaatatgtgtttctgaaaagccagagtggaaataatttcatatgtcagaaatcacaggcattttatcagcctcc

SEQ ID NO: 659386 - DNA, 591 bp, Homo sapiens
ataagtgctcagtgatagcactaacacacaagttgtgaatgataccagaataccagctgagtttgaaaacttagagttgcttttttccacatttgttagaataaccaaatattccctttcagcacttttgctgatttctgaaattgtgactctcttcattgaagttacataggggtaatcccccatcaatataggtttttaaagtagctggaagggtacaagggtcactaaccggattaattaaatcaaacaatgaagctttctcagggtgaaaaatactgcattatactctttctcatgtgactacttcaacttttgttgatcacattagcatttgtgaagataggaggcaaaacaacttgcaggttgcttttctagcagctaaagaaagcctacaggatttttgcaattgaaattaagacctattggttaggaatcattaagattgtaaaaatttgagcctgaaagctgatgatgcaacatccytgagtaggaaagactgagttgatattaccattaatatgtgtttctgaaaagccagagtggaaataatttcatatgtcagaaatcacaggcattttatcagcctcc

SEQ ID NO: 659387 - DNA, 593 bp, Homo sapiens
gaagtttataacaataaatgcctgcattaaaaaagaagaaatctcaaataaataccctaacattacacctcaaggaatgagaaaaataagaagaaactatgcccaagggtagcagaaggaagaatataataaasagtaaagcagaaataaatgaaatagagaatggaaaaacaacacaaggaacagcataattgtttgtcttttgaaaagacaaatataataaataaaaccttagctagactaagaaaaaggaagaaggctcaaataagtaagtccataatcaatgctaccaaaataaaaggatagtaagggattgttataatcaattatacaccaacaagcttatcaaccaagaagaaacaaatttctagaaacaacctaccaagaatgaatcaataagaaatagaaagcctgagcagaccaataaaaaaaaggaaaaataaaatataacaaaaaagatcagtattcaaaaatttctcaagaaagaaaagcctaggacaagaaagtttcactggtgaatcctactaaacatctaaagaagaatcaatgaaatccttcttaaacttttcgaaaaatggagaagaaagagtact

SEQ ID NO: 659388 - DNA, 575 bp, Homo sapiens
tctgtcacccaggctggagtgtggtggcatgatctcagctcactgcaacctcccaggctggagttcagtggcgtgatctcggctcactgtaacttccacctcaagggttcaagagattctcctgcctcagcttcccaagtagctgggactacaggtgcgcacctgtcatggaacttctcatctttcataattatgtgagataattcccctaataaatcctcttacatctatctatatgtgtatatcctattggttccgtgtctctggagaatcttgattaatacagtagttaactaacaataacatgaaaataagatgactctattagacagaaaactaatttttctaaaggaaawgctactttttggaaaataatactatgtcttatttttgtgacaagaatcacacaaaagattgaaagtacacatactaaatgtccctcaaaacattttcagtcatagcattaaacaatatatatagttattgaacaaaataaaattcaaagtaaaaacattttcatatattcagttacatttttgaaaaaaaatttgaaaagcagttcattgtggataatt

SEQ ID NO: 659389 - DNA, 485 bp, Homo sapiens
tgcaggtagagtgtggacttggccacccatcaggaggaatctgcaggyacagagtgtagacttggccacccatcaggaggaggctgcagatagagtgtggacttggccacccatcaggaggaggctgcaggcgcagagtgtggacttggccacccatcaggaggaggctgcaggtggagtgcgtggacttggccacccatcaggaggaggctgcaggtagagcgtggacttggccacccatcaggaggaggctgcaggtggagtgtgtggacttggccacccatcaggaggaggctgcaggtagagtgtggacttggccacccatcaggaggaatctgcaggcacagagtgtagacttggccacccatcaggaggaggctgcagatagagtgtggacttggccacccatcaggaggaggctgcaggcgcagagtgtggacttggccacccatcaggaggaggctgcaggcagagtgtggatttgg

SEQ ID NO: 659390 - DNA, 485 bp, Homo sapiens
tgcaggtagagtgtggacttggccacccatcaggaggaatctgcaggcrcagagtgtagacttggccacccatcaggaggaggctgcagatagagtgtggacttggccacccatcaggaggaggctgcaggcgcagagtgtggacttggccacccatcaggaggaggctgcaggtggagtgcgtggacttggccacccatcaggaggaggctgcaggtagagcgtggacttggccacccatcaggaggaggctgcaggtggagtgtgtggacttggccacccatcaggaggaggctgcaggtagagtgtggacttggccacccatcaggaggaatctgcaggcacagagtgtagacttggccacccatcaggaggaggctgcagatagagtgtggacttggccacccatcaggaggaggctgcaggcgcagagtgtggacttggccacccatcaggaggaggctgcaggcagagtgtggatttgg

SEQ ID NO: 659391 - DNA, 485 bp, Homo sapiens
tgcaggtagagtgtggacttggccacccatcaggaggaatctgcaggcacagagtgtagacttggccacccatcaggaggaggctgcagatagagtgtggacttggccacccatcaggaggaggctgcaggcgcagagtrtggacttggccacccatcaggaggaggctgcaggtggagtgcgtggacttggccacccatcaggaggaggctgcaggtagagcgtggacttggccacccatcaggaggaggctgcaggtggagtgtgtggacttggccacccatcaggaggaggctgcaggtagagtgtggacttggccacccatcaggaggaatctgcaggcacagagtgtagacttggccacccatcaggaggaggctgcagatagagtgtggacttggccacccatcaggaggaggctgcaggcgcagagtgtggacttggccacccatcaggaggaggctgcaggcagagtgtggatttgg

SEQ ID NO: 659392 - DNA, 504 bp, Homo sapiens
ggggaaatgtagcaaactcataattgccacttaaacaccacggccacctcctatgtgcaaccacctctgcgtgctgctgcctttcaaggcctggatcgctcatttctatcagaagctgttactctttcttatcaaagctatggagctgaatacaaaaacagtttgtttaaattatgatatcaaaacttttagctaattcaacagtgaagacaactttcaccaaagcaatgcttatctcttgacttcttaaaaycatttaaaaatatattcagaaatcctttaaatgcaaattttaaaagacataggacacagactgaatttccatgaggtccggccactctggaatcccctggaaaaataatacgatacaccaatatcaataatatttcttaatgtttttatcaccggtcatttgtcaaaagatttcaaagatgcttttaaataagtatcacgaaatttcaaaatttatacataaatacgaattgtaaccctcatatgtattgt

SEQ ID NO: 659393 - DNA, 504 bp, Homo sapiens
ggggaaatgtagcaaactcataattgccacttaaacaccacggccacctcctatgtgcaaccacctctgcgtgctgctgcctttcaaggcctggatcgctcatttctatcagaagctgttactctttcttatcaaagctatggagctgaatacaaaaacagtttgtttaaattatgatatcaaaacttttagctaattcaacagtgaagacaactttcaccaaagcaatgcttatctcttgacttcttaaaatcatttaaaaatatattcagaaatcctttaaatgcaaattttaaaagacataggacacagactgaatttccatgaggtccggccactctggaatcccctggaaaaataatacgatacaccaatatcaawaatatttcttaatgtttttatcaccggtcatttgtcaaaagatttcaaagatgcttttaaataagtatcacgaaatttcaaaatttatacataaatacgaattgtaaccctcatatgtattgt

SEQ ID NO: 659394 - DNA, 542 bp, Homo sapiens
tgattcttctctgtcaaaaagggtcaccatgacagtcttctcactgagtctctgatttgtcttttggatctttcagaatggagggtgatatggtttggctgygtgttcccacccagatctcatctagaactgtaatccccaggtgttgagggagggagctggtgggaggtgtttggatcatgggggtggtttttcccatgcctttctcatgatagtgagtgagttctcatgacatctgatggttttataaagggctcttccccctttgctttctgtctctcctgctaccatgtaagacgtgcctttcttccccttcgccttctgccatgatcacaagtttcctgaggtctccccagccatgcagaactgtgagtcaattaaacccgttttctttataaattacccagtgtcaggtatttctttatagcaatgccaaaatgaactaatacagaggattaattgctacaataaaatatgaggaaattaaaacctataattctttttttcctcagtaaaccagagacaagcagaaagtggagctc

SEQ ID NO: 659395 - DNA, 557 bp, Homo sapiens
cactgctataggtttctagggaaacttagccaataatctatgtgccaagtactttgtayaaattaatttttaaaattacaaaatgctttgaaaattgttataagtgccctaaaagttgaaaagttatcatcatcagttcagggaaaaggcatgaactttttgaggtttaagcaacatcattttgcgaatttcctttctttgctgctcccttttcttatgaaaaataaaaagataattcaaggactgaaagggaagcctaagaatgtccttgtatttaatcagaagagcttaagcaaacaactgtgcctgagagagagtcacatggaatagaccttccctagggagggtattctgtcaggatgacccactgttcaaaggtctcaagagcataacgggtgataaaagcccttgatacgacagtataaaatccacttcatctccattttcctgaggggcacaacaaggcttagggaagctaagtaacaagtcaccaacatggtaaatgactggactatggattaagttcagatatatctgactaaaaagcctgtaattct

SEQ ID NO: 659396 - DNA, 557 bp, Homo sapiens
cactgctataggtttctagggaaacttagccaataatctatgtgccaagtactttgtacaaattaatttttaaaattacaaaatgctttgaaaattgttataagtgccctaaaakttgaaaagttatcatcatcagttcagggaaaaggcatgaactttttgaggtttaagcaacatcattttgcgaatttcctttctttgctgctcccttttcttatgaaaaataaaaagataattcaaggactgaaagggaagcctaagaatgtccttgtatttaatcagaagagcttaagcaaacaactgtgcctgagagagagtcacatggaatagaccttccctagggagggtattctgtcaggatgacccactgttcaaaggtctcaagagcataacgggtgataaaagcccttgatacgacagtataaaatccacttcatctccattttcctgaggggcacaacaaggcttagggaagctaagtaacaagtcaccaacatggtaaatgactggactatggattaagttcagatatatctgactaaaaagcctgtaattct

SEQ ID NO: 659397 - DNA, 567 bp, Homo sapiens
tcttacattttataaaataacacactcatttagaaatacctggcacatttatattttatgaaacaatttcattcaaacccttcgtatgtatattctagaattgtagagctcatcaccttgctaagttatttgtaatatggcattgtttgaatcccyacataatactctgaaagccctctggccaagattacaagcaacatatctgtaatcaaaaaattaagaatatttaccttattgcagcaagagcgtaaaacacttcagagtgtgggcatctcagtaagagggcattggaaaaagcttcttacagagttcagctggctgcatgattctaaggaggaattcagaaagtagaagccatttctggattagatgctttcaagaaacagagtcaatgtagtgattaggtatcttagtgtttatctagaagatgagattaaagtagggctagacacgtcgttggtaaaggagcagcaatgcctcatattagtcatttctgtgatagcagaaaggccttgtctctgtcttgtttcaaacacggccatggggtggccttgtgtctgcctagtt

SEQ ID NO: 659398 - DNA, 611 bp, Homo sapiens
ctccaatggttcctctaagcctcagcagcagttttgtgactgtgcatagcctggattctcagcctccctccygtaccctaaatttgcaaatgtccccagggtaggagcagctgcagacatcagctcctctccttgaggttttctcctcttgattctcagcctcccagttctcatttcttccatagatagcaaatgccttcaaatagatttctatattttatttagctttctagttgttcttattgagagtgctgatctgtacagagctacttcgtcccacctggaagtcctctccattatattttgagaatatataattttaaaatttactttcaaagcaaaagtacaaaagacttcagcagatcataaaatacaatgtacatgtattacaccttggtaagaatacagaattaataaaattaatcaataattaataaaaatgtttgatattaataaaatgttcaataacaaattattaaaatgaagataactgtacttcttccttttatatgaaaacctaggtgttcacttccaatatatatattcctaaggtagaaataaagcattgttaacatggcatctctggttctcttgagttgtaatcaaaggat

SEQ ID NO: 659399 - DNA, 619 bp, Homo sapiens
cacacacacacacgtgggcatttatctatgtatctatgtatctatgtatctatctatctatctatctatgtatctatctatctrtctatctatctatctatctatctatctatctatctatctatctatctatctctatctatctaccatctaaagctattcttggttgaaagaaggtacatgacaagtcattttgaagaaatgaccacatgaatatccaggatagtatctacctctccatggtttcagtataaatccagaagatactattgaacttttccaatgctggtggcaatgactaataaaaatgttttcttctctggagctagcaaagctgaacactacttattagctttctaaactattcataggtcatagcaatctaagaaggaaaagtatcccaaatacattatgcattttgagtgcaaataaattaagccttaaaaaccccatgccacataaattacagtgataacatttgataagtaaaacatagatgggtttagaaaaatctagctacctacagaaatttcttaaaggcccaatgtgagtagtcaataccaagggaggaatctctgagaatttgtgttttatctgtatgatcttaagacagaattat

SEQ ID NO: 659400 - DNA, 394 bp, Homo sapiens
cacaacctaccaatactgaatcataaaaaagaagaaaatctgaaccgatcaaatacaagtaagaagatttaattggtaatcaaaaacctccaaacaaagaaaagggtaggactagatgtattttaccaagcctttaaagaattaastcccatcttcctgaaacttttctgaaatattgatgagaagggaacatttctaggctaagtctatgaagccaacattgtccttatgccaaaaccaggcaaagacactccaaggtagctacagaacaatatctctgaaaagtattaatgcaaaaattctcaacataatactagaaaaccaaattcaacattaaaaggattatataccatgaacaggaggaatttaatcctgaaatgcaaggatggcttaa

SEQ ID NO: 659401 - DNA, 549 bp, Homo sapiens
agaaaacacccttctgaacatcagccttggcaaacaatttatgacaaatacccacaaagcaaactcaacaaaaacaacagtaggtaaatgagacttgatcaaactaaacatgcacaggaaaagaaataatcaacaagagaatcagacaactgatagaatgggagaaaayatttgtaaactgcgcatccaacaaaaggctaatatccagaatctgtaagaaacttaaacaaatcaaaaagaataaaacaaataatcccattaaaatgtgggcaaagaacatgaatagatgtttctcaaaagaagacatacaagcttccaacaaacacgtgaaaaatgctgaacataccaatcatcagagagatgcaaattaagaccccacatagataccatcttataccagtaagaatacctattgttaaaaaaaaagtcagaaaacaacatatgttgtcatggatgtggagaaaagggaatgttcatacaccactagtgggaatgtaagctacttcgaccactatgaaaaacagtatgtagatatctcaaagaactaaa

SEQ ID NO: 659402 - DNA, 571 bp, Homo sapiens
gagtttgagaccagcctggctaacatggtgaaaccccatctctactaaaaatacaaaaattagccaggcatcgtggtgcatgcctgtaagcccagctactcaggaagctgaggcaagagaatcacttcaactcaggaggtggaggttgcagtgagccaagrtctcaccactgcactccagcctatgcggtagagcaagacttcatctcaaaaaaaaaaaaaaagtaacatttttcacacttattactgatagagaaggagcaccatcattttggacaaacatcgccaccttaagttccagctccctttctagcttcatgcatttcagggaaaccccttctcttctaattacaagcagccataaagaacagacagtaaaacacagataagacacctcaggcacagaagaaggtgcagggaaagtctcttgggtaactgtcaaacttcaccctcatacaacgggccccagtaaaacagtgggccttaataaacacatttatttcccttcaggtgcactgagataaggaagataaaagcagactcgaggggtatgcctgcagctgcagaaagat

SEQ ID NO: 659403 - DNA, 571 bp, Homo sapiens
gagtttgagaccagcctggctaacatggtgaaaccccatctctactaaaaatacaaaaattagccaggcatcgtggtgcatgcctgtaagcccagctactcaggaagctgaggcaagagaatcacttcaactcaggaggtggaggttgcagtgagccaagatctcaccactgcactccagcytatgcggtagagcaagacttcatctcaaaaaaaaaaaaaaagtaacatttttcacacttattactgatagagaaggagcaccatcattttggacaaacatcgccaccttaagttccagctccctttctagcttcatgcatttcagggaaaccccttctcttctaattacaagcagccataaagaacagacagtaaaacacagataagacacctcaggcacagaagaaggtgcagggaaagtctcttgggtaactgtcaaacttcaccctcatacaacgggccccagtaaaacagtgggccttaataaacacatttatttcccttcaggtgcactgagataaggaagataaaagcagactcgaggggtatgcctgcagctgcagaaagat

SEQ ID NO: 659404 - DNA, 571 bp, Homo sapiens
gagtttgagaccagcctggctaacatggtgaaaccccatctctactaaaaatacaaaaattagccaggcatcgtggtgcatgcctgtaagcccagctactcaggaagctgaggcaagagaatcacttcaactcaggaggtggaggttgcagtgagccaagatctcaccactgcactccagcctatgcggtagagcaagacttcatctcaaaaaaaaaaaaaaagtaacatttttcacacttattactgatagagaaggagcaccatcattttggacaaacatcgccaccttaagttccagctccctttctagcttcatgcatttcagggaaaccccttctcttctaattacaagcagccataaagaacagacagtaaaacacagataagacacctcaggcacagaagaaggtgcagggaaagtctcttgggtaactgtcaaacttcaccctcatacaacgggccccagtaaaacagtgggccttaataarcacatttatttcccttcaggtgcactgagataaggaagataaaagcagactcgaggggtatgcctgcagctgcagaaagat

SEQ ID NO: 659405 - DNA, 455 bp, Homo sapiens
attcattcgttctctggtaaaattctcaaattttatttttacttcaaatgtatctggtgtggtaggctgagtaatggcctctcagtgatatccttrtcttaatccaggaacttgtaaatgaattagcttatacagaaaaatggactttcagatgtgattaagttaataatcttgaaatggagagatgacactgaattatccaggtaggttcaatatcatcacaaggatctttgtaagagagaagcagtagacttagagtcagggagagaaaagttgtaaggatggaagcagagctcaaagaggagagatgctacattgactggctttaaagatggggtatggggtggggcgtgagacatggaatgtagggcagaattagaagatggaaaaggcaaagaaacagattttctcctatagcctcctgaaggaaccagtcctgtggacataatcacttt

SEQ ID NO: 659406 - DNA, 638 bp, Homo sapiens
gtgaatcttcgtgaggcattttaattatctaatccygtgtaaatcaacacaagcattaagtaaatcataaaaagaaacataactcatttctttttaatacgcatattttatcaattatgtttgtgataattaacatatgtgtaattcaattttaaaacacattataaatgtaagcttttatgaatgattgattcattatgatgaaatgtgtcatttttctcgaaattataaaaataatagcatacttaggctaagtaaattactgaactatatcctgaagaaatgtaaaataatcaatacatgctaaatgcattatttatttatttcttgaaatgtaggcctaaatatatttagcagtactttttgataaaatagttcattaatttggattttaaatatgatatagaaaaaaatgggttaacctgcaaaatcttcagagcaaaaattatttccgaagtatttattattatagcaactgtactaatttagaaaacagttatagcaggtcttcaaataatattgtctcattcattgttgttttgttataaagttgatggaaaaaaattggtttttggccagggccactgtctgcgtggagcttgcccattctccccatgtctgcttgggctctctctggg

SEQ ID NO: 659407 - DNA, 574 bp, Homo sapiens
gataccagaagacactggaggaggagacagtcagatcacacagagcttgaaatgccttgttgaaagtgagggagacttattgcaagaatgatgggaatctatgtgggggttcagagcagggtggggcagagctgatacatgtttaaaggatacttccatggctctgtggaaacttgactcagggatgtggggtggggaggcagtgcagagagaaatcaaggagatggggttaggaagcagatggagtgacaggtgagagaggtcgatggctaagaatagaatggtaacggcagctggctttattgccaattatgcaatacttttaggttctatgaccttgagtttaattaacctctttggggttaattagctttttttagcttatttttatttcaaaatacagttattaaaatccttacaastctgtaatgaaagaaaacttacaaaaaattacatatcctgaaatatataaaacgttaaataactgtttttctcttgccatagagaaaaatatacacagcggggacctaataagcacagaatttgattcagaaatggatttaaaacatacaca

SEQ ID NO: 659408 - DNA, 461 bp, Homo sapiens
agcctgcagtgagccgagatcgcgccactgcactccagcctgggcgacagagcgagactccgtctcaaaaaaaaaaaaaaaaaaatcagagagaatttttcctagtacccacagatttttttatgagaaggaagaactattattagagatgactggcctattgctaggctagtgtattccccaaagagaggcaatggattcccttatacatcaaacaccaaagacaaaaaaactcttgagtaacagtctgaatgaggtaaacaaattcagaaagctgtgctcattgcaaaatggggaagggaaatacaggttttgttatcttttaataccaacaattaagttaacatgaaaattttttttagygccaacatattccattcccactttactcttactataagggacagagtaggcagcattagtcccactttaactaacagagaaagacatttaccacatgc

SEQ ID NO: 659409 - DNA, 522 bp, Homo sapiens
tgactagtaggtaatgtgtgaatttttaattaggtggcttctgccatccctaagactttatagaagaaaattgaagtaaaataattttaatgaagaaaataatgtttttcttagaggcctatgatttattcctcctccactatctctctatggctctttttcacccctgcagttaattagaagtactccaaatttaattgccttttcaaaaattgtgcaactcatcactttgcctgwttttagtcctgaaccctaacttctctgtacttattatcattgatgacctctttgaccattctgtgtagttctctttccatgtgctggtttgaggtcactatcatttgacctctcacagggcctttcacccagttaagtaaaaatttacaactagttggtgagcctcaatcccttactgctaattagccttgctcttagtctgtgttggcatgccttgccatgtctgtagtactaattatgaaatgaagggatgcaatgtatagatggagtcattttaaaatttga

SEQ ID NO: 659410 - DNA, 581 bp, Homo sapiens
attactcagggttctaagttcagccamcaagacgtcttactacaggtcatgggaagaagttaactcataaaaaaaatcagagaaaaggaagatttgaactcatcttccagcttttacagagcatattgaagccaaagatctggaagtatgtggaaaagatttatgtagtataaagaattacatgaattatattattagaaaaatgtaaaggggctctctattggaattattatagctgcttagctagtcagttttctcagctattaaccctccaaaatgaatgtgaatattttactctccttagagctctatcgcatctatgtatagtatcatcactgaaaaactcagtggagctgagacttactcttttttgagaatctcagactttgacatcaggaggatggatcctatttttggaggtcataaaaatctgagtgaaatcaccaaagtaatttggcttaacttatctgcataagctacttcctaaaaatgtgattctctatctttctttatatctttacattaaatatatttaaaacaagttgtttttgtttccctagcaagcatacctcatgctctac

SEQ ID NO: 659411 - DNA, 581 bp, Homo sapiens
tattaaagttatctagagtggtggcacaaagaatgctgcgaaaagtctgaggcagtactacagaactgtaaacgtttctgaactgtggcttcatttttaataaaccagacytccttccttccttccgtccttccatccctcatctttccattcttccttcctgtgaagagttatacatccttgatcccagagccttctactataaaaatccacctcttattgaacacctaatatatgccaggaaatgtattgagctctttgcatacctgattacccagggagtaggcatcggtataagaaactctagtttagagatggtaaatagaaaagggaagacttgagtctccttgatttcaaatctgtgactgtatccactgcttaagaagaaatggaaagaaaaaagtcaaggaagatggatggatgattgcctgtaccactgttgaatggaatttcctgaaaagagaggaggcacttttgcaagctggatttgttgtaaccatatcagaggttgcagtttatcttaagctttgcttgctgatgggacaataagttataaaagtgattagagagggctacttagt

SEQ ID NO: 659412 - DNA, 500 bp, Homo sapiens
atttattctgtgtctgtgctatcattgcattttggaagtagataactaccatgcttgagttcacagtctcacagctagaggggaatttgtctcaggatgaattgctccttaagtctcatctttgtctgatttagatgagactttggacttggacttctgagttgatgctggaacaagttaaaacttgtggggcttttaggatggaatcaacgtattttatatgtgagaagatgagttttgaagggccagggatatggtttgaatgtttgtctcctttaaaactcgtgttgaaatttaattgccattttcacagtattaagaggtgggacctttaagaggtgatcagactgaagactctgcccttatgggtgtaatggcataataaaaaggtgagtttagcccctcccaytctctcatcctctcaccttatgccatgtaatgacattataagaaggtcctcaccagatgctggtaccttgatattagacttcccagcctcc

SEQ ID NO: 659413 - DNA, 516 bp, Homo sapiens
ctttgctcactcaccttcaggcttgtacatatgctactttctctgctaaaaccctcttctctgtgttcacctggctaactgctaactcatcattcaggtctcagtagagatgcacttctcttgattcccaagtatcagtcaaaaactcctttaaataactctgggcttcctctaacacacctggattgtagtcacctatttacctatatcaccctcaaggtgtgtgctccaaaagagcaggaaccatgtcagaaatgttcaccattgtaatctgagcactggcacagttaactaacatgtaatgtccactcaaaagactcggttagaaatgctataagggtatctcattataattaggatccagcatatcattggtattcaaatgctgttaagagcacacccacgtaagcagcaacaaagcccaacaagatgttcttttttttttgttttgttttgagagagagtctcgctstgtcgcccaggctggagtgcagtggcgcgatttcggctcacact

SEQ ID NO: 659414 - DNA, 326 bp, Homo sapiens
acaccatactagctaatttttgtaaagatggggtttcaccatgttgccctggctgatctccaactcctggactcaagtgatctggccamcttggcttccgaaagtgctgggattatagtttgaggcaccgcgatcagcccagccttaaaaaaggctgactagagatctttatctatgtatatctatatctatctataaaataaacatatgtgtttattatataaaaatatacattattaatattatataaaaattttttttcaagatagaaatatataaagagggtgcatgtagagcctctgtcattgtgtagtgaagctcaaagc

SEQ ID NO: 659415 - DNA, 326 bp, Homo sapiens
acaccatactagctaatttttgtaaagatggggtttcaccatgttgccctggctgatctccaactcctggactcaagtgatctggccacsttggcttccgaaagtgctgggattatagtttgaggcaccgcgatcagcccagccttaaaaaaggctgactagagatctttatctatgtatatctatatctatctataaaataaacatatgtgtttattatataaaaatatacattattaatattatataaaaattttttttcaagatagaaatatataaagagggtgcatgtagagcctctgtcattgtgtagtgaagctcaaagc

SEQ ID NO: 659416 - DNA, 326 bp, Homo sapiens
acaccatactagctaatttttgtaaagatggggtttcaccatgttgccctggctgatctccaactcctggactcaagtgatctggccaccttggcttccgaaagtgctgggattatagtttgaggcacckcgatcagcccagccttaaaaaaggctgactagagatctttatctatgtatatctatatctatctataaaataaacatatgtgtttattatataaaaatatacattattaatattatataaaaattttttttcaagatagaaatatataaagagggtgcatgtagagcctctgtcattgtgtagtgaagctcaaagc

SEQ ID NO: 659417 - DNA, 326 bp, Homo sapiens
acaccatactagctaatttttgtaaagatggggtttcaccatgttgccctggctgatctccaactcctggactcaagtgatctggccaccttggcttccgaaagtgctgggattatagtttgaggcaccgcgatcagcccagccttaaaaaaggctgactagagatctttatctatgtatatctatatctatctataaaataaacatatgtgtttattatataaaaatatayattattaatattatataaaaattttttttcaagatagaaatatataaagagggtgcatgtagagcctctgtcattgtgtagtgaagctcaaagc

SEQ ID NO: 659418 - DNA, 394 bp, Homo sapiens
ttttattgttcttatcaagtttggaatttttctgtactgtcaaagtgacctcgttattatctcatgcattacaaacatagtcatttatgctactaggtgcaaatctgatcccacattatgatggaaaaattatcaagataagaacaaagtccattaacttcaacacaaatgaatgtattccacaggaaatattttgacctaaagtggctaagtacttttgcctcagctaccagagtaatttartatagttacagattacatttagagcacttgggataattatagaaatagtactaatttatgataaatgaccagggaattgagaaaagaaaaacatagatgatgaaattttctttatgagaaagtttatataatagagaattgaaaaactatt

SEQ ID NO: 659419 - DNA, 587 bp, Homo sapiens
ggatgttctttctagtgcccactttctaagaaagggtcaatgaaagaaatattctgtggaacagcagagggaaaccctgttacggcccttcatgcctctctacctcccatcctttctgctgctcaaccaggtatactcctagactaattacgttgtagaatccactgaaaaatccaatacaatcctcatttctcctaacaacatagcaatttccagcaggtgttargtgcttaaaaaaataaaagaaagagtaaaaacttcacaccagatgtagcccatataaatattaccacacaggtgctgggaagagaataagttctctaaattatgcaaataagtcttcttgacaattcaattttttagaataaccatatatatatttctttagagattttttattaatttaaaaatatcaatgatccatgtttgcaagttaatttacacaattatatcttcaaacttctctcaaagtcttaaagccaagagaattaaagctttgaccatgatttgtcctctgagaacataaggagtgaaaaaaggttgaatccattgcattgaacaggtaatgcaaaagcatcatttcaatt

SEQ ID NO: 659420 - DNA, 553 bp, Homo sapiens
ggaagggtgtcaatggggtatgaaagcgtttataaaatcttatgggaagtaattagtggatgaaggaatagaaatacaggaaaccacatcttagaaaatgtccaaagaggagcacatatcagaagagccttaccttgcctttcaaataccaagaggtcatatgggacttggaaattccaggttagaatagacacaggtgtgtgtaactttttgaaaacaagrgagtggaggataatggaaagcctgtagctgcataatgttcacttctcccacatcttcctttcgtttgaacacaacttgaagccaaagaatgcctccaaacaccaacaacaaaaatatatatatatatgtaaattaactaaaaatgggcacagaaagtagaacagtggttaccagaggctgagaggaggaatgggaagttactatttaataggtacagagtttcagtatgggatgatgaaaaaatctggagatagataatggtgatggttgcataacaatgtgaatgtacttaaggccactgaaattagaaatgttttaaatggtaaatttt

SEQ ID NO: 659421 - DNA, 611 bp, Homo sapiens
gaaatcataggtgtaaatctttgtgaccttgaatgaggtaatactttcttaaatataacaacaaaagcataagcaaccaaggaaatatagatgaattggattttaacagaattaaaaactttcgtgcttcaaaggacattatcacataaatgaagataaaccacaaaattggagaagatatttgcagttcatatatctgaagagtctactatcaagaatatataaaaaagtactgcaattcaataataaaagggtaaataattaaaaatrggcaaagtatttgaatagacagctttccaaacaagatatacaaatggccagttatatgagaaattctcaatatcattagccatcagagaattgctaatttcacttcatactcactaaaatggctatagtaaagaagacacataataacaagtgttagaaaaattggaaccctcttgcactactggtgggaatgtaaaatggtgcagctacattgggaaacaatctggcagttcttcaaatgactaaacatggaatgatcaaatgatctggtaattccgctactaaggatatacttccaagaaatgagaacatatgtccacacaaaagcttacgcatgaatg

SEQ ID NO: 659422 - DNA, 528 bp, Homo sapiens
tactgtaggtctgttttcgcaaaatatttacttagggcctaccgtattccaggcactgttctaaatcaggacacggcaatacacaaggcgaggaatctctgcactcctagagtttatgttctaattgggaagatagaaaatatataactaaatattgtgttgctgcagtgtatttcatgatgtggagaagaaaaaaaaatcatgttctaagaagtgaaaatggctatatgacagtgcctgcagtgtgaagccattggtgtaaatcagcagaaataggcaagctacacatttctaaaatgttaggaggatttacaccaagtctccagattttgttctaaattttttgcatttgttacttttaaaataaaagcaaaactaaactgaagcagagattactgatacatacatacatcaagtcaatgcttagctattgattctacttctaaaaaagtcattggatttatactttgtgraagcctcaagatttgatttcttaataactagaaacagtaatgaaaatgagtgcta

SEQ ID NO: 659423 - DNA, 620 bp, Homo sapiens
accccagcccccaacacatacactcacacacacagcacgcactcgcaaaacacacacatgcatgtatacccaacatacacaccctacatgcacacatttgcatgcccttgctgtgttctgaagatggcactttgctttcccccctcctttttcacttgatgttttattgtggagattgacctagtttttcccaccctctatgtcagattcagtcatcctgctgatggtggctaagagatagaaatggaggcggtacccataggattctctctactaggctaggggaaaagatgagcctgggaatactcctcaatccatttatcctattgcatgagtatyattacaggcagatgagaaatctgcctgcttaaagacagaattttctgatcccttggagaaaagaaaattaaaactgttgttcttctttccattagactgtgagctccacagtaggtggccctgggcccagtgatctgcacctcactaggacttaaaccttgcctcatacttagcacaaaatctcctagaaggcattatttattgggtagttactatgtacagctaagtaatttatatgtattaattaaattttgcttcaatccatatcattgcagagtata

SEQ ID NO: 659424 - DNA, 508 bp, Homo sapiens
ttatgcagtcaagaccattcttcgtctccagaatattttttatcttagaaaatggaagccccatatccattaaataataacttttcattacttgctctcccagtatgttggcaaccaccattctattttctttctttataattttgactactctcattacctcatgtaaggataatcatgcagtatttgtctttttgcagttatcttattttgcttagtataataycttcaacatttgtctatgtagtggcatatggcagaatgtccttcaggtttaaggccaaataatatttgattttatgtacagactttattttgctaattcattcttctatcaatgaacatttaggttacttagacatttcagttattgtgagtaatgctgttctaaacacaggtatactaatatctattttagatcctcattttaattcttttgggtaaataaccagaaatagaattgctggatcacatggtagttttatttttatttttttggtcagtgtgg

SEQ ID NO: 659425 - DNA, 541 bp, Homo sapiens
gtattgttccatttcagtaaaayattttagtgtaaaccaaaacttgcatttgtccaacagaaatagagcatagcttgtactctttccgtttacattttcaacacaaaatctctaagtggccacataaattgacagagttgaaataactctagttctgttttttcatctttaagatcacgatgctatcatggtttatttcgaaccctctgtttaagtgcaggaggatgtagtaccattaggagttggagatgtgaagtcctggctggagaagagcttgcacaatgtcaaacagctcacacagtcacaaattcattctcacaaggaacatgtgtgtgtaggggacccactaaacaactgggagttcttggaattgactttcatctagagtacaatatttactaaaggataaattattaaaatgtgctaatttgaagcttacacacatattattaaaactcaacagaaaccacaggggttgtttagaagttagaaccaacaaaagattgtttcagggaggagtattttatgactggcaacgttt

SEQ ID NO: 659426 - DNA, 610 bp, Homo sapiens
aagcttagaagggaagaatgttatggtggtccaggcccagggcctctctgccctgcacatcctcaggaccctggtccctgcattctagccactccagctccagccatgggtcaaaggagcccagatacagtttgagctactgcttcagaagagcaagctgtaagtctgtttggcttccacgtggtgttaggcctgggggaggagggaacagaatgcaagagttaagacttgggagcccccatctagatttcagagagcatatggaaaagcatggatgtccatgcagaagcctgctttgggggtggagtcctcacagagaacctctattagagtagcacagatggaaaatatgggtttggagctctgacacagagttcccactggggtactgcctagtgcatctgtgagaatacggccatcaccctctagaccccagaatggtagatccactgacagcttgcaccttgcacctggtaaagccccaggcactgagcaccagcccttgagagcagccatgaagtttaaaccctggaaagctacagaggcagggctacccaaagccataggagcccacctcttacaccagtaygtcctggatgtcagacagaaa

SEQ ID NO: 659427 - DNA, 581 bp, Homo sapiens
cctctcacttgcccagagccaatagaacacctgcaaatggaagttgtactaggtgtacaagggttcatgcctgccttgtcttctagtccacaggatttttgtacctggaggggctgccaagcctccatatctaaggtagacctccccaaatatcctccttgagaccattctccaggcccagggggccacactggcagccaagcactgtgacatggggagctgactcagtgggtaccatgcactttcctgtaaaaggcccagatagactcgggaccactcaggcagggaactctaaggccctctgatcttggaatgtggtcgtctaggctccggggcagcacacagcttyggtccagagtcaaagccagagtcctggctttgaggcggcaacatgtccgggccatgttcatgcttaatattccttctgtgggtgctcttagtggaagaaacatctatcatgtagttgaacttgttctctgatgaagagaacttgatggagctaaacatcttggaaaaatggttccaagattccggatacaggtattgggtgctagagtcaactttctaggaataacactatt

SEQ ID NO: 659428 - DNA, 615 bp, Homo sapiens
acttttttaaaaaaggaggaattcctttctgctgccaaaccattaacataataataataatgtgagcaatatattttttgtctgaatcaaaagcttgaaaaatgaaagcataaactataagcttaagaatcaatgagaactcaraattgatcaaagacttgaatttaatagctaaaaccataaacttttcagacaaaaacttagagggataatcttcatgtccctggatttggtaatgagttttcagatataataccaaaagtacaggcaacaacaacaaaagtagattaattgaacttatttaaaaatttttgtgcatcaaagattattatcaagagagtaaaaagacaacccatagaatgatagaaaaattttgcaaatcatatatctaatattggtttaatattgagaataaatgactcatacccttccaaaacaaaaacaaatcaacccaattaaaatgaggaaaggatgtgaatagacatttctttaaagaagacatgcaaatgaccaacaaaccattaaaaagatattcaaaatcattcattgtctcagtgcattcaggctgctataacaaaataccttagactgggtaatttataaacaacagaaatt

SEQ ID NO: 659429 - DNA, 657 bp, Homo sapiens
gtaatctgcacacaggttcaagcctctcactgtatgcttttcaacaacttctggtcttttcagccaagctggactgtgctgtctccatttacttcttcttcaagtcataggggtcaagctttaaccctatgacacaagctacccataacctttaattcttaaatgcaatttacagttttcagtgttttttatgtgactttcatgtggtaattgacattgttagctgccactttgggaaaagcttttcctttgcctgataccccactttctccttattttccttctactttttagcttgttctttatgtcaatcttctttgcaggattgtctgtctattccttctcatttggagttactgtttttcaggattatggattgattttcttcttcatcttccatttatctaatctattttctcagggtgatttcatctactcctaggcttcaactagaatcaacataatattgaccctcaactattaataaataagtcacaatgtagtttttcttgtttctgagttttatgcttatctctctatctactttatgaagatgcacacttgaattttccagatacctaaaataccacatrataaaactgaactaattataagaccacttttacatgtccatttggactgctgtagcaaaatata

SEQ ID NO: 659430 - DNA, 585 bp, Homo sapiens
  misc_feature 478: n = A,T,C or G
ctaattcacaaattgttctaattaaatgagatcatgcacagaaagatgagcttagtaggaagtcatatgtccttaagaatcaaaaggcaaaaaaggaattgaaaactcactccagcaaaagctgatcagaagccccttgttatgcaagatgaccagctaatgccaagtctgttttacataatctttcctcactgattatgtaatgattctgctggtgttgcttcacagtcacttttctgtgtatatgtttcaccactaaatgttctttctaactcactgtgtttcctaacagctagtctgagctttcctcccatagctttgagccgtggcttcttgctctcatcatccaagactgagcaattcccttccctcattaattttgtaaccttgaagayatttacgcagtttgaacaaatactcacctgcagttttcttttttccccaaactcttatatgaatctaattctatctttatcanctcacacataatatacaaactcaaattcctttctccctttgtgttgctctaattgtggttcatcaaacatttcctacattgagcccttccatttaattaagattatt

SEQ ID NO: 659431 - DNA, 517 bp, Homo sapiens
tattaataatattatataattcttagggctattgtgatgattaaatgaataaaactgtgccttgtatatattaagtgtctaagtatttactattaatatagttgttattatgattacagagaacatgaagacgtgaactatattgaagtccctatgcaaatcttcataatgcccaggggactctatctcaacttcaagatgcaaacctttacaagcatgcagctgttccagacatcaataatgcatgcacagttcataatcataccagttatgtaacctgtcgtgcaagccacatcttccaaggcatgtatccccagaggacagacaaagctatgcacagagaacctgctgtttcttaagtatttccacttyccataaatttacaattaatattaatcctgatcttgaaaataagctgtgaaccaaagcaaatcaccttaaaagcagattttcattaatgaggagatttactgtaagtttctcaaagcctacctttcttacttggcttttgtgagaa

SEQ ID NO: 659432 - DNA, 552 bp, Homo sapiens
tcttgcagagtgacttaacctctcttagtttacttctttgtcttcycaatgggcataaataataccatttgataagattattgtgggaattaaataaaagtgaccaataaaaattagattttggccaggcacagtggttcacacctgtaatcccagcactttgggaggccgaggcaggtggatcacaagctcaggagttcaagaccagcctggccaagatggtgaaaccccgtctctactaaaattaccaaaaaaaaaaaaaaaattagctgggtatagtggcgtatgcctgtaatctcagctactcgggaggctgaggcagtgaattgcttgaacctggaaggcagaggttgcggtgagccaagatcgcaccactgcactccagcctgggctacagagcgagactctgtctcaaaaaaaaaaaaaagattttagcagggtacaggttgtggtggtttccaatactaaatggaagaatataaactttattttgtatataataaggaacaatcaaatgtggtttttttcttgtggttgttgtggttgtgtgtt

SEQ ID NO: 659433 - DNA, 552 bp, Homo sapiens
tcttgcagagtgacttaacctctcttagtttacttctttgtcttctcaatgggcataaataataccatttgataagattattgtgggaattaaataaaagtgaccaataaaaattagattttggccaggcacagtggttcacacctgtaatcccagcactttgggaggccgaggcaggtggatcacaagctcaggagttcaagaccagcctggccaagatggtgaaaccccgtctctactaaaattmccaaaaaaaaaaaaaaaattagctgggtatagtggcgtatgcctgtaatctcagctactcgggaggctgaggcagtgaattgcttgaacctggaaggcagaggttgcggtgagccaagatcgcaccactgcactccagcctgggctacagagcgagactctgtctcaaaaaaaaaaaaaagattttagcagggtacaggttgtggtggtttccaatactaaatggaagaatataaactttattttgtatataataaggaacaatcaaatgtggtttttttcttgtggttgttgtggttgtgtgtt

SEQ ID NO: 659434 - DNA, 586 bp, Homo sapiens
ctgtggttttgacctttttttttttttttasattctgtgtataagtgagataatgcagtatttttctttctgtgtctggcttaattcacctagtataatatcctccagttccatccatgttgtggcaaatggaagaatcttgttcttttttctctcttttttaaaaattttatttgtatcaatgtaaggagacaaatgcagttttgttatgtgaatatgttgtgtagtaatgtagtctgggcttttaatgtaaccatcaccagaatactgtaccttgcacctattaattaatttctcatccatcaccaccccctcaccctcctatccttcagagtctgcaatgcctattattccactgtatgtccaattatacacgttatttggctcccacatacaagggagaaaatgtgatatttgactttatgtttctgagttgtttcacttaaaataatggcctccagttccattcatattgctgcaaaagctatgatatcattcatttttactccttcttttttatttttttatttttatttttttgagatggagtttcattcttgttgcccaggctagagtgcaatggcat

SEQ ID NO: 659435 - DNA, 513 bp, Homo sapiens
aattaaattacacaggaaagtttatattcatagataatatatttaattggacttttgtgttaaaagctatatatagctttacagtttatccagtataaaaccctccgagtgattcaaacatgaaaaataccatacagaattcaaactcctactgcctttagtgacgctattttactatgtttcagtctctaaacgatttttgtttaatgtccacatgtctacagaatgtagaggatgtttctaaggaaagccacagtagaagaatagtttttttttctcccattttaaaggggagaaggaagaggatggccgtgctacaatasagcgtcaaaagatctcttataaaccaggacccaaagagcgtatcacagcttgtcaaggcctctgaagacaattgcttgtgccagtttcctgttacagtagcagcctggcctctgcaagttctcatgatcaaaaacattgattagttcttgtcataggccttcagtctccctctagcttctaattaagtcc

SEQ ID NO: 659436 - DNA, 549 bp, Homo sapiens
gttggtccaattccagctgcttgttctactaacggtgaaaccatgacccagagaggaaaagtggatttcccaaattcacacaatgacgtaggtgttggcatgagtattgcaactcctatctctggctacccagtgttctttcctgaccattgtttctcgctctaatctacataaactatggactatgggctttgagaaacaaaaaggccttgcacagagtcttggctagatgtttcatgccacagatggaagcactggaacccagagaaggaagcttaagacactcacrgaggcattaagttcccatgagagtgctgtaatacccacctgggccatctggttttggtattaaactgggcaagcttggagtctacagaatatagctttacttacataatgaagtgcaagcggcccttgttctatacttcttttactgttttaagaatgttttattcttgtcaatacaaattaatatatgttcattctataaaatcaagaatgaaggcctgtatagaaacaaaggcaaaagctcccttttacagcttattc

SEQ ID NO: 659437 - DNA, 447 bp, Homo sapiens
ttatcttccaagtttgtttactacaatgtacaagtgcagccacaaggtacacattataaagatttagtggtttcctagcctcagatccatggactacataaatgccatgtgatatgaaacttacttgaatgaagcagacccacaaaatacatgcacaattgtgactaggaaagtgcttttgtctagacagaggttttataacttttattaatttcctaaaggatgaacaattcaaaaatcagggatcatarcactgacaaaagctctaaagtaatagatttctctttgtatgcaagtgaactctttaaatatataatcacattttgcctgagaatgctttcatgtttatatcttggcactacttccattcaattgtgctaaccaaaaacccagagagtcatactggacatcttcttgctcatatgtaatccagtatcaagtgctgtc

SEQ ID NO: 659438 - DNA, 591 bp, Homo sapiens
cccctgcccacccctctggttagatagaaatcattctgccctagagactgtggatgtcctgtcttggctatagttttccaggactgagtggcagggatagatgccttaaattaagactcttgccaaagaagactttcaaagcaatgatttcttcagtgcattttccgtttgtttatgaatttccttagtacttttattatagcacaatctattgatcttgctaaatgaatttcatagacatgacccaataaatctatttatcaatatttarttataacagcaaatggaaaaattcattttctataggatagaactctaccttgtactataacgtgtagtttctctgagtattgatgcattattctcgtcactagattagaagctttttgaaagtggaaacaaattcagcttagcttagctgcttatccccagcatctaagataatatcttgagtataacagctgccaattaaaaagagtcagtcattgaataacttaaaatatatatcatcctctaatctgtttgggaaggttctggaaatcctgataaaaatatacaggttgagataagaaataatttttccagtttata

SEQ ID NO: 659439 - DNA, 591 bp, Homo sapiens
cccctgcccacccctctggttagatagaaatcattctgccctagagactgtggatgtcctgtcttggctatagttttccaggactgagtggcagggatagatgccttaaattaagactcttgccaaagaagactttcaaagcaatgatttcttcagtgcattttccgtttgtttatgaatttccttagtacttttattatagcacaatctattgatcttgctaaatgaatttcatagacatgacccaataaatctatttatcaatatttagttataacagcaaatggaaaaattcattttctataggatagaactctaccttgtactataacgtgtagtttctctgagtattgatgcattattctcgtcactagattagaagctttttgaaartggaaacaaattcagcttagcttagctgcttatccccagcatctaagataatatcttgagtataacagctgccaattaaaaagagtcagtcattgaataacttaaaatatatatcatcctctaatctgtttgggaaggttctggaaatcctgataaaaatatacaggttgagataagaaataatttttccagtttata

SEQ ID NO: 659440 - DNA, 553 bp, Homo sapiens
gagtggtatgctcagccatgtgttgtagaaagatcacagtggcagtggcagcaggagacaggttgagtctgaagggatgacaggaagaaagttaacttttcctttatgatacacttttattggcactggatatgcattatccctttgcaatgtgataccagaaatgcaccaggtggcagagggcagctgggttgtaaaccatttaatgtgctgtggacagctagacctgtgcttctggaaggagcctctcacccgcagggtttgtgtccctaacttgtgctcccatgtcatttgtttttaacctctacaatgctcttagcaccctgaattgttcctttacatgtttatctgccactatgaacactggctctttgaggccaaggataatgccacttcctcaggccgcagtgaggytcatggagcacagccatgaagagaagacagcagtgtgacccacggtatctggggtaaactctccttggcatcctgtcatatttcggatagaacctcaacagggctcctctttggtcccaccaactcgtttcacttcaca

SEQ ID NO: 659441 - DNA, 517 bp, Homo sapiens
gggactattgtcctcggagtcacaaagaggctctttgtcctacctagcattatttgtcattgcaagcaggaagaaagagaggaaaaagaaggcaaatcgctgctttttgcagtaattttccctataattcattaatctacactctgccacatggccacttctatctacaagggaagctgatgacacaggtacttctcttagagscttctatagtacagaaaggcatggaagagggtactcttgaatgaatctactcatcatatctcccctacataatgttggactgcaaggtatgtcttaatagggagagctttgaaactaatcctgaaaaataagtctagaatacagtgagagaaagaaaatcaagacagaaagaagcacacagtgaaaattctgcaaggtgcattttgtttttctctttgccaatgtgaaatgtaagttaaagtggacctatgtaatattcaaatttgggaaaactaacaaacccatctgagtgcatattaggtatttgataaat

SEQ ID NO: 659442 - DNA, 476 bp, Homo sapiens
tcctctccaatctttaaagttatcttcagattaacacatgacaattgaatgctttctgtctgacaacatattaactacaaaatgatgtaacacaatgtctgtccttattgaatcttgtaggacacacaagtaggtatataagtcagtaagtcagtaaaggaaatggaaagaccaattgggcatacttatcttttgctctccaatcactgatccaaaatgaatatcttgtcatttatatattatttatccattgaagaagcaggamactgactacttattatactcctttgtctacattcccatgtcttttaaccacggtgaagtagaatgtgattgttcattcaaaggtcattccataccacctttattccctgataatagaaccttaattggaagggggtggcaaaatgcccatttctggaaaataaaccataattggcttattaatattgccaataatggcaatattatttccc

SEQ ID NO: 659443 - DNA, 599 bp, Homo sapiens
tctttgtggaaaacgttaacttctctgccagttctgtgccctgttaagtactgtggggccatgtgactagctaaaataatgtcaaacctgacacccccagagcacccctcatayaagaggatgtctagatttatgtttctgctttccttactagaaatctgggatttggatatttgaaacttacacatgatgaccttaggagtgctcaatttccagcaaatgtcttattttttttatgttataaatcaaacattggttattatatgtgcttctttataagatttgtgtatatcatggtccagatcatataacaatgcgtgttcacccagttctttaatacttagagaaattttaatctgtgggttcacacagttgtaacccaagaaatttatctggagttaccattctagattataagcagaattcttaaccaaagagcacccttttaattccagctttatatgctgttttagaggaacttaagttatgctatagtaacaagtatcacaaaatcaatatagtttaacagagaagaaatatattccttgttcatacaagccttgtattggtctggaagggaagatgtctgctgctctgat

SEQ ID NO: 659444 - DNA, 607 bp, Homo sapiens
tgtatagacatacttagcagttagtacaacccccatattggctccccaactagtaggatgagggctattatggtgggaaaggccaaatggaagccatcagagctgcctctacctagaaaaatagtaaatcaaaaacaatattgcatccctggaggaatcacagagattagtgccaccatcaaggacttgaaagatgcaggggtggggattcccaccacatccccattcaactctatttggcccatgcaaaagacagatggatctttcagaatgaccatggattgttgtcagcttaaccgaggggtgactccaattgcagttgctgtaccagatgtggttttattgcttaagcaaattaagacatctcctggtaccttgtatacagctattgatttggcaaatgcctttttctccattcctgtccataaggtgcacgagaagcaacttgccttcagctggcagggtgaggaatatacctttatcatcctacctcaggagtatatcaactctctgtctttgtgtcataatcttattcagagagamcttgatcgcctttcacttccgcaagataccacactggtccattacattgatcatattatgctaa

SEQ ID NO: 659445 - DNA, 540 bp, Homo sapiens
gaaactctatccatttattcatcaaacgttaaccgagtatctgctacgttttaggtactgtaacagtgtttgggaatactgagatgagtaagatagtgttcttgccgttaaaagttcattctagtaggaagacatatgtataattaaattacagtataactagagaggaggtgacagtaagagcacatacacagtcagagaagtttgatagtgaggagagtgatgaactttatgtgatagagctaggaaggacctgagataayggaaggctgaattccagcaccacccccgtggaaagcccttctttaatccttagtctggtttagctgtccctcatctatgctgtgatggcaacctattgcagttgtagccttatgtatctgtctatctaaactaagtacaccttgaggacagagacagtttttatatcccttgaatgtagcaaaactctgctacatgcttggtgctcagttaagatataaaaaaatgaatgaataaatgaaggaagaagggcattggagacaatgttacttaggagga

SEQ ID NO: 659446 - DNA, 473 bp, Homo sapiens
ggatgacctacagccagaggcatgcgctctgataatcaccagtccatgaggaaaaggccaggggaccctctgggcaccccctcctcagagcctctccctctgccaagagtttcctttccatctccttttcttggcttcacctggaaacaaaactgacaaaccatatgttccacaggcctgagctcatctctaattagtgctcagaggcagtggtrgggctgccgggaggggctggcttaagaactctgctccctgcctcccacctacagagctaagagagcctctcgaccctgcactcatattcctctctcacaatgctcatggatggagcattttaggggaaatatgcactctgacatcaatatttggtgtgaatattcaccaagaatgggagaagaacttttgtggctcatggggtatgtgcagaagaggagctgggagttatagcccatacccttgggagccctgaacca

SEQ ID NO: 659447 - DNA, 567 bp, Homo sapiens
gcttctctgttagcggaagtgaccaaatggcttaagtaactgccgtcaatattaaggctgataaaagaacttcaaccgaataattcccattgagaattaagagtgtaatgaaaatccagaaatgccgctatctgtttaatcattccttgattaaaataaatctatttacatttgtgttatttgctggagctgtgctaggcatgaatatacagtgccggtcaaggcataccattgtggagtttacaatgcgtctctccttgcagtcaagcttcatggagaataaaggcatgcctaaagtgaaaagagataggaactaaagaaaccttgacaatgtagtaaaatgtcttattggccgggcgcggtggctcaggcctgtaatcccagcactttgggaggccgaggggggtgcttcacgaggtcaggagttcgagaccaccctgaccaacatggtgaaaccctgtctctactaaaaaaatacaaaaatyagccaggcatgctggtatgcacctgtaatcccagctactcaggaagctgaggcaagagaattgcttgaacccggaggcggag

SEQ ID NO: 659448 - DNA, 640 bp, Homo sapiens
tactatatttaaagttttaaaaagtgtttcctagttatttttattaccacaaaactttgtgaataaggcataatgctatgtctaatcccaagataggtaaattgagatacatggagaaattgactaacttgcctattattatctagatcatgaaacaaaattagcttgatttagtttatcagcagcttaagtattttgtaagcaatgttaccagmcatttagtttatttctaaaaaactgagggtcctgggaatttaatcatgccaatgcaggttttttgtttgtttgttttgttgtttaacattattaacaaagagttggtgcctttcacagactttttaagattaggaaacaaaaacaaatcacaaagtgtgaaatcaagactgtaaggtggatgcctaatgattttccaccaaagctcttgaaaaattgcccttgtttgatgagaggaatgaacagaaacattgctgtgatgaagaaggactctctggtgaagctttcccaggcatttttcaggtaggctttgctaagtttctccaaacactctcataataaggaaatgttaccattgtgtggcactccaagaaatcaagcaaaacgccttgaggatcccaataaggctgttgacataacctttgct

SEQ ID NO: 659449 - DNA, 615 bp, Homo sapiens
tctatgtagcataagtgtaggctattctatggattttggctttgagacatactgttaactatttaagggtttgttcatagattaaacatttaatttgagatatttgtcatgaataattccaagattttttgaagaaatgtgtccaaagtcatgcaaaggaagacrgaatatgtgtgtatagatgagaaaatgaatttaaaaaattagaaaagaaaattaagtgacatatttggaatgattagtaaaatgactagcacagaaagaagcaaaactactatacttgtggcataaataaaaatgaacataaacataaatatgaataaaattgcttagctccataaaaaagtaacaaatttaaataagcacaaaatatgtcattttcaaataagacaaaatattatatatctccacataaagttatgtggactcatcttgaaatcttttatcttttcatctttatttgaaatttagaaattctaattctaattcttacatgtatttcttctttagaaaaagcttactgatttctgtaagttaataggaaccctctgtctctctgtctctctttctttttctatagacacatataaaatacacacaaatattttacttgta

SEQ ID NO: 659450 - DNA, 579 bp, Homo sapiens
tgacatttccattttaactcttccatttaatggttgtaaatgtgtatgactatatctgtttccctatttatgggtaaaatgctggtactggattatataatccttgaagttcttgttttgaaatgaacatgtataattgtaattattaaagcagtctattaatgctattcacaatagcaaagacagcgactcaacctaaatgcccattaatggtagactggataaagaaaatgtggtatatgtatgccatggaatatgatgcagccataaaaaagaacgagatcatgtcctttgcagaaacatggatggagctggaggccattatccttagcaaactaacgcaggaatgggaaaccaaataccagatgttcttacttgtaagtgggagctaaatgatgagaaggcatagacacatagaggggagcaatacacactgggcyctgttgaagggtggagggtgggagtagggagaggatcaagaaaaataactactggaaattaggcttaatacctgggggataaaataatccataaaacaagcccccatgtcacaaatttatataagaaacctgcacatgt

SEQ ID NO: 659451 - DNA, 534 bp, Homo sapiens
tactaatttcctttccttttggtaatacccagtagaagaattgttggtagttctatggttagttttttgaggaaactacatggtttttccacaatggctgtactaatttacttcccaccaatggtgtataagagttcctttttctttgaatcctcaccagcatttactttttacctttttgataatagtcattctaactaggggtgtggtgatatttcattgtggttttgattcacttttccctgattattagtggtgctgattattttttcatatgcttatgggccaattgtatatcttcttttaaaaagtttctattcagattctttgcttatcttttttttttttttttttttttttgayggagtctcactctgcccccgggctggagtgcagtggtgcaatctcagctcactgcaacatccacctcccaggttcaagtgattctcctgccccagcctcccgagtagctgggactacaggcgtccactaccacgtctggctttttgtatttttattagagatggggtttca

SEQ ID NO: 659452 - DNA, 577 bp, Homo sapiens
gcttgaacccgggaggtggaggttgcggtgagccaagatctcgccattgcacttcagcctrggcaagaagagtgaagctctgtctcaaaaaaaacaatcccagggttttgggatgcctaggcggaggctcacttgaggccaggagtttgagaccagcctgggcaatgcagcgagaccctgtctctaccaataaatgaatgaatgaataaataaataaataaataaataaataaataaataaataaataaaattagctggggatggtggcaagtgcctttaatcctagctgctcaggaggctgagacaggaggattgcttgagcccaagagtttggggttacagtgagctatgatcacgtcactacactctggctagggtgacagagaaagaccttgtctctaaaaaagagaggaaaacaagttaccaaattatacaattatctgttcagacctagatttacaagaaaaaaaatgtaaaatttcgtgtttttagtatatttgtaaagttgtgccaccatcaccagtaattccagaacatttttatctcgtctccccaaaataccccgaatccacagta

SEQ ID NO: 659453 - DNA, 577 bp, Homo sapiens
gcttgaacccgggaggtggaggttgcggtgagccaagatctcgccattgcacttcagcctaggcaagaagagtgaagctctgtctcaaaaaaaacaatcccagggttttgggatgcctaggcggaggctcacttgaggccaggagtttgagaccagcctgggcaatgcagcgagaccctgtctctaccaataaatgaatgaatgaataaataaataaataaataaataaataaataaataaataaataaaattagctggggatggtggcaagtgcctttaatcctagctgctcaggaggctgagacaggaggattgcttgagcccaagagtttggggttacagtgagctatgatcacgtcactacactctggctagggtgacagagaaagaccttgtctctaaaaaagagaggaaaacaagttaccaaattatacaattatctgttcagacctagatttacaagaaaaaaaaygtaaaatttcgtgtttttagtatatttgtaaagttgtgccaccatcaccagtaattccagaacatttttatctcgtctccccaaaataccccgaatccacagta

SEQ ID NO: 659454 - DNA, 569 bp, Homo sapiens
gcgctgggctgagcgctgccgcgccctggacgagcgcgctgtggagcccggacgcgctggtggcaattcccgctgtgcgaccccccaccccaccccgcccgaggctgaggacctgcaggggccccaccggcctggggacaaccttcccggagacctggaggcggagagggctcagccagggagagtgacagaaagggaaggcaggggaaaggcgcgcagaaagagagcggcggggaagggagggcgagcagcatcttggakctggagctcagagcccaggtgtggggggtcagcaggtccggaggctctcgaaggtggcgccaggggctttggatttggtcccgagaacaagcgggagccgttcgaatgtgttaagcagggggagtgaattagggagaaatcattccggcttcagaagggcttggaaggtctgcagcagaggtggcgaggccgctggaggtttgaaatggcttttaaaatagagaaaccgggaggaccgacgaccgctccggcgaccgcagtttccaggcaccagagctgtgtggaatgaggggcgctcaggagcatcc

SEQ ID NO: 659455 - DNA, 618 bp, Homo sapiens
tgtattatataatatacataacgttcaaaaatatccccactaatccctagcattagatgtgatgacaatgattatctttggggaagagggatagataatttataactgggaagaaacactatagctttctagggtgctagtaaactgccatcacctcacttttggtggtggtaattcatttgtgagcttttctgcagatatatttcaataaaacctaaayatttacctaaaaatttgataagatgtagataacccaaataaaagtgagtagacccctgcttgttagtagaaggggcagacatatttttccctagctctttaattgtctaaggacaattaaaatcccttgacgttatgtataaaactgacataacaagactctaaaaggcagactgaagaaagtggagagaagaagaatgcactcatatgtgctttcaggacccaagggatgacacattggtgagttccctggattttctttttgccttatatatcccagacttggagatgaagaagcttgcaacccagaaatgccagtgggaacagacaaaaaaagcactagcaaaagcctgctctctttagccaatggaccaaaaaagggagcaggcaagcaagaga

SEQ ID NO: 659456 - DNA, 513 bp, Homo sapiens
ctctttgcaacggtgattcaggatctggggcttcatgatggaattcagagagtactttttggcaacaacttgaacttttggctgcacaagctcatcttcatagatgccatctccttcttgtcagggaagaggctgacattgtccttggacaggtacatccttgtggacattgatgatatatttgttgggaaagagggaacaaggatgaatgtcaaagatgtgaaggtaagcttatttatagacaacatcgaaatttgtatttcacaatatggtactgataaaatattactaatatgatagattattaatccctaaagttttaaggtgcagtagagttgaaataagatagccatttagaaaaatattgaaccaagacttaaccattctttacacacacatacacacaccagaagcttcagaatgggacagagctraaatattaaaatatcccgaagagttagtgaacttaatctctttgccctttttttttttttttttttttttctgaacaga

SEQ ID NO: 659457 - DNA, 523 bp, Homo sapiens
agggtgagaatgaaagctctaagattgtaatcatagctttgtctttctggtgaccagctcctatctaggaacccaccaagaatcaccttattagaacaaaagatgcttctattacccaggaaatcccaagggatttaggaattctttatcaagaaccagggtcaaaactaaatattagaataagagattattctagtaaycttatcttctacagaatttggagttctggctcaggaactgggacagagaccaaatattagaacaaaagattcttctattgctttagtcatttaggaaattacaaaatttataagagctgtgatccaggaactgtggacaaaatctaaagtatgtatttcataatattacacactctttttttggcagagactgaaaaatcccaccaccagtatccactctccttttttttgtttatttatttattttgagagagggtctcactctgtcacacaggctggagtgcagtggcatgatcccagctcactgcaacctctgcctccca

SEQ ID NO: 659458 - DNA, 506 bp, Homo sapiens
caaaccctgatgataaacaacagagaaataaaaaagaaaaaagggatatacaaaactaccagaaaacaattaacaacatgacagggataaaacctcacatatcaataatgacctggaatgtaaagagattaaattttccactttaaagatatatactggctgaatgtagtttttaaaaatgatgcaatcatgtggtgcctacaagaaactcactttatcagtaaagacgtatatagagtgaaagtaaaggaatagaaaaagctattccatakaaatctaaatcaagcaggagtagctatacttacatcagctaaatgcactttaagtcaaaaacagtaaaaagaaagaaataaggtcattacataatgataaaggtgtcaatccatcaagaggatataacaaatctaaatatatatacactcaatgctggaactcctagatatataaaccaaataatgctagatctaaaaggcgagatagactccaatacaataatagtgggggag

SEQ ID NO: 659459 - DNA, 458 bp, Homo sapiens
gcatgttgctctggttcactagttaaagacttcagagtcatctctgtctcacttcactctccctcactcctatctccccacgaacagcccgagtcctattgatttgtgcctctacaatatctgtgagatatatccttcttctcccctttccagtgccattgcccgaatttaaacctgcrctgtcttgcaccttgatttttagagtgacccccttcctgctttccaagcctcctcccatccatccaaactttaaacaacacaacttttaaaaaatacaagtgtgattatgccctatccctgggtcaagactgtaaaggctccctgtgtccataggatgaaattcagatcctaacccagcacaccaggcctttgacacctgctcaatcttcatcacctggtcacaccaggcattctcatgctccttggcttttacacgtgctgttctttctgcccggaat

SEQ ID NO: 659460 - DNA, 402 bp, Homo sapiens
tcattggctaaaaatccagccctggaatattaccaaataagtttacacaaatgatttatagccgagaacactatacctaccctcttatgcctacctgtttcatgctgttgagtgtttgcattaaatatactcagaaactttttttctatggtaatataccttattttctctattttcaagtggaactagtrggattaaaataaaacatttgcagtacctgctcctcatactgttgctgtcttgtttgttgaggtgaccttggaactgtttgctgaggttgttcccagggtaggaccatgtaaactggatagtattgaaacatctacttgtaaaaagagaaggatacaagagattccattaaatcagcataggacatactttttatcttctaatgtcaatttt

SEQ ID NO: 659461 - DNA, 606 bp, Homo sapiens
agctcatttattttgggaaattaaactaattttgtcatttttttgagggacaagggttattttttaaagttttggctgaattaaccagttgtttttgttgcaagaggttatagtcttaattgaatacaggccaccacaaaatctttgtggtagttgtaaataaataaactaataacttaaggttaattgaccccctcttatcttctaaatctacttggaaaccactataatgcctcaatacactatttgaggctttggttaatgttacgtttaaaacaaaataattcactcacgggctttttcaattctgcagyttattttttccatttagttctaaagagtcatcattggctggctctttacataattttacatattccggaagtcctcctagtgtattataaaacagagtactaaaaatacatagacccatatttaatcattttataattagatatagatttttatatactttttaaactttaacaagattgcattagtagctgttatttaattcacacccaatgtcctttctaacctaaattaaatccttattgaagacatttattcacactgtaactgttttctctaatgaactaccaattc

SEQ ID NO: 659462 - DNA, 249 bp, Homo sapiens
ccgttgcattccactccattccaatacactccattccaccccactccactccattatactccattccaaktcattccattaatttccattgccttctactccattccatttcattcacttccactccattcctctccactccattccactcctttccgttactgtccactccactccattccactcctttcctttctgttccattccactccactccattcaattccactctactccattccattccat

SEQ ID NO: 659463 - DNA, 445 bp, Homo sapiens
ggaatggaatggaaggcaatagagtgaatagaatggaatgcaatgaaatggaacgaagtggaatcgagtggaatggaatcgaatggagtgaaatggaatggaatggacgcgaaaggaatggactggaacaaaatgaaatcgaacggtaggaatcgtacagaacggaaataaayggaacggaatggaatgcactcgaatggaaaggagtccaatggaagggaatcgaatggaatgaaatagaatggaatggaatcgaaaggaatagaatggaatggatcgttatggaaagacatcgaatggaatggaattgactcgaatggaatggactggaagggaatggactcgaatggaatggactggaatggaatggattgaacggaatggactggagaggaatggactcgaatggaaaggaaacgagtggaatggaatggaatggaatggc

SEQ ID NO: 659464 - DNA, 445 bp, Homo sapiens
ggaatggaatggaaggcaatagagtgaatagaatggaatgcaatgaaatggaacgaagtggaatcgagtggaatggaatcgaatggagtgaaatggaatggaatggacgcgaaaggaatggactggaacaaaatgaaatcgaacggtaggaatcgtacagaacggaaataaacggaacggaatggaatgcactcgaatggaaaggagtccaatggaagggaatcgaatggaatgaaatagaatggaatggaatcgaaaggaatagaatggaatggatcgttatggaaagacatcgaatggaatggaattgactcgaatggaatggactggaakggaatggactcgaatggaatggactggaatggaatggattgaacggaatggactggagaggaatggactcgaatggaaaggaaacgagtggaatggaatggaatggaatggc

SEQ ID NO: 659465 - DNA, 445 bp, Homo sapiens
ggaatggaatggaaggcaatagagtgaatagaatggaatgcaatgaaatggaacgaagtggaatcgagtggaatggaatcgaatggagtgaaatggaatggaatggacgcgaaaggaatggactggaacaaaatgaaatcgaacggtaggaatcgtacagaacggaaataaacggaacggaatggaatgcactcgaatggaaaggagtccaatggaagggaatcgaatggaatgaaatagaatggaatggaatcgaaaggaatagaatggaatggatcgttatggaaagacatcgaatggaatggaattgactcgaatggaatggactggaagggaayggactcgaatggaatggactggaatggaatggattgaacggaatggactggagaggaatggactcgaatggaaaggaaacgagtggaatggaatggaatggaatggc

SEQ ID NO: 659466 - DNA, 486 bp, Homo sapiens
ctcctgtgcttgctgctgcagcacacttcccactcacctctcagttccggcctggggagtttgtccccagtcaagattatatcacacatttcakttgggaggttgtctcaacctgtgaccaccatctgacttagctggcagacttctaggaggtcctgtctgaggtagaatcagaactggcttccctccattctaccagaaacggggaatgtgctggagattcaaagcacatcccaatgccactcctcatatactcaccacttttccctaaatcagctccagcgctgagtagggttaaggccttccctcacggcctggattgataggtttcccagtggaagtgtatatcttagagtcagtttaccctcctgtcacaccctggaaacttacaattttctgcctagcttatggtgtaagctgcatcctgctgtttctttcaaatggtctgtggcttatttcaattttcctgttaaattcctgtgttgc

SEQ ID NO: 659467 - DNA, 486 bp, Homo sapiens
ctcctgtgcttgctgctgcagcacacttcccactcacctctcagttccggcctggggagtttgtccccagtcaagattatatcacacatttcagttgggaggttgtctcaacctgtgaccaccatctgacttagctggcagacttctaggaggtcctgtctgaggtagaatcagaactggcttccctccattctaccagaaacggggaatgtgctggagattcaaagcacatcccaatgccactcctcatatactcaccactyttccctaaatcagctccagcgctgagtagggttaaggccttccctcacggcctggattgataggtttcccagtggaagtgtatatcttagagtcagtttaccctcctgtcacaccctggaaacttacaattttctgcctagcttatggtgtaagctgcatcctgctgtttctttcaaatggtctgtggcttatttcaattttcctgttaaattcctgtgttgc

SEQ ID NO: 659468 - DNA, 619 bp, Homo sapiens
ccgcgttatacaagagaacatggcaatcacattctcttacttgatgggagagttgttttcatcatatcttaaaattatatttcattattaagctttgtcaagacgcctacctctgtagtggaagtctttggacatgtctatgggagcctgttctacagctgatctcttgtagacaacatgaatccttcctttttcttcctccatctgtttacctctttccaagggttcaatgaaatactcttcattatcactttttatcattccagcctagagaaagcacaaaatgtgttaatttaaaaaagaaatatctatcatcttcagctcacaagcacatctttttaaatgtcaagaatatgacttgtgaaaactaacgctttttcyttccacatttggccataacttaaaatagttttattaactatcaataattaattcatataaggtagaaattcacatatgacagaaatgaaaaattcatattaaggtattacggaatacaaaatttacataggataagaatagggaaatcatacaatgtatatattttatcaaactgcaaaataagtgcatttatatattctacttggtattttatatctagtaagaatcatatgggaca

SEQ ID NO: 659469 - DNA, 568 bp, Homo sapiens
cacaattattttaaattttcagtctggtaatwctaaaatctctgccatgtataagtttggttacaatgctgctttgtctcttcagactgttatttttgtattttgtttttgtttttgctgtttatcctaacttttaattttttgttgaaagctgaatataatgtttgataaatgaaactgaaataaacagatctctcatgtaaggacttacgtttatctaagtcattgtttgctgtttttgtaggagtaagaggttaaaattttctctaatgccctggtttttgcctcttatgtcctctttagatttccctacagactaattcctaaataaggtctgggccacacagttcttttcacctataattctttctttatacaggactcctatttatgtggtgatatggtattgagggaggggaaacattctttgttcctgtgattagttatcattcttctcctgggcctcttacccacactgtgaccttcacaagtgcttctcagcttcctcactgccttgttagtaggaccgaacgctggaattgggaatttccctttccccatgtcaaag

SEQ ID NO: 659470 - DNA, 424 bp, Homo sapiens
gacatcttgtggccttcgttggaaacgggatttcttcctattctgctagacagatgaattctcagtaacttccttgtgttgtgtgtattcaactcacagagttgaacgatcctttacacagagcagacttgaaacactctttttgtggaatttgcaagtggagatttcagccrctttgaggtcaatggtagaaaaggaaatatcttcgtatagaaacaagacagaatgattctcagaaactcctttgtgatgtgtgcgttcaactcacagagtttaacctttcttttcatagagcagttaggaaacactctgtttgtaaagtctgcaagtggatattcagacctccttgaggccttcgttggaaacgggatttcttcatattctgctagacagaagaattctcagtcacttccttgtgttgtgt

SEQ ID NO: 659471 - DNA, 422 bp, Homo sapiens
caagacagaatgattctcagaaactcctttgtgatgtgtgcgttcaactcacagagtttaacctttcttttcatagagcagttaggaaacactctgtttgtaaagtctgcawgtggatattcagacctccttgaggccttcgttggaaacgggatttcttcatattctgctagacagaagaattctcagtcacttccttgtgttgtgtgtattcaactcacagtgttgaacgatcctttacacagagcagacttgaaacactctttttgtggaatttgcaagtggagatttcagccgctttgtggtcaatggtagaaaaggaaatatcttcgtatagaaactagacagaatgattctcagaaactcctttgtgatgtgggcgttgaactcacagagtttaacctttcttttcatagagcagt

SEQ ID NO: 659472 - DNA, 405 bp, Homo sapiens
tggaaacgggatttcttcctattctgctagacagatgaattctcagtaacttccttgtgttgtgtgtattcaactcacagagttgaacgatcctttacacagagcagacttgaaacactctttttgtggaatttgcaagtggagatttcagccgctttgaggtcaatggtagaaaaggaaatatcttcgtatagaaacaagacagaatgattctcagaaactcctttgtgatgtgtgcgttcaactcacagagtttaacctttcttttcatagagcagttaggaaacactctgtttgtaaagtctgcaagtggatattcagacctccttgaggccttcgttggaaacgggatttcttcataytctgctagacagaagaattctcagtcacttccttgtgttgtgt

SEQ ID NO: 659473 - DNA, 377 bp, Homo sapiens
cttctttgtgttgtgtgtattcaactcacagagttgaacgatcctttacacagagcagacttgaaacactctttttgtggaatttcaagtggagatttcagccgctttgaggtcaatggtagaataggaaatatcttcctatagaaactagacagaatgattctcagaaactcctttrtgatgtgtgcattcatctcacagagtttaacgtttcttttcatagagcagttaggaaacactctgtttgtaaagtctgcaagtggatattcagaactcctagaggccttcgttggaaacgggatttcttcatattatgctagacagaagaattctcagtaacttccttgtgttgtgtgtattcaactcacagagttgaa

SEQ ID NO: 659474 - DNA, 377 bp, Homo sapiens
cttctttgtgttgtgtgtattcaactcacagagttgaacgatcctttacacagagcagacttgaaacactctttttgtggaatttcaagtggagatttcagccgctttgaggtcaatggtagaataggaaatatcttcctatagaaactagacagaatgattctcagaaactcctttatgatgtgtgcrttcatctcacagagtttaacgtttcttttcatagagcagttaggaaacactctgtttgtaaagtctgcaagtggatattcagaactcctagaggccttcgttggaaacgggatttcttcatattatgctagacagaagaattctcagtaacttccttgtgttgtgtgtattcaactcacagagttgaa

SEQ ID NO: 659475 - DNA, 377 bp, Homo sapiens
cttctttgtgttgtgtgtattcaactcacagagttgaacgatcctttacacagagcagacttgaaacactctttttgtggaatttcaagtggagatttcagccgctttgaggtcaatggtagaataggaaatatcttcctatagaaactagacagaatgattctcagaaactcctttatgatgtgtgcattcatctcacagagtttaacstttcttttcatagagcagttaggaaacactctgtttgtaaagtctgcaagtggatattcagaactcctagaggccttcgttggaaacgggatttcttcatattatgctagacagaagaattctcagtaacttccttgtgttgtgtgtattcaactcacagagttgaa

SEQ ID NO: 659476 - DNA, 377 bp, Homo sapiens
cttctttgtgttgtgtgtattcaactcacagagttgaacgatcctttacacagagcagacttgaaacactctttttgtggaatttcaagtggagatttcagccgctttgaggtcaatggtagaataggaaatatcttcctatagaaactagacagaatgattctcagaaactcctttatgatgtgtgcattcatctcacagagtttaacgtttcttttcatagagcagttaggaaacactctgtttgtaaagtctgcaagtggatattcagaactcctwgaggccttcgttggaaacgggatttcttcatattatgctagacagaagaattctcagtaacttccttgtgttgtgtgtattcaactcacagagttgaa

SEQ ID NO: 659477 - DNA, 375 bp, Homo sapiens
aacctgtcttttcatagagcagttaggaaacactctgtttgtaaagtctgcaagtggatattcagacctctttgaggctttcgttggaaacgggatttcttcatattctgctagamagaagaattctcagaaacttacttgtgttgtgtgtattcaactcacagagttgaatgatcctttacacagagcagacttgaaacactctttttgtggaatttgcaagtggagatttcagccgctttgaggtcaatggtagaataggaaatatcttcctatggaaactagacagaatgattctcagaaactcctttgtgatgtgtgcgttcaactcacagagtttaaccttttttttcaaagagcagttaggaaacactc

SEQ ID NO: 659478 - DNA, 467 bp, Homo sapiens
taggagaaatacctaatgtaggtgacgggttgatggttgcagcaaaccacctgggcacgtgtaacaaaactgcacattctgcacatgtaacccagaacttaaagtaaaaagacaaacacccaccaccaaaaaaaaaatataacaataaattaaaaattaaaaaataaagtgtcaaggagggatgcaaagttgggggagtcttatggtatttatttatggtatttatttctagcaaatggctagaaatatggtatttatttctagcaaatggctagaaacatggtatttatttctagcaaaaggctagaaatcagattgccatgcttctaagggagcaccttctccagatggaaagggatttgacaaggcactgttggtaacaatttttkggggaggaaagcttacatttaatccttatgaagtgtgactgcttattaaattgatcaaagctctattagaacatgaac

SEQ ID NO: 659479 - DNA, 418 bp, Homo sapiens
gaattcttcctgaaagcctcagcggccagagaccaaggtgcaacagggctgtcctgggctgcaggaccagtaactgatgaagaatttcttctggccccaccactactggctgctttcttcccaaaaaggccatttctaatttttgcttgaaagcatagtatctgcctgcctgtttctatttccccratagttggcaggatgtgatgttgctttagactgcccttctgactcagtctgttcacccataaagcaagcataaaaatgtttataccatccctgactccatttggggttacaaattctttgaatgcctttggtgcatggtaagtacaaactattgcacctcatgttttaaagcaattgtgtatgcataagatctttatgccttcttttctctttccagaaaatagtccctttc

SEQ ID NO: 659480 - DNA, 587 bp, Homo sapiens
cattttttaaaagacacaatctaaagaaggcaaaataaaaggaaaagggctacaaagaacagataggaaaaatagaaagaaatgacaagatgttggatytaaatccaaatatattgataactaaattaaacacaattgattgaaacattccaattaaaatgaaccgattggcaactggattgaaaagcagtcaccaactatagtctatgaacaataaatgtttttctctatattaaaaacaataaattgtaaaataaaatttaaaaatatgtgtaacaacattaaataagaaatacttagaacaaaaatcttcccattcactgatgaatggggcctaatgtaatcaacctgtcaccaggtagctggctgatcaccatgaagaatggtgccatgtaaaagggttcagtgtgggtttctgttgttggcagactgggcacttaatggtggccacagtcatacaaggcttagtgaatgggaatccatattgctgaacccatgcataatctcatgcccgccaccatggccatgttgttcatgagcacattgggacatgactggtagctgaggagaaaggctgatagtatcca

SEQ ID NO: 659481 - DNA, 481 bp, Homo sapiens
agatgggctctgtcatcaaggtgagtgagcagaagaatcaaggcacctttcttgactacagctgggaattgcagtaaaaccaaaggaggacattcttgcagaattgtcaaaatcagaaacagaaatttacaaggaagttgtttcaggagattttttttgtttccagatgcagcaggcttgctgattgaaaacatttgggtcttgaaacccaggtttttactctgagaacgagaaatgtcagaaaatcccatagtatgatcctctttcccactttatagatgagaaaactaaattatagagaggctagaaaacgagcccaagtctatgcagtgttagtaacacatggaggaacataacctgttctcctggctaaccaaatatttccacctcaaagtgctgcctcctatatattttkgtttgttttgagatagtctcactctgttgcccaggctggagtgcagtggtgctatctcagctcact

SEQ ID NO: 659482 - DNA, 574 bp, Homo sapiens
tccctgggggagcccgggtatgcagcccccacgccaacatggatctctgccctcaccccctcgctgcctctggcttcttcctactttctcatcttgccccggcctcgtctaacatcaccaccctgagggttcaactacttcatccttacaagataaatatcatttaaaatctttttaaaactttgggttcctgagcttttaaagacagtatctggggctgaaaactccactgggttttcccttggcaagaatctaagatatccccatatatggatgtccaccctctgtttggccctggcttctcactctattgtagaaagttctttctcacatgarttgagctactgtcagtcctagctctggcctaaggaaacccacagaacaaacataattattttcctttttcatattataatatttttattgtagaatatacagataagcaaaatgaagaaaatgaaaaccacttgtaatctaccatctaaatataactcatggtaacaccttcagggtctagtctttaatgttgattctcatacaatcacacacactctaaacaacaaaataaagtaat

SEQ ID NO: 659483 - DNA, 574 bp, Homo sapiens
tccctgggggagcccgggtatgcagcccccacgccaacatggatctctgccctcaccccctcgctgcctctggcttcttcctactttctcatcttgccccggcctcgtctaacatcaccaccctgagggttcaactacttcatccttacaagataaatatcatttaaaatctttttaaaactttgggttcctgagcttttaaagacagtatctggggctgaaaactccactgggttttcccttggcaagaatctaagatatccccatatatggatgtccaccctctgtttggccctggcttctcactctattgtagaaagttctttctcacatgaaytgagctactgtcagtcctagctctggcctaaggaaacccacagaacaaacataattattttcctttttcatattataatatttttattgtagaatatacagataagcaaaatgaagaaaatgaaaaccacttgtaatctaccatctaaatataactcatggtaacaccttcagggtctagtctttaatgttgattctcatacaatcacacacactctaaacaacaaaataaagtaat

SEQ ID NO: 659484 - DNA, 544 bp, Homo sapiens
ttctgtgatgctggctcagaattctgcaaatcacactgctgatttaccaccttattgcctgcgagttaatgccaataggcagagtagagagagctaaagcaagactagatggcaagaggaggaagaagggaatatttcctcccattttattccctctcaaatttatttacctatttcagcttttcttgaggtataatgtatattatacctcaattaggtataactgtgtattattaatacacacactttcatcagtttagaaatatttatacacctgtgatagtatcaccacaattgagataacatattcatcrcctccaaaagttttcttgtgcccctttttataattgttgttgttgctgttgttccttcctatgctaaagaacagacttgcatctttacctttactgtcagtaacactttcacttcaagagtggtggcaagtcattctagtaatagcagttagagcaagtttgcagttttctatgattttcagagtcatgttcatcatactcctccagagacattaccacaaattgaatca

SEQ ID NO: 659485 - DNA, 561 bp, Homo sapiens
atacgatctcattttgaaacttatcaaatgtttctctytgttgtatctagagttctgaaatgtcacagccatgttacttattatgagtctatagtctttcattttgccatgcattttatgggtcctttcagtctgacaatttgtgtccatcaactctgggaaaattcctcatgttttttctttaattttcttgcctttgtttttggttctggaactctaattaaacattctacctcctggacctattttttttctgtcattttttatgttttttttttcttcatactttctggaaaatttacctttttcaaacttttgagactttgatttctgctatcatacttttaatttccaaggccttttttgatctctgtataattttcttattatatcctgttatgttttctttttatgaattaaaattattgtttggttttgaaatttattgcttcctgctttctctactttttccaaattattctttctgttaatatgttttcatctttttaatcgaggctttcctcgagctatgtagcaatcattgattgcatgttcaaattt

SEQ ID NO: 659486 - DNA, 612 bp, Homo sapiens
gtaaaaatgccaaaagagaggcctattggtgtccctgaaagaaagagaaagcaaacaacttggaaaacatatttcaggatatcgccatgaaaattccccaaaccttgctagaaagaccaacattcaaattcagaaaacacagagaacccttacaaaatactacacaagaataccttctccaagacacacagtcatcagattcttcaaagttgaaagaaaaatactgggtgggccaagatggccaattagaagcagctacagtctgcagctctcacagaggacaaaatggtgaatgaattctacaccttcaacctaggcatccaggttcttgcattgggactgactaggtgatcagcatgactcagagagagtgaggaaaagtagggtgtggctatggcccacccaggagcagcacagagcaaagggagctgtcatccccagccaagggagttgagtgattgtgtgaccccgcacaggaaaccacatttctgccacagatctttgcaatccacccsctatgaggccatgccaccagggccttgggtctgaggcagagagctgtgtagattctcagcggccacttgggcatgcacggagatgcaggagtttttg

SEQ ID NO: 659487 - DNA, 585 bp, Homo sapiens
ctgggctggagtgcaggggtgtgatcatagctcactgcagcctcaaacttctgggctcaagcaatcctcctacctcatcttcccaagcagctggaaccgcaggtgcacatcaccacttatgggtatttttaaattttttatttattgtagagaaggtgtctcactatgttgcccaggctaatctcaaactctgggcctcaagcaattctcctacctcagtctcctaaagtcctgagattacaggcatgaggcactgtacccaacttgtttttaagatgtgtttagtttagtgctaataactccccaatacggagacaagacccttgtgactactctaccctctaactcataaagattttactaagtggtggcaataggcaccctattcttgtgtgaggtgttgactactctttattttctaacgtrctttttttttgtaagtttgtttttactttttttctttgtgtccttcttgcctttgcttctcttgccttgttttttctcacttcctcttttcttttccttttcttaatactgcttaaaccccttcatttcttccatttctttatttttttccttgtattc

SEQ ID NO: 659488 - DNA, 388 bp, Homo sapiens
gaattctcttcccagcaaagccaggttttatggctcttgcagattcacttaatcttttgcaacacatgaatgatcccttcattctaaaggccacatggttgatttggtaatttctatagatctgtctcttactggtttgcttttgtctgctcattccttttctgttacttaattatttcaggcgatttttctctacctatttaccatccgcaattcaggccatcctttattcttctccttaatttcagagctttacagcctaccctccaagagcctggggtttcatctctacatagtgcacattgtgccccctctttttaattgaggcagagactaggaattatgcaattccacactccaytggtcatttgcagggttggatttatga

SEQ ID NO: 659489 - DNA, 471 bp, Homo sapiens
ttttttctaaatagtaggtgaatattattttttaagtttggacttccacttgtttttagtatgtagaagtattttaaatttttgtgtgytgaccttatatcctttgacattgctaaacttactagttctgaaagtttgttttttattttttaatagattgcttgggattttctacttagacaattatgtattcaaatgggcatagttttattcctttatagtctgtatgccttttcttttattgctgtaatgtactgtctaggacctccaatgagagttgacatccttacccttcctcaatttttgtgagaaaacattgtctttcatcatcacataaaatgttagctgtgggttttttgtagatactctttatcaggttgaagacattgccttctgtttctagtttgttgacaatctatatgatgagtgaatgttggattgtttcaaatgctttttctgcatgaattgata

SEQ ID NO: 659490 - DNA, 627 bp, Homo sapiens
atatgttttttctctttgcctaatattttaagacatgatttcaacacttgattttagtatcatttaatctgttaaaaagtaaatgggatttactcttctccactcttcacactaactggttactcgctttctcttaaatttcaccaactttttcaggaaatatattactcatatatctactgactgaatagtcctgttaggctcagactacttaaaaattgtagtattgtagctatgttcacctgtgaaatgtattttaaaaacacacacatcagatyatctgctaggtgctgagaatgcaaaactgagagcagctcctctctcacccgagagaagagcagaccactaaatgagtaatcacagctctgccttatgactttgcagttcctgcctttatatatctggaaagcccatccagtctttccttgtgtagaatttaaaatcaaagcagctctaaatttgtcctttttctgtctggaccctcattacttagaccaaatgtcctgaaatttagatgaagaattccttaaaatatgttacttgtatttggtaactactctccatcctcctgctagtaggtaaacgcctgttgaatcttgtagaataagtggcaaacgctcaataaat

SEQ ID NO: 659491 - DNA, 526 bp, Homo sapiens
aaactaaatagcaaagagttctagtaaaagtccaaaaagcccatgtttaaagagcacagatactacatgaactcatggtcatatatatccatcaactgtatgatgttatcacgtataagcccttgctgacctcatcaacctcatgaggtttttgtaaattattgagaaataaatagcacctagaacagtgactgacacaaaataatcactgtataaatacttgctgtattactattatgctgttattagaagcattatttcctgctagattataagcaaatggaaagtaaagagtacgtgtttctcatctttgttctgctctggcacctaggttgttgtctttggcaaattctrttgttggattaaaaaatatgactataacgaatagtggagtctcaaaatttcccttgccatttgtagccttttcaatattaaaacaagttaattactgaattcatttaataaaatcattgcacttcatttttcttcattaatatagctttgcttctggtttatagccaaatac

SEQ ID NO: 659492 - DNA, 526 bp, Homo sapiens
aaactaaatagcaaagagttctagtaaaagtccaaaaagcccatgtttaaagagcacagatactacatgaactcatggtcatatatatccatcaactgtatgatgttatcacgtataagcccttgctgacctcatcaacctcatgaggtttttgtaaattattgagaaataaatagcacctagaacagtgactgacacaaaataatcactgtataaatacttgctgtattactattatgctgttattagaagcattatttcctgctagattataagcaaatggaaagtaaagagtacgtgtttctcatctttgttctgctctggcacctaggttgttgtctttggcaaattctattgttggattaaaaaatatgactatmacgaatagtggagtctcaaaatttcccttgccatttgtagccttttcaatattaaaacaagttaattactgaattcatttaataaaatcattgcacttcatttttcttcattaatatagctttgcttctggtttatagccaaatac

SEQ ID NO: 659493 - DNA, 606 bp, Homo sapiens
aaataagtgaaaaaccagctgcatccatcaaagtcattaatgaccttagaaagaaacttcataaatgcaagcatggatggatggaaggaaagaaggaaggaaggaaggaacaaaggaaggaaggaaggaaggaaggaaggtaggaaggaaggatagagatgaatttgtggtgaaacaaggaataagatgaagaaactctcagtggaaatatagacatctattgaaaaattagagaaatattcagaaagtatgtctttatcttcaatggttaagatttgtatcaagcatgattattctaagtcttagattttcttgccaattttgctatatatataattaactttatattatctggtgggataaatgaatatagcatctcatattgctttatagacataggcaagactttgcttttcctagaatcctagacttatagaggtggaaataatattagtgaccattacatttactccaaatgttttatagatgaggaaactaaaatcgaaagattgtccatgacttgcctaatgcattcagccrctggttaagaaccaatgcatccagtaaataagcttttactaaagaatgccagccacagagactgat

SEQ ID NO: 659494 - DNA, 604 bp, Homo sapiens
ggttttacatgtgttatctcagtttgggaggttcaatcccattgctcttggtcctgaactcccaagtaaactgtagatggttttccattagagctttctgtcttctttgccatgccatctgttcctatttagtaaaatacagcacaagaggccaccacatggactaaatgaaagagaaagggtaaggggaagagagcttcttggtgaagaaagggtgcatatgagggagaaacagatgggaagagtaataccagtgagctcacctcttaatttaataagaaaaggccattttatagccatctctattaytttgaagtaatgaaacattttccaaagtgagaaatcatgtcatctgttgtgcttcagtaggcttaatctaaagagaagcaaagtatttcatatgtttttatgagaaactttgaaaaaaaaaaacaatgactaaccatctggtatatttttaaatctgctctggaatgtatattttacatattttctggattgtcgtattttactgccaagcatgcttgcaaatacccctatttcagagccgcatgatcagatggttgctggaagagtacaaaaaaaaaaaaaaaaaaagggagcc

SEQ ID NO: 659495 - DNA, 521 bp, Homo sapiens
acctatgtaacaaatctgcacattctccacatataacctgaaacttaaagtaaaattaaaaataaaaataaataaattaaaaacttttagtatggaaacaacctatcggtttcatattctttttaatgtaataaatttattcatagtatcttggaaataaaactgagcatcaagcaattgttacacctggtatagcagaccttgttagtgttagcaatattaaacctaatacttaggcttgttaaaactaggccatgcaacaaaaygtgaacttctaaccaattctatcccacccactatagtgctggacaggataaacctgttacttttaacataataggaaaaaaacattaagccaagacatagtagcttatttttatgagaaagagtttctttttatgcacttgaattaggcggaactatttcagttttgaataacgaaacttcaactcaaacaggcctcagctaaaaagggagtttattactaatattgcaaagtgttcaaactaagtcacataaaa

SEQ ID NO: 659496 - DNA, 521 bp, Homo sapiens
acctatgtaacaaatctgcacattctccacatataacctgaaacttaaagtaaaattaaaaataaaaataaataaattaaaaacttttagtatggaaacaacctatcggtttcatattctttttaatgtaataaatttattcatagtatcttggaaataaaactgagcatcaagcaattgttacacctggtatagcagaccttgttagtgttagcaatattaaacctaatacttaggcttgttaaaactaggccatgcaacaaaacgtgaacttctaaccaattctatcccacccactatagtgctggacaggataaacctgttacttttaacataataggaaaaaaacattaagccaagacatagtagcttatttttatgagaaagagtttctttttatgcacttgaattaggcggaactatttcagttttgaataacraaacttcaactcaaacaggcctcagctaaaaagggagtttattactaatattgcaaagtgttcaaactaagtcacataaaa

SEQ ID NO: 659497 - DNA, 569 bp, Homo sapiens
gggtttggctacttcatgtagctctgtgtcgagggaaaaaaggacagatttcaatgttaatttgtagattgcatttccatataaaaatctggctcttttacatttctttaattacgactaaggagcagtgtggtattcataatgtgacagacacaaagatgtgccactcacatcctccttcaagaaagcactcgctgcccagctgtgaggagtgtggtttgcccctggcctccagctgttagtccttcagggtctgcttcagctttccggtacatttcacacatgagcactgctagttgtgcggtggmccctagccaatgactgagtcgggcagtggtagccaagagcctgttctcgcagcagcctcctgccaatgactgaacagggagtgaggcaaggcccagccacttccacccaacgcagattcctctcatgggcaggtgtgctcccaagcttcccactgggctggcagaggcttggtcaggttggcatcatgactgacagcacccctgcccagtcctgctcccttccttttctgttcccaggcgtactccccaataaatagtttg

SEQ ID NO: 659498 - DNA, 610 bp, Homo sapiens
taaaatgcaaggctcttcaaaaatcagaacttcatttatttaattcactgctatatcctcagtacctaagacaaggttttgcagaaagtaagacctcaataattatttgtggacagaaaagtaaacagagacttttacggcaagtagagtctattgacataaagtatttgtttccaaattttgacccttccattatgtcagtaagataatgtattagtttgttctcatgctgctataaggacatacctgagactgggtaatttataaaggaaaggggtttaattgactcacagctatacagggctggggaggcctcaggaaacttacaatcatggtggagggggaagcaaacacgtccttcttcacatgtcagcaggaagaagtgccaagcaaatggggaaaggccccttataaaaccatcagctttcatgagaactcactcactatcacaagaacagcatggggggtaactgcccccatgatttgattacctcccactcaatccttcccacaatacatggggattatgggaattacaattcaagacgagatttgrgtggggacacagccaaaccatatcacataatatactctaccaagtgataaagta

SEQ ID NO: 659499 - DNA, 598 bp, Homo sapiens
attcaattttagtttcctgtaatttggaactgctcgttattgatgcttcagatctgcttctgatccttagttctcagatatcctgggaagaaaatatagggacagaaaagggaagagatagaaaaagggaataagggaagtcagagaaagagaagacagggaagagatgagggagtagggactctgaacactgaagagcagaaatatttatggcactctttggactactctaatacagagcaacttacagaatacctgccactggatagcatataaatacaacagccttgtccaggaactacccacaaaatatagaacccgagtaggtgttgcctagaacartggaacaaacaaccattaaatattttacaaaacatatagaactgatgcatggacttttcccgaacatgccacagattcagaatgcaagtatgttaaaaaatttttatttggtttctatttgtattaaatagcatttcttctaacttcaaatgaaggtggtagcacatctctcttgacgacagaacagttactgtaaacaagacaatggtgagtcttcactggatccctctgtttacagaaacaagtatgagggatg

SEQ ID NO: 659500 - DNA, 628 bp, Homo sapiens
aaaaaaaaaaaagatacaaactctttatccataatattctaaaatgatgttaaacattacataaaattgttatacacaattcgacgtgaacttatagaagttagtcagatataaaaatatcctataagaaatagcttaaatatacaaataaaaattcctataaactatgtgaaaaaatgcttctctttgtgtttacacatttaatacacaggattaaaatgttaaaaattgattatttctatcacacaatgtttttagatagcatggctatataggaagattattgattatcctggtgaatcaaaaccaacatcatttcctcaaatttataaggatggttttgtgcttattttcccccaagtttatgatatccaagttcacacattcagtacttttatgatgtaatttcttggatgcatctcctatattataatttggatagagattttccttgtaattacagcaaagtttacactatactcaaaaccatgtaaaaattatctctgacatgaaacatgaagctgttgaaatattggsatgactaagactttcacccagagaaaacaaagtgatagaatattttcattgaattttgaatcctacccctgataaaggcaaaccatcactt

SEQ ID NO: 659501 - DNA, 628 bp, Homo sapiens
aaaaaaaaaaaagatacaaactctttatccataatattctaaaatgatgttaaacattacataaaattgttatacacaattcgacgtgaacttatagaagttagtcagatataaaaatatcctataagaaatagcttaaatatacaaataaaaattcctataaactatgtgaaaaaatgcttctctttgtgtttacacatttaatacacaggattaaaatgttaaaaattgattatttctatcacacaatgtttttagatagcatggctatataggaagattattgattatcctggtgaatcaaaaccaacatcatttcctcaaatttataaggatggttttgtgcttattttcccccaagtttatgatatccaagttcacacattcagtacttttatgatgtaatttcttggatgcatctcctatattataatttggatagagattttccttgtaattacagcaaagtttacactatactcaaaaccatgtaaaaattatctctgacatgaaacatgaagctgttgaaatattgggatgactaagactttcacccagagaaaacaaagtgatagaatattttcattgaattttgaatcctayccctgataaaggcaaaccatcactt

SEQ ID NO: 659502 - DNA, 651 bp, Homo sapiens
gagctgtgagtggatgagagaagacttgagctccatttgatggggctggtcttcacaaatgtaatcaggagtttttgtctgagtctggaaactgaactgtccatatctatagggagatttgtgaagacgcatgccttgcaacttgtctctaacctgggtattcagacatttctaaaaataggtaaactcaatttaggcgacaaattgctgttgctagtctttaaattccaaaaaaggacttcagtgaaccaataagtgtctcagatctggggtgagggatttagggtttggtttctgggggycatcagaaagagcagggcctttaggagaaagcatattcctgactcctgtaacttcaccttgactcagaaattggtggaaacacatgcatattagtccattttcacactgctataaagaaatacctgaggctgggtaatttatcaagaaaagaagtttaactgactcttagctccacaggctgtacagcacaggtccccaactgctgtactcactcactatcatgagaacagcaccaaaggggaaatctgccctcatgatccaattgcctcccaccaggacccactgttaacattagggattacaatttgacatgagatttgggtggggacacagatccaaaccatatca

SEQ ID NO: 659503 - DNA, 651 bp, Homo sapiens
gagctgtgagtggatgagagaagacttgagctccatttgatggggctggtcttcacaaatgtaatcaggagtttttgtctgagtctggaaactgaactgtccatatctatagggagatttgtgaagacgcatgccttgcaacttgtctctaacctgggtattcagacatttctaaaaataggtaaactcaatttaggcgacaaattgctgttgctagtctttaaattccaaaaaaggacttcagtgaaccaataagtgtctcagatctggggtgagggatttagggtttggtttctgggggccatcagaaagagcagggcctttaggagaaagcatattcctgactcctgtaacttcaccttgactcagaaattggtggaaacacatgcatattagtccattttcacactgctataaagaaatacctgagrctgggtaatttatcaagaaaagaagtttaactgactcttagctccacaggctgtacagcacaggtccccaactgctgtactcactcactatcatgagaacagcaccaaaggggaaatctgccctcatgatccaattgcctcccaccaggacccactgttaacattagggattacaatttgacatgagatttgggtggggacacagatccaaaccatatca

SEQ ID NO: 659504 - DNA, 418 bp, Homo sapiens
atgttcaccaacctttactgagtgcttaataaccaaccattaactcttgcactgtttaaatgataagatgtgtcactgataaaactgatcagtcctgtcaagtcagcccatactttctctgaaataagatttgagggarttttctagtagacagacttgaaaggtctatcaacccatacagggttaagatgtccccaaatacaatttgtgcccctactttccttcagtatttaatcacctgaagatcccctccaatctaattaagattctcttttagtttatttttatttgcctgtttacttattttttcattagtttgtgtgtgtgtgtgtgtgtgtgtgtgtggggagacagggtctccctctgtcacccaggttggagtgcagtagtgtgatcttggttcactgttacttctgag

SEQ ID NO: 659505 - DNA, 554 bp, Homo sapiens
ccaggctggagtgcaatggtgcaatctcaacttactgcagcctctgcctcccgggttcaagcaattctcaggccccaggctctggagtagctgggactgcaggtgcatgccaccacacccggctaatttttatatttgttattacagacagggtttcactatgttggccaggctggtctcgaactcctggcctcaagtgattcacyggcctcctaaggtgctgggattacaggcatgagccactgctcccagctaacaaactcaattctaaactaggagtatatgaagaaccaggggtcctatcagaaagactgggagcacgattctggactttcagcaggtagtgattctctgtgttgatgctcattcaatagatatgtttaggatttactgtggttcttttgaaatgaaactgtgaacttaaaatatctgagacaggtctcaaccaatttaaaaagttcattttgccaaagttaaggacatatccatgacagagcctcaggagctcctggtgacatgtgcccaaggtggtcggggtacaatgtgcttgtata

SEQ ID NO: 659506 - DNA, 611 bp, Homo sapiens
caatgtgcaattatatttaagcctaaattccataattgttttaaaagatgtctaattcaataataaatgaataacaaccaaaatatttatattggctgtaacaaatccaaacttaattcgatttcagaattttctgcagaatccacgttgaagggatgttaaaataattttagtggattttctcttctcagtcaattcctcttaattatctattttgaaatatattcaactctggtgattcttttaggaaagttgaattgttttatttcattttagtaacaaattggcacttaaaacataaaatagcccatttgttgatggcccacaagtactttctcstaactagaaagatgtgctatcaactggagaagctattactctaatttgaattttggttaccttggctcataagactgctgcctgtgtttgctcctaagtgtttattagtgaatcattgacggttagtgtaatttcaatgctaattgttgcttcaggttttcaaatagctcagcagtaagacattaatgattattcatgccttaagaagggctgataagggaatgagattacaatcttgtgcgattttagctaacaaattaaagtataaatta

SEQ ID NO: 659507 - DNA, 611 bp, Homo sapiens
gggaaaaaaaaaaaccttaagaaaaacacaacaatcctagagaaagaagagcattgataagatgctataaaaaggagcattcaaagaacaaaagaaagagtatggaattgaaaacatgagagcttcaatttttttaactcaatagatttattaggaaataaaatttagaaaaaggttagaaaaatctcccagaaagcagaggaaagaaaaatgagaagaggagagaaaaaaaaataaggaagcttgcatgtttaaagtctttcttattaaattcacatgctttaaaatttcaaattgtactaaaatatttgtaacataaaattatctatttccyacccacttttttctactccctgcttggtaatttcagaagcagtcattttgattctttcagctgtttcttttgacatttacctaactttaaatgtttaaatagtatgtgtatttgctattcttagatacatgaatgttgagcattatctaattacttcctattatggtagtttagcactttactctcttagactcccattgcctctgctttccctcctctatgattccaattcagttgtagtcatttttagattaaatcaatactcagtaaagtctgt

SEQ ID NO: 659508 - DNA, 649 bp, Homo sapiens
ggatggtcttacatcccttcctctcctttacttctgaaaactcactgatcatcatgggctactaatgtcacccccttattggctcttcccttcaactcctccatgggttctcactgtcactacaccctaggctgcaccgacaaccttcaggctggcctctgcaactttaacatccaccctctggatggtcctctgacatcagagggctctctccctgatctcttgcatcatgtttctctccagcttaaaaacttcccagttgttggtactctgttgactataagaaaaagcccagtatctcagcttgaccaaatgtcctccacaagtggccttagtctcctcaccagccactgcactgggcactttcccctagctacctgcaccctgctaccctggacgtgcyatgtcgtttcagggccctgtcctttaccatattctccctctacctatgatgttcttgcccttgaatgcccaaaaactcatctgtcaatgtccagctcaaatgtcttcctctctgaagtcatctaatgctgcattccgctctccccagccccaagctggcgaccactttctctctgtgaggacatctgtcactccagtgagcggactgctcgccttctctcctggttgtcgtatgggttcactgagg

SEQ ID NO: 659509 - DNA, 509 bp, Homo sapiens
tctaaaatcaccaggagttcaacattgccacctctcacattctaacatctctccactcacctggtccgtaggagatggcttccccatggcagttcagtataagtttgggctccagaatcgaatgacctaggttcaaaatctgtctgcttcagttatcagcctgtatgaccatggacaagttacttaatcttcctgtgcctcaatttctccatctgtaaagtacctgcaatacttacctcaaaggtttgtttggaacagtaaaagagacaaygtacctgtgagggctagcagagtgcttggctcacagtaagtgctcaattagtgttcaattagtgttggcagctgttaccgttgttaaatgaccacagccggtctggcctgaaccaggcaggacctgaaggatggaaactggggagcaaacctgcaactccacctgaggatacacttgtaaccagcagctccacagcctccaaagacactgacacttgtggcggccatcagatggctgg

SEQ ID NO: 659510 - DNA, 548 bp, Homo sapiens
accagcaccttaaagagaaggctgaaggtgggctgggcagcactgcctgggcgagaaagaagaagctgrgcctggtacaccgttttggtatctgtctgacatcttccacttcttttctcagcgcgcaaagagtctgccaaggagaagcagctgaaggaagaagagaagatcctggagagtgttgccgagggccgaggtatggttgtagccaggatagtgagaaggtggactgagtcttctcctcccagccccaggcatgttatatctcaagggatctggcttctcagaagcaggagccagccctgagccatgtctctctcttcagcattgatgtcagtgaaggagatggctaagggcattacgtatgatgaccccatcaaaaccaggtatgtctgtacagtctgcagttgcccttgcttaggatggtacatgcagggatgctcccaggccagctattcccagggctctcttgatccctgttacccatccacagctggactccaccccgttatgttctgagcatgtctgaagagcgacatgagcgcgtg

SEQ ID NO: 659511 - DNA, 515 bp, Homo sapiens
acattgtgagggacaggatggctttaacacagtgcagtgactattgagagtttggagctactgaaaagttgttgcatgatatacttggcctttagtttcagagcatggaaamttattttggaagtttgttttgattttagaaaagattttaatgactttccctaaaacaagtttctttagatctaagacaaactgactttacttagaaacatacggttataacaaatgctatggaaaaatggtgtaaaaaatggctgatcatttacagaagttacatggttcatgtctgtgcacccaagacataatgtgaccagtatgcatcatatttaaaatctatctttatgtggcacccttcttagaacatgagatttctatttgttgcctcatgttgttaccatgtgtgactcaatcagcagtttctgttgcctggtgctttcattttaaatgaccaactgtaatgacagtttttttttttcaatttaaccgtccgcatctctcgacgctcatctcggtgg

SEQ ID NO: 659512 - DNA, 542 bp, Homo sapiens
aatttttaaaagctgcaatgaatgagcagcaatagcagaagcagaaaagtgagtgagggctctccaagaagccatctggcaggctcaagggttgtgagagaagctttggtttcagaagcaactcacgaattacttctgtcatattaggatgggatggtagtagattgggaactctatggactagaagtcatttaatttcctgtctacaatccttagaagaggttttgagacttgcaacctaggaccttaactaatcatcttccctcagcattgatagaattctttattatacatgttaatatcagattagtcaggatgggctrgattatgctgtgttaacagccattctctaaatctctgtggctcaacagggagctctgcctgtcatggtcacttgggacccaggctttgggtataaggctacagcacatggaaaacgtatgactgtctctcagattcttaaagtttctgctggaagtgacatgtcattctgctcacagttcattggctaaatgagtcacgtggctgtctctaacttcaag

SEQ ID NO: 659513 - DNA, 405 bp, Homo sapiens
ttctccacctatcctgtaaagtgtattgggaaattaattttgtagatttcctcacactgcagtgactagggaaatcacccattcrttattatctaatgaggaaaaagtggaaacatctagaagcactgctcccatcctcctccccagcccacacagacacctacctcaggccctccctgtcccaggtgagcagagggccccaccttcggaggttgcctcccttccaccttcaccaatcctatgaccagattatccccaaggaaatgtcaatttccaggcagcaagggaatcatataaagataagatcattgagagatttttttcctccgtgattggcagtttatattttcttgggtctacaaatctgacagcatttattaaattttctagtttgatactgacctc

SEQ ID NO: 659514 - DNA, 405 bp, Homo sapiens
ttctccacctatcctgtaaagtgtattgggaaattaattttgtagatttcctcacactgcagtgactagggaaatcacccattcgttattatctaatgaggaraaagtggaaacatctagaagcactgctcccatcctcctccccagcccacacagacacctacctcaggccctccctgtcccaggtgagcagagggccccaccttcggaggttgcctcccttccaccttcaccaatcctatgaccagattatccccaaggaaatgtcaatttccaggcagcaagggaatcatataaagataagatcattgagagatttttttcctccgtgattggcagtttatattttcttgggtctacaaatctgacagcatttattaaattttctagtttgatactgacctc

SEQ ID NO: 659515 - DNA, 547 bp, Homo sapiens
ctgaagaacactaaaaaggataaacctgtgggtaaatctaaatgaatactgattgtacaaaatagtaattttaatatcttatatggatatttaatatcttatgtggatatatatatatcttctatggtaaccactatgagcagattataaaaacatagaataagctaacattttaaaataaaatactattatatattctaacagttgggaaatctttcattatatttattcttaggtaccctttttgttgctattataaattatatatrtatattgttgctagtatatgaacatataattgtttcatgtagtaatttatgtctacccaactagttaaactctcttcttcataataacaatttttgtggaatttttggagcttctatattggcaattatattatctgtgcataatgagagttttttctctcttgtttttatttcctatttatttctcttgttttaccatgtttgctaggatcttgaagacaatggtgaatggaagcagggtctctggacatatgtcttatttctgatattcaagagaa

SEQ ID NO: 659516 - DNA, 523 bp, Homo sapiens
aatcacgcaggatacactctatagcgtcctgctccttttacccaacattgtatatgtgagacttgcctgtattatagaaatcaatagttcataccattttgttgtttagtatttcttttctgttgctgagtagtattccactcttttatcttttagtctttccctctcctcctgttgtcctcaaaagcactaactgtgctttcttcaataaaagccaggaagccttcacctgaagccaaggatgcacagggtgcttattttttcatggaatagaggagggaaaaggcagcacaaaaaacacaagttagtatctcaggcaattggtctgccacataattattcagagaagagactatgaaggcctggattagggtggagcatgggaacarggaggagagggggctatgagaaggctagtgcagtggtggcattgatgggatttaggacataattagacctggggaaaggcagtggaggaaggccaatgctgagttgtttagcctgggaggtgactgaggtgact

SEQ ID NO: 659517 - DNA, 588 bp, Homo sapiens
accaccatggcacatgtatacctatgtaacaaacctgcacgttctgtacatgtatctcagaactttaagtatatgtatatatatgaatgccttcagaaatgctaggaaatcagtggtgcctggagacaggcaattggtgataacatagtttctggagatttccttcttatgcctaatttaacaaatcattaaaggtacatagaacaaaatccagcctccgttttgtctgcaaagagctatgtagaatatcagagctctaagcaaatagatctgctatttgtgtaagtttttgactactgcaaataaagcagtcatgaacgtttgtgtacagacctttttgtaagcttggaatggttgggttctatgttaggtgcctgattgttcaatttttcagtatttgagttatttaaactatattttattactgatttctaattttaaaaattattttgtagttagataatatactrctctgtatgacttcaattcttttaggtctattgagatgtattttatgtcctagaatatgttatatcttcttaaatataccatatgcacttgaaaaacatgtttattctgcagttgttg

SEQ ID NO: 659518 - DNA, 609 bp, Homo sapiens
ccaggttgtccagaaaccccatgagtttcctccttcatcacataagggtgtgtgcaccctgaaggcagaatcagcacctgagctacttccaggtcagtgacggtgtccaggctgccccctagagctgattggttgtgccctgattgcccccagaaatcttttaccttatcttctcatgggaaaaaaaatcccaggaagaccatagccctaactgccactggaagcactggaatccaagatagagatctcaaagatttctttagcttttctggagtaagtaggggctgtcacatggcctcagcttagaagaaaggccagcagtcattagccagtattcctattgagtttatacatgactgtgaagatctaaaggttggcacaaggattcacagatcaactctgggtgaggttaatgctatcaagaattagccctaaacctgcaattmtagattgtaatctggccatattcagagaccctcaattctgagatctctagaaacttgtcctagtacttctctaggataggcaaaaaagccctgtatatagcaactcttaggcttgagaaattaattatagtgaaacagaaggcttctaggtgaacttggccag

SEQ ID NO: 659519 - DNA, 685 bp, Homo sapiens
ggcatttcttccatagagagcaagtgtattttgattttgcctgtcctcaaattgaccctttggtcattagaacaagcatgtacagctactgcgaatgtgcacccagagggctacccagaacatgcttactagttacgcttcctcccaccctcttaggaatatcatgtaatactcccataaacagcatttacccagtaacagtcaatgctgtcatcctcacgagcagcctgcctggaatcctctctctcagagcaygctgcctattctacaactaacttttggagtattctttctcctttgcaagaaattgctctatgctgcatctcatttgctgtgtgtctcctatttaaattcttttaaactaagaagacaatgtattagtccattctcacactgctataaggaactacttgaggccaggcgcagtggctcatgcctataatcccagcactttgggtggccaaggctggtggatcacctgaggtcgggagttcaagaccagcctgaccaacatgtagaaacctcatctctactaaaaatacaaaattagctggggtggtggtgtatgcctataatcccagctacttgggaggctgagacaggagaatcgcttgaacccaggaggcagagtttgcggtgagccgagatcatgccattgcactccagcctgggcaaaaagagcaaa

SEQ ID NO: 659520 - DNA, 685 bp, Homo sapiens
ggcatttcttccatagagagcaagtgtattttgattttgcctgtcctcaaattgaccctttggtcattagaacaagcatgtacagctactgcgaatgtgcacccagagggctacccagaacatgcttactagttacgcttcctcccaccctcttaggaatatcatgtaatactcccataaacagcatttacccagtaacagtcaatgctgtcatcctcacgagcagcctgcctggaatcctctctctcagagcatrctgcctattctacaactaacttttggagtattctttctcctttgcaagaaattgctctatgctgcatctcatttgctgtgtgtctcctatttaaattcttttaaactaagaagacaatgtattagtccattctcacactgctataaggaactacttgaggccaggcgcagtggctcatgcctataatcccagcactttgggtggccaaggctggtggatcacctgaggtcgggagttcaagaccagcctgaccaacatgtagaaacctcatctctactaaaaatacaaaattagctggggtggtggtgtatgcctataatcccagctacttgggaggctgagacaggagaatcgcttgaacccaggaggcagagtttgcggtgagccgagatcatgccattgcactccagcctgggcaaaaagagcaaa

SEQ ID NO: 659521 - DNA, 446 bp, Homo sapiens
gtatcctgagaaacagaaaaagactgagaaatagtttcagattaaatgagtttaaagagatatgacaaactaaatccactgtraaaaaaaaattaccatatagtactactgaaaatatggtccagggactgactgctagttctccaactgtagtctgtccatgacaacataaggaactagcaacagaacgtaaacaactacgttactgagcacattgcttagttcagctgttttttttttttcactgcaagatattcttggggaaggaatcagtaccctgatttgcattctaaaacatattccttatttataaatcagtattttgagtagcaatgctctaaaggacattactggggtaactggcaaaattgaaatatgaaaagtatattagataatagtactgtactatagtgaattgggatttctgggggtgaaatattactgtg

SEQ ID NO: 659522 - DNA, 446 bp, Homo sapiens
gtatcctgagaaacagaaaaagactgagaaatagtttcagattaaatgagtttaaagagatatgacaaactaaatccactgtgaaaaaaaaattaccatatagtactactgaaaatatggtccagggactgactgctagttctccaactgtagtctgtccatgacaacataaggaactagcaacagaacgtaaacaactacgttactgagcacattgcttagttcagctgttttttttttttcactgcaagatattcttggkgaaggaatcagtaccctgatttgcattctaaaacatattccttatttataaatcagtattttgagtagcaatgctctaaaggacattactggggtaactggcaaaattgaaatatgaaaagtatattagataatagtactgtactatagtgaattgggatttctgggggtgaaatattactgtg

SEQ ID NO: 659523 - DNA, 446 bp, Homo sapiens
gtatcctgagaaacagaaaaagactgagaaatagtttcagattaaatgagtttaaagagatatgacaaactaaatccactgtgaaaaaaaaattaccatatagtactactgaaaatatggtccagggactgactgctagttctccaactgtagtctgtccatgacaacataaggaactagcaacagaacgtaaacaactacgttactgagcacattgcttagttcagctgttttttttttttcactgcaagatattcttggggaaggaatcagtaccctgatttgcattctaaracatattccttatttataaatcagtattttgagtagcaatgctctaaaggacattactggggtaactggcaaaattgaaatatgaaaagtatattagataatagtactgtactatagtgaattgggatttctgggggtgaaatattactgtg

SEQ ID NO: 659524 - DNA, 560 bp, Homo sapiens
gaaaattttctcccactctgtgggttgtctgtttactctgctgagtgttccttttgctatgcaaaagctctttagtttaattaagtctcaactattaatttttgtttatattccatttgctttcagtttcttggtcatgaaatccttgcctaaaccaatgtctagaagggttttgccaatgttatcttctagaatttttatagtttcagtcttagatttaagtccttaattcatcttcagttgatttttgtgtagggtgaaagatgaggatccaattttattctcatacatgtgaatagccarttatctcagcaacatttgttgaaaagagtgtcgtttcctccactttatgtttgtgtttgctttgtcgaagatcaggtggctgtaagtagttgggttaatttccaggttctctattctgttccattggtctgtgtgcctatttttatagcagtagcatgctgttttggtgactatggccttgtagtatagtttgaaattaggaagtgtgatgcctacacatttactctttttgcatagtcttgctatggttatgtggg

SEQ ID NO: 659525 - DNA, 474 bp, Homo sapiens
acagaaaatgaaatactgtatattctcacttataagtggaagctaaacattgtttattcttggacataatgttggctacagtagaaactgggaactactagaagaggggagggagagtgtgggccatgtgttgaaaaactattggttattttgttcacttcctgggtggcactaccaattgtactccaaacctcagcatcctgcaatagccccagataacaaacctgcattgaccaggcatggtggctcatacctgtaatcccatcactttgggaggctgaggaggggrtatcacttaagcccagaactttgagaccagtctgagcaacacagtcaaacctcatctctatagaaaaaaaaaatgaaaaaaatggctagatatggtgtcacacacctgtagtcccagttactcagaatgctgaggctggaagattgcttgagctcaggaggtggaagttgcagtgagctgagatc

SEQ ID NO: 659526 - DNA, 579 bp, Homo sapiens
tattttgtctctttgggcctttccttattcagtaatactgtcagtttggctttttttctaggtcaacttattgatctcagtattctgaaataatatgtttactaycttttgataagcatttaaaatattagatttattgttactcttctgccttcattgggctggaagaataattgtttctctcactccacaaaagccaagttgcagagaaaaacacatagacattcaactgcaaagcagagaaactcgactatttcctgcaattttaaagtgtatattgaataaaaccatctttttattttcttttttgctcactggcaaatattaacaacatcaagtgtgttattataatgttatctagttaaaaatctcaaaaagttttcataattaccatttaaaaatatataaataggtgacctaatgttaatttgtattgtctgagaccatgtctgttatttcactctttaaattcagttagtcatgcagaacctagcacttagtggatactcaaaaattatttgctggataaaaaaaggttaaacatgtaatatatacaaaatgtactagaaaaaatgcacc

SEQ ID NO: 659527 - DNA, 579 bp, Homo sapiens
tattttgtctctttgggcctttccttattcagtaatactgtcagtttggctttttttctaggtcaacttattgatctcagtattctgaaataatatgtttactatcttttgataagcatttaaaatattagatttattgttactcttctgccttcattgggctggaagaataattgtttctctcactccacaaaagccaagttgcagagaaaaacacatagacattcaactgcaaagcagagaaactygactatttcctgcaattttaaagtgtatattgaataaaaccatctttttattttcttttttgctcactggcaaatattaacaacatcaagtgtgttattataatgttatctagttaaaaatctcaaaaagttttcataattaccatttaaaaatatataaataggtgacctaatgttaatttgtattgtctgagaccatgtctgttatttcactctttaaattcagttagtcatgcagaacctagcacttagtggatactcaaaaattatttgctggataaaaaaaggttaaacatgtaatatatacaaaatgtactagaaaaaatgcacc

SEQ ID NO: 659528 - DNA, 579 bp, Homo sapiens
tattttgtctctttgggcctttccttattcagtaatactgtcagtttggctttttttctaggtcaacttattgatctcagtattctgaaataatatgtttactatcttttgataagcatttaaaatattagatttattgttactcttctgccttcattgggctggaagaataattgtttctctcactccacaaaagccaagttgcagagaaaaacacatagacattcaactgcaaagcagagaaactcgactatttcctgcaattttaaagtgtatattgaataaaaccatctttttattttcttttttgctcactggcaaatattaacaacatcaagtgtgttattataatgttatctagttaaaaatctcaaaaagttttcataattaccatttaaaaatatataaataggtgacctaatgttaatttktattgtctgagaccatgtctgttatttcactctttaaattcagttagtcatgcagaacctagcacttagtggatactcaaaaattatttgctggataaaaaaaggttaaacatgtaatatatacaaaatgtactagaaaaaatgcacc

SEQ ID NO: 659529 - DNA, 564 bp, Homo sapiens
acaaaactgttatgctgctgaatctatcaaacattttaagaattaattaccaattatcctcaaactcttgcaaaaacctgaagatgcagaaacacttccaaatttattctatgaggtaggccaaaattacagtgacataaaaaatgaacaaaagcactacaagaaaagaaagttgaagaaaaatgttctttataaataatataaaawctataaaataaatattagcaaaatatatttagcagaataataagagggttatctaccaagactaattgagagttattactgaagtgcaaagatgctttaacatataaatatcaataaatgtagccaggcacagtggcttgtgcctgtaatcccagttacccaggatgctaaggtgataggttcacttcagtccaggagttcaagagcagtctaaacaacatcataatatcctgtctctaaaaataaataaataataaataaataaacaaataatcataatataccgcattagtactgttaaacaccacaatatctcaatttacacagaaaaagcattctacaagatattactcattc

SEQ ID NO: 659530 - DNA, 389 bp, Homo sapiens
gctctgcttgtcagtcttgctagaatctcaccctaggcagcaacctccagtctgagattgcccttgacagtggctgaggtttgcattgttggaatggattagaaaaaacaaagggaagacagaccaaaacagatttaaatacagatcccatttgttgaagttttaagtaattttaaatgtttatttgcaccagctgcccaytcccattgtgctctcctcacccaaaaaagtgacttgatattctagtaaaaagccaaactgtgctttagagaaacccacttgttacttctttaaatccatataattttgccaaagtgaatttttcttaatatgctctggcagaatcagtaaactaattatttacaccagagtcacttaacctttcctct

SEQ ID NO: 659531 - DNA, 688 bp, Homo sapiens
aacaattatttaaatacttcagtccagagctaactggactaaactgaagaagatatttgatgaaaaaggatgaaattttttttcctgtattatccatattcactttcaagcagttgtcactgaaagtagtaagaagcaagctaacaaataagttaaaggacttttggaaatattttaataatacactgtacttgtttcctattgctattatgacaatgattcatgtccattccacacacaaaataaagtcaacccgttctcaggtctccaaaactctcaacccactagagagtcaactcaagttcaaaatctcatataagtctcacaagtttaaaagtcctaaatctcatcatacaaatccctaaattaagtataaatgagactctggatatattccatcctggcacaaaatttctctccacctacgaatctatgacactcaagactctagttatctgctccaaaataaggtgatggaacaggcacaggataacagttgtatatattcccatccccagaagaagaaaatgaaaggaaaaaaggagggcccaggcaatttcaaaaatcaactsggcaaattccatcaggtgtgagagctgaaataatcctctctggcccgtgaatctgccctctaggccagagggtctgtcctccagtcctctgtatgtgtgttaggtgactaaaacca

SEQ ID NO: 659532 - DNA, 580 bp, Homo sapiens
gtgattgctgggggctgagcagaagsggaaatggggcattactaatcaactgacataaaatttcagtcaagcaagataaatgagcactagagatctgctatgtgacattgtacctttaggcaacaataatgtattgtacacttaagaatgtgttaagaggatagatctcattttaaatgtccttaacacaatgaaaagaaatctgtgtttacttatctaagtgtcctgtttttctcgtggttgattttattcacagatgggttttcctaatgtggtggcaagaattaccatcaggagctcccagcttgcattctactggcttggggacccttatggaataagagtacttctgtcctctggggttctttatgattctagaaagagttttaaataaggccttgtattggtttcccaatgctgctgtaacaaattacgacaaacttaatggcttaaaatagactaagtttattataactctggaagtcagaaaaattcaaaatgggtcagcagagctacatttcttttaaaggctctaggggaaaatgtatttccttgattttttcagcttctaaaggctgcc

SEQ ID NO: 659533 - DNA, 466 bp, Homo sapiens
tttaatataaaaacttatctgctatttattgattttacagttttcttctattattttttattatgaaaaatgagtccaggyatggtgcctcatggctgtaatcccagcattgtgggaggctgaggcaggtggatcaactgaggttgggagttcgagaccagtttggtcaatatggtgaaaactgtctgtactaaaaatacaaaaatttgctgggtgtggtgctgcacacctctggtcccagctacttgagagactgaggtgcgagaatcacttgaacctgggaggtggaggttgcagtgagcccagattgtgccactgcagcccagcctgggcaacagagtaagactctgtttcaaaaaaaaaaaaaaagaaagaaagaaaggataatgaagatttgaagatttgacttttttacatggttcccacaaaatacacgcatgcacactgtcactgtctgtatcattct

SEQ ID NO: 659534 - DNA, 466 bp, Homo sapiens
tttaatataaaaacttatctgctatttattgattttacagttttcttctattattttttattatgaaaaatgagtccaggcatggtgcctcatggctgtaatcccagcattgtgggaggctgaggcaggtggatcaactgaggttgggagttcgagaccagtttggtcaatatggtgaaaactgtctgtactaaaaatacaaaaatttgctgggtgtggtgctgcacacctctggtcccagctacttgagagactgaggtgcgagaatcacttgaacctgggaggtggaggttgcagtgagcccagattgtgccactgcagcccagcctgggcaacagagtaagactctgtttcaaaaaaaaaaaaaaagaaagaaagaaagrataatgaagatttgaagatttgacttttttacatggttcccacaaaatacacgcatgcacactgtcactgtctgtatcattct

SEQ ID NO: 659535 - DNA, 613 bp, Homo sapiens
gtgtgtgtatgcacatctgttatttatattcataaaacgtcttttcataaagaggaaggaggaaggagatgatattggctgagccaggggcatggcttctgtatgcaggagggccctcaggttaggtgaagcattcatttttgctattatttcctaaattgcaacttctagtcagattagttgagatctcaattccagtcttcccttgaagtttttcataaatagaaaaagcatcatcaaaatagcccaaactgatacttcccctccccaaacagtacataaaacaacattttgatttttttaaaaatcaaaatctgtgactcttctcagctttgtttttctctctattgacatggtgaattgtcagctgcagagccaacatgccttgactgatgaaaaattttatactttatgttatattccttcacatcgattctcagaattttcctgttgccaagcaagtgtaaaacctgggagtagatgattaaaggagagggaacttcaggctcctagaagcaaaagtttccgcttactttcctgagaaggtttaaatatcatctaggatgatataattaytatttttattattaatatgacaatcacgtggttaata

SEQ ID NO: 659536 - DNA, 572 bp, Homo sapiens
ttgcgtgtcacctgttttggttttgctcacactgcttccttggagctactcaacaaatagtcaaatggccttcctgggactakgtaaaatatggaatgttttctgaatttgtgtgccatccctaggcagtagccatgcttatctgctctgtcttgatccaattttaaaatatgagctgttgaaataagtacaaagccctgtttgatacatggatactcatgagtcatggatgaggcttagctctattaaatccaactcacttacttcagattcagagaattttattgaatggcttcctgtgaggtagaattttaaaatatatttaaaacttgaggaagagctgcaagtagcccaggagattttcatgattatagagacacattacttgaggggccaactgcaagctggttcccactactcagtggaaagataacatggaacattccgctatctaaccaaagctgctgcacaggatataaaaaagcctcaaggtacagatctgatagcaaaagagacagggaactctgatctcttcctgcaacattatttgaacatccctgactattgagaac

SEQ ID NO: 659537 - DNA, 572 bp, Homo sapiens
ttgcgtgtcacctgttttggttttgctcacactgcttccttggagctactcaacaaatagtcaaatggccttcctgggactatgyaaaatatggaatgttttctgaatttgtgtgccatccctaggcagtagccatgcttatctgctctgtcttgatccaattttaaaatatgagctgttgaaataagtacaaagccctgtttgatacatggatactcatgagtcatggatgaggcttagctctattaaatccaactcacttacttcagattcagagaattttattgaatggcttcctgtgaggtagaattttaaaatatatttaaaacttgaggaagagctgcaagtagcccaggagattttcatgattatagagacacattacttgaggggccaactgcaagctggttcccactactcagtggaaagataacatggaacattccgctatctaaccaaagctgctgcacaggatataaaaaagcctcaaggtacagatctgatagcaaaagagacagggaactctgatctcttcctgcaacattatttgaacatccctgactattgagaac

SEQ ID NO: 659538 - DNA, 621 bp, Homo sapiens
tgatgattttatataaaattattttaaactgccacagcatttcattacaagcaattgatacatccaagcaaataatgtattaccttatggattttgattgctaggtaaatcttctttggaaaacctaaaggcgaatacctccacccttccttgggactgccacatttctctgagtagccctgatgctaggttccaattttttaccagttcaatccatcagatggcatgtatttattcatggatgctcatgtcttaaatataaaatattggaaaaaattgttttagtgctttgaaayaagtgttttttaaaaaagtgatttaaaatgtcattttagttatattacaagatcacttttctcctgtaaaaattcctgcttcttgcttcaattatttatgaagtatttcttcaatctctcactcattgcaaatttttatttagagctgactacatttcagacactgaatactgtagttaaatggtgaacaaaatagacatattctttgctgctttaaaacttcagtagaggatagcagtaaatatgtattatagtacaagatgacaggtaaattagtaagaatataaagttccagaaaaacataggtaagagacatagtgaacca

SEQ ID NO: 659539 - DNA, 533 bp, Homo sapiens
aagcactaaaacaataaaacgataagacaccattttacacttatcaaattgaaaaaaaatgtaatgaatggttactttgaatcttcaattttgtgggcaaacagaattcccagaactgttagaatataaaacaatgcaatctttgtaaagagcaatgtacacgtcaaataattttaaactggcatatcctttgtcttaacaactctacctttagaatttatcctaagacaaatttcaaggcaggctccaagatttatacacaagcattttcatgaaagcactaactataatagtgaaaagtttgaaacaagataaatatagaaatggcaaaayaaatttttatatatacctataattaaaaatcacatttttgatgtgcagatgataacatggaaaaataccgatgaaatagtattccataaaaatagcagaataggccaggcacagtggcctgtaatcctagcactttgggaggcagaagcaggtggatcgcctgaggtcaggagttcaaaaccagcctggcccacatggtg

SEQ ID NO: 659540 - DNA, 556 bp, Homo sapiens
  misc_feature 553, 554, 555, 556: n = A,T,C or G
ttttatagacataatacaaacaaccccctcaaatctggaggaataacttagacaaaatagcatgaaagaaatgtattttctgcttttcttagggataaacaatggaaacacatccctaaaacrtcaactaatatgaaaaaaccagggccactttcatggaaaacaaattacaacttttgctcccttgcaaaaatgtctagcacaaatcgaaagtaaaaaagaaatgtagactgaactctcaggggaaatttgttgcatcaaaatgtcatataaaaatgaaatacttgttttcttaaatgaccaaaaacatgttatgaaggaaaatataaaggcttagaatatagctataatatatctaggcataagaaagaaattaaagaaatctcttaatctttctgacactcagcttcttcatctatgacatgggaatatacaagctacctaaaaagatcataataaaggttgagacattgcatataaaatgtatagaatatagtagaagcttgaaaaaatttcactttttttcattaaggaaaacaaagtattttagaannnn

SEQ ID NO: 659541 - DNA, 416 bp, Homo sapiens
cccacctccttcattatcagcaatagctaccatcatttgtcaagcacctactagatgccagacaccctacacatattgcctcctrttctcatccattcctgcaaagaagatgcaatgagcatccttggaacagactgggagcctgatcccaagaggctgctgaactggccccagtcacccacctatgtgccagagtcaggcctggccgacacaaggatctatgctttttctgtggtgtgtcactgcctttttaacaaaagggctgtcaaagtcaccattctttttgatgagggcagcgtaattacattgccttttgtcaggactgtgggtatgtgatttgtcttccacagtctctctggggctgtgtcctacatagcttctgactctcaatttttggtgccatgagctgagctcag

SEQ ID NO: 659542 - DNA, 655 bp, Homo sapiens
cctaggtgatgtgattatattgcctggctacttccctcaaaggaatggtaatatatgctttactgagcacctaagtgatgtaaaccttctctcttgcctggactctgcccacaggtaaggttatgacatatcaccaagcctagcacttaatggcatgactgtcctatcatgtttgtgccctgccctgaagaagcactktgacattactggcctaagtaaaaaggtaattcgagtcttctgcctgggacatgtgcacaggggagattgtgaaatatctcttggcttatcaacatgatgatgtgattctcctctgttgcctggtacctttttccagttgggattgcaacatattgctgggcccagcaccgggtgatgttattcttctcccagggcccagcccacaaatggcgttgtggcatctctctgggtccatcacctaggtgctgtgactctgctcttctaactgggcactttccacaaaaggaattgtgacacatagctggacccagctccctggtcatggagctgtcttgtcttggtcctgtgcaaaggggtcattgtgatatattgcttggccaagcagctaggtgatatgactctcctgaatgggccctgctctcagagaggattttcacccatcactgggccagtcata

SEQ ID NO: 659543 - DNA, 599 bp, Homo sapiens
ctttaagtactttttagagaatgtgctctgactgggaaaatataaacaaccaagaggtgcaatttaaacaaagcatttcagcttagttgttgaaccaaagtgcaaggcacatactgtacctaaagccaaggaaattaaatcttgcatgaggctgaaaatgttaagcaaacagattcaaatccccttagtggatattcctggcgactgtaggagaataactgcaatagtttagtacagctgtgtcctgctttaggcaaacccaacatatgaaaagcaaacttacagaacagacagattgggagtgattattcacatcacaaagggattaatggaagggttccttcaaatagcatccatctctagtttattagaattccatttaccragattcaatttacacaactttcagaaacatgcttgtttcatgaaatgcaatataccttaggagctggagctgcctaaaaggcttaattattcttctttcgtatcctctgggatctgcacattttagacttttgccagtgaagtgtcaaatcacaagctccattttaggatcaagccattcaggttcaatatttttgttctctctcaaatttaat

SEQ ID NO: 659544 - DNA, 528 bp, Homo sapiens
ctgtcaatgatcagataaaaagacaggcatgtcctgagaaaaccccattcccaactctgtcaatttggaaggaaaaagacataacataaaactcaaactgaacctttgagacccttgtatcttggaatctccctgatcccccctgaatgagctttaaaattatacctttaggggttgaatcagaactaaaagaaactttagaagccacgtaataatctatgtgttctctttcaccttggacttctctcayttctgctccgtcttttaattgtttatcacattttgctgatcttcctcttccacgtttctcagatctgtgaaacctgttcctctcacatccacctctgctgtcgtaggcaaaattcgtcaacattcacacatcaattattctaatagtctcttagttggtcttcttcgcaaccaattactttatgactcaaaccaccttgcattgttctgtgggattaatcttctctaagtggtaattttcattatatcacctgcctgtttgcaaactcacaatggttc

SEQ ID NO: 659545 - DNA, 608 bp, Homo sapiens
  misc_feature 586, 587, 588, 589, 590, 591, 592, 593, 594, 595, 596, 597,598, 599, 600, 601, 602, 603, 604, 605, 606, 607, 608: n = A,T,C or G
tagagattattatatgattatgtatggaaagcatccaagagtagctccagaaagattctaatatcacagagccaagactaagaatgttttctgactgaaatccaaagctttaagaggtttcttccccgctctcaagtctgccaaagacacatctaaaacccaatgaatactagacagggaagagaggatccrgcacttcttggctctcttcttcctcgccaccgtatccagctacatcgtttttgtttcgaagttccttctcatcttgttttcccttcgtgccaaaccataaaagcagagcgtagggctgggcgcggtggctcacgcctgtaatcccagcactttgggaggccgaggagggtggatcatgaggtcaggatttcgagaccagcctggccaatatggtgaaaccccgtctctactaaaaatacaaaaattagccaggtgtggtggcgtttgcctatagtcccagctactcaggagggctgaggcagaagaatcgcttgaacccgggaagaggaggttgcagtgagccgagatcgcgccactgcattccagcctggacaacagagcaagactctgtctnnnnnnnnnnnnnnnnnnnnnnn

SEQ ID NO: 659546 - DNA, 517 bp, Homo sapiens
gttttcatttacatgacaaactaaagtgtttctaatgaataatagtttaatttgagtgttcctagttggtggatgactctgttccatgcaaatttaaagatgcagccttctttaattttatggccttgattttatcaagggcaagataatcttctatagaaagggaagaaaagctaatagtttttggcagggaggaagtatgacatactcactggagctcagaaaataaaaatattatattgagagaagaaacatcataaaagacacacaaaggttcacacgtggatcaaatgtgggaagacaaggttaaacatgaaaccccatcttggctgtagctaatttttagtgaattttcaactcacaagtaaaattcaggaaacacattctatattatttcaaactcatataacattcctatcaaatatttgtagaaaaatattagaaaatgtaatattatgcataatatatttagtkatttaaaatgaaactaaagaatttaactaggttttggttttgg

SEQ ID NO: 659547 - DNA, 428 bp, Homo sapiens
tttcttcgttcagaagagggaaaaaactcttgtaattgttgcccatttcaggagaaatcttgcatatgaaaacaagagataaatatacacaactgagggctgtggtttaaacaaaatcttgagaatgttttttgaccttatacatttgtgctttagtataacaaaatgatatagacaaaggtaacttttaatagaaccagtcactaaattaaaaaaatgacacattcttctgcttagctaagcaacagagaaggtaaaatactaattcaattcatcaatttaagcaatactcattaagagccaagtatgtgcttactgaataagctgctaaggtttggtggttacagagtgtgcggtgaaatgatgtctacatcacagtccaacattcacagagtttaraagcctaccaagaatcaagacagacacaa

SEQ ID NO: 659548 - DNA, 384 bp, Homo sapiens
taaacattattttttattttgacaatggctttccatgtaacttagcatgtcaaataatcctgtttactcctcttttggatgtttcaggggccctctgtactatcccaaagttagaggtcagaaaagaccattttgaagctgaaatttgattttagaagcctatcaaatatgttaaaagtttaaaacacttgatattatgaaatagaattccacgtcaccataagtcattcatttagccaaaattatgactcaamaattttaaaaagtcaaaaacctttactcattgatagagggaagacttagcttttcaaacaatttgcctctcgtctttccccttttttgctagtttattcaaaaagcaaacaaaaacctttcattatcttt

SEQ ID NO: 659549 - DNA, 519 bp, Homo sapiens
aatggaattaacccgaatagaatggartggaatggaatggaacggaacggaatggaatggaaaggaatggaatggaatggaatggaatggaatggaatggaatcaacccgactgcaggggaatgaaatggaatggaatgcaatggaatggattcaacttgaatggaatggtaagaatggaatcaacacgagtggaatggcatggattggaatggaatggaatggaatcaacccgagtacagcggaatggaatggaatggaatgcagtggaatggaatcatccgtaatggaatggaaaggaatggaatggaatggaatggaatggaatggaatcaactcgattgcaatcgaatggaatggaatggaattaacccgaatagaatggaatggaatggaatggaatggaacggaacggaatggaatggattggaatggaatggaatggaatggaatggaacggaaaggaatggaatagaatggaatggaatggaatggaatggaatggaatcaacgcgagtgc

SEQ ID NO: 659550 - DNA, 579 bp, Homo sapiens
cttggcatcccctggtgcagcagatgagaaggaggaggagaagggagggccagctggctaaatggagggagggacagggtagtcctaatgggctcctgagcctccaccggccatgggaccagcttctttctctggcgttcatcacagatgtatgcacgcatctacacataccaaccattctctcacaccctggaagaagctccctgagggcaaagcccatgggtcgtattcatccatctttgcatccccagcctggagcatagtgtccaacactcaccagctcaataaatatttctcaaatgcaagcatttggcttacttaagatatactttagaatgatagaatgttgtaattaatagaaggaaaaaggaaactgccgaggtcaaacattacarggaaggggaaggggagactaagggcgggaggttaggatggttcctgtgacactgcgtatcctaatggcacgttagcataggtcatccctgtaagtgcctagagggcagaatttggggatggttcacccttagtgcccttggtgctcaccctgtcagaagctcccagaagatgaatgtcaatttg

SEQ ID NO: 659551 - DNA, 506 bp, Homo sapiens
tcccttcccctcccctcctcttctccccttctcttcttctcttcttctcttctcttccctcttctcttctcctctcctctcccctcccctctcctctcttctcttttctcctctcttctcctctcctttcctctctctttctctctctctctctctctcccccaccatcatcaccaccaccgccaccaccaccatcatcatcatcatacaagctattagaagaggagttaagatactggtagagacaaattggaaatgtaatgatttaagcagagaagactaagagggaatgttcaagaatgatgtcaggattagggaaatagaaagatagagggttgtcagagggaatcaaagtatttctcaaaacgaggcctggtgagccaaagagaaattaaatgaatatgctgatgtttagtttcccagctttacataggaaattgaagatsgttttgtgaaagacaagtggggaaaaggtgagtctataaaccattatccactcaaagtgt

SEQ ID NO: 659552 - DNA, 506 bp, Homo sapiens
tcccttcccctcccctcctcttctccccttctcttcttctcttcttctcttctcttccctcttctcttctcctctcctctcccctcccctctcctctcttctcttttctcctctcttctcctctcctttcctctctctttctctctctctctctctctcccccaccatcatcaccaccaccgccaccaccaccatcatcatcatcatacaagctattagaagaggagttaagatactggtagagacaaattggaaatgtaatgatttaagcagagaagactaagagggaatgttcaagaatgatgtcaggattagggaaatagaaagatagagggttgtcagagggaatcaaagtatttctcaaaacgaggcctggtgagccaaagagaaattaaatgaatatgctgatgtttagtttcccagctttacataggaaattgaagatcgttttgtgaaagacaagtggggaaaaggtgagyctataaaccattatccactcaaagtgt

SEQ ID NO: 659553 - DNA, 608 bp, Homo sapiens
cccactcatcataaagtaattatgtaattctagtactccttttttttaaaaactaattcttgccctccttaaaaagtacatcagttctgcctgttcttgaactatatataggtagaatgttgttattagtattttacaacttgcctttttctggccacacatttgtaaatttatctatatatctgtagttgattcaaatctgtttcaatatagagtcccattgtaagaacataaaacatatacttgcaatattgctatgaacagtcttaagcataaatcttggtatacataatcaaacatatcttttaaggtatatatgcaaaagtggaactattggatcttagttccattttttttttattatactttaagttctgggatacatgtgcagaacgtgtaggtttgttacataggtatacatgtgccatggtggtttgctgcacccatcaacccaacatctacattaggtatttctcctaatgctatccctcccctagccctccagcccccaacaggccccggtgtgtgatgttccccttcctgtgtccctstgttctcattgttcaactcaaacttatgaatgagaacatgcagtgtttggttttctg

SEQ ID NO: 659554 - DNA, 580 bp, Homo sapiens
taatgcacactcctctaagctgttctatggcatcatcctgcttgaccacttgtgcatgtaaaccagcccagccaccaacccccaaaagttggtctgcagttatattaatttgaggttgggcccaggcattgagagcagcctgaatggaagcttcatctgcccactaagttttaaattgtaagaactgagcaggagttagacaagctagagtaagagtgtcccagtcagtaggaatcatccgactggaaacagcaacattctttaacagtcccatttcaaaaggagaacctggtccatactgatttatagcttgtttaattttttgagtaatttaaaaggaaaaggctcaaatgtagctataatatttccctgttgatctgggggggtgtattcaaacagggaactgccaagcctctaaatcccacttttgtctagcttgctgwattcctgcctgaatagaactaagcagtcgctcaagtcaccagggcaactacttttcacccagtgtcctccagaaaagaaagatctggagggtcgttttcttcaaaataataatgagggggtgcagaagggtagggat

SEQ ID NO: 659555 - DNA, 478 bp, Homo sapiens
acattctaccttgtaataacctaaatcttctggtgggcaagttcttcctcaatcaaatttgtgtttatgattgtgttggggattggcttagtaatccaggtactgttactgccttgaaagcggagactgcatccttctgtctggatttcttgagtttctggattgtaaaccttattagggcccatttttcctagaattggagcctctactttgttcttgctaccttagttcacccagaaagcacgatctctgcctgaatttcaaagggttggctagtttaaatatccttttttragacttttgtcttcctgtggggtgattttttcatcttacataccattgctaatctttttatcttgaatgtaattgaaatagttttaatctgtgttaccagcaacaagaaccccttttatgagatggagaggccaggtcagtctcataacatgtgtcccccttcgtgtgttgaatttatgtcaga

SEQ ID NO: 659556 - DNA, 584 bp, Homo sapiens
tttttattttgattaaatctaattttcgtgtattttcttttgttatctgtgcttttctgtcatatttcaaaatacacttaaaactcaaaggtcataaaggtttaccgtgtgttttcttctaagagttacatatttttagtccttacatttaagtcttttattaatttagaattaatttttgtatatactgcaaggtaggggtctaacttctctcttgtacactgacatccagctgttgaagagagtgttctttcctcccttgactagacttggccaccttgttgaacagtcattgaccatatatgtgaggactaacttgtaggatctcaaatctgttctrttgtattggtctgaaagtctattggtcttattccagtaccacactctcttgattactgtagatttgtagtaggctgtgaaactgaaaaatgtgagttttccaatgttctttttcaagactgttttgtctgtcagatcctttgaatttttgtatgattttagaatgagtttctttgtttctgcaaaaatgcctttgggattttgacggtattgcattgaatctgtagagtacttcagatggtatt

SEQ ID NO: 659557 - DNA, 433 bp, Homo sapiens
gaattcaagcaaactctaggtagtggctctgttttagcccctaaatatggcaaggtctgagccagaaatgaatttgatgaactgtgtgacttgatgaactacaaatacaagaaccaaataatcactgtgagattttagacctcaaaaatctcccaggactgaatagtctgactataagtgctttgtatcatcgtctaggaggttcaaaacgtgtataggagatgatatttgtggaacctcttagggactaagagactatacacatcactacayaggcttcagtgatttagatcatgattgctacctggaagctgctatctggaagctacatttgaaaaatctgcaattaaaggaagggaaggaataatttcagaacatccacaggaaagttcagtaaagataaaatagttttggtaactgaaaaatattacat

SEQ ID NO: 659558 - DNA, 525 bp, Homo sapiens
atgactttcaggcccgtgccagaaattttagagtaggcttataaagggagatgagagaatatacagtcaagcattcttaagagtggtgtrtgtgtgtgtgcgcgcgcgcatatgcgtgtgtttttcatttgggattatgggacacgtgctcatcattttttgccatcttgattaaatgtaattaggttctggcaagccacccttcccctctcttggatgctggggtgtttttgcattttcacaggggttatccacaggaggttactctgttgccttttgcctttactccaggggtggccacatttttttttgacgtattgggcttcacagtgatttacagattaaggatctggcctgaactcgggccagcaggactgctgttctctctcgctgacacatctcactgcttggagccagtggctctttgcttaccctctcattatagttcttagcccacatttccttttggcacagaacacttggttattttgacgatgtgctggatttgcctcctgcctctacccc

SEQ ID NO: 659559 - DNA, 404 bp, Homo sapiens
gtaaattagtaaaaatactaatagtccctgatatgcggaaataatggcataagctgtctttctctctgtctcctctccctctctgcctcggctgccaggcagggaagggccccctgtccagtggacacgtgacccacgtgaccttacctatcattggaggtgactcacattctttaccctgccccttctgccttgtatccaataaataacagcgcagccagacattcggggcactactgttctccgcgcattggtggtagtggtcccccaggcccagctgccctttctcttatctctttgtcttgtgtctttatttctacaacactctctcrtcgccgcacacagggagagacccaccgaccctgtggggctggtccctgcagggttataggcatgagccacca

SEQ ID NO: 659560 - DNA, 324 bp, Homo sapiens
gagttaaatgcacacctccaaagaagtttctcagaatgcttccgtgtagtttttatgtgaagatatttactttccacaattgccccaaagctctaaaatgtccacttgcagaccctcyaaaagagtgtttcagaattgctcaatcaaaggaaaggttcaattctgtgtgaccaatgcactcatcacagagaagtttgtctgaatgcttctgtgtagaatggatttgaagataattccttttccaccacagtccgcaaagggctaaaaatatccacttgccgattccacaaaaagagagattcaatactgctcaatcacaagata

SEQ ID NO: 659561 - DNA, 324 bp, Homo sapiens
gagttaaatgcacacctccaaagaagtttctcagaatgcttccgtgtagtttttatgtgaagatatttactttccacaattgccccaaagctctaaaatgtccacttgcagaccctctaaaagagtgtttcagaattgctcaatcaaaggaaaggttcaattctgtgtgaccaatgcactcatcacaragaagtttgtctgaatgcttctgtgtagaatggatttgaagataattccttttccaccacagtccgcaaagggctaaaaatatccacttgccgattccacaaaaagagagattcaatactgctcaatcacaagata

SEQ ID NO: 659562 - DNA, 609 bp, Homo sapiens
acctcaccttttacaggacacctgggtagaatcacgggtcaccaagaagtctctctaacatgtagacagacccttgtgtgaacatgtgtaaaaagttcttggacagaggcattttctagacacgccaattagaaaggacttaggtaagttacaacargactgcgagcttgaagtattaacagttatttcaactttttgttttgcaattaatttcttagactttcttgatcagatttttcaacccccaattttcccaattgctccactttaacaaataatgtgtatgccaatctgcttacttttccaaggtatggttaggttaatgagtgtcatacagaatgcataagttaaaactgaatcttcggtatcctattcctgtgtatgtcttgctgccttataatttaacctggctgatccacacttagagctttcctgtgctgtcagtggatgcttatgtagtttattacagcttaaattatcatttactattggaaattggatcacaaggaaaaatctagcctttttaattatgtcaattttaaaaattattatgaagacagtagttacatgaactggcagtaatgatggaatttctgaatggtgctagtc

SEQ ID NO: 659563 - DNA, 620 bp, Homo sapiens
tttttttacatagcaaattatatacctagttggcaaagaggtttttatcatgaataataaatgggttttgtcaaatgtgttttctgcgtatgttttttttttttcttctttgcttgttgatgtggtgggttgtattaattgacttttttcaacagctttggaaacctggaataaatttaattagagattgcatataatattttgttattccatttgctaacattttgtttagaattttggtttctatgtgggggagagatattgctctatagttttcctttcttgtaatgtatttgcctgttttttgtgattggttaatgctgacctcatagaacgttaggaggggttcactctgcctctattttctggaagatattgtaagaaattggcatttttgtttaagtgtatgatatgtatttggcatgagattttggtatttgtcctgaatggagttctctgagatttctggatatggttttttttttttttttttttttttttggaaaaggagtctcgctytgtcacccaggcctgactgggggggcactatctctgctcactgcaagctccacttcccgggttcaccccattctcctgcctcagcctcccaagggggtggg

SEQ ID NO: 659564 - DNA, 620 bp, Homo sapiens
tttttttacatagcaaattatatacctagttggcaaagaggtttttatcatgaataataaatgggttttgtcaaatgtgttttctgcgtatgttttttttttttcttctttgcttgttgatgtggtgggttgtattaattgacttttttcaacagctttggaaacctggaataaatttaattagagattgcatataatattttgttattccatttgctaacattttgtttagaattttggtttctatgtgggggagagatattgctctatagttttcctttcttgtaatgtatttgcctgttttttgtgattggttaatgctgacctcatagaacgttaggaggggttcactctgcctctattttctggaagatattgtaagaaattggcatttttgtttaagtgtatgatatgtatttggcatgagattttggtatttgtcctgaatggagttctctgagatttctggatatggttttttttttttttttttttttttttggaaaaggagtctcgctttgtcacccaggcctgactgggggggcrctatctctgctcactgcaagctccacttcccgggttcaccccattctcctgcctcagcctcccaagggggtggg

SEQ ID NO: 659565 - DNA, 594 bp, Homo sapiens
agctcccctgggttggaggtaaaaagtttctattccttaggaaatggaataaaataaatttgttaatgaagttttgagattcattcatccatagcattctaaaataggaattagcttagaaaggtcatcaacgaccaaaattatctgagtttggtggagataaaaaagcaagactgaaagttatatttttttcaagcaatgtttgaatggataaagtacagaaggagaaaaatggttgcatttctatgcattgaaaatgcttatttggttttcttttaagcttgttgtttcaaatggcccacttaaatttactgactctataccaaataaattaatctcayttttcacactgctatccctctagtttcttgcctcaatttattccagaatgacattctacatttattcaataagtactcaaagggatgtgttatgtgcatggcattcaactaaccattagttggacaagacaaactaagtaaaggatatctttcttgccttcttaaagtttgcagtttaattatcttgatatttcaaggctcattctcttacattttcactaattttccatattttttctaagtctctgaaaag

SEQ ID NO: 659566 - DNA, 342 bp, Homo sapiens
ttcttgcctcaatttattccagaatgacattctacatttattcaataagtactcaaagggatgtgttatgtgcatggcattcaactaaccattagttggacaagacaaactaagtaaaggatatctttcytgccttcttaaagtttgcagtttaattatcttgatatttcaaggctcattctcttacattttcactaattttccatattttttctaagtctctgaaaagttttgatagtgaattccatcccttttatattagctaagctctcattggctttctaactcaatttatcacatggatattgactttcaaccatgttttctttttttttttctttt

SEQ ID NO: 659567 - DNA, 381 bp, Homo sapiens
ccttaataattattttaaatagtaaaacatgcctcaagttttaggaaaagctcataaatatattgcatataaaattaagtatattttatacaaaggaatgaagtatgctgtacatagagaacataaataatataactctaatgtatcataaatttggtctaaagctaacragctagctataaaaagcatttccaatttcttgtgcctttaaatttaaaagagcttgttagaagggttaggatgaactaagtttctataaaaggctgaccttggaactttgaattatactttcctttgatctcagtatatgtcccttaacaaacaaaaaatcatttcatttcttggtctagagctgagctcttcagaataaacagtctagtt

SEQ ID NO: 659568 - DNA, 381 bp, Homo sapiens
ccttaataattattttaaatagtaaaacatgcctcaagttttaggaaaagctcataaatatattgcatataaaattaagtatattttatacaaaggaatgaagtatgctgtacatagagaacataaataatataactctaatgtatcataaatttggtctaaagctaacaagctagctataaaaagcatttccaatttcttgtgcctttaaatttaaaagagcttgttagaagggttaggatgaactaagtttctataaaargctgaccttggaactttgaattatactttcctttgatctcagtatatgtcccttaacaaacaaaaaatcatttcatttcttggtctagagctgagctcttcagaataaacagtctagtt

SEQ ID NO: 659569 - DNA, 569 bp, Homo sapiens
tttttggaaaaaaaattgacaaatagtaaatgaatatgcttacgggctacagtggaatgttttgatggatgtatrcattgtggaatgattaaaccaagctgattaacatattcatcatctcatacttattttttgttgtgagaacatttaaaatctactcttttagcaattttgaaatatacattattattaactatagttaccatgccgtgcaatagatctccaaaacttattcctcctgtcaaatggaaactttgcattttttgactgtatttcctcattccctacccacccccatcgctgaaattttatacctgttcattaataactcctcatttccctcctcccagtgcctggcaaccacaattctattctctccttccatgagtctgactactttagatacctcctatgagtggaatcacacagtatttgtccctccgtgactggcttatttgacttagcattacattttccagattcatccatgttgtcacaagtggcaggatctccttctctcttctagctgttgttgcccaggctggagtgcagtggctccatctcggctg

SEQ ID NO: 659570 - DNA, 585 bp, Homo sapiens
tcacagaaaaaagaggagccattctaccattaagagaaatgtaaaagacataatcaagtacaattatgatttttaatttgatccaggcttaaagaaaacaaaagctacagaaaatattttgagactgaataagggaatttgaatatggcctgggaatgtaatgatatttggggattatggtcgtttttgtcagatacaatgatgttcctgtggatgtatgggaagatacactttggagatgcatgttttagtattcagggatgaaagaaaatgagagtataatttatgtttacatattttcagcaaaaaaagaactgatggaggacacaaaaatggccaaggcattgaaattaattggcatttgtactggtaatataggtgttcactgaaatatgttttctacttttctgtagagtacagtatagggtaagactccgtctcaaaaaaaagaaaagaacgagttagaaagaccacagtaatgtyttccttccccctttcaagaaaatatttaaaatatttcataaaaaatggagcagaaaataagaccacataatccctgatttctagaaacgtacaatagggttg

SEQ ID NO: 659571 - DNA, 602 bp, Homo sapiens
ctggctgttcatggtgaatcatttaaatttaaaatttgatgttctgcacggagaagtgtgcaatccctgttgaatttttgaagctccctgaagaagctcttctttctgcagctgctgtgttcatttgcatctcaatatgagcattcagaggtcaactgcctgtatttcaggcacaaaataaactggagacactgcaaatattatgaactggtgtctctacaggcatgtggatacagctctgggtttccagtattgccatgctgcctgacaaagaataggcagtatagtgttaggcataggatgaatgatttatgtgatgtcatcagttactccacccttttcatagactatttgttttcttccctacaacaccagtcacygcccaagccctaaatcaatagctagtcatttgttttattaaacttgatctatgttcccaaaaagctacctgcaccttcattacaacattcatttctctgttgggcccactttatgttagattccatacagtaagtctattccaccttcaaccatcataagtatgatccactggtatattcctgacaatgtcgagcagtgttctgggtgctggaaatacaatg

SEQ ID NO: 659572 - DNA, 566 bp, Homo sapiens
ttaacagagaggagggaggtttgtttttgtttgtttttattcatgctagaaagtgacaacagagtcctataagaaatggaggactcctccctgaccccttcaaaaagcccaggcctgcaggagaaaagaaaagaaacatttaaaaacactccacttattttttctaaccagtgggaagygctttgaatttatgctgctggccagtttcatcttaagtataacaaaaggcttcttacttcaaaagtaatagatgattcaattgtagaaaatttagaaaatacaattgggtaaaatggaggggataaaagtcatctccaaatctatgattgaaagggtaataactgttaatattttgagtatattggcattctatgtgatcacatctatatacagaaatatgttatttctgtgcatattagacttgctcatttagctttgaaaacttgttttctgtactaataaagaataaatatatagtaacatattttcatgtcattgaatatttaactataatgattattatcaagccctttacaaaaattggtcaaagtggttaaccctcttcc

SEQ ID NO: 659573 - DNA, 566 bp, Homo sapiens
ttaacagagaggagggaggtttgtttttgtttgtttttattcatgctagaaagtgacaacagagtcctataagaaatggaggactcctccctgaccccttcaaaaagcccaggcctgcaggagaaaagaaaagaaacatttaaaaacactccacttattttttctaaccagtgggaagtgctttgaatttatgctgctggccagtttcatcttaagtataacaaaaggcttcttacttcaaaagtaatagatgrttcaattgtagaaaatttagaaaatacaattgggtaaaatggaggggataaaagtcatctccaaatctatgattgaaagggtaataactgttaatattttgagtatattggcattctatgtgatcacatctatatacagaaatatgttatttctgtgcatattagacttgctcatttagctttgaaaacttgttttctgtactaataaagaataaatatatagtaacatattttcatgtcattgaatatttaactataatgattattatcaagccctttacaaaaattggtcaaagtggttaaccctcttcc

SEQ ID NO: 659574 - DNA, 559 bp, Homo sapiens
tgtgatttcagcagcaaatcagccaaaggaaaaattagctacagttttttccaagggaaataattttctgttcatgttctgttattttcaaaagattctaatgctgttatttcaaaactaaatgtcctcaaacaaggcaaagacaattcttcattgaattatgcttgcagatgccaaattttcagtgttgtgttagtcccacgagaataatccaaaatttaaaaaatgtatatagaaacattctttwaaaatgaattaaaaatactgtaccctttgaagatctggtaactttcaaaagaagatacgcattcaaaagtagagagggaagggggtaagatagaaaagaagggcatatttaaagaatatcatttttaaccccctttccccaataacaaaattatccacgaaacttattttgcattctgacttgactaaaattgggcaaggtcatgtggtgacaaagtaatagaaaggaagtgctctgaatgtaatttagtaggagtattaagaaactatttctttttctctttgcacagtctctttggctaactatcacatc

SEQ ID NO: 659575 - DNA, 597 bp, Homo sapiens
agctaccaatatcttgctatcatttgcagaggtagtttgaacttattaagttatgacttcaggtcattcatttgttccacaaatatttatggagttcctatcatgtgccaagctctgagtgcacactgatgaataagaggctctctttgtggagattatgatctagggaggtatgggacctcctacataaaattacttcagtgtgacattccccaatcatgcctctgtgtcttctaatatactgtcatttctccactgaggactgtcttccatacataaaccacatacacaatgtgcaagggcacgcccacaagcatgccttctttaactatttcyagttcctcagtcttctgtataaatattacctacactaggaatttcattcctaattcccttgcttctgatttaaatgttccatcctctgtgctcctatatatcctgttaatgcctctatcaaagcatgcattgtaatgaataatttgttgctattgttacttattgtgggcctgccctataaaggcagagacctggatctagcacaatacttgacacacaataggtgtcccataaatcttccttagatggaagagcaaatga

SEQ ID NO: 659576 - DNA, 616 bp, Homo sapiens
atggtatcctccctgtgtgtttctgagtaccttttcctcttcctatgaggacaccagtcatgttggattgagacccatcctaatgacatcatctgaactagattatatctgcaaagacattgtttcccaataaggtcacaatcacaagtaccaggagttaggacatcaacttatatcttcttgggggaaacatgtcaacccacaaggtcatctcagctgtcctggcacaatgccaagggatgagagcttgtcaatctgtcttgccctaatktctccttcacagcaaagtgctgaggagcttgaatcccaaactgcattctacattacaaatttacaagtgactctgcccaaccccatctgaagtgtttgaaaggagaaattatttgaaattcaaatttataccaaacctcctttgtaggaaccacaattaagaatcatttttctctgccttgtttctgtgcattatgatgaagatgaaaatgcactttatttcaaataaagtaaatcaagccaagcatgacctaaaagttctacaaatattaaacatccatctaattatgcattagactgttgtcattgtttaattttataagataatacctaaaatgatcccaat

SEQ ID NO: 659577 - DNA, 537 bp, Homo sapiens
tgattgcataaacaaactaacaaacaaaaactattacaaatgttwtactctaactttatcccccactttttaactttttgttgcttctatttatatcttgttatactgtctaattcttgaaaagttgttgtagttattatttttgacgggttcacctttcagtctttctactcaagataggagtagtttttacacactacagttacagggttatacggttatactgtgtttttctgtgtacttactattactagtgagttttctacttttagatgatttcttattctcattaacatcatccttttctttcatatagaagaattccttgtagcatgtcttgtaggacaggtttggtgttgatgaaattcctcagcttttgtttgtctaggaaaatctttatttgtccttcatgtttaaaggatattttttctggatatactattctaggataaaagtttttgtttttgttttttccttcagcactttatttatttatttatttactttttttttttttttttttgagacagagtcttg

SEQ ID NO: 659578 - DNA, 537 bp, Homo sapiens
tgattgcataaacaaactaacaaacaaaaactattacaaatgttttactctaactttatcccccactttttaactttttgttgcttctatttatatcttgttatactgtctaattcttgaaaagttgttgtagttattatttttgacgggttcacctttcagtctttctactcaagataggagtagtttttacacactacagttacagggttatacggttatactgtgtttttctgtgtacttactattacyagtgagttttctacttttagatgatttcttattctcattaacatcatccttttctttcatatagaagaattccttgtagcatgtcttgtaggacaggtttggtgttgatgaaattcctcagcttttgtttgtctaggaaaatctttatttgtccttcatgtttaaaggatattttttctggatatactattctaggataaaagtttttgtttttgttttttccttcagcactttatttatttatttatttactttttttttttttttttttgagacagagtcttg

SEQ ID NO: 659579 - DNA, 537 bp, Homo sapiens
tgattgcataaacaaactaacaaacaaaaactattacaaatgttttactctaactttatcccccactttttaactttttgttgcttctatttatatcttgttatactgtctaattcttgaaaagttgttgtagttattatttttgacgggttcacctttcagtctttctactcaagataggagtagtttttacacactacagttacagggttatacggttatactgtgtttttctgtgtacttactattactagtgagttttctacttttagatgatttcttattctcattaacatcatccttttctttcatatagaagaattccttgtagcatgtctkgtaggacaggtttggtgttgatgaaattcctcagcttttgtttgtctaggaaaatctttatttgtccttcatgtttaaaggatattttttctggatatactattctaggataaaagtttttgtttttgttttttccttcagcactttatttatttatttatttactttttttttttttttttttgagacagagtcttg

SEQ ID NO: 659580 - DNA, 537 bp, Homo sapiens
tgattgcataaacaaactaacaaacaaaaactattacaaatgttttactctaactttatcccccactttttaactttttgttgcttctatttatatcttgttatactgtctaattcttgaaaagttgttgtagttattatttttgacgggttcacctttcagtctttctactcaagataggagtagtttttacacactacagttacagggttatacggttatactgtgtttttctgtgtacttactattactagtgagttttctacttttagatgatttcttattctcattaacatcatccttttctttcatatagaagaattccttgtagcatgtcttgtaggacaggtttggtgttgatgaaattcctcagcttttgtttgtctaggaaaayctttatttgtccttcatgtttaaaggatattttttctggatatactattctaggataaaagtttttgtttttgttttttccttcagcactttatttatttatttatttactttttttttttttttttttgagacagagtcttg

SEQ ID NO: 659581 - DNA, 603 bp, Homo sapiens
gattgtgtcattgcactgcagcctggtcaacaagagcaaaactctgtctcaaaaaaaaataagtaaataaaattaaaaataaagataktcactgaacctgttactatgatatatttaagcaagacacggtgaccctaaaaattagagatcattgaagaccaaagtaacaacatgtggtcattatttctcaaattgaagtatataaaatatataaaataagtaaatttaattgcatgcttaggtaagaaaatattgataaaaatgattgaatattttatcttatttcataattctaagcagggctttagcacaatatgaaaactagattattcatgtaatccaaataaaagacaatttttattctaattttaactcagaaattattttgcttatttaacaattttactgaaaggtaaatgagataaataggacagattataattacctaacattgctatggtaacttatgtacaaatagctgttcgtcaccgaaagtcaaaaaagtaaccagcgctgcaacttaagatggatcatacaacagaaattagtaccaagttaccttatcttataatatgttattaaaatgaaattttaaaacaacac

SEQ ID NO: 659582 - DNA, 562 bp, Homo sapiens
ctaatagtctgtttcttgtaaaacctgtgttkgaatgaatgaataaaaaattattgcttgaggatggcagtttgatatatttctctaggcactgttttctctactacattactcccaacacctcaacattcagtcttgattattttctgacctgaggaagcatcaaaacctattcttaccaaatgtagagagttttacattttatgtatccaaatttaaacaaaactaaaaagaacatcaagctaagtagcataaagtaaaggtgaaatgttgcttgccaagatttcaataacttgatcatccttcataatgtagatgtttaattaacttcatgaggtcttgtttttaatctcaccctccaaacagcatgctaagtaacccacataactaaacctgaaacttaaaattacattaataatagctaacatttatgcagagcttaccatacgccaggcgctcagcaagtatattacatacattatttctatttatccttgacaacaacactatgtgtgggcataacatggaaaattgaagtaaatttctaagctaataagcagtg

SEQ ID NO: 659583 - DNA, 579 bp, Homo sapiens
agttttttaccttcatgccattcagtaggtttgttttaagaaattaacactgattttcatgctaaattacaagaaatattttaagaagacaaatcgttcaataacaagttacaatataagtcagaaattaattctaattaaagtgagggaataaatttcaaggagggaacaaataaggtctttcaggagataatatgtgcattgaggtttaatagacaaatgtgcgatcctgtgagggcacttctaggcacagtgagcatgatgaacaaaagtgggtgacatatgaaatcgcagctcttatttgatgatcagatagctagggcttgagtgagaaggattatagtgataaagctaggaaagtagaaaagttgcattaagttctggagggctttctatgttgtaccaaagaatttgtactactctttgtagttatggaacaatggccaagaattcttaaggagggcataatgattaaattttggctatagtaataactttaaggraagttaaagttattactgaatactgaactagatatgagagaggctgaaggcaacaacttcttttggaaaaatttta

SEQ ID NO: 659584 - DNA, 560 bp, Homo sapiens
cagaaggccaacaaatcagatccacaaaattttcaaaagtgtacatatacttaagtagatcatatgtgtcagtgtttgtgaatccataattgtgtgactatatgtatttgagtgtatgagtacaagcgtgaggctgtgagtatatgtttgtgagctgtgtgaatattaagtgtaggcttccagtctgttagtgtgtttgtacatattcataaatgtgtttgagtatatgtgtatgtatgaaagtatatgtgagtgtgtatgtttatatatgtgtatgagtgtgtgcacatttctgtgtatgtttgtgtatgtatctggtcttggattataattcaaccacttattgatggtaacttctctaatctgttaatgataatgtgacataatgtatgtaataatmtttataaaatctagagtactatgcaagtctacttcattattacagatacataaaacatactattttacagctttaagaccggaacagtactgtatggcaatcactatactctctgaatgcctgtatgtagtcagaaaatgcagtctaaaatgtttatcca

SEQ ID NO: 659585 - DNA, 599 bp, Homo sapiens
ggcagtactttttggtcattctcaattaatagcactctctccctaagccagagagcctatagtcctgaggatggtarggagaagggggagagtttctcaaataacataacagaagtgttccaggctgaagattgctttgattaaaaaaaaaaaaaaaagcaattggttttcaccttctataaaaggattaggaactcagaaatgctgagagaaaaaggcaggaagagttttgtgtattttgcaaaccttgttttgaagtgcacaaactagtgatttctagagcaatttcagggtaagaattaaactcttttaaccaatattttgaagagattttgacaattttttttacattaccatgttggtgaaaacaaattacaatcttcctctatccctaattgcatgtgtttcattcttatatttttctcagcaaggcttttgtgttaagaaaaaaaaatactaactaatttgagtgtgtctcaatgttttattttgattaattgttaattaagtcattttagaaataattaaaaataattatttttagctaatcctaagattcatggtaaaataagaaagagatggtgtgttccaaatcacgt

SEQ ID NO: 659586 - DNA, 597 bp, Homo sapiens
tcctatttgttcataatgcatatttaattttttgttcctgagaagttatagcagctgctttaaaatctttagcaattccaacaactatgtcatctcagggtactctctattgattgtgttttcttgagtttgggtaacatctttctgtctctttstgtgtcttaatatatgtatggtatcctgatgatacattgtaaaaactctagattctgttatgttcctctgaagagcattttgtgtttagttttaatatacattaaattatcctgactcagaattcaatttatgtttccctgtggatacatgacattttccttaggttttctagatttagctagacttcttggagtctgctctgaacatccatagtttagatataatcagaaatttaaatagtttttattcacataatttggcactgtttctcccttaatgtggaacttcttcactctccagatgtggtggctccaactttttctttaagccagtaagactgataatttttttttaagttttattctcctaaaattggcagtctcacatctgcattcaggcaaaaagaggcatgcaatgagaagagcaatgccatttcctttc

SEQ ID NO: 659587 - DNA, 562 bp, Homo sapiens
tgaattcaagtgttgtatctctaaaaaggcccaattaaaatgtaactatgaaaagacataaccaagttgcctggactgtgagtcattaaacatttaggacattagcaaattaatagagctcagagtgcggagagccgaggtgttatcagaaatgttttgggtgccaaagaaagatgagaaaaggaagaagggtaaagaaaaaaagaggaaaaagttgagcatgaggaacttctgaagagagttgactggataaagctggggaggggctggggggttggagggaggcaggagggtaataaagtcccatttaccctggggtagagattccagaagaacaggtgggggacacatatcaatagtgccattttatcttgtggacccaaaaagaagttactgggtccaaatgccaaaaaaaaaaaaaaaaagcccagtaaaacaaaatttataaatgcttaattagayatcagtaaaacataacattgtcaatttcattaattgttaaatttagtatttataaatatttattccatttgaaaagaattttgtgggttagatttttttc

SEQ ID NO: 659588 - DNA, 531 bp, Homo sapiens
aaatttccctctaagcattgtttagccacatttcacaaatttggaaatgtttattcattttcatcttcattcagttgaaaatattttctaatttcccttttaatttcttcttttactcacttattatttggaaatgtgttatttcatttccaaatatttggggattttcaaatatctcctgttaacaatttctaaattagttgtagtcagagaacatattctgtgatttcaatgctgaggcttgtctgaagccccagaatatggtgcattctgtggaatgtttcatgcacatgtaataagaatgtggctgggtgcagtggctcctgcctgtaatctcaacactttgggaggctgargtgggtggattacttgaggtcaggagttcgagaccagcctggccaacatagtgaaaccctgtctctacgaaacatacaaaaattagctgggtgtggtggtgggtgcctgtaatctcgattgcacccctgcactttagtttgggtgacaaagcaagcccccctctcaaaaaaaaaa

SEQ ID NO: 659589 - DNA, 547 bp, Homo sapiens
catgtttgcaagcgataattgccaggttcttgggttgacagaattccatattttctttctttttttaactgaaaaaatttccagttcatttaataaatatatatggggtgaaaaaagaaataggcaaaatagataatccttttccaagtgctataccccccaatttttttaaaggaatgtgacaaaggtcaaggaaatcacgagcatatgagaagaaaaaattatgtaaatgatctaaactgaatatttaacaatctacctgttgaacaagcccctaagatttggcctttgacttttctctatttaggcatcattaasttcaaattctatgattcatttgacattaatagttaaggttcttgtttctctctctctctcgtctttcacttttctgagacgtcactcacttgctgtcccaagaaagagttgtgaatatgcctcagatttcagaactttccatgagaaagtacgttgataaggaaactcaaattccagagtgggcaactgctttgtacctctactccagatatgcttgttttataaagcc

SEQ ID NO: 659590 - DNA, 590 bp, Homo sapiens
caggtgactgatcacagtacttggtattaacactatattaatgaatggggcactgaagagcacaggaaagacagccttgaatggcttacacaacccctccctcataccctggtagtggcagcagagcacaaagagagaatctgtgcactttggggagggagaacacaatgattatgagactttgcattggaagtcactacttccttgttatggcagaaagcaaaaagtgacagaacacatcctgcaacctatggagtaagcctttagaccagcacaggctagagagaaataactcaacccagtggtcaaaacctgagttctggctagccccaccactgtgggctaaagcactccagggtccttaatgaasttgaaaggcagtctgggccagaaggactgtaattcctgagtaagccttggtgatgtgctgggcttggagccagtggatctggagtgcaggtgacatagtgagaagccagctggcgtggtcaagggagtgcttctgccactcctcccccaaccgcaggcagtgcagcttgcagctctgggagagatcccttccttccacttgagtagaagtgaggaaggag

SEQ ID NO: 659591 - DNA, 594 bp, Homo sapiens
tggaagagaaatctacttgtatagacgaagcagcttgtttgttgatttcttgcagttgagtttttaaccttacaagatgtatttattcaattgcagcaggaaatgttaagctatcacagtccccccccgttcagctcatagtccaaagcaatcctgatattgaaaacaactttagcaatataatttttttaaagtttgctaagcaactatagtctttgcagtagagtcagctatagcagataatgtttgaaatagatttctaattataaatttatttacatgtacgccaagccagggaagaagattctccaccaaagatgcccatttaaagggatttattccttctgacagtttcctttttattccatagtaaaaatwaagaggtgttgaccaatgtttaatttccagttggttattgagtgacggatgtacttttagaatttctaatccacattggtcgcttatttttcacttactgagacacacagttgcctgcacatatggtaggttgttaaattctgtacaaataataatatatcctagacaggcacaactgacagttccatgtgggatgccttcttcattggaactcac

SEQ ID NO: 659592 - DNA, 317 bp, Homo sapiens
tctgcagtctcacatacttaagaggctaaggtgggaggactacttgagcccaggagtttgaggcttcagtgaattatgatggtgccacaacactccagcctgggaaacagagctggaccccatttccaaaaaaaaaaaaaaaaaagtagttacccaggtaaggtggatgatcaagtacacccagtgagaagcacacaaaccttaccctttacccaaactctctcccttacctggcccatttcyggtttctggaggaggatcagttagggggtgtgacccaagttacccagataattaactgtggaagcacgagtttt

SEQ ID NO: 659593 - DNA, 397 bp, Homo sapiens
tgaggagggttgttggtgggttacctccaactcaaccacttcagagctactacagtggtaatgcatgttgaagaaaagagtcaaactctgtgaaatatttgaagagatttattctgaggcaaatatgagtgacctcggcctgtcacacagcccaggagatcctaagaacatgtgccaaggttgttggactacagcttggatttatacatgtgagggagacataagacatcaatcagtacacctaagatacacattggtaaaattgggaaaggtgagacaactcaaagcaggtgggggtggggtgggtgaaggcttccaggttaaaggtgaattcaaagattttctgaytggcatttgacaactggctaaaataatttatctaaagaccggaatcaat

SEQ ID NO: 659594 - DNA, 562 bp, Homo sapiens
tatagtaaaccccaacatccaatcgggaaaaatgttgtaactctatatattcattaaattgttcacaaactgacatcttttagcatataatatggtttcctttagcttgttaaagagcatggactcatgactaaaacataagaacacccaatgaagytcaactaaatcaattcaactatgaaaaataaactgactagtgatcatctctttattattattgaaagaataacttacaagtaaaaacattcaatttttgaaaacagctttatatttattgaatttatgcatataacgttagttgcatttcaaaataaaatggctgccttaaaagtgatgcaaaattacatatttatacattctctgaattaagcaggattaattgaaaagtggatatgaaggcatgactgcaagctacaaattgagcctatttttagtaacttgctctagctgagatgttatatgttcagatttgttgacatgaagctttattgagaagcattacttattcccaataactcaaggaggagcctgttttgggaggaaaaaccacatcaagtatgtt

SEQ ID NO: 659595 - DNA, 550 bp, Homo sapiens
tgccttggattcccaaagtgctgggattacagacgtgagccactgtgcccggattgggggtgggaaaccccagcctccctctgtgctctttgataacaagctggtctgtgatttttgagcatatcttctctcattagtccaaggcacmcatggttatccaggaaacctcatctccctttgcaaaccacagccctcccatgcacaaactgctagtaaacacctgagcatgctatgctacttcagatttttgcatttctgcatatgcagctttgtctaccacagctcaaagccaagctatcattcagctgtcacctctttggtaaagcctctttacattttccagtcatattttattactttgtcttttatgtggacctttcaatactatacttatcactctatttaaaaatatttctttacctttctctcatctgcactgtgaattctttgagggatagtccatgactcttcttcctcgtcttccttcttcttttttatgatcatcttctatataatagaacttggtatattacaattccaattagtgttt

SEQ ID NO: 659596 - DNA, 584 bp, Homo sapiens
tataaatttatgaggcctcctgttgagctagacaaatgcctgcaggattattaaatagagatatatatctctaaaaatacgagttttttagttaatattatatagccacattggtcggttaacaacctttaaattagaagcaaaataataaagattcaatcagtggctatatattttaaaaattgatgaataaaagttatttctctctgatccagaaatatgaatacagaatgctatttactttttttaaagtatttgtttgtattaaagatggaatttttaattctgaaatccatcaaatcttttctcaaacttaaatatttctttctctataacatgctcattaattttccrttatagttaggtcattaataaattaaatgccaattaagtcaaatccaataattaaaaaattagtaatgataacattattatcatatgacattgaacacatcaaattattttcaagttattaacctttttaccgatagcatatctaaaactgcacagcattttaagcaaaactaggagacatttgagcaaaagcttctatggtcattcattttagattgagtatgattcag

SEQ ID NO: 659597 - DNA, 590 bp, Homo sapiens
aaatgaaatagttaattttcttttaaaaaaaagataaatgaaatttaaaaaatctttagccaaactaagaaaaaagaaagaagacccaaataaataaaatgaagatggaaaaagagacattacaatagatacaacagaaatataaaggattcataagagaattataaacaattatacagtgacaaatttcatcacctagaaaaaaacggataaatttctggacacatrcaacttacaatgattgaattataaaaacttagaaaatataaacagactaaaaatgagtaacaacactaagtcagtaataaaaattctcctgtaagaagaaaaaatggagcaaggacaaatacacaccccctgcaattgtcccctccatagggacatcaaattgaacaacagtccacataagaaagaacctctgtaagaaccaaaaatcaggcaagtgatcacagtatctggttttaacatcatatcaaggaaagagacagtgaaaagggtaggaaagtcagtattgcattgcctataccacactgttctcatttcctgactgcaccaaatgttgcagagaaataatctgcttggaagaggga

SEQ ID NO: 659598 - DNA, 394 bp, Homo sapiens
tattatagtatttttatgttgctctattcttcttttaaaatgtttctattttcttaatgcagaaacaattgatcttgatggaacaatcttgtttttatataaaatttcaagctggtgatgacatgtgtaaaaggaaragtgctgcaagcagtaaatgctgttcagtttgcagtccattacatcaacatatctaaatgatcctctttagcccagtaagtacctatactgtgcttactctttccaaaatgttttccatttctttaaaatccaagttgatgataactctttcatagggcagaattcaagtaaatattgtaaaggaataaagactttgcaatgacctttctatatgtgattatacaacgcaatcccaaattatttgaagagctaaaga

SEQ ID NO: 659599 - DNA, 553 bp, Homo sapiens
tagacttatgctgtcatgtaaaacaaccaagataaaayacataaagcaatgattttcaagacactggaactcaggtaacaaaggacagtgatccctgagaaattgaaaacaagatgcgccctgtaattgtcctggtttgagagacttccaaagctatagcacattagggggtcacccaagaagaacttgataaactcaatgagttaagaagacagaagatagaatctggggaaaccaaggctgcactgaaggagaattccagaaaagtacagagggccttgacttattttgcgaagtactaatcaacacatatgtgtgaataacttaaaccctagaaaaagaattgaaaggattaaatagaacagcgcctgacactcacacagggctaggaacagagcctgttcccacaaactatgttagaaaaactcaccattcattgtagtgcactcaggaaagtcttaccacagcagggggaaataaactgctataaactgagcattgctacgaaaatattcaacattaacaaggtacaaattgcaatgtttggcatgca

SEQ ID NO: 659600 - DNA, 633 bp, Homo sapiens
gatgcctgaaaagtttccagaggggctggccaacacaggaggcagggtccctgtagctagaagacccagctgaaaaatttgccttygacggaaacatgaacatgataggcaggtgagagtaggggcatcgtgtattggtctctgcctcctccatgaaggagcactgcatctccaccacacactgttctgctcagaaccaaagctggcaagcttagctaggctttctctttgtctctctctctctctctctctttctctctctctctctcctctctcctctctctcctatctctcctctctctcctctctctcctatctctcctctctcctctctttctccctttcctctctctctctcctctctcctctcttctctctcacctctctctcttctctctctcctctctctctcttctctctctctcttcctctaatctatgaacttttgttttttttggtgggagggggtgattctttattgtggtaaaatgtacatagcaaaatttaccattttaataattcttgagggtacaattccatggcattacctacatttacaatgttttacaagcatcaccactatccatctccagaactttttcatggttccagactgaaactgtgtacacatga

SEQ ID NO: 659601 - DNA, 503 bp, Homo sapiens
tttttttttttttttgtatttttagcagagatggggtttcaccttgttggccaggctgatatcgaccccatataattttgatttgattagaatctgatgtggccctaccttcaaggaactcacaatctaataagataaacagagtcataattacataagtataaaacaagatggttgtaaaatacagagctatgcacagactgtatggagtatagtatacacccagaatgggggtaccagacaaaggagaatttaaattaagtgggaaaaacactgactttgaaatcaggcaaattcctacctatgtggcttagaaaaagtaaattaatttctggtttccattatatttaagatggtcatttaccatcatcttgatggtcaaaccatttcctaatccctgtgttcccaaaggaatcagatcacttcattctcttcaaaccaataaaactgacaagtgttttctggttcycagcttatatctgccctgggtcactgggatttaa

SEQ ID NO: 659602 - DNA, 319 bp, Homo sapiens
tgtatacatgcatcaaaacaccccattatatatcataaatatatacaatgtttatttgccaattaaaaaataaaaattttaaaataatttaacctagaaaaggtaataatacatcacagaaataggggatgaagaaatagcattcacctactttattcatttgtctctcaagggctctctctaggcytggattaatgtaggacaggaagccctaggtagaggtagtaggtaattgaaaaggcaacaacatgttttctttcacttttagactaccattaaaaatgatatttgagtttttattgtattttcactcaaacat

SEQ ID NO: 659603 - DNA, 519 bp, Homo sapiens
tgttctgtttgcccaagattatagtcagatttctgattccatcaccaccctccattggacctatttttacatggtcattaggaccttcctgctatggattgaacatatgtgtccctcccatgttggaacctttaaccccaagatgatggtattaagaagtagggctttggggatatgattaggccctgagggctctgctcttgtgaatgagattaatgttcttataaaagagccttcaaaagacttgcctggcccttttacccttccatcttttctgccatgtgaggacacagcatgtttcccctctggagaatgcagcaaaaaggtactgtattagtccattttcatgctactgataaasacatacctgagactgggcagtttacagaagaaagaggtttaactggatttcagttccacatggctggggaagcctcacaatcatagtggaaggcaaggagaagcaagtcatgtcttacatagatggcagcaggcaaagagagagaacttgtacagggg

SEQ ID NO: 659604 - DNA, 509 bp, Homo sapiens
gatctcaatgtaaaagctaaaaatagaaagctcttaggtagctggatgtggtggcatgcacctgtagtcccagctagctgggggcctgaggagggcagattgcttgagccctggaagtcaaggctgcaatgagctgtgttcatgccactgcattccagcctgggtggcagcgggaaactgtctcaaaaaaaaaaaaaaaatatatatatatatacacacacacacacacacacacacacacacacatataaatgacataaaataaagctcttaraagaaaataaagggtaaatcttcatggcctcagattaggcaataatttgttaaatctgacccaaaagtacaagcaaaaacaaacaaacaaaatagacaaattggatttcatcaaaattaaaacttttacgctgcaaaggacaccatcaagaaagcaaaaaacccatagaatgggagaaaatacttgcaaattatatatctgataagaaacttatatctacaatatacaaagaaca

SEQ ID NO: 659605 - DNA, 619 bp, Homo sapiens
actgctttattgatttgcactctaattttcattatttcatttcttctgcttatttttcatttcrtctgctcttctttttccagtttcttaaagtggttaagaatgttacttaagtactgcttgagcaacattccacaaatttcgatatgttttcaatttttattcagctcaaaatactttctaattttctactttttagaagtctgttatttagtttccaaatatttggggattcctattagtctttgttattgattcccaatttaattttcagtcagagaacatactcttctgaaaggaaaataaaatcttggcacttcaaattcactatgccaaaagggaaaaattaaccttggaagctgagtcatgaaaaaaagcaaaacgcttgctttttcttttgttcttaaactgatagctatagctagaaggccacatgtgggagcctccctcaccctgacaatgtaaattaacagcttatcttcacaggcaagggacaaaaagaaatcatctcccacccaccccaggaatgcatgtttgactgcttcctctactctatgtttattttatgtaaagtgcagatttactgagcagaagacaaatacataattgactgttccct

SEQ ID NO: 659606 - DNA, 628 bp, Homo sapiens
gatactattcctgtccaatcctgccccaccttagtcaagggagcctgattctcaaactcttacagtcctactttctcacattttctaaaccatctcacttttcccctacaggctcaggctrttgccaactccctcactccactgcacccctacagtctcccttactcaccaactaaccagccacctagaatccaaagactgcaaatgcagggctacattcgcctgctaacttgagcctgacaccaaaatgttcatgcttaaagcaatggactgtgccactcttaggaaactgccctaccttcaggcaaagatttcccttcagcacttgcagctgaatctgtcaccttcttccagttcaccacttgcatgttggtctcaaatcattctactctaataaactgtgccacagaatagtgcctttgcctatacacatgatggtcatcttttcgtaggattggacgaagtttttaaataattgtctcttaatcgattataaatgaaacaatgtatgcgcaaagagcaaaaatgatttcttcagtgtattctatcatttaaaatcttgtaaaaacttttacttctcttttaatcctaagatttctcggctcatgcaacatttatatgtaggaag

SEQ ID NO: 659607 - DNA, 628 bp, Homo sapiens
gatactattcctgtccaatcctgccccaccttagtcaagggagcctgattctcaaactcttacagtcctactttctcacattttctaaaccatctcacttttcccctacaggctcaggctgttgccaactccctcactccactgcacccctacagtctcccttactcaccaactaaccagccacctagaatccaaagactgcaaatgcagggctacattcgcctgctaacttgagcctgacaccaaaatgttcatgcttaaagcaatggrctgtgccactcttaggaaactgccctaccttcaggcaaagatttcccttcagcacttgcagctgaatctgtcaccttcttccagttcaccacttgcatgttggtctcaaatcattctactctaataaactgtgccacagaatagtgcctttgcctatacacatgatggtcatcttttcgtaggattggacgaagtttttaaataattgtctcttaatcgattataaatgaaacaatgtatgcgcaaagagcaaaaatgatttcttcagtgtattctatcatttaaaatcttgtaaaaacttttacttctcttttaatcctaagatttctcggctcatgcaacatttatatgtaggaag

SEQ ID NO: 659608 - DNA, 622 bp, Homo sapiens
ctttgccacctggctccctgtttgccaatacagggatacagagggagaatagaagcttgagagggaagtagaaagtgcttcctgcttctgacaatgtygccctgtttattccagtagccactgcaaagcagttggttctattttatacatttttctacaattcaggaagaaaaaaacctaatcgcactctttcctagtgataaaacagcactagctggctggtaccccatcctcagaaatgtgattccagctttgcctgtggattcctttctagttttcaggctgtaacactggctgagtaccatcccccacaaaattctgcatcccagctccgtgggtaccccaatctgagtttctggggtacagccccagctggcagcctctccttaaaggaaaggttcttagctctgtggagtccttgctgagcttctaaagtccctctatttttcgggggacaccctcacccaagactcctgtattccttttcttcaaagcccctcctccagtattctaaattctaataatctctgactcttacttttgtccctgcatccaggatatccacttcctgtaattactacctttatgattcctcagtgttttttttttttgcctttattat

SEQ ID NO: 659609 - DNA, 543 bp, Homo sapiens
gcagatattggattggaagatgtagcagttatcattaagggttaaaagaggaatcaggaaaaataataaacagacaaattcaggctgtgtttacatgaagacatcaatgaaaatttcagtcattaatttgtgatactgatgtattttgaagcacaactggtcacagcagtggcaaatgattccatgaataacataataagggagttgcagtcagggtggaaggtgctgatttctgcagatatataagaaaaaatggtataaaacttaaaaataatgttaaaaattattcagtggctttaaagagtcttaaagacagacttcccccaagaagttcatggacattaaagccaatatgggcagyaacacagtgcccagagaatttataaaaacaagagcaagggcattgccttccagaaacatatacattctttggtctgtaacttggttttctggaaatcagtcctagaaactcttcaacaaaagcatattttaactttaggccttggagctgcttttacttgcttccttgggcatccatagctg

SEQ ID NO: 659610 - DNA, 587 bp, Homo sapiens
aagaagagacgaagattctctgcaatgatttctgtgcaatttccagaaatagcaaagaatgttatttagaaatagtgaagatttcctttgtgaaactatacaattcttttaataaattatataataaagaggtttttgttaaaattgttataattaattcgttaaaaaattatataataaagaggtttctgttaaattaattgttttgaaaaagacacactggtacactttttagtttatcttcagtggatattctgaaaaaggttcaatgctgattaagctgttccttgttactagcaatttattggttatgtattggtaaattaaataatttttttccaaatgtatgatatgatattataaattatattgtatataaatccaaattttgcttctgttttaacaagacatttcattcattcrgaaaaattggaaagtatcaaaaatatgtaaaaataactaattataatgtgtacttacaataataaaataaatatttgttttttattgtaaagtcttgatatttcttatgattttcaatacattttattttcttcttgtaaaactgtgatatataaataattaaa

SEQ ID NO: 659611 - DNA, 439 bp, Homo sapiens
aacatttgaccacatatctggacactgtagcccagccaaattgacacataacattaactatcacagaaacaatgtatttaataggcaagaaaagaaaaaggagataaaggagaatcataaaaaagataaaatgaaactaaaaacaagcaaacatcatttattaactcagatatcaataagagaaatcaagcaaaagataatcttttttgcacctgtattagtggccttgaggatcacatgacttaatatttcatgcccacagagcaaaaatacaaagtgaatgaaatcatgagattgctgggagatgcagatgattktaagtcgttgaagttccggtaagagaaaaagaaacacatgtaggatagattaagaattatataaaaaacagaggaaaacgctcatgagttaaataaatatctacaattgtaaatgtaaagaa

SEQ ID NO: 659612 - DNA, 537 bp, Homo sapiens
ctgatgaatgggaaatcattaaaggatttcaagtaggagaggatcagtttccattttgaagaggtccctctggctgcaacatggagagtgaattggaggaggacaggaacaatggtgggggctgcttaggagctactagtagcacctccagggcagagatggcattggtttgggccagggcaagggtaacagggatgaagacaggtggaaggatagaaaagatattttgtagggaaagcaaagacccttatacatagttataaraagcagctgtagccaggcacagtggctcacacatgtaattccagcactttaggagatcgaggcaggaggatcacctgagctcaggagtttaacaccagcctgggcaacgtagtgagccctcatctctactgaaaataaaaacaattagctgggcatggtggcacatacccatagtcccagctactcaggaggctgaggccagaggattgcttgagcatgggaggtcaaggctgcaatgagctatgatcacaccactgcactccagtctgggtg

SEQ ID NO: 659613 - DNA, 602 bp, Homo sapiens
ctggcctttcataatacattcccgtggccacctagcatcatgggtaaggctctcatcaaatgcttcttggagagcaatgcatcttgcagaacaggaggtgggaaatttccacaagggaatgactatgaatggggtgggagaaagacagggaagcaggggaagatcatttccattatttgttcagtggtgattttgggtgaacatctctctttagtccagaatgggcaggaaaatgatatgaattgtaattgttggcaartgcgaaataatatatttagtgaggaatgtagtgtgaagcacatgaaactgcactgtcaggaagagaagttgaatctggggtcagaagaactggtttccattcctggttctgcaaactgccatcaaacttgaaggactcattctgaggcagagaatgaataaatcattacctttgtgaagcatcagaatcagcagcactttcctgtcccaggagaagagggaaggggaggatggcacgtttcagggcttaggggaggataggggagaaaaagtgagaagggaggctgacagaagtgttgcagacactgcaacacttgcatacttaacactgtatactaaagtag

SEQ ID NO: 659614 - DNA, 602 bp, Homo sapiens
ctggcctttcataatacattcccgtggccacctagcatcatgggtaaggctctcatcaaatgcttcttggagagcaatgcatcttgcagaacaggaggtgggaaatttccacaagggaatgactatgaatggggtgggagaaagacagggaagcaggggaagatcatttccattatttgttcagtggtgattttgggtgaacatctctctttagtccagaatgggcaggaaaatgatatgaattgtaattgttggcaagtgcgaaataatatatttagtgaggaatgtagtgtgaagcacatgaaactgcactgtcaggaagagaagttgaatctggggtcagaagaactggtttccattcctggttctgcaaactgccatcaaacttgaaggactcattctgaggcagagaatgaataaatcrttacctttgtgaagcatcagaatcagcagcactttcctgtcccaggagaagagggaaggggaggatggcacgtttcagggcttaggggaggataggggagaaaaagtgagaagggaggctgacagaagtgttgcagacactgcaacacttgcatacttaacactgtatactaaagtag

SEQ ID NO: 659615 - DNA, 572 bp, Homo sapiens
tgtgtgtgcatgaagagcctatagaccttgagtgagaacttcttaatggtcatgatggcaataatggatcactgtgacaccattacagttattcatatatgggtttttttggtctttttttctcagctttgtctggcttaagggaggttgccaggccagtgacacctgatgagtgggtgttttgtagtttctttcaggaggtagaatactggtgaagacaaagtccatgatgtgggaagttgtctcagtctgctatctgttagctttgacacaatacctgaaactgggtaattgataragaaaaggaattcatttcttatagttatggaggttgagaagtacaaggttgaggggccacatctggtgagggccttgttgctggtggggtctccctgcaaagtcctgaggtggcacagggcagcacatggagaagggtttgtgtgtgcttgttcctctccttataaagccactagtaccgctcccatgacaacccatcaatccattaaccatttccttaatccgtcaatagattaattcatccatgagggcagagctttcataatccaatcacc

SEQ ID NO: 659616 - DNA, 615 bp, Homo sapiens
ctgcagcatgagggcactgtgggatgataggggaaggggtagcattgacagttgaagactgtctttctttccctctccagtgcctctttgaaaaatatgaagtcaaaaccaggtactgtgagtgctcactttattattgattcttacgaagatgtgtgtgtgggtgtgtgtgtgtgtgtgtgtgtgtgtagatagttgttgaacttggtgttcctgtggagggcagaattgttggggttttccattccatcatcttgctccacctcttctccactgtgtcttccattattttctttttgtggtgctaaacaatctctagcatggcygttttggcaagtcacaaaagctcatgcagatattttattgtgctgctgctactctggaatgtgtgcagaatcaccatgggcattatcatcatcaccaccatcaccaacatgattaacagaaagaaaaataaaaccaagaaaactgtaatatgaaaggagaatctgaagacataaactttatacaatagttatggagtcaaactggcataattgcagtgttttattagttgatactaagccattttactttgagaaacacacatgctaaatgacatagaggaaaaataac

SEQ ID NO: 659617 - DNA, 585 bp, Homo sapiens
aattttaaaaagtttttaaagcacaaaatttaataaaatgtaggttagtagaatggtgcttttcttttttctttttttttttttttaaatatattaacaagaggacctaagaaatgtctggcagtagttcaaagtcaaaggccaacatcaatcgctcataaagcaacttattaaagggcccttaatgtaacggactgcasatgtccaagtctcctccttcaactatcctcccaaggctgggactccccgaaggttcccttaatggaccttgggtcaatattgttaggacagaaagccgtgggcattggtcattttcttttatatctaatctactagaaattattttccttcaggtcgagaatttcttatctgctatttgaaggcaagactgttgttcttttattactgttattattgacaggttatggttagtaatgtgaattttgttattattagtggtggtgatggtattcttgcttttagatgagaaactgaagctggaaggagttaagtgattgacatcagataatacagcaagcaaggggcagggcagagttggtgcactgggaaccctggacgcgacac

SEQ ID NO: 659618 - DNA, 547 bp, Homo sapiens
gatcatgaaaacattctttgaatagatggtgtatctaggccttggaattgagatggtttaataaaattagttcaaccatttttcactgaatacttaccatatgtcagaaactatcttagtgctagagataacaatttcagatggaatgggattgtgtgccagctctactatttttctaactgtgagctgtaataaaattgaatctctcaaacactcagtttcctccatgcagataaaataagctttgacctgctagtcaacgtgaaataatacatgtaaaggtaattaggtacttagtaaaagttagctattattattacaatattccattgaycttctgttttccattcttctaaattcttctatatttggctaacagtttcaacctcattaaacaaaacttttatcaacaaaatcggtgaaagctttggtagctttttcagcatcttctgagaaatctaaatgtttctttggtattcaaagcatttcatgatctgcttcaaaccctcctatcaaatgtactatttaatttctggataaactggat

SEQ ID NO: 659619 - DNA, 547 bp, Homo sapiens
gatcatgaaaacattctttgaatagatggtgtatctaggccttggaattgagatggtttaataaaattagttcaaccatttttcactgaatacttaccatatgtcagaaactatcttagtgctagagataacaatttcagatggaatgggattgtgtgccagctctactatttttctaactgtgagctgtaataaaattgaatctctcaaacactcagtttcctccatgcagataaaataagctttgacctgctagtcaacgtgaaataatacatgtaaaggtaattaggtacttagtaaaagttagctattattattacaatattccattgaccttctgttttccattcttctaaattcttctatatttggctaacagtttcaacctcattaarcaaaacttttatcaacaaaatcggtgaaagctttggtagctttttcagcatcttctgagaaatctaaatgtttctttggtattcaaagcatttcatgatctgcttcaaaccctcctatcaaatgtactatttaatttctggataaactggat

SEQ ID NO: 659620 - DNA, 526 bp, Homo sapiens
tcttgggctgcacccactttccaaccagtcccaatgaattgaacccagtacctcaggtggaaatgcagaaatcacccatcttctgcattgctcatgctgggagctgtagactggagctgttcctatttggccatcttggaacaatccacctccatcttgatttcattgttgacccaaagatcattcacaagcagaatatttagtttccwtgtatttgtacagttttgaggattcctttagagttaatttccaattttattccactgtattctgagagtgcacttgataaaatttcaattttcttaaatttattgagaattatttcgtggcctatcatatagtttatcttggagaatgttccatgtgctgatgaaaagaatgtatgtttttcagttgttgggtataatattctgtaaatatctgttaagcacattcgttctagcatactctttaagtctagggtatagtttaagtctactgtttctttgttgactttctgtcttgtgacctgtctagtgctgtcagt

SEQ ID NO: 659621 - DNA, 422 bp, Homo sapiens
gtatagctaatgtacccagtggaaaaatgggcaaagaatagatagtcacttcaatagctagtaattttttaaaaaacaaaaacagcataatctcattattcatcaaacaaatgcaacaacaaaggaatttcattttatgcttatcccataagcaaacctagaaaacaatagctggtgtgttggctcatatctgtaatcccagctctttgggaagctgaggcaggaggattgcttgagcccagaagttcaagcccagcctgggcaacaaagtgagactttgtctctacaaaaaatmaaaaataaatcagccaggtgtggtggctctcgcctatggtcccagcgacttaggaggctgagctgggagaatcacttgcgcccgggaggttgaagttgcagtgagctgtgatggtaccactgaattc

SEQ ID NO: 659622 - DNA, 598 bp, Homo sapiens
atccttccattcaaaatccctttgccatgtcctccagcacagaagaataaggcatgaataattacagcatagttttttatacatggcgtatcaaagtctatgyaaatacatatataagtaacaataatgctccttggatacagacattcaggttcacactcaacttcaaacagcagaaagcatggcactatgaaacgagcatgaactttagatccaggcaaccaagtgatggaaccccagttcttccactggctagtaatgtgacattgaaaagtctaattagattctctgaaacttaaggcttcattggtaagatgtggataattgacatttgctttaggttaatttaaaggattaaagaagacaaagactataaatctcatgcacattgccttacccattgtgcatggttaattttatgtgtcaacttcactggtctaagggatacccagatagctggtaaagcattattgctggatgaatctgtgatgatgtttctggaaaagattagcatttgaattagtagactgagtaaagaaagttcaccctcaccaatgttggggggcatcatccaatacattgagggtccaaacagagc

SEQ ID NO: 659623 - DNA, 414 bp, Homo sapiens
catcgttcagggatgaagtaaaggagatgaaaactaggccattctctttgacttagcgtcagttatgaaagatgaataagttcagcatgtctactgtatagtaatgtgactatagttaaaaaccctttatcatgtacttgaaatttgccaagaaggtagattttaaatgttcataccaaaaaaataaaaaggaaatggtaactaagtgccctaataaatatgttattcccaatgaatatatgtatcagagcatccccttgtatacctgaaatatacccaaatttttatttgtcaatcatacctcaatacagctggaaaaaaaaagtagttgrtctagttaattattacaaaaatatttttattttcaacattaaaattagaaattttttgaaccaaaaaaaaaaaaaaaagttc

SEQ ID NO: 659624 - DNA, 475 bp, Homo sapiens
aattcacaagaaattttttctttgaatccaagtcaaggcagaaaaatattgtgattctatgtcaccacagacccacattasttgccctcaggaagtaacacaaagaatcagacactcttctcctccctcatttctgggaagatcatcaggttgtcccagtggaggctcatctataagtacaagtaaaacccttctgcagccctctatttagtgagtgggcaattctagcctgagcctcaacttttcaggtaattgaagattttaaccatcaaggagcagctgaacgcagtgcagcactacctgagtaataattggcttctaaaccagtttaaagaaaaatgacaatgccataggtacttgaagaatattatttacaagctaagtaaatgaaaactcagttgaatcagttttgccaccacgcatgtatatcttggactgtctttttccacaaaactgtcataggttttctacttcc

SEQ ID NO: 659625 - DNA, 498 bp, Homo sapiens
tcaaaaagcagatccgtagaatattttgttccagagattgtagtgggggccmaagtattgcatgagttttgttgggaacaaggtggaggttgagaatttaagcaaacttcagttggtggttttcagttggtgggcagtggcagaaggaagaggagctccatctgtgctctctcttcccccagtcacagccctcaggcttgttgcatccaggcccttcttacttaaacaagacaggttgacaggtttatttagtatttagcagacaagtcagctcagggtaggcgggtaaggtggggtgtgggctgctagtacagtgctgccctttgacccagggctgcccgtgcccatggggctattccatatattatatattatatatatatatataatatttttatatttatgtatataagcctgttggtttgttaaaaccatggattctaagttgctctatcaacgtgatcattagaaaaatgtgatgtacttagtgtgtaaatt

SEQ ID NO: 659626 - DNA, 498 bp, Homo sapiens
tcaaaaagcagatccgtagaatattttgttccagagattgtagtgggggcccaagtattgcatgagttttgttgggaacaaggtggaggttgagaatttaagcaaacttcagttggtggttttcagttggtgggcagtggcagaaggaagaggagctccatctgtgctctctcttcccccagtcacagccctcaggcttgttgcatccaggcccttcttacttaaacaagacaggttgacaggtttatttagyatttagcagacaagtcagctcagggtaggcgggtaaggtggggtgtgggctgctagtacagtgctgccctttgacccagggctgcccgtgcccatggggctattccatatattatatattatatatatatatataatatttttatatttatgtatataagcctgttggtttgttaaaaccatggattctaagttgctctatcaacgtgatcattagaaaaatgtgatgtacttagtgtgtaaatt

SEQ ID NO: 659627 - DNA, 498 bp, Homo sapiens
tcaaaaagcagatccgtagaatattttgttccagagattgtagtgggggcccaagtattgcatgagttttgttgggaacaaggtggaggttgagaatttaagcaaacttcagttggtggttttcagttggtgggcagtggcagaaggaagaggagctccatctgtgctctctcttcccccagtcacagccctcaggcttgttgcatccaggcccttcttacttaaacaagacaggttgacaggtttatttagtatttagcagacaagtcagctcagggtaggcgggtaaggtggggtgtgggctgctagtacagtgytgccctttgacccagggctgcccgtgcccatggggctattccatatattatatattatatatatatatataatatttttatatttatgtatataagcctgttggtttgttaaaaccatggattctaagttgctctatcaacgtgatcattagaaaaatgtgatgtacttagtgtgtaaatt

SEQ ID NO: 659628 - DNA, 498 bp, Homo sapiens
tcaaaaagcagatccgtagaatattttgttccagagattgtagtgggggcccaagtattgcatgagttttgttgggaacaaggtggaggttgagaatttaagcaaacttcagttggtggttttcagttggtgggcagtggcagaaggaagaggagctccatctgtgctctctcttcccccagtcacagccctcaggcttgttgcatccaggcccttcttacttaaacaagacaggttgacaggtttatttagtatttagcagacaagtcagctcagggtaggcgggtaaggtggggtgtgggctgctagtacagtgcygccctttgacccagggctgcccgtgcccatggggctattccatatattatatattatatatatatatataatatttttatatttatgtatataagcctgttggtttgttaaaaccatggattctaagttgctctatcaacgtgatcattagaaaaatgtgatgtacttagtgtgtaaatt

SEQ ID NO: 659629 - DNA, 493 bp, Homo sapiens
aataatttacttcaaatttctaaaaaaattaatgcaaacatattgtgaaatagaaaagtaggttcatgatttgattattataattaatattatgggttaatcacctcaggtcaggagttcaagaccagcctggagaacatggtgaaagcccatctctactaaaaatacaagaaattagctgggcttggtggcctgtaatcccacctactcgggaagctcaggcaagagatacgcttgaacccaggaggtggaggttgcagtgagccaagatcacaccattgcactccagcctgggcaacaagaggaaaattccatctcaaaaaaaaataattaattaatttaaagaaaagaagaagatgatgatggagagagggcgggtagaaagatatgtggtctgccttacactatgtatttcttatattagagataaatacygtgccacagaaaactgggtagccatctttatatcgcatagcaagtactcctaggggcg

SEQ ID NO: 659630 - DNA, 516 bp, Homo sapiens
gtcacacattgtgtgattccctacataagaaatgtccagaataggcaaatccatagacaaaaagtagattaattgctgccagtagataaggggtgggggggaaaggagtaactgcttaatgggtatggggtttccttttggagtgattaaaatattctggatctagataatagtggtgatggcacattaggttatgtatattttaccacaataaaaaaatgatattcagtgactacaaaagttaacattgtatggtcatgccataatttacttmttttctctattgtctaaattttaatgtatttaaaatttgattttagcctattacaataatttttcattaaatctgactcacagtataataatgactgttaatttgatgcatatgcttttattagtttgaggaaacattaatctattcctaatattccaggaatttttatcagaaataagtgctgaattttatcaagcaccttttcattacccattggttgaaataattattttattatgtga

SEQ ID NO: 659631 - DNA, 575 bp, Homo sapiens
gaaataagtgctgaattttatcaagcaccttttcattacccattggttgaaataattattttattatgtgaccttttgccatgatatatttgcacatttccttatagcaaactgctcttgcatttctgttatatatcttggtcataatgtactgttgaattctatatattaacattttactttggactcttctayctatatcaagaaataagatgatctacagtagtgtttccatgtctgggtgtctcaggatatctgccaaagccaaacagattcagaaaatttgggtaaatgcatttaaggtgttttttttaattgcagagttcctcagattctttaatatgcaaacgtatattgtgaatctccaaggggaagatacaatgtgagaatttcccacatttatttgaccacagacacatttttcaagtcctatctgttaatggaacagagttccctaatgtggaagtgtgttccacaaaatatcattaggaaactggctatattttttgtggactaaatttgaatatattatgtttaatttataaaataagttggccatctcttcatcttttcct

SEQ ID NO: 659632 - DNA, 602 bp, Homo sapiens
tttaatggacttacagttccacatgggtggggaggcctcaaaatcatggtggaggacaaagaggagcaagtcacatcttacatggatagcagcaggcaaagagacagcttgtgcagggaaactcccattttaaaaatgatcagatctcatgagacttactcactaacmcaagaacagcacaggaaagacccatcctcatgattcagttatctcccactgggcacctcccacaacatgtgggaattatgggagctacaagatgagattgggtgtggacacagccaaaccatatcaattgtcatcactcaaggcagatgagtatatagaaagctatcagttgtaaggaattggactaagtttaagagaataataattaagatagaacaaatgtttggtcctgcttaagggctaggatagatgaggcacaatagaatcatgtggggagctgtaaaaatgcccaggccctactctgtgtcaattaaatcagaatccagaatctctgcttgagtgtgtctagagtattggtcaaaggaaacagtgattttgatgtgcagccagttaagagctgatatcctcaaggatcatgatgtgacacagctgtt

SEQ ID NO: 659633 - DNA, 557 bp, Homo sapiens
aacaatagatataaaactcctctgcgtgtgtttgtgttatatagaactttctatatagaatatatacaatagtagtattttacttcgatagaaatatttatctcacttgatggggaaaaacctacatatatcattaattataattatcttcgcagttctacaacctatccaacaatagcctgtgtttattacatgaaaaaatagtaaatgttcctcaaagctcctttaaaaaagataaattaataagcataggctataccagttatttttgagtgaactttgttgctcaaggtaaatacaccaaagaaataaataagtgtscataaaaccttttagttagtataatttagagaataaaaggtttcaaacacacttctcaggaacactttgtagtcagagccccaaagctttttttttttttttttttttgagaagaactctcgctctatcacccaggctggtgtgcagtggcgtgatctcaggtctctgcaacctctgcctcccagattcaagcaattctcctgcctcaccctcccaagtaactggcactacaggcg

SEQ ID NO: 659634 - DNA, 559 bp, Homo sapiens
acttgaccagggacccacctagtggyagaacagctgtcctcccagggacctggagggagacactcttatctacacatctagtaaaagcccccaaaatagcagactccactgtgaacccaaaagcagccacatgactgacctccaatcacacttgactgtgatcctgaaggctatttcatcagtatggagactgaagagaagaaagtcttttgctgtgaaatcagtctgtagggccatttcaggatctcctaagtgacaaagatcagcatgcttggttctgggggcagttgcttgccttttcaaatacacagacaccaaatcaaggcttcccaaaaaatgaataacaaggaaattatgacactacccaaggaaatcagtaatggaccataaagaaatgtatctctatgaatgcctgattaaaaaaaaatccaaaataataattctgaaaaaaagttcagtgaaatgcaaaagaacacagataggcaactaaatgaaatcaggaaaacaatacatgaacaaaggagaagttgaataaaaaaactgaactcattaaaaaaaa

SEQ ID NO: 659635 - DNA, 447 bp, Homo sapiens
gtcttaaaaaataaaacacatggtgtaagatgatacaagcaaaattaccaatttgtgtaccccaaaacaaaattagatttaaatttccaattttaaaagattatttactgagatttaatgagaatgccagaaagttttaaatggtttmtagaaaaatatattgcactgttgtaattctttctttccaaagtttcacattttattgagttgagaatattattaatttaggaagatgaggcaaaaaactagaatgctaatcagaatataaggaataatcatgggatgccagcttcatatacatatgataccagtgactggtcatcaattgaatatgttctttgagctgcttttctagcacttttcacaattcacagctgcactttgctagctaaagggatcaatctgtagctgtgaaacaggaaaaggctctaatctgtgattgatgat

SEQ ID NO: 659636 - DNA, 447 bp, Homo sapiens
gtcttaaaaaataaaacacatggtgtaagatgatacaagcaaaattaccaatttgtgtaccccaaaacaaaattagatttaaatttccaattttaaaagattatttactgagatttaatgagaatgccagaaagttttaaatggtttctagaaaaatatattgcactgttgtaattctttctttccaaagtttcacattttattgagttgagaatattattaatttaggaagatgaggcaaaaaactagaatgctaatcagaatataaggaataatcrtgggatgccagcttcatatacatatgataccagtgactggtcatcaattgaatatgttctttgagctgcttttctagcacttttcacaattcacagctgcactttgctagctaaagggatcaatctgtagctgtgaaacaggaaaaggctctaatctgtgattgatgat

SEQ ID NO: 659637 - DNA, 585 bp, Homo sapiens
cactgttttcttctcccctttccctctcctgcttacaaattaacacccagaattgtacctctcagccacagtggtctgctccccgtgctgatctctcagttcaccctggctcataggggtgggaaggaacttggggtccacaccgagtagaactgaggcactaatggcccttctggacaggaaactctcaagagtgagagggctaaagcctaaaaccrggcaatgtctggggtttcttctgccttttcaactaaaatcagctctttccaagaacccatactgcctattctcctattttctctgtgtgttttcagaaatgaccttacacacccaccagaccatccaccacaggggcaagtttgcctcttttgctttcactttgcatgccacatggcttcttaaacacacactccctgttatttgtgttccgcagctcttactgtgtttatgtggcagcaaagacacaggctcccttacagatatcccctgagatttatacttgtttttacactactagcttgcatgacctccaaaccttcccctgtctgctagcaacattgctgggacatacagtaattggaaccc

SEQ ID NO: 659638 - DNA, 517 bp, Homo sapiens
tgacctgctcctaactggtgctcacggcttccactttaaactgtgacacctggggaagcgatgcagtgtatgtgggtctgtcagccctgcgtcgccaggtaaagcagccaggtcatcagtaccctctcacctgtacggcttcctggagcccaggcccgttttctatctgactctattcttaggcctccatgccctaactcgggtcctgtccctggacccttgcccatggcctttggaatggggtctttgagtcttgctctccctagtggcttgaaacagcctcttgggtccatcccacygtagagctggggagacagcctggctagtggagcagggctgatttcacaccatcctcagacctgggcaagaggcctgctccctgggtcccacacttcagaggaccctactctggccatgcatctcctcaagggacaaggaatccatggagccaaagggatgctgtgctcacttggagtctacctgacacctcccacccttccagatcactgcctgatac

SEQ ID NO: 659639 - DNA, 356 bp, Homo sapiens
ctagtgaaatggagagtgcagttgagatttgaaataaaaagcaaagagatggaaggaaactttttgcaagtggcagaaatggttttaactcagaatttgctcctcatgggccaggccattttttcttatcctgcatgtacagggatatccagttctgcttgcagcttctcaagatgtaacctctttcaaacctcagtgctggaaggctgcctcccactgtgattctagagcattcttgtcaaaggaagcactacccacactcaacatacacattgacrtactcttctgattttattttgtcactctaaactcccttgcttatggttctagaaatcagaatctttttgtcacttaat

SEQ ID NO: 659640 - DNA, 554 bp, Homo sapiens
cttagctccatcactcactaggtgtttgaatgccttaaggtagtcatctctgaaatggggatcataataggacctactactctaaggtgcgrttgttgtgaagattaatcttaattctggcatgaaataagtataaaatggaagctcatcacactgttattaaattaatttacttttttcctatggatatagatctaggaatctcaagatctcagcccaaggaccattacccatttctatcaacgaccaagcaggccacgggctctgatttatatcctcagccccctattccactcacctccccctttcttaatcaaagagcaccacgggatggtgcccccaaggaagccctgggaggctgaaaaggagggagcctgaaaccagagactaacagtggcaaatcgcgggtgggatttggcagttcagaaaaggaggtaccatgccaagagtgggggtagcggggtgaagtagcggggtgaagtggggggctggttcgggacaggccacaaaccagaaactgcgagaaggcgccagaagggacctgttgagatggc

SEQ ID NO: 659641 - DNA, 594 bp, Homo sapiens
ttagggatgaagatgggtaaatctttattttgtatgccctttgcccttgttctataattatcccttacagtaagttgaactcctgagagaagagaaaatgagcacaaacagtaatgatcaggtgtttagtgcctcctcccacaaactccagtccccactccccggcaggcatactcagagcccacagggaggggaagctcacagcctgggggaagaacagaaggcagcaaaagcacgtttggcctttctgaagatttgagtggggacgttcatacctccaaaggttgttcagactcttactgggcttctgagccaagctggcttgcctggtcaccagtagcagaagcaggccttctatgctttcaaaaaacagccatctgttgaggtttatttcaggtagcagccctagttgtcaggactctcatacccagtttactgtcactagcgtcctctctgggataaagtaatgggctttctgatgaccagttgcttgagcactcaggcctggctgttgagcctaagctgtggsaattctgattaggctaagcaagagggtgcacgtggtcatttgaaggctttgtctaaacagtggta

SEQ ID NO: 659642 - DNA, 513 bp, Homo sapiens
ggccagaccccactgaccagttttccactgacctggtccccattgacaagaccgggttcccactgacaagaccacaatttaccaggttgctgctcacctgaccccccactgaacaattctccatgaacgagtacccagctgaccgagccccctctgaccaggcaatcactgaccaggctccawgccagtaaggccccacactgaccaggcccgtgatatattgtgtatgccccaccaaccagtttttcattgtttatgttccaacagatcaggccccactaataaagccaccactgactaggtccccccactgaccaggcttccaatgactaggtcaccaggtccccactgatgaggcctttactgaggaggccgccactaaccaggcccctgctgatcaggtcccaaatgactaggtcctgatgaccaggtcatttctgaccatggtccactgaccaggccccagagcaaaggggttcaaagtctcattacaatgtccccctcagctcatag

SEQ ID NO: 659643 - DNA, 513 bp, Homo sapiens
ggccagaccccactgaccagttttccactgacctggtccccattgacaagaccgggttcccactgacaagaccacaatttaccaggttgctgctcacctgaccccccactgaacaattctccatgaacgagtacccagctgaccgagccccctctgaccaggcaatcactgaccaggctccatgccagtaaggccccacactgaccaggcccgtgatatattgtgtatgccccaccaaccwgtttttcattgtttatgttccaacagatcaggccccactaataaagccaccactgactaggtccccccactgaccaggcttccaatgactaggtcaccaggtccccactgatgaggcctttactgaggaggccgccactaaccaggcccctgctgatcaggtcccaaatgactaggtcctgatgaccaggtcatttctgaccatggtccactgaccaggccccagagcaaaggggttcaaagtctcattacaatgtccccctcagctcatag

SEQ ID NO: 659644 - DNA, 543 bp, Homo sapiens
gtctccaatcttcaaatcttcagtgtatraaagcacagattcctgaaagaatggcctcaaatgaccaggagtaggagctctctatatccctgctcctgaaaaacaagctaactggagtctccatcacctgccaccagctatacacactaccaactacctaactgaactccatgactgatttgccagctaatcatgcccctaacccagcccacatggacatgggaaggacatcagtgaactgtgaaaagaggcagaggtgaggagacacctgccctgtgccacacatctatgtagttcagcaatttccagccccttagtactccaggggctctaagccacccctttgtaagtcaggatggaagtagatgacaccacatttctatctgctgtagacattcttcccagtgtctcaaaatgttttggcatctttcagtaaaaatcttcaagtttgtcagtccttgatttaaaaaaaaagcagcaaaatttttagagctcccttgaaccttctattttaatgtgcctttgtagataattcccaacatc

SEQ ID NO: 659645 - DNA, 543 bp, Homo sapiens
gtctccaatcttcaaatcttcagtgtatgaaagcacagattcctgaaagaatggcctcaaatgaccaggagtaggagctctctatatccctgctcctgaaaaacaagctaactggagtctccatcacctgccaccagctatacacactaccaactacctaactgaactccatgactgatttgccagctaatcatgcccctaacccagcccacatggacatgggaaggacatcagtgaactgtgaaaagaggcagaggtgaggagacacctgycctgtgccacacatctatgtagttcagcaatttccagccccttagtactccaggggctctaagccacccctttgtaagtcaggatggaagtagatgacaccacatttctatctgctgtagacattcttcccagtgtctcaaaatgttttggcatctttcagtaaaaatcttcaagtttgtcagtccttgatttaaaaaaaaagcagcaaaatttttagagctcccttgaaccttctattttaatgtgcctttgtagataattcccaacatc

SEQ ID NO: 659646 - DNA, 621 bp, Homo sapiens
tgcttttgtgtgttttttccacagtgtgtctctagcacaggaatggtgcctggaacaytgtagatgctcaaaaacatataataaaggagttaactccagcagatcgcttgactcctcagacctcagtctcctgtgtgtaaaatgaaggtttagatgagattgctttcaagattctcattttaaaattctgaaactttactataattttaatgtcagtatgtacgttacctttaggctttcaaaatcattttactctaatatggctttactctctgatatgctatttactttctggtatttaccatatggtaaatttaccagagagtaaatagcatattagacagtaaaatgattttaataaatgattctaataatatatataagaaaggatgaagcagttattaaagatgataaagcacacaaaagaaataaaaagatttaaggatcttggtttaacctgtggagatttaaagatctcaggaagtcagtattaatcaatggtaaggtgctgggaaaaaattatttcaaccaatgagtgactgagcaatagtgagacacccccacaaccgcagtgtccaccctgctgtgtggtgctgggatggtttgctttgaatatgtgag

SEQ ID NO: 659647 - DNA, 621 bp, Homo sapiens
tgcttttgtgtgttttttccacagtgtgtctctagcacaggaatggtgcctggaacactgtagatgctcaaaaacatataataaaggagttaactccagcagatcgcttgactcctcagacctcagtctcctgtgtgtaaaatgaaggtttagatgagattgctttcaagattctcattttaaaattctgaaactttactataattttaatgtcagtatgtaygttacctttaggctttcaaaatcattttactctaatatggctttactctctgatatgctatttactttctggtatttaccatatggtaaatttaccagagagtaaatagcatattagacagtaaaatgattttaataaatgattctaataatatatataagaaaggatgaagcagttattaaagatgataaagcacacaaaagaaataaaaagatttaaggatcttggtttaacctgtggagatttaaagatctcaggaagtcagtattaatcaatggtaaggtgctgggaaaaaattatttcaaccaatgagtgactgagcaatagtgagacacccccacaaccgcagtgtccaccctgctgtgtggtgctgggatggtttgctttgaatatgtgag

SEQ ID NO: 659648 - DNA, 594 bp, Homo sapiens
ccacagtacagttttaccatagtttattgactcggagatgccagtagttataagctgaatcattattttatatgccattaagactgaaaaatattcccaattaaattttgacacaatattctcttatcacttagctttttgttgtgctcatctcaaaagcactctcttaaacttatatagacatagcttttcattacatatcattttgtgtgtacgctgaagggaaaatacagcaaaataaattagtgaaggttttctgaaaacctcttcactttcagagtctgactcttttgaattacttttctgttgagttgtccaaagatgcccaggttcttgcacttgatattgtcytctggaccatcaagtgcattggtgattcttctgttctttaaagaaaatgtggcatatatgcaccatggaatactatgcagccatgaaaaaggatgagttcacgtcctttgcagggacatggatgatgctgggagatacatttaataaataaaattcatgccatgttcatagatggaatgctaaatattaaatatccattttcctggaaaaaaaaaggggctccgctattgtctctgatagttt

SEQ ID NO: 659649 - DNA, 236 bp, Homo sapiens
ggccaggagtctgagaacatcctgggcaatatagcgagattctgtctctactatctatctatctatctgtctatctatctgtctgtctgtctgtctatctrtctgtctgtctgtctgtctgtctgtctgtctgtctggccagccagccagccagccagccagccaggcatggtagcatgtgcctgtagtcctagttacttggaaggctgaggcaggaggattgcttgagcctaaag

SEQ ID NO: 659650 - DNA, 598 bp, Homo sapiens
tggtttttttttgtttgttttttagtagagatggggtttctccatactgtccaggctggtcttgaactcctgacctcgtgatccacccaccccagcctcccaaagtgctgggattacaggtgtaagccaccgcgtctggccgagattctgacatatgtcataatttacttaggtttcagttagtttgtatggtcaattttgcttcttatcagaaagtacacagttatttgaaagttatctcaataagatcatacaaaagacacaattacacaaagacaatgtgaaaaatattctctcatgaaaacacatttgattttcaagacccattcagtaaaatttctgaaagagtgaataaaaatatagatggtttggaacatcacacaatggggcctgtcagggagtgggggactaggggagggatagcattaggggaaataccttatgtagatgatgggttgatgggtgcagcaaaccaccatggcacgtgtatacctatgtaacaaacctgcacgttctgcacatgtaccccagaacttaaagtataataaataggtagatagatagatagatagatagatagatagayagacagacagac

SEQ ID NO: 659651 - DNA, 373 bp, Homo sapiens
ggctgggcgcggtggctcacgtctgtaatctcagcactttgggaggccaaggcgggcggatcataaggtcaggagatcgagaccaccctggctaacacggtgaaactccgtctctactaaaaatacaaaaaaaaaaaaaaaaaattagccgggcatgatggtgggcgcctgtagtcccagctactcgggaggctgaggcaggagaatggcgtgaaaaaaaaaaaaaaaaggaaggaaaaaaagaaggcccgggagaaatgctccaggacattagtctgggcaaagatttttttgcgtaagacctcagaagcacaggcaacaaaagcaaawatagacaatgggattatatcaaactaaaaagcctcaagcaaag

SEQ ID NO: 659652 - DNA, 373 bp, Homo sapiens
ggctgggcgcggtggctcacgtctgtaatctcagcactttgggaggccaaggcgggcggatcataaggtcaggagatcgagaccaccctggctaacacggtgaaactccgtctctactaaaaatacaaaaaaaaaaaaaaaaaattagccgggcatgatggtgggcgcctgtagtcccagctactcgggaggctgaggcaggagaatggcgtgaaaaaaaaaaaaaaaaggaaggaaaaaaagaaggcccgggagaaatgctccaggacattagtctgggcaaagatttttttgcgtaagacctcagaagcacaggcaacaaaagcaaaaatagacaatrggattatatcaaactaaaaagcctcaagcaaag

SEQ ID NO: 659653 - DNA, 525 bp, Homo sapiens
atttactttaaaaagaaaaacagaaaacatgtctcctccagaagtttatccaactctatcatggagaaacattaaataatctcagattttagaaatattcctaataaattattaataaaatacttctactctcgcacttacttcattgtatcacaattaattattttaatctktcacaaactagatatgaagtgggtattcccttgagtaaaaggccaagttcttagttttcattttaccattctttcttagcatttgtctggaatacagtgtgtgcttagcaaatatttgttaagggtaactgacttaaactcaattcaggtaaaaacagcaaaggtatgaggtttgagtaagaatagtctgacttttggctgggagcagtggctcacgcctgtaatcccagcactctaggaggcccaggtaggtagatcacctgaggtcaggagttcaagaccagcctggccaacatggtgaaaccccatctctactgaaaatagaaaaattggctgggtgtgatgacatgtg

SEQ ID NO: 659654 - DNA, 618 bp, Homo sapiens
  misc_feature 1, 2, 3, 4, 5, 6, 7, 8, 9, 10, 11, 12, 13, 14, 15, 16, 17,18, 19, 20, 21, 22, 23, 24, 25, 26, 27, 28, 29, 30, 31,32, 33: n = A,T,C or G
nnnnnnnnnnnnnnnnnnnnnnnnnnnnnnnnntgagtcttatgatcgttttcactgaacacttacatggcagatactgtgtctggcaatggagagattttcccaatatrtaattacaaaagcagtgattttacattacttaagtgttaaactagtgtctaagaataccgtaacaattcagaggataagcaatttattttaaaactcatttgttcaactgtatctcacttatgattccttcattgaaaagcataatgaaatgtattttcctcctagagaatgctaaaaacaatactatttaatcaaccaaatcaaaatctgatggaaaattgtcctcaatacattctactctgattactaaaactgtcttcccatcccgttgcagaactaatcccatacttttacaactttattcttggaaatatttttaattctaataaattaaaagtagttttaaactgcatgcctgaagataaaatatagtaaatacatataatggaatattatttggccttaaaaaaggaaatcccgatacatgctataatacagatgaatcctgaggacattatgctaaatgaaataagctagtcacaaaaggacaaatattgtatgattata

SEQ ID NO: 659655 - DNA, 540 bp, Homo sapiens
ttttaattctaatgtagatgaaaaaaataggtcattttaatatacctgtggtacattcttatactgggtatatagagtctctctctctctctttctctttctctctgtgtgtgtgagtgtgtaggcaatatctgaaggatgatctttaagtatctagaataaattgagtcaaaaatctattttgaatacaggtgacagcttcaatttcaaaaacatttacttacgggtctttctatgctttgcattcaataattcaactcaacacaaaatgctggcgtcattctcatcttttaaaggaatgataggcatgcgtccagctacatgataaacacagacttgtattaaatttatttatatttgaagtttgactataagttgcagtagtctrcataactaagaatctctattactctaaacacccatattttcagatgttggttttcatattcaatgtttcaagactgaaggtacaagtgaaattattatcaaaatatgatccatgcacacctgcattagaatcacatatgatatttgttaaat

SEQ ID NO: 659656 - DNA, 549 bp, Homo sapiens
cagtgccactgcaacaagttcacagaggaatgtgagacgtgtggagtgacacctttggtttgagtttgtgatgctacatttggtaaagttccagttgaaaaagaaggaatccayattttagattggtcttttgacgatgaagctccaccacctaatcagatagcagatgactggctaaacctgttaatcactaaagggcgtgaaaagccaggttgctgccttgcagtgcattgtgctgtgggattgggaagggcacctgtgctggcagcgcttgctttgaatatggaattaagtatgaagatgcagttcagtttataagacaaaaaagaaggggagcattcaattccaaacagctgctttacttggagaaatgccgacctaaggtgcaattacacttcagagataccagtgggcattgctgtgttcagcagaaatgtaaatgaagaccggctggattgtggcattttagaggaactcttagtacttggaaatgtgaatctggagtcttacctgtatcatccaagtagtgatagactcagtactcagcca

SEQ ID NO: 659657 - DNA, 538 bp, Homo sapiens
gggcactcatctattccttttctcttgtgtccctactcattgaaaccaaactctggaaaggacccaatgtaccagtatttatacctctartgaagcacagagagaggaagagagctgcttaaactcacacaacaatgaactgcagacacagctgttctctccctctctccttcccagagcaatttatactttaccctcaggctgtcctctggggagaaggtgccatggtcttaggtgtctgtgccccaggacagaccctaggaccctaaatccaatagaaaatgcatatctttgctccactttcagccaggctggagcaaggtaccttttcttaggatcttgggagggaatggatgcccctctctgcatgatcttgttgaggcatttagctgccatgcacctgtccccctttaatactgggcattttaaagccatctcaagaggcatcttctacatgttttgtacgcattaaaataatttcaaagatatctgagaaaagccgatatttgccattcttcctatatcctggaatatatct

SEQ ID NO: 659658 - DNA, 487 bp, Homo sapiens
caacaggattggtctcatggaagacaatttttccatggacatgggggagggatggtttcggggtgattcaagcacattacatttattgggcactttatttctattattactacactgtaatgtgtaatgaaataattatataactcatcataatgtagaatcagtgggagccctgagcttgttttcctgcaactagatggccccatctgggagtgatgggagacagtgacagatcatcagggcattagactctcataargagcgcgcaacccagattcctcacatgagcagttcacaatagtgttcatgctcttttgaaaatccaatgccaccactgatctgacaggagttggagctcaggcagtaacgtgagtgatggggagtggctggaaatacaaatgaacctttgctggctcaccgctcacctcctgctctgcggccccattcctaacaggccacaaacgctactggtctgtggcccatggcc

SEQ ID NO: 659659 - DNA, 487 bp, Homo sapiens
caacaggattggtctcatggaagacaatttttccatggacatgggggagggatggtttcggggtgattcaagcacattacatttattgggcactttatttctattattactacactgtaatgtgtaatgaaataattatataactcatcataatgtagaatcagtgggagccctgagcttgttttcctgcaactagatggccccatctgggagtgatgggagacagtgacagatcatcagggcattagactctcataaggagcrcgcaacccagattcctcacatgagcagttcacaatagtgttcatgctcttttgaaaatccaatgccaccactgatctgacaggagttggagctcaggcagtaacgtgagtgatggggagtggctggaaatacaaatgaacctttgctggctcaccgctcacctcctgctctgcggccccattcctaacaggccacaaacgctactggtctgtggcccatggcc

SEQ ID NO: 659660 - DNA, 562 bp, Homo sapiens
catatactattgtgaaaatcattttatacaaggtacacttatataaaaataccatgttgcacatgttaaatctgcacaatctcttatttgttgatcatacataaataaagctggaaaaatatatttatctcagtccacttgggatgctattacaaaataccttggactgggtaatttataaatatcagaaattttttgctcatagtttggaagctgggaagtctaagattaaggtgccagcagattcagtatctggtgagagctctgcctaaaatatgatgcctgttgctagcctcatatggcagaatgggcaaacaggctgtcttccttcaagactctttagtgagggcattgatcccatttatgtagtcagagccctcacgatcaaatcacttcctaaagactctacctctgaatacaaccacattgagtattargttacaaggtatgaattttgggggaacacaaaaattcagaacatatcaatattgaattaaagatcaatcaatgaaggcatactagtaattatttttacaaaataaaaataaagatttggagacaa

SEQ ID NO: 659661 - DNA, 515 bp, Homo sapiens
actctgtattttaagttatcaggtgaaatggttttggaataaattaatgagttgtttcttctgaataaatgtgcatgttacaaatgcaaacacgtgtatgtattatacaactatgcagcttcaagagctgacttatttctatcagctttttattcmcttaaaaaaatcaggctactgaagcatattagaatttaattacaccaattagtactgccacatcagacatatgatgtgccttcaattaagaagtacctaatgggtattagtacaatttagcttcataattaaagttctaagaacagcacaaattaaacattatgattacaaaacattaaaaatctactggtgaaattaaagctgaatatttaacttctccttttgagctgattttaaaaaagaaaatcaggattatataaaatgcaatgttattattgaagcattctgaatttaaaaacagaaattaagctcacatgcccataaatatgtgcatatataatgattaaatatttagtaaa

SEQ ID NO: 659662 - DNA, 594 bp, Homo sapiens
taaactccaactaaatcctataaattagtgcagatcaacttaggacattccttaaactgtgagaagtaatttatmtttcataggacccaccaataagcaataaactcagagactgtcaagactgttctaagaatcttgtctacccatactcacaaaataactggaaagagttcagaacgtgaatacagcattgtagtactttcctagggctgctggaacaaattaccacagactgggtagcttaaaacaactgaaatttattatttcacagttctggaggctagaagtctgaagccaaggagtcaatagggtcacgcttccttgaaaagccacagaaaaaaatcttttcttgcccctgcctaggttctactctctcctacaaatttttggagctttattacttatagatttattactccaatttctgctttcattttcaatctcttctccatgtgtcctctcttcttataaaaacacctccagtcattggaattaggaccctccttaatctagtaggagctcatcttaactaattgtatgtgcaaatttctaaagaaggtcaccttctgagattctgaatgaataataatttca

SEQ ID NO: 659663 - DNA, 592 bp, Homo sapiens
acattatttgtaggtgtagacaatgctttcaaactagacacatttaattagcacataatatgaactacatgagtggcaagttaagcagcactggcccctttgccaggcattttgaaagaattacaggatttggtcatgtgatattaaatctaattgaagtagtgttctaggaggcccatcattawgataaaaatgacttgctacttcaaatagggacactagaggaagctgtttttagaggactcagttgtagtaggaaatcagtttggtttaagacaatgcttgaaccgaagacactgaataaataatgacttccatgcttattaacaacactaggattaactttgtacctttagtcaggaaggactattggatatattaatcactatgggatattatgtctttaatgttgagttgcaggaattcataaagaaacaagctcaacgtcgggcgcagtggctcacacttgtaaaatcccagcacttaggtaggctgaggagtgtggatcacctgaggtcaggagttcaagacaagcctggtcaatatggcgaaaccccgtctctactaaaaatacaaaattagccaggcatgg

SEQ ID NO: 659664 - DNA, 592 bp, Homo sapiens
acattatttgtaggtgtagacaatgctttcaaactagacacatttaattagcacataatatgaactacatgagtggcaagttaagcagcactggcccctttgccaggcattttgaaagaattacaggatttggtcatgtgatattaaatctaattgaagtagtgttctaggaggcccatcattatgataaaaatgacttgctacttcaaatagggacactagaggaagctgtttttagaggactcagttgyagtaggaaatcagtttggtttaagacaatgcttgaaccgaagacactgaataaataatgacttccatgcttattaacaacactaggattaactttgtacctttagtcaggaaggactattggatatattaatcactatgggatattatgtctttaatgttgagttgcaggaattcataaagaaacaagctcaacgtcgggcgcagtggctcacacttgtaaaatcccagcacttaggtaggctgaggagtgtggatcacctgaggtcaggagttcaagacaagcctggtcaatatggcgaaaccccgtctctactaaaaatacaaaattagccaggcatgg

SEQ ID NO: 659665 - DNA, 493 bp, Homo sapiens
ttttcttacctgtagagtggggatgtaaaactatatcatacagtcatgagcattaaatcagataatgtctttgggagtaagttgtaaaccataacactgccagtgctcattcaataaatgtttatttaaaacctactatatgcccgaatctgtgctaggaactaggaatacagagatggacacaatcttgggttcaaggaatcttcagtttagtgctgtgtaattattaaaatattgttttagttacaaaattgagaagaaattacttttttaaaaatataagggcttgaaagcaaaggcagttcgtacaacaggaaataccagtatgaaagcttgccaatttmataagatcattgttagatttctttcaataatatcccttggtcaatttatctctagcctaaatcacaacaacaattccttgctggagtatttttagtgctttttttccctctctcatatgtgaggacaacacttttcttactgttgtact

SEQ ID NO: 659666 - DNA, 328 bp, Homo sapiens
atggatccaacacagaatataagatagagccaccaagcagaaagccttgggacattgggaggtttcagtagaattggggtcagagcaggaacaaaatcttcctatctccttcacccaccctgagtactgccctcgccacccactctgtctgcacagggcttgtgattaaaccccctctgggccttgctccaagtcccagccgtaaatatcctattaaaagcatctctgcctggctcaagcctcattccaaggccggggtggrgggtcgttgagttggtaaaatggcagggcctgaagctttggcccctcagccctgcagcctggctga

SEQ ID NO: 659667 - DNA, 523 bp, Homo sapiens
gtgtttctaaactgctacatcgcaaggaatgttcagctctgtgagttcmactcaatcatcccaaagaattttctgagaaagcttctgtcttctttctataggaagttatttcctttactacggtaggcctcaaagaagtgcaattatccccttgcagtatctacaaaaagagtgtttcaaacctgaactatcaaagaaaggttccacactgtgagttgaatgcagacatcacgaagaaggttctgagaatgcttctgtttagttctgtgcggtttatcccgtttccaacgaaatcctcagagaggaccaaatatccacttgcagtttctacaagaagagtgtttcaaagctgaactatcaaagaaaggttcagcactgtgagttgaatgcaaacatcacgaagagggttctgagaatgcttctgttttagttctgtgcggtttatcccgtttccaacgaaatcctcagagaggtccaaatatctacttgcagtttctacagaaagaccgtttcaaacctgaac

SEQ ID NO: 659668 - DNA, 632 bp, Homo sapiens
ggaaggccgctggtgcaagttccaaacaaattayttactgtaaccttgtgtttctaaaggtttctgtatcaagcccaaagctaaaacaatgaaaaacatagtcactctccatagaattaaaatcatagtagttggtggaaatgctggtagcaccaggttctctgttaggtatgaccaagttcagtctttacaacgccacagaagtgaagtaattggctgtcaaaggttgactggcagttttcatatcatccattcataccaataagcaacattgtcaatatgttctactttctaaaattaaataagcatagcagtatacccctaaattttatcgtaaatgatatatttgtaggattttaattaaagaataaatcctcaaggagttaagagtgtttctaatgcttcagaagataaagaaaaatctctctcatggcctaatagaggtttttattgttcaggaaaagaagaggggaaatgagataacagtgaagatagaaggtgaaaggaagggaaaagaacttgtggtatcagtgaaagcaggtgcttgcttagagaaggggcaagggaaatcctcaaggcaaaggtaaagaatagtccttttgacaagaagactatttttttttatatgtttg

SEQ ID NO: 659669 - DNA, 632 bp, Homo sapiens
ggaaggccgctggtgcaagttccaaacaaattatttactgtaaccttgtgtttctaaaggtttctgtatcaagcccaaagctaaaacaatgaaaaacatagtcactctccatagaattaaaatcatagtagttggtggaaatgctggtagcaccaggttctctgttaggtatgaccaagttcagtctttacaacgccacagaagtgaagtaattggctgtcaaaggttgactggcagttttcatatcatccattcataccaataagcaacattgtcaatatgttctactttctaaaattaaataagcatagcagtatacccctaaattttatcgtaaatgatatatttgtaggattttaattaaagaataaatcctcaaggagttaagagtgtttctaatgcttcagaagataaagaaaaatctctctcatggcctaatagaggtttttattgttcaggaaaagaagaggggaaatgagataacagtgaagatagaaggtgaaaggaaggraaaagaacttgtggtatcagtgaaagcaggtgcttgcttagagaaggggcaagggaaatcctcaaggcaaaggtaaagaatagtccttttgacaagaagactatttttttttatatgtttg

SEQ ID NO: 659670 - DNA, 585 bp, Homo sapiens
aagaccttatttaaattattttatttatatatttatagtttatgtacatttggcataccttgtgtttccagatgaattcaatttctataccgtaaaaaagaattcatctcatcttgtgggggatacaaacaagaactcattttgtccttactgtcatgaaacttaccaataaggactataagggaggtatagtatttactatggtttttaaaatttatttatttatttatttatttattttttattatactttaagttttagggtacatgggcacaatgtgcaggttagttacatatgtatacatgtgacatgctggtgcgctgtacccacttactcgtcatctagcattaggtatatctcccaatgctatccctcccccctccccccaccccacaacagtccccagagtgtttgttccctccaaaactccctgaaatttaattgcccttgtaatagtatacagaggtggacctttaagaggtgatttgcccatgaggactctgcccttttggatgagtttaatgccttttaaaaagggctttcaggagtcagytactctcttggctcttctcctctgccatgtg

SEQ ID NO: 659671 - DNA, 619 bp, Homo sapiens
actgtcatcttggagaatttaaatcaaattagcctaaagcaaattaagggcgtggctaactgcatcaatgtcaggatacaacaggattgtattgcttccttcaatatgagagaaatagattctaggctacttggattaatttcatttccttgggagaagaaaacctgaaatttgtattctgagaagatggagatatggtttgataaaaccagattctcttttctgtgtcctttggattttatttggccaatgaaaaagatttcagttttcaggcctctagaaggaaaaagccataaattatcacaactgaatacgcagtttatttcatggtttgaattataaacagaaaggaagtggatggttttaagcaacatttgtaaatttccttcaatgattgttttctatggagactgcagatgtgccttttgggtacattattggattaaacaaatggaaggttgcaagctatcccatttttagttcaaagctctctttacactcagtaaccacatcctkcccctgaatgtagtcaacagacctgttaaataaactagaagaaaatcttcttgatgcacacccacaggtcttgtgctaattcagtctttatgatggcagctaa

SEQ ID NO: 659672 - DNA, 581 bp, Homo sapiens
tcagtaatttcatatggagcaagcagcagccatgtctggctgccagggaatggtggcagacacagtgccggggaggggatggcaagatgctgctggggcagatatcacagttcaacaccacatgactgctgctggggcagatatcacrgttcaacaccacatgactcctcccagactcagctaatatcctctaactctcaggatcaagtactggagagaagtgcttattgtcattccacacagtgaccgtcttggttccagctttcagcagtatcccagaaaaactgatttccataactatttcttatgccttctcgaccacacaggaatgagacatccagtgggtgaaattttaaaaacagaatgtccaaatggcctgtccataataaagtcgggggtttatgagctacatgtgtcactgataattcagtgctttctctcacattcactcggattctctcactgatagatttcagaagctccccctgcaagtttctgaagtgagtgggagaagagtggctctagagcaggtactcgtttcacatgatacaatgtgaagaagtaatcatatgggccagaac

SEQ ID NO: 659673 - DNA, 507 bp, Homo sapiens
ttgacatgtgacatataacaaatgtcttaaaggagagccctcactgtggtctcacactgtacatttttactgtaaacctaagagaattgacaaaggctccatctttatcctcttaactacatacagactcatcacctawtgccagcgaagaacattcctgacatcatattattcaataacatgaataaggtaaaaaattcttaacacactgctgagctagaaactagctgatttgttgaaaatatttgcaaaaatagattgaaactgcaaatagaggatcactcctaacatgctgttatctcagtcatatatatggcatacatataaacacgaggtagggttttgttaaatttcttttttttctttttttattattatacttgaagttttagggtacatgtgcacaatgtgcaggttacatatgtatacatgtgccatgttggtgtgcttcacccattaactcgtcatttagcattaggtatatctcctaatgctatccctcccccc

SEQ ID NO: 659674 - DNA, 507 bp, Homo sapiens
ttgacatgtgacatataacaaatgtcttaaaggagagccctcactgtggtctcacactgtacatttttactgtaaacctaagagaattgacaaaggctccatctttatcctcttaactacatacagactcatcacctaatgccagcgaagaacattcctgacatcatattattcaataacatgaataaggtaaaaaattcttaacacactgctgagctagaaactagctgatktgttgaaaatatttgcaaaaatagattgaaactgcaaatagaggatcactcctaacatgctgttatctcagtcatatatatggcatacatataaacacgaggtagggttttgttaaatttcttttttttctttttttattattatacttgaagttttagggtacatgtgcacaatgtgcaggttacatatgtatacatgtgccatgttggtgtgcttcacccattaactcgtcatttagcattaggtatatctcctaatgctatccctcccccc

SEQ ID NO: 659675 - DNA, 507 bp, Homo sapiens
ttgacatgtgacatataacaaatgtcttaaaggagagccctcactgtggtctcacactgtacatttttactgtaaacctaagagaattgacaaaggctccatctttatcctcttaactacatacagactcatcacctaatgccagcgaagaacattcctgacatcatattattcaataacatgaataaggtaaaaaattcttaacacactgctgagctagaaactagctgatttgttgaaaatatttgcaaaaatagattgaaactgcaaatagaggatcactcctaacatgctgttatctcagtcatatatatggcatacatataaacacgaggtagggttttgttaaatttcttttttttctttttttattattatacttsaagttttagggtacatgtgcacaatgtgcaggttacatatgtatacatgtgccatgttggtgtgcttcacccattaactcgtcatttagcattaggtatatctcctaatgctatccctcccccc

SEQ ID NO: 659676 - DNA, 507 bp, Homo sapiens
ttgacatgtgacatataacaaatgtcttaaaggagagccctcactgtggtctcacactgtacatttttactgtaaacctaagagaattgacaaaggctccatctttatcctcttaactacatacagactcatcacctaatgccagcgaagaacattcctgacatcatattattcaataacatgaataaggtaaaaaattcttaacacactgctgagctagaaactagctgatttgttgaaaatatttgcaaaaatagattgaaactgcaaatagaggatcactcctaacatgctgttatctcagtcatatatatggcatacatataaacacgaggtagggttttgttaaatttcttttttttctttttttattattatacttgaagttttagggtacatgtgcayaatgtgcaggttacatatgtatacatgtgccatgttggtgtgcttcacccattaactcgtcatttagcattaggtatatctcctaatgctatccctcccccc

SEQ ID NO: 659677 - DNA, 624 bp, Homo sapiens
aatattttgtattttttttttaagagtcggggtctcactatgttgccsagactagtcttgaactcctgcactcaaatgatcctccctgctttggcctcccaaagtgctgggattacaggtatgagccactgtgcctggccccttttctatcatttttaacaagtgtcagaataatttattttctttgacgttggccatccatagttgactaatatcaagagttattttgcttatggaggaatattttgatcactgggctggtgctcaaatttccattggaaatttctaatggagacaagtctccattgcataagagacttgactccaactggcataagaagaaaaggagatttttgtggttcatacagttggaaactccatggatcatcttcatattatgtatggttcaatctacgagcacggaaaaaatagcatcagagtctgatttcccccaaatgctcctcattgtcacaagatggctgctgcaggggagaactctacatgttctccccttcaggacaaagaaagaacctgcctcactcctaaaagctcagcacaagtctcactgcacctgtttagctctcattgggccatgcaacatgactaaacccaccatggctaagg

SEQ ID NO: 659678 - DNA, 540 bp, Homo sapiens
aaggcaactggggaacagcaaatgcaggggtgggggtgctttctctgaactcctcttatctgtctagggatagatcttccaaaaggaactcagttgtcattaaggctcttccaagacatctcatcaaccaggggagatcacaggagtggagactgtaagtcagcatcacaccgggacagactttgtcacaggttattacctattctttcgagggtccatttattttccctccaacatcatttactctctcctaagttgcttacatccctgttccactctcccctgtgaaaaggatctgtaagtttctagattccactgaaagttttccctccctrcaggatacatacatgtgcacatacataggtaaggaatccagttgttctaaaatttttatgtgatgcagggagcagttatatacataatatatctaggtcaaaacttttatcagccaaatagaaccagccaaatatcattcatcataatttcctcatgcacaacaaagaacagaatataatattttgttacttttatgtcattcct

SEQ ID NO: 659679 - DNA, 588 bp, Homo sapiens
ctcctgcctatggatctgagctgtcccaggctgcagctcctcttccctgttctccaacctggagtcactcttgctgagcttatkaggcttgtcaggcagggcaggcacagttgtaatcactgagtgccaaagttggcaatggcctctggcagagtcaggaagaagggctcctgtccttttgtgtcacactgtgttagatgtgggacatgagcccagtgggctaaaacatctattgaaacagctactcaagttttgttatggtgcctctccctaggacctaagcatgtggtctaagggattgggctgggcattgagtagagaccacttgctccatgtagacccctcctacaccctctttgaattctaagacttcgttactcagccctattcctggcttcttcctctcttataatgagctgtctcctgggggtacctgcgtcttccctgagagtggaattttgcctggtactccactagactgtaatgtgcccagatcacacacttcccagcagcaggtgcaatgctggcttgttcccaagaggctgctcattccccatgcactagacttccatctggcccaagccacca

SEQ ID NO: 659680 - DNA, 497 bp, Homo sapiens
tgaacaaaccaatagcacgcagtgagattgaaatggtactaaaataaaattgtcaacaagaatgtccaggaccagacagattcacagctgaattctattagacattcaaagaagaattggtaccaatcctattgacactattccacaagctagagaaacagagaatcttccctaaatcattctatgaagccagtatcaccctaatacgaaaaccaggaamggacataacaaaaaaaagaaaactacagaccaatatccctaatgaatacagatgcaaaaatcctcaacaaaatactagctaacagaatccaacagcatatcaaaaagataatccaccatgatcaagtggacttaatacctgaaatgtggggatgttttaacatatgtacttcaataaatgtgataaacagaattaaaaataaaaatcacatgatcatctcaatagatgcataaaaagcatttgacaaaatccagcaaccctttatgattaaaaccct

SEQ ID NO: 659681 - DNA, 587 bp, Homo sapiens
taatattgcaaagcaaactggattttcaacagtactcaacttgaaaactcaattcaaaagccaacaatgaatttagtgaaaagaggacagctctcctgaatcaaattacacctcaacaatagaaaggaaaatacagccttaataagtaaatttgataatagttgttactgagaaattataaacatgaagaaatattttgtaggaccagggtttgtagtggtatatgcaggcacagccataatgtgtgccrtttgatgaataatgatgaaatagaagtatagatattaaatatccttcttcccaaatggccaagagagatcaaggcagaacactcagagtgaggccaaacctgcacctacttccctgggcacaatggctctgccaagcccaaggtcagcctcattttgcctgccctttcccacgagggcagcctgctggctggtagagttccgtgtcttcccttctagctggagcctggcagctgcaaatgtccataattatggaagatccactagttttctgctctgtggttgaaacaaggacagtttctctttttattgctgttctgtggcttcatgttctgaata

SEQ ID NO: 659682 - DNA, 372 bp, Homo sapiens
ttagccaggtgttgtggtgcatgcctgtgatctcagctactygggaggctgaggcaggagaatcacttgaacctgggaggcagaggtttcggtgagctgagattgcgccattgcactccagcctgggcaacaagagtgaaactccatctcaaaaaaaaaaaaaaaaaaaagaagaagaagaagaagcgagaaagaaaaggtatagcttaaagtggcttttgagcaggcatgagtttatggaaccaaggattcctgtgaagacattttcttttgataaaagaatattgataagaatattataccaaattgaacaaaagtagccacagtatgaaggattcagtacatggccaaataacttatttcaaaatagtt

SEQ ID NO: 659683 - DNA, 601 bp, Homo sapiens
aaacaaaacaaaaattctgctccatttatttgatgagaagccacaaatccttaaaatgttttctctttgtgtcaattacattatttataaaattatgttatatgtttaggttgttttgatcaattgaatgcctataagaagtaaaataataagtgtatctgaaagaaatttttaacctttagagcagctctgttcaatagaatgtcctgcatcaatactaacgttttctatctgtatccacgcatcaactactgactagccactgtggctatcgggctcttgtgactaatatggggaaactaagtttttaactttttcatttttgttcatttagatttagatagcaacaggtgctagtggctaccatattgggatagtgcagatttacagccttatgaatacagagaataaagcaaatttccagttcatatgcatatttttcttgtatgtatacaaaaaatgtatgataggggaataagtaaaaggtttaaagactactatatttttacataaataccttatatacatttagattaaatcttgtrtggtaataggttgaaaatctagattcaagggggaaaaagatttaaattttccaaat

SEQ ID NO: 659684 - DNA, 602 bp, Homo sapiens
tggaagcctgctggagtggagagccccttcagctcaaagccaccaggggttgggattctgtcctggggaacattcagccttcaggacagtactgattccggtgtccaagcttgtggcagagggggcaagccatgtgggcctttcatttatcccattggggcagtttgcgttccagtggcctggcttcctgcactgatggcagttacctgggagggtattctgaggccaatgtggaggggattggtaggcttgcagaaaagccaatagttgagcctgcctcttgttcctgcatttatcctttttcttagccctgtcctcrtcctgatcttgattataaaagactgaggaggctaatttgaggatttcctgcataaggacactaaattctaaggctgacttttataattttatcccagttaatttttaggccagacagtattacaaaggagcctaggttttgttttaagattttggggatcaaacttttcccagttcttcaggatgcacccaaggggaatgtcctatggtagggagacatgattatccatctgcaaaaaagagaacagaggagaaaaaaaggaaaaaggaaaaagatgacatca

SEQ ID NO: 659685 - DNA, 583 bp, Homo sapiens
tctcaaaattccaaggggctatcataaagttaaaaaacattatgacaactgacacttataacaatattgtcagtatattctacttttaaatataaggggtgaaaataaattctcactaagtgatttctatgttttggtattgagaggtttaacttatatgatacatgctgcattttagaagcctttccatctaaaaaatayagtggcttttgctttgtatttcctctgttgtttaaattttgggcacttcacaccaatgtgggagacagacttatgcaaggagtttgtaccataatcattatttttccaaaaccaaatgtcacacaactagttattctagttttccaattaaaaaaaatcacaacgccagtaatgagaatcctattatttcaaagtgtattttttccccaaatgctgacattcagttaaaattttactagacatgtagcattggaacaagatgacaaaggtaaacactaaagaaaagtctggagagatcagatgaaaaatgcttcaagacattcactgggaaatgaccaaggtcatttatggaaaatgttgtctcaagtagatgccattggac

SEQ ID NO: 659686 - DNA, 583 bp, Homo sapiens
tctcaaaattccaaggggctatcataaagttaaaaaacattatgacaactgacacttataacaatattgtcagtatattctacttttaaatataaggggtgaaaataaattctcactaagtgatttctatgttttggtattgagaggtttaacttatatgatacatgctgcattttagaagcctttccatctaaaaaatatagtggcttttgctttgtatttcctctkttgtttaaattttgggcacttcacaccaatgtgggagacagacttatgcaaggagtttgtaccataatcattatttttccaaaaccaaatgtcacacaactagttattctagttttccaattaaaaaaaatcacaacgccagtaatgagaatcctattatttcaaagtgtattttttccccaaatgctgacattcagttaaaattttactagacatgtagcattggaacaagatgacaaaggtaaacactaaagaaaagtctggagagatcagatgaaaaatgcttcaagacattcactgggaaatgaccaaggtcatttatggaaaatgttgtctcaagtagatgccattggac

SEQ ID NO: 659687 - DNA, 392 bp, Homo sapiens
tgtccattttcaaaatggactcccacagctaccggggccccagccttgaagatttctgagctcccagaactgggctaactctgagggaggtgaagtgtccctagtcaggtcccagggggtgagatgagcttcaacaatcttactttgacaataatcctaaagtagtagaccttgatttaacctatagcttctgagacctgtggggcataccctgagcattcctgaaattgagacaaataactgattatttccacctttcatgtgasgtccaagaacagtttacccttcacaaaatcaagtgagttacttcttagcatcttagcaccttctagttttcttagtggttaataagagctaatatttattgaatgcttactaagtaagcactaagc

SEQ ID NO: 659688 - DNA, 621 bp, Homo sapiens
atttttgctcattttaaagtctttcatgtatatttctgacagtctccccatcatgatcttgatattcccgagatatttttaatcatgcattcacaaaaaaagactggtctctctatcacaattctcttcctgtcagagagtctgggaaaggtcataagtactttagaaaccctgctaaagggacattaattcagagatacatttggttagtattaatgtcatakattttatggctgttacttccatggataattaaattagtactagccatatccgtataggaatgtctttcaggagtattcttactacccaccttgttgacccatcttgcaacatgatttcaaaatacaggaccagaaagtcgacagtgatagaaatgtatcttacaactcttggcactataagtagtaggagaagcaaggtattaaactgtccagagcagatgctaacatctggaaaatgactggtttgtgtgaaactattaaaaatattgtatttttctgaatattttctgatttgacagttgttatttcttattctaatataattttaacaactttctgctttttttccttaaagagagattcccaaattggtataaattttggctcctataaaacc

SEQ ID NO: 659689 - DNA, 567 bp, Homo sapiens
cgcccctgagatgaatcagtcccagctccacacaaagactgaccagccaggatgcatgtgtgtgccttttagaaggcaattttaaatgcaattggccgtgctgtgcccttatatggagacagcaggataggtgagaaagaggaggaaattaacataagaggagcagagggttatccagagtgcttacagggtctgggcaggagggctcccctggctaacaggccaggactctctccttaatcatatctcccagggctcttttttccaaagaaaatggcagcaracaggtcaaagatagcatgcatgacctttaaaataaaccacataagtgccatggaagaaagagaagccctgggaggcgaaggaacttgcccaaggtcacccagtgagttactgccaaagccaagactagaattcaggttagaacttacagtcagttcctcttccattttgtggtgctgcctcctaagagaaaatcttggagaataatcttctttcctgaaatcagccttggacgaggctgggcctccctatgtatgtgagctttgtgatagaagactgagctga

SEQ ID NO: 659690 - DNA, 579 bp, Homo sapiens
tactacttttttagtagaaaaaaattgtaagcaaaaagcaaagcagccttttttggaacttaaatattaagagaaaaaatgatgtaaataacccatgtgtattagagctggcttgtgctggcttatgmaagtcaattattaagttttcatagatttcatgggtatgtttttaaatacaatcacgttttaaaacgaaatcttatgaatgtgcaattacacattattaaaaacgaaggtggcaaatactcaatatttgtcattttctcataagtttactatgttaactatgatctatgtttttaaagttatttgtgctcattatgtctggagggtaaaatactaaataatcatgtgttcctgcacatctcttctctgttttgtgttaggtgacatcatgttggtagattgaaattactcatgatgggactatatttacatcatagaatttgacaaatgctggaaacaaaaatttgattcattgttttgttgatgcttagacttaagaaagtgatgtgaaaatgttaataatgcaaattaaacttaaaaagctgccaggtttgtagtcattacattgtgact

SEQ ID NO: 659691 - DNA, 518 bp, Homo sapiens
gccaatttttttttttcctcacatttagtgttgactcatactttaaggttgttgtgcaattaggaaattgtgattgcaaatccaggtagaccaccatgacttgaaacagaacaatgcttacttagtgtagtaatttcattaatggaactgtcagattccttgtactgcatgtctcagctgtgtttttctctgccaaattcaagggagatttgttaataaaaaacgtggagaagtagaaataattgaggggtatgctctaaagagaatacatagccctagtttgtctctagggcttaaatttcatgctggttgatgtcttcctaatacctaagtagygcagcatgtactaaaacttagtgatgacctcaatgtgacctaaaatggtttacatttagttagttcaattgtggatataactatatatgatttttgtatttgaagatgctggagattaccataaacaaatcatattattagacaatatgccctgattatcttcaactattttcaaatgatag

SEQ ID NO: 659692 - DNA, 593 bp, Homo sapiens
tttcaaaccaataaggcatcacattcatcaaccacgctggtggaggcctttactctcactcaggaaggagtgctaaaaatgtacattactatagaatctgagaaagtgatgaagagttctaggggactagtttggtataggaggaggcagtcatttacaaaaattctatggtaagcctaagctatggagaaaaaattaaaaaaaaaaaaaaggctgtcggagaatgtggctttcactgaaatatctaagagtttatgtcccatggaaaaaaatgtctttctgtagggggcagatgtgtggttcataatgatacctaaaagtctgtttttatataaacctgtaatataattatgtcaacaaacgacgtggaatctaaaattaattgaacagtggtttcttgtcatcagtctagtcactaaaactgtatatcgcatgaaaatcgttcatttgcttcttggaaataaatayaaagataaatctgtaattttactagatgcgtaatgtgtcaaacattattttagtcactatgctatggttatacacagtaaaaaagtgcatgtaaatacattgataaaattaaattgaaatcaaac

SEQ ID NO: 659693 - DNA, 617 bp, Homo sapiens
tattactatgaaactctaccacagttgacaatattttagatttttaattaatctgaaaatatatgtaattcttcttgtctttcctggcaattctcccaaccataaaacgattgaatttgattataacctaaccaaagataagacattatggaacaagcacagctacctgaggagagttaaccttctcatgagtatcargtgctagaaaattgaaattaatctttaatattaaattaaaaacaacaaactaataaacgtgtgcatattcaatacgggaaattactcaagggtactgatttttagagatttagtcttaaggaaaataaggagtcatatgggaatgagaaaagtcttagggattagatcaacctcctggggaaggaaaagtgatagctccaaaaaattgacagcaggcagaaattcaggcaggtcaggagttaacataagagaagaacaactgtaattattggggacaagttcctggaatttagggcagaactgtggctatttttacctcataaaaactgagaaaccatccaagaaaccaaaggaaagacttacaccataaaaataatcagacagccagagtttagccactaggaataagaaaagagcct

SEQ ID NO: 659694 - DNA, 617 bp, Homo sapiens
tattactatgaaactctaccacagttgacaatattttagatttttaattaatctgaaaatatatgtaattcttcttgtctttcctggcaattctcccaaccataaaacgattgaatttgattataacctaaccaaagataagacattatggaacaagcacagctacctgaggagagttaaccttctcatgagtatcaagtgctagaaaattgaaattaatctttaatattaaattaaaaacaacaaactaataaacstgtgcatattcaatacgggaaattactcaagggtactgatttttagagatttagtcttaaggaaaataaggagtcatatgggaatgagaaaagtcttagggattagatcaacctcctggggaaggaaaagtgatagctccaaaaaattgacagcaggcagaaattcaggcaggtcaggagttaacataagagaagaacaactgtaattattggggacaagttcctggaatttagggcagaactgtggctatttttacctcataaaaactgagaaaccatccaagaaaccaaaggaaagacttacaccataaaaataatcagacagccagagtttagccactaggaataagaaaagagcct

SEQ ID NO: 659695 - DNA, 617 bp, Homo sapiens
tattactatgaaactctaccacagttgacaatattttagatttttaattaatctgaaaatatatgtaattcttcttgtctttcctggcaattctcccaaccataaaacgattgaatttgattataacctaaccaaagataagacattatggaacaagcacagctacctgaggagagttaaccttctcatgagtatcaagtgctagaaaattgaaattaatctttaatattaaattaaaaacaacaaactaataaacgtgtgcatattcaatacgggaaattactcaagggtactgattttkagagatttagtcttaaggaaaataaggagtcatatgggaatgagaaaagtcttagggattagatcaacctcctggggaaggaaaagtgatagctccaaaaaattgacagcaggcagaaattcaggcaggtcaggagttaacataagagaagaacaactgtaattattggggacaagttcctggaatttagggcagaactgtggctatttttacctcataaaaactgagaaaccatccaagaaaccaaaggaaagacttacaccataaaaataatcagacagccagagtttagccactaggaataagaaaagagcct

SEQ ID NO: 659696 - DNA, 617 bp, Homo sapiens
tattactatgaaactctaccacagttgacaatattttagatttttaattaatctgaaaatatatgtaattcttcttgtctttcctggcaattctcccaaccataaaacgattgaatttgattataacctaaccaaagataagacattatggaacaagcacagctacctgaggagagttaaccttctcatgagtatcaagtgctagaaaattgaaattaatctttaatattaaattaaaaacaacaaactaataaacgtgtgcatattcaatacgggaaattactcaagggtactgatttttagagatttagtcttaaggaaaataaggagtcatatgggaatgagaaaagtcttagggattagatcracctcctggggaaggaaaagtgatagctccaaaaaattgacagcaggcagaaattcaggcaggtcaggagttaacataagagaagaacaactgtaattattggggacaagttcctggaatttagggcagaactgtggctatttttacctcataaaaactgagaaaccatccaagaaaccaaaggaaagacttacaccataaaaataatcagacagccagagtttagccactaggaataagaaaagagcct

SEQ ID NO: 659697 - DNA, 630 bp, Homo sapiens
aaaaaaaaacacctaaatgtttaagatcctagtgtctgaaaaaaaagcatggctgtagtttaatcttgtttcactaaaataagaaaartaattaaattgaccttatttagggccaagaaatgcaatcactttgatgctgttttaagaagatgatttgctttggaatagacaagaggtttgattgagataatttgtttctgttttaaaatgttttatttcagacatggatgaatgaagactttgtagttattccatctatttcaacgtggacactgacattatattttccatatttactgtggtaagcatacatttttaaaaggataggtttcttaatagcctgagatctacactctgataaaattataaatatgtatgggatgatatgtagtagaatcatgtctataatttacttatctccaattcttacattttttaaataaatagtaatgacaagtcagaataatctaaagtatccagagatcctcataaatgtatcatttcttcagagtcatgagttggcaatttatgacccacaggccaaatccattcagctgcctaatgcctcattcatttacatattgtttatgtatgcttaggcatgacaagggcagaactgggtaattgtgg

SEQ ID NO: 659698 - DNA, 551 bp, Homo sapiens
tgtgctgtggtctctcactctgccttatgctcctcagtcgaattcttccttctgaggaggcaagaattgaggttgctacagacccgtatggattcaccacagctaacaatagcttaggcttccattccattttcaaaactttgctcatgttctcctcacttgctgaatctaaatcagaatcctgtcaaggacggcctrggaaacatgtatccaaggcttcctacgcctgtgtctccaagaagagtaaatgaggcaacaagtatctaaacttagcagacaagttggaaagctctgttatgttaatagttaaattgatatgtgaccattgcttatattcacattttgagggaaaaataacacaccaaaaactaactttgccacgaaaatgtatgaaacaggcacaattcatttgaaacctacgaaacacttgacttcactcaccagatgtttttaaacaaacaaaaattttaaaagattcaatgaagactgaaagatttatttcaaaagttaatgcaataaatatttgaattctccataattattgtagctat

SEQ ID NO: 659699 - DNA, 551 bp, Homo sapiens
tgtgctgtggtctctcactctgccttatgctcctcagtcgaattcttccttctgaggaggcaagaattgaggttgctacagacccgtatggattcaccacagctaacaatagcttaggcttccattccattttcaaaactttgctcatgttctcctcacttgctgaatctaaatcagaatcctgtcaaggacggcctgggaaacatgtatccaaggcttcctacgcctgtgtctccaagaagagtaaatgaggcaacaagtatctaaacttagcagacaagttggaaagctctgttatgttaatagttaaattgatatgtgaccattgcttatattcacattttgagggaaaaataacacaccaaaaactaactttgccacgaaaatgtatgaaacaggcacaattcatttgaaacctacgaaacacttgacttcactcaccagatgtttttaaacaaacaaaaattttaaargattcaatgaagactgaaagatttatttcaaaagttaatgcaataaatatttgaattctccataattattgtagctat

SEQ ID NO: 659700 - DNA, 598 bp, Homo sapiens
tattggttgttctttctctgaaaataacattgtcagatctcttcaaaatcatatttttaaaaatatagtttacatgaaagtacctgagaggtgtaatgattgtgatgaacactgtgcccattagaaactctacacttgatacrcaatacatgtttatgaaagttagagaactgatcaccattatattaaacagggttttaatttatacaatgaatgtatgagtgagtgttgaacttgaacagataatttggtgaactactgttctaaaattttgttctaaaatagttgtctttatatgcaatgacaggtttagaaatcatccctaactatggttatttttaatataattatcttttaaatacatgacttgaattgttttacttcaacttcctctcctaaaatagccattgcttttattaaaatataattttggcagaattttttttagcctcttgtatattacagctttggaatgtggctgccagaagagaaatgtacataaaattaatactggggcagggggaggggggtggcgggataagcgtgatatggcctgaaaacttatgcatacccaattatttagccctcatcaattgcc

SEQ ID NO: 659701 - DNA, 598 bp, Homo sapiens
tattggttgttctttctctgaaaataacattgtcagatctcttcaaaatcatatttttaaaaatatagtttacatgaaagtacctgagaggtgtaatgattgtgatgaacactgtgcccattagaaactctacacttgatacacaatacatgtttatgaaagttagagaactgatcaccattatattaaacagggttttaatttatacaatgaatgtatgagtgagtgttgaacttgaacagataatttggtgaactactgttctaaaattttgttctaaaatagttgtctttatatgcaatgacaggtttagaaatcatccctaactatggttatttttaatataattatcttttaaatacatgacttgaattgttttacttcaacttcctctcctaaaatagccattgcttttattaaaatataattttggcagaattttttttagcctcttgtatattacagctttggaatgkggctgccagaagagaaatgtacataaaattaatactggggcagggggaggggggtggcgggataagcgtgatatggcctgaaaacttatgcatacccaattatttagccctcatcaattgcc

SEQ ID NO: 659702 - DNA, 520 bp, Homo sapiens
atcataccttctctttatttcagataagaataaattttctctttcttctggagtttttagttctgccccttgaaacctccagaatggagaccagttaccagaaacgtcaacccagatctgcagagccccattcagcttgatgttctatggtacacatctatgttttcccacattataatgatatgttaatgtatgcatggatatggttaacttgttagagacaataatttaattatagactcagacattccacaacataaacaacttatcatggaaggaagacataagaatggctcaaacattcagatttagtatgagtataattatgaaataatatgccaattaggaaatgcaaataccttttaagaaaaacaaacattttagaatatgttatgtcttctcctagaaagcatacattagtgaatcagagaggaaaaagaatatacaatctttsggttcatggcaagttagtttctgtttctctctcttcgaattacatctatctgtcttggtctcttgc

SEQ ID NO: 659703 - DNA, 547 bp, Homo sapiens
atgaaattttaaatacaaaattaggtataaaatgaatatctatttagaaagggcctaggtcagtgaggggcccgaagcttagcttcctgaagtacagagaaacttggctgctggcaaggtggggtgggtttgggctccrgaggacccaggattatggatcatggactctcacaaagaagacttaaaaggttcttatgcctaaacttaaaagtctctaattgataacacttacacagataattcatgcacatgctctcatacatataaatgaagaaacaatgcagaagagcatagagcgaaaggggaaatgctcttctaatcatgatcgcccgacctgctttctcccataaataatccctatgaacaattcagggtgtctctcccaggcatttttcttaacctctaaatatgtatgtgtacatttgcctcattattttaaaatgatgcacaataatctataatatgtctgctcgaagtttatttggacaaacacttactgataagtattcaggtttatttcagtcggttgcttttacatggcggcagt

SEQ ID NO: 659704 - DNA, 598 bp, Homo sapiens
aaaaggttattatataatgataatgggatcaattcaataacaagatataacaagcctaaatatatatgcatcaacactagaacacccagatgcatgaaacaaatattactacaactaagagaaaagatagatagcaatgtaataatagtaggggacatcaacaccccactgagctctagacagatcactgaggcagaaaatcaacatagaaacactgaacttaaattagattctagaccaaatggacctaacatatatttatagaacactttacccaacaatcacagaatatacattattcttaccagcacatagaacatcctccaaaatggaycatatttaggccacaaaacaagtcttaataaatttttaaaaacagaacatattaagtatcttctttgaccacagtggaataaaactagaaatcaataccaagatgagctctcaaagctgtgcaaatacatagaaattttaaaaccactcctgaatggtctttgggttaatgatgaaattaagatggaaatttaagaatttttcgaattgcatgaaaatagaaaaaaaaagcaaaatatctgggatacagcaaaagcagtgcaaa

SEQ ID NO: 659705 - DNA, 565 bp, Homo sapiens
ttttgtttcagttctattctgacattactgtargaatgcctttggctgcatgtaaaagaaaacagtgctttttaaaaagaataatttgtttttgcataactagaagtctggagttaggcagctgctgatgttggtttaatggttcattaatgccagggtggttcagccctcctccacaattccaagatggcttccatagctccaggctacaccttcaaagggtagggttaaggtagtaacactggctgcttgtgactaatatttttatcagaaaaatgtatgcttctcccagcatatgttcacttaggtttcattagctaaaactatatcatgcagccaccctctagttacaaaagttactaggataggatataagtatttgacttctctgtcttctattttgttgatagaaaagagagtaaagtcaggcatgtatttgctagccaaacaagttcctgttatccttaatttttgtcccatctactctattaagtgtgaagtcaactacttctgaaactaatgggtcttttaattgttagataatattctcttttcttctaagaga

SEQ ID NO: 659706 - DNA, 530 bp, Homo sapiens
gtaaaagaaattgagttcttgatttgattctcagcttgatcattgttggtgctatgcagtagtactaatttgtgtacattcattttgtaacctaagattttatgaattcattcatcaaatagaagagtcttttggtggaattcttaggcttatctaagtatatgcttaaatcatcagcaaacagagataatttgacttcctcttttccagttcggatgccctttatttcttcctcttgcttgattgctctgggtaggacttccagtactatgttaagtagaagtggtgaaaatgggcatccttaacttgttctagccctcagtgggaakactttcaacttttccccattcaatatgatgttggccatgggtttgtcatatatagcttttattattttgagatatgtttattctatgtctagtttgtttagggtttttatcataaagcaatgctggattttactgaatgtttttatgcatctattgagatgatcatatgtatttggtttttaattctgtttatgaaataca

SEQ ID NO: 659707 - DNA, 560 bp, Homo sapiens
aaggtaagtaggagcaagtcacatcttacatggatggcagcaggctaagaaagagcttgtgtcaggaaactcctgtttttaaaatcattagatctcatgagacccatccactatgatgagaacagcatgggaaatacccatccccattattcagtcatttcccaccaggtacctcccacaaaacataggaattgtgggatctacaggatgagatttgaatgaggacacagagccaaaccatatcaggcagcaagggtggtaccactgtatgtaatgccagaggggctgtgggttgtcgctgggaattctatctcagagaaatgcacaggtgccactgtctgaagtgttcaagtgggagcagggtagctgtgctggggcccaggtcgggaggccctacccagtragaagtagcaggagcaaagacaggcatggaaaaaagtctgacaacacctccataaggcagctgtgctgagctgaagacctgctatagtccttaagcctctttgctatctcttgatctgagggcattatgggcaggggctatagcagacaaaaatggc

SEQ ID NO: 659708 - DNA, 569 bp, Homo sapiens
caaaaattacaaaatacacaatgaaaaataatatacatgccaggcgcggtggctcacgcccgtaatcccaacaatttcggaggctgaggcgggtggatcacctgaggtcaggagttcaagaccagccaggccaacatggcaaaaccccgtctctactaaaaatacaaaaaattggccaggcatggtggcaggtgcctataatcccagatatttgggaggctgaaataggagaattgcttgaacctgggagggtggaagttgcagcgagctgatattgcaccattgcaacccagcttgggcaacaaagtgagactctgtctcaaaaaaaaaaaaaataccaacaataagagtcagcagatgtaaaacagcagaattaaaagtatgtgtaaaaatrgatgaataatttgaaaaaaattataaaattaataatatgtaatgaacatatataaacactaaagacatttaaaaagaaatgaagagcagatttggcaaaggatatccaaaaataaaaatatagtaattgaatttaaaaacctatgagatatggatgattaaaattaatataataa

SEQ ID NO: 659709 - DNA, 420 bp, Homo sapiens
agcggggggcaaaggttgaaaaactaactcttgggtactgtgctcattacytgggtgatcagatcacttgtaccccatacctcagcatcatgcagtatacccatgtaaaaaacctgcacatgcatgccctgcatctaaaatagaagttgaaattattttttaaaaaagaatctatggttctgtgatgctgactgatcttacacaaaagcatgtgacacgttcacagctacatgggataccaaactcaggacatctgcaactgctgtgtgcccttttctggtgtgacccagcctttttgtcctggtccctgctttgctgatggccttgaagcagcctcccaagcagatgaatggaatttgtagccagagtcagatgattttttttttttgacactgggcaacttggatgcccaaggtctcc

SEQ ID NO: 659710 - DNA, 572 bp, Homo sapiens
caggggtctttctaaaacacctatcctacaatatggccaggtactattttaggtggtagggatacagcaatgaacaaaacaaggttcctgctttcatgagcctgaattctatagctaaatatataaatacacaataaagaagaaaaatatcagtggtaagttccatgcagactggggagctactttagatttgagaggtcaggaaaggttttgctgaagagaagacattaaagctcagagctgaatgacacaccttgagtggcactcaggagacatccacacttcccagatgaaaatcctttagtgacttcccaaagttctcgggatataagtccaaatttcacagcatggcagagaaggtcttctggcatctggccagttgtcttcctctctagcttctttacattacatgacattaatgcatttaatcytcacgagcaccttgcaaaatagcagctaggctggctgagttctctgatggtctgattcatctttgtactgtcactgcgttagtagttggctcaacaaacgttcatgaaacaagcaaggtgttggacaaaaagcatggatgc

SEQ ID NO: 659711 - DNA, 574 bp, Homo sapiens
ttctcattgctgccaggggtctttctaaaacacctatcctacaatatggccaggtactattttaggtggtagggatacagcaatgaacaaaacaaggttcctgctttcatgagcctgaattctatagctaaatatataaatacacaataaagaagaaaaatatcagtggtaagttccatgcagactggggagctactttagatttgagaggtcaggaaaggttttgctgaagagaagacattaaagctcagagctgaatgacacaccttgagtggcactcaggagacatccacacttcccagatgaaaatcctttagtgacttcccaaagttctcgggatataagtccaaatttcacagcatggcagagaaggtcttctggcatctggccagttgtcttcctctctagcttctttacattacatgacattaatgcatttaatcctcacgagcaccttgcaaaatagcagctaggctggctgarttctctgatggtctgattcatctttgtactgtcactgcgttagtagttggctcaacaaacgttcatgaaacaagcaaggtgttggacaaaa

SEQ ID NO: 659712 - DNA, 519 bp, Homo sapiens
aataaaacccatctgatgagaacttacggtctgtagagcatgactccccagaccccttatataggaatttggactagatgaaacaaccaaagcttagtcctcactagtttgaataacaactgtgggctctgtggtatagcatctgcttcaagctgtctgttgcttgctttgggatgattagggcaggggaatagtgtcctgcagtataagagcccaataatgtgactggaaggagctgggggctggaaagattggttagtctgatgaaaggtgcttttgaaggagtcattttctatcactaggaatccaataaccctgagaggggccgtccttttctagtcaacacggcctcaatgataaaactttaggtacagaaacttttttttttttttttttttgagatggagtttcgctcttattgcccaggctggagtgcaaktgtatgatcttggctcactgcaacctccacttctcaggttcaagcgattcttgtgccctagcctcctgagtagctgggat

SEQ ID NO: 659713 - DNA, 562 bp, Homo sapiens
acggtggctcacacgtgtaatcccagcactttgggaggccgaggtgggcagatcacagggtcaggagatcaagaccatcctggtcaagatggtgaaaccctgtctctactaaaacacaaaaaattagctgggcatggtggcacgcacctgtagacccagctactcgggaggctgaggcaggggaatcgcttgaacccaggaggtggaggttgcaatgagctgagatggggtcactgcactccagcctggcaacagagcaagactccgtctcaaaaaaaaaaaaaaaaaamcaccaaaaaacaaaaaaacaaaaaaggcctggcgcagtggctcatgcctgtaaatcccagcactttgggaggccaaggtgggcagatcacttgaggtcaggagtttgagaccagcctgaccaacatggttaaaccccgtctttattaaaaacacaaaaattagctaggcatgatggcgcacgcctgtaatcccagctactcgggacactgaggcaggagaaccgcttgaacccaggaggtggaggtgaaagtgagccgagattgcaccacta

SEQ ID NO: 659714 - DNA, 562 bp, Homo sapiens
acggtggctcacacgtgtaatcccagcactttgggaggccgaggtgggcagatcacagggtcaggagatcaagaccatcctggtcaagatggtgaaaccctgtctctactaaaacacaaaaaattagctgggcatggtggcacgcacctgtagacccagctactcgggaggctgaggcaggggaatcgcttgaacccaggaggtggaggttgcaatgagctgagatggggtcactgcactccagcctggcaacagagcaagactccgtctcaaaaaaaaaaaaaaaaaaccamcaaaaaacaaaaaaacaaaaaaggcctggcgcagtggctcatgcctgtaaatcccagcactttgggaggccaaggtgggcagatcacttgaggtcaggagtttgagaccagcctgaccaacatggttaaaccccgtctttattaaaaacacaaaaattagctaggcatgatggcgcacgcctgtaatcccagctactcgggacactgaggcaggagaaccgcttgaacccaggaggtggaggtgaaagtgagccgagattgcaccacta

SEQ ID NO: 659715 - DNA, 571 bp, Homo sapiens
tcaaaactgctctatgaaaagaaaggttcaactctgtcagtagagggcacacatcacaaacaagtttctgagaatgcttgtgtctagttgttatgggaagatatttcctttttcaacataggcctgaaagcgctccaaatgtccacttccagatactacaaaaggagtgattccaacctgctctatgatagggaatgttcaactctctgtcctgaatacaaacatcacaaagatgtttctcagaacgctgcagtctgcaatttgtatgaattcccgcttccaacgaaatcctcaaaactagccaaatatccacttgcagattccacaaaaagascatttcaaaactgctctatcaaaagaaaggttcaactttgttagttgagtagatacagcataaacaagtttctgagaatgcttctgtccagtttttatgggaagatatttcctttttcaccttagccctgaaagcgctccaaaagtccagttccagatactacaaaaggagtgtttcaggactgctctatgaaagggagtgttcaacttttgacttgaatgcaaacatcagaaagca

SEQ ID NO: 659716 - DNA, 571 bp, Homo sapiens
tcaaaactgctctatgaaaagaaaggttcaactctgtcagtagagggcacacatcacaaacaagtttctgagaatgcttgtgtctagttgttatgggaagatatttcctttttcaacataggcctgaaagcgctccaaatgtccacttccagatactacaaaaggagtgattccaacctgctctatgatagggaatgttcaactctstgtcctgaatacaaacatcacaaagatgtttctcagaacgctgcagtctgcaatttgtatgaattcccgcttccaacgaaatcctcaaaactagccaaatatccacttgcagattccacaaaaagagcatttcaaaactgctctatcaaaagaaaggttcaactttgttagttgagtagatacagcataaacaagtttctgagaatgcttctgtccagtttttatgggaagatatttcctttttcaccttagccctgaaagcgctccaaaagtccagttccagatactacaaaaggagtgtttcaggactgctctatgaaagggagtgttcaacttttgacttgaatgcaaacatcagaaagca

SEQ ID NO: 659717 - DNA, 514 bp, Homo sapiens
aaaataaattacgcacatacaagctgttgtctccagctctcattttagaagaatcaaatctaatactataacgaacaaatctaacactgattcagttttattatttaatatcctatttatattcagatttgtttaattgtccaaaaatgtttttctctccaatccagaattcaattaaaaatcacacattctatttggttgtattttaagtcaaaatacctctcttccatcttttttctttttccttgtggcattgacaatttgaaatagtttaggccagttttcttgtagaatgcctcacaatccagatttgtctgatttctttccctgtggttactttcaggttaaatattatgtcaagtgatatataattcccattgagtagtgtcagaaaacakctttccagtttctgaagactcaattctatctgacctctgtattagaaagcacttttttttcctgctcattctacaaagttgccattactgtttgtgaactgtgaaattttatagca

SEQ ID NO: 659718 - DNA, 557 bp, Homo sapiens
ggagatcacagggagatctacacaaaggccattgttcagtgccaatgtgagctatggcctgctgcacctgccagaggggaaggagctctccagagcaggcttctgagaattctgggaggacagcctgtaggaggtgtgaacactttccagagtcaaaggcctcagtgccttgaatctgggagatgaattcagccaagcagagctcttaaagctctgctgagagaccaggaaatggctctggaatggacacccagcttcctagagaggcttcagtgaggcctggaatgggaagaagtgttgcaaagaaagacaatcacaattatgagcacgagaagcctccacagcccactgttaaccacaatcagatasagtgtaccaggtccctgaaacataagtacccttcatagacgctaaatgtattcttttcagcttctcttagcttcattctgaggccaggggacaggcctagtgtcacagctgagaaaatgttataacacgagttggaagagagtctaattgcaaagaaagcagagcatcctgggcagggtggtgtggca

SEQ ID NO: 659719 - DNA, 642 bp, Homo sapiens
aacattttatattaaaaaaataaaaataaaatgcctgttacataatggcttcatttaactctaaaatccatcgtgttatagaactagaaacttctagagggtttgcttcattggttcccaatttttcagaaatgtgggacccctctgtaacagtgaagtccgcctctccgtatcatggtaataaaactgtctatctgcttcatttaaatgagatatgggctgaaagaaagatgctaaacacatagcctctgtggaattagattaaattttccatttaacctgctgagattatgaaaacagtctgacccacagggctgagggagttgcagcaattaccatcccattaagagttacaaaaacagtgggatttttgcaaaatcattgccccaggctttatatcaccagctttcgaactatgtcccagaaagatkaagtacttacttaaatttaagggactacttaaagaaaccacaccctcctacttcttgactcccacttagcctcactatgcaagggtgaagggagagtctgcagccaggttgagtaatatttttctcatcctgaatcctgcgcagccatctcctttttctgtgcctgatagaacacttaccatgggtccggcagggactgtaccaagaccct

SEQ ID NO: 659720 - DNA, 635 bp, Homo sapiens
tctttacaattgagctataactttcatactgtgatatatacagctcttcaaagtgcagtttgataagttttcacaaatgtatgttacattttaatgatgatataactatcacccaaatcaagatacagaactaaaaacttatctcagaaaagtttctcaactttttacagttaatctttctccaaggtaatcatttttctgagttttgtgtcttaaacttatctcagtccatctaactgaaactttgtgccctttgaccaacaccccctcagttctccccaaatctcaatctcctggtgaccatcattctgttcttttcttctatgagtttgacatttttagatcccacatataagtgacataatgtggtatttttctttctatgcctggcttgtttcacttaacacaatgtcctccaggtttattaatgttgtttcaaatgacaatattttctttgtttttaaaactggatattatttcattgtgtatatgctatattttctttatctgttcatccactggtggagacttatgttaacaccatatcttggctattgtgaataatgctgaaatgaacatgggagtgcagttatcccttcaacatacygatttcatgttctttggatatacatcca

SEQ ID NO: 659721 - DNA, 474 bp, Homo sapiens
tcacaggctcataagtggaaagcgttaagtctcagatgagacttaggactttggacttgatgctggaacaagwtaataccttgggggactattgggaaaggatgattgtattttgcaatgtgaaaaggacacgatatttaggggactgggtggaatggcgtggtttgggtgttttcctcctccaaatctcatgttgaaatgtaattctcaatatgagatttggagtagtggccagtattggatcatgaggacaaatccctcatgaatggcttagcacgatccttgtggtgatgagtgagctcttacttagttcatgtgagaactggttgtttagaagagtctgggacctcccccttctctctctctcagtcctgctcttgccctgtgacatgcctactccccctttgccttctgccatggctagaagtttcctgggtccctcaccagaagcagatactgccaccatgcttccta

SEQ ID NO: 659722 - DNA, 552 bp, Homo sapiens
ctatacagtctaatatgtaaggcccaacaaaggtcaattagaaaaacaagccattattctttactttatggatttgagtttataaagattggatgctgagaacttcctcctcttcctmctcttcttcttcatgtactttccttgatggcagagtaaactgctatcagatggacgaggtgataggtagaataatggcctctcaaagatatccttggccaaatcctcagagtctatgaacatgttacattacatggaaatgaggcactaaggttgcagatggaattaagtttgctaatccattgaccttaaaatatagaagctgtggccaggcatggtggctcatgtctgtaatcccaacacattgggaggccaaagtgggaggattacttgagcccaggagttcgagatcagcctgggtagcatagtaaaacctcatgtctactaaaaattttaaaaaatgattagctggttgtggtggcaagtgcctgtgatcccagctactcacggggctgaaatgggaggactgcttgagccttggaagtcaagactgta

SEQ ID NO: 659723 - DNA, 449 bp, Homo sapiens
gagatatttgggagcacattgacatatatgaaaaagtatatatcttaagaaaaaaactagaaagtctctttctgagaaactgctttgtgatgcttccattcatctcacagatatraatatttcttttgattgagaagtttgcaaacactgtttttgtcctttctttgaatggacattttggaggtcattgatgccaatttcaaaaaagcaaatatccaagggtaaaaaatagtaggaagctatgtgagaaattgatctgtgatgtatgtattcatctataagagataaacctttcttttgattgagcagtttggaaacagtttttgtaaaatctgagaagagatatttgggagtactttgaggactatggtgaaaaagaaaataacttcagataaaatctagaaagaagctttgtgaaaaactgctttgtgatgtgtgcattcatctca

SEQ ID NO: 659724 - DNA, 449 bp, Homo sapiens
gagatatttgggagcacattgacatatatgaaaaagtatatatcttaagaaaaaaactagaaagtctctttctgagaaactgctttgtgatgcttccattcatctcacagatatgaatatttcttttgattgagaagtttgcaaacactgtttttgtcctttctttgaatggacattttggaggtcattgatgccaatttcaaaaaagcaaatatccaagggtaaaaaatagtaggaagctatgtgagaaattgatctgtgatgtatgtattcatctataagagataaacctttcttttgattsagcagtttggaaacagtttttgtaaaatctgagaagagatatttgggagtactttgaggactatggtgaaaaagaaaataacttcagataaaatctagaaagaagctttgtgaaaaactgctttgtgatgtgtgcattcatctca

SEQ ID NO: 659725 - DNA, 449 bp, Homo sapiens
gagatatttgggagcacattgacatatatgaaaaagtatatatcttaagaaaaaaactagaaagtctctttctgagaaactgctttgtgatgcttccattcatctcacagatatgaatatttcttttgattgagaagtttgcaaacactgtttttgtcctttctttgaatggacattttggaggtcattgatgccaatttcaaaaaagcaaatatccaagggtaaaaaatagtaggaagctatgtgagaaattgatctgtgatgtatgtattcatctataagagataaacctttcttttgattgagcagtttggaaacagtttttgtaaaatctgagaagagatatttgggagtactttgaggaytatggtgaaaaagaaaataacttcagataaaatctagaaagaagctttgtgaaaaactgctttgtgatgtgtgcattcatctca

SEQ ID NO: 659726 - DNA, 455 bp, Homo sapiens
atgttagacaaaaagcaaatttgagcaattttcttattcaagttcaaaatggtccgtaaagcagcagagacaacacgcaacatcaacaacacatttggcccaggagctgctaagaaatgtacaatgaagtggtggttcaagaagttttgcaaaggacatgacagccttgaagatgagaagcatagtggctggccaytggaagttgccaatgaccaacagaaagcaatcatcaaagctgatcctcttacaactacacaagaagttgctgaagaactcagtatcgaccactctatggttgttcagcatttgaagcaaattggaaaggtgaaaaagctcaagaagtgggtgcctcatgagctgaacgaaaatgataaaaattgtcatattgaagtgtcatcttctcttattctatgcaacaacaaggcaccatttcttggttggattgtgatgtgcga

SEQ ID NO: 659727 - DNA, 554 bp, Homo sapiens
cctcatgccaccttctttgggttgatggaacttctgagaaaatgggttatgagttatagagcgtcacgctttgccaacctctgaaaatgccaatattcatgtctgtggtttcaggcaaaaatattctagtactgtaattctagaaagagaacaaattagaaagattgctctgcaaatgtcaaaataaattccaagacatctctttccccatgtttaccatacaattccctgtgaccgtaattgaaactataaagtcasacactcttggattgacccttcatcaccactccttactacctatgggaacttgggcaagatacttaacctctcttggtctcagtttcattatatttaaaattaggattattatttgtatctcacaggttgtagtaagaatatacggaaaactggtacatggtatttaatcaatggtagctatttttataatgataacttccacattgctcatttccatcatctgcctgctaataggcactgttctattttgtgtccatctgtacatgatctctatgtctgcctttgctatggtctaa

SEQ ID NO: 659728 - DNA, 565 bp, Homo sapiens
cagtccttacattataagatttgatcagatctgttctttgtttcctagcagcatgtgttccctagcagtcatacattccacaggtcctgatgtcattagaactgtgtgtgtcagtgtattgtgctgtctttagctgaaggtgaatgtgtcagagtatttgaatgccattccatagctcttccttatcactaagtattcagtaacctgatctatttgtgtatatggttgactagactatttctacaaaatcagggtaggaggaatgattaacwcaaagttttatatgaactattaatttttttttttagatagagatgttaggctgcatcaggcatccccggcctgaagagtgataagccagtatgtgatttgcctgatgggtaaatgcttttgatgtctcatttttggttgcttggtgtgattatccttcagactgagagtgctcctcaaaaatatgaatggaaagtctttcagaaatgattttcttaatcatgatcttcttaacattttgcagatttaaatactcttttccacagggaataatagcaagtatggcacttactgg

SEQ ID NO: 659729 - DNA, 419 bp, Homo sapiens
aggagcctggccgcttcagctcatgtgctcctggtattcaattgtgaggtggaaacctctttgcaggacccctctctttgctgagagctgtsctttcacataataaattctgccctcctcaatgtgtctgcatgcttaatttttcctggtcacgagagaagaacacagatgtagctgaactaaggagcaaaaacccagcatcaatacctgctacagcacagatgcagcatgaaaaattatgctaagtgaaataagccagtcccagcagaccacttgctttttatttcagaggcttataggcaaatctatacaaagaaggtgggtggttccctagggctgagggaggaagggaaaactagtgaagatggctaaatgatgtggggtttgtttttagggtgatgaaaatgttctaaaattaa

SEQ ID NO: 659730 - DNA, 460 bp, Homo sapiens
ccgcttcagctcatgtgctcctggtattcaattgtgaggtggaaacctctttgcaggacccctctctttgctgagagctgtgctttcacataataaattctgccctcctcaatgtgtctgcatgcttaatttttcctggtcacgagagaagaacacagatgtagctgaactaaggagcaaaaacccagcatcaatacctgctacagcacagatgcagcatgaaaaattatgctaagtgaaataagccagtcccagcagaccacttgctttttatttcagaggcttataggcaaatctatacaaagaaggtgggtggttccctagggctgagggaggaagggaaaactagtgaagatggctaaatgmtgtggggtttgtttttagggtgatgaaaatgttctaaaattaattgtaatgatgacggcataactctctgaaaatactaaagttaatgaattct

SEQ ID NO: 659731 - DNA, 362 bp, Homo sapiens
atcctaatgtttgtagagtatttagaaatttgagaattccctccaaataaagagttttttaaaacattgttagacaaaaagtttgaattacaaaatgtggtagtagctcaggtctaactcaaatgcagggaaaaaaaactattaactctaaaaaaaattaaatacacatttgatggtaatgagaaacagaaaacaggcagaaatagtagaatattcaaccactgatgaagtatttgaccactgaataaagaaaattgcaatgatttaaatttgcatcaatgtaacttcacacctgatgacacttcccagtctgtgcaaaattagatgtctaagagtaaagcsgtgagttttactagcctgag

SEQ ID NO: 659732 - DNA, 463 bp, Homo sapiens
tttctttcaatagttactcaggagctatttattaaataatgatatattaattttgttccattttatcaacagctatggttaattaaattctgatttgatacaatattgacttgtagttctatcatatgtgggtaaattattggaaaaagagtgatgctttaggatttaaaatgtatagagatattgaaatgaatatgacatggggaggggtggaaaaaaatgaatgaatgcaagcttccatacctggaaatataatatgtcagactagatacccgaaattgccctctctttcaaaggaaaaaaacctgaaattaataaaaactattytatttaagtgcacggtattatgcagatatcatataagtgatagattaaataaaaaataaatttttatagtgaaatttcaaaaaatataagcaaagaataaaaaatggccaatatattcctgagatgaaaaaaagga

SEQ ID NO: 659733 - DNA, 584 bp, Homo sapiens
tagcttgtgtcagaaaaataaacaatatttaagtataatctctattttttattgttttgcatgtttcaataattaaagacatatggaaaatgttacttttagaccttggctactctgggcacactgcctatggggtaatcctgctccacaaggagcagtgaaaaaaaaaaaaaaaagacctactagatgtcacaaatacaataggaatgtattaaactaaattattatatccagtaacgtactaattattcctagttgtcaacctgctctgcacccattaaaataaaatttgtattgctccaggaaaaagataaatagagattagaattagaaacttaatatttggctttgtctttcaaaacagtcttctaagatctaagtctctatacttaagtctgaagtttttggttttcaaaattgargttttgctggaaaaaaaaaagctttacaaaataatttcaaatctaaaccataacaaggtaaaaacaaggtgtcaagccttactttttggtctttctgcctcttttgttataggctattccaaggagaagggtacaatataaccacagttcttaatagaaggg

SEQ ID NO: 659734 - DNA, 599 bp, Homo sapiens
gagaacccctcttttctccaaaggagacagtccctaaatctcttcttatcgcatcaaattttaagcctaggatttctaggtgatgaatacttttcttcaaatttttttccccatgactgatctacctaaaaccaaaactgatctgttccctacatgcccgatacacagtggtaaagacaaatcagatatacaatttgactgaaaattctttatttaaagcatggtgatatatatatgtatgtcagttttaatatatattttatggtaatcggttaacatttgaagcactctatttggcattgtctctgctagaactcactcccactcctgcagctatgataagcccttcaattatctttatctcaccaccaacaaaggatgtattaattaagrtaatcgactttagaaatgattattcattcgtgaaataagtgatgtttaagatatgtgcactttcgagaaatgttacacactcacctctggccttgcatgaacagggtctaagaatctagtggcctcagtagtatattccttttaatttgtttccacttcccttcagaatggcattgtaagccctggattctgtatagtcctatgtt

SEQ ID NO: 659735 - DNA, 536 bp, Homo sapiens
catttgtgtggtttaagccacccattctgtaagactttgttgtggcagccctaacaaatgactacaggcatatacatacgctacatgttggaagtcatttcctaagaggcatcattaaaactcagtttccatcacactgcagttggtcccttagcctgtatccttcattttttctatctccggtaacacaccactgaaagcaactctcaattcattactttgctaccatcttattggttctctttgcctttgctgattcttcttggaacacctgtcccctggatattctaatggctcccctgttctcttccttcagttgtctgctytatggggacctcctcaagagctttcattaatagcttaactgaaaatagccttatcaaaagtagtgctcacaatcacttctcctatcatccgtcatcaccaggcattctattatctacttacttatttgtatggaacataagaatgtaacagaaaacaggcacttagcatttttatctaagagttcatctgagtgtagtagccaccatatc

SEQ ID NO: 659736 - DNA, 536 bp, Homo sapiens
catttgtgtggtttaagccacccattctgtaagactttgttgtggcagccctaacaaatgactacaggcatatacatacgctacatgttggaagtcatttcctaagaggcatcattaaaactcagtttccatcacactgcagttggtcccttagcctgtatccttcattttttctatctccggtaacacaccactgaaagcaactctcaattcattactttgctaccatcttattggttctctttgcctttgctgattcttcttggaacacctgtcccctggatattctaatggctcccctgttctcttccttcagttgtctgctctatggggacctcctcaagagctttcattaatagcttaactgaaaatagccttatcaaaagtagtgctcayaatcacttctcctatcatccgtcatcaccaggcattctattatctacttacttatttgtatggaacataagaatgtaacagaaaacaggcacttagcatttttatctaagagttcatctgagtgtagtagccaccatatc

SEQ ID NO: 659737 - DNA, 536 bp, Homo sapiens
catttgtgtggtttaagccacccattctgtaagactttgttgtggcagccctaacaaatgactacaggcatatacatacgctacatgttggaagtcatttcctaagaggcatcattaaaactcagtttccatcacactgcagttggtcccttagcctgtatccttcattttttctatctccggtaacacaccactgaaagcaactctcaattcattactttgctaccatcttattggttctctttgcctttgctgattcttcttggaacacctgtcccctggatattctaatggctcccctgttctcttccttcagttgtctgctctatggggacctcctcaagagctttcattaatagcttaactgaaaatagccttatcaaaagtagtgctcacaatcacttctcctatcatccgtcatcaccaggcattctattatctacttacttatttgtatggaacataagaatgtaacagaaaacaggcacttagcatttttatctaaragttcatctgagtgtagtagccaccatatc

SEQ ID NO: 659738 - DNA, 415 bp, Homo sapiens
  misc_feature 1, 2, 3, 4, 5, 6, 7, 8, 9, 10, 11, 12, 13, 14, 15, 16, 17,18, 19, 20, 21, 22, 23, 24, 25, 26: n = A,T,C or G
nnnnnnnnnnnnnnnnnnnnnnnnnnaaacaaaggtaaatcttcaggtaaatgtgtagcctctgcataatctcataagcggsctttggagtattaattatatctctatggtggctgcaattcaaggcgagatgacaagatttcatattctcacagcagttattggccaaggacgtcgtagttggaggagtgggaatgggaagaaagcagacatacatttccagacatttctggttgtctacacacacagacagattggcttcagtagcctaaggcagttctccacagagaattccaggtatgggccctgggaagcacaggctgggagagatgcacagaattgatacacaagatctgtgtttgctgcagtctatgattttcaaagactggatccagttatgcctcccagtgatttc

SEQ ID NO: 659739 - DNA, 424 bp, Homo sapiens
  misc_feature 1, 2, 3, 4, 5, 6, 7, 8, 9, 10, 11, 12, 13, 14, 15, 16, 17,18, 19, 20, 21, 22, 23, 24, 25, 26, 27, 28, 29, 30, 31,32, 33, 34, 35: n = A,T,C or G
nnnnnnnnnnnnnnnnnnnnnnnnnnnnnnnnnnnaaacaaaggtaaatcttcaggtaaatgtgtagcctctgcataatctcataagcggcctttggagtattaattatatctctatggtggctgcaattcaaggcgagatgacaagatttcatattctcacagcagttattggccaaggacktcgtagttggaggagtgggaatgggaagaaagcagacatacatttccagacatttctggttgtctacacacacagacagattggcttcagtagcctaaggcagttctccacagagaattccaggtatgggccctgggaagcacaggctgggagagatgcacagaattgatacacaagatctgtgtttgctgcagtctatgattttcaaagactggatccagttatgcctcccagtgatttc

SEQ ID NO: 659740 - DNA, 336 bp, Homo sapiens
tgtgtgtgtgtgtgtattctgatttcatctctttttttaaaaaaatcatctgattattataggcaataactataacaatactgctgagttcatagcatataagagatacattgatcaaagttgctatataacactggaattaagtaaaamttactaaaccaaagtagattgtaaaaagtgaagatgattgattattataatccccaaaggtagttgggaggctgagatagaagtactgcttgaggctaggagtttgagactagcccgagcaacacaatgaaactctgttgatatagtttggatatgtgtccctgcccaaatctcatgttgaattgt

SEQ ID NO: 659741 - DNA, 359 bp, Homo sapiens
cttcacagattctagataaacagtgtttccataatgctgaatgaaaagaaaggtttaactctgtgagatgaaggcacacatcaaaaatcagtttctcagaaagcttctttctagtttttacataaaggtattttctttttcatcatrggctcccaaatatacctgtgcaagttttacaaaaacagtgtttgccaactgctgaatgaaaagaaagtttaactctgagagatgaatgcacacatctcaaagtggtttctcagatagttttcttctaatttctatcttgggatatttgctttttttgccattgacctcaatgagctctcaaatacccattcacagaatggacaaaaaaacag

SEQ ID NO: 659742 - DNA, 359 bp, Homo sapiens
cttcacagattctagataaacagtgtttccataatgctgaatgaaaagaaaggtttaactctgtgagatgaaggcacacatcaaaaatcagtttctcagaaagcttctttctagtttttacataaaggtattttctttttcatcataggctcccaaatatacctgtgcargttttacaaaaacagtgtttgccaactgctgaatgaaaagaaagtttaactctgagagatgaatgcacacatctcaaagtggtttctcagatagttttcttctaatttctatcttgggatatttgctttttttgccattgacctcaatgagctctcaaatacccattcacagaatggacaaaaaaacag

SEQ ID NO: 659743 - DNA, 359 bp, Homo sapiens
cttcacagattctagataaacagtgtttccataatgctgaatgaaaagaaaggtttaactctgtgagatgaaggcacacatcaaaaatcagtttctcagaaagcttctttctagtttttacataaaggtattttctttttcatcataggctcccaaatatacctgtgcaagttttacaaaaacagtgtttgccaactgctgaatgaaaagaaagtttaactctgagagatgaatgcacacatctcaargtggtttctcagatagttttcttctaatttctatcttgggatatttgctttttttgccattgacctcaatgagctctcaaatacccattcacagaatggacaaaaaaacag

SEQ ID NO: 659744 - DNA, 560 bp, Homo sapiens
catgacttcagagagtacatatttctcaatgacttcagcaaacagtgcaacatggctgtagcaagtatacaggaaacagtggaagataaggctatgcagtctgattagcactaagctaaatgctgtgcatttaccccatcacagaaagttttataaagttttaaagttgtgaaatgaagtgactggagctttattttagagggattactctgatagcaatatggagattgaattggaattggaagaacctagattcttgaggagcagtgcaggtgagtgttggagtagaaaggatatgggctaggcaaggtggctcatgcctgtaatcccagcactttgggaggctgaggtgggcagatcacctgaggtcaggagttcgagaccagcctggccaacatggtgaaaccccatctctagtaaaaatacaaaaattacccgggcatggtggcatgtgcctgtaatcccagctactcgtgaggctgaggcaggagaatcgcttgaacscaggaggcggaggctgcagtgagctgagatcatgcctatgcactccagcctggatg

SEQ ID NO: 659745 - DNA, 560 bp, Homo sapiens
catgacttcagagagtacatatttctcaatgacttcagcaaacagtgcaacatggctgtagcaagtatacaggaaacagtggaagataaggctatgcagtctgattagcactaagctaaatgctgtgcatttaccccatcacagaaagttttataaagttttaaagttgtgaaatgaagtgactggagctttattttagagggattactctgatagcaatatggagattgaattggaattggaagaacctagattcttgaggagcagtgcaggtgagtgttggagtagaaaggatatgggctaggcaaggtggctcatgcctgtaatcccagcactttgggaggctgaggtgggcagatcacctgaggtcaggagttcgagaccagcctggccaacatggtgaaaccccatctctagtaaaaatacaaaaattacccgggcatggtggcatgtgcctgtaatcccagctactcgtgaggctgaggcaggagaatcgcttgaacccrggaggcggaggctgcagtgagctgagatcatgcctatgcactccagcctggatg

SEQ ID NO: 659746 - DNA, 560 bp, Homo sapiens
catgacttcagagagtacatatttctcaatgacttcagcaaacagtgcaacatggctgtagcaagtatacaggaaacagtggaagataaggctatgcagtctgattagcactaagctaaatgctgtgcatttaccccatcacagaaagttttataaagttttaaagttgtgaaatgaagtgactggagctttattttagagggattactctgatagcaatatggagattgaattggaattggaagaacctagattcttgaggagcagtgcaggtgagtgttggagtagaaaggatatgggctaggcaaggtggctcatgcctgtaatcccagcactttgggaggctgaggtgggcagatcacctgaggtcaggagttcgagaccagcctggccaacatggtgaaaccccatctctagtaaaaatacaaaaattacccgggcatggtggcatgtgcctgtaatcccagctactcgtgaggctgaggcaggagaatcgcttgaacccaggaggcggaggctgcagtgagctgagatcaygcctatgcactccagcctggatg

SEQ ID NO: 659747 - DNA, 471 bp, Homo sapiens
attgtgcttattcaaacttctcttctcttcttcagaggcaaacctgtataatttckttggtttgtttgtttgttttaagacgtagtcttactctgttacccaggctagagtgcagtggtacaatgtgaggtcactgcaacctccgcctcccgggttcaagcgattctccggcttcagcatcccaaataactcggattaaacccttataatttctatcatgattgattaattttgttcatcttcaaattccaataattagaattcctacaggatgtgtgtgtgagtgtgtatctggtttattttctttagcataaatacatatttgagatttagccaaatatttgtgtgtatcatttgtttatttttcctcatatttctgagttgcctacgtatttgtcagagtttgcttattcattagtctgttagtgaatattcagattgctttcagaattagcttttacaaataaagga

SEQ ID NO: 659748 - DNA, 514 bp, Homo sapiens
attcaaacttctcttctcttcttcagaggcaaacctgtataatttcgttggtttgtttgtttgttttaagacgtagtcttactctgttacccaggctagagtgcagtggtacaatgtgaggtcactgcaacctccgcctcccgggttcaagcgattctccggcttcagcatcccaaataactcggattaaacccttataatttctatcatgattgattaattttgttcatcttcaaattccaataattagaattcctacaggatgtgtgtgtgagtgtgtatctggtttattttctttagcataaatacatatttgagatttagccaaatatttgtgtgtatcatttktttatttttcctcatatttctgagttgcctacgtatttgtcagagtttgcttattcattagtctgttagtgaatattcagattgctttcagaattagcttttacaaataaaggacttaggtgcattctcaaacaggtttttgtgtaaatatatgcttttatttttg

SEQ ID NO: 659749 - DNA, 585 bp, Homo sapiens
tgctacgttgtggtgcattggcgagactgcaactttaagaagtgtgacttttattgctgctgaattattttatctcctacccarttgaaaataaaggatataaagtgcttaggttgaacacaaagtcctctgctctaggtaacatcttcagcagccacattagcagaggcatgggtggtaatggtggagtagatgtctctttgcttctgacagggtgtctgcttatgtgttaaacaaaatagtatggtatatatttcattaagaaatctgctaaaaaatgaagtaaaacaggttcatgttcttaagaggcacaggatttgctacggcagcaagaccaaaaggcttaagtaacaaaaatgtgcatagtagttacaaacattttcatctaaacaaaacaatgtgagcatctgcatatgacaataacttatgcaaaaaatatttttaactgagattgaaatcattttatacataacaaatgttatcactgtattctcaggtaatatattgtttgtatatagatgtgataaataataacttatttaagttattcatcatttatacaacaaataattctttggaatctac

SEQ ID NO: 659750 - DNA, 432 bp, Homo sapiens
ggtaacagagtgagattctgtctcaaaaaaaaaaaaaaaaattccaataagtcatagattttgttcctttacctaatcctatatttctcaaaagtttggttcattatttttaaattctttttttatttttgtctgactgggttgattcaaaggtctggtctttgagctcttaaattatttcttctatttggtctagtctgttgctaaggctgtgaactgttttttgaaattcctatagtaaatttttcaatgcaagaagctctgcttggttctttctcaatatggctatgttgtcattcaaatccaggatcgttgttatggggttgttgctggatttcaactttctgttggcttttggtgattttttttgccacttatatcttgartactatacctgtcatttcagacgttgcattctggttaggactcatt

SEQ ID NO: 659751 - DNA, 255 bp, Homo sapiens
ggggcctgatgcccatctgggccctgggtgtccacctgcagcatggatgtccactggtactttatrtccaccaggggcctaatgtccacctaagacctggtgttcacctggggtctgatgttcagctgaagaccggatgtccacctggagccgaggaatccactcagggactggtgttgaactggggcctgatgaccacccggggacaaggtacacaccaggcttgttgtccacctgtcaccagatgtccacctg

SEQ ID NO: 659752 - DNA, 497 bp, Homo sapiens
aagagagagagaaagaaaaccaagcaaattaagaaaacaaaaataacaaggtgcactgcaacaaatgcagtcaggcctgggctttagggtacagatgcaaaagcctctattaggaaggttttctgtgtgctttgcctgtggaatatctctttccttttgcctgtccatcacacaagatctgacttatttttgaatttggatttgtgtctctttaaaatgctaagatgagccttaagctgggtacaggaaaaccagtcatattcaggttccaggctgatgagraaacaggctcaagggcttaagtcactttccaaaagtcacttccttttttggctctgtaagatgaagtgatttcatttgtcaagctctgaaattctttggggaagagcaagctgacttatttccacacaggtgaggcaaactgctctgccttgatgtttttctgttctttacttcccgggcagctgccactgcaggggctgaaaataaccccggga

SEQ ID NO: 659753 - DNA, 585 bp, Homo sapiens
ggacttttccttttccatctgtttttttttttgtaaggcaggaaaacctttctaaaagatcccccagcaaaaatgtcctctgrttccatgggccaggcctgggttccacgtttatgcttcagttacaaagaatgctgggaaatgtagaatatgtcatttgcagcctttgtcaagtggaggtcaaccctgcccacaaggaaaggggaaggaagtagattttgagcaggcaatcaacggtgtctctgccaaaaaaatctagctcagaggatgatgaaagtcaaatgaatatatatttatttatttggctgaagttaatttatagcagttattatatgccaggcactgtttaacatcaactcatttcctcctcataacatcatgagggaggtacccgcacaacagtgtctctccaaaaggtgtgttaaagcttcgcacaaagtgggctgcctgggaatgctgatttttccatctctcctctaattctgccacaagagcacatatgcatactggatggaggggcaataataaaagtagaagcaactacttcaaatgccctcctcctacccattctagtttctgtgttta

SEQ ID NO: 659754 - DNA, 504 bp, Homo sapiens
ttttctatgggtcactcttttttagtaaacactctgggattctgctattaggaaacctacgtgaccacaagctgtttgcactgtatttgttcatttacatattgaaagaagttgggyggtgatgttcttgtaaattctccagatgatgagaatgaggcttagaaggatttgtgtaatttgcttggcagtggagctgagaaatgcaaatctgtccttcaaaaatagggtggataagaagcaggagacaggtgcttggctggatccccagaggtggtagagctggtcatctgggccaggaaaggggaccgatgcatgtttactggccgctgtgtgtgtgccagtcactttatgtatgttatttaattcagtgtcctccgcctagttgtaagatagtttgattctttttactgaagcacagggaaattgcagagcaggccagacacagactcatgatttgagcagcgtctgttggactcctaggtctgtgctgcctgtgaggaaggg

SEQ ID NO: 659755 - DNA, 504 bp, Homo sapiens
ttttctatgggtcactcttttttagtaaacactctgggattctgctattaggaaacctacgtgaccacaagctgtttgcactgtatttgttcatttacatattgaaagaagttgggtggtgatgttcttgtaaattctccagatgatgagaatgaggcttagaaggatttgtgtaatttgcttggcagtggagctgagaaatgcaaatctgtccttcaaaaatagggtggataagaagcaggagacaggtgcttggctggatccccagaggtggtagagctggtcatctgggccaggaaaggggaccgatgcatgtttactggccgctgtgtgtgtgccagtcactttatgtatgttatttmattcagtgtcctccgcctagttgtaagatagtttgattctttttactgaagcacagggaaattgcagagcaggccagacacagactcatgatttgagcagcgtctgttggactcctaggtctgtgctgcctgtgaggaaggg

SEQ ID NO: 659756 - DNA, 603 bp, Homo sapiens
tgtgatggctgggctgcagggccattaagaaaatacctttgcacaccaacaaaaaagactaaagccttaattgctgatccaaaaggtaacaggaaaggatgcaccactgcatatatggtgagggatgcattgccttggtcagggcacaggtcctctgtccctgagtcctgtttccttgtgtgggtagagggcattttcacactctctgtccccaaaagacctcagggggaacmaaagagcagcatgagcagggggccatggtcatgggcattgactgggtgcttgctgcatgcaaaggctctgtgttaagcaccttgggaacactaactcatttactgtcccaacaaatccaggatgtaggtacaagtaatagtcccactttacaggtgacaaaaatgaggaatagagaggtttggtgatttgctcaagatcacacagtatgtgtggcacagctgagattctgacccacaggtgagactcttgagcttattcttctcactgaaccccctgcctctcatggttatgtggctcatgctcccatagccttaagtcctgaggctaaggaagggtcctcagataaaagacgtcaatttctgtgtcttt

SEQ ID NO: 659757 - DNA, 610 bp, Homo sapiens
tgactattgctatggagacaactgcaaaatcagagaaaagctgggtattgggcctgtaaaatcaacaatgctccacagatttctcaccaactaaacctgttcttacaaattagttttgcctattttgaacttmatataaatgaaattgtaaaatatctaccctcttgtgtctgccttctcttgattgacttcacatctatgagatttatttatattgttgcaggtaacagtagtttgttctccttcactgctgtgcagtattctggtttgtagtttgaagcttctagtttgaagctactatgaataaagttgttctgaaatactcctatacatgctcttcagtgtatgctagcactcaattctctttcttttgggtagaagcacaggaatggaattctggagatagatatctagatatctataaatagatactcagctttagtaaatagtgccaagaagttttccaaggtgtttttactaataagcacagctaccagcaatctaagacagtctaggtgcttcctgttttcacttccaaaatacaccttacccgtgtgatcttaaagcaatgacttctttttaaagagatgcgtgcaaaaacctgtacaag

SEQ ID NO: 659758 - DNA, 616 bp, Homo sapiens
tgatcacaccttaattccaactgggcacaaaaaagtaagagcgcctccacccatctctgcaatatatccatttgctctttttgtaattgaagtgaagatctttcagattcatcaccttctagacctctacaatctgttcctccttcctacctaggtacctactcctaagattctactctagaccttgaatcactaaagtctcattccctgactatcaactcctattcttatgtgtcctgatatggtttggctatgtccccacccaaatctcatcatgaattgtagttcccatcatcctcatgtgttgtgggagggagctggtgggaggtaatttaatcataggtgcrgttaccctcatgctgttcttgtgatagtgattcattctcatgagatctgatggttttataaggggctttcctccttttgcttggcacttcttgcttccaccatgtgaagaacgacgtgtttacttctccatctgccatgattgtacatttcctgaggcctccttaaccatgcagaactgtgagtcaattaaacctctttcctttattaattacccagtctctggtatgtctttattagcagcatgagaatggactaatacagctccctt

SEQ ID NO: 659759 - DNA, 584 bp, Homo sapiens
acataagccaaagtattacagagacatgaggtcaatggatgacctcaagaattagaagcaaacagattttagacaagatatagctccaaaggtggcagagtttggccagaagaaggggtcagggtgagaaaatgcttttcttaattggaaaaaaagacagccctaggaaaatatgcatacacgtagcatgatctctctctctattgagtttctctgtgaaaaggagaagatgtaggggctgcaagcacagacaaaggggaccaggggatttgcagaaagcaatcacagataaggttctttccctgtggcagttaaagccgcagaaaggaaaagtatcagggtttaacacctcatccagctgaccagaggtctcagggggctcasagaagcctccaagaagccaaaattaaattgctctgagaatgagagaagttaacagtcaatgtaaaattaagcttaattattagcagttaagggctaatgaggatgcccgatttacctaaatgttgggctatttctacatcttgctctaaattagctatcactttttatatgtagtcattaattagattagctcattatac

SEQ ID NO: 659760 - DNA, 519 bp, Homo sapiens
gtaactactttctggcctgaaagctgagcttttctttctcctgaccctagcacagccagggagtggacatggggcctcagttcccctcccaggtgactcttgagggatgctggcagagcaggaggctgaaggtcagccttggccacagctgcatacccccagcctgtgccagcctcaagaccaccttctgtttcccgggctcaccatcatcatcttagttcctgcctgtgcctaaggccagtcctaatgtctcctcctgggtctgggataacttcaaagacttccagtcaatgcccttttgcttaaattgaccacagttcatttctgttactttcaagcargaaccaggttgacccggactcacccaaggaccagatgttccgtctccatttgacagtcttccattccaacagtctgtgcattgatgagataagtggaagttaacacgcagagagcagggccctggtgctaggtttgttttgagagcattgatctccttcccctgttgccaccctggaa

SEQ ID NO: 659761 - DNA, 607 bp, Homo sapiens
actttacatatttaaaatcattttagacacagtgcattctatatggtcagaatggcaccaggacaaatagcattggatattctaggcaggctgtgtgtgttgtcagctggagaactccagcaagtttgaattttgctagtggcatctgctctaatgaaatcagagtgatcatttcaaaacataaatcaaatcttgcctctcccctactttaaatccccaatagctgcccatcccccagtagtcaggataaaactcaaactcctcatgctgactcaggccctgtgaagaagtagccctggccttgtattctgtgccatgtccccagcacgtgttccactctagccaaaatgactttgctctcaaattggaaacctctgagcttattcctgccttcagccctttgcatcaactgttccctctgcctactgggcttttccctgaaaccacacatggctggcactgtgttatctttcagtgtcacttcctragagacactttcctggtcacataaagtggctgcttggtcactctccctcaccactccgaattctctgcataggactcgcaattccctgaggtgtctctcgtctcttaaggtgtttgttgg

SEQ ID NO: 659762 - DNA, 542 bp, Homo sapiens
atccaagaccatcaaagcagtacctctatgaatttgagacaaccagagcattattgggcttggggtctaagtccctatgaatacctagaatgccttcccaaggataggcagaaaaaagcccagactgtgaggactacaataattgcctaattctgcaatacctagaaactgacaaacatctacaagcattaagaccatccaggaaaagacgacctcaccaaagtaagcaatggaccaaaaaaaaaaatcttggaaaaacagatatgtgaccattcagatggaatattcaaagtaactctgtggaggaaackcaaaaaaattaaagataacacagagaagaaattcagagttctattagacaaattcaatgaagaaactgaaattattaaatagaatcaagcagaaattctaagttgaaaatgcaattaatatactgaagaatgcatcagtgtatctaggagaatttatctagcagaagaaagaattagtcagcttgaagacaggctatttgaaaatacacagtcagaggagacaaaagaaaa

SEQ ID NO: 659763 - DNA, 591 bp, Homo sapiens
ttattatatgaatgagtaaagttagccaaaaggggtaagatgtacgtaaatagtccagggaggccaaaaccacaaaagggagtaacagccaaaaatgagcttttcccctggagatgctttttcaaggtcacagcccagaagaggaagcctatygaatctctaggtttccattggaagaacaggcagtgcttacctgcactgcacaatccattctaactaggatgatgactatggattaaagatgaaagtgtggcaatgcacagactctatctgaggagaatacagaaacactaagacaatgacagagggtgagacaaaggcagtagagcaatgtgaagcctctgacatcatgatttttaagaccaacatcttgtaaatgccatcatagatctcagcttcttttattatggggactttgctggtttcccagctgagaaagtgaaaataacaacctgcatgcacttcccaagtctccacctgtatcctgtttgctttaaatctctaggagaagaaagtcagataactgggcctagtgtcagtgtaggaggcacttcctaaaagctacatattaggaagaagggaaaatgtgtg

SEQ ID NO: 659764 - DNA, 553 bp, Homo sapiens
gattttattaaaaatgggggtttatcaaaccacaccaggcatgtccagctctgtcctggagttggttcagggaacaggtgggtcctgtgtttagcagccatgacaacaagctcacagcgtcagttctagttgacacctcaaaaaggcgaagggatctcaactaaaatgtcatgtggatgtcacatctgtgggtgctgcgtactccctcgatgtgaatatggaaaagttaattacctcttgaggsatctgttgagattagtgctggtctctaaggaacacccaaaatggctcaatagagccagaaagcagactggctcagggcttttgtgatggtttcgtggtgggtcagagtgaggcttcccactcacaggaaggggattgcacagtgtgaaacacccactggtgtcaaatgaggaagctcctgcgattcctaactagattcacattgtgtgataaaagacacacaatagacataacttcatggtcggatatcacaaaatgctgttaatagatgtggtaaaaaggcaactctaaatttttagtcattggagtg

SEQ ID NO: 659765 - DNA, 620 bp, Homo sapiens
ggaatccttctaactccatttacctacactatccaattataaacttagatggaagttaaacagcctgtgagaactcagaaggatatctcattgaaatggtagaagagttcactgctgtatctcagtagcaggcaggcacctcaaactggttaaactgtgtgcaccacagtactggtgctatgaaggtttctttcacaatagttttgcattttttaggtgttcaagatatgtctttgtggtgtatgyatgtgtgtttctgtgtgtgtgcacgttgtgtgtctgtgtgtttcttttgctttttggatgggtgggaagttaataagtgtcatgaattattaaaaaggaacttgaccttatagtgattccaacagaaaggaacaaaatctggagatatcagagagtcccttgtgcatattccagggactatgcgggcaactatctctgatggttgcaagaggaaaaaagaaggatttcagcatagatgacaaattatcactcaaatgatgatagtctgtggttataggccttgcctcccacttggattttggtattacccactaaaagtgctcatcttggaagaggatgtggagcctcagatgccttctctgctttccctatat

SEQ ID NO: 659766 - DNA, 620 bp, Homo sapiens
ggaatccttctaactccatttacctacactatccaattataaacttagatggaagttaaacagcctgtgagaactcagaaggatatctcattgaaatggtagaagagttcactgctgtatctcagtagcaggcaggcacctcaaactggttaaactgtgtgcaccacagtactggtgctatgaaggtttctttcacaatagttttgcattttttaggtgttcaagatatgtctttgtggtgtatgcatgtgtgtttctgtgtgtgtgcacgttgtgtgtctgtgtgtttcttttgcttttkggatgggtgggaagttaataagtgtcatgaattattaaaaaggaacttgaccttatagtgattccaacagaaaggaacaaaatctggagatatcagagagtcccttgtgcatattccagggactatgcgggcaactatctctgatggttgcaagaggaaaaaagaaggatttcagcatagatgacaaattatcactcaaatgatgatagtctgtggttataggccttgcctcccacttggattttggtattacccactaaaagtgctcatcttggaagaggatgtggagcctcagatgccttctctgctttccctatat

SEQ ID NO: 659767 - DNA, 396 bp, Homo sapiens
atgaaaagtttagccacaaagacttcagaagctcagctattcagctttgccttacacctgggtgtgattctctctaactctctttatgctacttttagctagtgcaacttgccataggaaaaaaatactgaaaacytaaaatgaccataagagcaacaaactttctgatttctgtcattcttttaaccaagataattttgaaggtagctatctatgtgtttggatacttggttcctaattagtgacgtgctctccacaatctgtagaacatatattctttggatatatatgcctcaagtattctacataaggtgggcatatagttacctttttctagtgattctgggatacctgtacctacactttgatagaatgtggagcattattgcatttctt

SEQ ID NO: 659768 - DNA, 396 bp, Homo sapiens
atgaaaagtttagccacaaagacttcagaagctcagctattcagctttgccttacacctgggtgtgattctctctaactctctttatgctacttttagctagtgcaacttgccataggaaaaaaatactgaaaacctaaaatgaccrtaagagcaacaaactttctgatttctgtcattcttttaaccaagataattttgaaggtagctatctatgtgtttggatacttggttcctaattagtgacgtgctctccacaatctgtagaacatatattctttggatatatatgcctcaagtattctacataaggtgggcatatagttacctttttctagtgattctgggatacctgtacctacactttgatagaatgtggagcattattgcatttctt

SEQ ID NO: 659769 - DNA, 524 bp, Homo sapiens
tttattatgtactctcaactcgacccaaaacacatctaaaaaaacctatattttagtgacatttactactactttgccactccacttttaaagcagcctatgtgaatatcaagtggatgggcctgtttctgtacaatatcacatactataggagaaatatctagcaccgatgataataataataataatttaaaaactctgaacactgctgtttgttagattactccagatatttgaatattccttttctttcttagttctttaattagctgtggctttgatatgagacatatatttatttgaagctaaaagcccactttcacaacttttacatattttttttttttgagacagagtctcgctctgtcacccrggctggagtgcagtggcatgatcttggctcactatcacctctgactcttgggttcaagcgattctcctgcctcagccttctgagtagctgggattaaaggtgcccaccaccatgcttggctaatttttgtatttttaatagagacggggtt

SEQ ID NO: 659770 - DNA, 462 bp, Homo sapiens
cttgtctgggcttccaagtggaactagagtttcattcaacgtacatgtgcctataggtcctccctgtggcaatgacatctctcagctcagtaagggccacttgcagtaggaatatgaccctaaccagaagactcagtggatccttatcaccttcatagaaaggtactcaccatccatgtcaacagccaagccaacaygctgttgctccaatacgtaaaaggcacttctgtagggctggcatgagtcagtcagttcaagacaacctgaaggagttgaataacatctatccagtgagtcctgcaagacttcaggccctttctcatccagcagctccctgctgagcctggaaaagtgggaaaaagtaaagaataagccagggggaatcagaaaccacacagccccagctagatttcatggctaacataaggaagagtttgaaaagaaaaaggacagatccattaa

SEQ ID NO: 659771 - DNA, 566 bp, Homo sapiens
cacaacctgattcagtcctcactgtggctgtgtgtggggggtcagatgacaggtcaccacaacctgattcagtcctcactgcggctgagtgtgtgtgggtgcagatgacaggccaccacaacctgattcagggttcagttgggctaccagccagtgccataaggaaaacctttctggggctcttgagaggggcaaagcataatttgcatgtaggagaaatgttaatagtttgtggccagaggaccagatgtgrtttattaaagactgctgcaggttcctactatgcttctcatcaagaggtggaatctaatcacctttcccccttgaatcatggctggtctcagtgatgagtgcgactgggcagtgtggcaggagagatgctctgggacttctgaggggtgatcatgagagtccttacagcttctgcctgggcctcttggacacacaccctgggagaagccagacaaacctgactacctgacgctgccagactgggaggaagtccgtgctggccacgaagagagggctgggtgcctgctccatgtccccagccactagagtccttc

SEQ ID NO: 659772 - DNA, 566 bp, Homo sapiens
cacaacctgattcagtcctcactgtggctgtgtgtggggggtcagatgacaggtcaccacaacctgattcagtcctcactgcggctgagtgtgtgtgggtgcagatgacaggccaccacaacctgattcagggttcagttgggctaccagccagtgccataaggaaaacctttctggggctcttgagaggggcaaagcataatttgcatgtaggagaaatgttaatagtttgtggccagaggaccagatgtggtttattaaagactgctgcaggttcctactatgcttctcatcaagaggtggaatctaatcacctttcccccttgaatcatggctggtctcagtgatgagtgcgactggrcagtgtggcaggagagatgctctgggacttctgaggggtgatcatgagagtccttacagcttctgcctgggcctcttggacacacaccctgggagaagccagacaaacctgactacctgacgctgccagactgggaggaagtccgtgctggccacgaagagagggctgggtgcctgctccatgtccccagccactagagtccttc

SEQ ID NO: 659773 - DNA, 566 bp, Homo sapiens
cacaacctgattcagtcctcactgtggctgtgtgtggggggtcagatgacaggtcaccacaacctgattcagtcctcactgcggctgagtgtgtgtgggtgcagatgacaggccaccacaacctgattcagggttcagttgggctaccagccagtgccataaggaaaacctttctggggctcttgagaggggcaaagcataatttgcatgtaggagaaatgttaatagtttgtggccagaggaccagatgtggtttattaaagactgctgcaggttcctactatgcttctcatcaagaggtggaatctaatcacctttcccccttgaatcatggctggtctcagtgatgagtgcgactgggcagtgtggcaggagagatgctctgggacttctgaggggtgatcatgagagtccttacagcttctgcctgggcctcttggacacacaccctgggagaagccagacaaacctgactacctgaygctgccagactgggaggaagtccgtgctggccacgaagagagggctgggtgcctgctccatgtccccagccactagagtccttc

SEQ ID NO: 659774 - DNA, 566 bp, Homo sapiens
cacaacctgattcagtcctcactgtggctgtgtgtggggggtcagatgacaggtcaccacaacctgattcagtcctcactgcggctgagtgtgtgtgggtgcagatgacaggccaccacaacctgattcagggttcagttgggctaccagccagtgccataaggaaaacctttctggggctcttgagaggggcaaagcataatttgcatgtaggagaaatgttaatagtttgtggccagaggaccagatgtggtttattaaagactgctgcaggttcctactatgcttctcatcaagaggtggaatctaatcacctttcccccttgaatcatggctggtctcagtgatgagtgcgactgggcagtgtggcaggagagatgctctgggacttctgaggggtgatcatgagagtccttacagcttctgcctgggcctcttggacacacaccctgggagaagccagacaaacctgactacctgacgctgccagactgggaggaagtccgtrctggccacgaagagagggctgggtgcctgctccatgtccccagccactagagtccttc

SEQ ID NO: 659775 - DNA, 597 bp, Homo sapiens
ggatttcaattttgtgccacccaccatgtgttcatggagcttctcctaatggtccacctccacctcagaactgggtttggggggacaagaaaagtctgatcttgtctctgtcctccacaagctcacagtccttaggggatgcaaattactttgatgtgttggcatttcttttaagggtttggggtwgaaggtaaatcctaaccagctttgttcattctgcctatagaattttctcacccatgctcctagtaccaaggtcatggtggtgtcagccccttaaatctttttcctctgttcatcagtcaactcccttgaactactcatcttcccttccagctggagcccagccctggctcaatctaaccactggcttccattaccgctcctcggggtacagagatggacctggggacatcaagtatctaatccttgtcagactattgtcaaaccctgggctgtttagtctctagagtggtgtgctagttaattttatgtgtcattttggctaggccatagtacccagatatttggcaagcctccatgacttcatgagccaattccttaaaaataatctttctctctctctttcgtttgatt

SEQ ID NO: 659776 - DNA, 403 bp, Homo sapiens
ataggacggtgtggcacctctttcctctctcagccttgctcctactcctgctgtatgaaacatttcattgctgttttcctactggtatgattgggaggcttcctgagtcctcccagaagcagaagccactatgctttctttacagcctgcagaaccatgagccaattaaaccccttttcattatgatcatacagaaaataaagtactgcgaagtggagctatgaaatatcttcaatgacatttccccatcgtcttggctattaacaytggacttcttttaatgcaaatatctgaaggcttcttgaagtttccccctgaaaatggacttctttttcttctgcattgccaggctgcaacaaagatagctgaaaatgtaaagcaggttcagaagtgggtaacagcc

SEQ ID NO: 659777 - DNA, 652 bp, Homo sapiens
gtttaattgactcacagttctgcatggctgggtaggcctctggaaacttacaatcatggtagaaggcaaagggaaagcaaagcaccttcttcgcaaggtggcaggaaggagaagtgccgagcaaagggtgaagagtcaccttataaaaccaccagatctcatgaaaattgactcaatgtcatgagaacagcatggcggaaactgccccccmacttgattcaattacttcccatcagatttctttccataaaacatgtggggattatggggattacagttcaacatgagttttgggtggggacacagccaaaccatatcagtgggtgttagctgtaacattcttttcactactctataggttcaaatttttttaaaataaaaaattggtgtaaaataaataaactaagctgagattaggaccatcctcaactacttggtaggagcaaataaactatgcctgaatgaagagataaatatatgaagtacgaaattacttcatctgtatctcagctgtcactcacaatagtatttgatcacatgcatactgacagcattctgacaattctcattcattgtaattttaaagttgaaataaagttttcagatctgtgatatatttatcaatttaactagttatctgtgaagaacatat

SEQ ID NO: 659778 - DNA, 632 bp, Homo sapiens
taatatcaatcagctaagtcatctattattgctatttatattattcctaatatgtcctcatagtcttggcttgcaaaattctgttatatctgtgtttgtcttcctcagtattccatggcacactctctcattttagcctaatgattattctayttccttgcctttgttcatactgttccatgatctaaaatgttcttcatcctgcgcattcccattatctcatttgtctaaattccagctcttttcatctgtattagtgatcaagtgttgcacaatgaattaataacccaagactttgaaaaacaaacacttattacctcagtttctgttggtccagaatttgggcatggtttaagtgaatactctgcctcagggtctctcatagtgctacaatcaagatgttgccagggttgtagtcttagctgaaggctcagatgaagaagattctacttccaggctcactcacatggttgttcataggattcagtccctcatgaactgttgatgtgaaagcattaattgcacactggcttttggccagatgccactgtcagtgccttggtaccatgagcatgcttctttttttttagtcaaagtgtgcaaactgagaagaaatagagaatgccaaccag

SEQ ID NO: 659779 - DNA, 374 bp, Homo sapiens
cctagtctttttctgaaagtgttatagtgtgaggttttatgtttgtgtctatgattcatcttgagttaattttatatatgaatgagttatgaattgtttatttttgtgcttatgaatatcccattattccaacattacttgttgagaagactgtcccttctccatcacatacatgtgggtctactcttggactctttattctattgatgtgtttgtggaacttgacaccaaaactatactgtcttgattactgtagctgaataaaaktattagaacttttgacattaggtagtattagtactctatctttttttcaaagttgttttggctattctagttctttgcatttccatatgaaatttaatattactttg

SEQ ID NO: 659780 - DNA, 374 bp, Homo sapiens
cctagtctttttctgaaagtgttatagtgtgaggttttatgtttgtgtctatgattcatcttgagttaattttatatatgaatgagttatgaattgtttatttttgtgcttatgaatatcccattattccaacattacttgttgagaagactgtcccttctccatcacatacatgtgggtctactcttggactctttattctattgatgtgtttgtggaacttgacaccaaaactatactgtcttgattactgtagctgaataaaattrttagaacttttgacattaggtagtattagtactctatctttttttcaaagttgttttggctattctagttctttgcatttccatatgaaatttaatattactttg

SEQ ID NO: 659781 - DNA, 662 bp, Homo sapiens
ctatcctttttattaaaagataatactaaaaggttatgtaaaggcaaaagattaaatcatttaaagtaaaattaagggtcctttacaattgaattattgcctacattttataaaactaaaatgagtttattttgttaagtcaagcagtgaaaagaaggaaatactttgcttttatggtcatgcacctctaaaatcactgtccaggaattttccagcactaacatttttcatctacagagaccaaaaatatgcagataaagttagtttcagaaaagattccacaatgtaaccaagctttacatacacaggggaaaaacaagctcgtggattcaatgcaatttttaaaaaatgtggccttataaaactgtcattcagaagctagtaagaactctatctacttagtgctggacattaaaactcttctgggcagatttggtcaaaacaagcaagatctttcacagtaatcagccagaaagctgtgataacttgcagtgagtcctttttcctatgaaaatatttacaatgctacgcaagggttcatatgatgccagcatcttactagctcgaaraaatccaaaaaattttggaaattgggatgtgtaacaaaaatagagacttcttccaacctgtattttttaagcatctagaaggtatccagaatt

SEQ ID NO: 659782 - DNA, 620 bp, Homo sapiens
taaattgatcatttatattaatgtattttaaaagcaattattttattaactgattctaatatactgggtgtgtgggattagcatggtgttacattgtgctggcttaaattaaagctgtgcaaaactatcaaaaatttgatgtattggtaaaatgtcttttctcccatttgtatgaggttttgaaatctaccacattctcagagaattcatattgaccccaaatggcctgggaaatatacattttagaaatgttcatgttraaatgttagcacatatgaaactgagactcttttctcaaggatctctctgatgtctttctacttctttggtatatctgctttgtcatgttatttgtttggctcaagaatctcaggagcatctggttgacattggcctaagaatacataaaccatagatgtgtaggttagcagcattttctactaagcctgaccacatagccacaccatttagttagcatgcagaaagatatcctaatcctggactatactctccaaacatatatgatgtcaaatatactttaaagctacagtaaccaaaacaatatggtattggtacaaaaacagataaagagaccaatggaacagaattgagaacccaga

SEQ ID NO: 659783 - DNA, 620 bp, Homo sapiens
taaattgatcatttatattaatgtattttaaaagcaattattttattaactgattctaatatactgggtgtgtgggattagcatggtgttacattgtgctggcttaaattaaagctgtgcaaaactatcaaaaatttgatgtattggtaaaatgtcttttctcccatttgtatgaggttttgaaatctaccacattctcagagaattcatattgaccccaaatggcctgggaaatatacattttagaaatgttcatgttgaaatgttagcacatatgaaactgagactcttttctcaaggatctctctgatgtctttctacttctttggtatatctgctttgtyatgttatttgtttggctcaagaatctcaggagcatctggttgacattggcctaagaatacataaaccatagatgtgtaggttagcagcattttctactaagcctgaccacatagccacaccatttagttagcatgcagaaagatatcctaatcctggactatactctccaaacatatatgatgtcaaatatactttaaagctacagtaaccaaaacaatatggtattggtacaaaaacagataaagagaccaatggaacagaattgagaacccaga

SEQ ID NO: 659784 - DNA, 615 bp, Homo sapiens
gggtaatttataaagaaaagagatttgtctgggctcagtggctcatgcttgtagtcccagcactttaggaggtcaaggctggtagattgcttgagcccaagagcttgaggaccagcctgggcaaatggccaaaccccacctctacaaaaaatggaaaaaaaaaaaaatgccaggcatggtgactcaagcctgtagtctcagctactcaggaggctgagatgggagaatcacctgagcaaggtaggtctaggctgcagtgagytatgatggcaccactgcattccagcctgggtgacaaaataagaccctgttaaaaaaaaaaaaaaggaaagaagaacgaaagaaagaaagaaagaaaagaaaagaaatttaattggctaatagttctacaggctttataggaagcatggtgctggcatctgctcagcttctggggaggcctcaggaaatgtacagtcatgatggaaaatgaagagggagcaggcacatcacatgtcaaaagcagagaaagcagggggagggggagaggaggagaggtgccacacacttttaaacaaccagattttgctagaattcacccactattatgaggccagcaccaagagaatgccattc

SEQ ID NO: 659785 - DNA, 329 bp, Homo sapiens
cattacaaattccataggaaagaatgcattttaagcatcatctttgcattgccacatacatttagcaaaatgacttacatacggtaggaactcaaaatttaatttaagaagtttttttttgacttatctctgagygaaaataatggattgctaaatgaaaaccaaacaaattaggagtcatcatatccagaattctgtcatttccaaaaatataatcattgtatgtctgcttttggttattgtctatttgggtagctattttgcaaaattaaatgaaaaatataggtataattgtgtactcttggttttgcttttttccattcaattat

SEQ ID NO: 659786 - DNA, 561 bp, Homo sapiens
  misc_feature 1, 2, 3, 4, 5, 6, 7, 8, 9, 10, 11, 12, 13, 14, 15, 16, 17,18: n = A,T,C or G
nnnnnnnnnnnnnnnnnntgctgtcttcttgccagttttactatgctctttgctgtctttggttctctgaagacacatgccaaagtgccttggtgtgcttatatttatctagcttttgttttgtttgtcttctgaatctgtgtattgacttctttttatctatttgtgaaaattcttagccatcatctctttcaatatatcttctgttcattccctttcttagckgtgcttgggttgggactcaagtttgaagttttgtatttctcagtgtaacacctttttctcttattctcatatatgttttttccaaacttttgtctctccaatcatcattctagaccttttttactgagccatctttctattcactaattctttctttagctgctttttaatgtgttgttaaacccaactttacgtttcataaatatttatttgtctaatttctaaatggaacattttataatctattatctcagatataccctgatgaaagtttcaattttgtatcttatattcatatacatagcaaacttaattaatgtctgtattagaaaattc

SEQ ID NO: 659787 - DNA, 459 bp, Homo sapiens
aggttaatggattaatgagttatcatgggaggagaactggcggctttataagaaaaagaagaaagacctgagtgagcacattagcatgctaagtccccttgccatgtgatgccaccttgtgatgccataaatagtccccaccagcaagaaggccctcactagatgcagcacctcatccttagactcctgagcctgcayaactgtaagaaatatatttctttgctttataaattacacagtttcgggtattctgttgtaagaacagaaaatgggctaagacaaaataaataaacaaaatgtggtatatacattcaaggaaatacaattcaaccttaaaaaggaaggaagttgcgatacatgctttaatattacataccttgaaaatattatgctaagtgaaataagccagatgcagaaggacaaatattgtggctactatgccactggaaacatgaagtc

SEQ ID NO: 659788 - DNA, 581 bp, Homo sapiens
tggtgggtagaaagctggtgacccttgttatgcagggacaaagcatctaatgacattgtcatctgcagcatcttgggatgaagaacacagggcatgaccaacattaggggaaatgatcagaaaattcagaatgttgatgttttgttgttgacacttgacactttcagcgaagtcctcatgagagaggccaatttatgctagaggcggctggacatcaagcaaaaatgaaagagaaccagagctccgctaagttagatcctctcatgacaggaacatcctcatggctcacatagtcaacttgaagtgaatatgagttatcttgggactttgcaagtttgataaagccaaaccttatccaaaactgaaacggtgagaagaggtggctccaaatagactgcaaggggaggagatagaactgtgtgatcctattttgctaagtcttctcacatayggaattttctgccaaaaaatgagagaccagaataaggggatttacttcccgcaaagactatgttactgaaactcccaagggagacaccattaactcgagaggacttttggcagtacccagaggccaggaa

SEQ ID NO: 659789 - DNA, 581 bp, Homo sapiens
tggtgggtagaaagctggtgacccttgttatgcagggacaaagcatctaatgacattgtcatctgcagcatcttgggatgaagaacacagggcatgaccaacattaggggaaatgatcagaaaattcagaatgttgatgttttgttgttgacacttgacactttcagcgaagtcctcatgagagaggccaatttatgctagaggcggctggacatcaagcaaaaatgaaagagaaccagagctccgctaagttagatcctctcatgacaggaacatcctcatggctcacatagtcaacttgaagtgaatatgagttatcttgggactttgcaagtttgataaagccaaaccttatccaaaactgaaacggtgagaagaggtggctccaaatagactgcaaggggaggagatagaactgtgtgatcctattttgctaagtcttctcacatacggaattttctgccaaaaaatgagagaccagaataaggggatttacttcccgcaaagactatgttmctgaaactcccaagggagacaccattaactcgagaggacttttggcagtacccagaggccaggaa

SEQ ID NO: 659790 - DNA, 547 bp, Homo sapiens
cacttacaccgcttctcaacccggtacgcaccagaaaatcattgatatggccatgaatggcgttggatgccgggcaacagcccgcattatgggcgttggcctcaacacgattttacgtcacttaaaaaactcaggccgcagtcggtaacctcgcgcatacagccgggcagtgacgtcatcgtctgcgcggaaatggacgaacagtggggctatgtcggggctaaatcgcgccagcgctggctgttttacgcgtatgacagtctccggaagacggttgttgcgcacgtattcggtgaacgcactatggcgacgctggggcgtcttatgagcctgctgtcaccctttgacgtggtgatatggatgacggatggctggccgctgtatgaatcccgcctgaagggaaagctgcacgtaatcagcaagcgatatacgcagcgaattgagcggcataacctgaatctgaggcagcacctggcacggctgggacggaagtcgctgtcgttctmaaaatcggtggagctgcatgacaaagtcatcgggcattatc

SEQ ID NO: 659791 - DNA, 583 bp, Homo sapiens
gatgtagcagtttagaaacacactttctgcagaatctgcaagtgcatatttggacctctctgaggaattcgttggaaacgggataatttcagctgactaaacagaagcagtctcagaatcttctttgtgatgtttgcattcaaatcccmgagttgaactttcctttcaaagttcacgtttgaaacactctttttgcaggatctacaagtggatatttggaccactctgtgtccttcgttcgaaacgggtatatcttcacatgacatctagacagaagcattctcagaagcttctctgtgatgactgcattcaactcacggagttgaacactccttttgagagcgcagttttgaaactctctttctgtggcatctgcaaggggacatgtagacctctttgaagatttcgttggaaacggaatcatcttcacataaaaactatacagatgcattctcaggaactttttggtgatgtttgtattcaactcccagagttgaactttcctttggaaagagcagctatgaaacactctttttctagaatctgcaagtggacgtttggagggctttgtggtttgtggtgg

SEQ ID NO: 659792 - DNA, 583 bp, Homo sapiens
gatgtagcagtttagaaacacactttctgcagaatctgcaagtgcatatttggacctctctgaggaattcgttggaaacgggataatttcagctgactaaacagaagcagtctcagaatcttctttgtgatgtttgcattcaaatcccagagttgaactttcctttcaaagttcacgtttgaaacactctttttgcaggatctacaagtggatatttggaccactctgtgtccttcgttcgaaacgggtatatcttcacatgacatctagacagaagcattctcagaagcttctctgtgatgactgcattcaactcacggagttgaacactccttttgagagcgcagttttgaaactctctttctgtggcatctgcaaggggacatgtagacctcyttgaagatttcgttggaaacggaatcatcttcacataaaaactatacagatgcattctcaggaactttttggtgatgtttgtattcaactcccagagttgaactttcctttggaaagagcagctatgaaacactctttttctagaatctgcaagtggacgtttggagggctttgtggtttgtggtgg

SEQ ID NO: 659793 - DNA, 416 bp, Homo sapiens
gattgtaaaggaatgaaatgaaatggaatggaatggaatgcaattgaatcaactcgattggaawggaatggttgcaatggaaatgaaaggaatggaatggaatgaaatcaacccaaatggaatggaatggaatggaatggaatttaatggaatggaatggaatggaatggaatcacccagagtataattgaatggaatggaatggaatggaatggaatggaatggaatggaatggaatggaagggaatggaatggaatggattcaaaccaaatggaattgaatggaatggattggaatgcaatggaattgaatggaataaactgaagtggaatggtatagaatggaatggaatggattggaatgcaatggaatgggaaggaatggaatcaactagaatggaaaggaatggaatgga

SEQ ID NO: 659794 - DNA, 416 bp, Homo sapiens
gattgtaaaggaatgaaatgaaatggaatggaatggaatgcaattgaatcaactcgattggaaaggaatggttgcaatggaaatgaaaggaatggaatggaatgaaatcaacccaaatggaatggaatggaatggaatggaatktaatggaatggaatggaatggaatggaatcacccagagtataattgaatggaatggaatggaatggaatggaatggaatggaatggaatggaatggaagggaatggaatggaatggattcaaaccaaatggaattgaatggaatggattggaatgcaatggaattgaatggaataaactgaagtggaatggtatagaatggaatggaatggattggaatgcaatggaatgggaaggaatggaatcaactagaatggaaaggaatggaatgga

SEQ ID NO: 659795 - DNA, 416 bp, Homo sapiens
gattgtaaaggaatgaaatgaaatggaatggaatggaatgcaattgaatcaactcgattggaaaggaatggttgcaatggaaatgaaaggaatggaatggaatgaaatcaacccaaatggaatggaatggaatggaatggaatttaatggaatggaatggaatggaatggaatcacccagagtataattgaatggaatggaatggaatggaatggaatggaatggaatggaatggaatggaagggaatggaatggaatggattcaaaccaaatggaatkgaatggaatggattggaatgcaatggaattgaatggaataaactgaagtggaatggtatagaatggaatggaatggattggaatgcaatggaatgggaaggaatggaatcaactagaatggaaaggaatggaatgga

SEQ ID NO: 659796 - DNA, 312 bp, Homo sapiens
ttccatttcatggcattccattccataccattccattccattccattccattccattctattccattccattcccgtttattctattccattcaaataaattccattttatttactccattccattccattccwttccattgcactcgcattgattccattgcattccattccattccattccattcccctccattccgttccattccattccatttcactcacattgattccattccattccattcaattccactccattcgattccattacattcagttcctttccattcctttcctgtccattccgctc

SEQ ID NO: 659797 - DNA, 302 bp, Homo sapiens
tttcagtccttgtgaatgaactgcaacctaactcaataggtacacaagactaaaacctaacttaggaatatgcgcctgtaacaatcgctgagtcttggccaattccagcagccatacttcaactagtcgcatacagctgagtgttcaaataaggcaagtgccaaggccataaccaatccagctgtttctgtacctcacttctgatttctatrcgtcactttactttgtattgtctataaattcattctgatcatgagacacccctggagtctctctgaatctgctgtgattgtgggggcttt

SEQ ID NO: 659798 - DNA, 450 bp, Homo sapiens
atactctaagacctgaggcaagtcaggagagagggaagaggaaatgaataaagagaaagaaagaatgaggagagcggaktgtacatggaataaataaaaaagcatatgcagaggtaagtaagagaggatagtaaaggcaaattgatctgtagaagaaggaagaacatggtgttagaaacaggaaagaagataaagtgagcttccagtaccaaaatgtgtcagagaattacagtaacattttccttctcttgctgtcatcctcactactggggaggcattaaggattgaggcacctcaccacacagacctgtgttttatctaccatagatgaacatcaccaaagatggtcagccatgtatggctataatttgtttttatagaaaatgttgtaacctcataggatagtatcatataggccaaattaacataattgaatagtgttgggtgatt

SEQ ID NO: 659799 - DNA, 429 bp, Homo sapiens
ccattctaagtgtaggtattaggaaccatatgtgcttctttttttctcttctgtatctcggccaccaccatgtgraaaagtccaagctggcttgcgggaggatgagataccacaggttacagagaaaagagcttgcaacaagtctcctcagcagagttcatcctggacaagttcacccccagccaatccaccagctgactgcaaattcaagattgaatccagctgggaagagtagaagaactactcagtgtgatccacaaacttgtatataacacatgcttatagtatcaggttggtgcaaaagtaattgtggttttgcaactaaaagtaattgcaaaaatcgcaattacttttgcagccaaccctgatattagccactaaatcttgagttctttttaacgcagcaatggctaaatagcacacaccaag

SEQ ID NO: 659800 - DNA, 597 bp, Homo sapiens
tttttttgttccatttctcaaggggaatgcttccagcttttgcctactcrgtgtgatattggctgtgcgtttgccagaaatggctgttattctgaggtgtgttcccctggtgcctagtttgttgagggttttaagttgtgaacggatgttggattttattgaagactttttcatgtctattgaggtgaccatatagcttttgtttttaattctgtttatgtggtaaatcacatttattaatttgtgcatgttgaaccaaccttgcatcccaggaatgaagcctacttaatcatgtggaattaacttttctatgtgctgctggatttggtttgctaatattttgagaatttttacatttatgtttatgagagatattggcctgtagtgtttttgttctgttgtttttgtgtctttgccagcttttggtatcagagtgattctggcttcatagagtgagccagaatttatactccttggtttttttgaataggttcagtagaattagtagcagctcatctttgtacttttggtagaatttggccatgaatccatctggactggggcttgctttggttggtaggtttttttaaattgttc

SEQ ID NO: 659801 - DNA, 610 bp, Homo sapiens
tctgcatttttttaaaagatatctatttccttggtaaatttctcatccatattctgaacttttttgtactgtttttcatatttctcttgcacctcattragctttgttaaaatcaatattttggtttatttatctggcattttgaggcattcttttttatttggatctgctgccatgcaattgttgtgtggtgtcaaaaatccctactttttcatgtttcctacgtccttccattgatatctgtgcatctggtatagcagtcaccttttcatttttttgttcacattaataaaaaatttactttctatataattgttacagatttcaataattttattcttttcactccctcttcttgctctaaatgccattttaaattattaactatgtattgaagtcagctccattgtatgccccttgtagttccaaagatttctttttctttctttttttttcacttatactttaagttctagggtacatgtgcacaatgtgcaggtttgttacatatgtacacatatgccatgctggtgtgctgcacccattaactcgtcatttactttaggtatatctcctaatgttatccctccccctccccccaccccacggc

SEQ ID NO: 659802 - DNA, 610 bp, Homo sapiens
tctgcatttttttaaaagatatctatttccttggtaaatttctcatccatattctgaacttttttgtactgtttttcatatttctcttgcacctcattgagctttgttaaaatcaatattttggwttatttatctggcattttgaggcattcttttttatttggatctgctgccatgcaattgttgtgtggtgtcaaaaatccctactttttcatgtttcctacgtccttccattgatatctgtgcatctggtatagcagtcaccttttcatttttttgttcacattaataaaaaatttactttctatataattgttacagatttcaataattttattcttttcactccctcttcttgctctaaatgccattttaaattattaactatgtattgaagtcagctccattgtatgccccttgtagttccaaagatttctttttctttctttttttttcacttatactttaagttctagggtacatgtgcacaatgtgcaggtttgttacatatgtacacatatgccatgctggtgtgctgcacccattaactcgtcatttactttaggtatatctcctaatgttatccctccccctccccccaccccacggc

SEQ ID NO: 659803 - DNA, 598 bp, Homo sapiens
gttgttgtagtgtgaaaacacccatgtacaatacataaacaaatgagcatggcgtcattccaatgaaayttaattacaaaaacaggtggcaggctggatttggcccatgggccatagtttgccaccctctggactatgatgtctgcaagggaagaatgcttgtcctctgtcctgctagtgaatcattagtaaactcggtgttaggtaagacatataaactgtgtggtttgattgatcatcgaactcacttcttcccttagagtctctcgaatgttaaacacaatgtgcataatgtggacgcaatacctgtaagtcaacttgtcaacagatattaatttaattccaattgttggcctacattacacttgatgttccacattcatggattcaaccaacagcagataaaaatatttttaaaaaggaaggtagtgtctgtactgaacacgtacagacttttttcttgtcattgttacctaaacaatacattctaacaactatttacattgcatttatatagtattaggtattagaggtaatctagacatgatttaaagtatacaaaaggatgtgtgtatgttatacagaaatactacaccat

SEQ ID NO: 659804 - DNA, 606 bp, Homo sapiens
ctctttttgcccaggctggagtgcaatagcgcgatctcggctcactgcaacctccacctcctgggttctagtgattctcctgcctcagcctcccaagtagctgggattacaggcatgtgccaccaagcccggctaattttgtatttttagkagagatggggtttcaccatgttggtcaggctgtcttgaactcccgacctcaggtgatccacccaccatggcctcccaaagtgctgggattacagatgtgagccactgcgcccagcttaattaactctttaaaggccccatatcacaaaataatcacattctgaagtactaggggttaggtttcaacatatacattgtttttccaggtgtggggggaggcaattcagctcatatcaatcaccctaccttgacatatcacccagatatattatgagccctacattttaatcaaattggaaaaactcaattttcctaaacaagccaatattttattgccttctcacttttggaaaatacattctttctccatttttctttgtcataattttactcatccttcaagagtccactgcttcatctgagggcatttttgatctacttgtctagaagtaacca

SEQ ID NO: 659805 - DNA, 606 bp, Homo sapiens
ctctttttgcccaggctggagtgcaatagcgcgatctcggctcactgcaacctccacctcctgggttctagtgattctcctgcctcagcctcccaagtagctgggattacaggcatgtgccaccaagcccggctaattttgtatttttaggagagatggggtttcaccatgttggtcaggctgtcttgaactcccgacctcaggtgatccacccaccatggcctcccaaagtgctgggattacagatgtgagccactgcgcccagcttaattaactctttaaaggccccatatcacaaaataatcacattctgaagtactaggggttaggyttcaacatatacattgtttttccaggtgtggggggaggcaattcagctcatatcaatcaccctaccttgacatatcacccagatatattatgagccctacattttaatcaaattggaaaaactcaattttcctaaacaagccaatattttattgccttctcacttttggaaaatacattctttctccatttttctttgtcataattttactcatccttcaagagtccactgcttcatctgagggcatttttgatctacttgtctagaagtaacca

SEQ ID NO: 659806 - DNA, 516 bp, Homo sapiens
ttttatgtcatttttctattgattccaacatttattaattttttcwacttatttttgatttaatttgctttacttctagtttctcaagttggaaactaaggtaatttggttgagacctttattattttctaatacaatcatttaaagccatttaatttcctctaagcacttctttagctatgagccgcacaattagatatgtcgtgttttagttataacttaggctgaaatactttttaatttttttaattccctgtttgatgtgttatttaaagtggtattactaaattgtcaaatatttgggaattttctggataccttaatgccactgatttcttatttaaaatccttattgtctacaaaagagtcaaactctgtaaaatatttgaagagatttattctgagccaagtatgagtgaccaatgacctgtgacacaactctcaggagatcctgagaacatgtgcccaaggtggttgtggcacagcctagttttatacattttagggagaaattag

SEQ ID NO: 659807 - DNA, 539 bp, Homo sapiens
atttcactcaactgcataaacacacagacccaacacacttaccctcttcacagttctcagctcagctggacttggggccaggctataatgttataaatgttttaaatgaggagccaaccctcttgggtcctgtaaacatgtccagttttccctgatcagacatcggagtctgcttaggtctgtcataggtgaataggtttgttcccagcctatccaactcaaaccctctaggaacttatttgaaaaccacagaacatcattccatgcttgattttgcactaagatctttcagtgggttgaaacatactgcacttaagagcaagtgttcctagctcccggcccagctccacgcctgaggaggctgcagagggcatgccattctcattaacaatgcaccattgccaatgtctcttcytgaaataggctcaccttgtttcagacagaagaagggggtcagacacaagcaataccttggccactctatctcctgggaaaatgcttgcttgcaaactgaggaaggacacaaataagcattaata

SEQ ID NO: 659808 - DNA, 583 bp, Homo sapiens
gtcaaaagtcaaaaagagtgaattttgaagaagcaagacaatgctgaaagagagaaattctcaaccaagaatgcaatttctggaaaaaaaatttcttcaaaaatgaagaatagataaagactttctcaagcaaaagctgagagaracaacttcatcaccactagatttgtcataaaataaatgacaggtgagctctttaactcaaacaaaataatactaaatagcaaaactaagcataactaagcatattaaaatataaaacttactggaaaagctaattatttaaacaaatacaaaattgtgcaacattgtaatggtggtgcacctttttctaatatgaaagtcaaaagacaacaaagtagaaattactataactacagaagtataatagtagatatacacatataaaagatgtaattgtgacatcaataacaaagtgggagaagtgcagaattttttatgtgattaaagttgagttgttattagcttagaataaactttgcctccatatatatgatgttttacataagccccaaggtaaccaaaaaaataaaatactacagaaaatatacaaaagaaaaag

SEQ ID NO: 659809 - DNA, 583 bp, Homo sapiens
gtcaaaagtcaaaaagagtgaattttgaagaagcaagacaatgctgaaagagagaaattctcaaccaagaatgcaatttctggaaaaaaaatttcttcaaaaatgaagaatagataaagactttctcaagcaaaagctgagagaaacaacttcatcaccactagatttgtcataaaataaatgacaggtgagctctttaactcaaacaaaataatactaaatagcaaaactaagcataactaagcatattaaaatataaaacttactggaaaagctaattwtttaaacaaatacaaaattgtgcaacattgtaatggtggtgcacctttttctaatatgaaagtcaaaagacaacaaagtagaaattactataactacagaagtataatagtagatatacacatataaaagatgtaattgtgacatcaataacaaagtgggagaagtgcagaattttttatgtgattaaagttgagttgttattagcttagaataaactttgcctccatatatatgatgttttacataagccccaaggtaaccaaaaaaataaaatactacagaaaatatacaaaagaaaaag

SEQ ID NO: 659810 - DNA, 537 bp, Homo sapiens
gcttccccttctgccatgatattaagttttctgaggcctctccagccatttggaactgtgagtcagttaaacctctttcctttataaattacacagtctcaagtatgtccttatagcagtgtgagaatggactaatacaggcacctaggttgattcatgtcttttctattgtgaatagtgccgcaaagaacatgcaagtgcatgtgtctttttggtagaatgatttgttttctttttgatgtatacctagtaatagaattgctgggtcaaaagtagttctgtttgaagttctttgagaaatttccaaaccactttccacagtggctaaactaatttacattcccaccaatagtgtrtaagcattcccttttctcaacagcctggacagcatctattgtttgattttttttttttttttttgagacggagtcttgctctgtcacttaggctggagtgcagtaatatgatctcggctcactgcaacctctgcctctcaggttcaagtgattcttctgcctcagactcctgagtagctgg

SEQ ID NO: 659811 - DNA, 577 bp, Homo sapiens
acatcttcatcaagaaagccttccttgtttctacccatttcattytactgtccaaggaaacaaggtagttctttgtctcttaagtgcctcaatatttgaaaattaattattccagatagccctagggcagcatagactagtgcagggttcttggacttttttcatcataaattcctcttacaatttaaaaacaaataaataaataaaaagccctctctgctcagaaaaatgcattgtgcacctacatgcaattttgtgttcactttcaggggagttatacatctgaggactctattccttcatataccaactattgatcaaatgtctattacatgccaattactgtgaaggtgtgaacaaatctttactggcctagggaaaaaaaataccccttaggaagcagggagaagccctggggtcttggacccacccaactaatataagattggatgaccttcccaggcatattacccttatttctgtgtctcagtttcttcacttgttaaatgtcactcactacttgccttatctacttaatgaattcattatgtgaagaaagatgtaaaaaatgaattca

SEQ ID NO: 659812 - DNA, 577 bp, Homo sapiens
acatcttcatcaagaaagccttccttgtttctacccatttcattctactgtccaaggaaacaaggtagttctttgtctcttaagtgcctcaatatttgaaaattaattattccagatagccctagggcagcatagactagtgcagggttcttggacttttttcatcataaattcctcttacaatttaaaaacaaataaataaataaaaagccctctctgctcagaaaaatgcattgtgcacctacatgcaattttgtgttcactttcaggggagttatacatctgaggactctattccttcatataccaactaytgatcaaatgtctattacatgccaattactgtgaaggtgtgaacaaatctttactggcctagggaaaaaaaataccccttaggaagcagggagaagccctggggtcttggacccacccaactaatataagattggatgaccttcccaggcatattacccttatttctgtgtctcagtttcttcacttgttaaatgtcactcactacttgccttatctacttaatgaattcattatgtgaagaaagatgtaaaaaatgaattca

SEQ ID NO: 659813 - DNA, 577 bp, Homo sapiens
acatcttcatcaagaaagccttccttgtttctacccatttcattctactgtccaaggaaacaaggtagttctttgtctcttaagtgcctcaatatttgaaaattaattattccagatagccctagggcagcatagactagtgcagggttcttggacttttttcatcataaattcctcttacaatttaaaaacaaataaataaataaaaagccctctctgctcagaaaaatgcattgtgcacctacatgcaattttgtgttcactttcaggggagttatacatctgaggactctattccttcatataccaactattgatcaaatgtctattacatgccaattactgtgaaggtgtgaacaaatctttactggcctagggaaaaaaaataccccttaggaagcagggagaagccctggggtcttggacccacccaactaatataagaytggatgaccttcccaggcatattacccttatttctgtgtctcagtttcttcacttgttaaatgtcactcactacttgccttatctacttaatgaattcattatgtgaagaaagatgtaaaaaatgaattca

SEQ ID NO: 659814 - DNA, 571 bp, Homo sapiens
ttagtttcttatggggatcttattattgaatggtattttgaaactctgatagagtaataggatttgaagacatgtgattacaaatgtgctcacaaattgaggtcaaatgtaagatgattagtcaagttatatctaatgttgttataatcctgtgctatttagaaatgtcaactgagtagtgacttagaaaaaaattgacactccattttcttatctttcttttaaatgtcatactgaagagsaaaatacatgtgggccagagggtattttgagttgtttttgaactaaggtttttatatattgaagtcaatatatactttggtctcatttatatgataacataacaccttatttcaatgaaacatagaatattaacacattgaaacatagcataaaaagggaaagctctagagagggggcagtgaaagaggaagtttaacccttcagtgcttcttcatgggtcattgaagctgtgatgtcagttttccaatgtacactcaactgggatagactgctagaaaaaattatcctttcataagtcctctattacttgtttttttttgttttgttt

SEQ ID NO: 659815 - DNA, 577 bp, Homo sapiens
acaacatgtgggaattcaagataagatatgggtggggacacagacaaacaatatccattactgtagccttattatatagtttgaaatcaggtaatgtgatgcctccagctttgttctttttcttaggattgctctggctattctggctctttgttagttatgcatgaattttacaatagtttttttttttttattttgtgaaacgtgacattggtagtttaatagaaatagcatttaatctgtacattaatttgggcagtattaccatcataatgatattgattcttccaatccatgagcatggaatttttttttcatttgtctgtgtcctctatgatttctttcactagtgtcttgtagctctctttgtggagatctttcaccttggtaacatgtattcctaggtattttacattcatgtgtgtggctattgtaaatgagattgcattctttatttggctttcaggttgaatgctattggtgtataataatactamtgatgtgtttacattgattttgtatcctgaaactttagtaaagtcactaatcagttctgcaagccttttggtgaagtctt

SEQ ID NO: 659816 - DNA, 580 bp, Homo sapiens
tttccagcttcatccatgtccctatgggattgttttcttgattttatttttggattgttcattgctagttcatagaattacaayagatttttatatcttgatgtctggcagaagcacagttatttactctgaactgattttttagttctaatcttcttttagtggtttccttaggagtttctataggatcctgtcatttgcaaagagatagttttacttgttcctttccaatctggacgcctttatatttttttcttgtgttatttccctggctaaaacctccagtgtaatgttgaatagaaatggcaagagcagacatcttgtcttatccctgaccttattcctgactattacttataatgtgaacagtggattttttttttatggaggcccttcatcaggttgagaaaattcctttctatttgtactttcttgagtgtttgtttttttttttaaatcaagaatgggtgttatgggtgttggattttgtaaaaatgccttttctgcatctattgaaaggagcatgttgtggtggatttgtcttctattgataattgttaccacactgattaactttcag

SEQ ID NO: 659817 - DNA, 571 bp, Homo sapiens
tagcacgatccttgacatctagtctgtgctcccatcctcttccctgattctatttgtcttcttggagtccagagaattttacactctattggaattaatttgtcttgactcctccttcctcagctgtgcatgttgttgatttcctgtctgaactgcagctgctcttaccatactcttgtgagcactttcctgtttagataaaattgaccttactcctacaagcctttgctctttctctttagttatcttccctaaatgacatgttggtggtattctcatatctgggtcaatttttgtgtgcagttttgcagaatagagttcttcgtccctttccttggactgtagaattttgggtctagtaatgatgaaaaccatatctcacttctgtctctaggtgcagctaagggatctcttttctcagcccttgtttgtttcccagtgtgggcattttcttgcctgctctatctacctttctsttacatatctagatgctcttgtgatctgacggattgaggacaaatcagctaaccaccctaagttagtgggtcttttagcctataagacataacag

SEQ ID NO: 659818 - DNA, 277 bp, Homo sapiens
tgtttgtaaaaaacaaaacagagtgtgctgagaaayaccaatttgctgcaaagccagtctttctgcattttcaccgttttcagtaataacggtttagcgtgaagatctatagatgagatacttattgcatcctattgtctaccttttaggcccacctttgcatgccagccaaccaactgcattccggggtaacctcattatcactcatcttctaccccagtgcctttctgctgctgccatgtgggatgccacatttgatgtttgcataaacctggaa

SEQ ID NO: 659819 - DNA, 576 bp, Homo sapiens
ctcacctgtcagatttgatcttaatggagatcaaatttcaacataaagtttagaggggtcaaacatccctactataccaggagccagtggtgtaagtcctgatctgagtccacagacccaagaaccaagattgctgatgtctgatgtcacggaaaactggatgtaccacctcgagcagaaagaacatctactttttgtctgcccttttgtcttcttsaagtgctccgcagattgcataatgcccagctgcattgataaaggccatctttgctcagtctaccaatgcaaattctactgtcttctggaaacattcttacagagacacagaaataatgttttataagatatttgggcatcccttagcccagtcaatttggtacataaaattaaccatcacatattgtatacaatttatttatgtgtctttatccatttttttaattttttcaattataagttcgacaagatataaattctcattggttttgtagcttaatatatcccaaatgcctaaatgcacccagcttatagtaaatactgaacatatatttgttgaattaatgataaattcaatta

SEQ ID NO: 659820 - DNA, 626 bp, Homo sapiens
acatttttgtggtaattttttctctttcttcctctccttccttacctctcctctctctctctatttgttttttaatttttgtgggtagatattaggtgtatatatttatggggtatatgaaatgttttgatatagacatgcaatgtgaaataagcacatcttgaagaatgggtattcgtcccctcaagcatttatccattgagttgcaaacaatccaattacaacctttaagttattttaaaatgtacagttaagttgttattgactatagtcaccctgttgtgctatcaaatagttggtcttattcattcttctattttttgtacccattaatcatctctaccacccctccagaccccactacccttcccagcctctagtaatcatccttctaccctctatgtccatgagttcaattgtttcaattattagatcacacaaataaatgagaacatgtaatgtttgtctttctgacttatttcacttaacatratgacctccagttccatccatgttgttgtaaatgacaggatcacattattttttaaagctgaataatatacccttgtgtataaatactacattgtctatatccattcattgatggacacttaggttgcttccaa

SEQ ID NO: 659821 - DNA, 543 bp, Homo sapiens
atgctactaccgttcttactacctggaaacacaagctagtaatttcatggcggttcaattggaacagtagcaaatttcatgaagcagctaaaaagaagagcaacagctggtacatcaggcattaataatataacaaaggaagaaaaaagagaaatttttcattagtactttgtgatgtcgatttattatttatccctttgccagtattcaaacagacaggcagtcataaaacattaaaaaagatcctttaaaacggtcaggcatctgttttacctcagttcctttttagaaacctggaaatcaggagccccggcttttatgctatagcaagtttgacacttgctgtatcaaaaaaattgcttgaggatcactacgtagaaagagttttgtttaaattttatgaaargctggttaggcaggcagacaatggtttgtaaggcaagatccagtgtaaatcagcaatgtgctgtttccaactgtttgactcctcagttcatattctgaaaccagggcgttgacaaaacccactgttcagtaattagc

SEQ ID NO: 659822 - DNA, 546 bp, Homo sapiens
agaaaaaaagaagaaaatttttgctatctagggcttagtgatgaatccttatatgtgacatcaaaagcataatccataaaaaaattgtaatattggacttcatcaaaattaagaaattttgctctgtgaaagactgttaagcagattaaaatacaagctacagactaggagaaaacatctgcaaaccacatttctgactgagaatcaatttagaatatgtaaagaagtctcaaaactcaatagtaataaaacaatccacttagaaaatgggcaacagacatgcagtgacatttccctaaagatgatacacagatggcaaataagcacatgaaaaaatgttcaacattgctagccattaggaaaatgtgaattaagaccatgatgagatattactacataccaattagaacagctaaaatttttttaaaaagtgacaatagcaaatactagtgaggatgaagagaaactggatctcacacattactggtgagatgcaaatagtacaaacactctggaaaacagwgtggcagtttctttagaagctaa

SEQ ID NO: 659823 - DNA, 606 bp, Homo sapiens
tttggtgggagggttcctctgcaatacactagcctaccattaccagaagatgaaaatgtctgttataaactcttaaacattcaccatttgttaaataaatttttttctctaagaacagttagcaagaaaccctgaaatgcaawcctgaactgtaaattgtgttaataaaatttgttaccaaaaacagaaattaggaaagaaaatgagggagagagggaagagaggataaatgattttaccagagaaattggagaaagcaaaagaggaagaggaagaagaaaaagaggataccaaggaagagttgagacaacagatcattacagatctccagataggtttcatcttgaggctgtatctccacttttctgatttttcatatcctatatctttcttgtatttgtcacttcctgtcccttcaactaaactgtctgaaaagttcatggccagcccagttactggatgcaacccaacattctttattcagactcttttgggctacagatataacacatgtatggcctgcacttgtatgtactccagctgagactgaactttctccttttttccttctctacctgtgaccctctttcaggcctttcttggtgt

SEQ ID NO: 659824 - DNA, 615 bp, Homo sapiens
acaatgtgtcttgagatattaactggtgatagtatggaaccaccatgtttagaaagtgtcaaaagtgtgaaaagacaaagttacaacaaatttagcttaaagatcttaattggctttatttgcaaacgtcagatcaagcaacatttcattccataaaacagaatgagtgttctgatgagctgagcagaggagttttcttttaaagccagaaaagggctgagaaaagcagaaacagaatacaaaaagtcggttggtcatttcaaagttactttttttgtaaaagataaacaaaggagatgttttaaaaatcatgctggctaaaactggcctgtttgakgacttggctattatctccctctgtctcctgacttcttagaaggtctgatagacaacttagtttcagtttggtgatgtggaacttcagcatgagtgactccattttggtctgttggcctggtgcagcagctcagttcaaatcaatggccccctataaattttatttaatagaagaaattaaatactaagcatatataaaatgaaaatattccatatactttttctttcagtgattgggaaatacatgtatgttaaaggcaattaattcttgacctggta

SEQ ID NO: 659825 - DNA, 589 bp, Homo sapiens
taactattatgggagctaatgtgtcccaggccttcatctccaagcccttagtgaacgatatgattgtttttaatcctcataccaaccagaaaggaagtatggttattatccccattttatggatgagctcagaaaggttaaaaaacttgccaaggtcacacacaccctagcaaatctccatggcaggggcaaccaaagtaacggcgcataccagtcttccatggagagtgttgcctgcctaccaatggtttagtgactctgaccaagccatttctgaagggtgctgatctgtttccacttggcaaggtccccagaacagcccagagtgcaggctcaaccttaccaactttttgcatggggcatggaatggtggaagctggrcaaagtaaaggtgacccctgaagctttggatctgagtgtggacaaggctggtgccacagcacctgatcaccaactctgatatgcatgaacctaccaccatgcctgcttgactcactcgtctggtcatgatcccggctaaatgggtcatccccaccactcactgaccctccgtggttccaggagcctgctgagagacagcctggactgg

SEQ ID NO: 659826 - DNA, 443 bp, Homo sapiens
caggctccccagaatgccaggtagaccgtgtcacatggcaagagttcatgaaactatttagtatagcagggcagtgattcagaggttgcgcaggaatcaataacactgaacacaactatgctagagaaatgttcccctggtgtggcttagtgccctagccagacacactccaaccagcctgtgggtgttatggaacatagcctggataatgcccctaagaaaacaytgccctaatcatgtccccttccatgttaccatgcttcttctcaagagcccctcagaaaccacatttgaatccctgtcaccccagtgtgcaatggaaacccacccccatgtctgcaaggccagctacagcaactgctgctgagttacatgcctactgcccagagtggggaagtagccccacaaaataaaatgtgattttataaggaactaaaatcaat

SEQ ID NO: 659827 - DNA, 520 bp, Homo sapiens
ctatttcattttgtatagctgaataatgttcatatatatmtatatatttcattattcaatgatctgttaatggacacttaggttgatgccatatctttgctattgtgaatattgctgcaataaacatactagttcagttatcattttgataaaatgatttctttttctttggttgatactcagtagtggagtttatggatcaaatgggatagttctatttttagctgtctaagaagtctccatagtgttttccatagagtttgtactaatttacattctcaccaacattgtatacacattcccttttctctgcattctcacaaatatttgttatattattgtatacttaataatagccactcgtaatgatgtacaacgatatcttattgcggttttaattgtaatttctctgacgatttgtaacattgagcatttctttttggtctgttggccattgtatgtcttcttttgagaaatgtctattcatgtcctttgtctacttgttaatggagttttttgt

SEQ ID NO: 659828 - DNA, 442 bp, Homo sapiens
ttccttcaaagatggcataagaaatttggattttcaaactttagttttctcatcttagagtttgargtaattttatttgtcagctgccagaaaataaaaagaacacataaggtagcagactaatatctacattgacctactgtagagccagaaggacccatttatttagcaagagacttctttactgtgtctagttcaggttcccggaaagatgggacaattcgtagtaacactcattccttctgctaagggtcatgagataggtttagacatatggtcccattttgatgatgttttaaactttgtttattttacataccctgtgatagagccaatcaatgtaggggcctaaacgtcggtatagcctgtaattttgacagatgcccagattgtggtattgacaaataggacagatgtcccgaggggcatatgtgtagaaata

SEQ ID NO: 659829 - DNA, 263 bp, Homo sapiens
ttttgtcctgcaaattttatacattaaagtgtgtaacatagtgttttgatatacatatgcatagttaaaacactactgtcaagacaattaacatatcgttcatctcatrttgttaacttttttgtggcatacactattaccaggtagagtcctcatgctctatattagatcctaaatacagttatcctaagtaattgcaattttataccctttgtcctatatcttcttatctccaacccactttgtctctggtaactgctgtt

SEQ ID NO: 659830 - DNA, 263 bp, Homo sapiens
ttttgtcctgcaaattttatacattaaagtgtgtaacatagtgttttgatatacatatgcatagttaaaacactactgtcaagacaattaacatatcgttcatctcatattgttaacttttttgtggcatacactattaccaggtagagtcctcatgctctatattagatcctaaatacagttatcctaagtaattgcaattttataccctttgtcctrtatcttcttatctccaacccactttgtctctggtaactgctgtt

SEQ ID NO: 659831 - DNA, 572 bp, Homo sapiens
ttaaaatatataaggaactcacacaactcaatatcaaaacaaaggaagacaaaacatgggcaaaggatccaaatagacatttctcaaaagaagacatacaaatgaacatcaggcatatgaaaatgtgctcaatatcactaatgattcggaaaatgcaaatcaaaactgcaataaggtgtcacctcacacctattaggatgactattatcaaaaagatgaaagataacaggtgttgatgagggtgtagagaaaaggaaacatgtaaacacyattttggggaatataaattagtacagacgttatgaaaaatcatatagaggtaaaggaaacacttaaacactattttggggaatataaattagtacagccattatgaaaaatcatatagaggttcctcaaaaaatagaaatagaactatcatatgatccagcgatcccacttctgggcatatatccaaaggaatatagatgtagatatctgcacccacatggtcagtgcagtattatccacaataaccaagatatgaataaaacctaaatgtcctaagtgtagaatacatgtacaatgaaaca

SEQ ID NO: 659832 - DNA, 495 bp, Homo sapiens
actcacccaacacaggagcacctagattcataaagcaagttcttagataccttcaaagaaacttagactccatgaaataatagttggagacttcaacacatcactgacaktattagacagatcactgaagcagaaaattaacaaagatattaaggacctgaactcaacactggactgaatggatctgatagatatctacagaactccccatccagaaccaacagaatatacattcttctcatctacatgtggcacatattttaagtatggtcacgcaatttgacataaagcaataagcaaatgaaaacaaaattataccaaaaactctctcagaacacagcacaataaaaatagaattcaagactgagaaaattgctcaaaaccatacaaataaaaacaaattagacaacctactcctgaatgacttttaggtaaataatgagaaggcaaaaatccattcatagtttgaaattgatgagaacaaagacgcagcat

SEQ ID NO: 659833 - DNA, 619 bp, Homo sapiens
gaccacgtctaactcatctttgtaattccctctaactcctagcatatggtaartatgcaataaaattgttttaactgtttaacaaatgacacgtatatttaaaagagttttagtatttgatagttacagatacactgtaaacaaatacgtatgtacctattatgtaccaatcaccacaccagggattgtgtatacaataatgaatcagtcaagcaaggttccttactctgcagcataaacatgtgatactctacattccaattagtcatgtttaggtaattaacatatcttttgatctgtaagaatctcccagtaacagttctttagcaaaacacaatgcaggatggtaaacaccacattcttagcaattttttccttcaatcttcttacttaaaaatgcaaaaataggctgggcgcagtggctcacgcctgtaatcccagcactttgggaggctgaggcaggcagatcacaaggtcaggagatcgagaccatcctggctaacacagtgaaaccccatctctactaaaaatacaaaaaaattagccggacatggtggtgggcgcctgtagtcccagctacttaggagactgaggcagaagaatggcacaaacccaggaa

SEQ ID NO: 659834 - DNA, 619 bp, Homo sapiens
gaccacgtctaactcatctttgtaattccctctaactcctagcatatggtaaatatgcaataaaattgttttaactgtttaacaaatgacacgtatatttaaaagagttttagtatttgatagttacagatacactgtaaacaaatacgtatgtacctattatgtaccaatcaccacaccagggattgtgtatacaataatgaatcagtcaagcaaggttccttactctgcagcataaacatgtgatactctacattccaattagtcatgtttaggtaattaacatatcttttgatctgtaagaatctyccagtaacagttctttagcaaaacacaatgcaggatggtaaacaccacattcttagcaattttttccttcaatcttcttacttaaaaatgcaaaaataggctgggcgcagtggctcacgcctgtaatcccagcactttgggaggctgaggcaggcagatcacaaggtcaggagatcgagaccatcctggctaacacagtgaaaccccatctctactaaaaatacaaaaaaattagccggacatggtggtgggcgcctgtagtcccagctacttaggagactgaggcagaagaatggcacaaacccaggaa

SEQ ID NO: 659835 - DNA, 619 bp, Homo sapiens
aaatctctaaggaagttctaaaatatttttaattaaatgaaaataaaaatacaacttatcaaaatttgtaagatgcagcaaaagtactggttagagggaaatttgtagcagtgaatccatacattagaaaagaagaaagatctaaagtcaataatataagcaccaaccttaaaaactagaaaaagaagagcaattaaacccagaataagcagaagaaaagaataaaatattagcagaaatcaatgacattgaaaacaggawatcaataggaaaaaaaatcacaaaaccaaaagctggttctttgaaaatattattgaaacagtaggcctgtagccaggctaactaagggaaaaaaagaaaagacaaaattactaatataagaaatgaaagaggaatatgactgcagattccatggacattaaaaggataataaaagaataccatgaacagtcctatgcccataaattttataacctagaaaaaaatagatcaattccttgaaagacacaatatgccaaaacttacacaagaagacactgaccatctgaataggcctatatatatgaaataaattgaatcaataattaacaaccttccaaagtggaaaacacagggtcaa

SEQ ID NO: 659836 - DNA, 511 bp, Homo sapiens
gagccatctgttagacatccagaagatgtcagattgacaactagatggatgacagtgggtttcatgtggaggcaggaaaatggactcaaaaatttaaaagtaatctactacctcttagcccctcaaatgcaccagtctctgcctctagtcctttgcacatgctgttctctctgtctggaccccttccccgtgtccctccttttatttcttccattaatytttcagatttttgcttaaatgtcacttacccctggaagcctagattccccagaccaggttagacctctttgtcatataatctccttataagttttccatcatagtatagatcaccactggtatcaaataagatttttctgattaatatttgtctagcctgtgtcaacagtattacagcaataatgtctatcttattcacttttaattaccagcacctgcagcagtgtctatatgtagcaaacacttagtaaatatttgtggaatgaaagaataagtgaatgaatgaataagt

SEQ ID NO: 659837 - DNA, 573 bp, Homo sapiens
ctcccacatcaggatgcttatccaataagtggaaaatgtggccacatgcattatcaaatctgccaytctaaagagcagtcagactgagtacctcctatcttgtaaaccaatgtgcaactacaaggctatttttactctaggagtagtttattaagactatgaaacatagagttacatgggataaaagttgttagatgaaatgctcatataacaagatgaagaacttgtaattattttacatttttagatttataaaatgctgtcataaatgccagcttatttgattctcagaataaacctctgaggtgagcagggttattttttccattttctagatgagtgtacagactcagaagtctggtgacttctccaggatcactcacccaggaagaggcagaggtgagactctaagccctaactttttttttctcccaatatatcatgcgtacccccatggtctgagacagaaaatatgacacacactataaaaacagatcactatcaccccactgcatcattgtctccattcttatttaatacctgaataaaactgagaaaaagttcacttataac

SEQ ID NO: 659838 - DNA, 590 bp, Homo sapiens
ctttttccttacaagagaatttatatgtgattctttgcttaactataatgatatacatataataatttatcattgcttttcatttcagtgactgctttgtattaaacaaaattttaagaataaaattcagaagaacaataaacaaaatatttgcytaaggtgcttaatttaatttgccaatatttatgagacagccatgctgaattacctttgtttgacactttcacattcacatttatatgtcaccagagtgattcatgttttcttttcctcaaagaactctacttacccgtttgattcctttcttcattaattacaaaagtgtttattgaacactatgaaaatataaaattctcaaaattattatttcctaacttaatttgaagataactttgtaacttttaatacaaaaggccaatcttcctgtcctgcctatcactagcatctgttccttcatttcgctaataatattactgatccaataactctccaaatattagtgattggatgatgaaatggatatgatatatttttcaaatttatgattgtcttattttaccagagaaactgatataccatttgtgtttcta

SEQ ID NO: 659839 - DNA, 609 bp, Homo sapiens
acttgtacaggtttttgcacgcatctctttaaaaagaagtcattgctttaagatcacacgggtaaggtgtattttggaagtgaaaacaggaagcacctagactgtcttagattgctggtagctgtgcttattagtaaaaacaccttggaaaacttcttggcactatttactaaagctgagtatctatttatagatatctagatatctatctccagaattccattcctgtgcttctacccaaaagaaagagaattgagtgctagcatacacygaagagcatgtataggagtatttcagaacaactttattcatagtagcttcaaactagaagcttcaaactacaaaccagaatactgcacagcagtgaaggagaacaaactactgttacctgcacaatataaataaatctcatagatgtgaagtcaatcaagagaaggcagacacaagagggtagatattttacaatttcatttatattaagttcaaaataggcaaaactaatttgtaagaacaggtttagttggtgagaaatctgtggagcattgttgattttacaggcccaatacccagcttttctctgattttgcagttgtctccatagcaatagtc

SEQ ID NO: 659840 - DNA, 609 bp, Homo sapiens
acttgtacaggtttttgcacgcatctctttaaaaagaagtcattgctttaagatcacacgggtaaggtgtattttggaagtgaaaacaggaagcacctagactgtcttagattgctggtagctgtgcttattagtaaaaacaccttggaaaacttcttggcactatttactaaagctgagtatctatttatagatatctagatatctatctccagaattccattcctgtgcttctacccaaaagaaagagaattgagtgctagcatacactgaagagcatgtataggagtatttcagaacaactttattcatagtagcttcaaactagaagcttcaaactacaaaccagaatactgcacagcagtgaaggagaacaaactactgttacctgcacaatataaataaakctcatagatgtgaagtcaatcaagagaaggcagacacaagagggtagatattttacaatttcatttatattaagttcaaaataggcaaaactaatttgtaagaacaggtttagttggtgagaaatctgtggagcattgttgattttacaggcccaatacccagcttttctctgattttgcagttgtctccatagcaatagtc

SEQ ID NO: 659841 - DNA, 572 bp, Homo sapiens
atgtttgggtacaggatatacttctgggatgtggcatagagaatttgggtactaggttatgtacaattccttgcctatcaatcccacctttctttcttaggaaaactttcctaaaagattcctactcattcttcctcctcaccccttatctggctctatcatgccatccatcaggtatcaatgcaggcagcactaatttatgaagtccttcccagcccctaggttaggggcaggtcttcctgctatgtgattccacagcacagtgtttgtttaactgcttgatgatgattaaatttgttacatgcggtgtcttttcttgctatcttattcatcgaagttttcccagggcatagctaactgccttatatgtgccagacactcagggctgattacatgaatgaatgaatggagtgtatgcaagacatgttattttcaggtatcttttcattggttctaatttatataaaatatgtatattaacaagtcagccaaaactttgctgttttaaaagttaaaaacttttaacttgaaaaagttaaatttttgtraaaagttaaactttttgtaaaaag

SEQ ID NO: 659842 - DNA, 598 bp, Homo sapiens
atctattatttaaggaaataagctacaacctaaggaatttctatcaagccaacctgaattccaagtataaaagagacagattaacagctgatcccaggagcctttctgagagaaaacaaaaaaagcaactggaagacaaactttagccaataaatagataactagggcaatgtaaaatgagtggcaataaaagaagctayttgattgtaaaacaaagacatttttgaaaatattaggagtagatggcaagatagaatataaataacataaatgctgatgatctagaaaaaaatacaattaatataaatgagaggaggaaggtggaaatgaagctagaagttagaataaagctggaagatggccagtagtaactgggaccaaaagataatatctaagggtcaagtaaagtaatagaataggcatattttacactacaaagataaatattaaggaagtaaattgtgttgactgaaattgggtgagaggagaaaccacacaaactttagcagatactttgtggggacttagagaactattaaaatttaagaactattaagaattggatcaaatcacactaaaatagaagagtttcatttac

SEQ ID NO: 659843 - DNA, 492 bp, Homo sapiens
tacatttaaccagatgtatattgtatgtgcctgttgcatgtactcttgtccaagtaggtacagcgatccagcgtattacattggtactcagctttggaattttgtttgctatactgagtgcttcagattcttaaccacagaactcatacatgctcatatagcccaagtttcctatagagactgacccctgctacagccttatcaggtttgtcagtggcctctaggacagagtcarcttcctatcacaattcctatagtttgtgaggcacattaaattcatcagctgtcattgtgatagaaaatagtctcagagttttattagggctagtatggtaaaagtttaatgttatattaatagtaaagtttgcctattgtagttagctcgtgttaggactatactatttatatgtataatatttcttgggtaattttcattagttatcttgttttctaaagaaaaaaagttgaaagggaaatggtgtttacaatacg

SEQ ID NO: 659844 - DNA, 658 bp, Homo sapiens
taaaaaacgtgagcaccatatattactattttgaatgtaataacttatcaactatctgtattgcttatttctttttaaactgtagaatgtattttactcaactgtattgtgattctgtataatttttagggtgaacattttatagaattttatagaatcatacagagttaaacaagactagaaaagttattgaattcattctcctgactggaggcagagctgcatttattttatccaaaatagatgaagatttttcctattttaagagagtcaggaagaaagaaatttcagaactgctcttagcaatctatttgattatttaccacttgcatatttagaatgttcatctttaagtcttaaattctgcactggacggtttaatgtcattttgccctaggacaaaaatgctgatcattatcctctttgtaacaacttttcttatagtcaaaaaaccataaagacacacctcagctctttcttccctaagctaaattatctcagtttttcaaacatttgcttttgtttctatagctctttctatacctgagtggcaaaggggactatttttaaaagctctgtcatatrtgatgcctcttagagaggcactgcatattttaatttcactgtgctgatgtggaaatagccacaactttttcat

SEQ ID NO: 659845 - DNA, 582 bp, Homo sapiens
gggtagtagctggagaaaggaatggcagtaatccgatggagatggagagagcacttgctcccaaagtttggtgggaaaataaagaagagatagagaagaagagaaacagaggtttttttcatgttttaacctttttttttttttttttgaggaaaaccagaaaaaccagggttcatggatgatctccccaaactatagttagctaataggtctgtatcacattcagacatttttggcattgtgctatccaygtttacctggaaaatactccttaggcaaaaattagaactgaatgtggtgggactgcgttccattttaagctatgactgagtgctctgccaatagtcagtctaaggattactttaacctagatggcaactgcaagctttaatttgttatttatgaacctttacagctgtatttccatgagaatgaattgctggttcatttatcaggtgtgaaggagggatgttaacaggtaggtctgaaaacttggaagaagggataacctatttaaatcattgttggtgaaggtgtggagaggttcctgacaggacagtgaggtaagctggaggggctgcc

SEQ ID NO: 659846 - DNA, 484 bp, Homo sapiens
cccctgtggttctcctggggctgtcaaccccagcctcccactctgtccccatctatagggaaagggaagtgacctgggcttggccaatcagatcatcttatgcccctggcaacagctgcgcatgtgatggaagaatctttgtctataattggaataccaagaagttctcttttgctggtggtctttggctcagacaatataagcttgaggctattaagtggcactttctccagctatagggaggaagtccttttccagtgsgagaagaagaggccagccttcagcaggaaagcagagctcaaagacaaagagaaggaaagagagtcccagtgacattggttgaacccctggctctagctctgcctgagcccacaaatatcctttctgtttaagctagtttgaattttttttgtcacttccaagcggataagtcctgacataataatatgctattagctcatgtgggagctggctgtttaaaaga

SEQ ID NO: 659847 - DNA, 547 bp, Homo sapiens
tcatgcttattaagtggtggatggagaatctgaatatacatagtctggttcaggaacctctgcacttaattgctaagaatactaaaatcctggcagcaaagacttacaaaacaaacatgtgtgaaaggaaaacactaagccatctagacaataagtccatggaaggaagaaaacgtaatgctgtagtcatccttatattgacctaggagaactgatcatctctagtctattgtaacagcaatatgtactgatatggtctaaaaattattgtgttataaaatraaatgtgagctctttaatatttaaattgatacattgtgtttactgccaaatgactttaagacttctatggattcatgataaaagaatgaatttgtttttgttgttataaataactgttgttttattaatgcacactaaatatatgcttaatggaaaaaattggaaattatgaaaaactagaaagaagaaaataaaagtaacctgtactgacagatttgacacaaactctatcaaaattccactggcatttttaatagaaatataa

SEQ ID NO: 659848 - DNA, 641 bp, Homo sapiens
cctctgtgtgttttttatttttatttttttggctctctacttgtccaagctgaaattagaagcctctgtttttggcatttagatgtttaatccatctgggctggttcttgtatatgcaactaattttagcctactgatttttatttatactctattcctttcatatttattcttgtatatgctataagaaaaagtaaagagtttgaaattgcctgtgtccctcaccagttgagtaattttacgtttagcacggtgtgccaaaggaggtcttggattccaaaaacaaataattaatggggactactccttaccatttagrgcaatctggaaagaggcttgctaaaagttaccttagagacctttatggtatttcagatactctctcttttaattgtctgctctatttcactaagagactcattaaagacttttgtggtagaccgttggagtcatgagttaattttctactcttgtcttgctttttatattcttctcttcttcgatacaatccttattttccctggcctggctgcttttttggttctgcagtaaggtttccatagtctattacctatgatgaaaacgatccaagacgtgaagtcagagagatctggatttgaggcttgtatgtaagactttgg

SEQ ID NO: 659849 - DNA, 595 bp, Homo sapiens
aaatcgattcataaatggataagacttttaagactttttttgaagaaatcatttcaaactagaataagcaagaggaatagatcaaaacaaaaaggaaaacagtgaaggtgatatacacatcctcttactgaaaattaattttaaagaactttaaattaattttaaagaattaattttaaacactaaaactcagagtcatcaatgtgtctggatacggattcatttttatttcttctgctcagcacttgttttatactttaaattagagtcctcaagtctttcctctgcaatggaaattttatggcatcatgtaaagtatacaaatagtgaaggcattgccagtgttttcttstgtataagtattctctaccattagaatggaaacgtcatcaaagtgggcccttagtgagagtttgctgagtggatgaatactgtccttaaatatggcttctccattctctttggactccttttgaaactcctatcatacatgtgttggggactttcttgactggtctttctgacttttaaatccttttatctggataaattcatcattatctcccaattgactaattctttgtgtttattgcat

SEQ ID NO: 659850 - DNA, 593 bp, Homo sapiens
cattatgttggtcagcctggtctagaactcctgatatcatgatccacccgcctcagcctaccaaagtgctgggattacaggtgtgagcctccatgcctggctgcttttaattttttatatcaatctttactttgttcttttttgcctgcttttttttttccccagggtcttactctgttgccccggccagagtgcaatggcgtgatctctgctcaytgcaattccccagggttctatcaattctcttacctcagcctctggagtagctgggattgcaggcacccaccaccattcccagctatgttttcgccatgttggccaggctggtcttgaagtcctgacctcaggtgatccacccaccttggccttccaaagtgttaggattacaggcgtaagccactacgcctggccttttgcctgtttttatttatatttttttcttttctttctttctttttttttttagatggagtctagctctgtcgcccaggctggcgtgcagtggcatgatctcagctcactgccagctctgcctcccaggttcacgctattctcctgccccagcctcccgagtagctgggactacaggtgcc

SEQ ID NO: 659851 - DNA, 593 bp, Homo sapiens
cattatgttggtcagcctggtctagaactcctgatatcatgatccacccgcctcagcctaccaaagtgctgggattacaggtgtgagcctccatgcctggctgcttttaattttttatatcaatctttactttgttcttttttgcctgcttttttttttccccagggtcttactctgttgccccggccagagtgcaatggcgtgatctctgctcactgcaattccccagggttctatcaattctcttacctcagcctctggagtagctgggattgcaggcacccaccaccattcccagctatgktttcgccatgttggccaggctggtcttgaagtcctgacctcaggtgatccacccaccttggccttccaaagtgttaggattacaggcgtaagccactacgcctggccttttgcctgtttttatttatatttttttcttttctttctttctttttttttttagatggagtctagctctgtcgcccaggctggcgtgcagtggcatgatctcagctcactgccagctctgcctcccaggttcacgctattctcctgccccagcctcccgagtagctgggactacaggtgcc

SEQ ID NO: 659852 - DNA, 593 bp, Homo sapiens
cattatgttggtcagcctggtctagaactcctgatatcatgatccacccgcctcagcctaccaaagtgctgggattacaggtgtgagcctccatgcctggctgcttttaattttttatatcaatctttactttgttcttttttgcctgcttttttttttccccagggtcttactctgttgccccggccagagtgcaatggcgtgatctctgctcactgcaattccccagggttctatcaattctcttacctcagcctctggagtagctgggattgcaggcacccaccaccattcccagctatgttttcgccatgttggccaggctggtcttgaagtcctgacctcaggtgatccacccaccttggccttccaaagtgttaggattacaggcgtaagccactacgcctggccttttgcctgtttttatttatatttttttcttttctttctttctttttttttttagatggagtctagctctgtcgcccaggctggcgtgcagtggcatgatctcagctcactgccagctctgcctcccaggttcacgctattctcctkccccagcctcccgagtagctgggactacaggtgcc

SEQ ID NO: 659853 - DNA, 642 bp, Homo sapiens
ggtttaaacataaaactgtaaaactactagatgaaaacataggggaaaagttccacaatgttggtttggtcaaagatttcttggatatmacccccaaagcacaggcaacaaaagcaaaaatatatgggattgcatcaaactaaaaagcttctgcacagcaaaggaaacaatatggtgaagagacaacctacaagttgtgagaaaatatttgcagagcatacatctgatgaaaggctaatctccaaatatataagggactcaactcaatatcaagaaaacaaataaccaagtcaaaaaatgggcaaggtcctaaatagacatttctcaaaaaaaatacaaatgactaacataaaaaaagtttgtcatcctaattatcagggaaatgcaaattaaaatgacagtgagatgccacttcatacctgttagaatggctactatcaaaatgataaaagataacaagtgttgaagaggatacagagaaaagggaaccctcgtacactgttggtggaaatgtaaattaatactattatgaaaaatagataaaagttactcaaaaaactaaaactagaattactatatgatccagcaatcccacttccttgtatatatccaaaggaatttaagtcaatatgctgaagagat

SEQ ID NO: 659854 - DNA, 490 bp, Homo sapiens
caacacacaccatggacctctcatggggacagggggtaggagaccatcatgacaaacacgtgggtacatggaggggaacaacacacaccagggcctctcagggggacagggggtaggagaccatcaggacaaacacgtgggtacatggaggggaacaacacacaccagggcctctcagggggacagggggtaggagaccatcaagacaaacacgtggatacatggaggggaacaacacacaccagggcctctcagggggacggggggtaggagaccatcaggacagacacgtggatacatggaggggaacaacacacaccagggcctctcagggggacagggggtaggagaccatcaggacaaacacgtgggtacatggaggggaacaacacacaccagggcctctcagggggacagggggtaggagaccatcargacaaacacgtgggtacatggaggggaacaacacacaccagggcctctcaggggg

SEQ ID NO: 659855 - DNA, 612 bp, Homo sapiens
tttaaataaatctttttttctattgttaatatacttttaaaaataattattttttatttttatttcaacactttttggggtacaggtggttttgcttacatgaataatttcttgtctttttcttttttttttttgagatggagttgctttcttgcmattgacgctggagtgcagtggcgcgatcttggctcactgcaacctctgcctcccaggttccagcaattctcctgcctcagcctcccaagaagctgggattataggcacacaccaccacaactggctactttatgtatttttagtagagacaaggtttcaccatgttgacaaggctggtctcgaactcctgacctcaggtgatccacccatctcagcttcccaaagtgttgagattacaggcatgagccaccacatcagtcctcgataatttctttagttgtgatttctgagattttggtgcacatgtcacctgagcagtgtacattgtacccaacatgtaatcttttatcactcacccctctctcaaccttcccctgtgagtgccaaaggtccattatattattcttatgcctttgcatcctcatagcttagctcccacttataagtgagaacata

SEQ ID NO: 659856 - DNA, 612 bp, Homo sapiens
tttaaataaatctttttttctattgttaatatacttttaaaaataattattttttatttttatttcaacactttttggggtacaggtggttttgcttacatgaataatttcttgtctttttcttttttttttttgagatggagttgctttcttgccattgasgctggagtgcagtggcgcgatcttggctcactgcaacctctgcctcccaggttccagcaattctcctgcctcagcctcccaagaagctgggattataggcacacaccaccacaactggctactttatgtatttttagtagagacaaggtttcaccatgttgacaaggctggtctcgaactcctgacctcaggtgatccacccatctcagcttcccaaagtgttgagattacaggcatgagccaccacatcagtcctcgataatttctttagttgtgatttctgagattttggtgcacatgtcacctgagcagtgtacattgtacccaacatgtaatcttttatcactcacccctctctcaaccttcccctgtgagtgccaaaggtccattatattattcttatgcctttgcatcctcatagcttagctcccacttataagtgagaacata

SEQ ID NO: 659857 - DNA, 612 bp, Homo sapiens
tttaaataaatctttttttctattgttaatatacttttaaaaataattattttttatttttatttcaacactttttggggtacaggtggttttgcttacatgaataatttcttgtctttttcttttttttttttgagatggagttgctttcttgccattgacgctggagtgcagtggcgcgatcttggctcactgcaacctctgcctcccaggttccagcaattctcctgcctcagcctcccaagaagctgggattataggcacacaccaccacaactggctactttatgtatttttagtagagacaaggtttcaccatgttgacaaggctggtctcgaactcctgacctcaggtgatccacccatctcagcttcccaaagtgttgagattacaggcatgagccaccacatcagtcctcgataatttctttagttgtgatttctgagattttggtgcacatgtcacctgagcagtgtacattgtacccaacatgtaatcttttatcactyacccctctctcaaccttcccctgtgagtgccaaaggtccattatattattcttatgcctttgcatcctcatagcttagctcccacttataagtgagaacata

SEQ ID NO: 659858 - DNA, 612 bp, Homo sapiens
tttaaataaatctttttttctattgttaatatacttttaaaaataattattttttatttttatttcaacactttttggggtacaggtggttttgcttacatgaataatttcttgtctttttcttttttttttttgagatggagttgctttcttgccattgacgctggagtgcagtggcgcgatcttggctcactgcaacctctgcctcccaggttccagcaattctcctgcctcagcctcccaagaagctgggattataggcacacaccaccacaactggctactttatgtatttttagtagagacaaggtttcaccatgttgacaaggctggtctcgaactcctgacctcaggtgatccacccatctcagcttcccaaagtgttgagattacaggcatgagccaccacatcagtcctcgataatttctttagttgtgatttctgagattttggtgcacatgtcacctgagcagtgtacattgtacccaacatgtaatcttttatcactcacccctctctcaaccttcccctgtgagtgccaaaggtccattatattattcttatgcctttgcaycctcatagcttagctcccacttataagtgagaacata

SEQ ID NO: 659859 - DNA, 448 bp, Homo sapiens
gaggcagaaattgggcataagacaatatgagggttggtctcctcccttagcatgtcctagtttcctaagccaagttaaaaatggtagacatgcgttatcattattttaaacaaatgaattcacataatcccttgcttttatgaatttctcataaatttaacaagatgcatgatttaacaaatattatcaaacgtatggygtatgggtgaattctgttgaaagaaatacaggattgaggcagaggcatccatgctcattactcacagttgggaaaattaagatcagaggcttcttcctttctttggttcattgaaaaactaagctttattcttgcaacttctgagaagatttccaagctttttcttttgtttcatatgtttcttaaaacacaattcgccagggtactgttgggacttaggctgtcttccactatatattccagggctgt

SEQ ID NO: 659860 - DNA, 358 bp, Homo sapiens
tggacagcacaggtatagataaatgatcaaaattataaaagttacattttatctttttaaatttgaataaaacatatcatcattaaaagcaatgctttttaagctaaaggttaactgtatgatttaaagtasagaataagaaaataacataactgtgtttcaataataaatttatttcttgacaatcaagggcagtgtaataggaagtcaataaagcaaaactaattaccgtcagggacaaataggtaaagtatttcattttaattaccttgcagtttcctggcgaagagcattaagaaatgtgtctggatggaaaagttctgataggtcaagtgtttcagagagaagagcctgtttt

SEQ ID NO: 659861 - DNA, 567 bp, Homo sapiens
cacaccttttatgggttcttttaccatattccacatacattaatctcatttttgtcctcagaataattaatgtagtcatcattttccccatgttaaaatraggaagcagcaattcagagggtcactactggttacacagccaggaagtggcaaggcagggcctatctgtttaaagagcctgtgtgttctttctagcatgagctgcctcctgatatttccagtgattggtgagtgggacctggccctagcaggcaggctgcagaagagggaacgaacttctgtcaggcagcctgcttctggctttgccctcacaacctttccctcaaaggattgcttgtctccatctgaccccaaaaactgtttcctgagctctgtggctcaataccagcatggcatggggctctcaggccagggaggcaagtagctgatccagtgagagagaaagaggagcagagggtggagtgggtggccagtggagtagggggaggaaagaaaaggtgatgggccaaagaatcacatcttgtgaccaaaatgatgagactgattttcttgtgcttgctggtaagc

SEQ ID NO: 659862 - DNA, 571 bp, Homo sapiens
acacgcattatttcatcacccaggtattaagcctagtaaacattagttattttttctgattctctccctcccccaaccctctaccctctggtaggccccagtgtctgttgttcccctctatgagtgcatgtgttctcatcacttagctcccatttatcagtgagaacatgtggtatttaattttctgttcctgcattagttcactgaggataatggcctccagttctatccatgttcctgcaaaggacatgatctcgttcttttttatggctgcatagtagtctgtggtgtatatgcagcacattttctttatctagtctatcattgatgggcatttaggttgggaatcaatagatttttaaagatggaaaggaagaagagagtgttggaaaagacagtgctagtgatactaccatagaaattatggtttttgccagcaggcaatggtattttatacaccacsttccaaaatgagaaacatagaaaggaattgaaggaattgttcataactgagcttaagtttgtgggctctgggcaactagtttggagtgattgacatgctggttaattt

SEQ ID NO: 659863 - DNA, 607 bp, Homo sapiens
attgcattttatcaatgttctttctgtacctatttaggtgaatatatgattctttccctttattttgttaataggttgaattataattgttttttacaaaatgttaacccaggctgagagtggtggctcatgcctataatcccagcactttgggaggacgaggtggggggcggatcacctgaggtcaggagttcaagaccagcctggccaacatggtcaaaccctgtctctataaaaatacaaaaattaactgggyataatggcaggtgcctctaatctgagctactcgggaggctgaggaaggagaattgcttgaacctgggaggtttatggtgcagtgagctgagattgtgccatcgcactccagcctgggcgacagagtaagaccccatctaaacaaacaaacaaacaaacaaaaaaaacccgactttgttttcctagaataagtccaacttgataattatgaattattttttatacatctagattcaatttagtagtattttcatcaggatttttgcatgtatgtttactggatatattaatctattaatccataatttttcttttttgtaatatccttggcaggtgggttttttttgttgtt

SEQ ID NO: 659864 - DNA, 607 bp, Homo sapiens
attgcattttatcaatgttctttctgtacctatttaggtgaatatatgattctttccctttattttgttaataggttgaattataattgttttttacaaaatgttaacccaggctgagagtggtggctcatgcctataatcccagcactttgggaggacgaggtggggggcggatcacctgaggtcaggagttcaagaccagcctggccaacatggtcaaaccctgtctctataaaaatacaaaaattaactgggcataatggcaggtgcctctaatctgagctactcgggaggctgaggaaggagaattgcttgaacctgggaggtttatggtgcagtgagctgagattgtgccatcgcactccagcctgggcgacagagtaagaccccatctaaacaaacaaacaaacaaacaaaaaaaacccgactttgttttcctagaataagtccaacttgataattatgaattattttttatacatctagattcaatttagtagtattttcatcaggatttttgcatgtatgtttactgratatattaatctattaatccataatttttcttttttgtaatatccttggcaggtgggttttttttgttgtt

SEQ ID NO: 659865 - DNA, 523 bp, Homo sapiens
tctccatgttggtcaggctggtctcgaactcccaacctcaggtgatccacccatcttggcctcccaaagtgctgggattacaggcatgagccactgcgcccggacttccagatttattttcaatcaatgtttcattttccacttccttcctatgctggcttgtaggttttccaggctatttacctttatttrgtgtcaaaaattcttttgggaacttttgagttgtcaaccaatagttgtaagcatattggatattgctgtttttctcccagtgctctggttataatctctcctattaataccttgtagtcttattgttgtagttttttttctattaatttctgagatataagaattagaattgtcaaattgtggatttatgcatttatcattttaattcaataacttttgcttcatgtattttgttatttttcttaggtgtatgcatgcttatgcttattaggttttctaagcaaatggacttattagtataaaacatccttctttatccctggtgatgctt

SEQ ID NO: 659866 - DNA, 410 bp, Homo sapiens
aacaggtatgaggattaggattagaggagtgtcctgacaactcactctcaatactgggaaattaagtattttagggagctatgtatccacgttctatgtaatccttcttrttagcatttaagactcttccagagatgatgagtttactaagaaacaccataagaaatgaacactaaagcctccagaaaacattccctgaggagacaaaatctatgttgaaaaggactactgggctcaataataatctgttagttaatgtctggattgcaaaatatgtggcccactaaaggtcacttagccctggtgctgactggtttgaaccaaaaatatgaaatgattcaagcaggaagtggaggccttgagtgaacctcagctggtcaactctttaacttttccaggcgggcctagca

SEQ ID NO: 659867 - DNA, 408 bp, Homo sapiens
aggtatgaggattaggattagaggagtgtcctgacaactcactctcaatactgggaaattaagtattttagggagctatgtatccacgttctatgtaatccttcttgttagcatttaagactcttccagagatgatgagtttactaagaaacaccataagaaatgaacactaaagcctccagaaaacattccctgaggagacaaaatctatgttgaaaaggactactgggctcaataataatctgttagttaatgtstggattgcaaaatatgtggcccactaaaggtcacttagccctggtgctgactggtttgaaccaaaaatatgaaatgattcaagcaggaagtggaggccttgagtgaacctcagctggtcaactctttaacttttccaggcgggcctagcat

SEQ ID NO: 659868 - DNA, 408 bp, Homo sapiens
aggtatgaggattaggattagaggagtgtcctgacaactcactctcaatactgggaaattaagtattttagggagctatgtatccacgttctatgtaatccttcttgttagcatttaagactcttccagagatgatgagtttactaagaaacaccataagaaatgaacactaaagcctccagaaaacattccctgaggagacaaaatctatgttgaaaaggactactgggctcaataataatctgttagttaatgtctggmttgcaaaatatgtggcccactaaaggtcacttagccctggtgctgactggtttgaaccaaaaatatgaaatgattcaagcaggaagtggaggccttgagtgaacctcagctggtcaactctttaacttttccaggcgggcctagcat

SEQ ID NO: 659869 - DNA, 593 bp, Homo sapiens
gtctggctagggaagacagctttttgagtaccasattggtgttgaagttgggcttctctgagatttttctgcacgaagggcagcgcattggtgctctgccttcttctgagcagaggcagaggcagggcctgcaaaagctgtgcccacagtcaatggtgaccggatctatgaagtagttcacgcaaatgcagcaaatgagctcattctggaagacttgcaggtcgtctgaatccatgtttctggaaattaaaaaaaaaaaaaagtgagaatttctttctcttatttttatttaccccgatgaaaaggaaagaaaggccggtggacaattttccttgtctacttgagctctgtccagcatgtctaataagttagctccagcacaaactgagacatagtaaattcatacatgctggatttataaagttttccctcaatagccatcgaagattcggtcaaggactccctgagaaccaagatcctaagatgttcaagtctcttattagtaaatggtgtgaatttgtatgtaacctaaacctatcctcctgaatactttatgtctagattactttgaatgcctaatacaatgtaaatgc

SEQ ID NO: 659870 - DNA, 639 bp, Homo sapiens
gagagtactggaacttagcatgaaactcacagaaggaagccagggcacgaaaaagaaagaaacaaaaagctggcagagattagctaggaaccccaagggacttggtattttgttgaaaaggtatgtccgagtgttgttggctgcccttgcttcagcggcacaccactggtatcccacctgttgaagagtgcctctgttcttgcaaacmcaaacactggtgtgggcagtgatttggagacttcttgagggcattacacccgattacctgcatgagccaggtcacttaccctccccctagacccaagctgtgtggtgggtgccctacttggagcacagcctttgagggactctgtcttgcccagggaacctcatcccttgtttctccaaatcactggagcccctgcagatattccccaggaccagcttggattgcagccaaccacacaggccttgctggacccaagagaggtgcaggcttcccaggggtttaaccttcggggaatggagtgctgcccctaagggaaggaagagtgcagtgcagaaagggagcaccccttgaacgacaacaacacaaaagggtatgcatgctttcttatagttaagagtgcctcacttgtgggctgagagtgatggcagcac

SEQ ID NO: 659871 - DNA, 612 bp, Homo sapiens
ttgcccatgtgcgtgcactggcaaaacaatgtgtggggtggccatgcatgagtttgtgccagcaaagtggcatgggtgaggctctggtagggacagtgcatgggaggactgctgcacttcagtgggggccgctctgctggagctctctggtggtcagatgtggtcagccagtgaagaacctatgatactggcccctaggaggcaccctggctgggcatcctaggctggactgcaagcaggcatgaccaggttgtagccctgggaaaaaccagcagacagggaaaaactcacattgaaccagccccatctcacgagcacgattaccctgttctctttaggtctgacagttctccataggctaaagtttcttaggggagcaaggtgaaatggccatcactggstatgttccactgtagatgctttcacaacaaactctctagattccacattggctagagttcttcccctattacctctctgaacagctttccctgccagctcacgtgtctgtgggcatcaagggttctcctactgtcggaattccaaagggctatggcaagagtgggttgattcttgcctgctcaactcacattttcccctggagtcactggg

SEQ ID NO: 659872 - DNA, 502 bp, Homo sapiens
ggtccatgcattgaactcattaaacagacagaaatttggggctagaattgagaattcatataccctgcccatattacctcccctcttcagtctcagttatctgacttccaactgccagctttggagcccaagggctttctctgaaacctaggagggcttccctgtccaccttgggcaggctggagtgctgcggggttgatgtagtctggcagcttttgaccaatgtctggtgagaactggtgtataaataccccagcccattggatgggataattcagaggtctgtgttctacatcggcctccagttttgccacaggattaatttccagtcacctccggtsgtgactgtcttaataacatacctttattgtcttcttcccttatctcacttccccactcacctacctatgtttccctcacctcctgtcacagcgaggtccctataagcagagcctgagacaagggtctcgttcacgtgatttagtggaatagtgtcctcagg

SEQ ID NO: 659873 - DNA, 551 bp, Homo sapiens
gggcagctttattgaataaacaaaatttaataaataaataaataataaaataaaatttatttagttagcaatttttttagcattctacatgtgtcatcccactccttcctggcttgcaagatttctgttgagragtccactgacagccctataagagttcctttatatgtgatgagtttctttccttctgcttcctttgagattatctctttgtctttgacttttgaaaatttgattttaaggtctctcggagtattcttttttgaattttgttgcttggaatcctgagtctgaattttcacatccctcccaagattcaagtttcagacaatatttttttgaataagctttcttccccccttctctttcaggtactcctgtaatacagatattcatatgttttctgatgtctcttatgctttttttactctttttcaatcttgttttcttttcgtccctctaactgggtaatctcaaataacttgtcttcaagttcactaattatttcttctccatgatcaagtcggctgttgaaatttttaaatttttca

SEQ ID NO: 659874 - DNA, 433 bp, Homo sapiens
agcactaaatgtggaaaggaaagaccattactagccattacaaaaacacactgaatacacagaccagggacactatgaagcaaccacataaacaagtctgcaaaataaccagctaacatgatkacaggatcaaatctacacatattaatactagccttgaatgtaaatgtcctaaatgccccaattaaaaggcacagagtggcaagctggatgaggaaccaagacctgttggtatgctatctttaaagacccttctcacatgcaatgacatacatagccttaaaataaagagatggagaaaaatctaccaagcaaatggaaaacagaaaaaagcaggggttgcaattctagtttctgacaaaacagactttaaaccaacaacatcaacaaagacaaagaagagcattacagaatggtaaagggttcaattcat

SEQ ID NO: 659875 - DNA, 536 bp, Homo sapiens
tgcttcacagtacagcaacagcatctacagtttcataggttacaactccccaggtcctcattgcaattgatgggctgcacacagtgttcagaatttcttatttgtcccacatcattcacgtttttcacctgctctcctagttattccgtactcagtctgcttgytgcatataggtgctcaaatttcattctcttccaaaactcaaaattaaatattttaaaggatggatattaaaatacggaaatattacactctgcaaaaaattaatgtcatgcctacattcagccatatacagattcaagcctatatgagatagatattattattctcattttggatataaagaaattgagtcttaagaaaggtcaagtaacttttccaagatgacacagtcactaagtggcagggctgggattcctatgtagataggtctaataactttaaatctcacattcttaatcactaacagggtttgaagcacttctcagttgctacacttcccaccttccaaacagttattctttttcttctacata

SEQ ID NO: 659876 - DNA, 540 bp, Homo sapiens
agtggaggcttcaagtaactatctggggggttactgatgaaagatcagctcactgaactctcagatcctctaatcgctcaatgatagaaggtgtgaggtacctcaggtgtgggtgcaaacagagagcatacctccttcccctcctctcctctttctccaactgagaaaatggacttcgaagactcactaagtgggaacatgggcacaaagaaaagaagtggtgagaagtgaagagctaaaacaaaaatagatgtatttagttaaagtctaaaaactaaatgggaatacccacccctaagccccgtgcccctactccttatccrgatgctaatatccagcacaccactaaccacacacactgtcctatggaagagtagaagccctttcttaggagaaacagtaagattccagagaaaggccgttcagacactgacattttggaggctgtcaaggaaaagccagcttcctacccaatcaccctgcaatgaaagtcaccaggccacaagcactgccatcaattcattaacatgccattcttaa

SEQ ID NO: 659877 - DNA, 568 bp, Homo sapiens
aggcatgtaaaaaggtgctcracatcacttatcatcagagaaatgcaaatcaaaactacaagtagtcccagctactttggatgctgaggcaggaggatgcctgagcctaggagttcaaggctgcagtgagttatgatcatgccactgcactccagcctgggaaatgctcaagtctgacaaacaaaacaaaattttaaaaagccccacaaacaactacaatgaggtatcatctcactccagttaaaatgacttttataaaaaagacaggcaataatgggtgctggtgataatgtggagaaagggaactctcatatgttgttggtggaaatgtaaattagtacaatggctatggagaacagtatagagggtcctcaaaaaactaaaattagacctatgatatgatccagcaatctcactgctgggtatatatcaaaagaaaaggaaatcagcatatcaaagagatatctgcattccaatatttattgcagtactattcataataatcaacatagactcaatctaagtgttcattaatggatgcatgggtaaagaaaatgtagtaaatata

SEQ ID NO: 659878 - DNA, 575 bp, Homo sapiens
ccgtgaacttatctgcccatgtattatgtttgtttttggtagattacaaaattatatgatcactccaaaaattaccttgccctttatagtaaarccttccattgtaaacttctggcaatcactgatctgtgttcctctagcattgcttttttttcagaattttatacaaatggaatcgttcaggctgtagcctttgagtctggctactttcatgtactgtatcaacagttattcctttttattgccaaatagtaatccattgtataaatactacatggtttgcttattggtttgtcattggaggaatatggactattttcactttttggtaaattataagtggattggaattcacaaagtgctttttgtctgagcataggttttcatttcacttgtgcaaatgactaagggtgtaggattgctgagtcacatggtccgtgtacgtttgactttatcagaacctgccaaattgtcttccaaagtgctgtgccacttctgtttctttaataaatacaggggtattcaagctgtctgtttcttcttgagttttggtagtctgtctttcaaggaattga

SEQ ID NO: 659879 - DNA, 575 bp, Homo sapiens
ccgtgaacttatctgcccatgtattatgtttgtttttggtagattacaaaattatatgatcactccaaaaattaccttgccctttatagtaaaaccttccattgtaaacttctggcaatcactgatctgtgttcctctagcattgcttttttttcagaattttatacaaatggaatcgttcaggctgtagcctttgagtctggctactttcatgtactgtatcaacagttattccttwttattgccaaatagtaatccattgtataaatactacatggtttgcttattggtttgtcattggaggaatatggactattttcactttttggtaaattataagtggattggaattcacaaagtgctttttgtctgagcataggttttcatttcacttgtgcaaatgactaagggtgtaggattgctgagtcacatggtccgtgtacgtttgactttatcagaacctgccaaattgtcttccaaagtgctgtgccacttctgtttctttaataaatacaggggtattcaagctgtctgtttcttcttgagttttggtagtctgtctttcaaggaattga

SEQ ID NO: 659880 - DNA, 575 bp, Homo sapiens
ccgtgaacttatctgcccatgtattatgtttgtttttggtagattacaaaattatatgatcactccaaaaattaccttgccctttatagtaaaaccttccattgtaaacttctggcaatcactgatctgtgttcctctagcattgcttttttttcagaattttatacaaatggaatcgttcaggctgtagcctttgagtctggctactttcatgtactgtatcaacagttattcctttttattgccaaatagtaatccattgtataaatactacatggtttgcttattggtttgtcattggaggaatatggactattttcactttttggtaaattataagtggattggaattcacaaagtgctttttgtctgagcataggttttcatttcacttgtgcaaatgactaagggtgtaggattgcygagtcacatggtccgtgtacgtttgactttatcagaacctgccaaattgtcttccaaagtgctgtgccacttctgtttctttaataaatacaggggtattcaagctgtctgtttcttcttgagttttggtagtctgtctttcaaggaattga

SEQ ID NO: 659881 - DNA, 566 bp, Homo sapiens
gaattaccaaatattttagatatcagataaaagagaatgccaggtatgcgatgataatcagcaacggttgttcacacaatatatcaaatcagtatttgaattagcttttgaattacgaggacaaatggatcaagtcttgactcattagtaggtaaatcttattaggctgaaatgtgttttcgcctgttttyccacaaggagattgcagatttgcaaacctcagctgctctcattttatgctctcaccaatccaaaagctgaagttcatcaatcagtgtgtctaagtgttcactagttatataccattttgtagtttaggctatctttccaacttcctaaatcatcaccttcatttgaccttgtttttttccactatcacttctttactgaccatataaagaatacaagtaagttcttattttcttattgttcattttagtctaatttcatcaaaatatcataattctttaatttcattttaatttcaaagattaaaagaaacctacatagaaataagtttaagattgtatttgcgttattttgacatcaatttgctatcctccctc

SEQ ID NO: 659882 - DNA, 464 bp, Homo sapiens
tcaaaagaattttgctgtaaagcaaaaatgccagccaaaaaatagtgcaccttatatgattccatttatataaaacttctggatgcaccaatatacaatatacagtaatatacaatactgaaagatggtcagcagttgtctagctaagatgcttattaggagagacaataattgcaaaaggggattattaaaagtagtcatgaggaaacattttgtggatttatatgttcactatcttgacaataatgatgatctcayggatgtataaatatgtcagagcatatctaataatttatcttacatatttttggcttttaatatgttaattatagctcaataaatttcttaaaaactcattggactctatctgtaatgtgtgtatgtttagttttaagtagagtgcagctaaatttttctccaccattacaattttcaaacatactttcacttacagaatagcatac

SEQ ID NO: 659883 - DNA, 464 bp, Homo sapiens
tcaaaagaattttgctgtaaagcaaaaatgccagccaaaaaatagtgcaccttatatgattccatttatataaaacttctggatgcaccaatatacaatatacagtaatatacaatactgaaagatggtcagcagttgtctagctaagatgcttattaggagagacaataattgcaaaaggggattattaaaagtagtcatgaggaaacattttgtggatttatatgttcactatcttgacaataatgatgatctcacggatgtataaatatgtcagagcatatctaataatttatcttacatatttttggcttttaatatgttaattatagctcaataaatttcttaaaaactcattggactctatctgtaatgtgtgtatgtttagttttaagtaragtgcagctaaatttttctccaccattacaattttcaaacatactttcacttacagaatagcatac

SEQ ID NO: 659884 - DNA, 598 bp, Homo sapiens
gtgttgatgagaagaatgtgaattctgcggtttttgggtacaatgttctgtaaacrtctgttaggtccatttcttctggactgcaacttaagtccagtgtttttttgtttttgttgttgttgacttcctgcttcagtgatctgtctagtgctgtcagtggagtgttagagttcctcactattattgtgttgctgtctattccttttcttaggtctagtagtaattgttttataaatgtaggagctccagtgttatgtgcatacttatgtagaattattatattttgttgaattaattatttaattattatgtaatgactttctttggtttttttttttactattgttgctttaaagtctactttatctgatataactacacctgcttgcttttggtttccatttgcattgaatatctttctccacccccttaccttgagtctatgagaatctttgtatgttaggttctgatgcagctcaacattttgtttcaagatttagcatttcttgtaggactggtctgatagggacagattccctcagcatttgcttgtctgaggaagacattatttctctttcatttatgagactcagttttg

SEQ ID NO: 659885 - DNA, 418 bp, Homo sapiens
agaaatgcagaattctagattcatctggaagatattgttgaagggaaaagcaactttcaggagagtatgtatggactgctatttgtataaaattgcaaaaacagaccaaagaacactatccattcttcatggacatgcacactrggtattaaacatggatgggaagacacacattgacttcagaatagtggggagggaggcggtaactgggctagaaaagggacatataactcgaggttcagcatgaacattatggctgaatccgtagttttcttcccttaaactctggagcaaatgcatccaaaatctaccacgtttgaattttaactgggaggtacatgaaagtttgatatcattttcctttgcgcaatcctgtgtgtttgtaatattgaggcatattttttaaacacttgacaca

SEQ ID NO: 659886 - DNA, 418 bp, Homo sapiens
agaaatgcagaattctagattcatctggaagatattgttgaagggaaaagcaactttcaggagagtatgtatggactgctatttgtataaaattgcaaaaacagaccaaagaacactatccattcttcatggacatgcacactgggtattaaacatggatgggaagacacacattgacttcagaatagtggggagggaggcggtaactgggctagaaaagggacatataactcgaggttcagcatgaacattatggctgaatccgtagttttcttcccttaaactctggagcaaatgcatccaaaatctaccacgtttgaattttaactgggaggtacatgaaagtttgatatcattwtcctttgcgcaatcctgtgtgtttgtaatattgaggcatattttttaaacacttgacaca

SEQ ID NO: 659887 - DNA, 534 bp, Homo sapiens
ttcagaatcagactggaaccacaccatcagatccccagggtctccagcttaataactgcagatcatagacttctcagcctgcatatcttgtgagccaatctttatagtaaatctatttctagttggctttgtttctctgcagaacccagacaaataacgcaagtatttagtaaatgcctgyttactttgtgtaagtggcctttggcaagtctggtgagcagttagtggcagagttcctaccaggatgtagggttgcaggctcatccacctggactccttccacccgaccaacaccaattcaccccaatggaggtgaggctggacaaagaatgatggtgatgaaaacagtggccccatgggaaccaccagaagctgagcctaaagaataggagtaagccaaggagtcacccaggcccagtgagtatcaggaattggggcttcaagacaaggccatttgtcagaccagggcagcctagcagtcagaaatgagctagaagcgaagagactctgtatccaaggtgaagcttgcctggc

SEQ ID NO: 659888 - DNA, 518 bp, Homo sapiens
atcccagctactcaggaggctgaggcaagagaattgcttggacctgggaggcggaggttgcagtgagcccagattktgccactacactccagcctgggtgacaagagcgaaactccatctcaaaaaaacaaaacgaaacaaaaacaaacaaaaaaacacctactgcctcactgaattaaaggcgtgttcagcagtttctttgttatttcaaagagtggcatctgcttcagcagggtcagtttttaatgtgtttgttttgtttcttttttctctgtctggtgttcttttctattttattataattttttaaatttgagggatgaggttttcatagtactgaatatcaaacaatgaatccgcatgaatgattcacctaatttccgtggttttagtcctctatacaggttttatatagcaaaagaaccatttaaagacttgggttacaaatgcattttattttacctctggcatgccttgggctgagaaagcattatatggtggcacaatatttgtaacat

SEQ ID NO: 659889 - DNA, 518 bp, Homo sapiens
atcccagctactcaggaggctgaggcaagagaattgcttggacctgggaggcggaggttgcagtgagcccagattttgccactacactccagcctgggtgacaagagcgaaactccatctcaaaaaaacaaaacgaaacaaaaacaaacaaaaaaacacctactgcctcactgaattaaaggcgtgttcagcagtttctttgttatttcaaagagtggcatctgcttcagcagggtcagtttttaatgtgtttgttttgtttcttttttctctgtctggtgttcttttctattttattataattttttaaatttgagggatgaggttttcatagtactgaatatcaaacaatgaatccgcatgaatgattcacctaatttccgtggttttagtcctctatacaggttttatatagcaaaagaaccatttaaagacttgggttacaaatgcattttattttacctctggcatgccttgggctgagaaarcattatatggtggcacaatatttgtaacat

SEQ ID NO: 659890 - DNA, 480 bp, Homo sapiens
aaataagtttaagattgtatttgcgttattttgrcatcaatttgctatcctccctcatacacatagagatcatttccatgtacgtgatttcaaacatccaagtgcagtattaaaagcagttgtcaattatggttctcattttcatgatacaattactatataaaattcctcttgctgctgtaacaaattatcacgaaatacatatcttacaataaagtgactgttaagcctacagttctggagttcagaagccttaaatgagactcacagggctaacatcaagttttgggcagggctgcagtctttctgagggctctgtggaagagtctatgtactttatttttttcagcatgcagaggccacctttatttcttggaacatgacctcgttcttatatcttttttttttttttgagatagagtctccttctgtcgcccaggctggagtgcagtggcacgatctcagctcactgcaacctct

SEQ ID NO: 659891 - DNA, 480 bp, Homo sapiens
aaataagtttaagattgtatttgcgttattttggcatcaatttgctatcctccctcatacacatagagatcatttccatgtacgtgatttcaaacatccaagtgcagtattaaaagcagttgtcaattatggttctcattttcatgatacaattactatataaaattcctcttgctgctgtaacaaattatcacgaaatacatatcttacaataaagtgactgttaagcctacagttctggagttcagaagccttaaatgagactcacagggctaacatcaagttttgggcagggctgcagtctttctgagggctctgtggmagagtctatgtactttatttttttcagcatgcagaggccacctttatttcttggaacatgacctcgttcttatatcttttttttttttttgagatagagtctccttctgtcgcccaggctggagtgcagtggcacgatctcagctcactgcaacctct

SEQ ID NO: 659892 - DNA, 666 bp, Homo sapiens
ctgcaccaagtggacctaatcgacatctgcagaactctccaccccaaatcaacagaatatacattttttcagcaccacaccacacctattccaaaattgaacacatagttggaagtaaagctctcctcagcaattgtctatgtttttatgtagtctgtaatactttcctcttatagaccaaacttcaggttttttaggaaaagttggagctctgtgcattatgccccaccagcttcaggttccgttgtcaacctaccccatatgtataaaccatctgtttgtcatgttttggctttatccaaacatcttcacaaagaggccatcygttcccttcttttagatatctatttatggcactttctctcttatctattttacaacatttttgcatatgtcaaaaattcaattactagtcacatattagtatgtcgtctactcaggaggagtcttagtgatccaaagtgcatggatagtaccgagagactgatagatctatctaaaatgaagggtatggacattgccataaaagcctcacaatgcatgaaatggataatagatgtgagattccctggggagctgtgtgcacgtgacttccaaaacgctgtcatttcactatgtagaaggacaatatgaatttacatggaaatttatttccaccatcagtaa

SEQ ID NO: 659893 - DNA, 520 bp, Homo sapiens
caaggatatgccatatgaaaatgtgaaggaatgaagaaaagaaagcagacaataaaagaagaaaaggaaaagaaataaattttgaccctaagcagaatataatacttattctcttctctattctgtagatcaaatggttaaatgtggattcaaaaaagttgtgaagtaactgagtgaagaattttgaatactgaatccatagagggaggtttatatttggcaaaccacaggccaatatttttaatcaattaatctgaagccaaagacaggaggctcattacatttgtagataacacaaaatttgtaagaaaagatgacatgaatggcaaagagtaaaggtttccaagagctggaatgatggyctaagcaattaaggtagagttcaacagaatttttgtttttagaaaggttaatttagttctaaaaaaaaaaaaagagtataagggcaaccttaattaattatagttagggattttaggtgaccacaatttcacttgacctggtgtttctaggcacagag

SEQ ID NO: 659894 - DNA, 572 bp, Homo sapiens
tttgtgcaaactctgccttgtgaatgagaacatctatttgaaggtttaatgaaaagtttagatgtttgcaaaatgctcactttgcattcacagttaatttatcaggaaattttaggctgccaatcaagacccccaaaaccctcatcaagagaaggttgtggagcaaacagaaaaggctttagagtaagagggctttgacatgaggtcagcttcattttccaattccagctccacttcccactagctgtgtggctttcggcaagtccctcaatctcactgagtctccgttcrctcttccgtgaaacatcacccatctgcagggctgttgccacgtctagaagtctctttgctgtgccaggtgcagtcagcattgagcgaatggcagctgttcttgcagtcctcaaatccctgtcccctggggcaggaggaggtgaatctcacagcctctctcttctaacttcatggttctgtcctgttccaatgcccccaagttgacttgagcagatggaattgagagattcaagcctttggagtgtgtgagggttttcaaatgaccgtggtccatatgcagt

SEQ ID NO: 659895 - DNA, 534 bp, Homo sapiens
acggtggctggttgctcagacgtgtaatcccaacactttgggaggctgaggtgggaggatcacttgagtccaggagtctgagagcagcctggacaacataaggagacctcctctctacaaaaagtaaaatattagatgagttagtggtatatgcctgtcgtcccagctacttaggagcctgaggtgggaggatcactggagcctggaaggtctaggctgcagtgaaccgtgatcatgccaccgcagtccagcctgggagacagggccagaccctggtctcaaaaacacaaaagcacatacacaaaaaaaaacaaaacaaaaaaataattctactgtcaaattttgattatcaaaaatgaattaattatggttaggaaggagtaaggaacttgaaatatctgacacttgaaatatcaggatgatggatgctccataacaggcagttagggatgaggacatgatcmctgcaccctcagagttggagccaagcagccgccccaccatgctgggtcactaagattgggggcaggctgt

SEQ ID NO: 659896 - DNA, 554 bp, Homo sapiens
gctgactccataacatttagttggccaactgagactaaatgtatgttcctctagatcttaaaaagttacagaaacatagcacratagtcaaaaaaattgtctttagtcaggagttctccatatatgtacaacagtttgaagtcattattaagcaaaatgaaacagaaactgtcacagaattccctaagataaattattttgctttaatcttcaattcatcatgtgaaataatcaagaccatgtgttattgtaaatatttctagcttacaacacaacaacctgatttttactgtttgaaataaccataatataaatcagttaattaaaaattgcataaataatcctttcaaataaaattctgcctaaattttacattactcatatgttcaaatgataatgagctcataggattttccaatacctcagtcaaaacattgtactgattccagctgtgggaatagtacctgaaagttatcttacagatggggaaaaggtacctatgtgacattggcctttgcactactgtacccttttgggtcaggaaaaagctgttc

SEQ ID NO: 659897 - DNA, 551 bp, Homo sapiens
cagagggtggagggccaggaatgggtatctttttaaagcatctaagttgttctaatgctcagacagggtgaagaatctcagtatctagtctaaaaagatctctatatggttaaatgaagcaacgtcagtatcttaaaaaggtatttgccatcctaggcttttctttttatagtatcacagaatgttagtgtagaaggtattctaatagaactagattttccacttacaatgcctgcattgtcctatcaaggtaaacaagccaaaaaaggagatttctagcccagactatgggggraaagggagttcagagttcagaatcccctcctagtcagaacctgcagatcctttcagcattctcctgcccaaaactttatttttaaaataaaatatattgagcatctttaaagagctaaagacactttaaagtaatagacactttaaagagatgcagtaagattcttattcttatgtcataggtaaagagactaaggctcagagagggatgctttgtcaaggaagtaaggagaggcaggatctgaacccagatctat

SEQ ID NO: 659898 - DNA, 562 bp, Homo sapiens
attactataaagatatgtaaacatatcaggaagattctgaayatgaccattcttcagtatactaagaaaaaactttcccatatgaaaagtaatatggagataataaagaccctaacacaatcatttacttgtactatttaatctttagaaatcattgtcaattatgaaaatactagaaaaacaaacacattttaaaactaaatacagctaactacttaaaacaacagaagctctatgcagacatttactaacttcaacaggaagtttatgactataagaaacaaaaatatcccaagtatccacacaagaatttggaatatatacatatctattaccttactcttgttgcaatttgaaagggaataaatatatagtaatctaagatctttgctgtaataaagtggcaatgtcgttaagagttatttttttccggtctcggacataagaatattgtctcaaaaaaacccttaaggtatataatctgtatatcaaaatgttaaaaattaggtaaataagagctactataagcactgtgttgaccactgtttctctaaaagatgct

SEQ ID NO: 659899 - DNA, 551 bp, Homo sapiens
tgggagaacagagaagaggcatttccaggtaagatcgatggtttggtggcttgagcttctaagaagggatacgttttgaaggttgaaacaggatttccaggcagatagaatgtgggatgtgaaagaaagaacaggatcaagaccccttaacccaagattttgggcctgggcaactggaaagttgagattattatcatctgaaattgaaaagattcaattggggtggaacagggttaggggttaaggatcagttttggagacagaaggttccagaagtctgtaggtccgaagaaagatctgaactagagatacattgtgtaaaatggagacattaagaataattatccgaaagcgttattttaaagattgaatgaggaagtggaattagcactgtaggttctcaaaacacttagtaattagtgaaaaataattatctgaaatgaaagaaaatcctgtagtttgtttctgcagtaawactgaacaaaacagtatctcattattttaataacatttgtgacacaattattctggtcagacaccataactataaa

SEQ ID NO: 659900 - DNA, 571 bp, Homo sapiens
tttttgttgctccatgttctaataataatgtgctgaagatgtggtcaccaccagtcgattgggtgaagtatcaacagttttaccaagtaatttgagaaatgttgacagagctgtacatagctgtacaatatgtctgtgttttaagataagtgttatcacacaaaagtcaaaaagttaaaagagttaaaagtttataaaataaaaaagttactgtaagctaagttaaacttattagtgaagaaaacataattttcataaatttagtgtagcctaagtgtacaatatttataaagtctacagtggtgtatagtaacatcctaggccttcacattcactcaccactcactcactgactcacccagagcaacttccaatcctgaaaytccatttatgttaagtgccccacacaagtgtactgttttttattttttatattatattttcactgtacctttcccatgtttagatttgtttgaacacaaaaatacttatcattgtattacaattgcctacagtattcagcacaataacatgcaatacaggtttgtagcctaggagcaatggaatgggc

SEQ ID NO: 659901 - DNA, 558 bp, Homo sapiens
  misc_feature 1, 2, 3, 4, 5, 6, 7, 8, 9, 10, 11, 12, 13, 14, 15, 16, 17,18, 19, 20, 21, 22, 23, 24, 25, 26: n = A,T,C or G
nnnnnnnnnnnnnnnnnnnnnnnnnnacagtttgctggtatgttgttgagaatatttgcatcaatattcatcagtgatattgccctgtagttttccttttttaatgtgtctttttctggtgttggtatcagggcaatactggccctgtagaatgaatttggaagtattccctcctcctctattttttggaatagtttaagtaggattggtattagttcttcttgaaatgtttggtagaattcagcagtgaagccattgggtcctgggcttttctttattgggagactttttattatgactttaatctaattacttgttattggtctgttcargttttggatttcttcatggttcagacttgataggttgtgtgtgtttaggaatctgtccatttcttctagattttccaatttattggcgtatagttgctcatagtagccattaaagatcctttgaatttctgcaatatcatttgtaatgtctcctttttcatttctgaatttatttgtatcttgtctctttttttcttagtgtgggtaaaggtttgtcaattttgtt

SEQ ID NO: 659902 - DNA, 558 bp, Homo sapiens
  misc_feature 1, 2, 3, 4, 5, 6, 7, 8, 9, 10, 11, 12, 13, 14, 15, 16, 17,18, 19, 20, 21, 22, 23, 24, 25, 26: n = A,T,C or G
nnnnnnnnnnnnnnnnnnnnnnnnnnacagtttgctggtatgttgttgagaatatttgcatcaatattcatcagtgatattgccctgtagttttccttttttaatgtgtctttttctggtgttggtatcagggcaatactggccctgtagaatgaatttggaagtattccctcctcctctattttttggaatagtttaagtaggattggtattagttcttcttgaaatgtttggtagaattcagcagtgaagccattgggtcctgggcttttctttattgggagactttttattatgactttaatctaattacttgttattggtctgttcaggttttggatttcttcatggttcagacttgataggttgtgtgtgtttargaatctgtccatttcttctagattttccaatttattggcgtatagttgctcatagtagccattaaagatcctttgaatttctgcaatatcatttgtaatgtctcctttttcatttctgaatttatttgtatcttgtctctttttttcttagtgtgggtaaaggtttgtcaattttgtt

SEQ ID NO: 659903 - DNA, 510 bp, Homo sapiens
ccagaccaaccaaattacaatctgtattttaacatgatcttcatgtaatttgtatgcctagcctrttcaagtttgagattcgctggcctatgaggtacatccagctacataacgccacctacttcttaagactattttattaaaaacaatattgttaataccttgccctccacatggccatgtgtggtagctgagggatttaaaagtagactttctgccgggtgtggtggcttacatctataatcccagcaccttgggagggcaaagtgggcagatacatgaggtcaggagttcgagaccagctcggccaatatggtgaaaccccatctctactaaaaatacaaaaattatttgggtgtggtggcacgtgtctgtaatctcagctactcaggaggctaaggcacgagaatcacttgaacctaggaggcagaggttgcagtgagctgagtgagattgcaccactgcactccagcctgggtgacagagcaagtcactgtctcaaaaaaaaaa

SEQ ID NO: 659904 - DNA, 411 bp, Homo sapiens
gtcattgagccaatatattagtaagatggtgagatggtaatggcattgagctagatcttggtgatagagttctgtgattaatataaccgcaatggaaacacagaagctagtttacagatgggtagcagaggacacatacttayagaaaaattcaatggcaatttgccaacatcaaagtccaggtacagaatgacaattatccaattaagaaagtatgtagacaatgttggatccatgtgaatgtttctaatgttcgtggcatttggattgatgccagtggaatttggcccagtaggaaccaagactacgattcaaggaaatgatgtcttaggaggatgaaattgcaaaggtaaaagccccagacaattaggcaccctcattcacaatggggactttcagatatttcctaaa

SEQ ID NO: 659905 - DNA, 545 bp, Homo sapiens
ctcacagtttctaagagtcaggaggcccagcttggcctagctgaatcctttgctcagggtcttacatacggtgaatgaaggcagaagcagggattagagtttccgctgaggcttggtgtcttgtcttgcttcacactgtaaaatttatttcttgctgctggatgaagtgacttgcttctttaaagccagcaagaaagaatctgacttcttctgtctctgactcctaagacctctctgaaagggctcacctgatttgatcagactcatcaaaaatcatcttcctttcactaaggtcaacttattacagggcytaatgacatctgcaaatttccttcaccttagccatacaacagaacagaagcagaggagtaatgttcctaaactttgccacattctaatggttagaagcaagcttcaggcctgcattacaccaaaagccacaggatttttcaagggtgtggtcatggagtctcacgttattattctgcctaccacaaaacatgaggcaatttagttaataccactgcaaagtcttctgctgtcat

SEQ ID NO: 659906 - DNA, 582 bp, Homo sapiens
agagttaactgcattttgaacatgctcaggtccttcatctctcacttccaaattctatcccttcaaaacacacttctctgtccatacatctccaaatgcacacagaagtgtacttagtagctaactcctgaaaaaattcaaaaaaggcacaccaatggaaaacrccaagctgaaggcaaatctcctttgcttctgggtagggagaagaagggaagagctaggcagagctaatgatgtcctctgagactgaggctgagttacaaacacaactgaggtccaagttagagattcaatcttaagaaaagtggctgcttttttcctgctcatttctcttatctaccctgggaattaggcgtatgttggagtgtccctagtatcttcagggacacggagacaaacgtgtccctgaagatactagaaggaacattcagagtttcaacattaacctacagctgaaggagacattgttcttggccctctgtatctggtgtaggagggtacacattacagggtgttagaagctcagaaaaagactaaacaagtcataattcactttaagacaatcacagctatagtagatct

SEQ ID NO: 659907 - DNA, 607 bp, Homo sapiens
aatactgttggtttcaccctcaaatgtatcccagaatctgactgcttcccaccatctcctcttctactgcccttgcccaaacctctatcaccacttccctggattgctgccacagtttcccagtgggtcttccttttcccacccttggccattcaacagcctattctcaacacagcagctagagattcattaaaacataagcaggtcacagtggctcctcttctcagagctttgcagggcttctgtattcactcagaataaaatcaaagaacacacaagggcctataaagccctatgcratcacctcactttaacagcccattaccttcctgacctcagacttcatctcttatttctcaccccatgctcactccactccagctgctctgctgcaccttgaacatgctgtacatgctcccttctagggcacttgcactggcattctctcttcctagaaaagactttgttcaaaatgtggaagtctgaatctcttacctcctccacatctgcccagatcttatcagctcaatgaggcctgctgtgaagccctttctaaaaattgtaccctacatacccacctcactctaaaacttccagtgccccttcc

SEQ ID NO: 659908 - DNA, 607 bp, Homo sapiens
aatactgttggtttcaccctcaaatgtatcccagaatctgactgcttcccaccatctcctcttctactgcccttgcccaaacctctatcaccacttccctggattgctgccacagtttcccagtgggtcttccttttcccacccttggccattcaacagcctattctcaacacagcagctagagattcattaaaacataagcaggtcacagtggctcctcttctcagagctttgcagggcttctgtattcactcagaataaaatcaaagaacacacaagggcctataaagccctatgcgatcacctcactttaacagcccattaccttcctgacctcagacttcatctcttatttctcaccccatgctcactccactccagctgcyctgctgcaccttgaacatgctgtacatgctcccttctagggcacttgcactggcattctctcttcctagaaaagactttgttcaaaatgtggaagtctgaatctcttacctcctccacatctgcccagatcttatcagctcaatgaggcctgctgtgaagccctttctaaaaattgtaccctacatacccacctcactctaaaacttccagtgccccttcc

SEQ ID NO: 659909 - DNA, 576 bp, Homo sapiens
tgtatataatgacatctcttcacattatcttccctctatgtgttgcctgtgttcaaatttctccctttttaagaacacctgtgacattgggttaaggtctactctaatgacctcattttaaatggattacttctgcaaagatgccatctgcatactcaggtttaggaccttgacataggaattgggagtgggtcacaattcaactgattacagaaagatattggaacgctttctggagatttattccatcracacagtattgacaggaggccattgtgaggcttcttttcttagaacaacaaattttctcaggcatttgtgataagcaaccccttgacattttaacacagtgggatgacaccacatggactcagcttgaagggcaccacttggaaaacggtaaatgtaatctatgacaggtgcatgttaaatcagggagcccgatagctaagtagcaggctgtgtattgtgctatgcaccccagctctggctcacttctcccatgtaactacaccatcagaaaaggcagattgttgaagcttgaacacttacaggcaatttccattcttatgctac

SEQ ID NO: 659910 - DNA, 576 bp, Homo sapiens
tgtatataatgacatctcttcacattatcttccctctatgtgttgcctgtgttcaaatttctccctttttaagaacacctgtgacattgggttaaggtctactctaatgacctcattttaaatggattacttctgcaaagatgccatctgcatactcaggtttaggaccttgacataggaattgggagtgggtcacaattcaactgattacagaaagatattggaacgctttctggagatttattccatcaacacagtattgacaggaggccattgtgaggcttcttttcttagaacaacaaattttctcaggcatttgtgataagcaaccccttgacattttaacacagtgggatgacaccacatggactcagcttgaagggcaccacttggaaaayggtaaatgtaatctatgacaggtgcatgttaaatcagggagcccgatagctaagtagcaggctgtgtattgtgctatgcaccccagctctggctcacttctcccatgtaactacaccatcagaaaaggcagattgttgaagcttgaacacttacaggcaatttccattcttatgctac

SEQ ID NO: 659911 - DNA, 585 bp, Homo sapiens
taagcaaataaccaaagagttagatttaggtacaaggatgttcttcaaattcttattattatagtgaaatcatgcttatgttaaattattagttggatcaattatagtacattcacatgatagaccagtacaatgttactaacaatgttaatgacaagattcatataaaccctgcatatagaatatcattctaattttattatttttatgttaactgtcaccgtttctggtatttgggataattttatgctaggattgaacctgaataagtttctttggtgagtaacgctagtgcaagaagatctgagctttaacttttcaccacttccaattgtgactcctagtggtaggcaaaacatctagcttcagtctgtcttagtttttgatgggcaaaagagagataataamccaatacctatcagaaggaaaaaagctaatttctccccttattaaataatacgtttcaattactgaaattgcccaagaagttagaataaatgacatttggtggtactatgttcccaataaattgaactgtgcaaaactaagataagtaaggatatccatcccctacagcaacaacac

SEQ ID NO: 659912 - DNA, 538 bp, Homo sapiens
cctgaaaggaggtcctaggtggagccagaacacaaccatatagaccatgctgaagacttggggagccaggatggagatttgagcagcaagagccatgacctgacttttattataaaataaagttcgcccaaagtcatccagccagtaaatgtcagaccaggattgaagtgcaagcagtctggttgcagagcccaggctcttagccaccacttaactccctcccatgatgatgttgtgtctcayagaaaggttttcatgaaggtgttcaaacactctgaaggctcgtccatgctttcaaatacattggacttacaacctggaggcaatgatagaatttggttttacatagcagttggggtccatttcgcactcaaaacacacatgcatctttgctatgaccactccgtttatttaattcatcattgaaagtcctggtttaagctgccaactatttttagtattattcacaagagatttttgcccatctcttatcactcagtcatcttcattctatcttctacaaatcaacatgtggatt

SEQ ID NO: 659913 - DNA, 538 bp, Homo sapiens
cctgaaaggaggtcctaggtggagccagaacacaaccatatagaccatgctgaagacttggggagccaggatggagatttgagcagcaagagccatgacctgacttttattataaaataaagttcgcccaaagtcatccagccagtaaatgtcagaccaggattgaagtgcaagcagtctggttgcagagcccaggctcttagccaccacttaactccctcccatgatgatgttgtgtctcacagaaaggttttcatgaaggtgttcaaacactctgaaggctcgtccatgctttcaaatacattggacttacaacctggaggcaatgatagaatttggttttacatagcagttggggtccatttcgcactcaaaacacacatgcatctttgctatgaccactccgtttatttaattcatcattgaaagtcctggtttaagctgccaactatttttagtattattcacaagagatttttgcccatctcttatcactcagtcatcttcaytctatcttctacaaatcaacatgtggatt

SEQ ID NO: 659914 - DNA, 201 bp, Homo sapiens
tggaagacaaaaataagaaggacaagggcaatgaccagaaaacagtaacaaatatggtagacattaatcctattatttgaataatcaatttaaatatcaatggtcttagtacrccaatgagcaggcagggattatcatagtgggtcaaaatacaatccaactataagctgcttagaataaatccactttaaataaacaaac

SEQ ID NO: 659915 - DNA, 519 bp, Homo sapiens
tattgtgcattgctggtgttgttggtgacaacatgaaatcatgcaactgttgtgaaaacagtacggtwgctcctcaaaaagttaaacatagcattacaatatcatccagcaactccacttttaggtatatactccagttttaggtaataaccaaaagcaaggactcaaacaaatacttgcataccaatgttcatagcaacattattgataatagctcaaaggtagaaacaatccacaggtttatcaacagatgaatgggtgaagaatgaaatactatccagcattaaaaagaatcaaattctaatacgtgttacaacgtggatgaatcttgaaaacactgagctacatgaaataaaccagatgcaaaagcacacattttctgtgcttccacttatattaggtacctagaatagccaaattcatagagatagtataatagaggttgccagaagctaggggaagtggggagtagggagttactgtttaagtggtacagagattctgtttgagatgatgaaa

SEQ ID NO: 659916 - DNA, 543 bp, Homo sapiens
  misc_feature 481: n = A,T,C or G
tcaaactatctctctttgcagatgatatgattttacacctagaaaaccccatagtctctgcccaatagctcattgatctgatatacaacttcagcaaaatttcaggatacaaaatcattccacaaaaatctgtagcatttctacataccaacaacatccaaggtgagaggcaaatcaagattgcaatcacatttacaatactcacaccaaaawttacctaggaatacagctaaccagggaggtgaaagatctctataacaagaattaaaaacgttgctgaaaaaaatcagagaggacacaaacatgaaaacattccatgctaatggataggaagaatcacctttgttagaatggccatactgcccaaggcaatttacagattaattactatttctatcaagcttccaaaggcattcttcagggaactaggaaaaactattctaaaattcatatggaaccaaaaaagagcccaaggcaatcntaagcagaaagaaaaaagccgggggcatcacatttcccaacttcaaatgatactatcaagct

SEQ ID NO: 659917 - DNA, 635 bp, Homo sapiens
actgaaaatagaggggtaggaaaatatgcattttttaaatgttaaatatatctggttgttcataactgtgcatagggtagaattcactgaaaacaaaactcacttgtatcttctgtccttctttgtcctcagatggccatggcatataaggcatataatagtttcttttcagagaacactttctatcctcaaattgcaatagccacttaccccagtagcacagtgactttcacaataaattctatttataaatctatgggcacatgccaactcaatcactgggaaaatgtgctaatcgcattgccattatattcaggaaacccagtggggaagaaacttttatctatgattgtgtttcccattggggtagattctgataccattaaatacttaaaagaagaattttctgaagaaaatatcccaggtttgagcatcttgggataaccaaaagaaagcaaaaacctcagtgatttaaacgctctaagtgggccatttctctcacaatgaccttaaaaatattaggaaagtgaaaagaaaatttaaatctgtgatttaatggtagttaacratttaaaatatgtaaaccaaaaactggagaatacagccttcttaaggtagccaaacttatttggtgg

SEQ ID NO: 659918 - DNA, 564 bp, Homo sapiens
ataaatatcaataaaatattgtccaacctactgaaacatttagaacgttctcttcacttttcatagccatggactatgaaagtgttatggcatattatatgttttttgttatattcaaaaatagtttatccttgggaaaatactaactgtggaaggaaattctacaaagttagtgactggagggaataaacctaatgcatatgttgaatatcctagtgttttctcaatttgtttaaatgggataaatcatgtgatattttttgaaaaatgcaatttatatgaaaatgtaatttctagacattcagcagcccattcacatggtaaaaacttgtcataaatcccccaaaagtacaatcttacattctcatgactatttatcaaaaatggaatatttttctgtaggcatgatagacaaygtattattatacatttggggtttttaaagatgcatattttgtttcagaaacaggctattatttctgattgactgctttgagttttaaaaccaatattgtcattagcaaaaaagtataccaagttatgtaagcataaacaaaaccaggc

SEQ ID NO: 659919 - DNA, 564 bp, Homo sapiens
ataaatatcaataaaatattgtccaacctactgaaacatttagaacgttctcttcacttttcatagccatggactatgaaagtgttatggcatattatatgttttttgttatattcaaaaatagtttatccttgggaaaatactaactgtggaaggaaattctacaaagttagtgactggagggaataaacctaatgcatatgttgaatatcctagtgttttctcaatttgtttaaatgggataaatcatgtgatattttttgaaaaatgcaatttatatgaaaatgtaatttctagacattcagcagcccattcacatggtaaaaacttgtcataaatcccccaaaagtacaatcttacattctcatgactatttatcaaaaatggaatatttttctgtaggcatgatagacaatktattattatacatttggggtttttaaagatgcatattttgtttcagaaacaggctattatttctgattgactgctttgagttttaaaaccaatattgtcattagcaaaaaagtataccaagttatgtaagcataaacaaaaccaggc

SEQ ID NO: 659920 - DNA, 542 bp, Homo sapiens
ctcaaataaagtcataagattactaagtggtagagctagaattaaaacttgaatcttgtaagttgtagaccagttcatttatccatgatacaaatatttacttagtatctacataaaatctagaaacatagtcaatattattttgtcatgcattacatgtaatatgaataagctttatttaaatatatgactgtgttttttattttttggctgccctgtgctttgtgccaagayttagggttgtagcaatgaacaagacatgtgatatccttcctgtcacagaattcgctttcttgaggcaggaattgataagcaaattaaaacagtaacatagtttcactgtgtgaagaaaatgaaagagggtattagagagtgaattgggtacttgaagcagggtggtcatttccaagaaggcccttctggagagccagcatttgagctaagacctgaataaaaaataggtacctttcctgaaaacttatgggaaaagagcattccatgcaggagaactagtagatgcaaagatcttgaggtaggaatta

SEQ ID NO: 659921 - DNA, 544 bp, Homo sapiens
tcgtaaacttgatgagtgacaatgtacacagcctgctagagatcagaaacaacatggaagagtgccaagacactttagccaacaacgagccattcctagtcaacccagaaactgatcacagtcatgtaaattagcccagctgagaccagaagaaccacccagctcagcctagcccacattactgacccacagaatcatgaattaaataaatggttattattttaaakactatgtattggggtgacttgttatacagctaactactagtctcagttaactttctttaaattttctgactcctacaaaaatttgagttatttactttcaagaatagcactctattttctactcaaaattaatgtatgttaattatagaaaatttgaatagtactgaaatgcaggaagaggaataaaaatagtatatggtatactactgtaaaataaccttaataaaattttagtttatctgttaccagtacattttctaaatatagaaacatttttatataatttgatatatttgctttctttctttttttattat

SEQ ID NO: 659922 - DNA, 508 bp, Homo sapiens
tataaaactggaggccactatctaaagcaaattaattgaggaacagaaaataaatactgtatggtctcacttataagtgggagctgaacatcaggtataaaaacagacataaagatggaaacaatagacactgggtactactagaagagggagagaaggaggggaggcaagaactgaaaaactacctattgggtgctgtggtcactatctgggtgaaggtataatttgtaccccaaacctcagtgccatacgatatgcccttgtaacaagcctgcacatgtgccccctgaatctaaaatagaagttgaaattatttaaaaaatcattattttcctctagatcaatattagcataaacttttattgttttcgcagatggttctttctgcaattaatatttattgtcctgttttgtgtaatattttaaacaaatactggtatttgtttaataaaatgccttatgaagataatgtttactatcacaraatatgcaaaagttaagagcattt

SEQ ID NO: 659923 - DNA, 536 bp, Homo sapiens
attatataatgataaaggggtcaatactccaggaagacagaacaattcttacrtatgctcccaacaagacagcatcaaaatatgtgaggcaaaaactgattgaactacaaggagttcactagtatggttagaggcttcaacacccctctatcagaaaaggacagatccagcaggcagaagatcaatcagtaaggacatagttgaactcagtaacaccatcaatcaactggatgtaatggatgtctatttactactacttaaaacaacagcagaatgcacattcttatcaagcttacatgaaacattcacaaagaccacattctgggccataaaaacacactttaaaacatttaaaagaataaacatataatatctattctcaggcctcaaaggaattaaactagaaatcaataataaagatagctcgaaaccttaaaatacttggagattgaacaacacacttctaaataacacatgagtcaaagaagaaatctcaacagaaaatttaaaatattttgaaatatatgaaaatgagg

SEQ ID NO: 659924 - DNA, 536 bp, Homo sapiens
attatataatgataaaggggtcaatactccaggaagacagaacaattcttacatatgctcccaacaagacagcatcaaaatatgtgaggcaaaaactgattgaactacaaggagttcactagtatggttagaggcttcaacacccctctatcagaaaaggacagatccagcaggcagaagatcaatcagtaaggacatagttgaactcagtaacaccatcaatcaactggatgtaatggatgtctatttactactacttaaaacaacagcagaatgcacattcttatcaagcttacatgaaacattcacaaagaccacattctgggccataaaaacacactttaaaacatttaaaagaataaacatrtaatatctattctcaggcctcaaaggaattaaactagaaatcaataataaagatagctcgaaaccttaaaatacttggagattgaacaacacacttctaaataacacatgagtcaaagaagaaatctcaacagaaaatttaaaatattttgaaatatatgaaaatgagg

SEQ ID NO: 659925 - DNA, 564 bp, Homo sapiens
tggtctcataccgtcatatttctgccttcattttctattttttttttctgtttgccactcttcttcaatcaaactgggctttgtgctattcctagaaaatgcaatgcctggyggactctgtcttgttgccttaaatatactggctgtttccctgtctgcaacataacttcccccaaatatccacatggcctctcactgacttctccaagtctttgcaaagatgtccccaatgggtgtgccctatcctgactatccgctttccagctgcatcccacctaccactcttaatttcccatccctgattaatgattaattcatttctttatctcacttatatagaataattattgtattttaattgtctttgccctcctcaactaaaatgtaaatttcatcgttagtgcttcatccatgactttgtccccagcacctaatacaggcagtatatagttagctgtcaattatttgctgaattaatgcacatttgatgctaatgaattaataacacttaggcccacaggaactaagggaagtacatatgtgactcaggcattgagataaacc

SEQ ID NO: 659926 - DNA, 546 bp, Homo sapiens
ttctgattttctggccagaaagggaggatttctcttggaacttattctgtgcacataacatctgccacacagttcaggatttagctgttctagtgtctaagccaggaaatatgaggtgggagcactccaggacactctgctggatctgtatttcttcgagtttttatttctttccctactctgttattatttttcacagtactctgatagttattttatatagtctgtcctgagtttttagttgtaaccagtagaagagatagagagtaaggtatacctcctagccagaatcgaaacctgccaagttatttttcatggctgcataatatttcagcaagcacaagkgtcataatttcttgaaatttctccctattcgattttaggtcatttctatttgttttcattattataaataaccagtgaatatttgtttccatattaataattattgtcttacaacagatattcaggtgaaatggctgaggaaataataaataccaacatatttagatccctgggcttccttctgattggaatgcgctgccc

SEQ ID NO: 659927 - DNA, 546 bp, Homo sapiens
ttctgattttctggccagaaagggaggatttctcttggaacttattctgtgcacataacatctgccacacagttcaggatttagctgttctagtgtctaagccaggaaatatgaggtgggagcactccaggacactctgctggatctgtatttcttcgagtttttatttctttccctactctgttattatttttcacagtactctgatagttattttatatagtctgtcctgagtttttagttgtaaccagtagaagagatagagagtaaggtatacctcctagccagaatcgaaacctgccaagttatttttcatggctgcataatatttcagcaagcacaagggtcataattycttgaaatttctccctattcgattttaggtcatttctatttgttttcattattataaataaccagtgaatatttgtttccatattaataattattgtcttacaacagatattcaggtgaaatggctgaggaaataataaataccaacatatttagatccctgggcttccttctgattggaatgcgctgccc

SEQ ID NO: 659928 - DNA, 595 bp, Homo sapiens
tactttttgcttatatttttggagctcctgtattaggtacatacaatctaaaattgttattttattcctggcaaactgaatcttttatrataatgtaatgactgtctttatctctaataatgcttttagtcttaaaatatattttgtctgttattattatagctaccttagttttcttttagtatttgcttttatggatagttcttccattaatttcaactttcttacattttgggtctgtttcctatgaacagtatatttgtaatttttaatccaacttaatgatctattaactaatctatttatatttgtggtgatagcttttataatttgatttatttctgctttctctctgttattctttttagttttcttttatataatctgagttttcccaccttgcttggtttttccattatgctgattttgcataaaacactctgttatttcagtttttactcctggaattttaccaagtatactaagcaaaattgaaagaaatatcttattaatttttaataagttaatacttccttaacaataataggatacctatgtgtctcaggttcttcatctgtaaaatggagataataat

SEQ ID NO: 659929 - DNA, 538 bp, Homo sapiens
gtctgatacagaatccccacctatgtggggttctttttttgaaacatgttccttagatttcagtggaagtttacagtctctagacatccatttgaatgacctcattggagacgcatggaagagaaaaatctgctggaacttagagtaccactgtgtgcctttctgtgttctatcatctcaggcaactgatgcttatgttaaacctcrtgaaaaggcagccatgtggtagactcgacagctacagcttcagtttgaaataggatgagaagagaccacagtacagtgctatttacactggtggctcctaccggctgctcatcctctgaagggcgtgtattagagctttttttcttttttttttttgagatggagtcttgttgtgtcacccaggctggagtgcagagacacgaccttggctcactgcaacctctgcctcccaggttcaagaaattctccctacctcagcctcccaagtagctgggattacaggagcacaccaccacgcctggttaattttggtatttttagtagagacggg

SEQ ID NO: 659930 - DNA, 611 bp, Homo sapiens
agaagataaaaatgagcctcatctttattatcaatcttaaggaygtattcctacttcctctttccctttttaatctgtattagaaaaaaagcagggcatcagtatacacacatttttactccattttcatggaaacaaagataaagtgtgattgtacacactgtttgcctctgctgaaaagtgaacctaacgcacaaagaatgtgttctggagtctagcctgaaaatgaagaaggctgaaagtcccctgtcactttcaggctgtgaatcaaacaagttcagcatctttatttgtcaaatctcgacattattgctaaatagaagcacactatttgtaaaatgtttcattgctgtttaaaatttaataatctcccttggcccatgttttgtttttcttctatttgaaaatcctgataaggcagtttcggattgtggttatttaataccagaaaaccttttcttttgtgcacacttattaaacagatttttgaaagcagcatttgttcatgtaagtttattaaattatatttcttcttacaaagtaatgagaacactgttaaaatgaggtaacttgtttgagtgtgtgtgttgacttcttatcacagtgtttaa

SEQ ID NO: 659931 - DNA, 601 bp, Homo sapiens
tggcaacatcattatttctgtctacagtgttctgaggcaagttttcggactgagagttttagaccgagattactaattaggtaatctctgatttttttttttttttacttttattttaggtgcaggggatacatgtacaggtttgtgatatgggtaaattgtgtgtcacgggggtggtagggtttagtgtgcagataattttgtcacccaggtaataggcatagtaccaaatacatagtttttccattctctccttcctgccaacctgcaccctcaagtaggcccatgtgtctgttatttccttctttatgtccatgtgttctcaatgtttagcttayatttatgagtgagaacatgtggcatttatcatattccttatttatttatttatttagagacagagtcttgttttgtctcccaggctagactgcagtggtgcaatcacggctcactgcagccttgacctcctggtctcaggtgatcctcctgcctcagcctcctgagtagctgggattataggcacgtgctagcacgcccagctaatttctatgtttttttgtagagatggggtttcaccctgttgcccacactggtcttgaac

SEQ ID NO: 659932 - DNA, 601 bp, Homo sapiens
tggcaacatcattatttctgtctacagtgttctgaggcaagttttcggactgagagttttagaccgagattactaattaggtaatctctgatttttttttttttttacttttattttaggtgcaggggatacatgtacaggtttgtgatatgggtaaattgtgtgtcacgggggtggtagggtttagtgtgcagataattttgtcacccaggtaataggcatagtaccaaatacatagtttttccattctctccttcctgccaacctgcaccctcaagtaggcccatgtgtctgttatttccttctttatgtccatgtgttctcaatgtttagcttatatttatgagtgagaacatgtggcatttatcatattccttatttatttatttatttagagacagagtcttgttttgtctcccaggctagactgcrgtggtgcaatcacggctcactgcagccttgacctcctggtctcaggtgatcctcctgcctcagcctcctgagtagctgggattataggcacgtgctagcacgcccagctaatttctatgtttttttgtagagatggggtttcaccctgttgcccacactggtcttgaac

SEQ ID NO: 659933 - DNA, 601 bp, Homo sapiens
tggcaacatcattatttctgtctacagtgttctgaggcaagttttcggactgagagttttagaccgagattactaattaggtaatctctgatttttttttttttttacttttattttaggtgcaggggatacatgtacaggtttgtgatatgggtaaattgtgtgtcacgggggtggtagggtttagtgtgcagataattttgtcacccaggtaataggcatagtaccaaatacatagtttttccattctctccttcctgccaacctgcaccctcaagtaggcccatgtgtctgttatttccttctttatgtccatgtgttctcaatgtttagcttatatttatgagtgagaacatgtggcatttatcatattccttatttatttatttatttagagacagagtcttgttttgtctcccaggctagactgcagtggtgcaatcayggctcactgcagccttgacctcctggtctcaggtgatcctcctgcctcagcctcctgagtagctgggattataggcacgtgctagcacgcccagctaatttctatgtttttttgtagagatggggtttcaccctgttgcccacactggtcttgaac

SEQ ID NO: 659934 - DNA, 621 bp, Homo sapiens
agtgaagccaccactgaaaaccaacagtaaatctcagccgactgtgcaggatggccagctagcgcacggggctgcaggttggctggagctgatgccacaaaaaaatactttagtatagtctaaaggtagctgattgcctggagaagatgataaaaatttggaatattcacgatacgttatggggatagaatatatttggttacagtacataaagaatgtttcctccaaagaaagaacgggagggagctcctgaagagtgtgtyatttgaggatgggggaaggacctgcattgcctggggcatctaccccaagcaaaccctgctgagcgtggacttctctgcttgaatcaccccgtcttcctttaggaaaagacggagaaaggaaggaagttgggtctcagttgcgcatgcagcaagtagatgtcttggtgttaaattctccattaatcagaaccaggcattctgaatgttaatttccatcctaaattttacacgtgctggggtggaggttaaggctcagatttatcttgctaagagccactttgcttgccaactatttatgaatttcaggaattagagctaaaagttgcgtgattgcagggctggcaaatgggctaaccag

SEQ ID NO: 659935 - DNA, 551 bp, Homo sapiens
acaaatttctgggtaaaacatgaatttaagagaaaaacaaataaatgcattatagaataataatcatcactcacattactgaacctttactaacaggacaaacagtattctaagtgctttaattttagtaatttatttaagcttcaaaacagctctatcacttaggcattattattattatttttgagacagagtttcactcttgttgcccaggctggagtgcaatcgcgtgatcttggctcactgcaacctccgcctcscaggttcaagtgattctcctgcctcagcctcccgaatagctgggattacaggcacctgccaccatgcccagctaatgttttaaaaaatatttttagtagagacaggggtttcaccatgttggccaggctggtttcaaactcctgacctcaagtgatccatctgccttggcctcccaaactgataggattacaggcatcagccaacgtacctggcatctgaagtaggcattattaacatgcccatttcacaggtaaggaaacaggtttacagatgaggaagtaactcaccca

SEQ ID NO: 659936 - DNA, 649 bp, Homo sapiens
gtgcagcacaccaacatggcacatgtatacatatgtaacaaacctgcasgttgtgcacatgtaccctagaacttaaagcataataaaaaaaaacataataaacataatgacctccaggtccattcatgttgttgcaaatgatgggatcttattattttttatggctgcatagtactccattgtgtatatgtaccacaatttctttgtacattcatcggatgagggacacctgggtttcttccaattattggctactgtgagcagtgctgcaataaatatgagggtacagatatatcttgaatatactcatttccattcttttggatatatactcaacagtgggattactggattgtagctctatttttagtcttttgaggaacctctaaactgttctccatagtggttatagtaatttatattcccatccacagtgtacaaaagttctcttttatccccctcctcatcagcatttgttattgcctgtcatttgaataaaagccattttaactggtgtaagatcatatctcattgtagttttgatttgcatttctgtgatgatcattctctgatgttgagcacatttttagaacaaaaaacctaatttacaaaccacacaaaggacctgaatacacattccttttttata

SEQ ID NO: 659937 - DNA, 649 bp, Homo sapiens
gtgcagcacaccaacatggcacatgtatacatatgtaacaaacctgcaggttgtgcacatgtaccctagaacttaaagcataataaaaaaaaacataataaacataatgacctccaggtccattcatgttgttgcaaatgatgggatcttattattttttatggctgcatagtactccattgtgtatatgtaccacaatttctttgtacattcatcggatgakggacacctgggtttcttccaattattggctactgtgagcagtgctgcaataaatatgagggtacagatatatcttgaatatactcatttccattcttttggatatatactcaacagtgggattactggattgtagctctatttttagtcttttgaggaacctctaaactgttctccatagtggttatagtaatttatattcccatccacagtgtacaaaagttctcttttatccccctcctcatcagcatttgttattgcctgtcatttgaataaaagccattttaactggtgtaagatcatatctcattgtagttttgatttgcatttctgtgatgatcattctctgatgttgagcacatttttagaacaaaaaacctaatttacaaaccacacaaaggacctgaatacacattccttttttata

SEQ ID NO: 659938 - DNA, 649 bp, Homo sapiens
gtgcagcacaccaacatggcacatgtatacatatgtaacaaacctgcaggttgtgcacatgtaccctagaacttaaagcataataaaaaaaaacataataaacataatgacctccaggtccattcatgttgttgcaaatgatgggatcttattattttttatggctgcatagtactccattgtgtatatgtaccacaatttctttgtacattcatcggatgagggacacctgggtttcttccaattattggctactgtgagcagtgctgcaataaatatgagggtacagatatatcttgaatatactcatttccattcttttggatatatactcaacagtgggattactggattgtagctctatttttagtcttttgaggaacctctaaactgttctccatagtggttatastaatttatattcccatccacagtgtacaaaagttctcttttatccccctcctcatcagcatttgttattgcctgtcatttgaataaaagccattttaactggtgtaagatcatatctcattgtagttttgatttgcatttctgtgatgatcattctctgatgttgagcacatttttagaacaaaaaacctaatttacaaaccacacaaaggacctgaatacacattccttttttata

SEQ ID NO: 659939 - DNA, 582 bp, Homo sapiens
gaaagtttctaaagaaattaaaaattaaactaccatatgatctagcaatccctcttttgggtatatacacagaggaaatgaaatcactttattaaagatttctgcactcccatgttcactgcagcattattcacaataaccataatatggaaacaacttaagtgtctgtcacaagatgactagataaagaaactgtggcctatgcatatataaatacacaataggatattattctgccttagaaagggagatcctgccattcatgacaacatggatgatgctcacttatttctcacttgggccttgataatgttgaaaactagagtgccctcaatctccaataatttaacaaacctttaaaaccttgaatgcttgagccctttttagccttcctgaattttggtggtggcaattttctgtcggaacccatatccacaaactaattagctrtgccctcaggcacatcatctaagtggactaaccctcagttttgtcaaatgtagaaaggtggtgataatagttccaggttcttaggatgattatgagaattggtaatatatttaaatgcttaataaagcacat

SEQ ID NO: 659940 - DNA, 587 bp, Homo sapiens
ttaaaagctacttctttgtgtatggcttagtgtgtgtgtgtgtgtgtgtgtgtgtgtgtgtgtgtgtgtgtgcatgtgcactttatcgcccataacagtaaagattatgttcagctgtaagtaattgaaaactcaaataataaaaactaaataagacagaagaagtttttttttcttgccaaaatagaatctggaagtaagcagtccaggastgtatgtagtcactgttaccattgggaataagtgttccttaaatattttctcatgagttttttccttatgacctaaggtggctgctcaaattttagccatgacaccacatttgagtcagcataaaaaatgaaggaaaaacgaagacacatatcctgtcccattaaagatagttcccataagcaaaacaagatacctctgcttgtatccctttgactagaacttagtcagaatgccacactgtttgattagaagcctgtggcatgaagtttttaaatcctgtatgactacgtttacaaataaaaattggggattttctaaggaagaatgaagggaaaattagatgtctagagacagacaagatatctgatatactg

SEQ ID NO: 659941 - DNA, 485 bp, Homo sapiens
atggtggaatagaatgcttcagcagttgtccccctgacaaggataccaatttaagaactatctacacacaaaaaacaccttcataagaaccaaaaatcaggtgagcactcacagtacctggttttaacttcatatgactaaaagaggcactgaagaggttaaaaaaaaaaaaatcttgaatccctgacgtcaccttctcacctcccccagcagcagctggtggcacagagagagaatctttgttcttgggagagggagagcacagcaacmattgcattgaattcagtgctgccctgtacagcagagagcaaaaccggactgactgacctcagccacctggactgatcgacaagagaaagaaatagagggcatccaaattggaaaggaagaatgcaatcatccttgtttgcaggtgacatgattttatatttggaaaaacctgaagacatcacctaaaaactactagaaaagataaacaaattcag

SEQ ID NO: 659942 - DNA, 485 bp, Homo sapiens
atggtggaatagaatgcttcagcagttgtccccctgacaaggataccaatttaagaactatctacacacaaaaaacaccttcataagaaccaaaaatcaggtgagcactcacagtacctggttttaacttcatatgactaaaagaggcactgaagaggttaaaaaaaaaaaaatcttgaatccctgacgtcaccttctcacctcccccagcagcagctggtggcacagagagagaatctttgttcttgggagagggagagcacagcaaccattgcattgaattcagtgctgccctgtacagcagagagcaaaaccggactgactgacctcagccacctggactgaycgacaagagaaagaaatagagggcatccaaattggaaaggaagaatgcaatcatccttgtttgcaggtgacatgattttatatttggaaaaacctgaagacatcacctaaaaactactagaaaagataaacaaattcag

SEQ ID NO: 659943 - DNA, 485 bp, Homo sapiens
atggtggaatagaatgcttcagcagttgtccccctgacaaggataccaatttaagaactatctacacacaaaaaacaccttcataagaaccaaaaatcaggtgagcactcacagtacctggttttaacttcatatgactaaaagaggcactgaagaggttaaaaaaaaaaaaatcttgaatccctgacgtcaccttctcacctcccccagcagcagctggtggcacagagagagaatctttgttcttgggagagggagagcacagcaaccattgcattgaattcagtgctgccctgtacagcagagagcaaaaccggactgactgacctcagccacctggactgatmgacaagagaaagaaatagagggcatccaaattggaaaggaagaatgcaatcatccttgtttgcaggtgacatgattttatatttggaaaaacctgaagacatcacctaaaaactactagaaaagataaacaaattcag

SEQ ID NO: 659944 - DNA, 609 bp, Homo sapiens
ttttggtgatttggacaccaaaattactggctgctcaagtcccttatataggaaagtatagtatttgcatataacctacacacatcctccacatgctttaaatcagatgtgtccaatcttttggttttcctgggccacattggaaggagaattgtcttgggccatacataaaatatactaacactaacaatagctgatgagctttaaaaaatcacacacacaaaaaaatcatatgttttaagaaagtttacgaatttgtgttggagggtaggccacagattggacaagttgctttaaatcacctctagattacttatatctaatacaatgtaaatactatgtaaatagttgttatattgtattgttcagagaataatggcaagaaaaaagtctgtatgtttagtacagacacaatcattctttttttcaaatgtttttgaatcgaggttggctgaatccatggatkcagaacccatggatatgaaggagtgactgtattctgtgtggaatttatgctgaatgggttggcagaacatacatattcaataagctataggaggagcaatgaatatttatgaaaggagaaacgtgaatgtgtcattgagtttc

SEQ ID NO: 659945 - DNA, 590 bp, Homo sapiens
atggtggcacatacctgtaatcccagctactagggaggctgaggcaggagaattgcttcaacctgggaggtgaaggttgcagtagccaagattgtgccactgcaytccagcctgggtgacagagctagactctgtctcaataaaataaaataaacaaaatatttaaaaattaaatttagaaaaatgttaaaaaaaagaaatttaagtagtaaaataaaaataaataaataaaacatggcactaacaattcaaggatacaacttcatattctggtgctcttggggttacacgtagaacttagttattttgaagaccttgctgaaaaacatcagtaacggtttaaaaaatattactaaaatgttgtttcatttttgacatgagacttcaatttaagtagaaatctctcttccagtgtgcttttggtatcacttttaatgcgctgttagtgtccttgccccacctgcacctccaggccaacctgtattgtgtcatgaacataagccacaccaggccacttacaaaggcatcaagccatgtaccagtttgataaactttccattgacttctctgtattcattaagactcagctg

SEQ ID NO: 659946 - DNA, 590 bp, Homo sapiens
atggtggcacatacctgtaatcccagctactagggaggctgaggcaggagaattgcttcaacctgggaggtgaaggttgcagtagccaagattgtgccactgcattccagcctgggtgacagagctagactctgtctcaataaaataaaataaacaaaatatttaaaaattaaatttagaaaaatgttaaaaaaaagaaatttaagtagtaaaataaaaataaataaataaaacatggcactaacaattcaaggatacaacttcatattctggtgctcttggggttacacgtagaacttagttattttgaagaccttgctgaaaaacatcagtaacggtttaaaaaatattactaaaatgttgtttcatttttgacatgagacttcaatttaagtagaaatctctcttccagtgtgcttttrgtatcacttttaatgcgctgttagtgtccttgccccacctgcacctccaggccaacctgtattgtgtcatgaacataagccacaccaggccacttacaaaggcatcaagccatgtaccagtttgataaactttccattgacttctctgtattcattaagactcagctg

SEQ ID NO: 659947 - DNA, 537 bp, Homo sapiens
ttgagaagttaggcattaactagaattcactgtaaatggatttcttacarttagttaaaataggctaattccagagctggatgataactgttttaatcaatttaatttattaatttttcccatgtccttaatttttatccttattcttctcacaatcagagatctacaatgtgtgtgttgaccaaaaaatatcttccagcttacttcctttactgtctttggttcttcttgtatatttgtttggcagcatgttgaggtatatatagtcatgcatttcaactcacctttaatttacttgcatcctcctgctcaaattttaggcttaacagcagtttctcatgactgaaatgatggtgaaacacattgctaccaggaagatggtgccctgaagaaaaggcacacatatacacagaattctcagaaaagctccctctctgccattatatatagaatatgtttcatctgtttctttgcattatatggggttttaaaattaaagataacaactttaattattcccctataaagggcttatta

SEQ ID NO: 659948 - DNA, 638 bp, Homo sapiens
tctgtgtgacttcggagggtccttctaccccaagacctcactgctaccatctgtaagtgaaggaactggaccagatagagaataaggagggttgcatctcatgccaaaggcaaaggttaggagtggctgcctggggtgcagtgctgggagggtttgcaaggggagtgtcaaggctggtcagtgattatggggaagagtcagggcccatcaggggaatgaagtagctaagggtgcctccagctctaatagccacaagtgaattctgttgaaagggagtttcagcatctcacaaaccaagtggagcttcaggatggaggctgaaggccagacaggatcctccctgtcctgtggcataaattcctctcagaactcacagatgatcagtcagtaccgcaggcagctcctgtcattccactgtgtacatctccaagcacttctcattgccctgacctatgagctccmctgggcaccggttcgtgtagtccacaggggcctcatctaggtagcagaagtctccagggctgggacccttggccagggccatgtaggcatacatgttgtacttcttcaaaaatcttgcaatggcctcgttttcctctggactcctagggacagcaatgcagctgcctgctctggca

SEQ ID NO: 659949 - DNA, 512 bp, Homo sapiens
gggcagccctaaatttgttgcttcacatgggattctgcccccacaaaaatgtaaaataacttccagattttccagtaaaatatactaagccaaacattttgagcaacttgtccactaaaataactttaaaactattttctcaagtacctacctattttttcttttgatcctccagcaagtagattgatattttctcctggtaacaattctaattgctcggtacattygacaaattttccagactcaaagctgcttaatgatctgtaattaaaatattggttagcttgtattcctatgcagcctgtggaaccattaaaaaaaacaaacaaacaaaaacagaacaaatcctaggaagacagcaaagtacacagcacttttctgacaaaattccttccacgaggatgccattattttggtttttatgttgcagatgtgactaccacttaattagtactcaaattggagtggcaaaccagaaagtcacagctacagactttcagtggagctgactc

SEQ ID NO: 659950 - DNA, 629 bp, Homo sapiens
tgctagtgtttcagaaatcagagatagagatatgttatgttttgggcagaagaaattgtaaagaaagatgcagggagggaagcacttgtgtcaaaaatgtcagcatgttgaaactgagtcacttaaaaaattgagtagagggcataaaggaccatttaaagaacaaagcaagtttatgtattagattgaatgaatagtgaataaaaacataggggagttttagctgcaggctccaaaacagaagcatggaagtcactatctcccatttttgtatctggggatatgatgtactcgacagagtaccaaggtggggaagcgcctgctgcttagtgcttgaccactctttaccctctgccacccacactataataagaaacagacagcagtgctcccaagagcaggcctataacctcattgatgcttcttaagtggccataaagaagttgactragcatgaaatttcatcattaaagtttatgcctttagttggggggaggggaggagaaacaaaaatcatgactaaattaaaaagaggaggaggaacaaatgataacagctcgtatgaaaagatgatgtggttcctaggagatagttaagtcttagcagggaaccaaagatactttcagttc

SEQ ID NO: 659951 - DNA, 486 bp, Homo sapiens
attaacttaataattatcagctcaaccaggaaactacaccacctaaaaggtagttaattttatcackcctagacatctacaggagaccatgattctccattatgtgaatgccttgctgcccatgtgatgcctgcacccatcaattataagaagcttcagtcatttagtacttaatatgtaatttttaaaaattacataagtaataccttctccttatagagaactgaaactttcagaaacagttaaagcctaatttgaatattgccaaagccctgtctcttcttcagagacaaccagtgtttccagtttggtgtgtattttccccaaatacagtgaatgtgtgtataaacacgtgtagatttacctgtcctagatatgagcatttgctttgtgagtctgctttaagtcaagttctaaactatggctcagtttaaaacttatctttttctatttaataatataccttagaagtcaggccatgatatt

SEQ ID NO: 659952 - DNA, 486 bp, Homo sapiens
attaacttaataattatcagctcaaccaggaaactacaccacctaaaaggtagttaattttatcactcctagacatctacaggagaccatgattctccattatgtgaatgccttgctgcccatgtgatgcctgcacccatcaattataagaagcttcagtcatttagtacttaatatgtaatttttaaaaattacataagtmataccttctccttatagagaactgaaactttcagaaacagttaaagcctaatttgaatattgccaaagccctgtctcttcttcagagacaaccagtgtttccagtttggtgtgtattttccccaaatacagtgaatgtgtgtataaacacgtgtagatttacctgtcctagatatgagcatttgctttgtgagtctgctttaagtcaagttctaaactatggctcagtttaaaacttatctttttctatttaataatataccttagaagtcaggccatgatatt

SEQ ID NO: 659953 - DNA, 486 bp, Homo sapiens
attaacttaataattatcagctcaaccaggaaactacaccacctaaaaggtagttaattttatcactcctagacatctacaggagaccatgattctccattatgtgaatgccttgctgcccatgtgatgcctgcacccatcaattataagaagcttcagtcatttagtacttaatatgtaatttttaaaaattacataagtaataccttctccttatagagaactgaaactttcagaaacagttaaagcctaatttgaatattgccaaagccctgtctcttcttcagagacaaccagtgtttccagtttggtgkgtattttccccaaatacagtgaatgtgtgtataaacacgtgtagatttacctgtcctagatatgagcatttgctttgtgagtctgctttaagtcaagttctaaactatggctcagtttaaaacttatctttttctatttaataatataccttagaagtcaggccatgatatt

SEQ ID NO: 659954 - DNA, 481 bp, Homo sapiens
acttacaatcatggcagaaggtgaaaaggaagcaagcacatattcacatggctgaaacgagtcaggggaggtgctttttaactttttaaacaagcagatcttaggataactttatcatcagacagcactagggggatgaggctaaaccattagaaaccacctccatgatgcaaacaccttctactaagcctctcctccaacactggcaattacaattccacatcagattggggatgsgggggtgcacaaatccaaaccatatcaagaagcatgttaaaaattgagggaagttctaatcaaatgacaagtcaggacacggcattccatcaacataacactcctctcaatacattccaaagtgggagaaaggaaaaagtgcaaggatgaagaagggacacagcaaaatgacaagatgactaacaagatgacccctgtggaaagcatttactgattcaacaaccaaataatgaagacaatagag

SEQ ID NO: 659955 - DNA, 481 bp, Homo sapiens
acttacaatcatggcagaaggtgaaaaggaagcaagcacatattcacatggctgaaacgagtcaggggaggtgctttttaactttttaaacaagcagatcttaggataactttatcatcagacagcactagggggatgaggctaaaccattagaaaccacctccatgatgcaaacaccttctactaagcctctcctccaacactggcaattacaattccacatcagattggggatgggggggtgcacaaatccaaaccatatcaagaagcatgttaaaaattgagggaagttctaatcaaatgrcaagtcaggacacggcattccatcaacataacactcctctcaatacattccaaagtgggagaaaggaaaaagtgcaaggatgaagaagggacacagcaaaatgacaagatgactaacaagatgacccctgtggaaagcatttactgattcaacaaccaaataatgaagacaatagag

SEQ ID NO: 659956 - DNA, 481 bp, Homo sapiens
acttacaatcatggcagaaggtgaaaaggaagcaagcacatattcacatggctgaaacgagtcaggggaggtgctttttaactttttaaacaagcagatcttaggataactttatcatcagacagcactagggggatgaggctaaaccattagaaaccacctccatgatgcaaacaccttctactaagcctctcctccaacactggcaattacaattccacatcagattggggatgggggggtgcacaaatccaaaccatatcaagaagcatgttaaaaattgagggaagttctaatcaaatgacaagtcaggacayggcattccatcaacataacactcctctcaatacattccaaagtgggagaaaggaaaaagtgcaaggatgaagaagggacacagcaaaatgacaagatgactaacaagatgacccctgtggaaagcatttactgattcaacaaccaaataatgaagacaatagag

SEQ ID NO: 659957 - DNA, 596 bp, Homo sapiens
cagagtagccatccagaggaaaatggaagaatagagtttgctagaaggagtcccaggtgaaagcaaagagacttgtgagtgaaagggaagaaaacaatcgcttgctgttttccaccgctttctaaggaaggacagtgctagatgcaggctgggtacctgcaggtccttaggacttccataggagatacccccagaagataaaagaaaagctgacacctctgtaatggctcagatagcaaaaagaagcttgacctcttaacattccagctatatgtgtacccttaccacatagtccaggtctaagccgaaaagaatggtcaccccacagcaccaatttgtatgagacctccatttaaactggtgttagaaatatagaaataaagtaagggagaggacatggcattttttttttctcaaaatgcatctctctgggctcacaatatggctagtgaatgagtggtcatgcaaacagatctgggaattagaaagccctgactttgaacaccaggtctgctgcctrctggttgtatgatcttgtatacattacttaacctctctgggtttcctttgcctcatttattaaatcagaaaacaat

SEQ ID NO: 659958 - DNA, 630 bp, Homo sapiens
cctagcttctacaaagtccaaagccctgctgctggtggtgacctgagccactcaacctaggggagaagcattgaagaccaaggacggatgacttgtggaagggaatggctggggggcacaggaatgtgtttgcacctgtgtcttataggacctggttgccatctcacctggatgcctttgcacacctcctccttgcacctgcagtgctatatgatgatgatctgtctgtgcctcttagtcttgtagctccttaatagcaggattgtttatcatcrtgttcccagctggcccaaatatttactgaaggagcctggtttgaccatgtctacttgtctcctctggtcacttccctacaggccatgtccctttgtgcagaaagatctgggagccaaggggagtagagcctccctggtaggcccacatttccctatggctgcattcacagctacctgaggaggggctgctatgcacagagagtgtatatggaggtgtttgtctgtgtggctgtcaagctgcagtcctctcagcccaagtgctggagcctaccagcaaggtgcctcccaagccaaggaaagcaaggccaccatgtagatgaagtccagtcacatccagttggccatgtatggcaac

SEQ ID NO: 659959 - DNA, 565 bp, Homo sapiens
gcatccattgtttcgttttcaaagcctaggaattacctgcctcaccactgcttctcatagaatttgattctcatgtcatctttccctggccctaacgtgacatttatttcagaacaaataagtatagtttgtagttacctgttcaactatttctctaataaagcaagcggcctattttcatrtgttttttcttcaagctgagttaaaagtctacttgtatatattgtgttaatagccaataaggcagaattgagtgacaataattatacatttaagtatattttcattttatagtaattactctgtaattgaaaataaggagagagatcaaaagagagagagagagcacacacatacatggaatacacattgtgaagaacttcccataagaggaaaaactgtcaggatatatgcagtgggatccttttgtgagtctatgtttttctttgtcccatattttctatgcttaatattattagaccaccattaagtctgtaccaaggacacatgtcaacagttgaagtcattttctctttggccacagctgcagtttcaggttattcat

SEQ ID NO: 659960 - DNA, 605 bp, Homo sapiens
tgaactttagtcaaagaaactgagggtgctttccagaaaaaaaaataggcacttatttktattccttagaattcttattcatttttcattcttaggcagtcttccttttaaattgacgtttaacttacacatagtgaaatatgcagatgttaattgcacacttcaatttgctttgaccaatgtacatccctgttaaacccaaacttctgtaaagaaatacttcctaggtattattaaacagcaaacttcctgacttggcttgagcaggagacaattggcaagagatgcctgagtggagatgtgtactataccacttggtatgcaaagatactaatgctaataacacttaggtggtagaattgaatagtcttgctgaacctcattcatgggtgctgtcttctagtcaaggaaattcagcagcaggggcaatggggaggtcatcaatggtggaagctcagaggagaggttagactgcagctgagtgtctcagtcaaggaactgtgaagtaagaagctcctacagggactctgaaagacacacacgcacacacacacacactgtgagtgagacagcacttgtctcagtcaaatgagtaagactgagtg

SEQ ID NO: 659961 - DNA, 598 bp, Homo sapiens
gcatactgaagaatgtgtcagagtcctttaatagaagacttgatcaagcagaagaaaaaattgctgagcttgaaaataggctattcaaaaatacacagtcagaggaaacaaaagaaaaaagaataaagaagaatgaaacatgcctacaggatctagaaaataacctcaaaatggcatatttaaaagttactgtccttaaagaggaggtagaaaaatatatagtggtcaaaagtttattggcagatataatagcagccaacttcacaaatctagagaaatatatcaatattcaaatacaagaaggttataaaacaccaagcagatttaacacaaagaaagtatcttgaggcatttaaaaatcaaactcccaaaatcaaggatgaagaaaggatcctaaaagaagcaagagaaaagaaacaaataacacacagtggagctctaatatgtctggtagcaaactttgtgatgggaaccttacaggccaggagagagtagcatgacrtatttaaagtgctgaaagaaaatatttttaccctagaatagtatatcttcaaacacaaagaagaaataaggactttcccagacaaacaaaagctga

SEQ ID NO: 659962 - DNA, 523 bp, Homo sapiens
gtataggaacttgaatatagccaatatattcctaaagatctaaattactctccaaataaaatgctttttgtacataattttttctattcccattaattatctttcacagttttattttgttttgattttttcatttgttccttccccctccccttggcattcagttaattcttctattttmtttcccaaacaggcacattatcattaaatgtaatggttggctgaatcataaccacatttaaatattgctctgttttgccatttgtttttcttccttctttctttcctttcttcgttcttgcttttcttggcaagcttatgaagttttatttgtgtaattgctacacaaagaaacttcattgtgtttgtatttgcccttcaattggatcataaatgccttggtggcaatgaatgtacatagctatttctgcatcctaagtagcatatatgtaggttttgaatacaggattgataaatgtttgtcttgtgaaattaaaataattactgatgtctacatattgtt

SEQ ID NO: 659963 - DNA, 574 bp, Homo sapiens
cctaagggaatattcaaagcatcttaatagttgctactaattcatataatttaattaatagaatagcaaatacattctcatcttatttcacatttttaacatacacaagatatagctattttatagtgattaggtttagtaaaaataacactgataaaactcaactgttagcatgtacagttttaggctacatatttttcaaaacaacaaaatataatttttttagactcaacttgaaattttgtaaaaaataaagtttcagaaatagtaaactatcacagaacaagaagcataatagaaagtagaaattgttttactataaaaaatactataaataaaagggctaaatgtttcttaatattcgtatactgataccaaatattagatgccttgagtcactaaattaaattgyccctaaatattacatttattatttaaaatgttaatgttgcttacaaacctcaacagatatttttgccaacttatagatgggagaatttaaaaagatgttggtgtttttaaaaatagcttttagaaaagcaacaaagtgattttatgtctggaggtgaagacc

SEQ ID NO: 659964 - DNA, 558 bp, Homo sapiens
tacatagtattgaaaattgctttgactgcacactcaaattattacaattcaactttcttcaacatcataaattgaaaggatatcatgtggatctttgttgttcccaattaggattgaaaataacttctggccaaattagtagtgtagagacttatggaatggagtcaatttaaaaccggatttttttgagttaatggtaagaaagagtttgttgcaataaaattctttgaaattttagatatgaaattggtacaaaaacttaatacaaattcatctacctgattttttgtggcaatgtcataaataaaagaaatatggtctcatctttcctaaatattttgctcatgctctttgacaataccgtaaaatgtacttaaactacataagaatcttcyagtaaaataaaatgcaacatttcactcagaagtaaaacatttttaaaatagtgtccaacaattgcttcaagagggtgacaacttatgaacaccctgttctaagtgtttccaccctaattggtttctttctttttttttttttttgagacaaaaccttgctctg

SEQ ID NO: 659965 - DNA, 586 bp, Homo sapiens
gacattattagcacattgaatattaaatagtatctgaagagagatacctttaaaaatgaagacaccttcctattgggattttcttcaaaacaaatagattatttttaaaaagattacaactatagcaacttcagtctctcctgttttatctactagagtgatttgcttcctctgcctttcttaaagtgattggttaaaatgttttagcacttagcagtttcttcctagttttgcagatatggccctgaaatggcttatgagtaaggcaaatagaggatgttcttactgggctagtgcttttatttctctctttcgcttgttctattttttaagtgaaaatggcattagcatcttatttgtcaggctttcattttcgtgtttgagaattccacttgtagataaccaatagctataacctgttcaggtctttaaaaatatagcttattgaatgagcagtcacacacaagaaattccgttcttcccrtagtccatcatgctttacccgtattcagcttctcacttctgtatctaaaaacactagattttatcattctactttaaagtttctttcttttttttttttttt

SEQ ID NO: 659966 - DNA, 602 bp, Homo sapiens
aagcaattccaaaattgatggagacatgcatgaaactaaggctatcgttttgctaagtcagtcatrtttagtagatagaaatttatttgatgaccaaggatggcacaaaatgtttaaaagactgaatatgtgacataataaagcacatttatgaaacagtaaattgcttttcataaaggtggattatttgatgtatcttgaagaagaaataacaactgtgaatcaaatatttatttatgaaattggcagagagtaaatgattaaagttttaatgatcagattgtcattttagagtaattatcattatacaacagcgaagaaaagttggaagaagttaaattatagaaaaaggatgctattgttttaaattaatgcactggtctagctgtgatttcattaagatgatttcataactgtaacagtaacaataggaatattgaggacaagaatgttgaggacaggaattaaagagaaatttattggttgaaataaattaggtttttagattcattatgattaatgtttaagaaggaatatataatttctagtcaacatataataatgcaaatttaacacataagaaatattgatagaaaaagggt

SEQ ID NO: 659967 - DNA, 602 bp, Homo sapiens
aagcaattccaaaattgatggagacatgcatgaaactaaggctatcgttttgctaagtcagtcatatttagtagatagaaatttatttgatgaccaaggatggcacaaaatgtttaaaagactgaatatgtgacataataaagcacatttatgaaacagtaaattgcttttcataaaggtggattatttgatgtatcttgaagaagaaataacaactgtgaatcaaatatttatttatgaaattggcagagagtaaatgattaaagttttaatgatcagattgtcattttagagtaattatcattatacaacagygaagaaaagttggaagaagttaaattatagaaaaaggatgctattgttttaaattaatgcactggtctagctgtgatttcattaagatgatttcataactgtaacagtaacaataggaatattgaggacaagaatgttgaggacaggaattaaagagaaatttattggttgaaataaattaggtttttagattcattatgattaatgtttaagaaggaatatataatttctagtcaacatataataatgcaaatttaacacataagaaatattgatagaaaaagggt

SEQ ID NO: 659968 - DNA, 633 bp, Homo sapiens
  misc_feature 620, 621, 622, 623, 624, 625, 626, 627, 628, 629, 630, 631,632, 633: n = A,T,C or G
tatcaaaatactgacatcatttttcatagaattagagaaagcaattctaaattcttatgaaaccagaaataagcttgaattaaaaaagcaactctgagcaaaaagaacaaatccggaggcatagttttaagagacttcaagttataatacaaggttttagtaatcaaaacagcatgcatggtactggtataaaggtagataaataaaccaaaggaaaggaatagagaaaccagaaataaagccaaatgtatacaaccaactgatcctccacaaagcattcaaaaacataaataggaaaggacaccctattcaataaatgatgcagggaaaacaagacagccacatgtagaagaatgaaactggatcactctttctcaccatctacaaaaattagaagatggatcagacttaaatataaaacccaaaaccataaaaattctggaaaaaaactaagaaaaacacatctggatatttacctaagccaaaactttatgactaagactccaaaagtaartgcaacaaaaacaaaaataaataaaaaggacataagtaaactaaaaaccttcacagcaaaagaaatagtcatcacagtaaacagataactcagagaatagaagaannnnnnnnnnnnnn

SEQ ID NO: 659969 - DNA, 633 bp, Homo sapiens
  misc_feature 620, 621, 622, 623, 624, 625, 626, 627, 628, 629, 630, 631,632, 633: n = A,T,C or G
tatcaaaatactgacatcatttttcatagaattagagaaagcaattctaaattcttatgaaaccagaaataagcttgaattaaaaaagcaactctgagcaaaaagaacaaatccggaggcatagttttaagagacttcaagttataatacaaggttttagtaatcaaaacagcatgcatggtactggtataaaggtagataaataaaccaaaggaaaggaatagagaaaccagaaataaagccaaatgtatacaaccaactgatcctccacaaagcattcaaaaacataaataggaaaggacaccctattcaataaatgatgcagggaaaacaagacagccacatgtagaagaatgaaactggatcactctttctcaccatctacaaaaattagaagatggatcagacttaaatataaaacccaaaaccataaaaattctggaaaaaaactaagaaaaacacatctggatatttacctaagccaaaactttatgactaagactccaaaagtaagtgcaacaaaarcaaaaataaataaaaaggacataagtaaactaaaaaccttcacagcaaaagaaatagtcatcacagtaaacagataactcagagaatagaagaannnnnnnnnnnnnn

SEQ ID NO: 659970 - DNA, 633 bp, Homo sapiens
  misc_feature 620, 621, 622, 623, 624, 625, 626, 627, 628, 629, 630, 631,632, 633: n = A,T,C or G
tatcaaaatactgacatcatttttcatagaattagagaaagcaattctaaattcttatgaaaccagaaataagcttgaattaaaaaagcaactctgagcaaaaagaacaaatccggaggcatagttttaagagacttcaagttataatacaaggttttagtaatcaaaacagcatgcatggtactggtataaaggtagataaataaaccaaaggaaaggaatagagaaaccagaaataaagccaaatgtatacaaccaactgatcctccacaaagcattcaaaaacataaataggaaaggacaccctattcaataaatgatgcagggaaaacaagacagccacatgtagaagaatgaaactggatcactctttctcaccatctacaaaaattagaagatggatcagacttaaatataaaacccaaaaccataaaaattctggaaaaaaactaagaaaaacacatctggatatttacctaagccaaaactttatgactaagactccaaaagtaagtgcaacaaaaacaaaaataaataaaaaggacataagtaaactaaaaaccttcacagcaaaagaaatartcatcacagtaaacagataactcagagaatagaagaannnnnnnnnnnnnn

SEQ ID NO: 659971 - DNA, 527 bp, Homo sapiens
tatgaggcattttctttcccctaatattacatactctagattttatttctgcacaaaaaatattctctatgtctagcctaaagaactatgtcttattcatatttatactcttcatagatcaaaagtgtgcttaaaatactgtacatttaatgagttatttttgaatgtaagcaactttgaattcatctttgcatttttaatcttatgtttctattaaatgtattattaaattctactaacactttcctcaaaataattctcaatattttggtttttaattttttactgcctttgcattctcctggcagagacccatttcacctctyctatagattatttcataaagattttatcatctgtatcatatatatttacaatattaaaagttatctgtagcacgctctcattgttgcttatagattaggtttgcttctctatgtactactctggtaggcagtggttaaatatactgctttaagccttttcacagtaccttctataatatcatcatgcacaattttaggcac

SEQ ID NO: 659972 - DNA, 527 bp, Homo sapiens
tatgaggcattttctttcccctaatattacatactctagattttatttctgcacaaaaaatattctctatgtctagcctaaagaactatgtcttattcatatttatactcttcatagatcaaaagtgtgcttaaaatactgtacatttaatgagttatttttgaatgtaagcaactttgaattcatctttgcatttttaatcttatgtttctattaaatgtattattaaattctactaacactttcctcaaaataattctcaatattttggtttttaattttttactgcctttgcattctcctggcagagacccatttcacctctcctatagattatttcataaagattttatmatctgtatcatatatatttacaatattaaaagttatctgtagcacgctctcattgttgcttatagattaggtttgcttctctatgtactactctggtaggcagtggttaaatatactgctttaagccttttcacagtaccttctataatatcatcatgcacaattttaggcac

SEQ ID NO: 659973 - DNA, 527 bp, Homo sapiens
tatgaggcattttctttcccctaatattacatactctagattttatttctgcacaaaaaatattctctatgtctagcctaaagaactatgtcttattcatatttatactcttcatagatcaaaagtgtgcttaaaatactgtacatttaatgagttatttttgaatgtaagcaactttgaattcatctttgcatttttaatcttatgtttctattaaatgtattattaaattctactaacactttcctcaaaataattctcaatattttggtttttaattttttactgcctttgcattctcctggcagagacccatttcacctctcctatagattatttcataaagattttatcatctgtatcatatatatttacaatattaaaagttatctgtagcacgctctcattgttgcttatagattaggtttgcttctctatgtactaytctggtaggcagtggttaaatatactgctttaagccttttcacagtaccttctataatatcatcatgcacaattttaggcac

SEQ ID NO: 659974 - DNA, 509 bp, Homo sapiens
ttattctcactttagctatctctaatatattatgaatgtgtcagttgtgtgtttactattgtttgaattaaacttttaaatcattcattttaattcttacttaattcaaacttgtttgttatacattcttataattccagtatctggagtctttcttcatgtgattcttttatctccctgttttcctcctatattcttttcatgcaccatctttctctgtgtgttttgttttgttttactgtcaattcctaactaatagaagtatatttatgcaaataattttaggatagaattgaaataggtttcccaaaaggattatataaatttgtttgtaccaarggcccagggttatcaacagaatgagatcactttaaatttctgtcctgaggattttcaagttacacaggtcatattagtgagaaccccagaaaagggcattcttttttttttttatatttcactttacgtcctggaataatacatgtgcagaacgtacaggtttgctacat

SEQ ID NO: 659975 - DNA, 509 bp, Homo sapiens
ttattctcactttagctatctctaatatattatgaatgtgtcagttgtgtgtttactattgtttgaattaaacttttaaatcattcattttaattcttacttaattcaaacttgtttgttatacattcttataattccagtatctggagtctttcttcatgtgattcttttatctccctgttttcctcctatattcttttcatgcaccatctttctctgtgtgttttgttttgttttactgtcaattcctaactaatagaagtatatttatgcaaataattttaggatagaattgaaataggtttcccaaaaggattatataaatttgtttgtaccaaaggcccagggttatmaacagaatgagatcactttaaatttctgtcctgaggattttcaagttacacaggtcatattagtgagaaccccagaaaagggcattcttttttttttttatatttcactttacgtcctggaataatacatgtgcagaacgtacaggtttgctacat

SEQ ID NO: 659976 - DNA, 509 bp, Homo sapiens
ttattctcactttagctatctctaatatattatgaatgtgtcagttgtgtgtttactattgtttgaattaaacttttaaatcattcattttaattcttacttaattcaaacttgtttgttatacattcttataattccagtatctggagtctttcttcatgtgattcttttatctccctgttttcctcctatattcttttcatgcaccatctttctctgtgtgttttgttttgttttactgtcaattcctaactaatagaagtatatttatgcaaataattttaggatagaattgaaataggtttcccaaaaggattatataaatttgtttgtaccaaaggcccagggttatcaacagaatgagatcactttaaatttctgtcytgaggattttcaagttacacaggtcatattagtgagaaccccagaaaagggcattcttttttttttttatatttcactttacgtcctggaataatacatgtgcagaacgtacaggtttgctacat

SEQ ID NO: 659977 - DNA, 633 bp, Homo sapiens
tcgcattttaatgagtattttaacataaaacgtgagtttgggattattataaatccaaagacacrtaaactcagtttctaaaagatatgattgaggggaaatcatgatttattatatcttcattttatcaaaaaaagacacagttattatttataataaagatgattacaatgcacacatactcttttgtgagttgccacagaattttctattaccaaaacctgtcaagttcaacacatgtctagaatatgtataaataaaggttgatctgtgatattagatattatcaaataaaaaatattcttattgaaaaaaatgtgattccttatgacaacttcagggcatcttctatttgccccctgttatcaacaggggaaattttctttcctacatttctcactaatcatttctgacaagtagttggcaagcttaactctaaagggtcgtccatagggttctaggtcaaccttaccctttgggaagaaagtacacatgatgtctatgaataaatgccctccaacaaaggaaaaggacaatgctttacatagtgtgtgcataatcatttttcaacataattagcttatctatttgtgacatgattttactgtcattgcaggtgtttgacatgaccca

SEQ ID NO: 659978 - DNA, 633 bp, Homo sapiens
tcgcattttaatgagtattttaacataaaacgtgagtttgggattattataaatccaaagacacataaactcagtttctaaaagatatgattgaggggaaatcatgatttattatatcttcattttatcaaaaaaagacacagttattatttataataaagatgattacaatgcacacatactcttttgtgagttgccacagaattttctattaccaaaacctgtcaagttcaacacatgtctagaatatgtataaataaaggttgatctgtgatattagatattatcaaataaaaaatattcttattgaaaaaaatgtgattccttatgacaacttcagggcatyttctatttgccccctgttatcaacaggggaaattttctttcctacatttctcactaatcatttctgacaagtagttggcaagcttaactctaaagggtcgtccatagggttctaggtcaaccttaccctttgggaagaaagtacacatgatgtctatgaataaatgccctccaacaaaggaaaaggacaatgctttacatagtgtgtgcataatcatttttcaacataattagcttatctatttgtgacatgattttactgtcattgcaggtgtttgacatgaccca

SEQ ID NO: 659979 - DNA, 633 bp, Homo sapiens
tcgcattttaatgagtattttaacataaaacgtgagtttgggattattataaatccaaagacacataaactcagtttctaaaagatatgattgaggggaaatcatgatttattatatcttcattttatcaaaaaaagacacagttattatttataataaagatgattacaatgcacacatactcttttgtgagttgccacagaattttctattaccaaaacctgtcaagttcaacacatgtctagaatatgtataaataaaggttgatctgtgatattagatattatcaaataaaaaatattcttattgaaaaaaatgtgattccttatgacaacttcagggcatcttctatttgccccctgttatcaacaggrgaaattttctttcctacatttctcactaatcatttctgacaagtagttggcaagcttaactctaaagggtcgtccatagggttctaggtcaaccttaccctttgggaagaaagtacacatgatgtctatgaataaatgccctccaacaaaggaaaaggacaatgctttacatagtgtgtgcataatcatttttcaacataattagcttatctatttgtgacatgattttactgtcattgcaggtgtttgacatgaccca

SEQ ID NO: 659980 - DNA, 647 bp, Homo sapiens
gacccaacctgcaacattagtattacaaattaatttctaattccagtctcactctttcatcaccagttctatctttgcacacttactaatcccaattattttaaagcaagttgcttaacctgctgtggcagttttcccctctccttcaactttctctctctttttttttctcctaataataccygccaagtaagaatccctttcattacatacatcaaatagccacttcttccaacaattttattcaacctaagtattcaacctaagggcttagattcatggtctgtccttacaatgccgttccatctttttaaagctaattgcaatgcacctagtcatttttattgcagcactatgtatgatagccaagatacagaataagcctaagtgtctggcaacagatgaatgcaaaaagaaaatgcactatctgtatacaatgaagtactctttagccataaaaaataaaatcttgccatttatgacaatatggatgaatctagaggacatcacggtaagtgaaataagccagacacagacagacaagtacagcatgatctcactcataagtggagtctaaaaaaaaaagaaaatacaaacatttaaaaaagttaatagcatagaagcagagagtagaaaaatgttaccag

SEQ ID NO: 659981 - DNA, 591 bp, Homo sapiens
gtctgtttatttcagttcagagtgttataaaaatgttaataaggtatttttatgtctattacccagctatatttgactttytaatgtgctttttgttataattggctgttgtttctataggctggcattattggcattagatcactgaagagtaaataaagtgagcaagaatactctcttgtcaccagattactgaggtgtactggaagtaggttgaatggttttacagatgaattacagtgaaaactttgaaacactaataatctcttcggtgttgagaaataacctactaatcattaacttaataattatcagctcaaccaggaaactacaccacctaaaaggtagttaattttatcactcctagacatctacaggagaccatgattctccattatgtgaatgccttgctgcccatgtgatgcctgcccccatcaattctaagaagcttcagtcatttagtacttaatatgtaatttttaaaaattacataagtaacaccttctccttatagagaactgaaactttcagaaacagttaaagcctaatttgaatattgccaaagccctgtctcttcttcagagacaacca

SEQ ID NO: 659982 - DNA, 658 bp, Homo sapiens
tgtgtataaacacgtgtagatttacctgtcctagatatgagcatttgctttgtgagtctgctttaagtcaagttctaaactatggctcagtttaaaacttmtctttttctatttaataatataccttagaagtcatgccatgatattaagatgaataataatgaaattattaatattagtcaaatttaattagttgcttattacgtagtgggtacttggtgtgatatatggattatctcatttaatcatcatgacatgctaataaattggcaatgctgttatctccattttatggaagagagaaaaagattgtaagtactttgctcaaggtcatttggagggagagcaaattattcaaatccagatattctgctctcagagattgtattattaactattatgccacaatagaggcattgtagtctgcatgatagtccaactatttttatttgtagttatatattgatgaatatctagagtatttttaaaaattacaacacaatactgcaattgacattcttgcatgattatctaccatgtatttccaaaagtggaaaggcaaacatatgtgtttagtttttacagaatgtagactatataacaattgtactccaaaggagatcttggttacattgataccagcatagtttgagcctac

SEQ ID NO: 659983 - DNA, 658 bp, Homo sapiens
tgtgtataaacacgtgtagatttacctgtcctagatatgagcatttgctttgtgagtctgctttaagtcaagttctaaactatggctcagtttaaaacttctctttttctatttaataatataccttagaagtcatgccatgatattaagatgaataataatgaaattattaatattagtcaaatttaattagttgcttattacgtagtgggtacttggtgtgatatatggattatctcatttaatcatcatgacawgctaataaattggcaatgctgttatctccattttatggaagagagaaaaagattgtaagtactttgctcaaggtcatttggagggagagcaaattattcaaatccagatattctgctctcagagattgtattattaactattatgccacaatagaggcattgtagtctgcatgatagtccaactatttttatttgtagttatatattgatgaatatctagagtatttttaaaaattacaacacaatactgcaattgacattcttgcatgattatctaccatgtatttccaaaagtggaaaggcaaacatatgtgtttagtttttacagaatgtagactatataacaattgtactccaaaggagatcttggttacattgataccagcatagtttgagcctac

SEQ ID NO: 659984 - DNA, 658 bp, Homo sapiens
tgtgtataaacacgtgtagatttacctgtcctagatatgagcatttgctttgtgagtctgctttaagtcaagttctaaactatggctcagtttaaaacttctctttttctatttaataatataccttagaagtcatgccatgatattaagatgaataataatgaaattattaatattagtcaaatttaattagttgcttattacgtagtgggtacttggtgtgatatatggattatctcatttaatcatcatgacatgctaataaattggcaatgctgttatctccattttatggaagagagaaaaagattgtaagtactttgctcaaggtcatttrgagggagagcaaattattcaaatccagatattctgctctcagagattgtattattaactattatgccacaatagaggcattgtagtctgcatgatagtccaactatttttatttgtagttatatattgatgaatatctagagtatttttaaaaattacaacacaatactgcaattgacattcttgcatgattatctaccatgtatttccaaaagtggaaaggcaaacatatgtgtttagtttttacagaatgtagactatataacaattgtactccaaaggagatcttggttacattgataccagcatagtttgagcctac

SEQ ID NO: 659985 - DNA, 550 bp, Homo sapiens
tagaggcattgtagtctgcatgatagtccaactatttttatttgtagttatatattgatgaatatctagagtatttttaaaaattacaacacaatactgcaattgacattcttgcatgattatctaccatgtatttccaaaagtggaaaggcaaacatatgtgtttagtttttacagaatgtagactatataacaattgtactccaaaggagatcttggttacattgataccagcatagtttgagcctaccctcttccctgtaccctcaaaacccttgttaacatcttatgttttgccagtctgctgaagaaaaaatggtatccaattgtttaattcaattacttgattaytagtgaagtgagaatttttttatatttatcataatttgtattgcctgtaatctgaaagggttattcatatttttttgcctacttttctattaagtcatgtctctctaagatctagcttaaacgttactttttccaaaaaaccttccctgatctcccacaactcaaaacattatcttcctactttagtttcttacaatat

SEQ ID NO: 659986 - DNA, 550 bp, Homo sapiens
tagaggcattgtagtctgcatgatagtccaactatttttatttgtagttatatattgatgaatatctagagtatttttaaaaattacaacacaatactgcaattgacattcttgcatgattatctaccatgtatttccaaaagtggaaaggcaaacatatgtgtttagtttttacagaatgtagactatataacaattgtactccaaaggagatcttggttacattgataccagcatagtttgagcctaccctcttccctgtaccctcaaaacccttgttaacatcttatgttttgccagtctgctgaagaaaaaatggtatccaattgtttaattcaattacttgattattagtgaagtragaatttttttatatttatcataatttgtattgcctgtaatctgaaagggttattcatatttttttgcctacttttctattaagtcatgtctctctaagatctagcttaaacgttactttttccaaaaaaccttccctgatctcccacaactcaaaacattatcttcctactttagtttcttacaatat

SEQ ID NO: 659987 - DNA, 447 bp, Homo sapiens
ttgtattgcctgtaatctgaaagggttattcatatttttttgcctacttttctattaagtcatgtctctctaagatctagcttaaacrttactttttccaaaaaaccttccctgatctcccacaactcaaaacattatcttcctactttagtttcttacaatattttatctacatttctcttataacaccactttctactttgtatgattgttattttagtactatctaatcagtcctttaatttcctttggggactattttatggtgattaatccttatgacacatattgtccacattttttggacaaaattcttcaatgaagattgataattaaaattaataaaaattaaattaattaaaaatttaattaacttagcttttaattttttaattatcatataggccacctactgagatatacaatttttggtctaaagtattactt

SEQ ID NO: 659988 - DNA, 447 bp, Homo sapiens
ttgtattgcctgtaatctgaaagggttattcatatttttttgcctacttttctattaagtcatgtctctctaagatctagcttaaacgttactttttccaaaaaaccttccctgatctcccacaactsaaaacattatcttcctactttagtttcttacaatattttatctacatttctcttataacaccactttctactttgtatgattgttattttagtactatctaatcagtcctttaatttcctttggggactattttatggtgattaatccttatgacacatattgtccacattttttggacaaaattcttcaatgaagattgataattaaaattaataaaaattaaattaattaaaaatttaattaacttagcttttaattttttaattatcatataggccacctactgagatatacaatttttggtctaaagtattactt

SEQ ID NO: 659989 - DNA, 447 bp, Homo sapiens
ttgtattgcctgtaatctgaaagggttattcatatttttttgcctacttttctattaagtcatgtctctctaagatctagcttaaacgttactttttccaaaaaaccttccctgatctcccacaactcaaaacattatcttcctactttagtttcttacaatattttatctacatttctcttataacaccactttctactttgtatgattgttattttagtactatctaatcagtcctttaatttcctttggggactattttatggtgattaatccttatgacacatattgtccacattttttggacaaaattcttcaatgaagatwgataattaaaattaataaaaattaaattaattaaaaatttaattaacttagcttttaattttttaattatcatataggccacctactgagatatacaatttttggtctaaagtattactt

SEQ ID NO: 659990 - DNA, 447 bp, Homo sapiens
ttgtattgcctgtaatctgaaagggttattcatatttttttgcctacttttctattaagtcatgtctctctaagatctagcttaaacgttactttttccaaaaaaccttccctgatctcccacaactcaaaacattatcttcctactttagtttcttacaatattttatctacatttctcttataacaccactttctactttgtatgattgttattttagtactatctaatcagtcctttaatttcctttggggactattttatggtgattaatccttatgacacatattgtccacattttttggacaaaattcttcaatgaagattgataattaaaattaataaaaattaaattaattaaaaatttaattaacttagcttttaattttttaattatcatrtaggccacctactgagatatacaatttttggtctaaagtattactt

SEQ ID NO: 659991 - DNA, 625 bp, Homo sapiens
aatcctcagagtccaaaacagaggatgttcctgcccccaccaccggcccccacgccaggaagctgctgcagccaccagggtctgatgctgcctaatcagggaaggtgctcctgcagggactttcacgtgtgtttaaaagcaagatttaaaagcaagattattcagtgctctccctcggggaaagtcccctggggagagggcacagtgctcacagcagggtccagcggccagggcaagcacaccacctctgtgtctcccaccgagggagctggcaaaagcccttcacctttctgaacttcagtttccacttctagaaaatgtggtgaatgccatgcacctgaaggaccggtgcagctccctgcgaggcaccttctctggcactgtgtacccttggccaatgcgcagtctcggagctatggaggagcgctgcctgggagccagctgcccggacactggtttcactacagctggggagaggagggccayctggaatgggggaatggggagagcacctgtcatggacacacctgagcagctatgacggtttccctgtcgggggacgcagagaccacctcccaggtccatatgccatcaccagccataggacacagtcgtcccagctgac

SEQ ID NO: 659992 - DNA, 548 bp, Homo sapiens
tcactttccactcccgaatgttctttctgtgtcctgcactgaggatgcccagtgatgaggagacccaacagagccacaggaggcttgacaccaccgtggcctcataaaagatccccagggaagggggacgcaggggtcagtgagcattcacccaccccgccccccttcgtaggtgtgtgcacagagcacaactgtccagctccccaaaaggggctatgggaggagcatcagaaggtggccctatggggtaactggccatcctccaacaccaccagccccaccacagcagagagtaggaacaacaggccaggaggggacagagtctcctgcacagctggwcaggaacagggtcaggcctccgttcaactccaaagggaagagcagtataaggcaggctcctagcacactgtcggaattctaggaccccttctggatcctggagtctgcagttctggaaacttccaaagcagggattaaccttcacttgactaaccttgctttgctttaagtgtgcatcgttaggagttagagtgagctgtgtgctggcc

SEQ ID NO: 659993 - DNA, 581 bp, Homo sapiens
caataattatattgattaaactacattatgtgctgtcagactaacaaattccttgtatactgtgcttatatgctaatatatttacagcagagctccccatgacagctgcaggcaaagtccctgtgcccagattctgtctgccgagtggaaagttaacaagtaaaatcatgaaaacacgagacatttgtctccagtgtccttagctgcctttcttcatactttttcttccctaaagacactaaatatcctagcaatcctgatgtcttccaaaaaaggatctgattcccatcatttatgcttttgtttaatgggtctggctactcttggactgagatgctgttggtgacctcagagaagtagcggtatggtgttcttgtcagctttctgcttaagtcttcrgttcctgttatacctgcccagattccttggcttacagcctccccagcaccacatgtctacggggtctaatgcttgctagcacccatagaacagattatcaggtaaatgacttcagggctcacagctttcatggcagggagactgcttgaagtgcatttggcttggctttcctcacatttctg

SEQ ID NO: 659994 - DNA, 591 bp, Homo sapiens
taacttgttcaggacttatccctggcaacctggccttcccaagctccatagaaactgagtatagtccagtgatcatagcaascaatcctagtctgaattctagtccatctctcaaaatactaaaaaacaagactgatgcttcctcaaccatggatacttacatgatgaattttgctgttagcatgccatgtcacataactgcaactgcaaagcttgagactagcttcttagtcattccaggagaggggttggttctcaacattaaccatgaaagttcagtcggtgagatatggacaaaggcataattctatcatgctatgttactattacatcctggtccttcaccaaatcagcatgggctgatatttttcttatcacgaaactgagaagctcaagagctcaagggttagggtcttctccccagagtttgacgtttcatgttgctagatctctgtgctcacacctagcacataataggcaataagaacttacacacctgctacttctttccttaatttttctcataaacaggctttatgacagtgccccttggctacttcctcttgtttccataacagctggtactgggaa

SEQ ID NO: 659995 - DNA, 564 bp, Homo sapiens
catttcttggttaacaagccctcaggtaggtggtatatgcccactgatttagcaaatgcatctttgctattcagattagaaaagaggatgagaacagcttgcgtataagtagaatggatattgatattcatttgcagttttgtttccttttgtcataatgtctaaagagatcttgactgccataacattgcttaaactctctgtttcttgttgttattacactgcctaaagagatgtgaactgtctgcatatcctgtgtaatatcacattgacccattatgtcaatgacagaaaactcactgggtaggataagcaactgattgctaatatactagagaccgacgtaagacacatgatctccagaggttggaagataaaccctatgaaatttcaggttcwtacagcttcagtgaaacatatagccctgtggtaagcagtgtgctaacatatttccaacaaaataaaaggcaaagtgctctatctagcattctttaccataaataaagaagcacagtgctggaaaggccttattgggctctgcaggcaatatgttttacatctagg

SEQ ID NO: 659996 - DNA, 475 bp, Homo sapiens
aaaaaacttattattaatgaraatgtattggtttcatttaaactaggatcagattttataaatagtaggacttttagcttgattatgttatggcctaaactgccatgcagaatttggttttctttttttcttttgatgtctgcactttgtgaggttatcaattaatcctttacaagctaattgaagtgcagacttgtgacagaacaacaattagaataaaaggagttaataaaactataggactgcgccttatgactcaaagtttatgatctacacgttgagtaatttagacaagtcatctgaaaaataaatttgaagccatttaattttattatttatttattattattatctgagacagaatctttctctgtcacccaggctggaatgcagtggtgtgatctcagctgactgcaacctccaactcccaggttcaagtgattctcctgcctcaacctcctgagtagctggcatt

SEQ ID NO: 659997 - DNA, 606 bp, Homo sapiens
gagaagccctaccttagaggtaacatcagcagaagtccaactgaatactgggggcaggtctggtgaagctgagcacttagagggggaggagtagcagagctggggacaagagagatcattattccatgagcaatggtatgggcttcctgtcagtgctatgccagatgccaatggcaacttatcttggtgaatgtaggagatactcctaccagaaccctctttgggtcttcatgacttggtactacaggggyacactcttaccatgttgagtctcaccacttactctattcatagatcagatgtcaggctcactgaaaatttggatgtttgattcaaaagcagacacacttaaattctttttctgtagcatagactttatcaggggagacatttcctcacgtgggtaatgaggtccctataataattagcactaattgagatccaggtaggcagcttaagtagaaaggctgacaactaaatcactcatagtggtgacccaggggactagtctcataggtcctcatttagtcagaaagaaggaggcagaattcagtgacattagtaagttttcaggaaggattacatttgttataaacaattagcaaa

SEQ ID NO: 659998 - DNA, 522 bp, Homo sapiens
gggtcccagttgtgtccctagagtgtctttctgtgactctcacttaacttttctacagtctcttcatcattaaaatggcctaaacctttattattttctgttctttggaagcccttccttacctctggagaactacatttgaaggtgaggctgtatcacagagggctgtgtaatttaaagagctgcaagttcattaactttctagagttatatcctagtttgtaggataaatagaatgggtgtgagaaagaaaatcatgaaaaaaattccttttagatggatcacagattaggaaaaattcagtgaaaaaactggaagaggcctgctttggaaatarggtgtacactgtttagaccttagctttgtcgtacagacctagggaatagaagcccatgaaagtttgcaggattttgacagtttctctccaatctttctgctgaaagtatagaataaggagtgatccagattgcacaggggtgaattttccataatccaggactaaatgtggcagatgccaaattt

SEQ ID NO: 659999 - DNA, 611 bp, Homo sapiens
ttaccttactgcagtttatagcaatgaatgctgattccattcctgtacacagtgcgggggctggtgacaagatggacagagactccactgggcaaccagacagctggcagaatcctggctctgtcacttaggagttttatggtctttggcaagttccttaattcctcagagccccaggttcctcatccacaaagtgggaatatcttggagagctattgtatcacttatatataaagtatcctagcatattataggtatcaaattatgatagctattgttatgattattgctaaatcatggataagccatcagctgagaccattgtctaaatgctgggaaagagggaacccatttaggaggaggtcatctttgaaaggagcacgttattaatgtgtaatctatgtcttccagtcaaaaatgcctctagaaattacaagactggtaaatataacgaatttcagccgtgcctttaaaaaacaacatacccyttgaatctgtaaccacttgaaggctttattcagtcctatttgcagcacagatgtcagatgttcatagttatgggacctttaatgagatgtgtcattgcttctataccacctaaagcttcccaa

SEQ ID NO: 660000 - DNA, 605 bp, Homo sapiens
tatgatctatcaaaatgagaacttgggtgtggtacttagcaacttttagatataccaataaaacaacaacctaatgcctaaagaaaactgggtaattttatattaatattttatggtatttttggaacctcatatgagtatgcaccagaggagggttagaagttgaaatgcattattatatgtcaagctggtatcatatatcaaatgattttagaggacagggagctaagaacaggagtactgggaaatacaagatagaatttcaaaggcaggaagaagcctgatgggaaaaaaattaagggtgaattggtggaaattcatggataattgcaaggaatgctcaagggagataaactttatattcattggaaagggttaagaatgaagactgttacaaatactagacacagaaggtctggaaacatagaccatgattttatgatggattaatccatagtttcagacttgttcaacaycctgcagatatgatcaatgtgtaaataagtgttttaactcagtaacagcagaaggtgcatttttagagagaggaacacttgacagcctccagtaaagtgaaaatgggaagtcactgctttcagtttgaa

SEQ ID NO: 660001 - DNA, 578 bp, Homo sapiens
ctgactctctctaactctggcccagatttaaaggcctcattagattaggtcaggtctatttaaaagcaaactagtaagggactttttattttaaaggacagggtcttgctctgtcatccaggctggagtgcagtagsatgatcacagctcaatgcagccttgaacttctgggccgaagtagtccttccacgtcagcttcatgagcagctgggactacagatatgtgccactatgcccagctaagtgttttttttttttttaatttaaatttttttttgtagagacaaggtctcattctattgcctaggctggtctcaaactcttgggatcaagcagtcctccttactcagcctcccaatgtactggtattataggcatgagccaccctgtccagtctaattagggatcttaatcacatcattcccatatagcataagcaaatcatgtgaataaaatcccagaacatctgcaagttcttctcacactcaaagggagaaggttatgcaagaagtgtccaccaagagatgggaatcttggaaccaatttagaattctgtctactacagcattcctaacaaa

SEQ ID NO: 660002 - DNA, 578 bp, Homo sapiens
ctgactctctctaactctggcccagatttaaaggcctcattagattaggtcaggtctatttaaaagcaaactagtaagggactttttattttaaaggacagggtcttgctctgtcatccaggctggagtgcagtaggatgatcacagctcaatgcagccttgaacttctgggccgaagtagtccttccacgtcagcttcatgagcagctgggactacagatatgtgccactatgcccagctaagtgttttttttttttttaatttaaatttttttttgtagagacaaggtctcattctattgcctaggctggtctcaaactcttgggatcaagcagtcctcmttactcagcctcccaatgtactggtattataggcatgagccaccctgtccagtctaattagggatcttaatcacatcattcccatatagcataagcaaatcatgtgaataaaatcccagaacatctgcaagttcttctcacactcaaagggagaaggttatgcaagaagtgtccaccaagagatgggaatcttggaaccaatttagaattctgtctactacagcattcctaacaaa

SEQ ID NO: 660003 - DNA, 473 bp, Homo sapiens
ttcaaatcttctacttactgacttgacgatacctgtagtcaacccctcccatgctttttacctggttgctcaatgggaatctaactactcctgtggatgaaaaattatgactgtattatccagtgtgtatctaggcactgcctaatgaagacaccacttgaaaattctatgaatatttattttgattgcttrcatctaggttgtctcaaactattaagagaaggaagctaggttctttattttcccatctcaactcactgaagtccaggctcacctgtctatcaagtgaaaatggtatttaattggtggctgctgagaacgtttaacaaaaagtcaccaatactatttcccatgctgtggatggtttctgagtttaatttgccagggcaccagcaaatatgcatacattttcagtaaatattttgttattttacaattcttggaaggaaattcttaatttatgttttttcctt

SEQ ID NO: 660004 - DNA, 320 bp, Homo sapiens
aaggtctgtacatttaagcttttcatagagactttcaagtyacactaataaatagggatctaatttaaaattatactggtagtatgagtcttctctataccaatatcctaggcaaaactgattattaatcaatttaatttttactaagcaattgggtgaaaaaaattgttattttcatttaattttcctgatcaatggtgaagtattttaccttttaaaatactgactagtcacttatatttcttctgtgagttacttttccatatacttagctcattttttctgcttggttgcttaatttctcatattaattttcagga

SEQ ID NO: 660005 - DNA, 489 bp, Homo sapiens
ggttacatgaataagttctttagtggcgatttttgagatttgtggtgcacccatcacccgagcagagtacactatacccaatatgtagtgttttatccctcaccgcacccacctcaccactcccagcctttccctgagtccccgaagaccattgtatcattcttatgcctttgcatccttatagcttagctcccatttatgaatgagaacatacaaggtttgrttttccattccaaagttacttcacttagaataatggtgtccagtttcatccaggttgctgtgaatgcattacttcattccatcttatggctgagtagtattccatggtaaatatttataacacactttctttatccacttactgattgatgggcatttaggctggtttcaaattcttgcaattgcatattgtgctgctataaacatgcgtgtgcaagtatctttttcatataatgacttattttcctctgagtagatacccaggag

SEQ ID NO: 660006 - DNA, 541 bp, Homo sapiens
tgctaccagcttatactcaacagtagttyaaagcatatcaattctctgagcaaaaacttcattggattcccattgtctttagaatgaagtaaaactacttatcccagtcatcatggaatatcatgactcccttttcaagtttaattttcatcactcccttcctcatttattctatgccaataaaagggaactctatagttttctatacatatgctgattttttctcattttcatctttattttcatgctgtgccttccatttctttcttcttcaactctttcttcaaagctcagctcaaatacaatttttcacacacactcaaaatactgtctctcatttatttgtataatggttaattttatgtcaacttggctaagccatggtacccagtttttggttgaataccagtctatatgttgccataaaggtattcttagatgaaattcatatctaaatcagtagactttgagtaaagcagattactcactgtaatgagagtgggtctcacccagtcagttgaaggtcttaaaagaaaagacc

SEQ ID NO: 660007 - DNA, 541 bp, Homo sapiens
tgctaccagcttatactcaacagtagtttaaagcatatcaattctctgagcaaaaacttcattggattcccattgtctttagaatgaagtaaaactacttatcccagtcatcatggaatatcatgactcccttttcaagtttaattttcatcactcccttcctcatttattctatgccaataaaagggaactctatagttttctatacataygctgattttttctcattttcatctttattttcatgctgtgccttccatttctttcttcttcaactctttcttcaaagctcagctcaaatacaatttttcacacacactcaaaatactgtctctcatttatttgtataatggttaattttatgtcaacttggctaagccatggtacccagtttttggttgaataccagtctatatgttgccataaaggtattcttagatgaaattcatatctaaatcagtagactttgagtaaagcagattactcactgtaatgagagtgggtctcacccagtcagttgaaggtcttaaaagaaaagacc

SEQ ID NO: 660008 - DNA, 571 bp, Homo sapiens
tgcttaatatttagggtcaggtcactctctggtgaaaaattgagtggtctatttgcagtaacctaaactggcggctcattttttttctgcttaaaactctcacattcttgatgcatactgttggcatactgtatatgaaaattactgattttgaacaagcaatgtatgccagaaaatgtcataaagttaattttatagagataatatatccaaaaaactctaaatttttaagagaaatcacttcatcagtaatatccatgtacatttagatgtacatggaacatttaaatgatagaacatttaaatgattgtgtctgacaatgggtgtggctrctacaacagttagcaagaacaactttatacgtgttggatccaagtgcttcttgagatcctctgctttccaccacccattcaaagagtgccttgctccagttgactgacctctatatgacaataggagaatagaattttaggtcatggggcaaaaataaatgtttaggtaccagagagtctaagctttagtggtaaccacttattatacaactgctatgaattgctgccagatggcaac

SEQ ID NO: 660009 - DNA, 526 bp, Homo sapiens
gctcggtgtctttcagacatgagattttctttctcccactctacttgactggcctgacctggggtccagtcccacttcctggtggctgcggaaatccgcagtgaggctcagtgtggattttggcttcagaggatttgggaaattccacctttcaatctgaaatctggggaaagtcccagaaaacaacggattactatatttctctcatgaaccagactgaagcaaggagtcaggtctaggaccaaggacctcggcactccagggagcccagggcccctcagaaaggtctcgcttggccaccgagagcgtggggccgtrgcagttggcaagcgggggaggggggtcacgcacaactgctctggagccacactgcataaatggcattcgtttttgttttctgattagaaaaacgttgaaaagaataccaaagtacagagaaaacacacccccatctccaatgtttcctcatttatgtaaatattctcatattttataaaacagggaggtgctgtctataatttttgca

SEQ ID NO: 660010 - DNA, 509 bp, Homo sapiens
caggtaccctgagcacaaacagagagtcaggaagcaaaggggccaggccagctctgtgaccagacctcagactactctctaccatgcagcagcctgcaggcccactgaccattgtccaagyttaacctcacctgagaagttttgtccctgcattccatgacctggaaaacccttcccccaaaattgtgcttgctaattccttctcaacccagaagtcacctcctcagcaaaccttcctttaaatgtttaatataatttgccctcaccccaccctctgtttactgtgttttgctgtcttattttctttacagcactcatcactatctgagattacctttaggagtgtgtttgttgtttgtttattgtctgcaccctactacactctgagctccaagaaaacaagggtctggtctctctagttgagtgtcgtttcatcagtacggaatgttgtgccttgaacctgctgactctcaataaatatatttgaaaagagaaagcatttgcctagg

SEQ ID NO: 660011 - DNA, 606 bp, Homo sapiens
gcattcagcaggaacgaattaaattctgaaaagacccaattaattgctctttgacttggtaggttttttgaatgtttcactccagttgatagattcattaattttagaacaccttctttgctttccactaatggaattcttagaaggtgattggtggttaccttctctaagcctcatgtaaaatttaaatgtcattttatacaaagatatttactgcatggtatgttggtctarttaatttttgagagcaaataagaattgctccaagtcattcttgtctgtaattgaagcatgagccttgaaaatgtggttgtgatttcttgggtatgtgaatatacccacatgtgtgaatttaggtgcacatgtatggggacataggtttagaatggtggtttttctttgtgaaaattaacatgtttcaagtgttttttagctggtatcttttatctcagttgtctacctctaggtaatacaagagcttgatcacagtatatcctaggaaattctctgaagtggggagatgagaaaatcagcatatgcctaaagggcacagaacaaactcaaattcatgacagtaaatccaaggaagggtacaaacccaagtcc

SEQ ID NO: 660012 - DNA, 598 bp, Homo sapiens
ctgcaattgaccaatgtgaagttagaaattagtttcttatcatggggagaaaaccacaagaatcagtgaacttgaatggtgccgccaaccttaggtaagccacttgaacaatttgggtcttatgttccccattttatrgaatccagacacaaatgggaggctcctgacttttaggattcaaatgaaatatggccatagggctctaggtttacatttctatcattctttcttgagatgttgaggaggatagcttacattgttcttcaaatcctgctcaaccagatttgtgtatgtctgtaattatccaccactcatctcagctgtcactcagaacaagccatggaatttagtccctttacctttttatccataaaataaccacacttacaatccaacagtgacaacaaaataaagataactgaacaaataccacctcccaaaagatccccctaacaagaaataagtgcaaacaaaaagtgaccactctaagaccattttgtgttgagcagaatacagaaatacatggggagatagagagggcttagattccatcaacacaaaacacttaagattgattattgggcctccctgttcttca

SEQ ID NO: 660013 - DNA, 535 bp, Homo sapiens
catttggagatgaaatgtttatcttattatggcacctaccaaaagggggaagaaattagggagccctttctgacagccaagcaggcagcatccaccaataatcctcaatgrgactcagacactgctctaggaaagtggccgagaaaacatttttagggatgcacagtggaagatctgaaaactagaggcaaatctctcaattacattaagttatcaaccataaaccaagggtctgaagagaacccttctgttttcctggaaaaaactgagagaggctttaattaaacacccatctctctcctgactctataaaaggatagttaattttgaaagacaagtttataacccaagcagccccaaatattggaagaatgctgcaaaaagttagctattgcaccagacagtactctaaagaaaatcctgaaagtcaccaccttggtcttttataatcgggaccatgaggaagcccaagaaaaagggagaaaaggaacgagaaaaaggcagaggcactaatagctgccatacaggcatataa

SEQ ID NO: 660014 - DNA, 593 bp, Homo sapiens
cagtgagccgtgatcacgccactgcactccaacctgggtgatagagcaagaccatgtctcaaaaaaaaaaagacaattttttgggcagttttaggttcacagcaaaattaagtggaaagtacagtttccatataatccttgtcccctccccaacctaccccactatcaacaccctgcatctaagtggtacatttattacaatcaacaaacctacatcgctacatcataatcacccgaagttcatagtttacgctagggttcactcttggtgttatatattctatgggtttggacaaatttataatgacatatatccaccattagggtatcaaatatcaaaaatcaaatcctgtgttccatctatttatccctcccactcttcttaagccttagcaaccactaatcttttcaccatctccatagttttgccttttccagaatgtcaaatagttggaatcacatagyatgtagacttttcagatagacttctttcacttagcatgcatttaaggttcttccacgtctttccatagcttgacagctcatttcattttagcattgaataatattccattgtctggaggtaccacagt

SEQ ID NO: 660015 - DNA, 568 bp, Homo sapiens
agttctagttacttcgcttagaagacattaggtgaaatcacatgaaattgccaatatttgactggttagcctgcaaaaatggtcaaacctaatctcatatggttcaatctaatctatcctgtatgatctgtctgaatgacaaagaagtcatggaagaaaaataaaatatttagagggcctttattcatcatagtgactgcatcagtcccatgttcaaaaatattcagttgatcactactagcttacattcatcagagtgaagagcaaagccctctagagaggactcagcctgctcatcagtagtattcattcctacttcccagcaccaaccaacasttttctcagaatctttccaatcttgtctcttacttcacctcttaaagttcagcatatgtaaaaggagtttgtcaaagggtcccaaatttcctctaattcatttaaacattcaatttaatccagtcttattaaaagcaaaggataacagaaataagaattataaccaaagtataacaaagaagtcaacattcttttccagaccctgaatatttatctaaaaccgacgtcaaca

SEQ ID NO: 660016 - DNA, 568 bp, Homo sapiens
gagttctcagtcatggctgctggggatgtaaaatgttaccgtcacttctgaggacagcctggtggcttcttacaaaacgaaacatacccgtaccatatgatccacactccttggtattcacccaaagaaatggaaaacttatttccacatacaaaaacctgcacacagatgtttatgccagttttattcataattgcgaaaacttggaagcaaccaagatattcttcattaggtgaatacataaactttgatatagccacacaatggaatattactcagcactgaaaacaagtgagttatcaaacaaatgagctatgaaaacacagggaggaaacaataaatattactatgtgaaagttatcagtctgaaaagtctatattctgtatgatcccaatgatacgacattctgcaaaaggcaaaactacagagacagttaraagacgtgtggttgccaggggttagagggaagagataactatgcagaggtcagaggattttaagggcagtgaaaggactctgtaggaaactgtgatgatgaatacacacgctcataaattcacccacacc

SEQ ID NO: 660017 - DNA, 494 bp, Homo sapiens
gcaagaattttagacacatggccaggtgaggagaagttgatgaatagctataggcagtaacctgagagaccaggttagccatttttatgtatgytatgtaaaatgacaatattagtcatttattactgcatatcagatactccttaacttagcagctcccaagaacagtaaacatttattattgcccacagtttctaagtgtcaggactctgaaagtggcttagctggatggttctagctcagggtacctcctgaagttccagtcaagctgccagccagagctgcaggcagtcactgggaggcttgaaggagattgaggatccattccaagatggtttactcacacggctaccagctgttggtaggagttataggtccttcctatttggaactctccagggactacttgagtgtcctcagaccatgggggctggcttcactcagagtgatccaagagatagtaagtgatggggttcaggacacactaccttcaa

SEQ ID NO: 660018 - DNA, 591 bp, Homo sapiens
aaagaatgttttaatcctttgagatgaatgcacacatcaaaagaggtttctcagagagcttctttctgaagacgtatcttttttcaccaatggcctcagtgtgctcaaaatatcccttcacagattctgcaaaaacagtgtttccaaaccgctgaataaaaagaaatgtttaactctgtgagacaaatgcaaacatcaaaaagtagtttctcagattgcttccttctggtttttatcatgggattttctctttttcacctttggactcaaagatgtccaaagtgtccattcacagaatggacaaaaacagtgtttccaaattgctgaataaaaagaatggtaaaattctgtgagatggatccatgcatcacaaagtagtttctcagaaagcttctttctagtttttaactgaagatgattcctttttcaccaacggactcaatgcactcccaaatatcccttcgcagattctacaaaaacagtgtttccaaactgctgaatgaaaaaaaggtttcacttggagagatgaaygcactcatcacaaagcagtttctcatgtagcatccttctcgtttttatcatgggatattc

SEQ ID NO: 660019 - DNA, 544 bp, Homo sapiens
gcatgggcagcatgctttttaaactgccgccagtgactcaaagattttttttttctttttttcttttcttctcccaacccccattctgaagttacccacaggccactagccataagttcagtcaataattagcaaacacaagacatcacttccaagtttctaagtgttttaagagttgtatgccaggaaagggggttgaagaccaaatatatatttcataatatcacaagtcataaaattgaataatactcagcaacaaaaagaaataaagtactgattcatccatcagtatggataaattttaaaacattattctaaaagaaataaactggagacaataatacctgccatataattttatgcatatgaaattttagaaaaaagcaaatctggtatgtggtgacaaaagtcagatcagtagtttccagggattgggaatttccaaatttcaagcatagcagtcaaaaaaattaactgttatgcttgaaatgtgacattatttaatgcacytttgatataataaaattaatctaaaaataaggtt

SEQ ID NO: 660020 - DNA, 560 bp, Homo sapiens
gtcaggtttggggcagactcacatatctgcagctgtctagagctctagactccatctagaattagggagactatattcatgtgtctctcgtcttcttcctgggttcagtggactaacctagccattttctccttcatggtgatagaagagagttcggagcacaagtggaaacacacaaggtctagtgaaacactattatttccactgaactctattcgaaaagcgaagtcatgcaatagcacccaaaagataaatatcttgctccccacagtgagaaagtgccacaaatttaagtggcaaaaggtgtaggtacagtgcagataaagaatcgcagttaatcatgcaatctaccagagacaatgtgacacatttgaaattctatgtctgacactaatggtgtcaagttaggcaatctatttataatctgaaccttaatttcctcttttgttaaactgtgttattcctaccacatggagtstttgtgataattgaatgaagaaaactgtgtgaaagtcacagacaagaagatggaaatgaggcttgtccagggctacaacaag

SEQ ID NO: 660021 - DNA, 398 bp, Homo sapiens
ttaaacactgtgagattaatgtacacatctgaaagtggtttctcagatagcttccttctaggttttatcctgaaatatttgctttctcatcattaggttcaatgaactacaaaatgtccatttgcagaatgtacaaaaccagtgttcccaaactgctaaatctaaaaaagatttaactctggaagatgaatgcacacatcacaaagcagtttctcaraaatttctatcttcattttttctgaagatacattctttttcaccataggcctcattgtgctctaaaatatcccttcacagcttctacaaaaacagtgtttccaaactgctgaatgaatgcgttaactctgcgaggtgaacgcagacatcacaaagcagtttctcagaaagcttctttctat

SEQ ID NO: 660022 - DNA, 546 bp, Homo sapiens
gaggactatttgctttactcagtccaccagtttgaatgctaatctcttccaatagwctctccacactcccaagaataatgtttaaccagctatctggccatcccatggcccagtaaagcataacacataaaacagccattgaaagggtgttaccacctatattaagaactctcaagtccccagtgttcccttcccaatcatagatgcctgcttctctcccaactgctaccctggattttgtgtttgtaaccctttggttttcatttacttttaataagtatgcatgtacttctaagagtatagttctgaatatttatgaagtttatatctatgtaacatcactgcatttgtgaggatcatctatgttgatgagcattgctctagctaattcatttcaaatgacagttttccgttgaataaatataatgctcatatatctattctccaatcaatgatgttttgtttattcccaggttttgggtttttttcctaataccataaaattttattattattaacatttctttacatgtctcctcttgctca

SEQ ID NO: 660023 - DNA, 555 bp, Homo sapiens
tgcaacaacaatgtttccaaactgctgaatccacagaaaggtttaactctttgagacaaatgcacacaccacaaagcagtttctcagaaaacttctttctagtttttatctgaatatatttgctttttcaccacaggcctgaatgcagtctcaaataacccttcacagattctgccaaaacggtgtatccagactgctgaatgaaaataaaagtttacctagggaagatgaatgcaaaaatcacaaagcggtttctcaggtagctgccttccacattttatactgggatattcactttttcaccattggcctcaataagttcccatatgcccattcacagaatggacacaaagagtctttgcaatttkctgaatccatagaaaggtttaactctgtgagataaatgtacacatagaaaagcattttatcagaaatcttatttttaatctgaagatatttcctttttcaccataggcctctatgcattcccaaatataacttcgcagattctacgaaaacagtgcttccaaagtgctgaatgaaaagaatgtttta

SEQ ID NO: 660024 - DNA, 553 bp, Homo sapiens
ttgaaaaacaaaacaaaacacttgtttggcaatgttcattcctcacagaatcagtgctattcattttggaaaatatcttagtatcctgcttgttgccttattagttgtttttctctcattgcaatcagctgttgccatgtaccttttgcatttagtggtcagggtcttcggaattgtatgaatctgatatcaaatcctagttgtattgctgactagctgtgaaaaaagattttaaacttattattttcagtttactcatttattaagtaccaatattaataytgaaactagagaaatagattaaatggcatacttgtatagtaattgttacataggaaaactctcaataaatcaatgctgttattattaccattaatattccctagatgtgaagattgccttcagaggaaacatactggaaaaaaaaatgagttttacagaagtttttcagcagaagttgattggttttacacacacacacacacacatacacgcacacatatttacacacatataaatatgtatattttatatatatatgcacacacatttg

SEQ ID NO: 660025 - DNA, 548 bp, Homo sapiens
agattggttacatccatttaatataccacattaaaacaacatataacacgattcatatgataatctcaacaatgaagaaaaatctgttggaccaaattcaacacactctcatagccaacaacttcagaaaatttgagaaatatgagcactaccccaagtcgatatacagctgtcacataaaacctcagctaataatatacttaatgatgaaatattgaacaagacaaagatgccctttcacactacttctgttcaatactgtattgrgatggtggaggaaaaaagaaaaaaaatgctgttttggaacaaaaaaattgcaatagtaaatattaaaataaaaataatattgattggaaagaaacctttctataagtgaaatcaatatgggtgtgatatgaaaattgaaattgaaatctaatatagcacaaaatttatggcattttatttatcataattatacaatcatattcaaactttatcttttttttttacctgaacaaaatttagttgaaaataaattgaatatttattggttactataactgtaa

SEQ ID NO: 660026 - DNA, 622 bp, Homo sapiens
acatgatttaattccttctttcggttgcatagtattccatggtgtgtatgtaccaggtattccttatccaatccaacactgataggcacctaggttgatttcatgtctttgctattgtgaatagtgckgtgatgaacacttgtgtgtgtgtgtgtgtgtgtctctttggtagaatgatttattttcttttgaatgtatacccagtaatgggattgctgggttgaagggtagttctaacttccttgggaaatctccaatctgctttccatagtagctgatctaatttacatttccatcaacagtgtacccttttctccacagcgtcatcagcatctcttgttttttgacttcttaataatagccattctgacatatacaaggtagtattcattatggtttggacttgcatttctctaatgattaatgatgttgagcattttttcatgtttgttgcccacttgtatgtcttcttttgagaagtgtctgttcatgtcctttggcattttttaatggggttgttttttgcttgttgaattaagttccttgtacataatggatattaaacttttgtcagtggaatagtttgcaaatattttcttccattctgtagttgtctgtttac

SEQ ID NO: 660027 - DNA, 622 bp, Homo sapiens
acatgatttaattccttctttcggttgcatagtattccatggtgtgtatgtaccaggtattccttatccaatccaacactgataggcacctaggttgatttcatgtctttgctattgtgaatagtgctgtgatgaacacktgtgtgtgtgtgtgtgtgtgtctctttggtagaatgatttattttcttttgaatgtatacccagtaatgggattgctgggttgaagggtagttctaacttccttgggaaatctccaatctgctttccatagtagctgatctaatttacatttccatcaacagtgtacccttttctccacagcgtcatcagcatctcttgttttttgacttcttaataatagccattctgacatatacaaggtagtattcattatggtttggacttgcatttctctaatgattaatgatgttgagcattttttcatgtttgttgcccacttgtatgtcttcttttgagaagtgtctgttcatgtcctttggcattttttaatggggttgttttttgcttgttgaattaagttccttgtacataatggatattaaacttttgtcagtggaatagtttgcaaatattttcttccattctgtagttgtctgtttac

SEQ ID NO: 660028 - DNA, 549 bp, Homo sapiens
tttaccttttatataaaatgaggcaattttttttcacatcaaaaatgagccatttttgcaatgccttctactaaataatccatcttttctcccctaaagtttgagacctccttaaatctatgctcagtgtctttgtatacaagactgttagtgaatctttctgttcatatataaggaatgcactgtttccatcataatgttctctaacatggattacatggattaatgtctagtagcatgaggcctcttctctgttttatcttttaaagatactattagtaagcaacagaattttacttctttatataaatttttattcttttttatgtatttgttttagagaaagggcctaactgtgtcactcgggctggaatgcagtggtgtgatcatagctcaatgcaacctcaaactcctgggatcaagcaatctttctgcttmaacctctcgagtagctaggactacaggcctacaggcatctgccaccacatccagctgattttttaaaatttttgtagatataaggtcctgttctgttgccgaggctggtct

SEQ ID NO: 660029 - DNA, 616 bp, Homo sapiens
ttaagaccaacctctttacacgtagcaaagtccctctctaaacctctctgaaccacagcaatggaaaggaagtgacagattgaaaaactgtgtggaagttacaattttaggctatgatgattgattcctttggaccaggatctgttaaaattcaagaaaacatttttcaaccatggtactcatcagaatccctcagagagcttcttcaaaattaactttccaaggccccaccctacccctagtgactcagaagttctgtgactacatccaaggctattgatggagatgaggatgaggtgtaaaatggtacctggaagtgttctgataatgagcatgtttttatagatatatcggtcattcaagtatattcattttttatagtatttttaaaatgtrtcattgcctattttaaaggattttttatacattctgatggtaacctattaccagctatctgtatgacagataactttctcacattatagccttgactttttttaatgtatttaatttgtcttttaatttagtttctaaaatgtttaatatagttaaatatatcaatctcaacttttgtgtttttgtacatttttgtacttctttaaagtgcatttccctg

SEQ ID NO: 660030 - DNA, 488 bp, Homo sapiens
gccaccgacagcactagacaggtcatcaagacagaaagtcaaccaataaataattgacttacactatacactacaacaaatggatttagcaaatatttacagaacattctgctcaacaactgcagaatatacattctattcatgagcacatggaccattttccaagctaggccatatgataagtctcagtaaatttaagaaaaytgaaattatatcaactactctctcagaccacagtggaacaaaattggaaattaactcaaaaaggaacccacaaaaccatgtaaatacatggaaattaaataacctgctcccgaataatcaatgggtcaacaatgaaatcaagatgaaattgaaaaattgtttgcacttaatgataatagtgaagcaacctatcaaaacctttaggatacagtaaaaatggtgctaagaggaaagtttacagctttaaatgcctacatcaaaaagtctaaaagaacaaaaataga

SEQ ID NO: 660031 - DNA, 557 bp, Homo sapiens
aaaaaaccatagaactaattagttttgttggaacatttgagctgaaaaatttgctctgaccagtcactgggaacaattgagatatccatagatgtcaaggcaaacaagttatttccttgcaggttctgggagaaaaaagtcctttttaaaattttcataaatccttccattatctcagaggttctgtacttactattagaccttgatttcaccaagattatgttcacctacaaaatatttagaaaatttaaattatcagctgctgaaagataacacagaatggtcatatgagatttgcaaataggcgctagtaagaataccattgagttctcactgaataaagtgttgcgatwgctcttttgtcttcccactggagaaaactgttatcactgtgcctttggtttactatctaagtagtagaaataaaaatcctcaaaggaaccatttattattaagtaagtgaagtaaattagtcacagttcagcacttggaagtggtagttacttaggaaacgtctgtctctaacaaaaatttagtttgtgaaaaaaataaagaaa

SEQ ID NO: 660032 - DNA, 646 bp, Homo sapiens
attctatatccagggaaataatccttcaaaaatgaagaataaaaaacactttctcagaccaacaagaaccaagggaatttgtcccgactagatctgctctgcaaaaatatggtaaaagaagttgttgagagaaggaaaacatatgtaaaaattctaatctacatgaagaaaaaagatattcagagaagggataaaygaaaataaaataaaaatatttttctttttcttaattgatctaatagataactctctcttcaaagtaatagcatcaataacatattgggtggttataatatatggtaaatgaaacacataataaaaataacatggatcagagtacagaaaataagaacatctctgttttaaggtacctacaccacatgtcaagctatatagagttattttaaggtagacttagatcagttaaatatatatagtatactctgaaaaaaaacactactttttttaaagatgtataactgatacactaagaaaggaaacaaatcagaatgatacaaaatatttgactaaagctagagacagcagaaaaagaaggaagaaaaagaaaaaatataacagtagaaaaaagcttaaaatgtggctcatatgcataactaaccaaccatattaataattactttaaata

SEQ ID NO: 660033 - DNA, 606 bp, Homo sapiens
tgaaactttgtttcaggaacatatattatacatttgagtatttatttaccttctatttattttagtttcttatyaaaatgctaattataaaatcaatatctacaatctttcagttatttttatgttgctcaaaagcacataattaccatacgttgttttgtgtaattttttttaaactctttcctgtccttaactgtgtttagaacatgttaacatgtcccatgttagaaccaaggctaagatatgctcatcgagattatgggtcttcacttctgctaccagctgcagcatgaagagagagaaaataatggaactcttacaatacagcttccctaggacagtttccaaaaggaatctacttcttagccttaaaacctccaacaatttatttgattctttgatcttgttttgtctcagttctctagacatttcctcaatatgtgtagttatctgacataaaaaattaaagtgaaagattaacaaatttgagaaaaaatgataaacaaatatggacaggagctggggtctttaaacaattatgtctttttctattgatgactcgctcaaccgcaaggtatacaagactgactttagaacattaatctc

SEQ ID NO: 660034 - DNA, 569 bp, Homo sapiens
aatgaaatatcttcactgttcagtatacttatttggtcacagaattctcttttcatatgataagygttatcctgtagaactgaggttgcatatagcatattttgataagataaatgctattctagaaactttatattaattggattaagctggaaaacttaactagtctctaggttcttctacttgactggcacaagtgtaggaaaaaggctgtgagttgtacatcaataaaattactcataatgctactcaatgcttactgttataattttcaaaatttaaaaagaccacgtggattccatttcagccaaacagaatgataattgaaaaattaaatttactggagattaaattgattctgggaaatcttggtttgatacttccatcctagagcacttacaggatgtacatagaaacccgcatagttgccagtagagtgcaccgaccagtcgacggcctccagccattcaggtgagaaacaggcctgtgtacccttggtgttccacttcagctgttattatgattctcttaggccggtggttatcaggtcaaagaagcaatacggctgt

SEQ ID NO: 660035 - DNA, 470 bp, Homo sapiens
ggtggcgcatgcctgtaatcccagctacttaggaggctgaggcaggagaaccacttgaacccgggaggcgtaggttatgatgagctgagatygcgccattgcactccagcctgggcaacaagagtgaaactccgtctcaaaaaaaaaaaagaagccaaaaatctgtttggaatcatacctaaaatagtaatagtcattaaccaccaataaaatttacccatgtctgtgttttaactttttattgtatgagtctacattcagttattaaaatatttgctatctccttttctttttcagagcatgaataatctttcatttagtgagctatgttgcctcttctgctgtccaccttgtccagggaagattgcttcaaaattagcgtttttgccacctgatccaacttacacactgatgtgtgatgaaagcggaagccgttggactttacatctgtctgaacgagcagactggca

SEQ ID NO: 660036 - DNA, 554 bp, Homo sapiens
ttgatttttttgtataaggtgagagacacgtggcatgccaattatcccagcactgtttgttgaatagggtgccctttccccactgtgatggttaataatgagtgtcaacttgattggattgaaggacataaagtattgatcctgggtgtgtctgtgagggtgttgccacaggagattaacatttgagtcagtgggcttggaaaggtagaccgactcttaatctgggtgggcacaatctgatcaactgccagcatggctagaatataagcaggcaaaaawatgtgaaaagagagactggcctggcctcccagctacatctttctcctgtgctggatgcttcctgtccttgaatatcaaactccaagttctacagttttggaactcggactggctctccttgcttctcaccctgcagacggcctattgttggaccttgtgatcatgtaagttaatacttaataaatggcttatatatatatacacacacacatatatatacacatatatgtatacatatatatgtgtgtgtgtatatatatatatttcattagttc

SEQ ID NO: 660037 - DNA, 603 bp, Homo sapiens
agacattcaccaaaaaaggtatctgatttgtaaataagcaagatgcttgagatcattagttattagggaaatgcagattaaaaccacaacgagataccactatacatctgtcaatataactaaaattaaagactgaacgtatcaagggttgacaaaaatgtggaggatctggacctctggaacatccactttgcaaaacagtatgtagtgatcttaagaagctagacatacacctaccatatgatccaaccactcctctcttagaagtttacccaagagaatttcaagtggatgtccatacacaaacttgtacggaaatgtccattagcaatttcacttgtatagtcaaaaactggaaacagcccaaacattcatcaacagaaaaatggataaacaaattgcatttgtttatcttaagatactattcaacaatttaaaagaataaactatygatacatgcaacataagtgaatcccaaaattattatgctgagtggaaaaagtaagatttttaaaaagagtatatgctgtatgagtccatttatagtaagctgtaaaacatgcaaactggcctgccacagtggctcctgcctatgatcccagc

SEQ ID NO: 660038 - DNA, 462 bp, Homo sapiens
tttctgggttatgttcaggtggctgacattacaacrgaaaaagggaaaggaggtacaggaatggggaagagttcaaagggatatttaaaaatctgttaatatttaagtaggcatttttaaccaaataaaaaggcacaaaatataattaaataacataaaatatctaagataccatataaacaccaaagtgaaggaaggaatcaattgaagaataacattctatgatattttccacattgaggcactgaggaacctttttacatgccaccccttgattcataagatgtacaaccatttcaaactgtgtgtattatttatgacaattttctctgaacaatatcaaaaaggcatggtaagtctccattttcataatgaagttgtttaaatggaatctctgagaagcatttaaattaagaaacacaaacactttgattctaactataaatgctgctatatatttgg

SEQ ID NO: 660039 - DNA, 594 bp, Homo sapiens
ctttacacaaaagtgttttccctaaagggagaagagaaaagttgaatgcagaagtagaaaaaaagattcatttgcacttgtagtatttatagctaaatatttyatattacagatgtattaaaatttttataattttaaacactactttaaaacagggagatggtttaccttcaaaaaatttggctctcaactcaaagttatcaaagtatatcctagatgtagtttgcttgtcaggcttctacatgaaaatctaaaatgctcctgcatttcagaatgagcctaacatatgtaattgcactcatccactatgtctacattgccaaccaaatactgacagagagagctagagtgccacagagagctggcagttcctctgtttgcattagcttctacttgcttcttcatctttcctctatgtctgacacatttcatgttactgtttttaaatgttcccttagctacagagctaatgtgcttatatctgtaaggggtctcatgtgaacctctaaataattaaagattcattagctccctggagggccaccatgatttccaaaacaagtcacaatacctaaagatctaattgtacaattt

SEQ ID NO: 660040 - DNA, 594 bp, Homo sapiens
ctttacacaaaagtgttttccctaaagggagaagagaaaagttgaatgcagaagtagaaaaaaagattcatttgcacttgtagtatttatagctaaatattttatattacagatgtattaaaatttttataattttaaacactactttaaaacagggagatggtttaccttcaaaaaatttggctctcaactcaaagttatcaaagtatatcctagatgtagtttgcttgtcaggcttctacatgaaaatctaaaatgctcctgcatttcagaatgagcctaacatatgtaattgcactcatccactatgtctacattgccaaccaaatactgacagagagagctagagtgccacagagagctggcagttcctctgtttgcattagyttctacttgcttcttcatctttcctctatgtctgacacatttcatgttactgtttttaaatgttcccttagctacagagctaatgtgcttatatctgtaaggggtctcatgtgaacctctaaataattaaagattcattagctccctggagggccaccatgatttccaaaacaagtcacaatacctaaagatctaattgtacaattt

SEQ ID NO: 660041 - DNA, 594 bp, Homo sapiens
ctttacacaaaagtgttttccctaaagggagaagagaaaagttgaatgcagaagtagaaaaaaagattcatttgcacttgtagtatttatagctaaatattttatattacagatgtattaaaatttttataattttaaacactactttaaaacagggagatggtttaccttcaaaaaatttggctctcaactcaaagttatcaaagtatatcctagatgtagtttgcttgtcaggcttctacatgaaaatctaaaatgctcctgcatttcagaatgagcctaacatatgtaattgcactcatccactatgtctacattgccaaccaaatactgacagagagagctagagtgccacagagagctggcagttcctctgtttgcattagcttctacttgcttcttcatctttcctctatgtctgacacatttcatgttactgtttttaaatgttcccttagctacagagctaatgtgcttatatctgtaaggggtctcatgtgaacctctaaataattaaagattcattagctccctggagggccaccatratttccaaaacaagtcacaatacctaaagatctaattgtacaattt

SEQ ID NO: 660042 - DNA, 593 bp, Homo sapiens
aatagacagcgactgtcacgaataaatcaaagtattactaatagtaaatgattcattctagaaagtcttggggatttctattagggctcttagggactatgtcttataagatgctaagcctagaccaatctgagacatgaaaagtatgtatttctaataagttttaaaaaattacttatactctaatttgttccaaaaataatttaatgtgaccgtgctaacaataatggaaatgtctctaccctgaaaagctaattacagtacttcctcttgtctctgtgcaaccatcttggattgattgtgaaatgccggtaggggcggcattgacagttattaactctacctgyttgtaatatttgctgttgttttatttttgagtctgagaagatggcttaaaagtggtctagactactgtgtatgacttcaaataccaagaggttggaaggtgttcaagccattttcagtccggttagactcagcagaataccttcttaccaggcaggttttacattttatctgtcatgaggcctactcaagactacaaaataaaaagagtaaaatcatatcagataataaggcaaaaagaattttag

SEQ ID NO: 660043 - DNA, 593 bp, Homo sapiens
aatagacagcgactgtcacgaataaatcaaagtattactaatagtaaatgattcattctagaaagtcttggggatttctattagggctcttagggactatgtcttataagatgctaagcctagaccaatctgagacatgaaaagtatgtatttctaataagttttaaaaaattacttatactctaatttgttccaaaaataatttaatgtgaccgtgctaacaataatggaaatgtctctaccctgaaaagctaattacagtacttcctcttgtctctgtgcaaccatcttggattgattgtgaaatgccggtaggggcggcattgacagttattaactctacctgtttgtaatatttgctgttgttttatttttgagtctgagaagatggcttaaaagtggtctagactactgtgtatgacttcaaataccaagaggttggaaggtgttcaagccattttcagtccggttagactcagcagaataccttcttaccaggcaggttttacattttatctgtcatgaggcctactcaagwctacaaaataaaaagagtaaaatcatatcagataataaggcaaaaagaattttag

SEQ ID NO: 660044 - DNA, 592 bp, Homo sapiens
atcagcccttacagattgtcccttggaatgcagcgtgtttccacttgcaaaatgcttagatcatctctaagtattgcttcttctgcctcttttcttcactacatcaaggattactgcatgacyctgtgaagttttatacaaccactgcaatgttctgccctacagctaactgaatttcagcatcagtgggccaaatccacacacttacaggagcaaagtttgagcccaagttttggagtaggaaaaagccatgcttacctctttctctatttctgttcagcatgaagtcccttggttgatgtcttcacactgcctggtcaaatccctttgcctttgtgtctgacctaaagtaatctaaaactaccaggcaaggactaggactgccacagccttccttgaatgtggcactgtaatagagaaaacatgcttatcctagagataagttttgtcatgcttcggttatagccaagtcggtcagttatatgctcagtttgccatcttctgaagtttcctgaaaacacagtagaaaaatggtgcctgacacgaagaatcatagaaatctcaacaaatgtttttatttttttagtcagag

SEQ ID NO: 660045 - DNA, 574 bp, Homo sapiens
taatttataaattaggtacagtaaaatattaccaataacttataataaaatataacaattatagcaatatactgtaataaaacttatgtgaatgtggtctctctctctctaaatatcttagtgtactctactcagcatccttcttgtgagaaagtaagacgacaaaatgcctatgtgatgggaggaagtgaatgttaggctactgttgaccctctgacaatattccagaggaaggattatctgctttgggtgatcctggatcatcgagtccgaaagatgtccatagttggatrtcaggagcagatgttagtgactaagggcaagtaccaggtagactctagacaaagggacaattcatgtaccctgcagaatggtgcaagatttcatcatgcaactcagaatggttcttaatttaaaatttttgaattgttcttttggcttaggattgactttgcgatgagggctcttttttggttccatatgaacattagttttttccaattctgtgaagaaagtcattggtagcttgatggggatgacattgaatctataaattaccttgggcagtatggcc

SEQ ID NO: 660046 - DNA, 564 bp, Homo sapiens
atcttataaacaataaaaagatagtactattttaaagtgagtcctaaaactaaacacatgtattatatcttgtaattctaatgaggtaggcactattattatgacatcttacagacagtgcaactgggactttaagaattaaattaaatactgggccaaagttatgcaactagaaaatgacaatattcaagccctggtatttttaactccagagcaaggctcttggcatttacwtttgactttcctaatcttatactagacaatactacctagcaaataacttaaatgtaatataatgtcagataatattatataaaaatctttctactctacccttttaagaaatctctcttcatcttacctttccactccctcccccaggctttcacaattccactcaaaccttcaaaacaacttgttcacaacttcgttagaatcaactgatcaatatgcttttcataatcaaatatctttatttcactcctaaagtgaaaatgtggaataaatggtcttcttcagaagaccactgtcaattttgattttctttttccttagagtggctgg

SEQ ID NO: 660047 - DNA, 600 bp, Homo sapiens
  misc_feature 1, 2, 3, 4, 5, 6, 7, 8, 9, 10, 11, 12, 13, 14, 15, 16, 17,18, 19, 20, 21, 22, 23: n = A,T,C or G
nnnnnnnnnnnnnnnnnnnnnnnaaaagtgcagtgttgttattgctgtcatttgtgtttattagatacagaaaatgttttgtgtgctatagagacaactgactccttttcccggagctcttaccttctaactggaaaagaaagacaggaagtctgaatactgtttttgtttgtttgtttgttttgttttgttttttatacttgcaaatgatggtcaaaattcagtgtaaagatagaactataagaaagtgtgggtttataagtacatgatactatacagaacagaaaaatattgggaggaaattgagtatagtacattttcatacattaagagacctggagttttaaaccaaaccctgtaattacttatcagcatgatcctgggcaaagcactttatctccctaggtctctattatactttaataatctcactatccaagatggagaaaagagaatttatcatggtaatrtagagggcaacattaactcagagtttattttcatttgctacaattagcactacaatttgagttcttttttttaattgacagcattgtttgcagtctttgtttaccatttgtaaattctggttagtagacc

SEQ ID NO: 660048 - DNA, 542 bp, Homo sapiens
gcgtgcagttgatttagccaaagtgcaagtggggtggtgcggacagcacatgaacctgagccccgctgtactgagcagcaatgagggccttgaaagccctccagttttcaggatatgtgtacagggtcccagtcgccatggtgcttccgcaaagaaaggggtgagaagagattctttttgatgtttaagatacataccatctatatgtatttaaaatatatattcatatgcatagaaaaggcatgtaaaagaagctcagcagaggctacttcccragaggactgcaggacttagaatttacagtgagaggagaattaatattttactataaatgtttatctttgtactgtttgaaaggtttactatgtgcgtatgtcatattgtcagttgaaagaagagacagagcaaatcctacctaccctgaaatgtgtgttttgttccacttggcaaggaatgccaaataaagggaagaaagccaaggcctaaattgtcaatatcacagtgttgcacatggctagccctgcttagcaaagaaagtattt

SEQ ID NO: 660049 - DNA, 571 bp, Homo sapiens
tcatactcatataaataaatgattgaataaataagtaaatgggggagaagaacaaaactctccttcagaagaattttaattaaaaaatatagaaggaaagaagaaaaagaaaatcatcattagaacatcaataataattgctatcggcaagatccaccaatgaatrctaacattagcgggtcaaagtttaagaacaaacagagtatttgcatagcttccaagtgtctcctctgcactcaaatttattaactattgtggtagctttaacatattccataaattatctgatacttcccaggaggtggagcttaattctcctctccacgtgtggtatggactttgtatcttgcttctaataaatagtgtatgagcaatactctgcaaaagtgtaaatagccatgaaagacaaggaaagtctgagaaattatttaagattggaggaggctatggaaacatgaccactaaaagtaatgtggaagcctggactggctcttggaacagaaaaaaagacattaatggaaaaaataatgaaatccaaattaagtctgtagtttagttaatactattatat

SEQ ID NO: 660050 - DNA, 460 bp, Homo sapiens
atgacactgttgatgtaaagtggaatttacatctgaatattctgctgttgagttgccagaagcatttgtcatgatatttttcaaatcctatcaccctaaagcagcagtgtcatctgtctttgcttgtagccatttccatgcagcaacattaagaacaaacttaattgacagtcactaggaacccaagggcagcacacatgatcaattatctaaatatgctggcggttatcaaagagaatggggttcatgaatctcatataacaaggtttttatgtwaaaaaaagttcgttctttggtggcatggagctatcgcctgaacctgatttatttttatttaaaatatatattaaatgaaagttcaataagcttttcccagtttgaagtcttgagaactttatgggtgcaaactaatcctaaagaggattaccaatattaagagtgataggtagttcttatctgt

SEQ ID NO: 660051 - DNA, 528 bp, Homo sapiens
gaggacatgcatggataagggagtgaatacagtgttttcaccctccctgctctgccagcttctacaccaaaggttctaaagtcattttcaatactttcctggcattctatttttaagctctgaggaaagaataaaggctatgagcctggcagtgacatccatgtctaaattatctttatacccctggcagcgtttagcttggagctcttagtaaacatgtagatagcactggattgaataactaaggaaggtaaattgttagaagttaaaggcatcaggctgggtgctgggaataccaagaataataaaatgcttaatacttacttagttgaagctgttgtagagagaggactaatggaccagtgtttgaactgtcagagtcgggaggacagaaatagagtgagagctagtagatgtgaagtagtgggtggtagggaagagggaatgcaggagaggagaggaagggatgggagcmcaaaaaaaaaaaaaaaaaaaaaggaagggaggtggggagaataggacaaagcc

SEQ ID NO: 660052 - DNA, 593 bp, Homo sapiens
aagtcaggagtggactgcaaaatgaggttcattagactatgaattcccaaggagtggttttttaatgaatgaataaataagtaagaatctaaagacagagaccagtctggaagtttgtctggaaagtttagttaagtagttcatcaggcctgaactaaaggagaagcagtaaaaattgaggttttagatatattttgaagtttatagtttagttgctacttatcaacatgttgatgaatgacagaaggaatatcagtaaagagggtttaggaaacaatgaatttgttcacaactatgccatcaactagctgtgtgatcttgttgatctcaagtggaaaattagggtattacagtgaaatgtatctgaagagcttctcaaagctgaagccctttcattctaggttgacatttttggatctcatgtcagtcatctttaacaaccgctctggtgtgtgatttcactcacatgaaggtcaagaacaggcaaaactaatctatggtgctagaaaaacaatccttacttatgsgagggggctgaatggaaacgggaatgagggaatgttcttgggtatggggtataccttgactgaggt

SEQ ID NO: 660053 - DNA, 569 bp, Homo sapiens
ttttaacctttgactataggtctcaatcttactttggttcctgtatttgaatttatgctaataaagtcctacagctaaaaaagattatataaacttatctacatttttactagtattctggtttcattttaaattatgtaatgaaatcaaattttaatttggatgattgttatctgagttaaggatctaaatttttaattttcttataaatattacataattatttctgaaccatatattgactaatctgccctttatatgatgtgcattataagagcttggggttgtttcatttgcaaagatgaatgcttgagaagtagatatttaatcataacatttcaaaatctactggataacctagaattgaaaaatagcctataggttgaaaaactcctgtagygaagaaagaaaataactaataaacagtgacaatataaatattataagtatttattttattatcgccctgaaatttgataatgcaaacatgtaatatctacatatcatccatatatcaggtcataaaaaatcaatacattcttcaaaaatttagcataacagaaaatgca

SEQ ID NO: 660054 - DNA, 538 bp, Homo sapiens
gatggaaatgtgtattgtcatggcatccctgctgcatcccctggtttcacaggagtggaacagagtctctttgaaccaattcactggcaaacatcttctggttaactttcacaggactcagatcaagagtggatgctcctgcatctcacactggtcatataaactctaactctccaggtttcccatgtggtcttttcccagtcctgggttggagttggtttatttattgcagctgagggagaaaagcaactttaccgtgaagtatataccattttgatgtgtggaatttttaagaaagagaaggaagcataggagcagagccatgaycttagtgtaagatcagggccttcagtaccagataagcaccatttccaaattctaggataacctttggcaaatctctaaattaactgaggccttggtttcttcatcttatgcaagacggaattgattaaaagacaaaccactattttattgaccacgaggaaagaaaaaatagtcatttagaattgcaatatgcattgattataaaatgcat

SEQ ID NO: 660055 - DNA, 540 bp, Homo sapiens
tacatactccaattagataaatcttccaccaattaaaaaaaatcttgtttcattagttttgagtttgttctgttgccaataatgttttgcttttcagctgaataaacaataaatctaggaggctatttagatgtgtgatgttcttgaaagaagctttttaggacatagaagacaaagttgcttactccaacattaaaaagataatgtagctgagttgaattaacccatttagggatgcatttcttcccaagggaaactgcaaagttattcttcacaaagagacttcactgcacccacacaattaaacactggggatcagataacatgtgactgcacmgccttcagataaatccaattaccacttaaattaccaaagaaatgtgctttttagggcgcatatcctctacacaatgacctttgtgtgtgtgtctgtgtgtgtgtgtgtgtgtgtgtgtgtgtgtagaaaagttattgcatgtaaaaaatgctgtatgaaaggatgaaattagcccagtcttctctccctccccacccattctt

SEQ ID NO: 660056 - DNA, 533 bp, Homo sapiens
aaccttaacgtttgaccaactcaaattcaacaaaccaaaatcccttaagcaattggtcccctttcctacttaaatagaattggcttttaggtaaatcaccagagagctatcaactgagcaagaaaaatgaccactgttatttggactaaaatgtttcttttctgtctatagaacttttataaaagctgagttacatttatgcggtgcttgtgtggtagtgtgattgaggttgcattcattttttaactgagttgataatgtgctcagaagctggtgtgtaacctacctacttctgttgcttttctccctgctcaggtgtggtttcagaattgtagagcacgccacaagaaacaygtcagtcctaatcactcatcctccaccccagtcacagcagtcccaccctccaggctgtctccacccatgttagaagaaatggcttattctgcctacgtgccccaagatggaacgatgttaactgcgctgcatagttatatggatggtaggtatcccaacatttaacagctgtctcccag

SEQ ID NO: 660057 - DNA, 526 bp, Homo sapiens
gtctgatcacccacaatgtgcgtttatcggcactttggtctcagtattgattttgatttggcttgacttgttaacacaaaggaaagtgaaagtgagtgagtgctagagtttgagacggtcggggtgagtgagtgacccctttaccctttccttcctgtggtgtgagtgttgttttgtctcaggaggaagatgggtggaatgcaaagtaagcccactccgctaggaactatgttgaaaaatttcaggataggatttaatggagactatggagctaccaggacaccaggaaaacttagaactttgtgtgagatagactggccggcattaaaaatgggttggccatcagaaggaagcctagacaggtcccytgtttcaaaggtatggcacaaggtaactggtaagccaggacacccgaccagtttccttccacagacacttggttacagctggttttagaccccccacagtggttaagaggacaggcagcagtagtactagtggcaaagggacagacagccaaggaaga

SEQ ID NO: 660058 - DNA, 625 bp, Homo sapiens
ttcttggtcatgaactctttgcctaagccaacatctagaagggcttttccactgttatcttctagaatcttcatggtttcaggtcttagattaaagtctttgatccatcttgagttgatttttgtatgaagtgagagaygaggatccggttttattcttctacatgtggcttgccaaatatcccagcaccatttgttgaatagagtgtcctttccccactttatgtttttgtttgctttgtcaaagatcagttggctgtaagtatttggcttcatttctgggttctctattctgttccactggtctatgtccctattttcataccagtaccatgctgttttggtgactatgaccttatagtataagtttgaagtcaggtaatattatgcttccagatttgttctttttgctttgtcttgctttggctatgcaggctcttttttggttccatatgaattttaggactgttttctctagttttgtgaagaatcatggtggtattttgttgctctgattgctctgggtagcacttctagcaccatgttgaagagaaatggtgagagtgggcgtccttgtcttgttccagttcttaggggcaatgctttcaacttttccccattcagta

SEQ ID NO: 660059 - DNA, 601 bp, Homo sapiens
attaccactgataccacagaaatacaaaagattattcaagactactatgaacatcttcacatccataaactagaaaacctacaggagatcgataaattcctggaaatatacaaccctcctggattaaatyaggaagatatagaaactctgaacagaccaatcagaagcagcaagactgaaaatggtaatttaaaaattgccaacaacaaaaaagtccaggaccagatggattcacacctgaattctatcagacattcaaagaattggtacccttcctattaacactatttcacaggatagagaaagagaaatcttccctaaatcatttgatgaaaccaaaatcaccatgatatgttatggctctgtgtccccacccaaatctcatcttttagctcccataattcccacatgttgtgagaaggacccagtaggagatgattgaatcatgagggcaggtcttttccatgctgttctcatgacagtgagtgagtgtcacaagatctgatggttttaaaaacaggactttctctacacaagctctttctttttgcctgctgccatccacgtaggatgtgacttgctcttccttgactccaccatg

SEQ ID NO: 660060 - DNA, 601 bp, Homo sapiens
attaccactgataccacagaaatacaaaagattattcaagactactatgaacatcttcacatccataaactagaaaacctacaggagatcgataaattcctggaaatatacaaccctcctggattaaatcaggaagatatagaaactctgaacagaccaatcagaagcagcaagaytgaaaatggtaatttaaaaattgccaacaacaaaaaagtccaggaccagatggattcacacctgaattctatcagacattcaaagaattggtacccttcctattaacactatttcacaggatagagaaagagaaatcttccctaaatcatttgatgaaaccaaaatcaccatgatatgttatggctctgtgtccccacccaaatctcatcttttagctcccataattcccacatgttgtgagaaggacccagtaggagatgattgaatcatgagggcaggtcttttccatgctgttctcatgacagtgagtgagtgtcacaagatctgatggttttaaaaacaggactttctctacacaagctctttctttttgcctgctgccatccacgtaggatgtgacttgctcttccttgactccaccatg

SEQ ID NO: 660061 - DNA, 601 bp, Homo sapiens
attaccactgataccacagaaatacaaaagattattcaagactactatgaacatcttcacatccataaactagaaaacctacaggagatcgataaattcctggaaatatacaaccctcctggattaaatcaggaagatatagaaactctgaacagaccaatcagaagcagcaagactgaaaatggtaatttaaaaattgccaacaacaaaaaagtccaggaccagatggattcacacctgaattctatcagacattcaaagaattggtacccwtcctattaacactatttcacaggatagagaaagagaaatcttccctaaatcatttgatgaaaccaaaatcaccatgatatgttatggctctgtgtccccacccaaatctcatcttttagctcccataattcccacatgttgtgagaaggacccagtaggagatgattgaatcatgagggcaggtcttttccatgctgttctcatgacagtgagtgagtgtcacaagatctgatggttttaaaaacaggactttctctacacaagctctttctttttgcctgctgccatccacgtaggatgtgacttgctcttccttgactccaccatg

SEQ ID NO: 660062 - DNA, 601 bp, Homo sapiens
attaccactgataccacagaaatacaaaagattattcaagactactatgaacatcttcacatccataaactagaaaacctacaggagatcgataaattcctggaaatatacaaccctcctggattaaatcaggaagatatagaaactctgaacagaccaatcagaagcagcaagactgaaaatggtaatttaaaaattgccaacaacaaaaaagtccaggaccagatggattcacacctgaattctatcagacattcaaagaattggtacccttcctattaacactatttcacaggatagagaaagagaaatcttccctaaatcatttgatgaaaccaaaatcaccatgatatgttatggctctgtgtccccacccaaatctcatcttttagctcccataattcccacatgttgtgagaaggacccagtaggagatgattgaatcatgagggcrggtcttttccatgctgttctcatgacagtgagtgagtgtcacaagatctgatggttttaaaaacaggactttctctacacaagctctttctttttgcctgctgccatccacgtaggatgtgacttgctcttccttgactccaccatg

SEQ ID NO: 660063 - DNA, 596 bp, Homo sapiens
acttgacaagaaaaagaatgtaatactacctcatttattttttatatcgattacatattaaaatgttaaaatgacaatatttcagatatattgggtaaaaaaatattaaaattaaattcactggtttttaaaaactttttacaatgtagctgccacaaaagtacaaattacatgtggctcacactatatttctgttggccagtgcctttctaaaccatagatttccttagtgccagtgactgtcacctcaactgcttagttacctgtgatctttgggcatggttaccaggaagctcttgaaggaccaactgtctcaaggccctgagtatacacttgcatagaaaattaatatatattcatcaaggcctcttgccttgttcagtagccaacttgatggacttcatgtcaaccgccattggtgtctgtgtggttcccttcagttctgcctgaatttcctttacatggctsggagaaaattataacgaggggttgatattttccacaagcctatactgataagagcaagtggtctagtctgacagcaataaagccaaatgactgctaaggcccggcaggtaacataaaaagtgaagcaa

SEQ ID NO: 660064 - DNA, 548 bp, Homo sapiens
cttagaatatgcttagaatatagaatagaataagtaaattagtccatattctaagctataaaacatgtcttaacaaatgtaaaacaatttttcacaaaatgtatggtctcaggccacaatggaattcagtaagaaatgaagaaaaagacatttgaaaaccccctaaatatttagaacctaaataaaacacttttaaataccatttaggtaaaaaagkaacacatcattgagaaattagaaagtgttctaaaattaataaaaataaaaacactcatatataattatgtaggatgtcattaaagcacagcttagaatgcagttgactatattagaaatcaagaaaggcctcaaatcgattatctcagtttctacctttagaaactagaaaaagagagcccagataagagaatataggatataataaacataagagtggcaatcaatcagatagaaaacagcaaaatggagagttatttgagacaaattttttttacataaatttttttttagaagaaagttgttgattttaatcaataaaatggatcaag

SEQ ID NO: 660065 - DNA, 591 bp, Homo sapiens
tgatctatacacaatggaatactattcagcctttaaaaagaagaaaatcctgtcatttttgacaacatagatgaacctggaggacattatgttgagagaaataagacgggcacaaaaagacaaatgttgcatgatctcacatgaggaatctaaaaatgttgaacttgaagtagagagtagaataatggtaaaagaggctaggggtggtgaaagggaaatgttgatcaaaggatacaagatttcagttagattgaagaaataagttcaaggagtctatcatgcgacattgtgactagagttaasaacaatatattcatggaaattggggagagtcaattttaagtgttctcaccacagaaaatgttaagtgtgtgagataatgtatatgtaaatgagctctatttagccatgtcaaaatatatgcatgtttcaaataaaaacatgtacatgatatacacaattttgtcaatcatgaaataaaataataaatatcttagctcctatggcttattcacttctcttctttaaactaaccgcctgactgaattcctgaatgttcttattactgtttgttgcctattacctattaac

SEQ ID NO: 660066 - DNA, 415 bp, Homo sapiens
ttcagccatattatacaaggatagaaaagtatctgaaaatattatgtttagctgcatgtgaataatttttgttgagaaaaaaatgagataagcaggagaaaatataaaactttcttagtaatgcaaataactgtgggagaatagctaaaataacatgttatttgtcatcagctcccaattgaattttacttccagatgaagatcactgagtttcaaatttggcacatattgtcctctgggtcttatgatctggatctcatagcatgagaaatgkgtatgttctacctgttggcacctctgctcaagctccacggatttataatcatgggcatctacatctccttcagcacaaattaactcatcagaatagtttatcctaaaccgtatttcaaagcctaattaatttcaacattga

SEQ ID NO: 660067 - DNA, 575 bp, Homo sapiens
aagttcatgttttccttaactcttctcataacagaatttgcagcagttgattctcctattttctcttacagctcaagagagcrtagaaggtatcagaatggctgtttgattgtaatctttaccctgcgtgtgtctttctatcccctcccatacctcacccccatccaacacacacacacaccctcactctgtgacatcgtgtacagaggtcaaatcaccactgggaatccaagatctcatatttaccagattttagaccccagacttcttttgcctttggttcttaagtttcttctcctggtctgtgtcttctctcataatatataaaatcactttcatttttcttaatgccattaccatgatagccttgtgtgagtcaccttctttgccttcttacgtatacacacactactggtggtggtgtacagaaatgattgggtcccagaggaaacagctgtgacatattcattcacacactcagcatctacttattgaacaccttctgtgtgcccagcactgtcctattagcagagatagtagggaagaggagacaggtcatggtctcaagcagatta

SEQ ID NO: 660068 - DNA, 587 bp, Homo sapiens
gacctttcacacatgaataacctgaggcttggaaatatgattggacttgggtgaaacagaacagctagtaagtgaaagaacccacattggaaactrggtttcctgacttccaggttagtgtccttaacctctgttccttccctcacgttttgttgtgcatcttatgttacacactgtcctaggtgatggggatacaatgttccacaaaacctctatacagtttctttcctcatcagcttaatcaggatttaataagatagcccacacaaaaattaacaaatgtgagattacaagtgtatttgagagatgtacagagaataaatgcaaagaataggcaactgattcactggtggtcaggaaggggtggtcagggaagtcttctctgaggaaagtgatctttgagctgagatataaaggtaggggaaatgagatagagaagagtgggtgagcattacagaaagtgcctcctggtttaattgtttgggaatttattgataaaaagtggtttttatttggctatttccaaggattgtttacttgtttggttccacattattttctgtagcaaagagactctaaaaaggcta

SEQ ID NO: 660069 - DNA, 571 bp, Homo sapiens
ttttttttttttttaaaaaaaaaaagtctttctttgtacccattagagaattgaccttgcagggaaaaccaccaccctgaaatcagcagacaggaaaaatacaaagaattttgggagatatacctaatgctagatgacgagttagtgggtgcagcacaccagcatggcacatgtatacgtatgtaactaacctgcacaatgtgcacaagtaccctaaaacttaaagtataataataaaaaaaaattaaaaaaaaaaaaaaaagaattacagctgagagttgattaccgggagtggaagtcaatggaactgtcaactggtagaaacactttagaaataattttcacaaattactaaggctgcgtttgaattagaatgagagtgagaaacttcctgaagccagtcttagtgagtctcacatctttctgggttttacctactggaaccctaggagattttcacagtgaagagccaagccagtttttgtttcactcatggtctgggcaagggragggtaacgtttttgaaatatgatttcattctgcatgataaaggcccatttttcagagaaaa

SEQ ID NO: 660070 - DNA, 577 bp, Homo sapiens
atacaaaatgcagtgaaaaatttcaacaatagactagaacaagtaaaagaaagaacttcaaagctcacagtcaaggctttcaaattaacccaatcaaaaaatttttttaaaaagaattttaaaaattaaacaaaacctccaagaaatctgcaattatgttaaatgaccaaacctaagaataattgttgtttctgagaaggaatagaaatctaaaagtctgrgaaacttatttgagggaataattgaggaaaacttccctagccttgctaaagatctagctatccaaatacaagaagctcaaaggactcctggtaaatttatcacaaaaagttcatcacctagccacgtagtcatcaggttatgtaaagtcaaggtgaaggaaagaatcttaacagctgtgagacaaaaacaacctataaaggaaaacgtatcagattaacagctgatttctcagaagaaactttacaagccagaaggcagtgagatcttaacctttagcctccttaaacaaaataattgtcagccaagcattatgtgtccagcaaaactaagcttcataaatgagggagagataaag

SEQ ID NO: 660071 - DNA, 612 bp, Homo sapiens
gtgtctcactgtggttttgacttgcatttctctgattagtgatgatgagcattttttcatgtttgttggctgcttgtatgtcttcttttgagaagtgtctgcccatgtcttttggtcacttatacactgttggtgggaatgtaaattagtctagtcactgtggaaagcagtttggagatttttcaaaaatctaaaagttgaactacctttcaacccaacaatccctttactggatatagacccaaaggaaaataaaacattctaccaaaaagacatacacacccctgtgtttatcacaacactattcacaatagcaaagacatggaatccacccaggtgcccatctgtgctggattggataaaracaatgtggtacatagacaccatggaatactctgtagccataaaaaagagcaaaatcatgtcctttgcagcaatatggatgcagccggaggctattatcctaagtgaactaatagagaaacagaaaatcaaatattgtatattctcacttataagtgagagtttaacaccgggtacacatggacacaaagatgggaacaatgagcactggggaccactagatgcaagagagagggaaagcggcaaggg

SEQ ID NO: 660072 - DNA, 522 bp, Homo sapiens
catcacagccactaacagtaaatatgcactctaagccactaagaaagtcagagacaccactgactctgtttatagccaaagaaatcatattgagactacactacagcaaacccagaatcaaagctaaagtgcagtgctctattcaaccaataccataaatatatcttcaggagaattsatcccctataaaagcaaattcaaaaaattggaagaaacagctgttacactcggtgtgcagatatcaaagtaaggacacaagaaacatgaaaaagtaaggaaatatgacacgtccaaaaaaacaaaataattctccagcgactgatttcaatcaaaaagacatttacaaaatcccagagaaaaattcaaaatattttcataaaagaagcccaatgacacatgagagaatattgaaaacagtacaaataactcaggaaaacaattcaggatacaaatgagaaatttgtcaaagagatagaaatcataaaaacgaacaaaatagaagccctggaactgaagaattca

SEQ ID NO: 660073 - DNA, 563 bp, Homo sapiens
agaaacgttgggagatgaatatattcactgtcatgattgtggtatcgttttcaagggtgtatatatatatatcaaagctgatggaattgtacatgtcaagtcaaatatagcttatatcaactatacctcaataagcctggttttaaaatttttctttttgaaaaaaggatgagaatctaaccttccttattcctggtttattagtaaacttgaacaatttcacctgtctcctatacttaaaatgacatttcagaattttaaaaacaggattttaataaaatagcgaagttattacataaaatatttgctagtagttagcaaatgtatttgtaatacacatrcaaataaagcttcataacatgatagtaagcaaatatctatcaatcttaaaattttttaaataaaagagcaactatattacataatgactttttagagagggttggcatagaaagataaggagtcaaagaggaaggtaagaaaagagaaagggtgagaaagtaaatatacaagaaaatgtaaccagaggctcaaaaaaaagaaaagtaggacagtaaaataaa

SEQ ID NO: 660074 - DNA, 613 bp, Homo sapiens
caaatgataaatagtctccagatgaagaaatgctctataacgccccaccgctgtgttttcctatattttgtccttttctgaaaactttaaatacacgaatttttggtagaaatgaaaatctttctgttttatatatttgtttctgtccatggcactctgatatctttgaatctagtaaggatatagccttgtcttatttataccagcaagcagtgttgtcacttaatgctctcatttttcacgtaaatgactgacattttcccaagtcttcacaagtgatttttgaagacgttgctgcattragcagagactatgtcattgtaattgcagaagtttttaaattaaatatgtttaataaaattttagagcctgtttctgtggaacacataacacataatggtggtgtaatgtgtatttaaccataaattagcttcacaaaaatttgtgtacttaaaagtgtttatatccaaagaaattcttatttactgctcagtaatctcttgtgtagaagaaaatatgtaacatagtttgctgagtctttgataataacccccagtgtaaaataaagccgtaaagatgaaatgagagttgatactcaatgaaactgatgtga

SEQ ID NO: 660075 - DNA, 596 bp, Homo sapiens
tagattaagtgaactcacttcagatgcattcagaatatttgcataaaggatgatttgatttttggctgttccaggaactactggaagcaggaaacagtgatagarttgggataaaccacagtgactcattattcctctttgttactattgggcaccagaggtatatgttttgttgatattggttattcaaatgagataaacgtgaatatgcatacattggctttgtttttcaaggagctgttggataaaatagcaacttaataaaaattctctagagaataacatgataatttaaccagactattttagaagtgaaaataatgttgaattcattacttgactcccaaatggttattttcaaggaatattggcgtgatttccagatgtaaaagcttattcatatctaatgcttgtagcaattttattttgtataagtatgtcaaatttggtaatttattaaactttttgatgaagtttatacattataccttgttgccatgagtggatgaagatttcggaaggctaaactagaagatgcaagagatgtaggcacattattacaccatatgggtgtgagaaataatgaacattacata

SEQ ID NO: 660076 - DNA, 596 bp, Homo sapiens
tagattaagtgaactcacttcagatgcattcagaatatttgcataaaggatgatttgatttttggctgttccaggaactactggaagcaggaaacagtgatagagttgggataaaccacagtgactcattattcctctttgttactattgggcaccagaggtatatgttttgttgatattggttattcaaatgagataaacgtgaatatgcatacattggctttgtttttcaaggagstgttggataaaatagcaacttaataaaaattctctagagaataacatgataatttaaccagactattttagaagtgaaaataatgttgaattcattacttgactcccaaatggttattttcaaggaatattggcgtgatttccagatgtaaaagcttattcatatctaatgcttgtagcaattttattttgtataagtatgtcaaatttggtaatttattaaactttttgatgaagtttatacattataccttgttgccatgagtggatgaagatttcggaaggctaaactagaagatgcaagagatgtaggcacattattacaccatatgggtgtgagaaataatgaacattacata

SEQ ID NO: 660077 - DNA, 521 bp, Homo sapiens
ttttataacttacatgctttatttgtatatatccaggatactagatatttgtaatccaaattggaggttattttttgtcatttgattttttttctgyaatgtgtgttctcaccacatagaagcttttacatttttatgtagtcagatttattcatgtttttatttatggttatgttaaagattatagctattagggacctatttcttcagggtttataatttatgtatgttgttacaaatagagaaattactttttctttgacccaataggtagagggcacttttgtggactcagaaagcttgcctctcctattttattttaggaaaatttctgagaatctgcctcctcatttccaagccagagtttaaaatatttacatttttacttcatagtgttaagacattgtgtaatgtaagtataatgtgtaaaaaaaaatcttaaaaatctaatagtgatttggcagagaccaaagcagggagggccttgaaatgctgctctatttgttatctattattataaa

SEQ ID NO: 660078 - DNA, 521 bp, Homo sapiens
ttttataacttacatgctttatttgtatatatccaggatactagatatttgtaatccaaattggaggttattttttgtcatttgattttttttctgtaatgtgtgttctcaccacatagaagcttttacatttttatgtagtcagatttattcatgtttttatttatggttatgttaaagattatagctattagggacctatttcttcagggtttataatttatgtatgttgttacaaatagagaaattactttttctttgacccaataggtagagggcacttttgtggactcagaaagcttgcctctcctattttattttaggaaaatttctgagaatctgcctcctcatttccaagccagagtttaaaatatttacatttttacttcatagtgttaagacattgtgtaatgtaagtataatgtgtaaaaaaaaatyttaaaaatctaatagtgatttggcagagaccaaagcagggagggccttgaaatgctgctctatttgttatctattattataaa

SEQ ID NO: 660079 - DNA, 521 bp, Homo sapiens
ttttataacttacatgctttatttgtatatatccaggatactagatatttgtaatccaaattggaggttattttttgtcatttgattttttttctgtaatgtgtgttctcaccacatagaagcttttacatttttatgtagtcagatttattcatgtttttatttatggttatgttaaagattatagctattagggacctatttcttcagggtttataatttatgtatgttgttacaaatagagaaattactttttctttgacccaataggtagagggcacttttgtggactcagaaagcttgcctctcctattttattttaggaaaatttctgagaatctgcctcctcatttccaagccagagtttaaaatatttacatttttacttcatagtgttaagacattgtgtaatgtaagtataatgtgtaaaaaaaaatcttaaaamtctaatagtgatttggcagagaccaaagcagggagggccttgaaatgctgctctatttgttatctattattataaa

SEQ ID NO: 660080 - DNA, 588 bp, Homo sapiens
gtttctttttttttttttttttctttttctttttttggagacagagtctctgtcgcccaggctggagtgcagtggcacaatctcggctcatgaggcagacagttttacagagatcagagaaggagataaagagagccctgtaaaaactaccttatctcagggcgattgtggatgtggccttcactctgggcctcaatcattttggttttcctctatgaataaaggaggtcaataattaaagtgagtactgcagggactaaggacaattctaaattactgcatttggggaattatgctcaaattagataacgtttggcaaagcacyttacaaactgtaaagtatgccgtgtatattgagtagcattattacttaacagggcaaccaatagaaggtagaaattgagaacataaattctagtgtggggcatgtggttcaacacccttcctaacattgaaggttacctaacttccctaagattcagtaatcttatctgtgaaatagatcatgtatcttccagggaaagtatttgtaaagtcctaagacattgcctggtataaagaatactgaggcctcaattggccttgccc

SEQ ID NO: 660081 - DNA, 602 bp, Homo sapiens
taaggaattgtaactaaggactaatctgcttaggctgagcaaacttaacatgccttgcttgcttttagtccctggcttctagttaatcttaaaacccacatcagctaagtcacatagctaacccttatgttttgtwgactttatagagtcaataaaaagccccttgaaaagactggcctcgtaactaccatggttctctgacaaggtttctgtccttggtgtaagcaaaaaaatgtcactttctgacaggcccaggaacctaaagatgttttagggccacgagaagaaagaaacaccaatttatataggaattacaggcacagtctattagcaaatctttggcttggttagccctaagccttttacatgtctagttagaggttccttctgaaaaggttccaacaaagctaattttaagagagtctgtatggccaatcattatccttattgcacttcatgcaaataatcagttcaagtctaataagactaaaacttattttacaagtaaattggtcctactatgatatgtctttgacaggtatgggagtctggagagagaaaaattatgttttagaagaaaactatagtacacctgttattag

SEQ ID NO: 660082 - DNA, 567 bp, Homo sapiens
tctatagttgctgaatgaattaatcacttagtgttaagtgttgtgccatggtttagatttaatcacaaactataaggaggttattaatcatatcttggtatttagtaccaaactgtaatgttcattaactatccataagtgtaaaaaaatgtgaatagacaagatattactttgttgatattgtgatagattcttccaattacatgtcctgaaacatgttatatttgcagtaaaaaatgctaaaaggctggctgtaataaaacacacagcttaaaatgtatgagttcaataaagagctatgctaattaaaagcactacatttttagaatagtttattcatcactgaaatgaataactatcagtatttttttttttgagacagagtctygctctgtccccctggctggagtgtagtggggtgatctcggctcgctgcaacctttgcctcgcaggttcaagtgattctcgtgccttagcctccctggagtagctgggattacagaagcctgccaccatgtctggctaatttttgtatttttagtagagacagactttgccatgttggcc

SEQ ID NO: 660083 - DNA, 567 bp, Homo sapiens
tctatagttgctgaatgaattaatcacttagtgttaagtgttgtgccatggtttagatttaatcacaaactataaggaggttattaatcatatcttggtatttagtaccaaactgtaatgttcattaactatccataagtgtaaaaaaatgtgaatagacaagatattactttgttgatattgtgatagattcttccaattacatgtcctgaaacatgttatatttgcagtaaaaaatgctaaaaggctggctgtaataaaacacacagcttaaaatgtatgagttcaataaagagctatgctaattaaaagcactacatttttagaatagtttattcatcactgaaatgaataactatcagtatttttttttttgagacagagtcttgctctgtccccctggctggagtgtagtggggtgatctcggctcgctgcaacctttgcctcgcaggttcaagtgattctcgtgccttagcctccctggagtagctgggattacagaagcctgccaccatgtctggctaatttttgtatktttagtagagacagactttgccatgttggcc

SEQ ID NO: 660084 - DNA, 561 bp, Homo sapiens
tttctgtggaaacataagatgctcactgcaaaatctcaaaggtctggaaagtctcaaaatagaattsttttcctcttttcttccccagtacctcaatcatcttgcttctctttctaccttcctcccctttgttttgttgcatctgattcaagtaggctaccctggatctggacaggaatagagatgggaaggagaaaggtaaagaatataccagggcaatctagggaagtctgtagggcaaaagtaaagcaatgatgtcaaaggtgccaaactgatgtagaggaactcatttggtatatccaaggccactactcaagtctggccccacaggcttacttaaatcatcagagtcaattcttagttcaatatcaattttgtttacacagttcatacttctccttttcagacatgggagactatgtacatggagttagatgtgaatggcatgcgaaattatttcacccctatgggcctaattctgttatctataaaatggatatactgtctcatgagagtaagcaaaacaatataatagttatgcctcttacagggcctgacata

SEQ ID NO: 660085 - DNA, 563 bp, Homo sapiens
tcttctttggttaaattaattgctaagtttgttttgttttttgtttgtttgttttgtttttttttttgagacaaagtcttgccctattgccaggctggagtgctgtggcgcaatcttggctcactgcaacctccgtctcctgggttcaagtgattctcctgcctcagcctccagagcagctgggactacaggtgtgcaccaccacgcccagctcacttttttgtatttttagtagagatggggtttcaccattttggccaggatggtcttgatctcctgacctcgtgatctgtcaaccttggcttcccaaagtgctgggattgcagacatgagccacygtacccagtcaattgataagtattttgaagctattatagatgatattgggtttcttgataccttttttggatcattcattgttagtgtatagaagtgctactaatttttgtgtgttgattttttatcctgcaactttattgaatttgtttattaattctaacacttattttagtggaatgtttagggttttctgtataaaacatcatctataaacagagtcaatg

SEQ ID NO: 660086 - DNA, 552 bp, Homo sapiens
cactgatgtccttcccatgtccatgtgggctgggtcaggggcatgattagctggcaaatcagtcatggagttcagttgggtagttggtagtgtgtatagctggtggcaggtgatggagactccagttagcttgtttttcaggagcagggatatagagagctcctacttctggtcatttgaggccattctttcaggaatctgtgctttyatacactgaagatttgaagattggagacttctgtggaaccctgcagaagtagaatctggaagtgggtgtccataggaagaaatatacttagatagtacttagggaaatagaggtacaactatcatgactctgtttctttcctcgcagtctctctccttgggtgtctgagtgcctatgaaaatttttaagggcttgctagtttatgtggacctgaataaggtaggacctatagagtgaaaataatgggattttataattgttaatattttaatatttctgggaaaagtattctcagtaagaacatacacctttgctatttgacttctgtacatttagctttcata

SEQ ID NO: 660087 - DNA, 602 bp, Homo sapiens
actggcccgtgataactggctcgtgatgaccacccgtgatgaccgcccgtgatgaccggcccgtgataactggctggtgataactggctcgtgatgaccacccgtgatgaccgcccgtgatgaccggccgtgataactggctggtgataactggctcgtgatgaccagcccgtgaaggacaaggaagaggtaaggatgcagacaggcacagggggccaccaggtgaacgcacagaggagacaccgactgccggccaaggagggaggcacaggatgaacctgccctgccggccccagggtggagacttccagcctccggggtgggcgacgggtgccccagcctccggggtgggcgacgggtgygtgtggtttgagccgctggcctgtgtcgtttgttgtggtggcctgaagagacctgcacggtagctgagtgtggtggacacgccaaagccgcaggcaggagacctgcagtgaggctggcaggaccatgtggcggcaatggccaccccaagcctcaggggcttcctgcagggatggctgctcagatgccggggcctgcagtgctgatgagggtgtgcctgggccacatcgccatggaggacg

SEQ ID NO: 660088 - DNA, 602 bp, Homo sapiens
actggcccgtgataactggctcgtgatgaccacccgtgatgaccgcccgtgatgaccggcccgtgataactggctggtgataactggctcgtgatgaccacccgtgatgaccgcccgtgatgaccggccgtgataactggctggtgataactggctcgtgatgaccagcccgtgaaggacaaggaagaggtaaggatgcagacaggcacagggggccaccaggtgaacgcacagaggagacaccgactgccggccaaggagggaggcacaggatgaacctgccctgccggccccagggtggagacttccagcctccggggtgggcgacgggtgccccagcctccggggtgggcgacgggtgcgtgtggtttgagccgctggcctgtgtcgtttgttgtggtggcctgaagagacctgcacggtagctgagtgtggtggacacgccaaagccgcaggcaggagacctgcagtgaggctggcaggaccatgtggcggcaatggccaccccaagcctcaggggcttcctgcagggatggctgctcagatgccggggmctgcagtgctgatgagggtgtgcctgggccacatcgccatggaggacg

SEQ ID NO: 660089 - DNA, 572 bp, Homo sapiens
gaaaaagtcaaagctgtgttgtaatgttctttctgatgttctacaattcatactaaaaaatattctaccaagatatttacctgaagatgtattttaggaatcatgatttaaggctagatcacaaaattcagtgaaatttaaaagagccataaaaataataaatctggaacaaagtaaatcctgcaacttgatggataggcctctatggtctgtaaagacacatacaaattatatgtggttttaccctttagttttacaatcactgactttcaaaatgatttttttctcattatatttataatttctgttaatagatagctaatacaaatgaaataatgtgacaaaatgataggtatggggggaattacaagtgatcattactgaagaagggcatagaaatttcttttctagaaaatttccaagaggatttacagacctctgtccccaaatactctgaactagtagaaatagcaaattagactctttcagcatagtgacyctacatagtttctgaagaaactaaatacgcttcacacaaatctatcttgcattaagacaataaaaatgttcct

SEQ ID NO: 660090 - DNA, 610 bp, Homo sapiens
aaagttgagtagttttagatgttaagatcacagtttccaaaaggtagcgcctcatgaaaagattggttaatattaagacatcaaaagcatcattctggtattgtgcagaaacattaaacaggtagaattatgactgttgtgagtaactgaattgtcctgagtgtcctaagctactagaggaaagatattttgtaaaaccaacatttaaccaggttgaaatccataaattggatatgaagggacagccacaatgaagatgtttcatatcttattctgggtgtgggctgggatttttgtataactacttattaccaaccattataaagacaaatcatatattaaaaattaaaatataaaatttaatttaaaaataaaataataataaaatggtaaagtattaaagttgcaaaagaaagtaaaaatatttgtaataaaagattcaggaaaccaagatcttaattcattaacattttaaaaagtgattaaaaagtaagaattgacattttaaataattaagaataaaaagggagaaagaaagctamtaccagagatactaaaagttaagaggcccaaacaatgaatttataaagttttaaattatgaaaaacta

SEQ ID NO: 660091 - DNA, 474 bp, Homo sapiens
tactttcaagtgttattatttaagaaatacatttcataaggctataggtataattcctctgatgtacctgagcaaagtaaattgaaaactttctggaaaggattaaccattctaggtgccattaagaagatttgtgattcatggcaaggagtcaaatatcaccattaataggattttggaagaagttagttccaacactcattgaaaacttcaggagtttcaagacttcaatggaggaagtaactgcagatgtggtgggaatagcaaaagaactagaattagaagtggagcctgaagttgtaactgaatttctgtaatcttatggttaaactcgaactgatgaggagttgcttcttatggatgagcaaataaaatacgtttttcctcttaaaaawttttttgggtacatagtagctatatatatttatggggtacatgagatatttgatacagacatacaatgtataataatta

SEQ ID NO: 660092 - DNA, 569 bp, Homo sapiens
ggtctttgtctttctgtttctggcttatttcacttaacataatgtcctccaggtttatccatgttgtcataaatgacaggatttcctgcttttttaaggttgaatagtattccactttgtgtgtgtgtgtgtgtgtgtgtgtgtgtgtgtgtatagtatatcacattttctttatctattcctttgctgataaacacttaggttgattccatatcttggctattatgaataagactgcaatgaacatggaagtacaggtatttccttgacataatcaatttcttattctttggctatatactcagtaatggtaaacctggatcgtatggtagttacgttatacttttagttttttgagacatctccatactgttttcataatggctgtactaatttatattcccaccaaaaagtgtgcaacagctctcttttctccccatcctcatcaatgttatcttttgtcattttgataatagccattctaacaggtgtgaggttttaacgggtgtgagctcactrtgcttttaattcacatttccttgttatattgagcattttttttacatact

SEQ ID NO: 660093 - DNA, 495 bp, Homo sapiens
tcttataatggagattgagaaggtgtattttttaagtgcctgtttaacttaattgaaacaacccctccccgcatttttaaagattcccgtcgcttatctgtgggtagctgaatataatagctataaaattaaagaaatatgacaggaattcccattcataattcatagcctgcctgtaccccacatgctagaataaataagacttgtatctcgtactgtcaacaagtttgggctttaaataytgagttaacaggaacaagtcaaaaagatgaaattttatgaagtgtcttttctttatattcaccaatgtaccccacatgctagaataaataagacttgtatctcgtactgtcaacaagtttgggttttaaatactgagttaacaggaacaagtcaaaaagatgaaattttatgaagtgtcttttctttatattcaccaagcattacaactctcagaagttttatttcagtttttacagtgtagttccccatttc

SEQ ID NO: 660094 - DNA, 567 bp, Homo sapiens
gagattgagatagaggaatatttcagagaacattgtaaaaaaaattttcagaaaaaactgcagtgacaaagcattagagaaactaaaatacatgactatgcatcaagaataattattactttgttcatgtaattttaataaataataaatttaaagaagctttttataattttgatttaatgagtatatacacatatattattttagctttttagaaagagttttacttttgcccgggccatggtagctcacacctgtaatcccagcactttggaaggctgaggtgggtggatcacctgaggtcaggggttcaagaccagcctgaccaacatggtgaaaccccgtctctactaaaaatacaaaaaattagctgggcatggtggtgcatgcctgtaatcccagctactctggaggctgaggcaggagaattgcttgaacccgggaggcggaggctgcagggagccaagatcacaccattgcactccagcctgggcgcagagtgagactctgtctwaaaaaaaaaaaaaaaaaaaaaaaccagaaagagctttacttttgagagcagtt

SEQ ID NO: 660095 - DNA, 568 bp, Homo sapiens
acccccctctgtcctccaggtgtcctgccagacacatgtgctttctcccacttgaccatcaccaataaatcttggagctggccaaaggcaggttctcctgacattgcaggtgagaaaagctgagatccccagaggaaaaataacatgcccagcgttgcacagataaattcttggtggagcgggaaaaggtccagggtcccccagacttgaagggctcactttgctttgccacaatttggccctgggtgctgttgcctgactcagatctgactgcatgtgccagggccagcctgccctggccggtccctactctgtaaccggacacagccatgaaggacaccaaggagggggcgagggagcagaaaagatatacaaagggatttgagcggatttggttacaaagttgcaccagccatttcctggaatctaatgggagccagttctgagaacttgaaggrgtggggaagcagaagggggagggaaaaaaaggcagatgactggcttgtggggtgtgcagtggggaggggaaatgggccctgctcttgtggccagcagccaggcaggccag

SEQ ID NO: 660096 - DNA, 601 bp, Homo sapiens
gtgcaagtgtctttttcatataacaacttcttttcctcatggtaaattcccagtaatgggattgctggatcaaatggtagttctacttttagttctttaaggaatctctacactgttttccatagtggttgtactagtttacatccccaccagcaatgtaaaagtgttcccttttcatgcatgcccaccaacatctttttttaatttttttttatcatggccattcttgcagaagtaaggtggtatcgcattgtggttttgatttgcatttctctgatcattagtgatgttgagcattctttcatatgtttgttggccatttggatatcttcttttaagaattgtctagtaatgtccttagcccatattttgatggcattgttttattctcactaatttgtgtaagttccttgcagattgtggatattagtctttgtcaaatgkagattgtgaagatgttctcctgctctatggtttttctgtttactctgctgattgtttcttttgctgtgcatgaactttttagttaaattaagtcccacctatttatcattgtttttgttgcatttgcttttgggttcttagtcatgaagtctttgcc

SEQ ID NO: 660097 - DNA, 595 bp, Homo sapiens
cctacaccttaaataccttttgatttcccactactttctacacccactgctactttctttcttcagacttttgtcaactcctgcccaaccatttacatgattcccaactggtttccctacttcgggtttctttccacttcaacccacccccatcgtacttattttctaaaatttacctctgatcacatcttccccctttaaaaaatattcagtgactccccattgcctataaaataaaatataagtgccttagtaggacatatgacaccaattagaagcaggcctctcrctacttatgacttcatattcccctcattcctatcccaacaccaaaaaaaaaaaaaaaaaaatgccattttaaattaaaccttaccaaattacctaaagtttttcaaatataacacactaattcattttttttgcggctgaacacaactcccacaatgccttctcctaacctcccttctactgttaccaatattttaatacccactgtaaatgctaccactcctctagagcattctctggtgttctgagtgcttgggccattttctcctctgtttttcaacatagatttgagtttgaatgtttgcca

SEQ ID NO: 660098 - DNA, 595 bp, Homo sapiens
cctacaccttaaataccttttgatttcccactactttctacacccactgctactttctttcttcagacttttgtcaactcctgcccaaccatttacatgattcccaactggtttccctacttcgggtttctttccacttcaacccacccccatcgtacttattttctaaaatttacctctgatcacatcttccccctttaaaaaatattcagtgactccccattgcctataaaataaaatataagtgccttagtaggacatatgacaccaattagaagcaggcctctcgctacttatgacttcatattcccctcattcctatcccaacaccaaaaaaaaaaaaaaaaaaatgccattttaaattaaaccttaccaaattacctaaagtttttcaaatataacacactaattcattttttttgcggctgaacacaactcccacaatgccttctcctaamctcccttctactgttaccaatattttaatacccactgtaaatgctaccactcctctagagcattctctggtgttctgagtgcttgggccattttctcctctgtttttcaacatagatttgagtttgaatgtttgcca

SEQ ID NO: 660099 - DNA, 552 bp, Homo sapiens
gaaatgttttcaatgagacagaatttacaatatagtatgtcaacctataaaccacgatagtatataaaaattattatctgagagtaaatagtaaattttgtccaaaaatatcaattgaacactttatatagtgaggtatttgtctcctttttgctattttaatattacataatgacttctaactatactgcagtctggccacaataatatgctcatctggacagattttttttaattaatcacatgctactttacatctccccttgtcttcattgtctaccaaactagattaaatctccttcaggtcagacacttagagcccttgtttttccatttgcacctaggtcagtgtaaggaacatcagttgttctcttataattactgaattaaatttaaaaactgacttaagtaagcaaaatgtacacagcagaaaccatcttaaagtcctttgtagaatccaattttaagatcaagcatagataaaatatcccttgccatttgttttgctgcattccccyttaaaaatatatacctatcaataaatggtgcagt

SEQ ID NO: 660100 - DNA, 463 bp, Homo sapiens
agctagaaaaaaatcttattaggaatgctcttcagcttcaactgcaaccaaagagctcaacagtgcttgtcaagaacaaagtgaggtctccagtctttattagctttacaggtcaaacattgaacttgctgtgactaagaaattaaggaattcattcagttgttttaagatgtatgaatttcattttccatctttagcttctatagtatctcagcacatttggaagacaatgtgcagttatttacccttttctgttatcactttsgctgtatcatttctggaaatgttctcaaaggagtgacaaagacatacatttagatttgcttgacatatgtgctttgccagtcaacaccaatatgagtgttttttagtatttctggtactctacaaatgacaagtagtgtacccaatacaaattagccttattaagacaaaaccacataaaaggcaatgcttacctgcc

SEQ ID NO: 660101 - DNA, 626 bp, Homo sapiens
ggcttctgaactctatcttagagctgtgaaccaggaagacacctctttgtatattacattacatttcacaaaggtttaacattttactatcaagctaaatatatattcaaataccayggctgtgataagttagtatacagttattaaaatctacaaaagatactgtattatgaaaatacatatcacctattttaaaagtgaagttaaaagaagaaactaatatttacaatagtttagggtctctggaactcaacaagcatgaggtcaaataatatttatgtcagatttaaggtgattttccttctcatacttccacaaagggttagttaactatatcttatagtctgagtaaaatgttgacataaaatcttgtccctttctcgtatgttatagatataaatggattggaagattataagtcataagatgggattgctgttgaaataaaaatattgcatgattcgcctgacttctagatgaaaccaagaaaaactgcacattatcccttgcatattacagttaaacaaaatttggatatagaactagtacctgaaaaaaataagtacaaattggagtagatacagttaaactattaaatttatattacatatataatacttgcaact

SEQ ID NO: 660102 - DNA, 626 bp, Homo sapiens
ggcttctgaactctatcttagagctgtgaaccaggaagacacctctttgtatattacattacatttcacaaaggtttaacattttactatcaagctaaatatatattcaaataccatggctgtgataagttagtatacagttattaaaatctacaaaagatactgtattatgaaaatayatatcacctattttaaaagtgaagttaaaagaagaaactaatatttacaatagtttagggtctctggaactcaacaagcatgaggtcaaataatatttatgtcagatttaaggtgattttccttctcatacttccacaaagggttagttaactatatcttatagtctgagtaaaatgttgacataaaatcttgtccctttctcgtatgttatagatataaatggattggaagattataagtcataagatgggattgctgttgaaataaaaatattgcatgattcgcctgacttctagatgaaaccaagaaaaactgcacattatcccttgcatattacagttaaacaaaatttggatatagaactagtacctgaaaaaaataagtacaaattggagtagatacagttaaactattaaatttatattacatatataatacttgcaact

SEQ ID NO: 660103 - DNA, 595 bp, Homo sapiens
tcataaacagaaggatagatataggcagagagatgatagatagatgatagatagatgatagatagataggtagatagatagatagatagaacagaaccactcaaccagtgttcatggatccagggtgacatttattttccagttttttggtagcaggagggaccagtataacataaagataaatatcttttttcttctagccaagaactgtggggaatttactataaaatgaaggaacatagcaaaatgttcacctaaaaatcttcatgccacctatattcatcttcttgcctacacaagtgatataaatatgcagaaagcattttgaagtattttaggctttcatgaaaaatatagacagctgacccacaaaatttgtgaaaaatatacattcaagggaatctttctttctgggaatttggtgctccctatatttgatttgaccaaaaatactttaaaaaatgttctaggtagtaatttacttgaaagtcttgttactttccttttctcccctcttgccaattcagcaaaacagctctaagttcaagycttaaattgaggctcaatgaaaaggtacctgcttttaataattcaa

SEQ ID NO: 660104 - DNA, 595 bp, Homo sapiens
tcataaacagaaggatagatataggcagagagatgatagatagatgatagatagatgatagatagataggtagatagatagatagatagaacagaaccactcaaccagtgttcatggatccagggtgacatttattttccagttttttggtagcaggagggaccagtataacataaagataaatatcttttttcttctagccaagaactgtggggaatttactataaaatgaaggaacatagcaaaatgttcacctaaaaatcttcatgccacctatattcatcttcttgcctacacaagtgatataaatatgcagaaagcattttgaagtattttaggctttcatgaaaaatatagacagctgacccacaaaatttgtgaaaaatatacattcaagggaatctttctttctgggaatttggtgctccctatatttgatttgaccaaaaatactttaaaaaatgttctaggtagtaatttacttgaaagtcttgttactttccttttctcccctcttgccaattcagcaaaacagctctaagttcaagccttaaattgaggctcaatgaaaagstacctgcttttaataattcaa

SEQ ID NO: 660105 - DNA, 549 bp, Homo sapiens
cacttcaaaggcacagagtggcaagttggataaaaaaataagacccatccatttactgtcttcaagagacccttctcacatgtaatgacacccacaggctgaaagtaaagggaaggataaatattcattatgcaaatagaaatcaaaaaagagcagaggtcactatcttttatatcatataaaatagactttaaaacaacagtaaaaaaggatgaaaaagggcattatataatgataaagagtttgattcaacaagaagacttaactattctaaataaataagtacctactgtgggagcacccagattcataaaagaactacttctagrcttacaaaaagacttaggcagtcacacgatagtcagggactttaacaccccactgatagcattagattgatcattgaagcagactctaacaagggaattcaggacttaaacttgacacttcaccaattggacctaatggacatctacagaatagtccacccaccaaccacagaatatacattcttctcatctgtacatggaacatagtccaagattgatc

SEQ ID NO: 660106 - DNA, 549 bp, Homo sapiens
cacttcaaaggcacagagtggcaagttggataaaaaaataagacccatccatttactgtcttcaagagacccttctcacatgtaatgacacccacaggctgaaagtaaagggaaggataaatattcattatgcaaatagaaatcaaaaaagagcagaggtcactatcttttatatcatataaaatagactttaaaacaacagtaaaaaaggatgaaaaagggcattatataatgataaagagtttgattcaacaagaagacttaactattctaaataaataagtacctactgtgggagcacccagattcataaaagaactacttctaggcttacaaaaagacttaggcagtcacacgatagtcagggactttaacaccccactgatagcattagattgatcattgaagcagactctaacaagggaattcaggacttaaacttgacacttcaccaattggacctaatggacatctacagaatagtccasccaccaaccacagaatatacattcttctcatctgtacatggaacatagtccaagattgatc

SEQ ID NO: 660107 - DNA, 317 bp, Homo sapiens
aaatatgtaaattttcttaataataaaataagtattgtaattctataatacaatatcaggaggaaaagttcttaaatgcattctacrtatcatagatatagttcaacacacaatgatactaacataaacaagctgggttatcaccctataccattattaagcattatagaggattgttggcacttctaagagtttaagtgtgagtggaagctacatggccacctgtcaagtttctcgaatttctaaagaaatgaataaagaagtctgttggtaaggagtacagtgccacagcaaacaatatgataatacctgggatt

SEQ ID NO: 660108 - DNA, 552 bp, Homo sapiens
tatcagtgtccttaaaaaatcaaccaagaattttaaatcccaccaaactaagcttcataattgaaggagaaataaaatccttctcagacaagcaaatattgagggatttgttttcaactagactagttttacaagggatccataaaggagtgctaaacttagaatcaaaagaacaaaacctgctaccacaaaaacacatttaagtgcatagcccctcaggtactataaagcaactgtaaaatcaaatctacatagcaaccagctagcaacataatgacaggatcaaaaatcacacatatcaatattaaccttgaatgtaaatggggtaaatgttccactgaaaggacacagagtggcaaactgtgtaaaakacaagattcaaccttctgctttcttccagggacccatttcacatgtaacaacacccacaggttcaaagtaaaagaataaggaaagatctaccatgcaaatggaaaacaaaaaagagaaagcgtccctatttctatatcagatgaaacagacttttcaccaataaaaattaagaaggacaat

SEQ ID NO: 660109 - DNA, 579 bp, Homo sapiens
gatggagaggtcactcctgcctgggctggtcaagaaagtttaatttggtttgaatccaaggtattcttacattcaggccaagcctgttctaacttacatttttaattaccccttgtggtaggctgcataaggaacccccaaaatgtctgcatcttatatcccaggacatgtggctatgttacctttgggacattgtgggtgtgagaacattaggtcggttaagaatcttgagatggagagakaattctgaattagctaggtgcatccaatgtaagagtccttataagaaggaggcaaaagggttagtgttagaaaaagagatgtgaacatagaactagagattgaaataatgctctttgaagatggaggaagaggccataagccaaaaaatgcatgcagcctttaaaagctggataaggcaaggaaatggattctcctctgaagtctgcagaaggaacatagcccctgccaacaccttgatttttagattctaaccttcaaatctgtgaaataataaatttgtgttattttaagtcactaatttgtggaaattcattacagaagcaataggaaattaat

SEQ ID NO: 660110 - DNA, 584 bp, Homo sapiens
gctatataaatgtctttagaatgcatacaaattttataagtagcttcttgaagtatttcttattgctgaactataccaaagattttgaaaacttttagataatcacgtcatattttaggaaattggaaagcattttaaaacaagttattcaactagtatgatttcatctgaaaatattccctgtattttttttggagggagggattggtaatttattcaaaataatttcaaatgctgttaatccattcatttgtttttgacacatccagactcagcatgaatttttttataatacagctgaagatactagaatttcacatacatataatatttcaagtataaattaattgagctgtagagataagaaaataaatgtttatctaattttgttactcaggataataaagtgctttactaaacaggctattttcctttgtagatttacttaayaggaattcaaattctttcaacagaaaatgtttccaaaacagacaaacattagaatatcttgtctttcataaaataattatcccaaataatgagcttagtaaaattaacattcctctgcttagaggaaaaccaga

SEQ ID NO: 660111 - DNA, 570 bp, Homo sapiens
tatgttcatgtttccaaaaattagaaatacagaaacataagcatacaattgtacttctaagtttcttacaaggtataggttggaataatttgtgtcacattaactcattttgcttttgctttttctgacttttaattcataaaatcttcaaaaataaggagtcagtatatttttgttacccacagagcatgagttggacagaatcaatgcaataatacttcctctgttctattggcagtccattattttgtattaatttttcaatttatgtatgcattttcatttagaatcattttttcttcaaaaaatatcagccagtatatgaatgttgatatggtttggctctgtgtccccacccaaatctcattttgaattgtacycttataattcccatatgttatgttgtgggagggacccagtgggagatgatttgaatcatgggggtggtttctcccatactgttttcatggtagtgaataagtctctcatgagatctgatggatttatcaggggtttccactttcgcatcttccacattttctcttgctgctgccatgtaagaggtacctt

SEQ ID NO: 660112 - DNA, 622 bp, Homo sapiens
ttcaaagaacaactgattatgtggacctggagctcaggagtaggatctgaatggggacacacattttggaagccatcagcacatgcctggtatctgaaactaagggaatgaatgagatcacctgaaaagattgggtatagtcagaaggggtctaggtataaagatatactaayatttaaagaacagataaaagagaagtaaaacaaaagcatcagaaagaagtcaacggagatgtcagaggaaaatatgtcaaggagaatatgacgccaagaaagagagtatctcaaaaagaaggagcattctacctgtgaaatgtaattacaaaatcaaggagatcagagctaagacatggccttagtgagtactatttcccgagaggctgaagagaaactcaactgaattgtgagatgaggaaataaaagcatgaacaactagtataaatttgcttgggaaatggaagtgacaaataaggcagtagttagggatgggtttcactggacaataggaagccattataaatttttgagcaagataattatacaatgaaagcaagactttgaaaatgtaattttcaccagattgtgagaacatatggggtagcaaatatatattcacaccccca

SEQ ID NO: 660113 - DNA, 587 bp, Homo sapiens
aaaattgttttcaaaaatttgtggttgtgatcacttattaaaaaacaatatcaaagaccaaaatgtgtaattagcttctgaaatgcagtcaatagttttaaggtgagcagttaagtgccttatttccctgtaaaataactaaaaccttcttactaaatatcttatatgaaacggtaagcttgtaataacaaatcacagccaaagcattatataatatatatatatttatcattttttttctgtagcaacactsaaattgagtgaccaaattgcttttatatatgtatatacatcaagaatacactgtactgtcacagtaaatttgggactctatttgagagtcttacttttaatttttctttgggactcttattctattatgattaaattatgagataactcaagttgtgtatagtagataatgtcaaaactaaaatgatcaaaattttatagaaaacttgtaagattttctttttgtactaaatgtgcaaaaaataagtcatactttgtaacatcaataattctatgctttttgccagtagcatttgtaaatctcagtattgcctcattagaagttagacagttac

SEQ ID NO: 660114 - DNA, 541 bp, Homo sapiens
ttaaggtgagcagttaagtgccttatttccctgtaaaataactaaaaccttcttactaaatatcttatatgaaacggtaagcttgtaataacaaatcacagccaaagcattatataatatatatatatttatcattttttttctgtagcaacactgaaattgagtgaccaaattgcttttatatatgtatatacatcaagaatacactgtactgtcacagtaaatttgggactctatttgagagtcttacttttaatttttctttgggactcttattctattatgattaaattatgagataactcaagttgtgtatagtagataatgtcaaaactaaaatgatcaaaattttatagaaaacttgtaagattttctttttgtactaaatgtgcaaaaaataagtcatactttktaacatcaataattctatgctttttgccagtagcatttgtaaatctcagtattgcctcattagaagttagacagttacaaagagtacttaaagcatttatcaaacctcacatactaaataatatttgtg

SEQ ID NO: 660115 - DNA, 548 bp, Homo sapiens
atggcaaacacgcccctattgctctcagctttgggacataaaccagaattcccaagtgaaaggaacagtctccttcaacatcccatgccctgtttttaagtaaagaaacctgcagttctccacatggacacagggaggggaaaaacacacactggggcctgctgggaagtgggggtgggggcaggtggggggagggagagcattaggacaaatagctaatgcatgctgggctgaatacctaggtgatgggttcacaggtgcagaaaaccagcatggcactcgtttacctgtacaacaaacctgtacctcctgcacmtgtaccccagaacttaataaaataaaataagaaacctgctgttctccatggctgtaaggaataagcaggataaaggggaataaaagagccagtacacacaggagacaaagcaggttcaccatccatcagcaaatgagcgcaacagatatttaccgaaatggatgagagaaatatctcaaaggagagcacatttctgaaaatacacaggcaagaaggcttgaaaactggtgtc

SEQ ID NO: 660116 - DNA, 561 bp, Homo sapiens
tgggcttttgcatgtcagggaaggattcctgaaattgttgcaaagaccaagaaaagtatgccaggcaactggagactggaggctctgcacactttctcctggttaatgacaccattaaaaaatgacagcattttaaacctcagagtcagtctcaatgcctcctgggtcttcagcctcctttactaaattctcaccaatttttttccctcttagttcaagccaccatcwcctgcccatctccagtgacaatatttgggaccaggctctcctcttccctcatgcaacccggtagagcagcagagctggccttccaggttgcacttctctccccttgcagagttgaattgttcaattcccctacaatacgctcaatcatgaccccctatagatatccacattctaacccccaaaaactgtgaatgttacccaatatggcaaatggggctttgcagatgtattagtccaatctctatacctataaagctctacctgagcctgggtaatttacgaagaaaaaggtttaaatgactcatagttctgcaggcttaacagaaagcatga

SEQ ID NO: 660117 - DNA, 579 bp, Homo sapiens
gagattcagaatttggaacgtacacaagatgggaagaacacagaagtaggctttcctaaaggtgcgtgtgtagcccaaggttggaaagatgaggagagtaacctaggaaaaagtactaagtaaatattgcaggaaggggaaacaaccatgcaaaggctctgtggaagcaaaaagcagaatctgttttgggaacttagacaagggcagctggcagatgtgcagaaagcagaatttacttcttcttttaatttttattttatttatttattttttttttaccattttaagtctgcagttgagtagtgttaagtacattcacagtgttgcacagccattcccaacattcatctccagaactcttttcatcttgcaaaactgaaactctgtaccaattaaacactaactcaccattcctcttttctcccagcccttggtaacgaccatgccactttttgtctttgtgaatttgacaactatgggcacctcatataastggaatcatgcaatatttgttcttttgtgacaagctcatttcacttagaataatgtcctcaaggttcatctatgttgtagcatgta

SEQ ID NO: 660118 - DNA, 582 bp, Homo sapiens
aagtctagaccacagaccacagcatgagtagcaaggttctaaagtttcagctacttgcccagacaccatctctgattaattgtagttctgctgcttgctagcacaaaagggtaagatttacagttcttctgagtaaggaacaatacagacagcaattttctacttaccaaaatgcttccatgcccgtcattaagtgagataacaagaaaaatcagtaagctaaaggaaacacctataacagactcaggctcaattagtattgtgaagaactggcttattgcaaggctcaatggcttctttctctttcccacttatctggttgattttggccaactctgtactccaacataaccatagtcttcctaaagataaygaccctaatgcaataggtagacactggtaagtaagtgcattctcctcacatttcaggtactgtgctagatcttatataactctcatttatttctgggcagcatttcttatctaaaaataaagttctattactggaggccaagaatttgaggctgcagtgcactatgcttacacccataaatagccactgcagtctagcccgggcaacat

SEQ ID NO: 660119 - DNA, 582 bp, Homo sapiens
aagtctagaccacagaccacagcatgagtagcaaggttctaaagtttcagctacttgcccagacaccatctctgattaattgtagttctgctgcttgctagcacaaaagggtaagatttacagttcttctgagtaaggaacaatacagacagcaattttctacttaccaaaatgcttccatgcccgtcattaagtgagataacaagaaaaatcagtaagctaaaggaaacacctataacagactcaggctcaattagtattgtgaagaactggcttattgcaaggctcaatggcttctttctctttcccacttatctggttgattttggccaactctgtactccaacataaccatagtcttcctaaagataacgaccctaatgcaataggtagacactggtaagtaagtgcattctcctcacatttcaggtactgtgctagaycttatataactctcatttatttctgggcagcatttcttatctaaaaataaagttctattactggaggccaagaatttgaggctgcagtgcactatgcttacacccataaatagccactgcagtctagcccgggcaacat

SEQ ID NO: 660120 - DNA, 536 bp, Homo sapiens
catgaggtggcactcaactctagaggtgggctcgaacactggaccaaattgaggactagctaaatcagggagggggtagaagcagctttccataagacatgcccaccagtgtgccatgtcagtttaccattgccatggcaatgcctgtgagtttccctttccatggcaacaacccaatgacccagaagttactaccctttccctagaaatttctgcataaactgcttcttaatctgcatgcaattaaaagtaggtawaaatatgaatgcagaactgccctgagctgctactttctgcctatggcatagtcctgctctgcaggggcagtcacagagctgcaacactgccggagctataacactgctgcttcagtaaactgttttcttctactctactaacagcttacccttaaattctttcttgggtgaagccaagaactcttgcaggctaagccccaatttggggctcacctgtcttccatcagtcccagctacttgggaggatgaggcagaaagatcacttgaagccaggagttc

SEQ ID NO: 660121 - DNA, 536 bp, Homo sapiens
catgaggtggcactcaactctagaggtgggctcgaacactggaccaaattgaggactagctaaatcagggagggggtagaagcagctttccataagacatgcccaccagtgtgccatgtcagtttaccattgccatggcaatgcctgtgagtttccctttccatggcaacaacccaatgacccagaagttactaccctttccctagaaatttctgcataaactgcttcttaatctgcatgcaattaaaagtaggtataaatatgaatgcagaactgccctgagctgctactttctgcctatggcatagtcctgctctgcaggggcagtcacagagctgcaacactgccggagctataacactgctgcttcagtaaactgttttcttctactctactaacagcttacccwtaaattctttcttgggtgaagccaagaactcttgcaggctaagccccaatttggggctcacctgtcttccatcagtcccagctacttgggaggatgaggcagaaagatcacttgaagccaggagttc

SEQ ID NO: 660122 - DNA, 570 bp, Homo sapiens
agcatatttcaattagacctttacgttcttggattgtaacctcagtgatttgataattcattcatgtttaaagagttaaatgatgatcatccaaattataaatgatgagcactctttggtatacaaattaccataccaagaatgtttgagtacaaaagaaaaaatgccctctttgttcttagaatgttttctttttttctaaaattatttagaatttttaaaggcacgaatagcatacaaagtgaagcatttcagaatgatacagagtttttaaaaagygattgggaaagtacattcctaaagatttgtgggtagagatgtagttttttgagttaactcttgaaaattatgagtctgggtaccgtggctcacacctgtaatcccagcactttgggcttacttgaggcctggagcccgagaccagctgggtaacatagtaagatctcatctctacaaaaaaatatttttttaattagccaggtgttgtggtgcatacctgtagtcctagctactcgggagtctgaggcaggaggatcccttaagcccaggagttcaaggttacagtggcac

SEQ ID NO: 660123 - DNA, 470 bp, Homo sapiens
ggtgttggaggcagagattggagagatgtgtttaccacccaaggagtgccaaggattgctggcaacaccagaaggtaggaagagctgaggggtgattcttccctagagctttcaggagtatggcctttctggcaccttgatttttaatttctaacctccaaaactgaaagataatacatttccattgttttaacccatccagttttcagcaatgtgtgatgacagtcctaggaaatgaatacagcatcatacttttttctaggtggctttgccaatagattgtcaattcatgttctgtcatattcagttttatgtcccctgttcttagcatagcacttggcctacccgggtgctcttaaatgactgtgggctgaaaatgaagcragaaaacacatggggaaaaccaagttggataaacatggaagggtgtcagtttaaccctgatacagctcgaagaatggcttacatgg

SEQ ID NO: 660124 - DNA, 566 bp, Homo sapiens
gctcatttacttctcagggctagctgggtacctggaatttcccttaaaggaactcaagattttcctttatttccatgcttggggggccctaaaatggggtccctgctctgtcccaggaaaatgaaaaaatgtgtggcttgcttttatcctaccaggtatagtcagtacaacaaaatggttaaataatattcacttagaaacatttttctggaatccagtgaagatcatcaggccgaaaaaatccccaaaccaaaagatatgcctgaatagaagcatgtggaaactgccccatttatagccctcgaattcattcttcaattttaagtgttttactttcacagccttcaaaagccackttcccatttagagaagaaactctcttaaagggagtattttttttgcccaagatctctctcctgataaagtgccccagggagatcttatgccacttttcatctttcacaagaggtcaagaaactcccaggaagagctggctctcaaccatgggcccacgctttcggtatgtgcagcccccacacgtgtgaacttgcctgctcccctgcacc

SEQ ID NO: 660125 - DNA, 566 bp, Homo sapiens
gctcatttacttctcagggctagctgggtacctggaatttcccttaaaggaactcaagattttcctttatttccatgcttggggggccctaaaatggggtccctgctctgtcccaggaaaatgaaaaaatgtgtggcttgcttttatcctaccaggtatagtcagtacaacaaaatggttaaataatattcacttagaaacatttttctggaatccagtgaagatcatcaggccgaaaaaatccccaaaccaaaagatatgcctgaatagaagcatgtggaaactgccccatttatagccctcgaattcattcttcaattttaagtgttttactttcacagccttcaaaagccacgttcccatttagagaagaaactctcttaaagggagtattttttttgcccaagatctctctcctgataaagtgccccasggagatcttatgccacttttcatctttcacaagaggtcaagaaactcccaggaagagctggctctcaaccatgggcccacgctttcggtatgtgcagcccccacacgtgtgaacttgcctgctcccctgcacc

SEQ ID NO: 660126 - DNA, 582 bp, Homo sapiens
tatgtgacatgggaaccttcagaatgaagacctaaagatacaggacaaattgtccacttttatgcttaggttcaactaaatgtgggcagccatgtagaaatatgactggataaaaaagggtataatgggacgctaaaagactttggagaaatcttgcaagtcctcttggtctagacccttcttggcctctctgtgcagctctcccttcctctgggtatggggcaggacctgctctggaatggggatcttatgacctacagtcaaacactgtaggccagataatttctttatggccaatttttacacagaaaggtggagggaaagttagagtaacattttcaggtttttaggctagctttggaaaaaaaaagggttctggttactatacctgccatcaggaaggaggattctagtttctatgtctgatcttggggggttagaatgggactgagagacagaagggcaggagaragtcagagaccaacttttgcctctgagggcttaatttgggggtattgttttctgagtcctaacaccaccaaaaacttactgatgatgcccaaaagctttgcttatataggt

SEQ ID NO: 660127 - DNA, 433 bp, Homo sapiens
tactccatcttgaatgagggctagaaaatataaggctgggatttgctgggctgggttcccaggagactaggcattcccagcctctagatgtttatggttaagggaactgagcaataatgtttactaaacagacccagtcccaggaaagtcctgataccccaatatcttgagaacaaaaacattcctaattttgctttaaagataatatcaatttttgcaaaacatagtaattataaagttaatcctttatcacaaayccttgtagtagagcacatctccctatgatatttttttgttatcctatatataaacaagcattgtacctagggtgggcacgttcctcctcttttgagaaagccctgctctatctatggagtagctaatctttcacccttctactttcttaataaacttgcttttgctttgcactgtg

SEQ ID NO: 660128 - DNA, 514 bp, Homo sapiens
tttaggctaaacttgatttaacaaggccgatttgaaacctctaaaactgtactcaaatctcttttcaggagagaacttgtcaggggtaacattagctgtcawtatgtatttgtaggattttcctcagggtccacaccaagatgagtcactctccaagctgctgccagccaatgactgagcacagtggaaaagttctagaactggactattagtaaccaatacaggactcctgtagtgggcagcctgggtaagacttcactggtgctgtacaacactcttcaactcttcttaaacaatctccctttcttccctcaaatgtcagccttgcattatggtatgaaggttttccctaactactataaagttttgctggcatttttggcaataaatcttttacatttctaattatatcttggcatctgctttctggagttcttgaactgaaacagtatctgtaatttggcctaaaaaggaacttaataatttgactttttcattagtgcacaggccttgc

SEQ ID NO: 660129 - DNA, 548 bp, Homo sapiens
ctgtcatatctaagaaattgccaaatcctgcctcatgaagctttccccttgttttcttctaggagtttcatagttttaggtcttacatttgtttccttatttctttttgagttaatttttgtgtatggtgtaaggtaacggtccagcttcattcttttgmatgtagatatccagttttcccaacgtcatttgttgaagagactgtccttttctcatctaatgttcttggcccctttgttgaagatcttttgaccatatatgtgaggatttatttctgggctctctattctattccgttagtctaaatgtatgtctttatgccagtactacactgttttgatcactatagctttgtaatatgttttgaaatcaagaaatgtgaggcctccaactccttgtttttctttttcaagattggtttggctatttgggatctattactgaagtttaaatatatacataacataatatttatcgttttaaccatttgtatgttgatgccaaattactggtattaaatacattcacagtgttgtgtagtcatcacc

SEQ ID NO: 660130 - DNA, 614 bp, Homo sapiens
ctaactagtgtacatttagatactgatatataatgccttagagctagttttccaactttccactttgatacatgtattctttccttgaatgtatccagttaggactaagccctggaaattgttttgctccaaaaggtgactttgcagatcagacttaattatctgcattgcttgaactcctggaaggtggtctttatttcttattcgtaagttttggagtggctattgactttagttgtcataaacttaccaatttagaaaacaagtatttccgaattttgatgtttataattgtgctcttttaggggttcttgattttcttagagctgaagaagttagtatgtgtttgacaaatgtctgaagattttmtatttctaactaccaatggttaagtttaaatatatttacataatatgtcattttaaggtaatttgacttttatgccatttgaaatttcaaatacaatcacaaataaagcaatgaagaaaattaagcttccaattttattctaaatactattctttcctgaaagtttcccaggagacttactttagttgttaaatttctgtaattttactagcttgacataaatgttaaaagtttgtttttacata

SEQ ID NO: 660131 - DNA, 582 bp, Homo sapiens
aaacagtaactctaagagggaagtaattttaaaatgataaagataatcctaaatattagagaaatagaattatatttattttaaaasagttggctgaatcaacttaatactcccttttgagtattttaacttgaattttgcaattaaattttatactgaatgaaaaaatgattcaaactaatagaatcacaagggcagtaactgctgtttttctatgtgataattaatatagccaatatcaggagcttggaggaggtacattaatttttaactagagatacttttaatgactctatgttgtcattttctaaagagaatatgtgaggtagttcagcctgttagcaacaaatatatttctcgaatatgtacatatttgaggtttgctttttgccatttaaatggatttgttaacaaagttataatgagagaatttcattcatcagttttgattgatttaattcaagtctttaaaaaaaattttttgggggttcaatacaaggactatattcatatgttagtttttgtgttagttttatttgtttattcttttagcgatgagggtcaactcctgtgtcttccact

SEQ ID NO: 660132 - DNA, 582 bp, Homo sapiens
aaacagtaactctaagagggaagtaattttaaaatgataaagataatcctaaatattagagaaatagaattatatttattttaaaagagttggctgaatcaacttaatactcccttttgagtattttaacttgaattttgcaattaaattttatactgaatgaaaaaatgattcaaactaatagaatcacaagggcagtaactgctgtttttctatgtgataattaatatagccaatatcaggagcttggaggaggtacattaatttttaactagrgatacttttaatgactctatgttgtcattttctaaagagaatatgtgaggtagttcagcctgttagcaacaaatatatttctcgaatatgtacatatttgaggtttgctttttgccatttaaatggatttgttaacaaagttataatgagagaatttcattcatcagttttgattgatttaattcaagtctttaaaaaaaattttttgggggttcaatacaaggactatattcatatgttagtttttgtgttagttttatttgtttattcttttagcgatgagggtcaactcctgtgtcttccact

SEQ ID NO: 660133 - DNA, 620 bp, Homo sapiens
  misc_feature 359, 405: n = A,T,C or G
cagccccagttgtgaatttctacaagtcactaaaccatgccctagttttcatgtctacaaaacagaagtaataacagaatgcctagcacaaagaactgtaaactttaaatgagtcaatacacataaaacatttagaatagtgcatggcaggtactaagcactcaatgttagtagtgattatagtgatgatgatgatgacgttgataatgatggtatctggttcatcttgctcaaaaagatgaactragctgtaaagaatatgtcttttatcatttacaaaagagacatagaaaagatccaccagtttctgatctgaactgtccagcttactgtttcttgagtagaatgagaaagcagcncaaggtgtcaagcagattaaataaatcccccaaataagacaagcanaactgaaagaaaccatggaactcctgaagcatgaataaagtatccttcattccagattttcagtttttggttagttctagtgcttctgacgtaaaacttaatttgtttcttgttattagatgattatgaaattgccacttgtgtccttactgtacacaatgcccttctctccacagccatttagctggctttctcattcttgcatctgcaaaatg

SEQ ID NO: 660134 - DNA, 467 bp, Homo sapiens
gacgcctataatcccagctacctgggaggctgaggcaggagaatcacttgaacccagaggtgcagattgcagtgagccaagatggcaccactgcactccagcctgggtgacagagtgagactctgtctcaaaaaaaaaaaaataaaaagaaagaaagaaagaaagaaaagaaaaaacagagtcccatgtacctgggccctgtgaggagccagaggtctgatgacatggagtagtcgggggatagtggcgaccctgtccctctacttgaaccatcaatatgatccagccaggaggcctgcacattaaatatggacagcatcctggagctcttttctttttctgctaataatcactattstctctaccaccaccacaaccaaactttgcctgtgcttttcaattaaaaaaaaaaaaaatcacagagggtggagcaggatggctgaatagaaaccaacaccatttggcca

SEQ ID NO: 660135 - DNA, 467 bp, Homo sapiens
gacgcctataatcccagctacctgggaggctgaggcaggagaatcacttgaacccagaggtgcagattgcagtgagccaagatggcaccactgcactccagcctgggtgacagagtgagactctgtctcaaaaaaaaaaaaataaaaagaaagaaagaaagaaagaaaagaaaaaacagagtcccatgtacctgggccctgtgaggagccagaggtctgatgacatggagtagtcgggggatagtggcgaccctgtccctctacttgaaccatcaatatgatccagccaggaggcctgcacattaaatatggacagcatcctggagctcttttctttttctgctaataatcactattgtctctaccaccaccacaaccaaactttgcctgtgcttttcaattaaaaaaaaaaaaaatcacagagrgtggagcaggatggctgaatagaaaccaacaccatttggcca

SEQ ID NO: 660136 - DNA, 459 bp, Homo sapiens
gaagcaagcctctttcagcttctggtgattaccacttttccttggtgtttttggcttgtggccacatccctgcagtctctgtctccatctttgtatctcttcttctgtgttgtattgaatctcttcccacaagtatcacaaagacacttgtgataacatttaggtcccacccagataatayaggataatcccttcatctcaatattcttaatttaattacatctgcaaagactctttttacaaataagataaaattataggctccagaaattaggacctgatatatttggattgccattattcagcctactgcagaagttatcagaatatgaatgattagtaaggaaggagaaaaattcccaagggtgagagatggtaggaagtcaccttgttataggggtagaaatctctgagctgagatcccacttggtcactgcttgtgtgtccctaaccaaatgg

SEQ ID NO: 660137 - DNA, 485 bp, Homo sapiens
gaggaagttaaataagggtgtgatttcaggtgagttgagacttgccctaatcctatgtagatttctgataccacaatggcagaatgctaggagaaaaagcacagaggtggtgaatagacacacagaaatagtaaaatgaatctaagaggatataagcagagtatcaacaatgtcaaaaaaaagtttatgcgtgtgtgtgtttgtgttgacatatactgcacatatacttttatattttggtgaaccatttgaaagaaagctktaggcatccttgacactttgccactaaatacttctgcttttactgcgtctcctaaataacctgcataaccatgataccatgatcacattcaagaaatttaacattattatctcatattaatctaatatataaagtccatattcaaattattccagtaatgcttttttgaacttttttttggatccaagatctaataaaagattgcacatttcattaagttgtc

SEQ ID NO: 660138 - DNA, 585 bp, Homo sapiens
tcagaatgtaaattctaagatacctcataacagttccataatgagagaggaaaggagagagggggagaggagatggaggggagggagagggatgaccagcaagagaatatgagaacgtagtgcccaaactacaaatcttcatgaactaatatggcttaagtttcttttcttcttaatgagaatcctttagttgtcatgaaaaatttcttagacataatttgcatttaacatttaatctttctccttctttttctatacactgtattaataactacctgatagccaatcttatcttcctattgtgtagttttgtagcaaatttatgttcagaatgaattccctgcttatgcaatgcggtcggttactcataataatgaatggtgatatcaaaagaaaatgttaaaactccatagcatgttctcaaacttgagcaagcttaatctgagagcctggtgagyagattctgcctggggcctcacctccagcatcttgaattcagaactgaggacaagccaggagtctcttagtttagtaagcagtatggatgattctaatgcaagtatctggagactagaccttaaatga

SEQ ID NO: 660139 - DNA, 400 bp, Homo sapiens
taataaaaagaggttatcttcaatttctgagtattgattggcctcctttcactaattaaacatgtttttccatgagatttcttttttctttgaaaattcaaggcctgaggtagtggctcatgcctataattccagccaagtcaggaggatcgtttaagcccagaggtttgagatcagccagggaaaaagggataatgtgtatatactaaatcaaaaataaaaatattagctgggcaagggggtgtgcacctgtggtcccagctacctgcaaggctgaggtgggaggatcgaytgagcccaggaagtcgaggctgcagtgggctgtgattgcaccattacacttcagcctgggcaacagagggagattctgtagccaaaaaaaaaaaaaagaagaaaaaag

SEQ ID NO: 660140 - DNA, 567 bp, Homo sapiens
acgaattaagtagcactgtccttccaaaataaaagaacatttgcaggcatttttttctatattatttgctactccaaaattagtgtctatgtaattttgctttaagttaaaaaatttagcccaaatggaatcaaatcataactctatatattcctattttgaagcatatattgcttatttagatcttaaaaatatagtgaattctcttaagcaactcatccatgtttatctyagtttgtctgctttattaaaaatttactcaccttttagtttttaaatcaatgatatttgaagatctgaaccattaaaatgtaggtaaaagtaaaaattataagtgtcataagttttgacattatagttactctacgtctgaccattttattttaaaacctgcagtcaaaatgtttactataccttatttacttccactagaagaatttgtgtttaaaaagaaacaaaatggaaaaaatgattcttcttgctagatttaatgattatgtttttccacttttctctgaggtctgaattcagtaaacaaagagatggaaaactaggtaaagaagacaa

SEQ ID NO: 660141 - DNA, 501 bp, Homo sapiens
gaaggaaaaaattgatatacagaatgaagcaactttatatccctggtcatattttttaatgagataacattatgccaagcttcacaagctatttttmaaagtaaatatttgcatttcctgtctatatagtaacaccttactgttttaggaaaagctgtatccttttggctttaaattctcttttctgagtacatactgaggatgtatgtactaagtgaatgattcagttcaaccaagcacactgatccactcaaagtatgattaggatgtatgtatcccttatacttgtgctataattcatattaattactcataactatctactctatttctcttttatagatatgaacaatttttactgcccaaattattaaaatattatccctcattttatcagaatggtatgtgcacacagacttttcagaattaaaacttgcaaaacatagagaaaattatttaatttgaaaattgcatgctatatttgtgtggaggctcacaaac

SEQ ID NO: 660142 - DNA, 561 bp, Homo sapiens
aaaacaaaaacaaaaactgatgtaccttttatgtctcataaaattcacaaggtgagccacagatgaaaatagatgatgcccactaacaaacagctaagatagtgaaccccataatctattgctgccctctgagaatgagtgtctccatgagaacaatagaaaatcacagactaatgggaaagacaatagaaagcacagtgtcagaaaagcctatgtaggtttattctacatatcartatagaaattcttaatttttattctttaattttgatagttagcttcctatgtcaatactgaatattgacttttacctgaattatatacacctggtattaagaatttctggtagtttattgggaatggcattgaatttataagtttctttaggcagtatggccattttaacaatatcgattcttcctatccatgagcatggaatgtttttccatttgtttgtgtcatctctgatttctttgagcagtggtttgtagttctccttgtacagatctttcaccttccctgttagctatattcctaggaattttattttttttgtgacaa

SEQ ID NO: 660143 - DNA, 467 bp, Homo sapiens
gtgcttagtggggatttgagtatagggtcccaatatataatttataggccctctgggggtaggaataaagagagttagggggaggttagataaggcattctggagatagtttcacaaagttgtgttttgaaagtagacagttttcyaggtgtataagaggaagaatggcattccaggcaaatcaaacagcacagggacagaggatattcttcctcttgtgacatagagtgttctggcaacaatagtagtgttgagggtataatcacaatgtaaggtcaatggggttggcaggagataagacaggtcggatggcaagggccagatcatgaaaggccccataggctaaactaggcagcttggatgtggctccataagcagtgctctgcctctgatatgtgtggcaccacagggacactctagctccataaatggagctggaggggagggaaaaggccacagtcaaatga

SEQ ID NO: 660144 - DNA, 467 bp, Homo sapiens
gtgcttagtggggatttgagtatagggtcccaatatataatttataggccctctgggggtaggaataaagagagttagggggaggttagataaggcattctggagatagtttcacaaagttgtgttttgaaagtagacagttttctaggtgtataagaggaagaatggcattccaggcaaatcaaacagcacagggacagaggatattcttcctcttgtgacatagagtgttctggcaacaatagtagtgttgagggtataatcacaatgtaaggtcaatggggttggcaggagataagacaggtcggatggcaagggccagatcatgaaaggccccataggctaaactaggcagcttggawgtggctccataagcagtgctctgcctctgatatgtgtggcaccacagggacactctagctccataaatggagctggaggggagggaaaaggccacagtcaaatga

SEQ ID NO: 660145 - DNA, 544 bp, Homo sapiens
ctctactatagctatattattcccccattgctatagtcctgaatagtcttccttgctatttttaacaagcatcyagtgtacacatttccttttgacaaaacatagtgtccatatgtagagggaagaggaaagctaacaaaatataaagtcatccaaaccacacacaccttggacaagcttatcatgtgtgggaataaaatgctggaggtgggtttggcttccccccaaaaaaaagtgtgtaatttgaaatttcatatcaagaacagttaaattcccagattctttatcattactgaataccttagtaattattcttcatttaacacaacaggaaataggagatttattttctggagagacttgtccaattaaagtggggatatggttgctccgttgagcagaaatttggcttatatagacccaaagctcagaaaaagagttatagatctaaaatgacaatcattgagacaataaagttcatggaaaccacgatgggaagcatctacgtggaaataaaaagttggattttcagtagagaaattgg

SEQ ID NO: 660146 - DNA, 544 bp, Homo sapiens
ctctactatagctatattattcccccattgctatagtcctgaatagtcttccttgctatttttaacaagcatccagtgtacacatttccttttgacaaaacatagtgtccatatgtagagggaagaggaaagctaacaaaatataaagtcatccaaaccacacacaccttggacaagcttatcatgtgtgggaataaaatgctggaggtgggtttggcttccccccmaaaaaaagtgtgtaatttgaaatttcatatcaagaacagttaaattcccagattctttatcattactgaataccttagtaattattcttcatttaacacaacaggaaataggagatttattttctggagagacttgtccaattaaagtggggatatggttgctccgttgagcagaaatttggcttatatagacccaaagctcagaaaaagagttatagatctaaaatgacaatcattgagacaataaagttcatggaaaccacgatgggaagcatctacgtggaaataaaaagttggattttcagtagagaaattgg

SEQ ID NO: 660147 - DNA, 632 bp, Homo sapiens
ttattttgtcaaaatgaaccatgctttaataaccatggataggattatattctttctgttaactaaatctagctttctctattgcaaacccagtatttttagggatcaaagtgataaaggttggcatttaaataatgaacaattgagttctttatcccagaagtacttgaccaagcctacctttgctctgtcagcctcaagtgaaaggcgataggcctcatcttgctctctcttcacattttctctggcttcacgttcatccttaaagaaaaagattcaaatattttttgacatatwacttttttttgaaaaaaaagagaaaaaaaactaatggtaatcccttttttattcctatatgaacttataattaaataagagacttttaaagtgtataggacataaataagcaaacaaacaataagatgagcagcatggtacatagtggaaataagaatgtttgaatcctaactctacaaactgtgtgaccttgtataagttatttaacttctccaggtctcagtttcctcacttgcaaaacagaaataatatttgtcttatagggtcactgtgagaattaagtgcaataatatacaaactatctagcaaaggacctggcacttagttcattttca

SEQ ID NO: 660148 - DNA, 511 bp, Homo sapiens
cactgcactggactctgagaaaatatctacttgtgattaaaacatggcaaacacattctagacatatgagtttacaaaaaacacccttcgatgtaatggacaaaactgaatgagttagctcagttgttcccaaggtatgggctgtggagttattgcaagggattgcaatcctcataaatcactttctaaactactaaacagtatcttgtccatatttaaatatatgtatatgcttttatgactagtaaaacataaagatatattaaatgattcttgaattcttagattttgacagtatacattgtattcaaacaacacactgagaaattgtttcatctcaagctctctcctttatgcrctatactcttgctaaatgcctttcagctcctagaaaatgctatagtacactacttctcacttccagacctctgtacacgctgttcagtcagcccaaaatgcttttccccaccttctcatggctaagccctaaaatttcattgtatgaacttaa

SEQ ID NO: 660149 - DNA, 511 bp, Homo sapiens
cactgcactggactctgagaaaatatctacttgtgattaaaacatggcaaacacattctagacatatgagtttacaaaaaacacccttcgatgtaatggacaaaactgaatgagttagctcagttgttcccaaggtatgggctgtggagttattgcaagggattgcaatcctcataaatcactttctaaactactaaacagtatcttgtccatatttaaatatatgtatatgcttttatgactagtaaaacataaagatatattaaatgattcttgaattcttagattttgacagtatacattgtattcaaacaacacactgagaaattgtttcatctcaagctctctcctttatgcgctatactcttgctaaaygcctttcagctcctagaaaatgctatagtacactacttctcacttccagacctctgtacacgctgttcagtcagcccaaaatgcttttccccaccttctcatggctaagccctaaaatttcattgtatgaacttaa

SEQ ID NO: 660150 - DNA, 580 bp, Homo sapiens
gcaactaaatggttattccatatagcattgacagtgtgatcaacataaataaaacaccagagctatccactgccaatgaagggattgtacagtcaggctgactattgttttgggactcacaatgctgctgaatgtaagtgaaattttattgctcctaagtgcttacataacaagggaaacttgagacgagctcaraatatgtatgtggtaactagacttcatggtagctgtgtgtatatgtctttaaattctgctgtgcttctactgtgaacttatggtacagatcaaagagtgtgagaagagtatttataaacagatggtccttttaaggagactttaaaaatctgattcctaatccaggtttgtcttgtgagggttttcagatagaaatttcaattttagccgattatttcaaatgctaattgaagacaaagtttactgaatttcttaggtgggtggataccattatctgacattttccagatggtttttgatctagtggtatttggggatatggaatttttaggaggttttctttcttttcccttgggcaatttttacacaaaagacttttttaaga

SEQ ID NO: 660151 - DNA, 557 bp, Homo sapiens
taaaataatagcatttcactcttcagcattagattagatgacaagtttacctgttctgaatgagtataatcctatgatgtacgtatttggcactttgtggtggggagtgagaaataaatgagattgctttrggggaaggaaaagaaaacctacattctcatgtcagcatgcttctttctatattcagccttgtatgaattacttaatctcctggagacttaatttcctctctacagagttcaacagagttgttgagaggtcacataagattaatgtgtgtgaaaataccttgataacaatacagtgttatattcctataaagaggcattattcaaattgataacatttatcactgcatgcctgtcttgtgctatgatagactaggttttatataaataaaatggtaaccaagacagagtcctgcctttcaggagctttcgctcttacggcctcaagagatatcatctaaccaatacactggctgctagcccctgcatcatttcttccattcagttaataatggattatctccttttctgagtttgcgctattttgat

SEQ ID NO: 660152 - DNA, 557 bp, Homo sapiens
taaaataatagcatttcactcttcagcattagattagatgacaagtttacctgttctgaatgagtataatcctatgatgtacgtatttggcactttgtggtggggagtgagaaataaatgagattgctttgggggaaggaaaagaaaacctacattctcatgtcagcatrcttctttctatattcagccttgtatgaattacttaatctcctggagacttaatttcctctctacagagttcaacagagttgttgagaggtcacataagattaatgtgtgtgaaaataccttgataacaatacagtgttatattcctataaagaggcattattcaaattgataacatttatcactgcatgcctgtcttgtgctatgatagactaggttttatataaataaaatggtaaccaagacagagtcctgcctttcaggagctttcgctcttacggcctcaagagatatcatctaaccaatacactggctgctagcccctgcatcatttcttccattcagttaataatggattatctccttttctgagtttgcgctattttgat

SEQ ID NO: 660153 - DNA, 608 bp, Homo sapiens
tttgttcagttctgtttttactattgtcaaatctgagactcttaattttaaaggttccaagagtgagcatgtttatttctctttgctaaattgtttacatttagacctttgtaaaggttaattcttaattgtttttctgttgcatagttgaaggcttcagaaaacaaatgccttggtgaaatctatatttataaaatacgtggttggatcccgattcttggccaaaatgagtatttctttcggtgatttgaggtatgaagtctgtatccaacaacattcttttcaatctatgatttgctattgtcggagttctgacacttgcttttttaatgttttttttttaaagttgattagtactttagcagtacattgtaaagtatgtggccacagaactgtattttaacatggaaaattacttgcatagttcggcaaaattaatctgaataccttttgtactggcagtgttgaatgatataatatttgaagagagaaaatatttgctactactttaaagaggtctactaataaaatgagaatcatctgtaggtatatatgtggggagttagtacrtgtttatatctctgaaatgcaccaacaaatataagtct

SEQ ID NO: 660154 - DNA, 521 bp, Homo sapiens
gtaaattatcgttatgcttgcttaaggcttattctatccttatagaatgattataccttgctgtgtacattggaatcagaatgatactcttgggctatgagttcattgtggaactatttctttcagaagataattttcaattaagtaaaggaacttcttactgtttctactgcagatacttctgaacaaatagcagtgttcagatgtcctggtaaaaatacatggtactggggttatttttcatttatcattataattgcatgtatgtatagtataatttctgtgttccattcaacatttgagatttgcccctgtttttttcaacactgtgaatccgtaaatttattgatgtargaaagctatatttaacaagatgttaggcatgccccagacctccaagctaggaaacacataggctttttctgttaagatcacataatatataatgtaatatatacatataattaatcaaattggacctgagagaagcaggcactagagtgtattttgtaagctgttaa

SEQ ID NO: 660155 - DNA, 572 bp, Homo sapiens
caacattcaacccagcataaaacaaaaagaccttgttttgctactttaggaaatgtaagagagattaaaattctttgggaaatggttttaaaaagtagttttgtactcagataggtaaagaacaagtccagtggtgctgacagcaatggaatttaaaacttgattctaataatctctgagtcccgaaggaatgccacgcagacatccrtttgagtcacgagcttgtaactgaggatttgacaaagattgagtcctcactgtgtgccaggcaccatgctaaattttgtgctaggcacttgggatactctttcagacaagactttgtccctgctcacagagaaatctgataggttggcctatagtcactcttttctaaacttgacctatctacctgaattaaccgaaggagctggttagaaatacagattcctgggccaagaagaagaacctaaagtccaacttcctgtaaccatcaacacatttaaccctgtaagtttagagtttattgtaaccttctcatgccctttgctatactcagtgtgcaaatcatgaagactaaggtggatcctgtt

SEQ ID NO: 660156 - DNA, 632 bp, Homo sapiens
tttacctagaacattatcgcatactctccatttggcaaactcttcctttaagaggcacgtggatgacactttccctcctggttactcctttctctgggcttctacagagttttgtttgaactttgattggttctctgtttatattgtattataaaatgtgtctgcttacatgtctatctcgctcattagactttaggaactttggcccattcatttcatctctgtggtgctaacagagttgcccagtgtaccgcattctgcaaaaatgtaattgagttagtaaatggaatagcactgaccagacctggaacacaagaagatcttcataatccagtgagaaggactgcttcctcagaagtatttttttattcccatagattgattacccagtggagggggaartacaaccaccacctttctgccttactctgagcaggtttgtcagacaaatattggctggtaaacccaaccttgatcagcagcaagctttccaaaccacacatgaggcaattcatatgccacactggataggtctgtttaaagaataataatttcgcttgatgatacacctttcttggcactgagtaaaactatcggttacgtagatgttcacacagatgtggttttccaca

SEQ ID NO: 660157 - DNA, 506 bp, Homo sapiens
cggaaaggcttgttccacattgatgaatggaaaataagcacagtatgtgcttgcaaatctttacactattgaattagatttttgaccatccctcgctttttgcactttctgtggttgcactcatctctacatgtatgaaagttgtgttttttgaattctagggttgtaattaagacccttcagttatttgtccatggtatttctctgtaaatattattaatactgtcgaaattatgtgatccattccttaattccttcacttccctttaagtagctagactgtggcttctgtcacttctgtgttcttttgtcaccatctgctcattatctgtcaagaggggactgtgaattatttctgccctgggccagtctaatggaatccttggtggggctgttyagggaagtaggtactacttaggtgtggtagcagttaggtgaatggctccacaggcagccagctccattaccacatgaaagcaccagcagcatttggcttcctggtgaat

SEQ ID NO: 660158 - DNA, 506 bp, Homo sapiens
cggaaaggcttgttccacattgatgaatggaaaataagcacagtatgtgcttgcaaatctttacactattgaattagatttttgaccatccctcgctttttgcactttctgtggttgcactcatctctacatgtatgaaagttgtgttttttgaattctagggttgtaattaagacccttcagttatttgtccatggtatttctctgtaaatattattaatactgtcgaaattatgtgatccattccttaattccttcacttccctttaagtagctagactgtggcttctgtcacttctgtgttcttttgtcaccatctgctcattatctgtcaagaggggactgtgaattatttctgccctgggccagtctaatggaatccttggtggggctgtttagggaagtaggtactacttaggtgtggtagcagttaggtgaatggctccacagscagccagctccattaccacatgaaagcaccagcagcatttggcttcctggtgaat

SEQ ID NO: 660159 - DNA, 562 bp, Homo sapiens
tttgccctccaatgtaaaatgatatgaattctgtggcttacacatagctattttttttttttttttttggcctgcatagataaggcaattccgtaaggctgtgttaccattctcctaaagggcctccctgtggggccacagtacatcttgcctaatttctttttaacaatatttatttctgtggtcaagaagaagataaggtaccttagaagtagtcactgttctatctcaatttggatatgcttgttgaaraactcttacaaccacttatttctgggaaaaaaaaaaaagaaatattttcagccatctcttcacctcaaaaacagcaggcatcgtggattattggaagggaattacccagagaaagtgctcttaaaaacaactgcatgtagaggaggctggcttatcaacaggcaaaaaaggagatttttttctactaaatttcagcttgtcactataaacgagaaaatagccacattcgtaatatattctatggggacagtgctgtgagtgtttctactggtggaattctcaagtacgagattctaagaatgagcattta

SEQ ID NO: 660160 - DNA, 402 bp, Homo sapiens
ttactattcacataattcatcatccttaagtgacagagatttgtaaataatgaaatctagtgagaaatctttaatttcatttagctrgtagcttagaagtgattctgattccacctgtttaccagaactcctaaagagaaaatgaagaaatttaaacttcaaatcccatttccttttctttttgaaattaaaagcaccttgttgatggaggagcagtgattggtatctgtgcaaggtggtatgtgggaccatttgatcataactgatatgatgtaaggaatggggttgcctggaaaaattaggaaatgggaggggtgggagagaaatttaagaaaggcacaggcatgccactggtggaaattaccttctagtatctccttttctgtttacagtagctcttac

SEQ ID NO: 660161 - DNA, 551 bp, Homo sapiens
caacatacaactcctacattgaattttaactatgggatttttgtgaattaaagactttcaggtaaaatagatacagtgaataaggtggggaatacytaagagagcagccccctttcacccattggcccttttcttttgatttggttaagattctgtgaatatctgcattagttattgttatgaaatgcgtacccagctcttctttgtagccttcagaaagagcaaataatttagtgttgtgcagcattaaggtttattggccacaaaacacagataaagactgtgatgataaaattttagaatgcagacagggagtttagtagtggccaacttttaaattcctgtgcccagtaatccacgtgctctctcagtgaggctatgctgctgggaccatctaaggtaagggtgtccaatcttttggcttcctggggccatattggaagaagaagaattgtctggggccacacatgaaacacaatgatagctgatgagctagaaaaaaaatcacaaaaattcttatgttttaagaacatttatgaattttgttggcc

SEQ ID NO: 660162 - DNA, 551 bp, Homo sapiens
caacatacaactcctacattgaattttaactatgggatttttgtgaattaaagactttcaggtaaaatagatacagtgaataaggtggggaatacctaagagagcagccccctttcacccattggcccttttcttttgatttggttaagattctgtgaatatctgcattagttattgttatgaaatgcrtacccagctcttctttgtagccttcagaaagagcaaataatttagtgttgtgcagcattaaggtttattggccacaaaacacagataaagactgtgatgataaaattttagaatgcagacagggagtttagtagtggccaacttttaaattcctgtgcccagtaatccacgtgctctctcagtgaggctatgctgctgggaccatctaaggtaagggtgtccaatcttttggcttcctggggccatattggaagaagaagaattgtctggggccacacatgaaacacaatgatagctgatgagctagaaaaaaaatcacaaaaattcttatgttttaagaacatttatgaattttgttggcc

SEQ ID NO: 660163 - DNA, 551 bp, Homo sapiens
caacatacaactcctacattgaattttaactatgggatttttgtgaattaaagactttcaggtaaaatagatacagtgaataaggtggggaatacctaagagagcagccccctttcacccattggcccttttcttttgatttggttaagattctgtgaatatctgcattagttattgttatgaaatgcgtacccagctcttctttgtagccttcagaaagagcaaataatttagtgttgtgcagcattaaggtttattggccacraaacacagataaagactgtgatgataaaattttagaatgcagacagggagtttagtagtggccaacttttaaattcctgtgcccagtaatccacgtgctctctcagtgaggctatgctgctgggaccatctaaggtaagggtgtccaatcttttggcttcctggggccatattggaagaagaagaattgtctggggccacacatgaaacacaatgatagctgatgagctagaaaaaaaatcacaaaaattcttatgttttaagaacatttatgaattttgttggcc

SEQ ID NO: 660164 - DNA, 600 bp, Homo sapiens
tagggtagatacttgtcaaatgtggttttgagggtttacactggaaagaaaaatctcatcaaaaatatgaagcaaggcctcccttctcttttcattctcatttggaagaaaggggagaacatcttattttagtcttttttaaagagcataacttattcaaaggctttgttacactctgcaggacactacccrtatttaagttaaaaaaaaggattcatgagtgagccagcaatcaacaagtatttactgaagcctcatataccagaaagttcaaagtgctagtttaaatggtcttcctaaggtatttaacaaagtcatgtcacaaaatacattgtagaagataaacatttatcagtgagtcatcacagaccacaagtgcccttacaacagagtggacgtatgtgcttcattttctgatatattagtaaatctgagaaatattgtccaggttgtataggatgtacagtattttcattgtctttaagtgccagcggactacagatggctctcagatccccttggatcacttctgtgtggtttgtgtacctattttgaatcctctagtcttttcctgaatcgaaacctcacattccaattaaa

SEQ ID NO: 660165 - DNA, 644 bp, Homo sapiens
gtttgagaattatggttctctgggcattgctgcctggcaattacagaagcctagggaagtaggggttatcacagttgttcccaggtaatatcacagtagttacccctgtcaccagggccttacaaccacttcctaatggtgagattggaatgagactggatgtgtctgactccatggtctatgttgtttaacaaatgccagatacattgagtcccacacaccttgtgttagtttgttctcacactgctgtaataagctacctgaaactgggtaatttatgaataaaagaggtttaattgrctcacagttcctcaggctgcacagaaagcatggctggggaggcctcaggaaacttacagttgtggaagaagggcgaaggggaagcaggcaccttcttcacatggtggagcaggaggaagaaagagaagagggaagtgccacatacttttaaaaaaccagatctcccaagaactcattcactatcatgagaacagcaagggggaagtccacctacatgattcaatcacctccttccaggccccttctccaatgtggggattacaattcaacatgagatttgggtgcggacacagcaaaaccatgacttggctcagatctcttacctccaaaccctagtactttat

SEQ ID NO: 660166 - DNA, 644 bp, Homo sapiens
gtttgagaattatggttctctgggcattgctgcctggcaattacagaagcctagggaagtaggggttatcacagttgttcccaggtaatatcacagtagttacccctgtcaccagggccttacaaccacttcctaatggtgagattggaatgagactggatgtgtctgactccatggtctatgttgtttaacaaatgccagatacattgagtcccacacaccttgtgttagtttgttctcacactgctgtaataagctacctgaaactgggtaatttatgaataaaagaggtttaattgactcacagttcctcaggctgcacagaaagcatggctggggaggcctcaggaaacttacagttgtggaagaagggcgaaggggaagcaggcaccttcttcacatggtggagcaggaggaagaaagagaagagggaagtgccacatacttttaaaaaaccagatctcccragaactcattcactatcatgagaacagcaagggggaagtccacctacatgattcaatcacctccttccaggccccttctccaatgtggggattacaattcaacatgagatttgggtgcggacacagcaaaaccatgacttggctcagatctcttacctccaaaccctagtactttat

SEQ ID NO: 660167 - DNA, 644 bp, Homo sapiens
gtttgagaattatggttctctgggcattgctgcctggcaattacagaagcctagggaagtaggggttatcacagttgttcccaggtaatatcacagtagttacccctgtcaccagggccttacaaccacttcctaatggtgagattggaatgagactggatgtgtctgactccatggtctatgttgtttaacaaatgccagatacattgagtcccacacaccttgtgttagtttgttctcacactgctgtaataagctacctgaaactgggtaatttatgaataaaagaggtttaattgactcacagttcctcaggctgcacagaaagcatggctggggaggcctcaggaaacttacagttgtggaagaagggcgaaggggaagcaggcaccttcttcacatggtggagcaggaggaagaaagagaagagggaagtgccacatacttttaaaaaaccagatctcccaagaactcattcactatcatgagaacagcaaggggsaagtccacctacatgattcaatcacctccttccaggccccttctccaatgtggggattacaattcaacatgagatttgggtgcggacacagcaaaaccatgacttggctcagatctcttacctccaaaccctagtactttat

SEQ ID NO: 660168 - DNA, 604 bp, Homo sapiens
aagtaatctgatgattcatacactggagatcaggagacaaaacagattctacctggttagagacccactatcacaatgatacttggcctaattcattttggttgagggcctgatgagccacacatgcgtgggtcagggaagatggttttcaccggatgcctgttgagtctgattgtagagactttcaagagaggattttattgaggaaaaaaagaagcaaacataacaaagtattattctgctttagactgaaatcagggactgttttctgagaataaaatgacttcataaaggaatcaagaaaattatcttgatgctcagcctgtaagataatcaaaggtaaattctcaagttgaatcctaaaggaacactcagtcctcttaacttccatggttgtgtgtgtgtgtgtgtgtgtgtgtgtgcaagatagaaatttctgcagctatttaggtgaaagcactttggaaaatgcaatatttmgtattcttcagtagttgatccaaatacatacggtggaatatacaaggtttatattcctggcctggttgcaggggaagaaagtgtcatctcgtggctgaaaaatagtctcagtgttggatactat

SEQ ID NO: 660169 - DNA, 604 bp, Homo sapiens
aagtaatctgatgattcatacactggagatcaggagacaaaacagattctacctggttagagacccactatcacaatgatacttggcctaattcattttggttgagggcctgatgagccacacatgcgtgggtcagggaagatggttttcaccggatgcctgttgagtctgattgtagagactttcaagagaggattttattgaggaaaaaaagaagcaaacataacaaagtattattctgctttagactgaaatcagggactgttttctgagaataaaatgacttcataaaggaatcaagaaaattatcttgatgctcagcctgtaagataatcaaaggtaaattctcaagttgaatcctaaaggaacactcagtcctcttaacttccatggttgtgtgtgtgtgtgtgtgtgtgtgtgtgcaagatagaaatttctgcagctatttaggtgaaagcactttggaaaatgcaatatttcktattcttcagtagttgatccaaatacatacggtggaatatacaaggtttatattcctggcctggttgcaggggaagaaagtgtcatctcgtggctgaaaaatagtctcagtgttggatactat

SEQ ID NO: 660170 - DNA, 588 bp, Homo sapiens
cagttggggattttagttaaaaaatgtgctcacattcaagaagcctggaccagctctggaccaaattgcacaagaggtggtgtttgggcttcaawtccagttcctgcttttttgttgttgttgttgttctttttctctttgttttcatgaacttcttcagggactcaatggcctgatcctgcactcttcgccccacaattaatgaggccacttcactatggagcccaaccttggctgctctctctccctatttctgggatctttacctttcttctctcacctacttaacttttggaaacccagttttactacgtgtaacctggagatgccattacggacttcagaagttaacatatgtggtatgtaaatcatctagcacagtgcctggtgtatatcagccgcctctctctgcctctcactcattccgtctgtctcctcttttccctcgtctcccttctcttaaggatttgcctgccaatctatcttttattttagaaatcccaacggtggtactgatggatcagtaaaccctttcatgatacatagtagcagtttcctagtgactgcaactcttcactgaaacaaaga

SEQ ID NO: 660171 - DNA, 646 bp, Homo sapiens
tatcttgctacacagtgatgagacaatagcagaataccaaccctgaaatcacgttattaaagcattttctttttctgtgcttttggagggattttgcattagccaaaaaaatgatgacaagtgttgtcatgaccaaactttcttttaaaagttttggccagattgaattgtaggatcacgttaacatgacagtgggtcttagtggtatttgtaagatgttggtatggccattttgtctaccacagtgttctttaaacagcctttctccaaatgggcatatcgtctttcagccttacagaaatcaaaaacagaaagtgacaagctttcacaccaaataagactgtgtatctccaccatyctgttctccagcttctgatattaacagccatcacccaagagggtagagctgttattttgacacataaattgtaccctgggctcctttgaaaatgttctctggttccttgtcaagtttgcattgaatattaaagatagaagaccttggtttttataggcatcacattccaactccaaattagattctatgtgaggatattgtaaataactcagtaaacacatatgaaaattgaacatgtaacaattcaacttccttttcattttaggaattagaattcatagtcttact

SEQ ID NO: 660172 - DNA, 646 bp, Homo sapiens
tatcttgctacacagtgatgagacaatagcagaataccaaccctgaaatcacgttattaaagcattttctttttctgtgcttttggagggattttgcattagccaaaaaaatgatgacaagtgttgtcatgaccaaactttcttttaaaagttttggccagattgaattgtaggatcacgttaacatgacagtgggtcttagtggtatttgtaagatgttggtatggccattttgtctaccacagtgttctttaaacagcctttctccaaatgggcatatcgtctttcagccttacagaaatcaaaaacagaaagtgacaagctttcacaccaaataagactgtgtatctccaccattctgttctcyagcttctgatattaacagccatcacccaagagggtagagctgttattttgacacataaattgtaccctgggctcctttgaaaatgttctctggttccttgtcaagtttgcattgaatattaaagatagaagaccttggtttttataggcatcacattccaactccaaattagattctatgtgaggatattgtaaataactcagtaaacacatatgaaaattgaacatgtaacaattcaacttccttttcattttaggaattagaattcatagtcttact

SEQ ID NO: 660173 - DNA, 646 bp, Homo sapiens
tatcttgctacacagtgatgagacaatagcagaataccaaccctgaaatcacgttattaaagcattttctttttctgtgcttttggagggattttgcattagccaaaaaaatgatgacaagtgttgtcatgaccaaactttcttttaaaagttttggccagattgaattgtaggatcacgttaacatgacagtgggtcttagtggtatttgtaagatgttggtatggccattttgtctaccacagtgttctttaaacagcctttctccaaatgggcatatcgtctttcagccttacagaaatcaaaaacagaaagtgacaagctttcacaccaaataagactgtgtatctccaccattctgttctccagcttctratattaacagccatcacccaagagggtagagctgttattttgacacataaattgtaccctgggctcctttgaaaatgttctctggttccttgtcaagtttgcattgaatattaaagatagaagaccttggtttttataggcatcacattccaactccaaattagattctatgtgaggatattgtaaataactcagtaaacacatatgaaaattgaacatgtaacaattcaacttccttttcattttaggaattagaattcatagtcttact

SEQ ID NO: 660174 - DNA, 606 bp, Homo sapiens
gatttgctgcatgtttgtccagcactcattaatgacagaggaagtgttgggacatacaagtctgtctgactgcatttcagagaaaagggaatgatggagtgggattgggtgaactgtgtttcattcatcctggaattaaacagatttcacaactgaataaagccattatacgggaattctaaacttagattttcaagtgattttggggtgcagtgcacaagtgacaccagatactgggagcagattcagaaaaccaagtcttctctatcatccttatcagccctttatgtccactgaattcatcgtagggcttggcttctgatggtgatgttctgatgctctgagaagttctttagaagtttgtgtgatcayagagctgcttctaagttggacctcataggattttcgagctgaaggaaaccttagatgttataaaattcctcttcttcctgttacggttttaatatgcaatcctagataaatgaagtgacaacacttcccgttagtgacagaactaagacaaagatgtaggtcttcggaattcaatttacctccttctcctattcagacagcctctctttaaaaagctgtgttgtgtgataggtt

SEQ ID NO: 660175 - DNA, 641 bp, Homo sapiens
gctacttcacatgctccagggttggtaatttgtgtttccaaagagttgaaagttgatctgcactgtctgtgggtcttggagagggggcagagtaaatccaggctctgctcaagaagggaggggatacaggtgacctttcagtagaagtgtgcaaggctgttcagatkaacagttttgctctatgaagagctctaataaagcgggtatgtctttcttaggaaaagattggcctcttttgacctgcaaaagtgaaggtaccaagataccagatttactccaagttaatgtttacctgaattattgattgccacatgagatacaaaacagctggcgactcggtgatgctttttctttgggttacaagagaagagctataaatccaaagctgaaaggctttctttcatcttttctacttgtgaaatatacctcttcaatagcaccaaccccaggtcattttaaatcaatttctaataaatctgtggtgctttttctttctctcattgaaagaaaggtagtattgtaggaattatttttgtttctggcttacctttatctaagctgattggctgtgacttcccttatttatttcacaaatgattgagtattaaatagtttactggatgttaagatgccttgaggta

SEQ ID NO: 660176 - DNA, 481 bp, Homo sapiens
gggctttcatgtgcaattttgtattttgtgcactgcacaagggcttcagacctgagtcagacaacctaccttcttcgctccctagctgcrtttatttaacttagttcagaggcttgctgggaagactaaatgagacaaggcatgccgggtgtttttcacagtttatagtaggtacttaataaaattagtggttaatattattaaacacatttgttttcacttcttcatccctattaaataaataattctttgaactttgtatcatttcctgaggttgggctgctggaagtggaataactagaccaaagttagtgaaccttttgagatcttgagttttatttgcttttaggaatagccataccaatgtacattcccgccaacagtgcatgagatgacccatcacactatgtccccaacaccttctttgggatttcaagcaccttcactaggtgccagcctcctgtgattttccaaatcccac

SEQ ID NO: 660177 - DNA, 481 bp, Homo sapiens
gggctttcatgtgcaattttgtattttgtgcactgcacaagggcttcagacctgagtcagacaacctaccttcttcgctccctagctgcgtttatttaacttagttcagaggcttgctgggaagactaaatgagacaaggcatgccgggtgtttttcacagtttatagtaggtacttaataaaattagtggttaatattattaaacacatttgttttcacttcttcatccctattaaataaataattctttgaactttgtatcatttcctgaggwtgggctgctggaagtggaataactagaccaaagttagtgaaccttttgagatcttgagttttatttgcttttaggaatagccataccaatgtacattcccgccaacagtgcatgagatgacccatcacactatgtccccaacaccttctttgggatttcaagcaccttcactaggtgccagcctcctgtgattttccaaatcccac

SEQ ID NO: 660178 - DNA, 634 bp, Homo sapiens
tccaagtagattctgaaattttgttgaaataaacatagatttaaatctatttcttgctgctttgttttctggtcaccatgaccataaagctatgtgagtctgttgaaacatattgcagattttgttttgttttgttttgttttcttttcttttcttttcttttctttycttttcttttcttttgttttctatctcccagaaataagtccatcttaagtgcccagggatggaatatggttaaagcagtagcttggtttagctactcagaagtgactgttcttacctgtcttaatcacttttccagtataaaatggccacggcaagtcctttatctaatttccaggcaattacttggtatttgcctttaatatcttcgggctccactatcctccctttatgaaaccttcatatatcaacccagctgccagtggtcctttcttcagatgtctaaaagcctctcatgacacttatttactacatgtccaatttatgtccccagttttttcttaaatacattgttattttcccgaagtcaatgtccttctctcccccaccccctctctctctttcccatatatatatgtatatatggtagaattggaaaatctattgggtgctaaagattactagcaca

SEQ ID NO: 660179 - DNA, 634 bp, Homo sapiens
tccaagtagattctgaaattttgttgaaataaacatagatttaaatctatttcttgctgctttgttttctggtcaccatgaccataaagctatgtgagtctgttgaaacatattgcagattttgttttgttttgttttgttttcttttcttttcttttcttttctttccttttcttttcttttgttttctatctcccagaaataagtccatcttaagtgcccagggatggaatatggttaaagcagtagcttggtttagctactcagaagtgactgttcttacctgtcttaatcacttttccagtataaaatggccacggcaartcctttatctaatttccaggcaattacttggtatttgcctttaatatcttcgggctccactatcctccctttatgaaaccttcatatatcaacccagctgccagtggtcctttcttcagatgtctaaaagcctctcatgacacttatttactacatgtccaatttatgtccccagttttttcttaaatacattgttattttcccgaagtcaatgtccttctctcccccaccccctctctctctttcccatatatatatgtatatatggtagaattggaaaatctattgggtgctaaagattactagcaca

SEQ ID NO: 660180 - DNA, 613 bp, Homo sapiens
catactatgtttgatatatagattctttactcaatagctgtaacaatgtaaactattatcaaaaattaatattatctgtactttgcccagtttgtaggtaaatgctaaagaatttgaatatttgctgactttttccttgttattcttgcaaatcccatcaactcccaccacttatttgtatttcactttggcttctttaagaagataagtagggggcaaygggggaatttgctgtgataccctcattcatcttgaaagccagataactaagttcttacaaagcaagagtaaatgacactgtctacattgactttaaccttatgaaaattacaaaaatttaaatatagttttggaatcacaattaaagtcacttttccatggtgacatttattcattttcattttacttcatgctgtaatcagaattcttgaaatttctaacgtcaggctaatataacattttctatacagagaaaagtctatctaagtattaaataacttttaattcctttttacctttaatgctcctagaacatatattctttagttcattcaacaagcacttgagcatcttctacatgtcaggtattagtgatacaatgccaaggagactc

SEQ ID NO: 660181 - DNA, 557 bp, Homo sapiens
ttcatgaccagtggttcttaacctttcatttcttagggattactctgagagcctcatgaaaaccattggttttctctgaagaaatgcacttttacacatgcacataaaatctggcatacagtttcagggtgttcgtgactcctagagaaattaagtttaagaaaaagcccacatactagttatttaaaaggtttccagctgaggttgagagccatgacccttccttgccaaatgctacatgtttccactcagtgactcagctcgaggagagccagcgtaaagtccagatgtgagcaagtgtaccagcaagggtggacgctactttcttagaaactatggaaatgttgctgaatgcatgactccagtcttttcttaagaatgatgtcctatgaactcttttctcttggaaaatcccaagaatctcaaccattgtggaagacagtgtggcaattcctcaaggatctasaactagaaataccatttgacccagcaatcccattattgggtgtataccaagggatcataaatcatgctactatgaagacacatgcacacgt

SEQ ID NO: 660182 - DNA, 607 bp, Homo sapiens
atgactttttaaagtgggtttttttgaagcattgattttgtgtttcgaattatctaaaatgtattctgtgcactgtggctatgaaattttgaagaggtacaatcttgatcacttactctggatttgtttcagccaaagcaatacgttttttcaactaattgtaaatatcacctttcggtggttttaatgaacctaataaaaagatatggtaatttgtctgctctatacaaacacttagctatgagaaaatcaaataagartgaagccatattaaccctcattactaagtcaaagtaggtgtatatttgtataacttaagacaataaaacaatgttatatgtgaatcttcataatttttgaagcaagcatctgataatctttacagttatatttcagatgcaatagatgggattattccttatactttgaataagatgaaacatctacagggacatttggacttgaacctggatagacccagctttattctaacaatatacttggtaataagcaggcacttttcctttcctttgtgtgtgtatgtatgcatgccgtgtttcattaaaatgaaccccatcattaaagaaaaaactcaaggatatgttgt

SEQ ID NO: 660183 - DNA, 607 bp, Homo sapiens
atgactttttaaagtgggtttttttgaagcattgattttgtgtttcgaattatctaaaatgtattctgtgcactgtggctatgaaattttgaagaggtacaatcttgatcacttactctggatttgtttcagccaaagcaatacgttttttcaactaattgtaaatatcacctttcggtggttttaatgaacctaataaaaagatatggtaatttgtctgctctatacaaacacttagctatgagaaaatcaaataagaatgaagccatattaaccctcattactaagtcaaagtaggtgtatatttgtrtaacttaagacaataaaacaatgttatatgtgaatcttcataatttttgaagcaagcatctgataatctttacagttatatttcagatgcaatagatgggattattccttatactttgaataagatgaaacatctacagggacatttggacttgaacctggatagacccagctttattctaacaatatacttggtaataagcaggcacttttcctttcctttgtgtgtgtatgtatgcatgccgtgtttcattaaaatgaaccccatcattaaagaaaaaactcaaggatatgttgt

SEQ ID NO: 660184 - DNA, 576 bp, Homo sapiens
tttgtctgaatactctgcaataatctgctgcagagctagcacccttgctgmcacatttaacgggatcaaatacagcacctgacacatagtagggtttcagaaatatttaataacataagtaataaaatgcagataccattcatatactaaagaaaaaaaagaaaaaatctataatatcaagatgaagtttaatctggaaaagtgcaaagaaaacaactgttaaggagaagtacacaaggcccaggagtggtagaatgaacatgaatttttgttgggacattaaggaaatctgagaaagtgatgctatagctatgagagataatgatgtaataactagacatttatagattatgatatacaaggaagaggaaacaattccatagctgtatttcacactgctttgtccatcattataagcatgtggatgtctccacatccacattttcttgttattaatgattctaacttacccattcaattatttagatatccattttgattaattcttcttcttctataattgcatagtttgaatctcactgttttgaaatatgttaaaagtagtagcatgaaagt

SEQ ID NO: 660185 - DNA, 546 bp, Homo sapiens
gtgtttttctgtccattcaaagctcacacctcattaaatgtgctcaccctcatctctcttccattcgggataccgtcgtaaatgggtgatggatggctcacaggtttagtagatccagtaacaattytaacctccttcattctatcaacagtttcctgaggcctgacaaacaagatcttcctgcctgtaaaaaggccatttaagagcatacaaactcaatcttaccacatcttgtgagcaaacttccatttgagaaaaataaactcagagtaccaactagtgtccgttttcaactgagagcaactatgtcagttgtcctgaagcttctcgtgtcagaatcacacatcggtgctttggatccctttatattgttgaaagggatgtggattattcttcctggatgttttcatcagctgcatctagaaaagcatgataaccgtctacccagatgtaatagaccctattcagttttcttctttcttccttttctattttggttactttttttcaggtaatcttcccagtaaaatgacatgtttgtctatt

SEQ ID NO: 660186 - DNA, 546 bp, Homo sapiens
gtgtttttctgtccattcaaagctcacacctcattaaatgtgctcaccctcatctctcttccattcgggataccgtcgtaaatgggtgatggatggctcacaggtttagtagatccagtaacaattttaacctccttcattctatcaacagtttcctgaggcctgacaaacaagatcttcctgcctgtaaaaaggccatttaagagcatacaaactcaatcttaccacatcttgtgagcaaacttccatttgagaaaaataaactcagartaccaactagtgtccgttttcaactgagagcaactatgtcagttgtcctgaagcttctcgtgtcagaatcacacatcggtgctttggatccctttatattgttgaaagggatgtggattattcttcctggatgttttcatcagctgcatctagaaaagcatgataaccgtctacccagatgtaatagaccctattcagttttcttctttcttccttttctattttggttactttttttcaggtaatcttcccagtaaaatgacatgtttgtctatt

SEQ ID NO: 660187 - DNA, 546 bp, Homo sapiens
gtgtttttctgtccattcaaagctcacacctcattaaatgtgctcaccctcatctctcttccattcgggataccgtcgtaaatgggtgatggatggctcacaggtttagtagatccagtaacaattttaacctccttcattctatcaacagtttcctgaggcctgacaaacaagatcttcctgcctgtaaaaaggccatttaagagcatacaaactcaatcttaccacatcttgtgagcaaacttccatttgagaaaaataaactcagagtaccaactagkgtccgttttcaactgagagcaactatgtcagttgtcctgaagcttctcgtgtcagaatcacacatcggtgctttggatccctttatattgttgaaagggatgtggattattcttcctggatgttttcatcagctgcatctagaaaagcatgataaccgtctacccagatgtaatagaccctattcagttttcttctttcttccttttctattttggttactttttttcaggtaatcttcccagtaaaatgacatgtttgtctatt

SEQ ID NO: 660188 - DNA, 350 bp, Homo sapiens
gcatgctatcacactgagctaatgcttttttttgttttttttgtagagacagggtttcsccatgttgcccaggctgatcttgaactcctgggctcaagtaatcagcctaccttcgccacctgaagtgctgggattacaaatgtgacccacctcacccaggctgcatctctttcattgactgccctttttactatggtgttttgacatagtgtagaaattccttgacaagtgaagttgcattatttgtctttgtattctctgaaggttttcattacttaaagaaaacttctggccaggcgctgtggcctacgcctgtaatcccagcactttgggaggccaaggcgggcaga

SEQ ID NO: 660189 - DNA, 350 bp, Homo sapiens
gcatgctatcacactgagctaatgcttttttttgttttttttgtagagacagggtttccccatgttgcccaggctgatcttgaactcctgggctcaagtaatcagcctaccttcgccaccygaagtgctgggattacaaatgtgacccacctcacccaggctgcatctctttcattgactgccctttttactatggtgttttgacatagtgtagaaattccttgacaagtgaagttgcattatttgtctttgtattctctgaaggttttcattacttaaagaaaacttctggccaggcgctgtggcctacgcctgtaatcccagcactttgggaggccaaggcgggcaga

SEQ ID NO: 660190 - DNA, 492 bp, Homo sapiens
taaaattttccagtaggcacgttttaaaaaagtgaaaccgatattaattttaatagcatatcttatttaacctaatttatcaaaacaatttcaacctaaaattactatgaaagttattaatgaagtatttgcattctcttttggagtcttttctaagtcttttaaatcctgggtgcattttacacgcatagcatatcgcagttctggctgaccacatttcaagtgcgcattagccacatgtggctagtggttactgtattggacagcgctggtttagagagttaacgtttcttgcaacttttcagtattagacaaaaagacactttgggaggccaaggcgggtggatcacctgaggtcaggagttcaagaccagtctggccaacatggtgaaaccccttctctactaaaaawacaaaaattagctgggcgtggtggcgctcgcctgtagtcccagctactcgggaggctgaggcaggagaattgcttgaacc

SEQ ID NO: 660191 - DNA, 641 bp, Homo sapiens
attaaacatgatatttgtttataatgtagtgtttcagaaatactagttcaaaagataggataaggatttatatcaaatgtttcaatctgacaagtaaattacatttcttccaccataaaaaggtaagcagaaaactgtagcagcaatgaaaagacatattcttactatctagtgatatgatatgcaccagtctgcaaaatatgaccttttccactttcaagattcagccaaagtttttacaaccactataataaggatcttagttttggcttttagtacttttaatatgatgttaaaactgccattccttttattagtcaactcagaggacaaaaaaagaacaggatgggtttctgtatgraaatctgaatatattaaaatctaagttattacacaaacatgaaaaatggtaagtctcagtaaattctatgctcaagaatgaaacatacaaaatggcccccatttgccaaagcagaatcaagaggataatgtacatttttaataggttttatttcaataagtggcctttgttgtgatttctcctttgcacatgcttttgcctttataccaattaccattgctgttacatcagtagaaggtattctctttagttaaacctatgaagtgaaaagaaactcaat

SEQ ID NO: 660192 - DNA, 578 bp, Homo sapiens
aataagtacttaatacatggatgtttaataaatgcaattttacattggaaaattaaaaatgaatataggcacataaaaacataatatttcttcctatgatctttaatggtaagattcaagaggatttcaagaaccatcatctgataaacatattctgttaacataaagtaagcatatcctagattatggatactgtcctagattactgatactagactatggacactgtcctagatttttggtagtttccatcataaaaatctttatttattwatttttttggactcttgtttcctcctaaaagcctgagaatgtttttcatgaagaagttgtattcctctaggacattttgaggaaaatccttttctcaaaagctaatctgaaaaagcctgatttgtcaaatttacttgtttaattcttcagttttagtagataatttttattttgtcattactgtagcattttaagaaatatccaattttttttctctctcagctccctactatacatctgtagagtaagggataaggagtagaggagacagagtagagaatgtggagatactaaggggcattgaa

SEQ ID NO: 660193 - DNA, 578 bp, Homo sapiens
aataagtacttaatacatggatgtttaataaatgcaattttacattggaaaattaaaaatgaatataggcacataaaaacataatatttcttcctatgatctttaatggtaagattcaagaggatttcaagaaccatcatctgataaacatattctgttaacataaagtaagcatatcctagattatggatactgtcctagattactgatactagactatggacactgtcctagatttttggtagtttccatcataaaaatctttatttattaatttttttggactcttgtttcctcctaaaagcctgagaatgtttttcatgaagaagttgtattcctctaggacattttgaggaaaatccttttctcaaaagctaatctgaaaaagcctgatttgtcaaatttacttgtttaattcttcagttttagtagayaatttttattttgtcattactgtagcattttaagaaatatccaattttttttctctctcagctccctactatacatctgtagagtaagggataaggagtagaggagacagagtagagaatgtggagatactaaggggcattgaa

SEQ ID NO: 660194 - DNA, 553 bp, Homo sapiens
ctttgaaacctttgtcttttaaatgcatcatccaggtaaactcacaaacactctctaatttttcctttttactgattatggctgtatttttccatttctttccctttctcataattttgttgaaagtgaacatttcaatcaaaaatgtatcataaacactccagattcaaatacttccctccttggggttgtagttattgctgtttatttgtttagcaactttcctggactaaatctgggaaatatgtctcacttgcagtgtgttactacttatgcttatatttaatttttttaattctgttttaatttttaagattcacttcttctgcactagccccatgtttccatagattaatggtcaggcagttatatgtcataagctgtgctcaaacacttttatccaagaaagccttcaaccttctttccaagtrtatgagtgctggttagagagcacattaaaagttcagaagttttcagggacactccaggttttactttccatcaggccctcttgctttttacctgtgcatgcagaccaccacttttcagatat

SEQ ID NO: 660195 - DNA, 553 bp, Homo sapiens
ctttgaaacctttgtcttttaaatgcatcatccaggtaaactcacaaacactctctaatttttcctttttactgattatggctgtatttttccatttctttccctttctcataattttgttgaaagtgaacatttcaatcaaaaatgtatcataaacactccagattcaaatacttccctccttggggttgtagttattgctgtttatttgtttagcaactttcctggactaaatctgggaaatatgtctcacttgcagtgtgttactacttatgcttatatttaatttttttaattctgttttaatttttaagattcacttcttctgcactagccccatgtttccatagattaatggtcaggcagttatatgtcataagctgtgctcaaacacttttatccaagaaagccttcaaccttctttccaagtatatgagtgctggttagagagcacattaaaagttcagaagttttcagggacactccaggttttactttccatcaggccctcttgcttttyacctgtgcatgcagaccaccacttttcagatat

SEQ ID NO: 660196 - DNA, 620 bp, Homo sapiens
ttgtagaaagatattaagtatgtttccatttatacatttttaaatgtatattgtttatgggtatgaacataagatgttaaggtttaataacagagagtggaggaacatagctccaaatttataacagaggtttactctcaaggaggacataagaaaaatatagcattgaaaagaagtagaaagggaacttcccatgtgccagtaaagttttataaattaagaaaaaaataacctggattaactcccactgatagtatggaggtgtgggttatatttttacatgtatatttctgtattttttaaatatctaactttttaaaatgtggtaagataattttgaaagcaaatggcactataaaataaatgactctttggtgtacccttctaaattaccagctaataataccaactaatacatttccaaggtagtgcyttaaggaatattaacaggtgatagaaattttaataagcccatctataccaactcttctctagcacttatattaacacattacttacatttagcatgtaactacttaagacactccatatgatgcaaaaggcatttacatagagagccaattaaagcaaaacttgacatattatttcttcgttaaaaa

SEQ ID NO: 660197 - DNA, 408 bp, Homo sapiens
gagatcattctgaattaggatggactccaaatccagtgacaagtttcctcagaagagtgaaagatgtgaagatagaggcagaaattagactaatgaatctccaaaccaaaawataccaaggactgccagcagctagtggagaaacatggaacagattctccttcagagcttccagaaacaatgaacactaccaataccttgatttgagacttagtcttccagaattatgaaagaataaaattactgctgttctaaaccaccaaatttgtggtaatttgttacagtaggcctagaaagtgaatacattaaattcatgtcattaagtgtatgtctgtttatttctaagggtcatatttttttatctaccctatctgtgagtttattatgtgcttcaatgaaacaaataag

SEQ ID NO: 660198 - DNA, 576 bp, Homo sapiens
catcatgaacaacctaataacatttggtaactggtaatctgatagggtttattgttttattttgttttttttctgtaaatgcttcttgcactttttactcgaagagctagttctcctaaagtctgaattcagaactgaattctaaagtaacctccatgtactgaattatggacaatcccagatacatcagaaactcagaattctgtttacctgtataacaatgtagcatattaatgttaaagaaaaaaaacatttatgacatttgttaaagatggaaggcagacagtattcacggagtgtcatggccaatagktgtaggggccactgcaaccaggtcttgcagtggaggagagagattggactcaactccagctctgacaaagacaagtggggatttacaaccaagaagtaagatggggtcagtggatgcaaaattcctgaaacatcaaggataactggtttctggccaagctgactcgacagaattattgctgaaggctggccaggttaataaggtattgagggtggtcagatactataggtgaaggattttcttatccaaatccatatgattac

SEQ ID NO: 660199 - DNA, 576 bp, Homo sapiens
catcatgaacaacctaataacatttggtaactggtaatctgatagggtttattgttttattttgttttttttctgtaaatgcttcttgcactttttactcgaagagctagttctcctaaagtctgaattcagaactgaattctaaagtaacctccatgtactgaattatggacaatcccagatacatcagaaactcagaattctgtttacctgtataacaatgtagcatattaatgttaaagaaaaaaaacatttatgacatttgttaaagatggaaggcagacagtattcacggagtgtcatggccaatagttgtaggggccactgcaaccaggtcttgcagtggaggagagagattggactcaactccagctctgacaaagacaagtggggatttacaamcaagaagtaagatggggtcagtggatgcaaaattcctgaaacatcaaggataactggtttctggccaagctgactcgacagaattattgctgaaggctggccaggttaataaggtattgagggtggtcagatactataggtgaaggattttcttatccaaatccatatgattac

SEQ ID NO: 660200 - DNA, 576 bp, Homo sapiens
catcatgaacaacctaataacatttggtaactggtaatctgatagggtttattgttttattttgttttttttctgtaaatgcttcttgcactttttactcgaagagctagttctcctaaagtctgaattcagaactgaattctaaagtaacctccatgtactgaattatggacaatcccagatacatcagaaactcagaattctgtttacctgtataacaatgtagcatattaatgttaaagaaaaaaaacatttatgacatttgttaaagatggaaggcagacagtattcacggagtgtcatggccaatagttgtaggggccactgcaaccaggtcttgcagtggaggagagagattggactcaactccagctctgacaaagacaagtggggatttacaaccaagaagtaagatggggtcagtggatgcaaaattcctgaaacatcaaggataactggtttctggccaagctgactcgacagaattattgctgaaggcwggccaggttaataaggtattgagggtggtcagatactataggtgaaggattttcttatccaaatccatatgattac

SEQ ID NO: 660201 - DNA, 579 bp, Homo sapiens
ataaaattacaatccacttaaaagtctatttcacagctatataattaagaatttagagcctctatgttaaggagtcataactgaattccaaaagggaagtaataaatagagaacatttgaatttttttcaatatgactttgaatattttacaaagtaatacaagttcagtggagccaaactttactagaacatgctacatgcaaaatttatcattaaaaaacagaggtttcatttacttacactckttcctgtgttgggcattgatgattacccagtattctttctttctttttgctcttccctttcctaaataactccaacttacttcacctatacacatgagaagcccctctgccacacacacacacacacacacacacacacacacacacacacacactgggcaaacacaaagccatctcacatgagaaagaaaccagcctttgtataaactgttgttgcagacagcagagtagagaggctgaaagaactggaatgctcgatgacaaggttaagctgctgaatcaactcaccttgatgccatctctggaagataataaattttcaatcacttgctt

SEQ ID NO: 660202 - DNA, 348 bp, Homo sapiens
tggaggctaaaggctccaacagaaagatttttaagagcagcattcaaaaagagatcagcaaaagcttcagagcttcatatgatctagcctcaaaggtctcacaatatcacttccattattgtttactggttaagagtgtcacaaatgccagcccagactcaaagggatgaayattagactccatctttcaaaaggaagagtagcaaagtatttatagcaatctatattctaccacagagctctattaggtatgtatgaatattatccctttttatagataagaaaactgagtccactgtggttaacaaattgtcaagatctgttagtcaacagctaaaccagtattta

SEQ ID NO: 660203 - DNA, 533 bp, Homo sapiens
tttaagagcagcattcaaaaagagatcagcaaaagcttcagagcttcatatgatctagcctcaaaggtctcacaatatcacttccattattgtttactggttaagagtgtcacaaatgccagcccagactcaaagggatgaatattagactccatctttcaaaaggaagagtagcaaagtatttatagcaatctatattctaccacagagctctattaggtatgtatgaatattatccctttttatagataagamaactgagtccactgtggttaacaaattgtcaagatctgttagtcaacagctaaaccagtatttaaagatggcaattctaactccagcgccttagctctaaactgctgttttagaaatgcttgattgtgcagcctattcaaggagctatttcatttgttaatcactagattcaacgtaattaggaaaactataaaatctttgataacttgaaagatataaagtaattttttaaaaatattaatgtatacagagcactcatagacttagcagaaaataca

SEQ ID NO: 660204 - DNA, 533 bp, Homo sapiens
tttaagagcagcattcaaaaagagatcagcaaaagcttcagagcttcatatgatctagcctcaaaggtctcacaatatcacttccattattgtttactggttaagagtgtcacaaatgccagcccagactcaaagggatgaatattagactccatctttcaaaaggaagagtagcaaagtatttatagcaatctatattctaccacagagctctattaggtatgtatgaatattatccctttttatagataagaaaactgagtccactgtggttaacaaattgtcaagatctgttagtcaacagctaaaccagtatttaaagatggcaattctaactccagcgccttagctctaaactgctgttttagaaatgcttgattgtgcagcctattcaaggagctatttcatttgttaatcactagattcaaygtaattaggaaaactataaaatctttgataacttgaaagatataaagtaattttttaaaaatattaatgtatacagagcactcatagacttagcagaaaataca

SEQ ID NO: 660205 - DNA, 569 bp, Homo sapiens
tattcctgtatggcaggaaggattgatggtgtcaggaggaaggcatgtgagaaaagacctccccatttgagaatcactgggagaatgtgtgaaaaacgcaayaaagacatgttacctctttaaaacaataatgtgctaatatagtgaagccaaaaaagacagagacagaaagaaagaaaagttgatggctaacctaaagaaaataaaggaagaaagttgtgtaaaaggctacgatacaaatggaaaaaaattaaatctctggcatggttttaagcaattgatagtgagaaaagagaatgtattctgtcatagcacaatgcatgactcagcatagtcataaaaatgtaaatttccagacttaattcatggagaaagggtgagagatttggttgctgtttaatttcaaagtacaaattataatagtcttaataaaataaaactaggttagctaataaatggtgggaactaagggaggtaaaaggtggatgaaagagtggggatgataatatctcataatgtgttagggtattactattatcacaaaagtaacctgtggaagtaatgaaatg

SEQ ID NO: 660206 - DNA, 528 bp, Homo sapiens
ccctgaccacagggggacccctgcaaacacggcctcctctttaatacctttgtaactcagttcttcaagcaacccacctaggagaataaaaggacccactgagctccaataactgagtagatgattaaataaagccgagatctcagatcttcgcgtttggggtggggagtgggggcgctggggaaaagtcgggaatagccccgcggtacctggggatcccagttgttttttctaagaaagcccggggttaaaaaatgcattggaatgtggcgatgcctccatcagccgtcactttakaagttcccaagtcacgctgctctagaccattgtggatgaaagtggattgtctctccagaaccaaatattccctgacctgcttccccaacgcgccctcacgctttcctgggagagcacagcgctgccggagacgcggcgcttctgtcaattgtgcagagcaattactaagaaaatattgtgacgatgttgtagggcgaaaggggacgtgaggaggaaagggagggggagtta

SEQ ID NO: 660207 - DNA, 570 bp, Homo sapiens
tagtccccgctactggggaggctgaggtgggaggattacctgagcctagaaagtcgaggctacagtgagctgagatcacgccactgcattccagcctgggtgayagagccagaccctgtctcaaataaataaataaataatgatatgaccacacaatgcagccattaaaaaaataataagttttttatgctgtggtatgagaagatctccaagatattggaggtgaagaaaagaagacgcttttactgcaatgagcacagtgggtccaatatgctgacagctgtgtagaaatcgggaagagggaggatatatacttatttgtgtatctatgcataaatatctctagaaggaaaaataagaaactaatagtatgtgttgcctacaagagaaggaactggatggctgaacaagaaaagggaaagggagacttcttactgtatacctttcatgttttattgaaatctctgtaagtaatatgaatagattacccattcaaaaatgtaaataaaaacaaaaagattacaaactaaacaagaaagagattatgtaacttggccacccacccagcca

SEQ ID NO: 660208 - DNA, 578 bp, Homo sapiens
aagtaatatgaatagattacccattcaaaaatgtaaataaaaacaaaaagattacaaactaaacaagaaagagattatgtaacttggccacccacccagccagtaaagacaccatgatcaccagtgggcctttacagaacctttcattgtttttgargttggctgtgccatgaattccaatcatctagaaccacaggagtgaatgcagggtgtggcctaaggagcagggtgagagcgcgatgtggtagtctgatgggatgtggatgaaggtctgtggttagctaaagcagagttaaccttacattgtctctaagtcagggcaggaattcttcctaagtcccttccgagaccctgtccagccacagaaactctatgagctgggttgccagattcaaaaatgaaactacaggatgaccagttacatttgaattccagataaacaaaaataatttgaaagcatttgctgtttatctgaaattcaaatataactgggcatcctgtattttattcagcacctctacgtgtaaggagccccatggcctggggagagaggcagtgcagcacacgaaggccagcat

SEQ ID NO: 660209 - DNA, 533 bp, Homo sapiens
tggttctgtttttaattttttgaggaacctctatcctgttttccataatggctatactaatttaagatttccaccaatagggcatgagggttctcttttatccacattctcaccaacacttgttaccttttgtctctttgataatagccattctaacagggtaaggtagtatctcattgtggttttaatttgcatttccctgataattagtgatattgagcatttttttcacatacctgttggttatttgtatatcttcttttgagaaatgtctgtccaggtcctttgtccatttttaaatrggttatttcttttcttgctattgagttgagtttctatatattttggatattaaccctttatgagatgtatatgcaaatttttctcccattctgtaggttgtctcttcactgtttcctttgttgtgcagaagctttttaatataatgtaatttgtctatttttcctttgtcacctgtgcttttgggggtcatattttaaaaatcattgcctagaccaatgtcatggagattt

SEQ ID NO: 660210 - DNA, 571 bp, Homo sapiens
accaaccgtaagctttcttcattcttttttattctgttttctcctctgattgtatattttcaaataacctgtctttgagttcatagattctttcttctgcttaatcagttctgctattgatgctctctattgcatttctcattctggtcacttattttcttcatttcattgaaatgtttctctgtattgttttgaagtcaaagagtttcattaagagttattttaaattctttgtcaggttgttcatacatcttcatttctttaacaccagtcactggcatctcattttgtccatttgggatctcacgtttgcctaattgttcttgagccttgtggctgtgcaccaatgtcagcatatttgaagaaataggtacttattctagctttcagagactggctttgttcggaaaagccctgcagcagggacagcaccagggtgcatcagaattctagtgcctgctatggccagtgtggcacagccagaagcccaggacctgctgtgacaagmattgcactgctatacaccagacacccagggacactgagggctgccagacatgatcaaagcatg

SEQ ID NO: 660211 - DNA, 585 bp, Homo sapiens
ctgggctgtgaaggtaaaagtgatatgggactaggtggattttttttggtttgggggtgtggcagttgttttgttttgtttttgtgcttttgtgtttgtttttgttttaatattggagagacttgagctcttctatggactctgaaaagccaatactgaagaaaaggcagaggagagaggagtaaccaatgctgcaaggttccacagaagagaaggggttttcattatagaagagatgcctcatttggactagaggaaaaaacacatgagtgttgttaggggcagatagaaggccagaycaccagctgagaaagcaggggagtggggctacttcttgaagacaatggcaaagctcatgggaggaagtgggggataagcaaaaagacaagtgggcacaggactctagtcaaggcgttttcactttccatttgcctatttcatagagaaaggcttttaactgccttctatctaaattgaataaaaagaaagtgacaaacttaaaaggaaataagaaatggacaagatgatatatactatgtaattaagaagagggtaagtttataattatccatttgcttatttatt

SEQ ID NO: 660212 - DNA, 602 bp, Homo sapiens
actaaatagctaaagtgataacacagacactacacaggcaaagatgttgagctagaattataacacagtgctagtgggaatgtgaattcatataagctctttggaaaactgtttggcagtatcgactaaaagatgaacatacgcacttccactcctgttatatacccaacagcaatgtatacaacatgtttaccaaaagacatagaaaagaatgtttatagcagcacttcataatagccccaaactggaaatgacccaacagtagattggatgaataacttatgatatattcatacaatggaatactgccatgagaacaaacaagtacaaccacacacaataacatgaatgaatctcacaaacaaagtcaagcaaaagaagccagacacaaaagattccatttagatagaattcgcaaacaagcgaaattaagccatggcatcagkagagaaaagagatgttaccctgggaaggggctagtggatggggacacaaaggaggctctgggtgctgggaatgttccatttcttgatctgggtgctggttacgcgggtatgaaaatttatcgatcctattattaattgtcctttgtgctgcattct

SEQ ID NO: 660213 - DNA, 536 bp, Homo sapiens
gtgggttttttacaaactgaaggtttgtggcaaccctgccccaagcaagtctatcagtgccattttttcaacagcatgkgctcatttcatatctctgtgtcatattttgctaattcccacaatatttcaaacttgtttattattactatagtgatctacggtcagtgatctttgatgttactatcgttaattattttgggacactacaaactatccctgtataaggcagcggcaaacctaattgataaatgttgtctatgttctcactactccactgaccggtcattcccccatctctctccttcttcataggcctccctatccccaagaaacaatattgaaattaggccaattaggcagggctcaggggttcatgcctataatcccagcactttgggaggctgaggcaggcagatcccctgaggtcaggagttcaagaccagcctggccaacatggcaaaaccctgtctctactaaaaatacaaaaattagccaggcatggtggcagactcctgtaatcccagctacttgggagg

SEQ ID NO: 660214 - DNA, 588 bp, Homo sapiens
ctctgtgtcatattttgctaattcccacaatatttcaaacttgtttattattactatagtgatctacggtcagtgatctttgatgttactatcgttaattattttgggacactacaaactatccctgtataaggcagcggcaaacctaattgataaatgttgtctatgttctcactactccactgaccggtcattcccccatctctctccttcttcataggcctccctatccccaagaaacaatattgaaattagrccaattaggcagggctcaggggttcatgcctataatcccagcactttgggaggctgaggcaggcagatcccctgaggtcaggagttcaagaccagcctggccaacatggcaaaaccctgtctctactaaaaatacaaaaattagccaggcatggtggcagactcctgtaatcccagctacttgggaggctgaagcagtacaatcacttgaacctgggaggcaaaggttgcagtgagccaagattgcaccaccgcattccagcctaggcgacagagggagacttcatctcaaaaaagaaaagagaaagaaaaaagagattaggccaattaata

SEQ ID NO: 660215 - DNA, 516 bp, Homo sapiens
actggccagagtgtgctgtcctgaactgatgcctcaggccagaaacaaaacgtttacacagaaattcaaggagaaagccacctggctttctaaaatagacctttatggttaatgaggttcattttagctggctaagcccacgacccctaacagggataactgcaagtgagttccaccctaccgcatgggatcctactgagaatttttctacacacctccctatgacaacacttcacatgtgttgtcacaactcactgctaagaaagttagccatgtcctgtgtgagttcccggggagagagctctggacttggttccctctggactttgccccatgcacccttctctttgctgatgttgcttggtattccttctctgtaagaaatcatagcggtgactacgaatgtctctgagtcatgtgagtccatactagcaagtcattcaaccttgaggtggttttsaggacaccccaacatatatgctaacattccaatggccaaagcaagttccacagcca

SEQ ID NO: 660216 - DNA, 610 bp, Homo sapiens
caattaaagtgaagaagggacataataacattcacagtgctcccattgtttgcaatgtcacagcagaaaaaaaaaatgccccaacaccaaacccctagatagttttcaaaggatgaagatcaatgctgaaaattcaacaagtatatcaggatcacctccccgccaccactgccacacacacagatatcaccagtttcacaatttccctccatttatgaatttagcaagcatttgttgagtgtgtgccaggcattgcaattaaactgtgtatcagsgaagattttaggttacaaacaacagaatccactctggcaaggcaaaaagaatttattaaacagtattaaatggatcaagactctccggaagggcaagaaagccaaaccctgaagctacaccaccagggatgatgctcaaccatagccctgaaggaaaacattgattacaccaatactcagtacctatgacccttaggactggaggcaaggaactctgccactgtcccctcctgcattaggttattcttgcattgctataagaaatacctaagactgagtactttataaagaaaagaggtttaattggcttacagttctgcacgctgtacaagcat

SEQ ID NO: 660217 - DNA, 379 bp, Homo sapiens
cccttaggactggaggcaaggaactctgccactgtcccctcctgcattaggttattcttgcattgctataagaaatacctaagactgagtactttataaagaaaagaggtttaattggcttacagttctgcaygctgtacaagcatagtaccaacattgctcagctcctggggaggcctcagggagattttactcatgtaaagctctgttacggctctgcctctgtggcaggctctttcttggacacccagacttccttaaacatcctctgaaacgtaggtggaggctaccaagagtcagctcttgcactctgcacccacaggcttaacaccacgtggaagccatcaaagctcacagctcacattctccaaagtggcag

SEQ ID NO: 660218 - DNA, 604 bp, Homo sapiens
taagtttgggtgtgttgcctcctataaagaactggaaagaacttccactaactgagatcttccaaagtgctagacagtggactagattcttttgcttatatgacctcatcaaatattcatatccttaccctccacctgcatgtagtaggtatgattgttttacagatgaggaaactgatatggtttggctgtgcctccacccaaatctcattttaaattgtagctcccataattcccatgtgtttccccatactgttcttgtggtagtgaataagtctcatgagagctgatgtttttataaagggtttcccctttcacttggctctcattctttcttgccagccgccatgtaaggtatgcctttcaccttctgccacgattgtgaggcctccccagccacatggarctctgagtccattaaacttatttttcttcataaactacccagtcttgtgtatgtctttatcagcagcatgaaaagggactaatacagcaaccaagactgctagaagttattcacttgcccaatatcataaagcttatacatagtagagcaaggaattgaacctaaatctaaacccagctgttttttccagtacaattg

SEQ ID NO: 660219 - DNA, 575 bp, Homo sapiens
agttgttctcaactctggctgtgtatttttaaatatttaagatgccaaagtccaggcctccccacagagatccatattcaattgttctcgccttgggaaaatgtttttgaaagcaacccaggtgattctgatgggctgccagggctgtgaaccactggcccaaggcaaccgtgcggatcacatttttttgcaagtgacggtgatggaaaagtcacgtggctcaatcatggccggtgggatgtggaaggagcctctttggtagcttctaggaaaggcttcctcattggttaaaacatgaggcacaggaagaaattttctgtcttgtgttggatgctgtcatggctaaacatgacacctgaatctgccacaatcatcttgagaccatgagtgaagctggctggcccaaaaactagcgcacaygccgagggtggtgaaaggaaagatagagagaatctgggttgctgatgacgtggtggtgagtcactgaattaaccaagactggagctgtgctcccttgggacttcttgttacacaacataataaattgaccttattaagtctgtgtcctactgatg

SEQ ID NO: 660220 - DNA, 615 bp, Homo sapiens
gtagggacctgcggaagggtgcagcggtcaataatagcaacagccctgctgtaggacactcactctttgttgcagtaactatagcactgatcacacacacgagcagggttctctctgcagccttcaaccaccattttcttagtggagcaggagctgcacactagccggccacagcggcgacaatgatgacgcctgttaaactgaggaatgccatcaggaggagaagaaagagggaggagagaaggggagattgccatcaatccatttatacatggtattaactaccagtggcttatactttctaagaacaccaactgcttgggtctctattggaaaaggacacaccagtccttgccctcaaaaattgaatgtttaaaaatatctgtcagctgatgggcaaaggtgcgaagtcatggagctttgcratagctcctgacaagttctacttgtgtatggaggcaacatgtggaaaaacaagaaaaagtagtggagaagaagtcactttctaagccagtgcagatcacatttctacatggtattgatgacaatgattaaaaagtatccctttcaaaatgcctttatttgttttccccaaggttattttagcaggtgcca

SEQ ID NO: 660221 - DNA, 582 bp, Homo sapiens
atataccttctctatacatccatattctgatgtgtgtaatatagtaataatattaccaagctcatcaggttattgtaaaatttaagagagataacttaagcaaagcacttagtatcatgcctggaacatatacagtaggcagtcaataaaggccaactgttgtcattattagaatttaaagattagaaactctttctatartctaccctatatgtaagtaaaccttctatatggtggtttcaaagctagagagcagcttgtcatgcaaaactccttttggtggcttgtcatatgtctcaacaagccacaaccaattgtcctccttgaagatttgtaagtttaaataaggaaaatacctgactctgctttcctaatatctttttttttttttaaatcaacttttattttaggttcaggggcacatgtgcaggtttgttacataggtaaactcgtgactcaggggtttagtgtacagattattttgtcacctgggtagtaagcatggtacctagcagtttttcttccctgaacttctccctccttccaccctcctctgtctcaagtacactccgtgtctgttgt

SEQ ID NO: 660222 - DNA, 582 bp, Homo sapiens
atataccttctctatacatccatattctgatgtgtgtaatatagtaataatattaccaagctcatcaggttattgtaaaatttaagagagataacttaagcaaagcacttagtatcatgcctggaacatatacagtaggcagtcaataaaggccaactgttgtcattattagaatttaaagattagaaactctttctataatctaccctatatgtaagtaaaccttctatatggtggtttcaaagctagagagcagcttgtcatgcaaaactccttttggtggcttgtcatatgtctcaacaagccacaaccaattgtcctccttgaagatttgtaagtttaaataaggaaaatacctgactytgctttcctaatatctttttttttttttaaatcaacttttattttaggttcaggggcacatgtgcaggtttgttacataggtaaactcgtgactcaggggtttagtgtacagattattttgtcacctgggtagtaagcatggtacctagcagtttttcttccctgaacttctccctccttccaccctcctctgtctcaagtacactccgtgtctgttgt

SEQ ID NO: 660223 - DNA, 596 bp, Homo sapiens
catgaagctgctcatatacttgcaaggctgagccctcccctcagctcggctggttaccatgaagcatggctaattctcaaagtatggccagaaaatgccacagtctgctttatgatatgtaaagagatttcttaccatttagcagagcaacactggctggtcacagaaaaagagagatgtaaaacatagtgactcttagtagcactcagaagaagagaccttagaatcctgctcctttgaccatttggcaaaacaaaacacttggctgagcttctttcgagagtaggccattgtgtgggggctggagaccaggggactggtgaaaagggtgaccaagacatggctgagggcttcaaggagcttgtgctttgtgtgtgacagtatgaacttgagggctaagtacggtcaagsctcattaatactagattgcatatttgtaaagttgcttgtttgttaacatttgtaacctcaaaaacaatactcatcttgcttttgtggtcatttgcaaacacatgcggtcatgaaagttttgagtcacccaatactcaacactcaaattcccaactgaggttgtttcaacctctatataacagtga

SEQ ID NO: 660224 - DNA, 626 bp, Homo sapiens
ttgaattatggtggcaactatcatgatttttctagtgtttgagtgttcattgataatagaatatcgtcttcctgatggcttgggtcacatacattaactcccagggtagcaatgaatatctcagattggcacagttggttttgccaactcgtgaaagtatttaatcctgtcttgaattaaggccatgaatatgttctctgtgaataaataggttccctgttcaatagtttctttcatctgaggcctatttcctgggggtgaaagtggagggtgttttaaccaatcaatatctgtctgtgattccttaattgtacccagtaatattttctggtccttttgcataatttccatttggttaaaagacacgggttccaatgaactaatatattttatagcaaattggagargagagggtttccttcacacaatactaattcctaccaatttaacattagattacctagcaatcatcacattttgtcacattctcattattgtgttacctaatatttgtattgggttttataactttataaaagcctttcatttgttttgttccttattcagtcattcacgcatttgacaaacatttatggcattcctatagtgtactaggcactgtgctg

SEQ ID NO: 660225 - DNA, 486 bp, Homo sapiens
tgtgtcatgggctcgtcctcaaacttggcaaaataaactttctaaattaactgagacctgtctgagattttctgggttcacaagagagatacacagatgtartaaccttaatttaaaaaaagttttaatctttttttcctaagcaaaccaaaacttaataataatatgacaacttgatcatataaaagtttttggttttgtttgttttataaatccgcttattgtgacttacatagaccttttgtgacatgcttggactttccagtttgtcttgaacatccctccttcttaaataaccagtcatgtcattttactctaggactaaatttaccacacaatattctttttcatatgaaattatttctctttaagctttcttacaaaaaaaatctttatttttataactttctttacatctcttttatttcctggttccttttaccttgttttatacatgatctttaaataagctttgaattagacaaa

SEQ ID NO: 660226 - DNA, 486 bp, Homo sapiens
tgtgtcatgggctcgtcctcaaacttggcaaaataaactttctaaattaactgagacctgtctgagattttctgggttcacaagagagatacacagatgtagtaaccttaatttaaaaaaagttttaatctttttttcctaagcaaaccaaaacttaataataatatgacaacttgatcatataaaagtttttggttttgtttgttttataaatccgcttattgtgacttacatagaccktttgtgacatgcttggactttccagtttgtcttgaacatccctccttcttaaataaccagtcatgtcattttactctaggactaaatttaccacacaatattctttttcatatgaaattatttctctttaagctttcttacaaaaaaaatctttatttttataactttctttacatctcttttatttcctggttccttttaccttgttttatacatgatctttaaataagctttgaattagacaaa

SEQ ID NO: 660227 - DNA, 561 bp, Homo sapiens
attatgctttggccctaattacccagcaacctgcaaactacaatgtggataatgcagaaaaggcacagaatggcttaaatgaagaacttctgtccttgttataatcttcagtgaaggagaacatggagaacataacaggaatgtccctgttgctgctttccaaaatctttcctttttttttgttttttgagacggagttttgctgttgttgcgcaggctggagtgcaatggtgcgatcttggctcaccgcaacctctgcctcccrggttcaagcaattctcctgcctcagcctcccgagtagctgggattacaggcatgcgccaccacgcccggctaattctgtatttttagtagagacagcgtttctccatgttggtcaggctggtctcgaactcccgacctcaggtgaactgtccaccttggcctcccaaagtgctgggattataggcatgagccactgcgccctgcccaaaatcttttcttttgctaacctttccctgctaagggatataaaatcttttcttgcatggagttttcaggtactaatgttgtctgactca

SEQ ID NO: 660228 - DNA, 572 bp, Homo sapiens
acggtggctcatgcctgtaatcccagcactttgggaggccaaggcaggcatatcacctgaggtcaggagttcaagaccagcctggccaacatggggaaaccccgtctctataaaaaaaaaaacaaaacaaatatttttgatgcacaaagaatgaaaagcagatatgcatataatgctgatcatgtcgggtatacataacaagccatcaaatatttacaggtgttatctctgggttattaagaataatttttattttcttctttatattttgctgcgctaaaaaaattcctacagaattgtaaaatgmatcgttttatagaagaaaagttcttctaaaaatcctacttaactcccagagtcgagctcaaatacctcctcttcccaaatttctttctgactactcttattttttttcggagatacttcttagaagtctgattacttttgtttacattgatctttccattttctctgtttatctttctctacccagcttttgagtctagatgctcttttcattctcttctttcgctctaggcaatctcactcatgcccataacttcaagaactac

SEQ ID NO: 660229 - DNA, 514 bp, Homo sapiens
ctagtgagggaagaaaaccaaaggatttgttttaggaagcttggtttgaaagtggttcatgtgattatcctaagtacatggttgtctcttctgttctgaaaaaagtctagtgatgagtttttcaccaattttcatgagactctgtgagratattaaattgcctttttaataatggtttcttcttgtgtatctcacctattttttcttgtggcaatatcattccatttctcgagttttagagttgtggaaataaagaacttttcctgtccaataacttttcaaatactatagaaaagaagtagactttcactcacctcgtgaaatatcaccaactcccttgaaccttctcacattgtttgtttcctaaattttaaagatcattccttaactattaaactttagtgatacataactagattcacctatgtgggcctgacttgtccctttgtttttacgcttgagaaagagtggtcataataacactgtacctgtaaagattaaaggactagaagct

SEQ ID NO: 660230 - DNA, 514 bp, Homo sapiens
ctagtgagggaagaaaaccaaaggatttgttttaggaagcttggtttgaaagtggttcatgtgattatcctaagtacatggttgtctcttctgttctgaaaaaagtctagtgatgagtttttcaccaattttcatgagactctgtgagaatattaaattgcctttttaataatggtttcttcttgtgtatctcacctattttttcttgtggcaatatcattccatttctcgagttttagagttgtggaaataaagaacttttcctgtccaataacttttcaaatactatagaaaagaagtagactttcactcacctsgtgaaatatcaccaactcccttgaaccttctcacattgtttgtttcctaaattttaaagatcattccttaactattaaactttagtgatacataactagattcacctatgtgggcctgacttgtccctttgtttttacgcttgagaaagagtggtcataataacactgtacctgtaaagattaaaggactagaagct

SEQ ID NO: 660231 - DNA, 498 bp, Homo sapiens
tgaaaaactcttcctaaatttttaaaaaattcattttaaacagtcctacatttaggtrctttcttgaaactctggggggaaattccagggaaacaccaaatatagtgactgagaaacaaaaaataaaccagttctcctattcaggctcttctcagtgtaataaaaatttcagtgtgttgacatgtaaagcaacagtcaagataatttatttgccagtgaaaagtagattatttttcaagttacttctagtgaaacattcagagttaggtgggaaagtaacttttttctacagtagatgcttaacaactatgaataatgatttgcacaagaattaacttgcttaagaaaaacagagcctgatgcaagggattcatctgttgccacctacctataatactatcaacactgaggttattgcacctgagaattctttagaaattatgacagtatctaattctttgatttattggcacaaatatattgcttctctataaaaag

SEQ ID NO: 660232 - DNA, 378 bp, Homo sapiens
gccaatcacgcaatttcccatccttctgacccacgggctgtaaattcccacaacccttccttaggttattctagccataacttgctagaattgctagaagagctcaaggaaacactttactcacatttaccagtttatttaaagatacaactcaagaaaaaccagacgtaaaagaaatgtgcagggtaagggggcgggcaaagcttccacatttctccaggtaccttacccacctagcatctccaggtgttctgcaacctagaagttcatcaaatctctttgttcaagaagagtagttacagttttcatctctaaccctacccccccccccmacccctttcccagaggtccttcggtggagctgaaagttccagccct

SEQ ID NO: 660233 - DNA, 582 bp, Homo sapiens
gtcgagttcctttatctttactctttaggtaataaagtatttctcatctcttatacacacccaccatttaagctaaaattgtaagaaaatcctggaaatgcaatcatgggagacctaactcaattaaagccatacacatgcagagggtattaattgagatgggtattacctgccacrgttggaatcttggttcttctttttttgtcatcatcataatcatttctccaccacttttattgctttctctgtatatgttgtgctaatataaataaaatgcttccaagtgtaaaaataataaaataaactagcattatttaattccatttgtttcttgagcagatctgtatagctgtgtgtgtgtgtgtgtgtgtgtgtgtgtgtgtctgtgtttgtgtgtgtgtgtgtgtgtgtgtgtgtgtgtaattatttatataatgccttggtttgggccaaaattctgtacccatgcagcaagtctatgaatagaagacccttgcatgaattaattcagaattatttctggaattgcaggctgtcttttggaacctcatttattactccctatccatttggtctcattca

SEQ ID NO: 660234 - DNA, 582 bp, Homo sapiens
gtcgagttcctttatctttactctttaggtaataaagtatttctcatctcttatacacacccaccatttaagctaaaattgtaagaaaatcctggaaatgcaatcatgggagacctaactcaattaaagccatacacatgcagagggtattaattgagatgggtattacctgccacggttggaatcttggttcttctttttttgtcatcatcatmatcatttctccaccacttttattgctttctctgtatatgttgtgctaatataaataaaatgcttccaagtgtaaaaataataaaataaactagcattatttaattccatttgtttcttgagcagatctgtatagctgtgtgtgtgtgtgtgtgtgtgtgtgtgtgtgtctgtgtttgtgtgtgtgtgtgtgtgtgtgtgtgtgtgtaattatttatataatgccttggtttgggccaaaattctgtacccatgcagcaagtctatgaatagaagacccttgcatgaattaattcagaattatttctggaattgcaggctgtcttttggaacctcatttattactccctatccatttggtctcattca

SEQ ID NO: 660235 - DNA, 598 bp, Homo sapiens
ctaaaattgtaagaaaatcctggaaatgcaatcatgggagacctaactcaattaaagccatacacatgcagagggtattaattgagatgggtattacctgccacggttggaatcttggttcttctttttttgtcatcatcataatcatttctccaccacttttattgctttctctgtatatgttgtgctaatataaataaaatgcttccaagtgtaaaaataataaaataaactagcattatttaattccatttgtttcttgagcagatctgtatagctgtgtgtgtgtgtgtgtgtgtgtgtgtgtgtgtctgtgtytgtgtgtgtgtgtgtgtgtgtgtgtgtgtgtaattatttatataatgccttggtttgggccaaaattctgtacccatgcagcaagtctatgaatagaagacccttgcatgaattaattcagaattatttctggaattgcaggctgtcttttggaacctcatttattactccctatccatttggtctcattcaaatactcttagattttgtctaaattcatttagatttatcactatatcaaagacaggaacattgtgccttttttaaaaagtaccaaata

SEQ ID NO: 660236 - DNA, 580 bp, Homo sapiens
actgtgctttaagtccatcttttcatgcttctctttgactttcctctggcagttacccctattctcctgtcccttaactaaatttgatgcccctctcactctgccaacaactggctactttccctaggccagtgcagtgtgcacgcactgttgagagaaagttttggatggcagcagatatttaagcatgggcttgcacactgcataaagactcctagctggagaggccagtcaggatgaaatccatccaatattcatctggccaagtcatgctggctcacatgttgaaaaatgtcttccaagaggaagggatgcattttcttagttttcaaaaagacactgtaaagtctagtagcagccctgtcctcaaccctccttccctgtagagttaccatcacatctgtccaccctacacaatcagacttctcagagtttcatcttagccatatccctcccattcattcttcctctgcagtcctatttctgctcccttccctttmctgtaactgctcaaccacaatgcctcaggaaatcttaatcctacccaacacaaagaagcttttagtgcttgaaacctttc

SEQ ID NO: 660237 - DNA, 565 bp, Homo sapiens
aaatattttgatgcaggcatgtaatgcataataataacatcagggtaaatggggtatccataacctcaagcatttatcctgtctttgagttacaaacaatccaattatattctttttgtaattttgaaatgtatgataaattattgttgcctgtagtcaccctgctgtgctatcaaatactagaccacattcattgtaactatatttttgtacctattatatattatatgtaacataatataaacaatatgtaatatacaatatatacattgtatatataatacacacaaawaggtatatatttgtacgtattagccatcaccccttacctgacccccactacgcttcccagcctctgataccgattgtcttactctctatctccatgagttcaattgttttaatctttagctcctacccatgagtgagaatgtgcaaagtttgtctttctgtgcctggcttatttcacttaatgtaataacctccaattttacccatgttgttgcaaatgacaagatctgattcttttttatggccaaatagtactccactgtgtatatgtacc

SEQ ID NO: 660238 - DNA, 540 bp, Homo sapiens
gttgtctctttactttgttgcttgtttccattgcggtgcagaagtcttttaacttgatgtgatcccayttgtccatttttgctttggccgctagtctttgcccagtccaatgccctggagagtttccccagtgttctcctgtagtagtttcacagtttgaggtcttagatttaagtatttaactcattttgattttattttggtatatggcaaaagagagaggtctagttttattcttctacttatagatatccagttttcccagcaccattgattaaagagattgtccttttcccaatgtatgtcttggtaactttgtcaaaaatgagtttactatagatgtatggatttgtttcttggttctctattctgttgcattggtctatgtgtctgtttatatgactgtaccatgatgtttgggttaactactatttctgtggtatattttgaggtcaggtaatgtgattcctccagttttgttatttttgcttaggatagctttggctattctgcgtcttttgtgattccatataaatttga

SEQ ID NO: 660239 - DNA, 540 bp, Homo sapiens
gttgtctctttactttgttgcttgtttccattgcggtgcagaagtcttttaacttgatgtgatcccacttgtccatttttgctttggccgctagtctttgcccagtccaatgccctggagagtttccccagtgttctcctgtagtagtttcacagtttgaggtcttagatttaagtatttaactcattttgattttattttggtatatggcaaaagagagaggtctagttttattcttctacwtatagatatccagttttcccagcaccattgattaaagagattgtccttttcccaatgtatgtcttggtaactttgtcaaaaatgagtttactatagatgtatggatttgtttcttggttctctattctgttgcattggtctatgtgtctgtttatatgactgtaccatgatgtttgggttaactactatttctgtggtatattttgaggtcaggtaatgtgattcctccagttttgttatttttgcttaggatagctttggctattctgcgtcttttgtgattccatataaatttga

SEQ ID NO: 660240 - DNA, 540 bp, Homo sapiens
gttgtctctttactttgttgcttgtttccattgcggtgcagaagtcttttaacttgatgtgatcccacttgtccatttttgctttggccgctagtctttgcccagtccaatgccctggagagtttccccagtgttctcctgtagtagtttcacagtttgaggtcttagatttaagtatttaactcattttgattttattttggtatatggcaaaagagagaggtctagttttattcttctacttatagatatccagttttcccagcaccattgattaaagagattgtccttttcccaatgtatgtcttggtaactttgtcaaaaatgagtttactatagatgtatggatttgtttcttggttctctattctgttgcattggtctatgtgtctgtttatatgactgtaccatgatgtttgggttaactactatttctgtggtatattttgaggtcaggtaatgtgattcytccagttttgttatttttgcttaggatagctttggctattctgcgtcttttgtgattccatataaatttga

SEQ ID NO: 660241 - DNA, 674 bp, Homo sapiens
aataatgtaatttggaagatatttgggagttcctttacatctaattttcctttaaagaagcctgggacattttgacctttgttgaaatcagcatagatttcaactggggaaaggaaagaaagaatgttccttcctacagtttacatgtattgtgtgctgttgcacctaaaataagacactaacagtcaggtatcaagaggaattttaaaagataccacatatacatataggcattgctcaggcaaacagtaaaacctrtaggccacactgctaaaaggaggataaacttggtgcattttggacacacacagcaaccacaatgaagaaaagagctctgggcattggagtcacagaggcttggttggaatcccagctctgccacttgctgtctgtatgtctttaggcaaattacttagtccttcagagcctcagatccctcaattatataatgaagatgcaaataatttacaagatcactttgtatatgagaggtaaggccttcagtagcccagttcctagcatttcgtaggtatagatataaaaatggcgttcttctttattatgaagatgtatgttcttatttacaattttgatatgggacattaacaaagagaaaaaggaagtgctgtggcatcatcagaatggcaaaaagaagtctctggctcccttctagt

SEQ ID NO: 660242 - DNA, 570 bp, Homo sapiens
tgagcctcaaacgtcagtagtgtgggcagatttgggaaaattatatccagaattctcacaggtacctctcaattacacagctactaatttaatctatcaaagttgaagctcagctcaattcactaatttgacaagaatttggggggcacctatgtgtaaggctggatgctatttaatactattgtatsttactgaagatacacaagtttctcaagccagaaccctggaagtcaccctgattaataatattccctcatcttccaacaggacttcctttagctagtcctgttgattctataggcaaaccaaatctgttattttccccatttcttttgcaaaagtccaagtcaccatcatttcttgcctgtactacagttgtatttatctgttgatccatctgcccatctactcagcaaacatcgataggacagccacagtgtgccagatacttttctgggcttgagagtcatgctattgaacaagacagacggagtccttattcccatggaacaacattctaaacaaagaatacagaacattttaaaaacatggaaaacccagttagtgatg

SEQ ID NO: 660243 - DNA, 570 bp, Homo sapiens
tgagcctcaaacgtcagtagtgtgggcagatttgggaaaattatatccagaattctcacaggtacctctcaattacacagctactaatttaatctatcaaagttgaagctcagctcaattcactaatttgacaagaatttggggggcacctatgtgtaaggctggatgctatttaatactattgtatcttactgaagatacacaagtttctcaagccagaaccctggaagtcaccctgattaataatattccctcatcttccaacaggacttcytttagctagtcctgttgattctataggcaaaccaaatctgttattttccccatttcttttgcaaaagtccaagtcaccatcatttcttgcctgtactacagttgtatttatctgttgatccatctgcccatctactcagcaaacatcgataggacagccacagtgtgccagatacttttctgggcttgagagtcatgctattgaacaagacagacggagtccttattcccatggaacaacattctaaacaaagaatacagaacattttaaaaacatggaaaacccagttagtgatg

SEQ ID NO: 660244 - DNA, 631 bp, Homo sapiens
gatagctttgtccctgttttgcagatgggatgaccatggaaatatgaaatgaccttccctggagcaggtggatcaggtggatcaggtggcaagccaccaagagaacaaaggcagaagtaacagttgcaggattgatggtgcccagtgaaggtgcttagggaaaattctcaaaaatcacatgttttggtactcacatcttcttgaaaagttatcccttgttgtggctataagctgtgctaaatggccacatccttgtacttctgcttcttttggttctaatatcctcttaatgaatttttttcagcctttatgcaaaatgtttaagtcatcaacatcatattcygtcatctgtttatttcagggaagccattcactaagaccttttctccagctgtaatttgcttccttttctgcaatgctgtttatttttatgtagtttttaggatttattccctgtagactaggaattgtttttcctatctggtgaaacctttgtaacttcccctatttacttattaactttctctccatgcatctatgcatctccatcattacattctccaaattttcacttcttcctcctctttacttttatcactcttgtctcttatcacacacacacacacacaca

SEQ ID NO: 660245 - DNA, 565 bp, Homo sapiens
atgtcaatgacctcacatacttatcatttttttgtgctgagaacatgtaagatctattctcttagcaattttcaagtatacaatctattattattaactatagccatcacacactgtaaaacagatctctagaaactcttcaagctgtctaactgaaattttgtatcctttgatcaacatttccycagtcccctttccctcactcttctcacttgcaacttccattctaatctctgcttctatgggttcaatgcttctatatataagcaacataatgcagtagttgtctttctgtggctgacttatttcacttagcataacgtcctctaggttcatctatgttgtcgcatgacaggacttccttctttttaaaggctgaatagttttccactgtatgcatatatatcacatattctttcttcattcgtccctcagtgcacacttaggcttaatctatatcttggctattatgaataaaactgcactgagcattggtgtgcagatatctctttgatgtactgattttatttcctttggatatatactcagtagtgaaattgttgga

SEQ ID NO: 660246 - DNA, 594 bp, Homo sapiens
tttaaaagtcctgcctcatccagaatctgttctaaatataagcatttaatatacaataagacagataccacagaatcatgaggaaatgaaatcaataaattattttgggaccacttattagctatttttaaaatttagaacctcatttcacatcccaattcaaaataaattttaggtgaattgaaaatccaaatctaacagtgaggaaaaataaaataaataggagcatggtgtcccttatttgccacattctattggttaaaagcaagtcatgggtcccacccatgctyaaggtaatgggtttgtaagaggatgtggctcatgagagtcaccttagtgtgtgtccagcaggttgattgatgcctgcaacaacacagatgacgctcgaaatcattatactgagcagaaaaaaagaaacagataaaagagagcatttacttttattctatttacatataaacacaactgtaaatagtgttatcccattggcaggtgtgatctatccccttccctcaaatctgagtgggcttataaaaaagtgaaaaggtcagaagtgaggctatgtgacttcggaggctaggtcatcaaagggca

SEQ ID NO: 660247 - DNA, 557 bp, Homo sapiens
taaggcatgttaacaggcagagagatactaggagatgagatgagacaaatagaaaataaatagcaaaatgataaatctaaaaccaataatgtcaattatcacatcaataatcacattaaatataaatggtctaaacaaccaattagagggcagcaaattttagattggatgaaaaagmaagaccaaactagttgatgtctataagaaactcactttaaatattgaaaaaaaagatggaccaaaactaaaaagatggaaaaaaacaaatactatgaaaaggctaaacaaatctgtaatttgttaatattgaataagtggatttcagaataataaatattatcaggaataagtgggggtattttataatgataaatatttgagttggtaataaatgagtttcaagcacatgaagcaaaaaaaaaaatatatggactgaaaagtaaaataaaaaagtccacaattagagttggagactttaaacattctcttacaatatttgataaaataagcagataaaaatcaaaaggatacagaagatttgaacaatactatcacca

SEQ ID NO: 660248 - DNA, 557 bp, Homo sapiens
taaggcatgttaacaggcagagagatactaggagatgagatgagacaaatagaaaataaatagcaaaatgataaatctaaaaccaataatgtcaattatcacatcaataatcacattaaatataaatggtctaaacaaccaattagagggcagcaaattttagattggatgaaaaagaaagaccaaactagttgatgtctataagaaactcactttaaatattgaaaaaaaagatggaccaaaactaaaaagatggaaaaaaacaaatactatgaaaaggctaaacaaatctrtaatttgttaatattgaataagtggatttcagaataataaatattatcaggaataagtgggggtattttataatgataaatatttgagttggtaataaatgagtttcaagcacatgaagcaaaaaaaaaaatatatggactgaaaagtaaaataaaaaagtccacaattagagttggagactttaaacattctcttacaatatttgataaaataagcagataaaaatcaaaaggatacagaagatttgaacaatactatcacca

SEQ ID NO: 660249 - DNA, 474 bp, Homo sapiens
taactcattatggcagcatgttttgttccttttagagtctattatcatctgaaatagatattataaagtagttgcctgcagattcatatccagagacatagtttgatctgtgtagtgttaaaaagttttaatgcaacatagaacaattttgagacttcacataatatatatatgtgtgcgtatgtgtttatgtgtgtgtgtgtgtgtgtgtgtgtktgtgtgtataggctttaaaatgtatatgtcttgccatactgaacccatgttgaagccgtatttccacagggtaatagctggcagaactgagttaagggttgccccttttagatgaggcatatgctctcccatcctccacagttcacactatgcctgcttatctcttactgatattagatattagtaatagtcacatttatgcattgtctttatttaaaaaaatagttctcttttttatgacagtagcaatagttagaa

SEQ ID NO: 660250 - DNA, 474 bp, Homo sapiens
taactcattatggcagcatgttttgttccttttagagtctattatcatctgaaatagatattataaagtagttgcctgcagattcatatccagagacatagtttgatctgtgtagtgttaaaaagttttaatgcaacatagaacaattttgagacttcacataatatatatatgtgtgcgtatgtgtttatgtgtgtgtgtgtgtgtgtgtgtgtgtgtgtgtataggctttaaaatgtatatgtcttgccatactgaacccatgttgaagccrtatttccacagggtaatagctggcagaactgagttaagggttgccccttttagatgaggcatatgctctcccatcctccacagttcacactatgcctgcttatctcttactgatattagatattagtaatagtcacatttatgcattgtctttatttaaaaaaatagttctcttttttatgacagtagcaatagttagaa

SEQ ID NO: 660251 - DNA, 617 bp, Homo sapiens
ttgccctactcaattccttgatatcatctgcctggtartgaggtgttggagctggctaatactgacttatgagagcatattgttaaatattcaggaattttaccagcagcaaccaccattggtagattggaatcagccacagtgggagtatttacaccagggaaatcaacgaacattacaaatcaggtctttttttcttcttcttcttctttttttttccttagagaaccagtttactagcatactgctacatttaggtatttgagtttatgatctctgaactaaaatgcatattatactttattgatcattgacgttagtataatctgccaatctgatcaatatgccatattcatattttctttatctatgtcattaataaaatatttaataagaatggaccaaagaagagacctatggcataacatccattaaacaatgatctttacatatggttgttcaacaggtattcagtaaaactctccgtgcttctaaatgattgcatccatctgctcactttatgcttatgaaaatctactggaagtgcatacgcctgatccaggaattcacatccttggtgaagggatttaagtcattagattttgggtgtatgttct

SEQ ID NO: 660252 - DNA, 617 bp, Homo sapiens
ttgccctactcaattccttgatatcatctgcctggtagtgaggtgttggagctggctaatactgacttatgagagcatattgttaaatattcaggaattttaccagcagcaaccaccattggtagattggaatcagccacagtgggagtatttacaccagggaaatcaacgaacattacaaatcaggtcttttyttcttcttcttcttctttttttttccttagagaaccagtttactagcatactgctacatttaggtatttgagtttatgatctctgaactaaaatgcatattatactttattgatcattgacgttagtataatctgccaatctgatcaatatgccatattcatattttctttatctatgtcattaataaaatatttaataagaatggaccaaagaagagacctatggcataacatccattaaacaatgatctttacatatggttgttcaacaggtattcagtaaaactctccgtgcttctaaatgattgcatccatctgctcactttatgcttatgaaaatctactggaagtgcatacgcctgatccaggaattcacatccttggtgaagggatttaagtcattagattttgggtgtatgttct

SEQ ID NO: 660253 - DNA, 617 bp, Homo sapiens
ttgccctactcaattccttgatatcatctgcctggtagtgaggtgttggagctggctaatactgacttatgagagcatattgttaaatattcaggaattttaccagcagcaaccaccattggtagattggaatcagccacagtgggagtatttacaccagggaaatcaacgaacattacaaatcaggtctttttttcttcttcttcttctttttttttccttagagaaccagtttactagcatactgctacatttaggtatttgagtttatgatctctgaactaaaatrcatattatactttattgatcattgacgttagtataatctgccaatctgatcaatatgccatattcatattttctttatctatgtcattaataaaatatttaataagaatggaccaaagaagagacctatggcataacatccattaaacaatgatctttacatatggttgttcaacaggtattcagtaaaactctccgtgcttctaaatgattgcatccatctgctcactttatgcttatgaaaatctactggaagtgcatacgcctgatccaggaattcacatccttggtgaagggatttaagtcattagattttgggtgtatgttct

SEQ ID NO: 660254 - DNA, 617 bp, Homo sapiens
ttgccctactcaattccttgatatcatctgcctggtagtgaggtgttggagctggctaatactgacttatgagagcatattgttaaatattcaggaattttaccagcagcaaccaccattggtagattggaatcagccacagtgggagtatttacaccagggaaatcaacgaacattacaaatcaggtctttttttcttcttcttcttctttttttttccttagagaaccagtttactagcatactgctacatttaggtatttgagtttatgatctctgaactaaaatgcatattatactttattgatcattgacgttagtataatctgccaatctgatcaatatgccatattcatattttctttatctatgtcattaataaaatatttaataagaatggaccaaagaagagacctatggcataacatccattaaacaatgatctttacatatggttgttcaacaggtaytcagtaaaactctccgtgcttctaaatgattgcatccatctgctcactttatgcttatgaaaatctactggaagtgcatacgcctgatccaggaattcacatccttggtgaagggatttaagtcattagattttgggtgtatgttct

SEQ ID NO: 660255 - DNA, 622 bp, Homo sapiens
cttactcctgctattttgttatttgtttcctcattgttttgtggtcttctctttctcattctttccttcctgtcttcctttagtaaaggtgtttttctctgatgatatgatttagtttcttgcttttcattgtttgtgtatccatttgtgtgttttttggtttgaggttaccatgaggcttggaaatactatcttataacccattattttaagctgataacaacaatactgtttgcataaaccaacaaacaagcaaaaagaaaactaataaaaactctacaccttaacttcttcctcctgctttttagctttttgttgtttctgtttatattttgttgtactgtctgtgtcttgaaaagttgttgtagttattattttttwttggttcatcatttagtctttctattaggatatgagtagtttacataccacagttgcattgttaaaatattctgtttttctgtgtaattactgaaaccagtgagttttttaccttcaggtgattacttgttgctcactaacgtccttttctttctaactgaagtattccccttaggatttcttgtaggacaggtctggtgttgatgaaatccctcagcttttgtttgtttgggaaagtctc

SEQ ID NO: 660256 - DNA, 597 bp, Homo sapiens
ggtgtacttgtcaagaggtacaaggggaatgattagggagccttctattctggtatcttgctctgccccatccgctattatggatgagaacactgaggtggggaaaattgaagtaacttactcaaggtcataaagttagtaagtgatagagccaatagtcacacctagaaaccgtttcagaatctgcccctatgtagactcaaaagtccctaggtcaaagatctrttacttgaaagagaaaagcacatagtttgctcttttgttccttattccattctgaatacttgacagccggctggaggaagtcagggagtcaacattttaagtcttggaaattaaaatttatagaacagggcctttaaaaggatttcaaattaacaataaaatgtgcaccattgacaagtaattactctgaaaaggagtatcactgatttacttttacagaataaaggaagaaaagagctaagcagttcatatgctttaagaaatgtttcctaaaacctcagtgcataattttcagaaataaaaataagaccaatttcatcaagtcttttagggggaatttctcatgtccactataaccaatttcaaatggta

SEQ ID NO: 660257 - DNA, 586 bp, Homo sapiens
acttcctctgaccccaaaaccacatttaaaggagatgagtttgaaagacaggatacaatgttttagcagttttgatgtataagaaaagtagccatgattcctacaggtgcctggatcatccctgctgctctaacttggagccattacaaacttagtaatgwtgctgttggcaaagttgcaaataaagaattacagtaactcagtctaaccataacaaaagcatacaaaacactttcaaattcaatagacatcaaacaggacttaatcctttctacatatcatagatacatttaaaaaaactattatattaaccacgtatatccatcaaaagaaaaccacgtatattcatcaacagtcttttattaggttttttccccaccacatattaaaaacccgtcacctaacacttctttggaaataattttaaataattggatacagttcaggactgccttataagaaaaattggctgggttaaggttgaaattcaaaggtagatttaatataaataaatattattcacactactgtctgagggtggtgggaaaacccacagaacatttttacaggcagtcccagtgcagtt

SEQ ID NO: 660258 - DNA, 476 bp, Homo sapiens
aaaaaggagatagtcagtatacctcccaagtttgccctttgacctgggaaggaagagctcttttggggtggtaaraaccaagtcccagattattaagggtgggtcttcactttcaggctacttttcctcttttgagcaaggcggcacaccatttacttcgagtccattttctactccaacttctgtctccatgaccttcttttgtaaaccctctttttacctcttgtttctccaaaattattgcattatgagtgcacacacaagtgtacacacacacacatatacacacacaattagaccttcatttaaggagagaaacaaaatttatattttaatgaccatattgaattgccattcatcttctgtaacttttactacaacatgattcttttataattggccaattaatagtatttattgagtatcatcactagtttctgttagttggcaaccctatgacctaggactttcagctg

SEQ ID NO: 660259 - DNA, 476 bp, Homo sapiens
aaaaaggagatagtcagtatacctcccaagtttgccctttgacctgggaaggaagagctcttttggggtggtaaaaaccaagtcccagattattaagggtgggtcttcactttcaggctacttttcctcttttgagcaaggcggcacaccatttacttcgagtccattttctactccaacttctgtctccatgaccttcttttgtaaaccctctttttacctcttgtttctccaaaattattgcattatgagtgcacacacaagtgtacacacacacacatatacacacacaattagaccttcatttaaggagagaaacaaaatttatattttaatgaccatattgaattgccattcatcttctgtaacttttactacaacatgattcttttataatyggccaattaatagtatttattgagtatcatcactagtttctgttagttggcaaccctatgacctaggactttcagctg

SEQ ID NO: 660260 - DNA, 598 bp, Homo sapiens
gcttctcttttatgtgtgagttgtagcttttgttttagtttcatttatgtaggactaggtatctgtctcttttcactttttttttttttttttgctgggaacttggtgagtcctaaatgattttgaaaatcctrctttagatcaggaaagttttacccgctgtttgattatcgtaatttctctatatgtttagtttcgtctttttggaagtcctgctctgcgcatattgaatctcccagatcttgccttcacttaaaaaaaaatctatttttatttttgtttcttcatctagggacttctggtagaattctcaagcttgttttctgtttctgcagaacctaattttgtaattcattgttttcattgcaatttttaattcaacagaagttcttttcatttttatacaatctttactgatcttaaattgttctgtcttcaaaagtaccaacttatctcagtgccatgaatgcaatatccttgtgcatattttcaagacatgaattgttttctcttttttggtattaacttatttcagtattgttctgagtcttcaaattgggccctcatttgaactacagtgtctgttgatgtgtgttga

SEQ ID NO: 660261 - DNA, 598 bp, Homo sapiens
gcttctcttttatgtgtgagttgtagcttttgttttagtttcatttatgtaggactaggtatctgtctcttttcactttttttttttttttttgctgggaacttggtgagtcctaaatgattttgaaaatcctgctttagatcaggaaagttttacccgctgtttgattatcgtaatttctctatatgtttagtttcgtctttttggaagtcctgctctgcgcatattgaatctcccagatcttgccttcacttaaaaaaaaatctatttttatttttgtttcttcatctagggacttctggtagaattctcaagcttgttttctgtttctgcagaacctaattttgtaattcattgttttcattgcaatttttaattcaacagaagttcttttcatttttatacaatctttactgatcttaaattgttctgtcttcaaaagtaccaacttatctcagtgccatgaatgcaatatccttgtgcatattttcaagacatgaattgttttctcttttttgrtattaacttatttcagtattgttctgagtcttcaaattgggccctcatttgaactacagtgtctgttgatgtgtgttga

SEQ ID NO: 660262 - DNA, 653 bp, Homo sapiens
tttattaaaattcagggatgagaaacaccatatgtgcggaatagcaaattgtttattgatattgaagcatagggtaaactgtctgatgtcaagtggggctgcaagcaaagyaagtagcctactctttgttaatttaccagggatgtcctcagtgttccagagcaggagggtggtcttgcagagcatgtttcaaccaacctggaaggagaaagtcctattaggaggttgctattctgtaacttaggtgatatgccctgagggtttgatatgggacaattacagtgagagggaagagattggatttccaccccccacctcccagctttattaaggtataacagacaaataagaattgaacatatttacagtgtacattgtgatgttttgatatatgtatatgtcgtgacatgattaaatcaagctaattagcatatccatcacctcatatacttgtcatttttcttgctttctaactgaaactttgtcaccctttgactaaaatctcttcacccctgtcacccccatcccctagcccagtctctggcaactgccattctaatctcttctctgagttcaatttattaaaattttacatataaatgagatcacgcagtatttgtctttctgtgcctggcttatttcacttaatataa

SEQ ID NO: 660263 - DNA, 653 bp, Homo sapiens
tttattaaaattcagggatgagaaacaccatatgtgcggaatagcaaattgtttattgatattgaagcatagggtaaactgtctgatgtcaagtggggctgcaagcaaagtaagtagcctactctttgttaatttaccagggatgtcctcagtgttccagagcaggagggtggtcttgcagagcatgtttcaaccaacctggaaggagaaagtcctattaggaggttgctattctgtaacttaggtgatatgccctgagggtttgatatgggacaattacagtgagagggaagagaytggatttccaccccccacctcccagctttattaaggtataacagacaaataagaattgaacatatttacagtgtacattgtgatgttttgatatatgtatatgtcgtgacatgattaaatcaagctaattagcatatccatcacctcatatacttgtcatttttcttgctttctaactgaaactttgtcaccctttgactaaaatctcttcacccctgtcacccccatcccctagcccagtctctggcaactgccattctaatctcttctctgagttcaatttattaaaattttacatataaatgagatcacgcagtatttgtctttctgtgcctggcttatttcacttaatataa

SEQ ID NO: 660264 - DNA, 556 bp, Homo sapiens
tcagtaggttgtcttttcactctgttgattgtttcctttctgtgcagagctttttagtttgatgtaattctatcaatctgtttttgtttcttgtgttttcgaggtcatatcccaaaactcgttcagaccaatgtcaagaaacttttcccctatgttttctagggggaaagtttatagcaattttggttttatgttttacttttaagtctttaatccattttgagttgattcttgtatatggtgtgagataaaggtccagtttcattcttctgcatgtggatattcaattttcccaacaatttattcaagagattgttattttcccatggcgtgttcttgctacctttgttgaaaataaattgatcatgaatgtgtggatttattttggggctctctcttctgttcarttggactacatgtgtttgtttttaatgtgagtaccatgctgttttgattactatagctttgtggtatattttgatatcaggaagtgtgatctctccagctttttactttttgcttaatattattttggctctatagggtcttttgtagt

SEQ ID NO: 660265 - DNA, 587 bp, Homo sapiens
ttaaatcccaagttataccctctacatttagaatatcacattcttttttctcaaggatatttttctttcttttttgaaattaatattattaggataagtgtaataatagattgaaaggtttgatgttgaatgttcttttgagaagcatagactaggcagtaacctaggttcctcttttccrtcatgccctctgcctttttcctcgtgccctctgccttttctcaaaatatccttctttatttttctttagtcatgattgggagaaatgacttttaggaaatggaaggatgtttcaagacccatttactccttatccaagccaagaccaccagcaaaagagccaatgagtgtctgtttagtcatgctgtatgaagccattcttgcattgctataaagagatacctgagactgggtaatttataaaaagaaaaaagaggtttaattggctcacagttctgcaggcttcacaggaagcatggtgctgtcatctgctcagcttctagggaggactcaggaagttacaatcatagtggaaggcaaagggggagcaggcacaacacaaggcaaaagcaagagcaagcaagggg

SEQ ID NO: 660266 - DNA, 615 bp, Homo sapiens
ggattacacttcaacatgagatttgggcagggacagctgtccaaactatgtcacatgccattctaactcttaataaaatactggtgcaacaaatttcaaaactttatcaaagcaacaatggaagttacattttcaatcttgtttgctttgcttacgcatgtggttctcactataatgttatttggagttagactttgaaggtgttagaacacgaccaagacatgaacggaatctgagaccaaacaaggttgtttcatgcaaattrttgcaacaacacacttatccagttaaagccagcaataaaggcatattgaaattaatattctgacacccctagaagttaatcagagaagatgagaaccaacttatatcttatgtgagagatattcaaaattgtattttataattattttttaaaagtccatcttagatcaccagaggacatttatcctgtctcagaataaggttatataatatttgatcccagaagatgttagagcctaaaggatcaatgcattttagagaaagagtatggagggcacatagaagttacatgttttacctgagattgcacaagtagttattatcaaactaggagaaaactcttaagttgtg

SEQ ID NO: 660267 - DNA, 572 bp, Homo sapiens
ttcctccctctgtatgaactttttgtgctaagatagaagaaagaaatgttagaaggtatatctgcaaagaaaagatgatagacttgggttggctctttagctaatcatcaggctgttctgtgaaagcccccaaatgttcttaagcacctcaataccctgggsaagtattgccatgctgagcctcactggggcctcctgcattttgttagattcaggaaagctaaggatgaaaacatttatgctttttgggagatgcactaaaggcagcattgccctcagatgattcaacctcctggatcccgttatgccaaaggaagttactaaaggagggtccccatggagagatgctctataggaatatcatttgcagaaaaaccattttgcagtcctgttgaggaagcagtttcagttctcagaaacaagagccttcctaagcatatttttaataatgtgggcttttgtgaaactcatacattcttaaactaagcacttctgtgacactctatccctaatgaggcacactggggtaagcaaagaaggaaggagtggtcttcctgctgaaccttgattca

SEQ ID NO: 660268 - DNA, 502 bp, Homo sapiens
gtttgtttttcaatccacattgcttctcagatattcaaataaaacacctttatgattagtgacttgtgttctgtcttgctgccaaaatgttagatggcataaatgaaagtactaccctcccgtgtattcaatcttctttgagagagcaggcaggagagaggtgtggtgtcttttcccagaagaaaataaaatttattcctctaaaggaaaattagctttattcaagaaaatggtcttgaaaaattctcctagatcttcactttgttttagctataagagtgtttgatgaatgaagttattatatttccttttcacagggttgaaatactgcttgaagctaaataatcattataacaatttaccagttgactaatatttagtcaatatctctctactacctaatatcatatttgaagagtattttgctgttatgtattggttaaasttctaaatgaccctgagagtattaccacacatctgggaatactgaaaactggtgaaa

SEQ ID NO: 660269 - DNA, 575 bp, Homo sapiens
aaacaaaattgtgaatgtttgtaaaagaatgattcttttcccttgatgtatctattcatccaaggatcttcaagaatttacagtattaattaataatcctggttgcccttaatgattcaacttgattggtgagtataccagatggcaagaaaaattaagatctttaggtcaaaaggtcagttcaataaggccatggaggtaaaggtgattgcggtaactttagacctcacttatttgtggactgggtaaacaaacagaggggaggtaatttttcttaaaaatgaaaagacttactgaaaatatttttattttaaatggttataagaaataatttagtgtttgaatctagacttataatatcatgtacaatgtcgaaactattttggcacactacccaactcctcttcaagagccaatagaaatatgcttggtgaaccaactcaggaagctttaatgctatttttaaaatctagcttttacattgaataaaccagtttgctgttttgaaagaagtyataatctacttaaaactgtcattctctgtttctgacttgcaattagatgatatttccaaa

SEQ ID NO: 660270 - DNA, 572 bp, Homo sapiens
ttcctccctctgtatgaactttttgtgctaagatagaagaaagaaatgttagaaggtatatctgcaaagaaaagatgatagacttgggttggctctttagctaatcatcaggctgttctgtgaaagcccccaaatgttcttaagcacctcaataccctgggcaagtattgccatgctgagcctcactggggcctcctgcattttgttagattcaggaaagctaaggatgaaaacatttatgctttttgggagatgcactaaaggcagcattgccctcagatgattcaacctcctggatcccgttatgccaaaggaagttactaaaggagggtccccatggagagatgctctataggaatatcatttgcagaaaaaccattttgcagtcctgttgaggaagcartttcagttctcagaaacaagagccttcctaagcatatttttaataatgtgggcttttgtgaaactcatacattcttaaactaagcacttctgtgacactctatccctaatgaggcacactggggtaagcaaagaaggaaggagtggtcttcctgctgaaccttgattca

SEQ ID NO: 660271 - DNA, 572 bp, Homo sapiens
ttcctccctctgtatgaactttttgtgctaagatagaagaaagaaatgttagaaggtatatctgcaaagaaaagatgatagacttgggttggctctttagctaatcatcaggctgttctgtgaaagcccccaaatgttcttaagcacctcaataccctgggcaagtattgccatgctgagcctcactggggcctcctgcattttgttagattcaggaaagctaaggatgaaaacatttatgctttttgggagatgcactaaaggcagcattgccctcagatgattcaacctcctggatcccgttatgccaaaggaagttactaaaggagggtccccatggagagatgctctataggaatatcatttgcagaaaaaccattttgcagtcctgttgaggaagcagtttcagttctcagaaacaagagccttcctaagcatatttttaataatgtgggcttttgtgaaactcatacattcttaaactaagcacttctgtgacactctatccctaatgaggcacackggggtaagcaaagaaggaaggagtggtcttcctgctgaaccttgattca

SEQ ID NO: 660272 - DNA, 585 bp, Homo sapiens
atttcatccttgcttgtgcattgggactttcacttctttgatatggtttgtctgtgtccccaaccaaatctcctcttgaattgtagctcccataattcctagatgttatgggagggaccgagtgggagataattgaatcatgggggtggtttcccccatactgttctcatggtagtgaataagtctcactagatctgatggttttataaggggaaacccctttcacttggttgtcattctctcttgtctgytgccatgtaagatgtgccttttgccttccaccatgattgtgaggcctccccagccacatggaactgtgagttcattaaacctctttttctttataaattattcagtcttgggtatgtctttatcagcagtgtgaaaacagactaatacactgctatatcccccagggcctgggaaatacttgcacatagtaggtctacaaataagtatttgctgaatgaatgagtacatgtgttcatttaataaattttgtttcattctggcatttgatttggagttactgtatctatattctaaatttttacattttttcacaaagtagctgagtgttatgtt

SEQ ID NO: 660273 - DNA, 626 bp, Homo sapiens
tcccagctacttgggagacagaggcaggaggatcacttgagcctgggaggttgtggctgcagtgagctgtgtttgtgccactgcactctagcctggatgacagtcagaccctgtctcagaaaaataaaaataaaaagatagtggaataaaataacctagaattatatatacagagaaaatatcattcaaaaatgaagacaaaatagttttcattcattaaaacctgargatattcattacccatcgacctgtaccacaagaaatgttaaaggcagtccttcaaccaaatggaaaattatatcagatggaaacctggataagcacaagggaatgaagaagactgaaaatagtaactatgtgggttactatgaaattttttttgtattatttaaatctctttaagtggtaatagactgcttaaatcaagttgataacagcttattgtctatttataacatatgtagaagtcaaacgtatgacaacaaaatattgcaacggccaggaactatgtggtttttattctatgtgaggtggtataatatcatttaaagtttttttttttgaaaagaggattaaagaaaaaattagacatgtgataagataaaatatatggttttgggtttttt

SEQ ID NO: 660274 - DNA, 626 bp, Homo sapiens
tcccagctacttgggagacagaggcaggaggatcacttgagcctgggaggttgtggctgcagtgagctgtgtttgtgccactgcactctagcctggatgacagtcagaccctgtctcagaaaaataaaaataaaaagatagtggaataaaataacctagaattatatatacagagaaaatatcattcaaaaatgaagacaaaatagttttcattcattaaaacctgagratattcattacccatcgacctgtaccacaagaaatgttaaaggcagtccttcaaccaaatggaaaattatatcagatggaaacctggataagcacaagggaatgaagaagactgaaaatagtaactatgtgggttactatgaaattttttttgtattatttaaatctctttaagtggtaatagactgcttaaatcaagttgataacagcttattgtctatttataacatatgtagaagtcaaacgtatgacaacaaaatattgcaacggccaggaactatgtggtttttattctatgtgaggtggtataatatcatttaaagtttttttttttgaaaagaggattaaagaaaaaattagacatgtgataagataaaatatatggttttgggtttttt

SEQ ID NO: 660275 - DNA, 494 bp, Homo sapiens
ggggcttataggcacatttcaaataagaagggtcttgaaattattctcttaatttccatatcttttgggtggaaaatcccagtaaaacttcagacagtaaggtttacaggcaatagtggattaattcctagaaagtcagtaagagaatgaattgaagaactgtggaagagggaaatcatttctatgtatctctcacagtactcttctacctcttggccttaggtagcaagaaaaggcctgagacaacacgatttatattttactaagtgcattggttcctaagacaggcatcttgaattaagcccctcttctattctatactacctgtatsatcatgaggaaatctctttaactcactaaatatggattcttctcatgttaaaatggttatcataattaggacctattacatagagttgttgaggagattaaatgtttttataaacacagtgacattattccagtacctgataaaaactaaatacagaaaaaat

SEQ ID NO: 660276 - DNA, 646 bp, Homo sapiens
ccagtacctgataaaaactaaatacagaaaaaatagtaccattcttcctcttctccttgtctttcctcttcttcattgttttctttttttacctttatccactccattcctcttctttttctgtatttctgctacacttcttgcattctcagaaatttgtttgctttcatagacgttagataaaataattatgtgacgacagaattttcaaaattgcttaatcatagaaaaaaatactatttgttacatgccgttgtcataaaaaatatataaatattcctgtgcaatttagtaaaaagttcttgaggaaaaaagtaattatgtgattagcacacaaaattaaaccctagaggaaaagtagtaaagacaatactcatctgaaagttggacacacaaacctagggatttacatataagcctgaacaastcttaatatctataaaacggtctgggttttttgcaggcctataagtagcattggaacttcagcaaacaattgaagttgtagagcaacttagtgtaaatggcttagcattgcttggaatttcagttatacatccttctatttagaacacagcttgcaaagaaatcacaactttaaataacccttggtcttgatctattgcccactcttattctaatggct

SEQ ID NO: 660277 - DNA, 599 bp, Homo sapiens
atttttcagatcttccagacagaaaatcaaaaaagaaacatctgacttaatctgcactatggaacaaatgaacctaatcgctatatacagaattttttttttatccaatgactgtagagtacacattcttctcttaagcaaatgtattattctaaaaaataaaccatgtgctaggtcacaagatgagtcttaaaacattcaaaacaattgaaataatatcaagaatcttctctgaccacagtggaataaaactagaaatcaataataaaagaaatgttagaaactataaaaacacatgaaaattaaataatgtgctcctgaatgatcagtgagtcaataaagaaattaaaaagaaaattaaaaactttcttgaaataaatgataatggaaacacaacatactaaaatctctaggatagagtgaaagcagtactaagagggaaatgtatagctttaaatgcctaaaccaaaaaagaagaaaaacataaatsaaataatataatgatgcatctaaaagaactagaaaaacaagagcagaccaagcccaaaatttggagaagaaaataaataacagacatcagagcagaaataaataaaatt

SEQ ID NO: 660278 - DNA, 616 bp, Homo sapiens
ttatttttacagtgagctcaacagtcatgattacagttagtagttatttctgtgttgatttatggataatttttattttctttattaaatttactaccattattcatctttataaaatgaacacatgtaattagaaaaatatttgaaatattactcaaacaaaaatacttatttgttacactttttactgcagtgagatcaactgattttagcttatatatatgagtgagaacatgtggtattttaactttccattcctggcttaattcacttaacataccatcctccagttccatctacgttgccacaaatgacagaattttattctttaataagactgaataatattttatggtgtatataagtcgtattttctttattcatttatctgtttttggacagctatgttgatcccatatcttggctactgtgaatagtgctgcaataaacacgaggttgcaggtatctcttcaatatactgatttattctcctttggataaatacccagaagtaagattgytgaatcatacagtagttctattaatatttttacttttttgaagaacctccattctgttctccatagttgtactagcttacattatcatcagaagt

SEQ ID NO: 660279 - DNA, 572 bp, Homo sapiens
atctccccaacagaaaatcagcaaagaaacatacaacttaatctgcactatgtaacaaatggacctaatagatacattcagaacattttatccaatggctgcagaatacacattcttcccctcaacacataaattattctcaaggatagaacatatgttaggtcaaaaaacaagtcttacaacattcaaaacaattgaaataatatcaaacatcttctttgatcataaataaaactagaaattcataacaagaggaattttggaaactatacaaacacatggatactaaacaatatgctcctgaatgatcagtgggtcaatgaagaaagtcagaaggaaatttaaaaacttcttgaaacaaatgataatggaaacacaacatatcaaaatctatgggatacagggaaagaagtactaagacagaaagttatagctatcagggcctacatcaaaaaagtatacatatgtaacaaacatkcacgttgtgcacatgtaccctaaaacttaaagtataataataataataataataaagaaaaaaagaagcaaaatttgaaacacataaacgaatg

SEQ ID NO: 660280 - DNA, 577 bp, Homo sapiens
atctaagaaaactttaagtaatatagtcttttgactttcttttaactaaccttactgtgtgaccccacgagaagcagcctgctataagagatcaaagttcaaaatgtcaacagtgacccacagagagctctgttgcccagtgcagaacattactaagtactcttaatacatcacagctacgggtattaatatgagcagtccttgtaaatttgaaactggctcaatgatcccattgaactgaagtttatggtttcttttgaataaacatacaaatttaccctcccagtcttaaaattaaaaatattacatttgtcttgtctgagttcctttctcaggaaaccaaccctcatgccccctacatagtatcaaggaagtgaaacttaccagatcacagcatccggacaatgagacaccataccccccactcatcgtgattgcctatccaaccacctgcttcctgttgaccaactcctcttccttagccctctctaattcctgtttacccacatatagttttatycctcccccactacataaactcccagttttagtagatcagggaaatggatttgagact

SEQ ID NO: 660281 - DNA, 607 bp, Homo sapiens
ctcctaattggctttctgtgtggaaagcaggagaacttagaccaaacccctggtgttttggtaacaaactgatggatattgtttacaaaatattaagatgcatactacatacttcgtgttcacaatcttgtttaaaatttacaattactagccaggtgtagtggctcacacctgtaatctcagcactttgggaggccgaggcaggtggataacctgaggataggagttcaagaccagcctggccaacatggcaaaactccgtctctactaaaaatacaaaaaaacttacccaggcgtggtggcacacgcttgtagtcccagctactcgggaggctgaggcatgagaatcacttgaaccagggagacagaggctgcagtcagccaagattgcgccaytgcattccagcctgggcaacagagtgagaccctgtctcaaaaacaacaacaacaacaaaaagcttacaattactatatggagtaaccactatattatcattttacaaaagaagaaattcaaggcttagagaagtctagtaatgttctcaaggccacacaggaagtaaatagcctagccagaattagaatcctgttatactccaagacctgt

SEQ ID NO: 660282 - DNA, 614 bp, Homo sapiens
tatttcttcatttatgtccagtttactgatgagctcttcaaaggcattattcatttctcttcatattttttatttctagaattttctttttattcattcttaggattttatttctctgcttacattacccattgttttttgcatgttgtttacttttttatcaaaaccttaaacatattaattatggtcatcttaaattctctaataattccaatactggtgtcatatctaattttggttctgatttttgcttcacctctttaggtgattttgtttatttatttatttatttatttttctttaaacaaggcttgtaacttttctgttgaacaataaacatgatttatctggcgataggaactgacataaatatgcctttagtgtgaggatttattttaatctgggtgggacttgggctacatttaatgtttgctgtagttgtaggtgttatagactttaaatttatttagttttcttgtctcccccgttgcctttgggygcccctttttagatatagtccatgtcctgcagctctgccagctgcaatccaatgttatactcgaaccctgttggtggagtggtaagatatgagagagaggaagctctttatagcc

SEQ ID NO: 660283 - DNA, 563 bp, Homo sapiens
tttcttgaattcattttgtgtaattttatactttttctacaataattctactgatagtgcccaacacaaaggcaatgaagaaacttaaaagcagccctagaaaaaagactttcaaaagaatgacaattagactkcttgataatggaatccaaataatattgaaaattttcttagaaatgctgagatgatataagtgaaatgggatgaaaatattgaatgggatttccagaaaatttccctttcaagaatgttttcaaaatgaagaaattttcagattaaaaaagtcttccaaaattcatcaaaagcaacaacaaaaatttcattaaatgaaattgtaacagatgttttagagaactaaaggcaattatcctagatgatagtatgagatgaaagaaagaatagtaataaaaagaattggtaaaaatatatataaatataagtgatgtgccagttccaaacctaggcatcaaaaggcctgtgtgctcttgttcttttgttggaactcacctccaggtgaacatatcttagtctggcctgctggaagatggaagaccaccgaaaga

SEQ ID NO: 660284 - DNA, 590 bp, Homo sapiens
tgttccatgtgtgtttgagcagaatgtgcattctgcttctattgcatagaattttctgtatatrtctgttaggtctatttggtctaacttgtagtttaagtctactgtcttttattgattttctgtctggatgatctttccattgttgaaactgggatatcaaatcctctactattatagtactatagtgtatctctcttttcagatctattaatatttgttttatatatatatttagatattcttatgttgagtacaaatattaacaatcaattcttgatgagttgatgtttttattattatatgatgaccttctttgtctcattttatagtttctgacttaaaaatctattttatctgacataagtatagtttcttctgctctctttggttttccatttgaatggaatgtctttatccattcttttactttcaatctatgtgcatccttaaaggtgaagtgaatctcttacaggcagcatatagtttgaacttattattttatccattcagccactatgtctcttgattaaagaattttatctgcttaaattcaaggtaactattgataggtaaggacttactattgt

SEQ ID NO: 660285 - DNA, 444 bp, Homo sapiens
caatgatgtaatgaattgtactatgtactacccaaattcatacactgaagttttcacccctagtgcctcagattgtgactatatttagaaatagagctattcaaaggcaactagagtcaaatgaggtattaggatgggccttaatccaatatgactattgttcttataagaaagggaaattaggactcagatgctttcacaggaacgactatgtgaagacacagggagaaaatggtaatctacaaactaaggasagaggtccatagaagaaaccaaccctgctgacaccttcatcttaaatttctggcctccagaattgtaaggaaacacattttcgttgtttaagccacttagtcttggggtactttgttgtggcagccctagcaaactattacagatggcaaccctccactgctgtatttgccaggtaagtggcatgttatt

SEQ ID NO: 660286 - DNA, 502 bp, Homo sapiens
aacacctattaagcatgctaaactataacacagttcataaaactcatttctgagaagtggttaacttacccatttagtcatgcagatttaaagtaatgggttaaaggcaacctatagaataggasgaaatatttgcaaaccatatagccaataaggagttaatatcaaaatatatgatattttgatactactactcccacaacttagtagtaaaaacacagatgaccagaataagaatatggacagttagcctgaatagacatttatctaaagaagacatggccggtgtggtccatgtaattccagccctttgggaggccaaggcaggtggattacctgaggtcacgagttctagaccagcctggccaacatggcgaaaccccatctctactaaaaatacaaaatattagctgggtatagtggtgggcatctgtagtcccagctactcgggaggctgaggcaggagaatcgtttgaacctgggaggcagaggtggtagtgag

SEQ ID NO: 660287 - DNA, 611 bp, Homo sapiens
gtggtgcatataaacaatgaagtacaatacagctttaraaaaggaagaaaatcctgtcatttgtgacatcatggatgaacctgggagacattaggctaactgaagtaagccagacacagaaagacagaaactgcacggtcttacttacatgtggaatctgaaaaagtcaaactcatagaagcagagagtagaggggtggttaaccaggggatgaggggtaaggaaatggggaaatgttgattaaagggtacaaactttacagggtttgtacatccattacagggtacatccattacaggatgaaaaagttctagagacctaatgtaaaacttggtgactattgttaataataatgtattgaatatttgacatttgctaaaagggtagatcttgagtgtttgcaacacaaagaaggtaattatttgaagtaattgatatgttcattacttgattaaggtaatcatttcacaatgtatacatatatcaaaacatcaagttgtatgtctgggtgtggtgactcatgcctgtaatcccagcactttggaaggctgaggtaggtggatcacgaggtcaggaattctgaacatggtgaaagtccgtcctactaaaaa

SEQ ID NO: 660288 - DNA, 257 bp, Homo sapiens
cttcaacttaatagcaaaaaatcaactaacctaattttttaaatgggcaaaggatttcagtagacatttctygaaagaacacataaaaatggtatatattatatataccatttatatatctatatctatatatataccatatatatatttgatgcccaacatcattaatcatcagaaaactaaaaatcaaaccatactgagctataatcccacacctgttaagttggctatgatcaataaaacaaaacaacaaaaga

SEQ ID NO: 660289 - DNA, 499 bp, Homo sapiens
tcatttttcttaccacataaactttaatctagatagaaaagcatgacagcaatttaaggtgaaaaaaatctatataaggtaaatatagcacttgttactagaatgttaamttttctgaattacattcaaaagagatagctttgaatgttgttgcttatcatttaaggaaactaattattcaatccaagctacttaaaatcacttcacataattaactgtcagtgtctgatatcattagttaacactgttaaatacaattatatgcctgacaacagaatccccacatttccccctaaggcctgttcttccatttttgtacctgtgggctcttctattatattctgggatgaaaactaacaaggtgtttagtgtgatcacagcagttttcactccgtgattacagagagctcaggtgcttatgaagtttacactgagctgataatacaaaattatcagacagaatatcaaaggcaggcttttagggaactgtttattctat

SEQ ID NO: 660290 - DNA, 498 bp, Homo sapiens
ggtgtgtggagctggcgttgttttgtttgtttgcagctagcctgtttcagggttatcattttgacacagagaaaattctttttctgtcacttctaaggaggatcctacagaggcaaatatgccccaaaatgcacaagaccggaaacaacttgcaatatgttcagaagccataaagcatttgttgaaaagaaggttgwtgggacttgtttgtcaaatactgcacatcatgctctcaatttcctactttttaagagtaaaatatatgattctatcacataaaatctatgattctatttctgagatgcagacatgtgtttagacaataatctgtaggatcaagtaacatttgagatcaaatgaaagtatataagcagtttatattatagtaggacctttaagacatggcacaggatctatatctactatctattacagtagtcactagacatatggagctatttaagcttaaatttaataaaaacacaaagaaatgtaaaa

SEQ ID NO: 660291 - DNA, 498 bp, Homo sapiens
ggtgtgtggagctggcgttgttttgtttgtttgcagctagcctgtttcagggttatcattttgacacagagaaaattctttttctgtcacttctaaggaggatcctacagaggcaaatatgccccaaaatgcacaagaccggaaacaacttgcaatatgttcagaagccataaagcatttgttgaaaagaaggttgttgggacttgtttgtcaaatactgcacatcatgctctcaatttcctactttttaagagtaaaatatatgattctatcacataaaatctatgattctatttctgagatgcagacatgtgtttagamaataatctgtaggatcaagtaacatttgagatcaaatgaaagtatataagcagtttatattatagtaggacctttaagacatggcacaggatctatatctactatctattacagtagtcactagacatatggagctatttaagcttaaatttaataaaaacacaaagaaatgtaaaa

SEQ ID NO: 660292 - DNA, 537 bp, Homo sapiens
gtaaggtttatttttagcagtatgcagaatacatcagggttataggggcaactatttgaaatttcccatgcaggatgtgctgctgggttttattactacaaaagcctctcctgggcataaaaatgtgaaagaggttataggtgagaagaaaacttaaaatttaaaatgtgaagccattaactggatttaaaagcaaagtaaaaggcagaatcaacaatgtctctaaagtctcagcctgagtaatgatggtggcatgggatagttgtgccatcaagggaaagaggaattttaactaaatttatttgaatgagtctaaggatggtggaagtaaggagattaaagagctaaatattaaaaaggcttmtgatacttatttcatttggtttgggactgattgcttaaatgttaagtaaggagcaggaataattcttagtaatagttgctttgaaatgaaccagataccaaagttaagaaattgagtgctatagaaatgtccaagtacaatgaaattacaaaacaaggtgttatcccacaaag

SEQ ID NO: 660293 - DNA, 519 bp, Homo sapiens
tatgtatttttaagtagtttatttgaagtgtttctctctctctcttttttttatataggcacttacagatacaaactttcaaattagtactgctttgctatatcccataggctttgttaygttgtgtttccattttcacttgttttaagaagtttacaattttcttctaaatttctttactgacccactgttcattcaggatattgtttcatttccatgtgtttgtgtagtttccataactccttttattattgatttctagttttattccactgtgttcagagaagatgcatgatattatttcaattattttgaatgttttacaatttgttttgtgacctgacatattgtctctccttgagaattatcaatgtgctaatataacaatgtgtattctgcagcattggcatggaatgttttgtaaatatctgctaggtcaatttggtttatagtgctgcatatgtctgaggttttttgttgattctttgcctggaagatctgtacaatgctgaaattgtg

SEQ ID NO: 660294 - DNA, 519 bp, Homo sapiens
tatgtatttttaagtagtttatttgaagtgtttctctctctctcttttttttatataggcacttacagatacaaactttcaaattagtactgctttgctatatcccataggctttgttatgttgtgtttccattttcacttgttttaagaagtttacaattttcttctaaatttctttactgacccactgttcattcaggatattgtttcatttccatgtgtttgtgtagtttccataactccttttattattgatttctagttttattccactgtgktcagagaagatgcatgatattatttcaattattttgaatgttttacaatttgttttgtgacctgacatattgtctctccttgagaattatcaatgtgctaatataacaatgtgtattctgcagcattggcatggaatgttttgtaaatatctgctaggtcaatttggtttatagtgctgcatatgtctgaggttttttgttgattctttgcctggaagatctgtacaatgctgaaattgtg

SEQ ID NO: 660295 - DNA, 449 bp, Homo sapiens
atctcattatctcaatggatagttgtagctgtgcatatgcccttattatctctactggggctggtaatgatatacatagtctcattttctgtgctgtggaattgaagagttgcatttataattgagcgttctgcactgtaagtaatataaggtgggtggataactggttgaaagtgtgtctagtatttttttgactttccatttttcatatacatttgatacttgttcctcaaatatctacaattagaaaattctgataagagtagacaaataagaaaataaaatgaataaaaatatttaagaaaatacgagttaagatattgacaacccatcaccctatggatgacattccactgacaaacccccccgactccaccacccaagattgtcattcaggtgaaaaawaaaaaagaaagaaagagagaaaaagatagagaagattaaaaaaa

SEQ ID NO: 660296 - DNA, 610 bp, Homo sapiens
cccctgctcatatgaacagaacatccagttgctttctctgtgaactcctcatcccatttttattattataaaaatccaaagcatctaatcctctttacaaattcatggcaaagacagaactggagaacaaagcatttttagttgctatttcttttctcacaggagctttgctgtgaaaaattatttcaaacaattcagtgcatccctccccactactaagtttttggaattgttggcctgaggctgtatgcaggttgtaaaatttctgtctttaatttaaccaagaatggctatctaaatgttcccctaagttaaaaggtctttagtttactttgaaattgaaatatcactcactatttgactggaacgaggccaaaaggaggtcaaaaattcagtcacaagcaatacaagactcagtcctacttcccttcttttcatccacttaacctactcacatacaactgcttkggtgtgaagtttggtcctacttgattccaattatatccaagataaattttcatttcaaagctccaggactttattcctgatcagcccacccatcagagagtttctaataatgtcaaatctaattaaggaagttgtttaactc

SEQ ID NO: 660297 - DNA, 589 bp, Homo sapiens
atttgtcatctgtatatcttcttggtgaaatgtctgttaaagtctttggctcattttgtaatcaggttgttttattgttgaattttaataattatttgtatattttgaataacaatcttttatcaaatatcttgcgaatattttctcctactctgtggcttgtctttacattctcttgacagagtctttcacagagcagaattttgtaattttaatgaagtccagttttaattttttttatatatattgtacttcggtatgttttgaaaagtcatcaccaaatacaaacacragttctagatttttcttccaggaattttatggctttgcatattacatttagatttgtgatccagcttgggttaatttttgtgaagggtctaaggtctgcattgagatttattttccttgcatatggatgtccagatgttccagcaccagttgttgaaaagtcttccttgtctttattgtattgcctttgcttttttgtcaaagattggttaactatattcatgtggatctatttctggtgtttctattctgtttcattaatcttttggtctatcctttctccaatagcccactgatt

SEQ ID NO: 660298 - DNA, 589 bp, Homo sapiens
atttgtcatctgtatatcttcttggtgaaatgtctgttaaagtctttggctcattttgtaatcaggttgttttattgttgaattttaataattatttgtatattttgaataacaatcttttatcaaatatcttgcgaatattttctcctactctgtggcttgtctttacattctcttgacagagtctttcacagagcagaattttgtaattttaatgaagtccagttttaattttttttatatatattgtacttcggtatgttttgaaaagtcatcaccaaatacaaacacgagttctagatttttcttccaggaattttatggctttgcatattacatttagatttgtgatccagcttgggttaatttttgtgaagggtctaaggtctgcattgagatttattttccttgcatatggatgtccagatgttccagcaccagttgttgaaaagtcttccttgtctttattgtattgcctttgcttttttgtcaaagattggttaactatattcatgtggatctatttctggtgtttctattctgtttcattaatcttttgrtctatcctttctccaatagcccactgatt

SEQ ID NO: 660299 - DNA, 512 bp, Homo sapiens
tagttggtttctgaatgttgaccgagccttgcatacctggtataaataccacacagtagagctgtataattcttttcacatattgttgaatttgagttgctaatattttgtttaagatttttgatctgtgttcataagagatattgatctgtgtttttcttataatgcctttgtctggttttgatattagagtaattttggcctcataaaatgagtttggaagtgttttctctatttctatcttctaaaggasattatagaaattggtataatttcttcaataaatatttggtagaattcaccagtgaacccatctaggcctgatgcattctgttttggaaaagtattagttatagattcaatttttaaaaagacatggaccttcaaatagtttatttcttcttgtgtgaattttggcagattttgtgtctttcaaagcatttgtctcattgacctaattattgaatttgtgcagatagagatgttaatagtgttccttgattatcctttta

SEQ ID NO: 660300 - DNA, 535 bp, Homo sapiens
aatactgagaatttatgtcatatgagcaaaacaatatattttgtattaagtaaaaatatatcaaactctgcctctaagaaacagttagctttcttgtgtaggtggaatatttacataaaattgactaattctaaaaatataaagtaatgcaagcaacaaaattaatcacaaaactataaacaaaagattgtttagggaaaaataatccatctaatgggatcaatgagtaaatctaaactttacagaaatttttaaaataaaaaataatgagaacaaamcatcaagtttcatagaatttttccaacataacattctcaaagaaaaacatataatatttaattttttattaaataaaaaactatgacaatacattaactaagttttaaattaaaagtataaatccaattgtaaattgcagttttcagggatataatatgaaaaaaacctgacaaagcttacaggattttccccaaaactatactcagagaaaaatatttttcaatagtgtttattaataaacaacaataatcataac

SEQ ID NO: 660301 - DNA, 637 bp, Homo sapiens
cctacaataagtacagtagtacttccttatctaaaatttccatttctgtagttttagtaacaggcagtcaatggcagtccagaaatattattcatacatgaaaagttgcagaagtaaataacttataattttttaattgtgcaccgttcttagtaatgtgatgaaatctcatgccarcctgcttcccctgcacaggatatgagtcgtccctttgtccaaagtatccatgccatatatgccacctgcatgttagtcacttatttgccacctgggttatcagattaaaaaaaatagtatatataggctttggcttcagtactatacatggtttcaggaatccactgagggtcttggaatgggtccctaacaggtaaggggggacaaatgttatcaaaagttcatgggtgagtcagaagaaacatatattttattaccataatcttcatgaatagctatcagttaaaaatctcaaattaaaaacaaaaaattgttcactcatacagcatgttcccgctttagttcccataccattttaaataacaaaacaaatcctgtaactatatattataataaaatatacaaataaagccattttaattttggtgtgatttttgttagtcctacagtttttacatta

SEQ ID NO: 660302 - DNA, 524 bp, Homo sapiens
atccaattacctcccaccaggcctctcttccaatttgacatgagatttgggcagggacacaaatccaacccatatcagaatgctttataatttgtcaaaaaccaaactgagaattattcggtggactaggtagtggaaagcaaggtaagtctcttcagggtaccatcaaktaatgtagatgaataagtttcagccttcctcagtcttttcactctagctttgctcaaagttcaaattcccagcaaattaagtctgtttgttgcagctcgggtctcatgcctattccttagctgtaagagcatggactctctcactggatttaatgggataaagggtaattcccacacaaagattcagagtgctgttttcagaaagctaaacagataccaggcagcaaagcaacagatgactattttactaggagagattcggatgagacagacttctcagtttcttccttccttcagacatttttcatccttaataatccttaacataatgttgctgtcattacctctcaggca

SEQ ID NO: 660303 - DNA, 640 bp, Homo sapiens
cagtttaacttcaacatagtcagttgaatcactaaactcaacttctttccaaaagcgagtaacatttaataaatttgagcaaaacatattctgaaaggaagaaaattgaaagccagagacacaaaaatataagacatattaaagatatgtatcagtatactaacaagaggaaaataatcttacccttgttttgcagcaagctttagtcacgttttataatgtagaacagagtaagctytaacattttatctctaatttttgtaaaaatttgttttatattatatactttaaaacttctttaaaggttaactatatcacttgtatctcaaaattcaatttcccatctgaatttcctaaacaatccaaacggatatttcttcttcctcatacaagtgtttggcagaagaaattcctacaatattatgaacagagttcttaaactacattccaaggcaaaatagatctctctggggtatgtgatgttctaggatctcagaaatttacactttcaagaagttccaccttatagtatccatttttcagtctgttcctaatgccaatatacaacacacaggcaatttataatgcagtaaacagacactcaggttggctttttttgctgagcagtttaaacaaggcc

SEQ ID NO: 660304 - DNA, 511 bp, Homo sapiens
agggatattaccaaatttaaagtragactttccacaactgaaaaaagggtcaatttaccaggaagacataacagtcttaaatgtgtatgtgcctatgtactgagctttggaacatatggaataaaattaagcaaaatgggaaatccaaagtgatgtttgaatattttaatttgtctctcttgataattcatagatgatttgggaaacaaattaagtaacgacatagaaaatgttagcaacattattaaccaactagatccaattgttatttacaacaattatttacaacagaacagttgtaaatgtaattaaacatttatagaaaagcaacttctagtttctattattttaataaacaaagtagtcatggatagcttttaatcaaattgcagtatcagcatgtaaatattatttttaatgaatattttcatgttctatattttaggaattattttttatgaaggcagtgttactcaatgatgttccagtctctcactaagttgaagtacag

SEQ ID NO: 660305 - DNA, 511 bp, Homo sapiens
agggatattaccaaatttaaagtgagactttccacaactgaaaaaagggtcaatttaccaggaagacataacagtcttaaatgtgtatgtgcctatgtactgagctttggaacatatggaataaaattaagcaaaatgggaaatccaaagtgatgtttgaatattttaatttgtctctcttgataattcatagatgatttgggaaacaaattaagtaacgacatagaaaatgttagcaacattattaaccaactagatccaattgttatttacaacaattatttacaacagaacagttgtaaatgtaattaaacatttatagaaaagcaacttctagtttctattattttaataaacaaagtagtcatggatagcttttaatcaaattgcagtatcagcatgtaaatattatttttaatgaatattttcatgttctatattttaggaattattttttatgaaggcagtgttactcartgatgttccagtctctcactaagttgaagtacag

SEQ ID NO: 660306 - DNA, 561 bp, Homo sapiens
tcaccccttcaagtatttgctcaaatacgtctttcttaatgagatctgacctgaacatacaagttgcaattgagatctgtcctcctccatgcctagcactgaattcttctttccttgtttgattctttccatagcatttatcatcactcaacacackacatatggttcttattttcaatgcttatcattatctatgttccccccaaaatgagaactctacatgaaacaatattttatgcttttatcactgatgagtcccaagatcctgcctggtgctctaataatatttgttgaatgtttttgcctttcaattactctcattcaccatacttctaccaccacaaaggcactgaacttccactagttagctcccactttttaagctctttttcctgaaacattttgatgaagagtatcttggcggtaccttgtctaaactcttggatgacatatgtatctcactaaagattaaagccttttctgtttctaaaattctcaatccttataatgacattaagatctccagtcattgcctcactacatttatttagcaaatttaaa

SEQ ID NO: 660307 - DNA, 404 bp, Homo sapiens
ataagttttgtgtgacatttgttgagaaacttcaagctgatgttgcacttctctcttaagctcagggaattttttttctgcttttttcttttatcactaatttccatttatcttatttttcttcttccactgcatttcttaaagcaacaaatatgagactactgtaaaaaacagtgatctataataaggtaggtattttaatacaatgattaagaatgtggctctgcagtcagactaaaatacttgaaactagccccaccatattctagcaatggtgactttargcaagttcctcaagctccctgtattacttttcttatttgtaaagtgttaataacttaaaaacagcacctacttacagggttattatgaagactaatttattaaatataagatggcagaaa

SEQ ID NO: 660308 - DNA, 610 bp, Homo sapiens
acatagccatttttaaaaagaaccaaactgaacttctggaaatataaaaatttgctacaggaatttcagaatgcaactggaagcattaataacagagtagaccaagctgaagaaagtatctcagagcttgaatactgctcctttgaatcaatgcaggcagacaaaaatataagagaatttttaaaaataaacaaaacctctgagaaatatgagattatgtaaagaggccacacttaggacttattggcattcctgaaacagagagagagcaagcaacttggaaaacatatttgaggatattccccatgaaaaattcctgaacatggctagaaaggtcaatatgcaatttcaagaaattcagaatatccctgaaagatactatattcctaagacacatagtcatcagattctccaaagtcaacataaaagaaaaaatcttaatggcaactagagagaaaggtaaggtcatgtacaaagygaaccccatcaagctaacagcaggtctttcagcaaaagccctaaaacccagaacagatcagagcctgtatttgggatccttaaagaaaagaaattccaaccaaaaatttcatatctcaccaacctaagcttc

SEQ ID NO: 660309 - DNA, 570 bp, Homo sapiens
agggactcctaactcattccataaggccagcattattctgacgtcaaaacctggcagagacacaagaaaagaaaaaaagaaaaagaaaagtttaggccaagatcactaatgatatatgcaaaaatcctcaacaaaatactagcaaatctaatctagtaacacattaaaaagctaatccaccatgatcaagtagtctttattactgacatgcaaagttaattcaacatatggaaattaataaatgtgattcatcacataaacaaaactaaaaacaaatgccatgtgatcatctcaatagacacagaaaagggttttgataaaattcagcattccttcatattaaaaaccctgcacaaactaggtgtcaaaggaacatacctcaaaataataagagccatctatgacaaaaccacagctcatgggtaggaagaatcaatatcgtgaaaatggccataytgcccatgataacttatagattcaatgccatccccatcaagctaccaatgactttcttcacagaattggaaaaaaactactttaaagttcatatagaaccaaaaaagagccctc

SEQ ID NO: 660310 - DNA, 553 bp, Homo sapiens
tcaagatcttgacttttgatttaatacttacaatattatactcattgagctaagatatgtttaaatttatttttatatatttatatatggatatatatagattttttacaatatttccagcccatatcaaacagaaatatagccaaattgaggtgttgatatctccttttgtctacagagtatgccagctggtttgctgaaggctcagctggtaattgtgcataagagaccgctgctcttaagacatcacgatgcaaaagtttcacatattcaggtaagtaatctccattaacacaataaaagttaaatggacacattgatatgcaraagtgaaacaattcaaataaatataatagaatggcttaggtttaggcttaagcttaatgcaacatctctaaatgaacaaatggaacagttttcaaaacagaaattttccatgagggaatggatcatatactgcagtgcagaggatttgattagatactcaacagcaatgttttttattaataatatttagattgatgctgagcaggagtaattaaaaaacacgatg

SEQ ID NO: 660311 - DNA, 504 bp, Homo sapiens
tgaaaactgttcttagagttatttctaaacagaactaacagcagaatctgaatcatcagaatcgtctactttggaaaaattggatgcatcaagtgactcttcggccaacaactgtttgagaatgatgttaacatcaagcataggaatgctacattttctagggtttgacattttcagtgatcaagaattactatattttgtaaatgaaaataccactactaaaaactgaatgctgtaagtagaatgatgtcttttgtttccaaagtctatatactagtgtaatgcaaaaataattttaaaaatgagatattttgtggcaaagttatctgagggtaaatgwttcagctgccagcactggcagcaagtattcttggggcaaatgggaaaagagttaaaattcacatggaactaaaaaaaagagcctaaatagtcaatgcaatcctaagtaaaaagaacaaacctggaggcatcattctacctgacttcaaactatgctacagggct

SEQ ID NO: 660312 - DNA, 562 bp, Homo sapiens
tcaacttaggctgaataggacagagatgttcattataaaaagaggtctctaggccctcatgttttcactgccaacatgggctatttcatatggaaaaagagtaactcaacggacaaagtcaagatagcttgggcactgctgctaggaagcaagaggttccaatcaagtaagtggtgacatgtgcatgctggattccagaattgctgtggatkagtgactatcagcctcctcttccatgctcctttttgaacaggagggtatactgtagatatcttatgtgtttaaaaaacattatgtgttgagtctataagggttaaatagcatatcttgttttacatagttctttagatcaagaggaactacttgaagagcagcactcaacaaatctgcacatcgacctggtttaaatgctaagatcctgcccttgtagattcgatgccataatgatgagactttcacaaggtcaagggagaaggtgagtatattttatttaagagagggatgtaaattgccctggtaagggagtatgctataccttattgcattttccaaaaataaccac

SEQ ID NO: 660313 - DNA, 552 bp, Homo sapiens
tgtgtttaaaaaacattatgtgttgagtctataagggttaaatagcatatcttgttttacatagttctttagatcaagaggaactacttgaagagcagcactcaacaaatctgcacatcgacctggtttaaatgctaagatcctgcccttgtagattygatgccataatgatgagactttcacaaggtcaagggagaaggtgagtatattttatttaagagagggatgtaaattgccctggtaagggagtatgctataccttattgcattttccaaaaataaccacaataatatttcccatcccacatgcttttctacaatgtggtcttcccaccctaccaaaaaggcagagtctatttctccacacctttgaatgtggccaagactcataactgccttggctaatagaatatggccaaagagatactgtgtcagttctaacaaatctcaatttatctgctgtctcctacttctttttgttaaaatattcttcagacattctcctttggaactcagctgcctgctgagaagtcctagctacacaaagaggcc

SEQ ID NO: 660314 - DNA, 640 bp, Homo sapiens
gccatgtgttggccacatggagcatctgacttccagccaatagccagcatcaaatgtaaaccatctgagtgagccatcttggacatttagcctggtcaagcggtagactcagccccagctaatttctgactgccaccatatgagatactccaaaagagaaccacctagctgagtgcagtcaaccaacaaaactgtgaaagatgataactattaatgtgttttaagttagtaarttatgaggtagtttgtcacacaaaataaatagaagactgaattacaataagaagagagagattgagaatggtattgaatttttaagccctttgatagctcttccaattgggaataaaattcagtgtcccatcagttataatattgatattcaataattctttactatgtgtcagtctatgttccaattgcttgcatgaattatcctatttattctacagagcaacccataaagtattatcattatgttgtttttgttattcctctctcacagacaagtaaactgaggcctagtaaatttaaatatcatacccaaagttgaacacctcttaactagcatcagatcaaggatacatattcaggtttgtctgataccaaagcgtatgctttttactactatataacgtga

SEQ ID NO: 660315 - DNA, 589 bp, Homo sapiens
catttgatgtcattttatgaacaaattagtaatttaggctaaagaaacctagctgttttgggttctgaattatactggaaacatcattcatagtatgtaatacactgacataagtgaattgaattttaaactaggatcattttaaaaattatatttgaattaccatatctctaaactaaattcataggaaaatgaaactgaaatgtagataaggtaatatataacagcaggaaaaatactgccttataatacaattattccacatctttatgattatttcatttttagaaatatattgtgtgcattggattatgtatactatctatatggataaattttcaaatcatgaataaagcttaagacatttgttacaataktaaacatcaacattttgggatgctactataattctattggtttgtgtttgattctagcactatttttggcttccatttacttgtgaaatctttagaatcagcaccgctaattcattctggtcagtttccagctttcacagtagcagcatgaatagaatttgctacagattcagttatggtgtcacaatgatttattttcctttttaacataa

SEQ ID NO: 660316 - DNA, 600 bp, Homo sapiens
cagtaaacttcaaaacacctctgatgatttagattactagcatttcaaaccaaagtcacttagattttacatgcaatagcgataataacacttcagcaaaatcagcaatagggaagtcttcaaatatttaataaatttgtgttcataaatgacagttaattgttatagcacataccaaaaaagtgtgtttaaagcacaaaaccaaacatgtttttgcatacatatttataatatttgtggaagactttaaaacattcagtagatacccttgaacattttcacctaaagttcwatttaagattccattcaaatgttagcagatgcatgccccaaattatctgctgcaaaaattaaattgctacagcatattcagtactgcttagatattctagaactaaaactgattgagatagaaatgcttacacatttaaactacaataaaaatcattaaaatgaagcatggtagactttcagtttcaaaatataaagaacttggaagtagtcattctcatccttacaaaaacaacagaaaacctggacaaattgaaattcagtgacatttcttggacccattaaagaactgaggtctcagagcaaatc

SEQ ID NO: 660317 - DNA, 467 bp, Homo sapiens
atcaagtaggagtttcggatgggagataatttccatagttaccacaggctgagaaatagcaattgggccaagggctacagttgtcctaatagttaatatttcttgctcccgaggaaagtattatagatgagatgttctgagtaaaacagrtaagatgaaacatatgaccactctccaagaggctagcctttgtgcattcctgtagttactgccaaataaacatttttgtggactattattagcctttaccatttgatgcaagtctccttacacacgaagttgcaagagtgaatttggaacaagcctaattgcccatcaattatcaatagacaggaattcaaggactcttttgccacagtctggataggaatagctgatcataaggcttctaaaaccatagcacttccaaacctgtaaacatgggtgttagaaagagatagtccattacaaggttcttgtgtttgtcg

SEQ ID NO: 660318 - DNA, 611 bp, Homo sapiens
agtgcacgtagcaccaattatggttcactgtagcctcagcctcccaagtagctgggcagggactacaggcacacgccactttgcccagctaatttttgtatttttagtggagaatgggttttgccatattgcccaggctggttttgaactcctggactcaagcaatctggctcccaaagtgttgtgagccactccgcctggccttaagaatctcaccattttaaaagcttttgrtatatactgccaaagaatagaaagattgtactggttcttgctccttttttcctcccatgcctaagtttttaaaaaaaatcagatatagttgtaattatatattatgtacaattttacattcttctttggcttaacaaaattattttcgcatgtttgtcatactatgtaacccttttaagagatgcataataattttttttggatataattatagtttgcttaaacttttgtttattgttggaatttagtcttgccatttttcacacataatttttatgtattaaagcaggccttatagtagtagtgatctgagctttgaaagctggctttgaattccctgcacattattatatatattacataatatatattatgta

SEQ ID NO: 660319 - DNA, 525 bp, Homo sapiens
caggaaatgccaaaggttttagtaactctgtgaggaaccaggggcgaagaccatatatgtatttcttacaccacaccctgttcaaaagatccccctcaaaatcagcccattaaaaaaaagtttattatgatttcatcacatgtaatttcaaatgtttaaaagaatataatgatatgtataatataattaatttctgaaccatatcaggttcattgcccagtgcatggcaaattagtacaccaagacactgggttgcagcagagaaaggggtttaatcataaracagctgaacaaggagataggaaacctcaaatttgcctccaggaggagtttgaggctagaggtttttaaagggttggacaggtagtaagccaaggtgtggggatcattgattggttaaggaatgcaggttgaagtcatgagaagcggggatgaagaaattgcattctcatgctgattcagttcctctgtgggggtctttagactcactgttccactggaattcaggatctgaaaactatctta

SEQ ID NO: 660320 - DNA, 581 bp, Homo sapiens
ttttttgttttttttttttatggaatgcttcaagcatttacatgttaactttctttgggggctatgttaatctcctctgtattgttccaattttagtgtatgtgctgccaaagcaatcacaagatggagtccttrataaaaatttttagacatcagcaggccaggggtgtgtgtgtgggtggagagaggaaatggaattctttgcaaattcccctgaaatcataccaagtaattgcttattttgtccacctaattgttctcattatcaaaaccctgccattagtctccttgaatcatcaaatccctgatagaaatagcttgtatagctgcaagcatttctcagtaagtattaactagatgttaatagttataataataaaaaatcaggtttttaatccctgatttgctggagctgattgtttccatcttttgcctagagaattgtcagtcttaaggaaggagaatggagaactgaagaaatttctagccattctaaaggtgaatgaaatagattttccttattattattttctctcttacttttctcatctatctagctgactgtatagaatagtgtttcc

SEQ ID NO: 660321 - DNA, 596 bp, Homo sapiens
cccctgccccatccttctctatctttgattcctacacactaggaacaaccatttttaaacttatttttaaagaagcttccctttgttatttaccctattttttctaaataacatgmtcagattgctatttcttgataaaaatgtagttcccttacagtctccatcccacatccacacttcctcccataacagtaatatagttacatcagtttacttttggctttattaatattccatggttacactgtaagtacatattagtatgtccatgtaaatcacattacaatgactctacttcctttcttttatatatagttttcctgaaataactgcctagtgtgttttttttttaattgcctggttttccaaggatgttaccactattctcctctgaaattttccagcagaactgtacatctcctttcaaaatcctcaaacacataaagcaatgtattaatttcatattttctaagaaacgttccttccagtgttctgtcctccttccattctactctggctaatgtccaggcccactgcacaactgtttcctgaaatttcctttgcctctctttattagatatcttttttcttggatc

SEQ ID NO: 660322 - DNA, 596 bp, Homo sapiens
cccctgccccatccttctctatctttgattcctacacactaggaacaaccatttttaaacttatttttaaagaagcttccctttgttatttaccctattttttctaaataacatgctcagattgctatttcttgataaaaatgtagttcccttacagtctccatcccacatccacacttcctcccataacagtaatatagttacatcagtttacttttggctttattaatattccatggttacactgtaagtacatattagtatgtccatgtaaatcacattacaatgactctacttcctttcttttatatatagttttcctgaaataactgcctagtgtgttttttttttaattgcctggttttccaaggatgttaccactattctcctctgaaattttccagcagaactgtacatctcctttcaaaatcctcaaacacataaagcawtgtattaatttcatattttctaagaaacgttccttccagtgttctgtcctccttccattctactctggctaatgtccaggcccactgcacaactgtttcctgaaatttcctttgcctctctttattagatatcttttttcttggatc

SEQ ID NO: 660323 - DNA, 565 bp, Homo sapiens
aacaaaaaatatagacttcacaaaacaaacaacaaataaccctggggggtgggtgaatctgatttccagagtttccacattatattaaatgtctatagttttttagtcagacacagtggcacatgcctgtagtcttggctactcaggaggctgaggcaagaggatctcaagcccagtagttcaaatccagcctgggcaacacagcaagacccagtacctaaaaaataaaagttttcaacaaaaaaataactaggcatgcagaaaaacmagtaggacctatacacagaggaaaagcagtcaatataaactactcctaagaaagcccagacactgaactttttagaattttttaatttagagacagggtctcactctgttgcccaggctgggtgccacactgtagcctcgccctcctaggctcaaccaattctcccacatcagcctcctgaggtgctgggactacaggtgcatgtgccaccatgcccggctaatttttttattttttgtggagatggggggtctcactatgttgctcaggttagtctcaaactcccaggtcaagcga

SEQ ID NO: 660324 - DNA, 403 bp, Homo sapiens
accaatagaattgaaagcaagcaagcaagcaaaaggaatctaccttaaaacactgctgctgctgttaaggagacctagaagggaaagcaaatgctagagcaggcaataaaggcttctttaatatatagtataggttttactaatttgggcacaagatatctttcttctcagctgcttacattagtgaagtttatgggtgaaaaatgcaattgctaacttgaagagtgttgaaatccaaacttgcatacaacagtacaaaggtctaaraaaccatagcagggactggtgaagtattatttagtgagcttaggccttactgcatttgtcaatccaaattttaaaaacaaatgccttacttactttactcacacagaaaattaagtttgcagtatgtagtagaaag

SEQ ID NO: 660325 - DNA, 531 bp, Homo sapiens
caatgtctcactcatcaccttgacccaaatgtctaaggctgtgtaaaaacagcattgtcagatttcataaatgygcaatgatgactcaaactgaaaagagacattctgtcacaaggaaaacagagcttgtcaaataaactcatattaagattaggtagctctcaaattacaggttagagagctttatttttagacataagttttatattttgtattttatctcaaaaactaaattttaataaatggtacttcattttaaaaaccaggattaatattcatcatgaatccattaaaatgtatatttgtcaataattaagaccatttctgttcttcaagaattttcacttttggactctattctactttctcttgagattgaatagctttttttttttttttttttgcccgtaaaacacttcattcttttgccatgtccaaaataaaccaatgtatatgtcttttacattcaaataccagtcacttaggagttggtaaaatttggtgcactgccttcagtaaagtcagagaggt

SEQ ID NO: 660326 - DNA, 608 bp, Homo sapiens
agaaaatgaatgaacccaggaaataatccagactgaaaacatcacaaaaacatgaacaaccagaaaatactcacctctgataaaagcttacaaattacttatgaagtaaagttgccaagaacatttaaaaatttttaaaagaaaaaaacagtgaacctgaatttgaataagtctttagatctataatcaattcacaggagaactgtgaatagaaatagagaagcacattaaataacacaggaatgcaactagcaaaatccagactgtcggaaacttgacaagacaaagtagccaatttcgtcaattaaaaaaaaaaaaaaaagaacataaaagagatgaaggggaatctatggatgaagagagacctgagagacctatcaaacaactgcaatacataaatcttatgtgatccctatctaaataaactgtaaaacaccacataatgcatgtgtaatactgggcatttatagataggtattaraactgaatgctgagtacattaagttcattatgttattttctctactttcaccttcatattgctctagacattcctcttttcccatatgtccacccaagcttttaagcaaaatttgaagaaaaagcag

SEQ ID NO: 660327 - DNA, 547 bp, Homo sapiens
tttccctcttaaaaaatcttctgagaaaataggattgcrgtgcagaaaacaggggtcttctccctggattactgagggcacctatgccccacccctagggttcagcatgggccaggacacatcctctctcttcaagtctggttgatatcaagtaacatcatttaactagaacttgatcacttacaaaagatctcctccatatggtccatttgggccacatcacagtggtgtgaagtgtaattattcccatttttcatatggggacactgaggatcagaacagtcacgtgacttttccaacttcacagagcttgatgcagatgagatgaaaagcaaacccaatgttcttcccccagatcaatggccctctcatgtgtatgtctcatttggtctcccgtgtctctttctgtctttctctatgtctctctctgtccctttttctttttgatgactatttggctgtctttttctcccacattttcttctctaattttcatttctcttccccctttcttcctccttttcttttctgagagacagagtctcac

SEQ ID NO: 660328 - DNA, 547 bp, Homo sapiens
tttccctcttaaaaaatcttctgagaaaataggattgcagtgcagaaaacaggggtcttctccctggattactgagggcacctatgccccacccctagggttcagcatgggccaggacacatcctctctcttcaagtctggttgatatcaagtaacatcatttaactagaacttgatcacttacaaaagatctcctccatatggtccatttgggccacatcacagtggtgtgaagtgtaattattcccatttttcatatggggacactgaggatcagaacagtcacgtgacttttccaacttcacagagcttgatgcagrtgagatgaaaagcaaacccaatgttcttcccccagatcaatggccctctcatgtgtatgtctcatttggtctcccgtgtctctttctgtctttctctatgtctctctctgtccctttttctttttgatgactatttggctgtctttttctcccacattttcttctctaattttcatttctcttccccctttcttcctccttttcttttctgagagacagagtctcac

SEQ ID NO: 660329 - DNA, 452 bp, Homo sapiens
tttcttgtcttcagggcataataaaacaattcataattcattctttaattcagggtaacataaaggtcttagatcaaagagtaaagtgaggtcctattaggcagtttggagagttccatgtagcctttgcccactttggaaaaacagatgaaggcacaagttttcacrgagaacagtagccttaggtgagtcacagttacgagtggaggctctggagataaacttggctgctctctgtgtaccctgaccctgccattgatcacctatgagactttggccaacttacctctctaagcctcagtttcctcattgtaagctggtgatgatgatttttgtcaaaagattaaatttaatagtattgcagtgtttttccaattgggatccacaaatacattttctgagtcttatggattttttaactacattttttaatatgaggttttcatttggag

SEQ ID NO: 660330 - DNA, 619 bp, Homo sapiens
aaaacagagaaaagaaataacatgctgctgaaaaacatttgaagaaataatggttgaaaagttgtcaaatctggaaaaagaaaaaacctacaaactcaagaaactcagtaaactgaaaacaggataaacccccaaaaaccatgaccagacacatcataatcaaattgctgaaaactaaatgcaaagtaaaagtcttaaaagttaccagagaaaaacaccttatctaaaggacagcaataatttaaatgactgtggatttgtcattagaaaccatggaggccagraagaagtggcacactatttttaaagttctaacagtaaataaatgtccactcgagttttcatatccaacaaaaatatccttcaggaattaacgtgaaataaagacctgctcagataaagaaaaactaagagaatttattgccagcagacctactctaaaagaattgctaaaataagttttttggaaaaaaaaagagaaataatactgatgacattttagaacatcaggaattttaaaagagcaacagaataggtaaaaatctggtagagtataataaactattcttcatttcttaagttcgttaaaatacataaaatgtctttgatgatgaaaagc

SEQ ID NO: 660331 - DNA, 444 bp, Homo sapiens
gtgaactgatttcatattgttcaaacacatatgttttacaatcaatttgtacagttaatacaattatcacagtggtcctgaggtgatgtacatcctcagcttacagagataacaggattaagagattcaagtaagacaggcataagaaagtataaaagtattaatttgggaactgataaatgtccatattaaaatgaaatcacaatttatgttcctctgccgyggctccaactggtccctctgtttggggtccctgacttcctgcaacagtccctcccacaacacatgggaattcaagatgagatttgagtggggacacagccaaaccatatcacaaaggaacaaaaaccagaggaaacaaaaagaaaatgagtaataaaatggcagacctaaattgtaatttatcattaattacattaaataaaaatggtctaaacataccag

SEQ ID NO: 660332 - DNA, 621 bp, Homo sapiens
aatctaggtatagggaaattcttaagtctactaaagagcatctacaaaaaacatacagctgatagcataatcaatggttagagactgaattatttttgcctaagattgggaagaagacactctcaccagtctgattcaacatcatactagaaatcctagttaacataacaaagcaaggaaaagaaataaaagacatgcagatttaaaagaaacacaactgtctttattcattcacaaacaacataatttcctaggtagaaaaccctaaggaatcaacaaaaaacaagcaaacaaagaaaattctagaaacaataagtgagcttagtaaggtcataggccagcaggtcaacacacaaaaatcaatcaccaatcatattttgagatactggcaatataaaattggaattcaacatttaaaaaatatataccatatactattgaaaccccaaaatgaaatatctaagcataaatttgacaaaatatgcataggatccacatgatgaaaactacaaaatgctgatgaaacaattcaaattttgcctaagtaaatggagagacagacataccatgtacacaggttggaagrctcaatacataaagatgtccatttttcccaaattg

SEQ ID NO: 660333 - DNA, 581 bp, Homo sapiens
gccgtgggatgttttcacagcctgcagagaggagccagatgtgggcagtggcctcgttcacttcagccttcaggagctatttggggctaagggcttctcctttcccagagagtttgtggcagattgactacaaaaatggccctaatctttcatccctcccacagcatttgcaatgtgacttgatagttcctctcatcaaggggttcagcctattaccctgttctttgaatctaggctgccttgtcatttactttgaccaatagaatgcagcagaagtgacagcatgtcagttccaagccaaggccttgagacctttgcccacctctctctctctctcatacacacactcgctcactagctccccttgcctccatcataagaacaaaagcaactagacttctggagtatgagctagcatgtggaraagatctgaatcaccccagctgaggtcatcctagaccaatcagcctctggccaacctgccaactgaccacagatgcatgagcaagcccagctgagaccagctgagcccagcccagatctgcagaaagggctagccagtccataaacctgtgagccat

SEQ ID NO: 660334 - DNA, 642 bp, Homo sapiens
tatttagaacttaaaaacacatgaaggcaaaggccctaaaggttagaatttgcttggtgttttcaagaaattaaaagaagtccagtgtcacttgagcatagtgagcaaggggaaccctgattggaaaagaagtgggacaggagggcaggggctgcttcgaggaggggtcggaagccatagctgggagttagcccagtcatcaaagtttaatggagagccagaggattttaggtaaatgagtgacatcacctgacttacatgtttaaaactcatgcttgtgtggctaaggtggacacagaagacgtcaggagccaggaagaacaggagtctgttacaggactccrggcaagagatattggtggcttaggtggtaaggatggaaagaagaggaaacccaccctccttgggggttcttagcaccttggaagagttttagtcccttccctgtgtccacatcaaaaggtaataatgataataacaagagcagcagctctgagcagtaactgtatgccagatagtgtcctcataacatccttttcacatgcaatctcatttcatcttctcaatgaatccatgagaaaggttgttagggactgagctgtgattccccaaaatccatattttgaagctctgctcccaatg

SEQ ID NO: 660335 - DNA, 532 bp, Homo sapiens
gccagcaaggaacacaaatgaaagaagtgagctaaaataattaactaggaaatgtcaggkgctgtggtaccttgagaacataagccccctttgaggtgctcaaatgcagtttaaaaaacagtattgttttaaagaaaaaaaaagttatctaaggcgtctgcttctatccaagatggaataatgggaagcagatttaccctgccactgaaataaccaggaaaccagaaaatatataaggagaaaatggacaccaaagccagtgatccctgagagagcagaaacaaatgagataagccctaagattacccccagcttaccgccttgagaaagtttccaggccctgatgcaagtgggacccagcagactccctgagttgacaagacatctgagagtctggggagactaaggtagctattgtctgcaaatcagatgatcagagagaagagagcctggaagacagagaacaccggagatctccaaagggtccctctcaagtcttcatgtaagtaaggaaactaacagaggctaggga

SEQ ID NO: 660336 - DNA, 642 bp, Homo sapiens
tatttagaacttaaaaacacatgaaggcaaaggccctaaaggttagaatttgcttggtgttttcaagaaattaaaagaagtccagtgtcacttgagcatagtgagcaaggggaaccctgattggaaaagaagtgggacaggagggcaggggctgcttcgaggaggggtcggaagccatagctgggagttagcccagtcatcaaagtttaatggagagccagaggattttaggtaaatgagtgacatcacctgacttacatgtttaaaactcatgcttgtgtggctaaggtggacacagaagacgtcaggagccaggaagaacaggagtctgttacaggactccaggcaagagatattggtggcttaggtggtaaggatggaaagaagaggaaacccaccctccttgggggttcttagcaccttggaagagttttagtcccttccctgtgtccacatcaaaaggtartaatgataataacaagagcagcagctctgagcagtaactgtatgccagatagtgtcctcataacatccttttcacatgcaatctcatttcatcttctcaatgaatccatgagaaaggttgttagggactgagctgtgattccccaaaatccatattttgaagctctgctcccaatg

SEQ ID NO: 660337 - DNA, 642 bp, Homo sapiens
tatttagaacttaaaaacacatgaaggcaaaggccctaaaggttagaatttgcttggtgttttcaagaaattaaaagaagtccagtgtcacttgagcatagtgagcaaggggaaccctgattggaaaagaagtgggacaggagggcaggggctgcttcgaggaggggtcggaagccatagctgggagttagcccagtcatcaaagtttaatggagagccagaggattttaggtaaatgagtgacatcacctgacttacatgtttaaaactcatgcttgtgtggctaaggtggacacagaagacgtcaggagccaggaagaacaggagtctgttacaggactccaggcaagagatattggtggcttaggtggtaaggatggaaagaagaggaaacccaccctccttgggggttcttagcaccttggaagagttttagtcccttccctgtgtccacatcaaaaggtaataatgataataacaagagcagcagctctgagcagtaactgtatgccagatastgtcctcataacatccttttcacatgcaatctcatttcatcttctcaatgaatccatgagaaaggttgttagggactgagctgtgattccccaaaatccatattttgaagctctgctcccaatg

SEQ ID NO: 660338 - DNA, 517 bp, Homo sapiens
cagtgtgaaagaatgccaagaatgcagagaaggaagatgaggaagtgccccatggttgaacttgaggttggccctgaacaatctctctcagttgcctcagttgtcaaataggaaagttccttaagccaaggagaaaggagactgaggatcaaggcagaagctgcctccagaagttctgagccaatgagttcccagaacagaggccaatgcaaaaaacttagaggattcaaaaaaccagctccatgggtaaggaagcacaggggaatgcaaccctatcacctcacagagggcccctgtattaatttgttggggctgccatcacaaaatgccacaaactcaattcgtttggcaagggttttggcttaaaaaatagaaatttgttttctcctaattctggaggctagacatccaagatcaaggggtgggcagggcttgttcttccaggtctctctctcttggcttgtggatggctgtcttctccctgtgtcctcayatggtcttgcctccaaatgtgtct

SEQ ID NO: 660339 - DNA, 635 bp, Homo sapiens
acatctaggaaaccaagatgacctatttaggttctgacccacttacaacagaaacaccaataaccaactctgtccagaaaagaaaaaaaaacagatgaccacaaatgtaactgattgtaagtaaaaaggaacggtggagaacaagccttcgcaggtacacctgctgttgatgccattgcaaaatatcctgaaaggggagctgccaaggaaatttggacaatacccaggtagccccctttggtatccatgcactgtgtggggtttgccagccttgtragcagcctagaaagcaatgaaataggtccttgtgccttgttttgctcagagatgggatgagcatctccagatgcctagagcagatgatttcctgccaagacaggggacaacccaatgcacaggtgtgaacaccgaggtatcaagaggaatatcgggtcagccttctctatttccccagaccaagaatggatgcaattagtttggaagcttctggaatagagccttttgtagtaaatatcaatttgtgtggctgcctggctcacaatagcagtctatttttcttttctctgggaatggtccatttcctaagggcagttgtgtctttgcttcatgacccttaacctcctgggcatggcata

SEQ ID NO: 660340 - DNA, 635 bp, Homo sapiens
acatctaggaaaccaagatgacctatttaggttctgacccacttacaacagaaacaccaataaccaactctgtccagaaaagaaaaaaaaacagatgaccacaaatgtaactgattgtaagtaaaaaggaacggtggagaacaagccttcgcaggtacacctgctgttgatgccattgcaaaatatcctgaaaggggagctgccaaggaaatttggacaatacccaggtagccccctttggtatccatgcactgtgtggggtttgccagccttgtaagcagcctagaaagcaatgaaataggtccttgtgccttgttttgctcagagatgggatgagcatctccagatgcctagagcagatgatttcctgccaagacaggggacaacccaatgcacaggtgtgaacaccgaggtatcaagaggaatatcgggtcagccttctctatttccccagaccaagaatggatgcaattagtttggaagcttctggaataragccttttgtagtaaatatcaatttgtgtggctgcctggctcacaatagcagtctatttttcttttctctgggaatggtccatttcctaagggcagttgtgtctttgcttcatgacccttaacctcctgggcatggcata

SEQ ID NO: 660341 - DNA, 635 bp, Homo sapiens
acatctaggaaaccaagatgacctatttaggttctgacccacttacaacagaaacaccaataaccaactctgtccagaaaagaaaaaaaaacagatgaccacaaatgtaactgattgtaagtaaaaaggaacggtggagaacaagccttcgcaggtacacctgctgttgatgccattgcaaaatatcctgaaaggggagctgccaaggaaatttggacaatacccaggtagccccctttggtatccatgcactgtgtggggtttgccagccttgtaagcagcctagaaagcaatgaaataggtccttgtgccttgttttgctcagagatgggatgagcatctccagatgcctagagcagatgatttcctgccaagacaggggacaacccaatgcacaggtgtgaacaccgaggtatcaagaggaatatcgggtcagccttctctatttccccagaccaagaatggatgcaattagtttggaagcttctggaatagagccttttrtagtaaatatcaatttgtgtggctgcctggctcacaatagcagtctatttttcttttctctgggaatggtccatttcctaagggcagttgtgtctttgcttcatgacccttaacctcctgggcatggcata

SEQ ID NO: 660342 - DNA, 635 bp, Homo sapiens
acatctaggaaaccaagatgacctatttaggttctgacccacttacaacagaaacaccaataaccaactctgtccagaaaagaaaaaaaaacagatgaccacaaatgtaactgattgtaagtaaaaaggaacggtggagaacaagccttcgcaggtacacctgctgttgatgccattgcaaaatatcctgaaaggggagctgccaaggaaatttggacaatacccaggtagccccctttggtatccatgcactgtgtggggtttgccagccttgtaagcagcctagaaagcaatgaaataggtccttgtgccttgttttgctcagagatgggatgagcatctccagatgcctagagcagatgatttcctgccaagacaggggacaacccaatgcacaggtgtgaacaccgaggtatcaagaggaatatcgggtcagccttctctatttccccagaccaagaatggatgcaattagtttggaagcttctggaatagagccttttgtagtaaatatcaatttgtgtggctgcctggctcacaayagcagtctatttttcttttctctgggaatggtccatttcctaagggcagttgtgtctttgcttcatgacccttaacctcctgggcatggcata

SEQ ID NO: 660343 - DNA, 436 bp, Homo sapiens
tttgttttttacttgagcctttttgtcctcacaatggaaagattactagtacatccatttaccccatatgccctattttgkgcaatggctcttgtctccaatttcctataatattatggtctgtgtcactcacatgagccttgccacacactgcataatgacagctatttattgacccttttacacaggtaaaagcctcttattattaccaatcccttctcaccaacccccatgcatctcaacttgctaaagccaatgcctggttcagtggtcagaggggcaggctggaccatatgacccagcagttccatttctgggcatatcccaaaaagaatggaaagcaggaacatggacaggcaatttgtacacccatgttcacagcagcattttccacaacagccaaaaggtgcaaccagggggagcagagactgttcaa

SEQ ID NO: 660344 - DNA, 637 bp, Homo sapiens
gggtttcccctttcacttggctctccttctcttttgtctgccaccatgtaatatttgcctttcaccatctgccataattgtgaggccttcccagccacatggaactgtgagtccattaaatctcttttttttttttttaataaataacccggtattggatatgtctttatcagcatcatgaaaatgggctgttacagtaaattacagtctacggtaccagtaggctggggtgctgctgtaaagtacccaaaaatgtggaagcgactttggaactgggtaacaggcagaggttggaacagtttggagggctcagaaaaagacatgaagaygtgggaaagtttggaactccctagagacttgttgaatggctttgaccaaaatgctgatagtgatatggacaaagaagtccaggctgaggtggcctcagatggagatgaggaacttttgggaactggagcaaaggtgactcttgctgtgttttagtaaagagactggtggcattttgcccctgccctacagatctgtggaactttgaacttgagagagatgatttgggggatctgacagaagaaatttctaagcagcaaagcattcaagaggaaccagagcattaaagtttggaaaattagcagcctga

SEQ ID NO: 660345 - DNA, 667 bp, Homo sapiens
aatgatgaaccaatcccaccttcaagaagctttcagtcaaattgctaacaaacacaatttaaagaataaattataggggtatttgaaattcctagctacctggctcagcatacagggtaaggcggaacagcaatttctaaaattttcagtggtttctatccctgcttctctccacccacgtatcagttacggtttttaaccacaaacaacacaatcccactytgatttaagaagtaaagaaatgtattaaagtggtaagtggtggctcacacctataatctcagcactttgggaagccaaggtgggaagatagtttgaggcaaggagttcaagaccagcctggacaacatagtgagacccccatctctacaaaaaatacaaaaattagctaggcctggtggcacatgcctgtggccctggctactctgaaggctgggatgggaggatcacttgagcccaggagttcaaggctgtagtgaggagccatgatcacatcactgcactcctgcctgggtgacagaacaagactctgtctacagggggaaaaaaaaaaaaaaaaaaaggatactagggaccttaaagaatttccaagaaagtcagtctcagaagaacaatatctaatcacttcataagggtatctctgggaaatacaaagccaagggaaaaa

SEQ ID NO: 660346 - DNA, 667 bp, Homo sapiens
aatgatgaaccaatcccaccttcaagaagctttcagtcaaattgctaacaaacacaatttaaagaataaattataggggtatttgaaattcctagctacctggctcagcatacagggtaaggcggaacagcaatttctaaaattttcagtggtttctatccctgcttctctccacccacgtatcagttacggtttttaaccacaaacaacacaatcccactctgatttaagaagtaaagaaatgtattaaagtggtaagtggtggctcacacctataatctcagcactttgggaagccaaggtgggaagatagtttgaggcaaggagttcaagaccagcctggacaacatagtgagacccccatctctacaaaaaatacaaaaattagctaggcctggtggcacatgcctgtggccctggctactytgaaggctgggatgggaggatcacttgagcccaggagttcaaggctgtagtgaggagccatgatcacatcactgcactcctgcctgggtgacagaacaagactctgtctacagggggaaaaaaaaaaaaaaaaaaaggatactagggaccttaaagaatttccaagaaagtcagtctcagaagaacaatatctaatcacttcataagggtatctctgggaaatacaaagccaagggaaaaa

SEQ ID NO: 660347 - DNA, 478 bp, Homo sapiens
aagtttgttcaacctgcagcctgcaagccatatgcagyccaggatggctttgaatgcagcccaacgcaaacttgtaaactttcttaaaacattatgagtttttttttttttttgcagggttttttgtttgtttgtttgttttttagctcatcagctatcattagtgttagtgtattttatgtgtggcccaagacaatttttcttcttccaatgtggcccagttaagccaaaggactggacacccctgtcttagagctttaagcagctggtagaaactgggaaaagattggtttcattgcaagtccaatttaggcctaggaagaaatcaggctgatgtgatatgataaatgatccaagggtgcaggaagaggcacatcctctggactggcctcatttatatcatcattctagccattaccctgcttaattgggccaactggctgcatcagccccagacagtagcttcatccttacccag

SEQ ID NO: 660348 - DNA, 357 bp, Homo sapiens
atgtgatatgataaatgatccaagggtgcaggaagaggcacatcctctggactggcctcatttatatcatcattctagccattaccctgcttaattgggccaactggctgcatcagccccagacagtagcttcatccttacccagaggctccagcagctacaggtcagcaactacattgtcccagcctttcctcttctccctcacgtggaatctaatctgcccctscctacttattggagatactctctctttattgaagaacagaaaggttgggtaccatagtgagatgtggtataaaaattattgcctttggcatcagactggctacaggcctaatctcagctttaccaattatc

SEQ ID NO: 660349 - DNA, 465 bp, Homo sapiens
gaaaaagtctggagtctacacttctctccagcacwgcccccaaatatttcaatttcatgtctcatcaaaccacagaagacctgcaaacatcttccactcccaaaccttcattttagaacaggaaacatgggcccagggaacaggaaactcacctatggtcatacagacactgacacccaggtttgctcacaccagtctatagccctcttttttagaagattctgctcataagaagaaagttaacatgtgccccggtttgctcctgagagtacacatcactatttccttcaccattcatcataatttgggacatccagatgctccagaaccctcccaggaggaccctcatcagcttgtgaatgtctcccttatcctcccccaagtatttttaagaagaaactgactagcggaggaaacgctggactccttagcagaaatttttgaagaccttgcagatgagccata

SEQ ID NO: 660350 - DNA, 465 bp, Homo sapiens
gaaaaagtctggagtctacacttctctccagcacagcccccaaatatttcaatttcatgtctcatcaaaccacagaagacctgcaaacatcttccactcccaaaccttcattttagaacaggaaacatgggcccagggaacaggaaactcacctatggtcatacagacactgacacccaggtttgctcacaccagtctatagccctcttttttagaagattctgctcataagaagaaagttaacatgtgccccggtttgctcctgagagtacacatcaytatttccttcaccattcatcataatttgggacatccagatgctccagaaccctcccaggaggaccctcatcagcttgtgaatgtctcccttatcctcccccaagtatttttaagaagaaactgactagcggaggaaacgctggactccttagcagaaatttttgaagaccttgcagatgagccata

SEQ ID NO: 660351 - DNA, 465 bp, Homo sapiens
gaaaaagtctggagtctacacttctctccagcacagcccccaaatatttcaatttcatgtctcatcaaaccacagaagacctgcaaacatcttccactcccaaaccttcattttagaacaggaaacatgggcccagggaacaggaaactcacctatggtcatacagacactgacacccaggtttgctcacaccagtctatagccctcttttttagaagattctgctcataagaagaaagttaacatgtgccccggtttgctcctgagagtacacatcactatttccttcaccattcatcataatttgggacatccagatgctccasaaccctcccaggaggaccctcatcagcttgtgaatgtctcccttatcctcccccaagtatttttaagaagaaactgactagcggaggaaacgctggactccttagcagaaatttttgaagaccttgcagatgagccata

SEQ ID NO: 660352 - DNA, 465 bp, Homo sapiens
gaaaaagtctggagtctacacttctctccagcacagcccccaaatatttcaatttcatgtctcatcaaaccacagaagacctgcaaacatcttccactcccaaaccttcattttagaacaggaaacatgggcccagggaacaggaaactcacctatggtcatacagacactgacacccaggtttgctcacaccagtctatagccctcttttttagaagattctgctcataagaagaaagttaacatgtgccccggtttgctcctgagagtacacatcactatttccttcaccattcatcataatttgggacatccagatgctccagaaccctcccaggaggaccctcatcagcttgtgaatgtctcccttaycctcccccaagtatttttaagaagaaactgactagcggaggaaacgctggactccttagcagaaatttttgaagaccttgcagatgagccata

SEQ ID NO: 660353 - DNA, 556 bp, Homo sapiens
tctgtctctaacgctaaatatgagttcagatctcaatctaatattcacaagtaacttggctttggaaaatcctagctcagactcagtttctataatggcaaaattgaaagcatgtatcacggttatggtgaggcttaaataaatagcatgagaagggcctagcatgtgcatggcacctataatgctcaataaatgttgtacatttgtttagacgttcaaggaatatacacawgtgggaaaattaaatgagcatcaaacagaaaattgacagagagatagtattccccaaatgtaagtcagagccccaaatctcccttatgatctcagcaagccctactgaaattgatatggtgcaaagtttagagtatttggaccaatttttgtctagtaaaattggaacacactttagatctcctggtgcccaggctaagagtcaaggttttttcatgcaaagcccatcccagcattgctaccaatctggaaaattctagagcattttttcacaagaggtcaaccatccaaatctgggataagttttctaaatattagatctaaa

SEQ ID NO: 660354 - DNA, 520 bp, Homo sapiens
gctcccagtgtcctctagaacaggcaattcaaacaagagcaaagaagacatgatgtcttttatgtcttttagtaccacctagtctcagaagtagcattctatcacttctgctatattctcctggtcacacagaccaaccctggtaccatgtgggggataggagggactrtacaagggtatgaataccaggagggaaggatcactgggggacaatctggaggctggttgccacaaacaccatttacaatagcatcaaaaaatatgaaacacttgtggataaacttaacaaaatatacagtagtccctccttatccacaggggatatagttgaagacccccaggggatgcctgaaactgtggatagtactgaactctatagacgctatgttttttccatacatacatatgataaagttaaatttataaaataggcacagtaagagattagcaacaatgactaataataaaacaggataactataacaagatactgtaattaaagttacatcaatgtggtcgg

SEQ ID NO: 660355 - DNA, 520 bp, Homo sapiens
gctcccagtgtcctctagaacaggcaattcaaacaagagcaaagaagacatgatgtcttttatgtcttttagtaccacctagtctcagaagtagcattctatcacttctgctatattctcctggtcacacagaccaaccctggtaccatgtgggggataggagggactgtacaagggtatgaataccaggagggaaggatcactgggggacaatctggaggctggttgccacaaacaccatttacaatagcatcaaaaaatatgaaacacttgtggataaacttaacaaaatatacagtagtccctccttayccacaggggatatagttgaagacccccaggggatgcctgaaactgtggatagtactgaactctatagacgctatgttttttccatacatacatatgataaagttaaatttataaaataggcacagtaagagattagcaacaatgactaataataaaacaggataactataacaagatactgtaattaaagttacatcaatgtggtcgg

SEQ ID NO: 660356 - DNA, 520 bp, Homo sapiens
gctcccagtgtcctctagaacaggcaattcaaacaagagcaaagaagacatgatgtcttttatgtcttttagtaccacctagtctcagaagtagcattctatcacttctgctatattctcctggtcacacagaccaaccctggtaccatgtgggggataggagggactgtacaagggtatgaataccaggagggaaggatcactgggggacaatctggaggctggttgccacaaacaccatttacaatagcatcaaaaaatatgaaacacttgtggataaacttaacaaaatatacagtagtccctccttatccacaggggatatagttgaagacccccaggggatgcctgaaactgtggatagtactgaactctatagrcgctatgttttttccatacatacatatgataaagttaaatttataaaataggcacagtaagagattagcaacaatgactaataataaaacaggataactataacaagatactgtaattaaagttacatcaatgtggtcgg

SEQ ID NO: 660357 - DNA, 509 bp, Homo sapiens
gaaactgaggcaaaagaagaacaagcttatctaagtactacagtttgaatgtttgtcccctcagaaactcatgttaaacttaattcccgaccaagtggggtggttcacacctgtaatcccagcactttgggaagccaagtcaggcaggtgacttgaggccaagagttagagagcagcctagccaacatagtgaaaccctgtctctaccaaaaaaaaaaaaaaaaaaaaaaaaaagccaggcatgttggtgtgcatctgtattcccagctactcaggaggctgaggcaggaggttcacttgaacccaggaggtggaggttgcagtgagctgagatcaaacctctgcactccagcgtgggtgacagagtgagatcctgtctcaaaaaagaaaaaacaaaacaaaacytaatccccattgtaatggtattaaaaggttgggccttttagggtgggtagaatattagtttgctagggttgccgtaataaactactacagactgggtgacttaa

SEQ ID NO: 660358 - DNA, 610 bp, Homo sapiens
tggtctccactctgtatctccatccagaaatgctagtcatgtggccatcataggatgcaccaagtacatatttgaattacgtagttaaataacaatattgatcacaagcgtaatcatatatattcacatggcatttacttttaacattctttcacgtgcaagacgtcactgagtctccacagcagactactaagatcctgaggataaggcttattttcttcctcttgttgccaaagcaactaagcctcagtggggctggggaaatgaaatgctgcctttgacatggaatgaagcaacgccccatgccagcaagcctatcagattctccaggacccactccaacccccatcaggccgtctcctgacctcacactggcagtccctagaatgctttcctgtgcstaatgacatttcgctttcccagtatccctgtgtgatacatagtttttcaaaattgcctgtcaatttcatgaatacagaagactaacatcccaaaggaggcaatgacttgctcgaggccccacagtggaaccagggcttgaactcatgccaactgatatgaagtcttaggtctttttgctacgacacaggtgcctctgtatctgcagttg

SEQ ID NO: 660359 - DNA, 603 bp, Homo sapiens
cttaaaagaatccctatggagattttgaatttccctttctgtgcatctccttcttctctggcaccccactgtgtaaattccagtgcccctcaatagtcccaaattctaatctctgccttctcagtccagtaacaccaccatgttttcttgggctccacctctttatactgcagarcataaaacaccttcaagcagaaagccagagcaattgtagcacttacttcacgcatttactttctctcagggatcataatcctatgatgactcttgtgcgatatctgaaaacatttgctgcagatattgcccagttttacagttgttttcaacaggagaaataatctagtactagttattccatcatgagtagaaccagaagttttgtcatatcctctgttaactgtgcctgaatgttgtaaaccaccttaaaacccagttttcttttttcctaagtaactggtgattatttacaagcagcaaataaattggtcaatacccttttcttggtcactgcttaggcagaggatggaggaatgaaatgggataagataaactcttaggtaggcgtatgacaggtactatgaaagattccatgatggaaattgt

SEQ ID NO: 660360 - DNA, 613 bp, Homo sapiens
agaaatgaacatgttcagctgcagccctttctcctgctctgcccttggagatccagctacatggtttactcttccgtggcttaatttgtacaataatatctgagaagacagcaggagctcaatmaacggtagaatcagaagttattattattactattattattattattactttttttctcatttccatttcctttttcattttaaggggcctctagaaaacaaaacttgagcgatcatcttaggtctgccctaccttgtttgtgtatgtaatggggaagtgatttccatgtaagagaattcaaatgggaaaagagcggcactcatgaaatcccttggctcacccagaaaaccctgaaggtaaacctggtccattttgcaatggcttctctctggagacattcagagtcattgggattgttcattagtagggtgcagagactccaagatggcaggtaccactgctactatccactgatagcatggatgccttatggaacttttccccaggaacatatacgttcctaatcttgtgttactggagttattaatgtaactgtgatattttctgagtgcacgcatgcaatctaggaagcaaagagtgtttgaagta

SEQ ID NO: 660361 - DNA, 613 bp, Homo sapiens
agaaatgaacatgttcagctgcagccctttctcctgctctgcccttggagatccagctacatggtttactcttccgtggcttaatttgtacaataatatctgagaagacagcaggagctcaataaayggtagaatcagaagttattattattactattattattattattactttttttctcatttccatttcctttttcattttaaggggcctctagaaaacaaaacttgagcgatcatcttaggtctgccctaccttgtttgtgtatgtaatggggaagtgatttccatgtaagagaattcaaatgggaaaagagcggcactcatgaaatcccttggctcacccagaaaaccctgaaggtaaacctggtccattttgcaatggcttctctctggagacattcagagtcattgggattgttcattagtagggtgcagagactccaagatggcaggtaccactgctactatccactgatagcatggatgccttatggaacttttccccaggaacatatacgttcctaatcttgtgttactggagttattaatgtaactgtgatattttctgagtgcacgcatgcaatctaggaagcaaagagtgtttgaagta

SEQ ID NO: 660362 - DNA, 555 bp, Homo sapiens
actagaactcaagtcatcgaaattcttctctaagattccttttgcaggccgcactgggggtctgtgggccaaatctgacctgctacctgcttttgcatggcctcaagctaagaatgrctcttttacatttttagatggttgaaaaaaaaatcaaaaggcctatgaaaattatatgggattcaaatttcagtgtccataaaaaatgttgtatgggtgcacagccacggccatttgtttattgttatcatctgttattgttatcattgttatgttattattttgtgccacaacggcagatttgatcagttgtgagcatgaatgtatggcctgtgaagttgaaaacactatagaaaaatgtgctgacccctgctctaccacactccaactcttcatcctccagatgggctgacacggttatcactttcttcttattcagtcaaatctacccattcattgctaggtctggtttttgccatttatattcaggatttctttagaaccaagttcaggctaaatgttttattggggagttcagtacaaattggtgcacgggag

SEQ ID NO: 660363 - DNA, 579 bp, Homo sapiens
cttgccagcatgtgatgttgttagagttttgaattttggccactctaattggtgtacagtagtatctcgttgttttaagttgcatttccttgctgayataagatatgtagactcttttcatgtgcttatttgacacctgtatatcttctttggtgagacgtctgctaaggtctttggtccatcagctcatttttttttttttttttttgaggatgagttgttgcttttcttactgttgagttttgagagttcctcatatattttgaatacaagtcctttatcagatatgtgctttgcacattttccccccagtctgtggtttgtcttttcattctcttaactgtgtgttttgaagaagagaagttcttgattttgatgaaatccactgtatcattttttcttttatggatgatgcttttggtcttgtaactaagaaatctttgcctaactcaagtccacaacaattttcccctgtttttcttctagaagcattatagttttaagttttacatttagacctatgaaccattttgagttagttttgtataggggacaagcatcatgaattattgataccct

SEQ ID NO: 660364 - DNA, 556 bp, Homo sapiens
ctttggccggcccattctatttctagaaatgagtcttgtggaaactctcaattatatgtgcagttttatctaccaggattttattgcaaaatcataatatgaaaaaaaacccacaaaaatctaattgtccaacaatagagggtgttttaataaattgcgctatatccacatacagctataaaatggatacgatggaagaagagataatgatacaggaaagtgtctatggtctataaagtgaaaaataagccataaaaaacytatgagcagaaaaattttactttatcaaaaagcaatacatatctatatgatacctcaaatgatgataatgtctaattctaggtaattttaattttttcctgtttttctatatttttcaaattttctgcactgaacaggagttaaagtggtagtgctattgagaggtaattccctaagatcagtgcagtatgggagacggtcttagctgtggagtgagaaacttgaatatcccaggacccctcctcgtctccacctgctggatgggcttgaagatgctgcacaaaagacgtgacgt

SEQ ID NO: 660365 - DNA, 556 bp, Homo sapiens
ctttggccggcccattctatttctagaaatgagtcttgtggaaactctcaattatatgtgcagttttatctaccaggattttattgcaaaatcataatatgaaaaaaaacccacaaaaatctaattgtccaacaatagagggtgttttaataaattgcgctatatccacatacagctataaaatggatacgatggaagaagagataatgatacaggaaagtgtctatggtctataaagtgaaaaataagccataaaaaacctatgagcagaaaaattttactttatcaaaaagcaatacatatctatatgatacctcaaatgatgataatgtctaattctaggtaattttaattttttcctgtttttctatatttttcaaattttctgcactgaacaggagttaaagtggtagtgctattgagaggtaattccctaagatcagtgcagtatgggagacggtcttagctgtggagtgagaaacttgaatatcccaggacccctcctcgtctccacctgctggatgggcttgaagatrctgcacaaaagacgtgacgt

SEQ ID NO: 660366 - DNA, 561 bp, Homo sapiens
ctagggccctctgtgggaagtttaggaactcacatcttcaattctgtatgttgttattgatcttccaaataaatgtggacccaagtcttccttcattcaaaattcatttgttctgagttggggatcacttggaaagaggttgggttggatttcaccttccttttttcctgcagaataaatgaaactgcaggcggcatgggtagctcacccaagacagtgattgagatgggcacattttactaagtggggtgtttcattggcacgtggattatttatccttggatacagaatcctctgagatatctacccatcaacactttagtagtcatatagaagctactctaatggmaattataattgttattattttggggtgtttcctgaatgacaagtactgtgataagagtttttcgtgcatttctcttgtccttcttaaaaacagagcaaatgaagaatcatagaggttaggaagtttgttcaggtcacacagccatttggtgacagtatctacagcttcttaaccatgtccccatcagaggagctcatcagagttggagcagg

SEQ ID NO: 660367 - DNA, 546 bp, Homo sapiens
gaatttcagataaacaagaaataatgcttaggtagacatatgttgtaagtttttgtttggtttgttgtgttttttgatagtgacaggctctcactctgttgcccaggctggagtgcagtggtgcgatcatggctcactccagcacccgggatcccgagatcctctcaccccagtctcccaagtagctgagactacagacacatgacaccatgcccagctaatttttaatttactttttagtagagatgggggtctccctatgttgcccaggctggtttcaaacttctgggctcaagcggtcctcccacctcagcctcccaaagttgtatgggacatactaaargattatttgttgtggatcccaaattcaatgtaactgagcatcctgtatttatactccatccagcaatcctatatcctgatacttctgcagatgaagtgagccctgaaaaagccccagacttaagtctccactgtcacaaccctgcgaaaacagccacccaggcgcttgctgtagagcaattagctgatgccaagtccatgaac

SEQ ID NO: 660368 - DNA, 621 bp, Homo sapiens
ccttggtcaacatgggaaactgaggcaagagagtgcccatgcctcactttctagctggcatccttggaggtgtttctgctcccagccttgtagtgatggtggggttttgtcctgcacaggctgtgtaggcttcctttatggagagtggtttgctcatgtaaatgggctgggtgggtacagagaggatctgacaccaatactttgggtttcctgtggcccagagaggagtgggaggccaactcttacacctgagggagggcacataccgaccaagccagagattgcatttcctagcttcccttgtagctaggtagggtcatgtaacaaggtatattagtttaccattgctgctgcaacaaatttctatagacttagccacctaaagcaacacaattttaccttcttatggttycagaggccagaattctgatacaagtctcactgtgctaagatcaaggtgttggcagggccagtgttccttctggtggttccagagttgcatccattctcttaacccttctggctcttaaggaggcatgcagtccctggctcatggccctttcttccatcttcaaagctcacatctctctctcttctgatcctttttctgtcatgacatgc

SEQ ID NO: 660369 - DNA, 636 bp, Homo sapiens
gatggtaaattataatatacccatagtttagggcctactaacttcttttagagaaagatttttgtttcaaaaaaatagttgtggataaaatcaagaccctcagtcatgttaaattgtcccaaccacagatacataaaagacagatggaaatttttgacattggcactggcttttttttctgacaggtgaaatcatgaactgtgtattgagtttccggccctttggaaaaatgaaatgccaaaacaagcmtttcttggggtttgtgctttgttttgaagcagttcttggtgatgcttaacagagtgcctggctggaacacagaagacactcaattaatgattttaagccagtgaataatgaatgaaagccacgaagccagcctagcgaagcctcggaggattccttcccgatggcatgatggttagatggtccaggcctggagcttacctggacctccttacctgggtgtcttagataattaaggaatttccccaagcctcagtttttaagttccttcataaacagggatagcacctccttcccaggtgaggtggagatgaaatgaaatgatgcaggggtatacttggcccaggtttgcatttaatgagctcctaataagtgttactattaatcaat

SEQ ID NO: 660370 - DNA, 636 bp, Homo sapiens
aaatggaaaatcgagatcccatgccatagatcgaaggtaactgtgaaatgtacgatggaaatacacttacagagttttgcctactgtgggagttagactcaaagggagacctgcaaacattagaaaaatgctatagtcatcctagcatgcaccagaggcttcctattggatgtaatcagaaaaagataacacgtgaatcaattttttaaatgctatgtctgtaagccacctaaaatcattgtgtgttctccctcagagggaaatgcccccacttttgggaaacgactgaattaatgactaggtctaggacatttgactagcaagcacaaaagcaatgcacatgaagctttctggttcagagagccaaggacccgataagagtaactgtactcwagcatgaccatcactttttagatctgctattatatagtcggcaaactccaccaggacctggatgaggcatcaaacgagtgaccatggctctctttttgacaactgtggttctttccaactctgagactctatgaacgggtgatattcctgtccatatacccagcttgatggatagacccagagctgtcctcaaatgccaattttagtacttgagagagagatttaaggccaagaatggtaatt

SEQ ID NO: 660371 - DNA, 636 bp, Homo sapiens
aaatggaaaatcgagatcccatgccatagatcgaaggtaactgtgaaatgtacgatggaaatacacttacagagttttgcctactgtgggagttagactcaaagggagacctgcaaacattagaaaaatgctatagtcatcctagcatgcaccagaggcttcctattggatgtaatcagaaaaagataacacgtgaatcaattttttaaatgctatgtctgtaagccacctaaaatcattgtgtgttctccctcagagggaaatgcccccacttttgggaaacgactgaattaatgactaggtctaggacatttgactagcaagcacaaaagcaatgcacatgaagctttctggttcagagagccaaggacccgataagagtaactgtactctagcatgaccatcactttttagatctgctattatatagtcggcaaactccaccaggacctggatgaggcatcaaacgagtgaccatggctctctttttgacaaytgtggttctttccaactctgagactctatgaacgggtgatattcctgtccatatacccagcttgatggatagacccagagctgtcctcaaatgccaattttagtacttgagagagagatttaaggccaagaatggtaatt

SEQ ID NO: 660372 - DNA, 639 bp, Homo sapiens
ggggattaatgaggataatatactataaactccaaagaagttgtaattaaagtgtcaggctgatggacatgattcataaccaggaactgcatcctctttccctataagtttctctatttaaaatcttaacccttaggacaatatttttatgctcctataaagcattgtgccaaacatcttaccaaaaatgtacagagctatagtccttcttcttatagaacaagttttagwgtttttctctctctgtattacttccaaaccataatcccaggtaattttttaaagagatggagctagaatatttttgcttttcccctccactatttactttgaaaattttcaaacacacagaaaagttacagttgtttggtaaaaaccagtgccacagtttgaatgtgtttctctaaaactcatgtaaaacttactctccaatgtaattgtcttaagaggtgaggcctttaggagatgattaggtcataaggactcccctcccacttatgaattggtgccttttaaaaaagggcttgcgggaatgagcttgtctcttattgcccttctgtcatgtgaggacacagcaaggagatgctatctcggaagcagagaacaagccttggttttggacttcccaacctccagaac

SEQ ID NO: 660373 - DNA, 600 bp, Homo sapiens
aaaaccatggcaaccagtacacagtacacatcctgcatcttgcccggtagtccttcaaattctttaatcacaagacaggaaatctgttttgtttggatgtcacttaagggcagattaatattacatgatggtcaaccatttgcttttatttaggaaaataaaaacctrtttgatggtgtaagctttacaattagagagagacaagagtgctttttattatttatttgtttactatcttttttcaaaaagatctgtggtaagtcccagaatcccaaaaggagagatgaagaaagtgagaagtattgggttgtgggctttctgcagttatgactgcagaaataactagcttggcagtcagggtaaataagaaaaataaaattggattctgtacagtgacactgccgaagtaccactcttaaactgggcaacatgaagagatctttgatatttctgtcttttgtttcaagttgaaaatagcttcatgatttttttctgattataaagtcaacagatgttcaagtagaccatccatgcactttagaagagtataaagaagaaagcaaacatcagcctaagtcacccaaaggcaactgttaaaat

SEQ ID NO: 660374 - DNA, 600 bp, Homo sapiens
aaaaccatggcaaccagtacacagtacacatcctgcatcttgcccggtagtccttcaaattctttaatcacaagacaggaaatctgttttgtttggatgtcacttaagggcagattaatattacatgatggtcaaccatttgcttttatttaggaaaataaaaacctgtttgatggtgtaagctttacaattagagagagacaagagtgctttttattatttatttgtttactatcttttttcaaaaagatctgtggtaagtcccagaatcccaaaaggagagatgaagaaagtgagaagtattgggttgtgggctttctgcagttatgactgcagaaataaytagcttggcagtcagggtaaataagaaaaataaaattggattctgtacagtgacactgccgaagtaccactcttaaactgggcaacatgaagagatctttgatatttctgtcttttgtttcaagttgaaaatagcttcatgatttttttctgattataaagtcaacagatgttcaagtagaccatccatgcactttagaagagtataaagaagaaagcaaacatcagcctaagtcacccaaaggcaactgttaaaat

SEQ ID NO: 660375 - DNA, 608 bp, Homo sapiens
tagcgttgaatggttatgttcacwtgtggtccaataggtcaaaatgtcattggttgatatgcattcatagtggtgtaggacctagactctacatatccactcttgtatataaatcatttcatgctcattttatatttcacatagtacaaaatagctttttaatttggtttgtgtaaatatatgacgagctgcaattcaatgatttctggagatgaaataccctgaaaacaactggaaagacacatcatttacattgtgaaattcatgtaaacctcacctgataaatgaccacatttccatgcaataattaactgttctatgtgctttgattaggctgggaaaatcttgattttggtgaatgcctatggttcttccaggctgttggataggacaagcccttgattgtggcctacctcactgtaaggttagcctccgtattaaagagaatggccatggtgaggacattgagctacagtgacagcccactcctgggaagaaaagcaggcctattacatttgctgcaataaactcatgctttctaatttgctgtctttttttttttcaaacaaatgtgttattactcaacaacaaagggtctgacaagatcc

SEQ ID NO: 660376 - DNA, 608 bp, Homo sapiens
tagcgttgaatggttatgttcacatgtggtccaataggtcaaaatgtcattggttgatatgcattcatagtggtgtaggacctagactctacatatccactcttgtatataaatcatttcatgctcattttatatttcacatagtacaaaatagctttttaatttggtttgtgtaaatatatgacgagctgcaattcaatgatttctggagatgaaataccctgaaaacaactggaaagacacatcatttacattgtgaaattcatgtaaacctcacctgataaatgaccacatttccatgcaataattaactgttctrtgtgctttgattaggctgggaaaatcttgattttggtgaatgcctatggttcttccaggctgttggataggacaagcccttgattgtggcctacctcactgtaaggttagcctccgtattaaagagaatggccatggtgaggacattgagctacagtgacagcccactcctgggaagaaaagcaggcctattacatttgctgcaataaactcatgctttctaatttgctgtctttttttttttcaaacaaatgtgttattactcaacaacaaagggtctgacaagatcc

SEQ ID NO: 660377 - DNA, 630 bp, Homo sapiens
attagttcctgggagacctggttgttagtggcaacttcccactctatctctcttgttttctctcttgtaatgtgatctctgcacacatcagctctccttcaccttccgtcatgagtagaagcagctgggcccctcaccagaagcagatgccagtgccatgcttcttgtacagcctgcagaacagtaggccaaataatcattctttctttataaattaccagcctcaggtattcctttatagcaacacaaatggactaagacagtcattaatatccatgtatacaacaaatcccataacctcttcttcctttgcacatagctagactctatttgccagcctctcttgaggttatagctaatggaatatgagcagaaatgacatgggccacctccaggcctggcccataaaaacctccttgattaattctccttgctatctcttcccccatctgccagctggatgtccgtgcccaggtaaccrtgaagttgtgtttgaataatggtggagcttccataagccagatcctagaatgattacatggaactcaacttatccacccctctacccctgtctattggaatttacataaagaaaatataattgtctatcatataagaccactgaaatat

SEQ ID NO: 660378 - DNA, 614 bp, Homo sapiens
aatcccataacctcttcttcctttgcacatagctagactctatttgccagcctctcttgaggttatagctaatggaatatgagcagaaatgacatgggccacctccaggcctggcccataaaaacctccttgattaattctccttgctatctcttcccccatctgccagctggatgtccgtgcccaggtaaccatgaagttgtgtttgaataatggtggagcttccataagccagatcctagaatgattacatggaactcaacttatccacccctctacccctgtctattggaatttacataaagaaaatataattgtctatcatataagaccactgaaatatgggcagggaagtgggggaggtctgttacagcagttagcctcccctgactcatacagcattcaagagcccatagaaagagcaggtgatgctctctgaatgcacctactcttgcagcatttctgaccacctttttttaatattcccctctacttgattccaacaactgatactgagctggggaatgatgggggagaagcatgytgggttgctacatactagcatgttgatgtgactttggaaaagaaaatgtgaagacggcaaagaacacaca

SEQ ID NO: 660379 - DNA, 580 bp, Homo sapiens
ttgatgtgactttggaaaagaaaatgtgaagacggcaaagaacacacattcctgaggacagaaatgctatcccaaccgacaaatccttgttgggcatgttccctaaaacagtcattctgctaggtgcygggaatacaaaggtatgaaacttcatctccaccttagaatgaaaacaaaaacaaacaaacaaacaaaaagatacagccctattcctcaagcttacaaactatttggggaaacacaacttaaaatacagttgactaatcaaagaggacaagctttacagtcagacagaattaggttgcaatatcaaatatggcacttagtaaatagatggaaaattatttcaacacattgtgcctcagtttcctcatctttaaacttatataatacctgatgtattagtctgttctcacactgctattaaagacatacctgagactgcataatttataaaggaaagaggtttaattgactcacagttccacatggctggggaggcctcacaatcatgactgaaggtgaatgaggagcaaagtcaagccttacatgacagcaggcaagagagcttgtgcaaggg

SEQ ID NO: 660380 - DNA, 622 bp, Homo sapiens
gcttttcatagaaataaaggactggaagccacattcattgcaatttaactcttttattttaaaggttaggaaactgagactcagagatgtatctattcaaactcatacaaccacttaatactgtaaaagccaaggattttgatctcataattctttrctgtgtaatgtgtccatgcaattgccaaacctttagcattattagaacaattattctggataatctcaagagcagagaatataatggggaaaaggcaaccgctaataaaatctgaatatgggtttggctcattttaagtcagtcctccaatttctccaaactataaaaatattcacatataagagtagaaatactgctatattttcagtcccatccaagtaggcattctgtaatgtacatttaagaactattccaagctgtcaataaaagtagtttctaggagactccattttcatagtctagtttgaacactacaaaaagtctgactgtgattggctaggattatgtataactgtaagtaatggaacatttagttctctcttctgaaagtctgaagatagtagcccttctaggttggtatgagcttccatagtatcagggactcagattctgatgtagtttggt

SEQ ID NO: 660381 - DNA, 582 bp, Homo sapiens
gctgcttggggaggctgccatcagaggggcatgctagagccatcgcttgtctacattgaaccctcagacaacaacggtgtcaaccacccatgagagctacgtaaagacaagtcaaataaggagctgggtctttcttgttccttttccttctccagctcagcatcagagaagcaggtgcatggagggaggaagaaggggttatatgaaagcagatcatgccccctcaaatgccagccctggwgcccactggtctagccaatgctgggaggagtgggggagaagagctttggatctgaaaaaaaattaaagtttaaataaacagagctgagtcttaaaaactgaaagtgacttttaattactgaaaatgacaaaaagctaaagaatcaggctgaagtgttataaagagcccctgtcacccagtgaggaggggactgtgttagagcagcgttgaaaatagtggttgggaaaaataagtgttctttgtttttacccgcaaatgaattgagactccttcctcaatgaaccaaatttgtcctttagtcaaaatcacaccagtgaagcagcctatgccaatttgaacag

SEQ ID NO: 660382 - DNA, 582 bp, Homo sapiens
gctgcttggggaggctgccatcagaggggcatgctagagccatcgcttgtctacattgaaccctcagacaacaacggtgtcaaccacccatgagagctacgtaaagacaagtcaaataaggagctgggtctttcttgttccttttccttctccagctcagcatcagagaagcaggtgcatggagggaggaagaaggggttatatgaaagcagatcatgccccctcaaatgccagccctggtgcccactggtctagccaatgctgggaggagtgggggagaagagctttggatctgaaaaaaaattaaagtttaaataaacagagctgagtcttaaaaactgaaagtgacttttaattactgaaaatgacaaaaagctaaagaatcaggctgaagtgttataaagagcccctgtcacccagtgaggaggggactgtgttagagcagcgttgaaaatagtggttgggaaaaataagtgttctttgtttttacccrcaaatgaattgagactccttcctcaatgaaccaaatttgtcctttagtcaaaatcacaccagtgaagcagcctatgccaatttgaacag

SEQ ID NO: 660383 - DNA, 422 bp, Homo sapiens
gctttgcaggaccatctcaaaatatatcaaataaatatattttggggtaaaatactttcgctttcttcagggcctactatctgtcacgtgatgctatactagagtctgtttggaacttgctggcttattgctacagagcctgttctgtcagtcttagaattcctgttttcatattaatgctggtcagttgtgcctgaacttcaaagggaggcgggtataatgaatatgtcctaccttccccttcctgtgatggcctgaactggtttttcagattcctttgggtccccttggctaagaggaggatccattcagtcagttggggggacttagaattttcttttggtttaccatatatatatgtatgtatatgtacacatatattrtctaattggagaagctctaccttggagcagagctttttt

SEQ ID NO: 660384 - DNA, 713 bp, Homo sapiens
attgcctcatccagggagcacaagaggttggagaacttcctcccctgaccaagggaagccatgagggactctgctgtgagggacagtgctatcaagcccagatacaacgcttttcccatggtcttcacaacccacagaccaggagattcccttgggtgcctataccaccagggccctgggtttcaagcacaaaactgggtggccatttgggcagacactgagctagctgcaggagtttttttttttgtttgttttgttttgtttttgtaccgcagtggtgcctggaatgccagcgagacagaaccgttcactcctctggaaaaggggctgaagccagggaggcaagtggtcttgctcagcatatcccaycctacagagcccaacaagctaagatccactggcttgaaattctccctgccagcacagcagtctaaagtcgacctgggatgctccagcttgatgaggggaggggcatctgccattactgaggcttaagtaggtggtttgcccctcacagtgtaaacaaagctgccaggaagttcggactgggcagagcccaccacaatgccaaaaagccactgcagcagactgcctctctggattcctcctctctggataaggcatctctgaacaaaaggcagcagcctcagtcaggggcttatagataaaactcccatctccctgggacagagcaactgagggaagaggcggtt

SEQ ID NO: 660385 - DNA, 713 bp, Homo sapiens
attgcctcatccagggagcacaagaggttggagaacttcctcccctgaccaagggaagccatgagggactctgctgtgagggacagtgctatcaagcccagatacaacgcttttcccatggtcttcacaacccacagaccaggagattcccttgggtgcctataccaccagggccctgggtttcaagcacaaaactgggtggccatttgggcagacactgagctagctgcaggagtttttttttttgtttgttttgttttgtttttgtaccgcagtggtgcctggaatgccagcgagacagaaccgttcactcctctggaaaaggggctgaagccagggaggcaagtggtcttgctcagcatatcccatcctacagagcccaacaagctaagatccactggcttgaaattctccctgccagcacagcagtctaaagtcgacctgggatgctccagcttgatgaggggaggggcatctgccattactgaggcttaagtaggtggtttgcccctcacagtgtaaacaaagctgccaggaagttcggactgggcagagcccaccacaatgccamaaagccactgcagcagactgcctctctggattcctcctctctggataaggcatctctgaacaaaaggcagcagcctcagtcaggggcttatagataaaactcccatctccctgggacagagcaactgagggaagaggcggtt

SEQ ID NO: 660386 - DNA, 525 bp, Homo sapiens
tgctaacttttaaggtacaggaacatatgtgactatagactatatttacttactcaaaatcaaacttcagatgtttagggaataaaacgataataaaattagtgtttaaaaatattcttcattttaataacatctaaaatgaatggtaaattgaaagtttgaaaaatttttattttttgctgtaatcattattttctgccttaagcttcttgatttcttttcctttctttctttttttttttttttcctggagagagagttttgttctgttgcccaggatggactgcagtggcttgatctcatttcactgcaacctctgcctcccagsttcaagcaattctcacacctcagcctcccaagaagctgggattacaggcatgtgccaccacacccggctaattttttgtatttttagtagagatggggttttgccatgatggccaggcaggtctcgaactcctgtcctcaagcaatccactggccttagccttccaaagtgctgggattacaggcgtgagccactgt

SEQ ID NO: 660387 - DNA, 510 bp, Homo sapiens
tgacttccaaacttaattatctgtacactatcaatcactccacctttctaacctaacaatgacaatcattgcattcctaatcacaacttgaattttcattgcttctttgctcttgactgtttctcttagcgatgagaaccactgagaacagggatttgaatgtaggggtgacggagaatggtataacaaaagaactttggggagtagtattctggaaaaaaactgtctagatttgaattttggctctaccattattagctgtataacactgtataagtcataacttcaygtataagtgaagataataataacatctatctcataagatatttgtaaagaaaataagaatacatgtaaagtgcttgcttagagatacatgtaaagtgcttgcttagagagtagctcagagttaacagtatatattgttagctattactatattgttgttcctactattatccttttgtttggatgatattctaggcctgtaataagaaatgctgatttttt

SEQ ID NO: 660388 - DNA, 617 bp, Homo sapiens
atattctgttttgttcttatatgagaattctatgcaaaggaaatttgagctttgtcacaattgttcagtttcctaaaaatatatcaaaagatctgaataaatcatagtaaaacattaaaatgtgctaaatctaaatggttaccaaatgggtgtttgttatattatctgttgtttactatatataacatttgaaacatttcattaaataatgggaactataaaaaaaagaaactaattttcccaaggacatttacattaggctttcaataccccaaaacactttagcttggatttctcaaatttagaatttgatatcatctaaatacccatttacactatcctaaaaacaaacaatgycaatgttttcaacccatatatttttttcattatttttttccttcactaagtatttattgaactgagaatgctattaaattctaaccactgtcctagacagttgcaccattgaccaacttgcttccttcctgtggttgcttcaggtggctttgctgtgtcttgcatcgctcagttatcatatgggcaatataattgtatcaaactctgcagaaactcatccattagagctttccaactcttacatcccacatgttttaaaa

SEQ ID NO: 660389 - DNA, 560 bp, Homo sapiens
tataaatagtcttttgacagggtcattatatgatgcataaaatttttacagttagaaatattgtatctaatttatttatgttagtttcatccagattacctctcctatattcctgtgagctacttgcctagaatttaggctcagtgtaccagaacataaaagcagctatgccaagctcattttgttcctttgaagcacactgaaacwcaaaaattaataacaattattaaggttcatactctttctcagtggctgaaatgggttattactttcattgaaaaaggaaaggaaaagaaataactagaaataaagagacaggtgatttctaatgaaaaaaacaaacacacaaggaaagggaaaagaagcacaagaaaaaataaagtgtaggaaactgcagtgagaaagtgggttaatgtaaatgaggtaataagtaatggaacagggattcttagattattcttctgtttgcaatttttttctcttcacattttttacttcaaccttcaaaacataaagcagactgtaaaagcacaaatataacccctgatctggaactgtct

SEQ ID NO: 660390 - DNA, 593 bp, Homo sapiens
tttagttttcaaagccaaagacatttcctctagtcatattttagaacaacatagcctgaattcatacattatgattttttaaaaaatggacaatatttcaatttgtaaaatcattaaggccccatatttaatttttgcaacattctctatatgcttaatatggcaatatctactctgtagcaatgtatagatkttaaataaatgcttgctgacttattatgacctactggtagtttcagcaaaactgaaagtataaacaaccaaggaaaaataacaaaacaagatcaatttcaagttttacatttacacagcacatccaaaccattatggtcttttaagctcagagtatgttttctaaacatatttggctctctgactgaattttcatgtaaaaagtaaaatgcacacaggataacaagatataattcctctcatactgtacctgaaaaattctgtttttacattcatgatgaattagctttgtcatgactcccttccattttctgaaatttcaccagaatatcccttctgaggaacataaaggtctagtttattcaaattttagagacgggtaaactggggcaaagagaaat

SEQ ID NO: 660391 - DNA, 593 bp, Homo sapiens
tttagttttcaaagccaaagacatttcctctagtcatattttagaacaacatagcctgaattcatacattatgattttttaaaaaatggacaatatttcaatttgtaaaatcattaaggccccatatttaatttttgcaacattctctatatgcttaatatggcaatatctactctgtagcaatgtatagatgttaaataaatgcttgctgacttaytatgacctactggtagtttcagcaaaactgaaagtataaacaaccaaggaaaaataacaaaacaagatcaatttcaagttttacatttacacagcacatccaaaccattatggtcttttaagctcagagtatgttttctaaacatatttggctctctgactgaattttcatgtaaaaagtaaaatgcacacaggataacaagatataattcctctcatactgtacctgaaaaattctgtttttacattcatgatgaattagctttgtcatgactcccttccattttctgaaatttcaccagaatatcccttctgaggaacataaaggtctagtttattcaaattttagagacgggtaaactggggcaaagagaaat

SEQ ID NO: 660392 - DNA, 593 bp, Homo sapiens
tttagttttcaaagccaaagacatttcctctagtcatattttagaacaacatagcctgaattcatacattatgattttttaaaaaatggacaatatttcaatttgtaaaatcattaaggccccatatttaatttttgcaacattctctatatgcttaatatggcaatatctactctgtagcaatgtatagatgttaaataaatgcttgctgacttattatgacctactggtagtttcagcaaaactgaaagtataaacaaccaaggaaaaataacaaaacaagatcaatttcaagttttacatttacacagcacatccaaaccattatggtcttttaagctcagagtatgttttctaaacatatttggctctctgactgaattttcatgtaaaaagtaaaatgcacacaggataacaagatataawtcctctcatactgtacctgaaaaattctgtttttacattcatgatgaattagctttgtcatgactcccttccattttctgaaatttcaccagaatatcccttctgaggaacataaaggtctagtttattcaaattttagagacgggtaaactggggcaaagagaaat

SEQ ID NO: 660393 - DNA, 659 bp, Homo sapiens
cctacattaatccatatatgtcaatttaaatctcaattcagttactaatagtgtaatatcagctaattaagagttatatgaacactagtctagaaatctagtcactataaagttactttttgtgaggaagtgctttgcccacttataaactggtgattgcttgtagtgtatgacatataatagaatacaaggacaatatactactgataataaaaaaccactattcctattagtcatctttggggtgtgtttatgtgcataactaatccagacactaaatgggaaagtgattttggagaaaaagacaattgaaaaactggagaagatagtcacctggcagaatgaaaagaaagacattaagtgttcatgtatttcatattctatatcctttacaatgactaggaaaaagaagtaaggcaggaatggtacaagtgctgatgtcaggttaagttgatagtggagctaatacttgtttcaatcaggttgtggctaatcactatacataaaacgtattttactctatgaaaaacmtaacagataatgtatctgaaagagttagttgaaacaaaaaataactttacctttggacctttaatataacaataaatactgataataatatagttaatatttattgagtacttacacatatcaggcat

SEQ ID NO: 660394 - DNA, 604 bp, Homo sapiens
aaagaaaggagaaagtaaaaaacatatgatcaattcaacacccaaccctgatagcactctcagaaaactaagaataaagagaatcttccttacccaacaaaggacatctgagaaaatgctatgctaacatcatactaaatgctgaaatattgacactgtcctcctaagatagacattctcaccacttctattcaacattatactggagaccctggcattgcaatcaggaaagaaaaacaggataaaaggcacgaaaattgaagaagatgcagtaaaactgtgtctccctgcagtcaagaagggtgaggccagaggctgartgtgccaggatgctggagcgtggtccaggcagaaaactctggggtggaataaaccaatggggctaggacacctggaccacaatgggaaggagggagccccagagtgccaggttccctcactcgggaggcaaatcaggggaccgtgggaagaagaagacagagcccagggcggtgagctgctgcccctgcttcatcctgtgcacggcagcaatggggccacctgcccagagaccccgagtgtcacacttgctggtgggtagagagggcagacaggcctggcctga

SEQ ID NO: 660395 - DNA, 599 bp, Homo sapiens
cccacttgcaggccgcatgtctggcaaatctcttaccctctctgaggcccctcagactctacccagcaggggccctgccccaggccccacgtctcggggagctccagctttgawgtgccctcctcaaattgtctgagacccctgtggtgtctgggacaagccctgacctggactgtggggaccctagttcccccttctccccatttggggcgctctctaactctacccaaccaccaccccacatggggtaaaccaggtgtccagaggtaccctgggaatgaactaggtctgggagggaggcctggcaggccggccactcggctggaggatccacgcttctttcgtgaggtcacatgaggctgggccatcagaaccgcacacgtggggtggcactcacccatgtcaaacacaagacaagctcaagtctctgagtccaccaccaacacttggacttgagccacagcgtgagcctgagtgctgattcccgggtgctgacctctctctgttctggccagggtgctgcttccagtccgtggcacccaagaggcatgatggtgactggcgctaaccgggtagctccgctgctggcagccacactc

SEQ ID NO: 660396 - DNA, 599 bp, Homo sapiens
cccacttgcaggccgcatgtctggcaaatctcttaccctctctgaggcccctcagactctacccagcaggggccctgccccaggccccacgtctcggggagctccagctttgatgtgccctcctcaaattgtctgagacccctgtggtgtctgggacaagccctgacctggactgtggggaccctagttcccccttctccccatttggggcgctctctaactctacccaaccaccaccccacatggggtraaccaggtgtccagaggtaccctgggaatgaactaggtctgggagggaggcctggcaggccggccactcggctggaggatccacgcttctttcgtgaggtcacatgaggctgggccatcagaaccgcacacgtggggtggcactcacccatgtcaaacacaagacaagctcaagtctctgagtccaccaccaacacttggacttgagccacagcgtgagcctgagtgctgattcccgggtgctgacctctctctgttctggccagggtgctgcttccagtccgtggcacccaagaggcatgatggtgactggcgctaaccgggtagctccgctgctggcagccacactc

SEQ ID NO: 660397 - DNA, 565 bp, Homo sapiens
gcaccttcaccctgcattcggtcatgatcgcactgctcactgtctgcctccctctctagattgtcagcgccctgagatcaggattctgaccttcttgttcacaactggaaccccagtgccgagaaggggcctgctgtgagcagggcagagcatgtgcacccacygagtgagcgagtgaccattgcagcctcactcctgcgctgcattccgcagcattctttcacatccatggtttcccccgaggcccctcaggaacaaaggctcagagagggtgggagaagtgtgcagggtcacacgtgcttcccctcctccctttatggggtcctgtggaggaaggggaggcctgactgcacactgcagaggccagggcagggcagagagactcccacgcatgctactccagggatggggcctggagggaggctcccgtgcgtgctagtccagggcctgtggaggaaggagacgcctgacctcacactgcagaggccggggcagggcagggagattcctgtgcatgctactctagggatggggcctggattcttcagtgggtccctgggcaagt

SEQ ID NO: 660398 - DNA, 492 bp, Homo sapiens
actcatgcacacaaacacacactgccctaacctcacacacagacacacacacactgccctgatatcatacacacacacacagacacacacatactgccctgatatcacactcatgcacacacactgccctgatctcacacactcatgcacacagacacactgccctgatgtcacacacacacacacacgcacactgccctgatctcacacatacacatacacactgccctgatctctctcacacacccactgccctgatgtcacacacacacasacacacacacactaccctgatctcacacaatcatgcacacatacacacacttccctgaccctatcactctgcacattggagctaagctcatgaaggctgctcatgcattttatttggcaagtctctctcacatctttaatcacactagcctgcccactgccaatcaataaagattaggaaatcgattgctaacttactcttgggttagataataaaat

SEQ ID NO: 660399 - DNA, 492 bp, Homo sapiens
actcatgcacacaaacacacactgccctaacctcacacacagacacacacacactgccctgatatcatacacacacacacagacacacacatactgccctgatatcacactcatgcacacacactgccctgatctcacacactcatgcacacagacacactgccctgatgtcacacacacacacacacgcacactgccctgatctcacacatacacatacacactgccctgatctctctcacacacccactgccctgatgtcacacacacacacacacacacacactaccctgatctcacacartcatgcacacatacacacacttccctgaccctatcactctgcacattggagctaagctcatgaaggctgctcatgcattttatttggcaagtctctctcacatctttaatcacactagcctgcccactgccaatcaataaagattaggaaatcgattgctaacttactcttgggttagataataaaat

SEQ ID NO: 660400 - DNA, 483 bp, Homo sapiens
aaccttgaactctgtcatcacaggaaccagtaaattcacctttaagcccaagttgagtttctgtcactcacccccyaaaaaagtgctgatgggagggtgtctgggtaacaactgcatgccagttgaccacatccatgccgctgccagccccggatctggggtagagtctagccgcctgagggcatcaagtttgtggcccatgagggtcgtagccatgctacagggcagaggacaagaaccgggtccccatgagaccaaaaggagacaataggtggaaaggatggcctgcactgaagccggggccaccaggcttgtcgcccctcactctgtggacagactgggttgcaccatttctgagggaatctccatgactcagtcctgggcattgcggctggggccagtactcaaaatggcagcagacgcagtcggcctgccagcccctgctagctcttgtttcaggtcagaggaagaaagtactggtgg

SEQ ID NO: 660401 - DNA, 493 bp, Homo sapiens
aatggcagcagacgcagtcggcctgccagcccctgctagctcttgtttcaggtcagaggaagaaagtactggtggcctctggggatccagaaaggactggtggcctccaggtgtccaagagtcttctcttcaacgaacatggtgagggggagcattgtgctgggttgatgagtgtcccccaaaccaacttccactcagaagcccaaaatatgaccttgtttggagacagggtctttgcacacrtaactagttaagatgaagccatgctgcattaggccagggccctgtgtccagggccttccctgtgaggtggccgccaggaggccgacctcagggacacaaggactggaatgtgggggtctttggagaggcatgacgccccctctgtgagtggacagacatcaagaatgaagggagccctcaacggggatggagcagcccctgagacctgagggtcccaccctgggacaaaggtgccctgagctcaagccag

SEQ ID NO: 660402 - DNA, 592 bp, Homo sapiens
ccatcttttataataaaaatctctctaatatttaaaatrtacatcatactcccatttaaatcacaatgcttactatttttacccaaagtgcttctatttcttgaaagagctgatgtttactagaattgaacatgggtcatgcaagaagcactgagtcaagattggctgggactgcggaatcctctctctcctgcaggaatcccatccacacgctcctggttcactttcatcatctgaaggacctcttcgtacctagattctacttgttatgtgcagtttattttggttctaaaggtcagaggcaaatattaataaaggcatttgcagccttttaagcttggaagatattcctggcagggcgaggggcaagacatggcatcagaggtcattcaccatccccggcactgtgtcccgccggccacaggacccctgcattcactcccttacctagtagtaggatatatggaaattagcctgggaaatgttgtatgttagcatagttcatgtttaatatactaaagcatggcctttagtccataaggttttatgaattacccgaacatatacaagcattctttaaacaaataacact

SEQ ID NO: 660403 - DNA, 605 bp, Homo sapiens
gacttgggtctgggaatackaaagctgaagctgaagggtcccagatgtctctgcttctgcctacagaaggccagtgctttggtaactttggcaagaaaataagtgcagatatcttggatacctcatttttttttcctccgtttccacttcaggccactcttttgccttacacccacattataccagttcaactcaaattcaactcacagcccacacaaatgttttagatggcatccttgcctgaatcatgatgcctgtgggggctggactgttttctgtaatttcctttcagggtcaaaaatctatgaaggactacttcaatgaacgattaatctctttcaggagatcatatttctatttagatgtcttaagaacatagtaaaaaagacattggacctttcctctctattaaaaaaaaaagagcgagacagagacagggagaaacagagagagcaaaagagagatttcaccttgtccttttatttgttaacactatctgtcaaagaaaacctgtataaaagcccccagtatactaaagaaggtaagacgttagataattgcagagccatccttcttacttcttttttttttttcacatgcttctc

SEQ ID NO: 660404 - DNA, 605 bp, Homo sapiens
gacttgggtctgggaatacgaaagctgaagctgaagggtcccagatgtctctgcttctgcctacagaaggccagtgctttggtaactttggcaagaaaataagtgcaratatcttggatacctcatttttttttcctccgtttccacttcaggccactcttttgccttacacccacattataccagttcaactcaaattcaactcacagcccacacaaatgttttagatggcatccttgcctgaatcatgatgcctgtgggggctggactgttttctgtaatttcctttcagggtcaaaaatctatgaaggactacttcaatgaacgattaatctctttcaggagatcatatttctatttagatgtcttaagaacatagtaaaaaagacattggacctttcctctctattaaaaaaaaaagagcgagacagagacagggagaaacagagagagcaaaagagagatttcaccttgtccttttatttgttaacactatctgtcaaagaaaacctgtataaaagcccccagtatactaaagaaggtaagacgttagataattgcagagccatccttcttacttcttttttttttttcacatgcttctc

SEQ ID NO: 660405 - DNA, 641 bp, Homo sapiens
tggtgctatcttttcttgggtggaagaaaaaaattagaagtattctcattcctattattgacatgattcaagaagttgtcacaggtataaaaattgagcatcagttgtgaaaaatgaatattctgaaatcaagaaagattttataagaattttcaaaaatgaatacttaaaaggaggcagtgaaaagttgattgartgctctaaaaactgtttcagatgtttgaaactgaacatttctccaagaaccaaggaaattaaaaaattggaattcttgagagacaaaaaagtaaaaattaaatgcaaatttagaaaaaaaatccacacgtgagtgcaaatttaaaacaaaaaatgcacacataaaatgcagagtagccgaacagaaagaataagaataagaaagaaataaaagaaaattgttctgaactgacaagtctttgagaggattcaccaattattcagataattttaatagaaatataccaacacctatttatagctcattgaatttttgtaaatcaaagatgaagtaaacttaaaagcacagaagctaattaggttgaaaaatatctaagatgagactggtattgcacttctccaaaatactaaagataagaggaaggaaaatgagcaaaagtgttttg

SEQ ID NO: 660406 - DNA, 641 bp, Homo sapiens
tggtgctatcttttcttgggtggaagaaaaaaattagaagtattctcattcctattattgacatgattcaagaagttgtcacaggtataaaaattgagcatcagttgtgaaaaatgaatattctgaaatcaagaaagattttataagaattttcaaaaatgaatacttaaaaggaggcagtgaaaagttgattgagtgctctaaaaactgtttcagatgtttgaaactgaacatttctccaagaaccaaggaaattaaaaaattggaattcttgagagacaaaaaagtaaaaattaaatgcaaatttagaaaaaaaatccacacgtgagtgcaaatttaaaacaaaaaatgcacacataaaatgcagagtagccgaacagaaagaataagaataagaaagaaataaaagaaaattgttctgaactgacaagtctttgagaggattcaccaattattcagataattttaatagaaatataccaacacctatttatagctcrttgaatttttgtaaatcaaagatgaagtaaacttaaaagcacagaagctaattaggttgaaaaatatctaagatgagactggtattgcacttctccaaaatactaaagataagaggaaggaaaatgagcaaaagtgttttg

SEQ ID NO: 660407 - DNA, 544 bp, Homo sapiens
aaggcaggcagatgacttgagcccaggagtttgagaccaacctgggcaacataatgagaccctctctctacaaaaatacaaaaattagccacgtatggtgttgtgcacctatagtcccacctacttgggaggctgaggtgggagaatcacctgagcccaggaagtcatagttgcagtgagctgtgatcacacctctgcactccagcctgggtatctgagtgagaccttgtctcaaaaaaaaaaaaaaaaaaaaaaaaaggtattgagctctaaaactatttagcaataacctggaggtgataaaacattttgcatataaaataatctttaaaatagargttacattctaaaagtgatagtaatttgctttaagaactcaactgagattatatcataaaaactgggaaattgatgaagaaatgaaagagtaataacataaaatcatgtaatgtaatgcagtgggggaataaatggatacttttcattctcaattctaatagagaaactagtttctagtatcttttttaagatagaagttaattag

SEQ ID NO: 660408 - DNA, 577 bp, Homo sapiens
ttgtgtggcagaatgttcagttatttgatgatatggcttggctgtgagtaaaagagaacagtgctctcttgcaggggtggaaagtgcctggacattccctgtgagtttgaggaattctgtgccrttaaggagtagacttactcagaaatactttgtgaaaagttcttatagaggaatattactgttagatgtaatattttagacatagtcctagatgttgctcaagagagcgtgcacagtaagtacttcttttctaccagcgtgaattgccaaggaaaattttggagaccttcttttggaattcgagaattattctagaagagagagagaaagagataacatgtgccttgactggagtagatacagtgtattttggtagaagattcctggtggttcatttcaggcacagggttgaacaagtaaaccatctcattgagctgtacaagatgtactctgcaaatccttccctatcctgggaaagcaataaagtccatggcttttaagatgacacagtaaaacagcttactgctttgaaactataattttgaaaggctgaagattgtttttgcatcactgg

SEQ ID NO: 660409 - DNA, 605 bp, Homo sapiens
aaattatggaatacagggcaattatttgaactacattagtttaaaacaagtggttgagaatttttttcccgtttcatccaatggaaaaaatttaaaaacttggtcaacaaaccaattgattgaatataatgaagttagtgcaatagcttactgggactagagataatacaataggaattgacatttgctatattagagaaccacaaataaaagtaaatgtggagctgttagggacttcacatgattatctattttagtgataaatcagactggtattctcagcaaggagaaagtatattgtctgcaggattgaaaaggaaattatyatagtaatgtgaaaagaatactgtatgtggggtctgaaactttgctgcatgaccaaaggcaaatcatacaacttcaataagagtttgtttctcgatctgtaaaatgaggataataatattttcttcccaaaattatgctgagaagtaaataaggttatgttttaaaacatctacaaaatgcccagcacatgataactaatcaatatgagctccccctctctttcaacatggcagcatagtgtttaacatgggaggcctattctaaagaaaataaaacat

SEQ ID NO: 660410 - DNA, 598 bp, Homo sapiens
ttactgggactagagataatacaataggaattgacatttgctatattagagaaccacaaataaaagtaaatgtggagctgttagggacttcacatgattatctattttagtgataaatcagactggtattctcagcaaggagaaagtatattgtctgcaggattgaaaaggaaattattatagtaatgtgaaaagaatactgtatgtggggtctgaaactttgctgcatgaccaaaggcaaatcatacaacttcaataagagtttgtttctcgatctgtaaaatgagsataataatattttcttcccaaaattatgctgagaagtaaataaggttatgttttaaaacatctacaaaatgcccagcacatgataactaatcaatatgagctccccctctctttcaacatggcagcatagtgtttaacatgggaggcctattctaaagaaaataaaacattatactatagcctttttttcataaattgtgctttatttatttcttattccaaaatgagtacatgttaattacataaaaatttggaaataagtatgttcctcccaaattcccttagtcccacactctcggagacatcgata

SEQ ID NO: 660411 - DNA, 450 bp, Homo sapiens
gtaaaattattgaagctgactagtaaaagttaattattcatccaatagtatccagtatgtgtggaaaaattaaaccctgccaactagcagctaaatagaaatgacatcaaatcttactaattcagattaattaagaatagtcatgtaaatgttaagtttgaatgctataaaaaattagttttatatcttccaagtatatgctacacagttggtargtaaagtgaagtaaaggttatttggaatttgctatattaaatgtataagaataattcaaataattcataatgcattaattatttaaagatttataaaaataaggcaatcaagaaaatttgtttttccagtcaattaaatataaactttgcagtaccacgtatattagcatttgcttaatatgtcatttctccttttgtttagcctttctctgatccattgaaagttcatgatgaa

SEQ ID NO: 660412 - DNA, 619 bp, Homo sapiens
ggacccttttaaacggtctcattttctctcttgaatatggctgaaattataggcttcctaaaatcttacttggtcrtgacacgctgatcataaaattcaaactctgtgcctgggtttaactaccctgcattgttcctctgtagctagccctgctgtcttcattgcttcttaacatatgtcattcatgtctttctggctctcttctgtatcacatcacacttgctctgtaggatgcaagcaagagaactggactggatgtcagaaagtctgggtcctagttcaacttctgggaattatctttgtgaacttgggcctgtcattcaacctcccttgacttcaagtcaaatactaaccaagacaaagctgccatagcagtgctaatactatgcagagtaaactcaaaggcaaaaaagaattgcttgtaattttgagaatcactgaaaagaatgaaaagctacattcatcaagaaattaaaatattctcaattgctatgtacacacttgcatcgcctcaaaattttaaataaaaaattgacggaatcgcaaagagaaagatacattaaacatcatcaaggttgacaatgtatctcttagtcattgatagcacaagtcaattaag

SEQ ID NO: 660413 - DNA, 617 bp, Homo sapiens
caacctttagcccctttttcctctccagaggttaggggtgggtctgaatgttccaagcttttaatcacatggtgagttgcccctggcaaccagcccctatcctgaggctatccagaagcccaccaagaattgcttcattagaagaaaagattctcctatcacccaggatattccaagggattggaaggagcgctgtgttgggaaccaaggggcaaaggccaaatgttataacagaagattctcctagcaccctggtctacaagggtatcaggagctatctctcaggaaccagaacagagaccacacattagaagaaataattctagcactcctattgcttaggacattataagagttttaggaactctgtgccaagtactttggacagagaccattatatatattttttattatttcacaattgtaacttaatctgaatatagtatttagattaatacaaatttgtycttaaatttatccattggattcttaattttgattattgtatttttgattttggaattttgatctgattcacttcttttgtgattcctgagagttttttaggaaaatatttccaatcttgatatatttccttgaaaatatttggcatagtt

SEQ ID NO: 660414 - DNA, 519 bp, Homo sapiens
aaaacttagcaccgtctctgcagcgtgggaaatgggtgcttgggtgcttattgatattacccccattttagagttgaagtaactgaggctcaggtagactagtctgagcgtcttcatggtgaggctgggaaaaaggctgttcttgcgctaatggatgggatttcgtagccatgtaatttgaatattttttttaaaatgacttcattcycatctcaaaataatgaagtgggatagaggatgtataagtgcagagctaaggaggaatgttgtaatgttaattttctttctccatcccctcattttggagagctgccttcctgtcagacttttattatccacggtggtaaatcaaacttcccaatttgcagattcctaaccccaaaggaataccttcaaagactgtacttcagcaagactgtatatagttcggaaaataaattcaattatatttgaaataataaacttgttaccaaattatatgccatttaagagagacaaacaatgtccattccgagttca

SEQ ID NO: 660415 - DNA, 412 bp, Homo sapiens
ttttccccagtatttctcataatactacatattawttgcgcttatggttattcagtcttattatttaattataaaagcttatagcttttactttgggggcaaagacaaagagaagaaagtgttctctaatcccttaaggaacaagaatatgacatttgccaatgtgcgttgtgtttatggagacttctttcaactctgttcttattttcatcctatggaggcatcctgaggtaaatgggcagttatggaccatcaaatgcgaaataaatgttttaatgaggaaacacagcttgctcgttcaaatacaacttaggattttcacaagctgttttcctttcttctattcctcttaaaacaaccatgggaaaacatagctacagagaggtaacaaaatactatgtaaattataatc

SEQ ID NO: 660416 - DNA, 412 bp, Homo sapiens
ttttccccagtatttctcataatactacatattaattgcgcttatggttattcagtcttattatttaattataaaagcttatagcttttactttgggggcaaagacaaagagaagaaagtgttctctaatcccttaaggaacaagaatatgacatttgccaatgtgcgttgtgtttatggagacttctttcaactctgttcttattttcatcmtatggaggcatcctgaggtaaatgggcagttatggaccatcaaatgcgaaataaatgttttaatgaggaaacacagcttgctcgttcaaatacaacttaggattttcacaagctgttttcctttcttctattcctcttaaaacaaccatgggaaaacatagctacagagaggtaacaaaatactatgtaaattataatc

SEQ ID NO: 660417 - DNA, 633 bp, Homo sapiens
aaaaacatatgtcctacctcacatagtagctmtgaggaataactgtgcaacttttcttgaacatagtagacaacttctaataaacaccaacaagtactccacagtgacagcactattaataaataacttttattcttccatggcaatgagccaagcctttaccccaaaactcaactacaaatcctcaatccctagattcaaatagcgcattggaatatcctattttgtatagggcagggaattacattccaagggagatgagaaatgattgaacatatttcaatatcctcatagcggggtgccctgagagaggctggtttcccatgagctctgttgttcaccaggactctggccactgggcagacaaacgatagaatgtctatttttctaataaagccatataaggaccaatggtagcccaccttttccatggtggagtccacagatgtggaaatacaacactctgaattagtcacattagcagccacataagcatagaaccaaatggcagacagaaatgctctgagagcttacctaccctcatctcattcttgaattcttcttcattttttctcggcaaaatcaactagcacacaaaaagaatatctcttaatcataaacatgtatgacatg

SEQ ID NO: 660418 - DNA, 633 bp, Homo sapiens
aaaaacatatgtcctacctcacatagtagctctgaggaataactgtgcaacttttcttgaacatagtagacaacttctaataaacaccaacaagtactccacagtgacagcactattaataaataacttttattcttccatggcaatgagccaagcctttaccccaaaactcaactacaaatcctcaatccctagattcaaatagcgcattggaatatcctattttgtatagggcagggaattacattccaagggagatgagaaatgattgaacatatttcaatatcctcatagcggggtgccctgagagaggctggtttcccatgagctctgttgttcaccaggactctggccactgggcagacaaacgatagaatgtctatttttctaataaagccatataaggaccaatggtagcccaccttttccatggtggartccacagatgtggaaatacaacactctgaattagtcacattagcagccacataagcatagaaccaaatggcagacagaaatgctctgagagcttacctaccctcatctcattcttgaattcttcttcattttttctcggcaaaatcaactagcacacaaaaagaatatctcttaatcataaacatgtatgacatg

SEQ ID NO: 660419 - DNA, 544 bp, Homo sapiens
gaggcaaagaccagcccagggtccaaggcactgataggcttgtgtactgtaggaagctcatcgccaagagaagcattttaacttargccttatcaatccaggcttcaccggtaaactgtccacatcttaggttcttagagtaaatttcacagagtcctactttggatgattatctaatgaagaaattctccactgaaggcaagaaggcacatcagtgcaagatgtttacatgtgcacagatatctgaaggagcatgttccattgatctagttcagtaattcataacacagagtgggaaagccaggcaaaatattcttggctggagagagaggatagtgagtaagtattctggtgggcacaggtctaaaaaggttgaggaaacactattcttagactgtgagcttgatgacatttccccatctaagaacatgagaccccggagcgccatgccttgtgcttctcaggtatccgccagggtcctctgcatagtattgaacactcaggtgcttaataagtatttttccttctttcagaaaatatttat

SEQ ID NO: 660420 - DNA, 544 bp, Homo sapiens
gaggcaaagaccagcccagggtccaaggcactgataggcttgtgtactgtaggaagctcatcgccaagagaagcattttaacttaggccttatcaatccaggcttcaccggtaaactgtccacatcttargttcttagagtaaatttcacagagtcctactttggatgattatctaatgaagaaattctccactgaaggcaagaaggcacatcagtgcaagatgtttacatgtgcacagatatctgaaggagcatgttccattgatctagttcagtaattcataacacagagtgggaaagccaggcaaaatattcttggctggagagagaggatagtgagtaagtattctggtgggcacaggtctaaaaaggttgaggaaacactattcttagactgtgagcttgatgacatttccccatctaagaacatgagaccccggagcgccatgccttgtgcttctcaggtatccgccagggtcctctgcatagtattgaacactcaggtgcttaataagtatttttccttctttcagaaaatatttat

SEQ ID NO: 660421 - DNA, 530 bp, Homo sapiens
aatttgaacaatgcacatcaaaatgttaactgaattaatcaattcagttgattgattaattgggtagtagaattatcgatgatttktcttttattctctgtatttttcagatttagcaaatcacaatttctcactacttttaaattaaggaaaaaaacacattttacaacaaaacccccaaaattccataaacctttgcaaactaaagttgacagtagattgctgatagtgaacacaagaagttagagcctttccagttggctcacagctcagcccacagctacaaattcactctaatcccactgttttgttatctttcttgaaattttatttaatgcaaatccaagagcacagtgctataataaggcctctggtctccttctagtagagagaaaggtacacagaaaagaaagtaggcatgaataaaggtcatatatgacaagcccacagctaatattatactcaatggtaaaaagctgagggcctttcctctaagatcaggaacaagacaaggatgctcactcttgcca

SEQ ID NO: 660422 - DNA, 609 bp, Homo sapiens
tatgtgaggtaagactaagtatgttattagcttgatttagcctttctacaatgtatacatatttcaaaacatcatgttgttttgaatttcaatagtcatgttgataaatatatatgatttttatttgtcaattaaaaactaatttttttataaaaaagtagtcatgggttattaaaaatagatcctctctcatgctcgccagcaccctcttgtgtataygagtcccaggtgtagcaacttgccactctcctagtttttctgctgaacaaaaaacgtgtgaagatcgaagatgcagctgcagataaaataacatttcctccaccctggccaacaaggtgaaaccccgtctctactaaaaatacaaaaattagccgagtatggtggcatgcacctgtagtcccagctactcaggagaccaaggcaggagaatcgcttgaacccaggaggtggaggttgcagtgagccgagatcacgccactgcactccagcctgggtgacagagtgagactctgtctcaaaaaaataataataaaatataatttaaaaaaataaaataacatttccatgcatcctaccaatggatgtgttttaatgggctgtggctgaaaa

SEQ ID NO: 660423 - DNA, 609 bp, Homo sapiens
tatgtgaggtaagactaagtatgttattagcttgatttagcctttctacaatgtatacatatttcaaaacatcatgttgttttgaatttcaatagtcatgttgataaatatatatgatttttatttgtcaattaaaaactaatttttttataaaaaagtagtcatgggttattaaaaatagatcctctctcatgctcgccagcaccctcttgtgtatacgagtcccaggtgtagcaacttgccactctcctagtttttctgctgaacaaaaaacrtgtgaagatcgaagatgcagctgcagataaaataacatttcctccaccctggccaacaaggtgaaaccccgtctctactaaaaatacaaaaattagccgagtatggtggcatgcacctgtagtcccagctactcaggagaccaaggcaggagaatcgcttgaacccaggaggtggaggttgcagtgagccgagatcacgccactgcactccagcctgggtgacagagtgagactctgtctcaaaaaaataataataaaatataatttaaaaaaataaaataacatttccatgcatcctaccaatggatgtgttttaatgggctgtggctgaaaa

SEQ ID NO: 660424 - DNA, 609 bp, Homo sapiens
tatgtgaggtaagactaagtatgttattagcttgatttagcctttctacaatgtatacatatttcaaaacatcatgttgttttgaatttcaatagtcatgttgataaatatatatgatttttatttgtcaattaaaaactaatttttttataaaaaagtagtcatgggttattaaaaatagatcctctctcatgctcgccagcaccctcttgtgtatacgagtcccaggtgtagcaacttgccactctcctagtttttctgctgaacaaaaaacgtgtgaagatcgaagatgcagctgcagataaaataacatttcctccaccctggccaacaaggtgaaaccccgtctctactaaaaatacaaaaattagccgagtatggtggcatgcacctgtagtcccagctactcaggagaccaaggcaggagaatcgcttgaacccaggaggtggaggttgcagtgagccgagatcacgccactgcactccagcctgggtgacagagtgagactctgtctcaaaaaaataataataaaatataatttaaaaaaataaaatracatttccatgcatcctaccaatggatgtgttttaatgggctgtggctgaaaa

SEQ ID NO: 660425 - DNA, 557 bp, Homo sapiens
agcgtgtattagctcacctggtattctgactcctttaccttctcctctctgttccctcggacaaatgtgcttctctttctgcctctgtatgtgtctccctctgtctctgtctctcattgtgtctctgcatatcacattgtgatttgtgtctgtctgtcctttctctccctccccttgtctctttctctatgactctgtgtctggatgtctgcctggttctgttgctctattatctttctctccctgtctctctcttcctgtctgtggtgtgtgtggggtgaggggactctctttgtatatgtctttctcattcagagaaaataaactgsatctcttagttccatgttcgccaaggacttttccaactcagtcctgtgtgccagggtagcagcatccttagctctccactgggcaacaaccaactgagtggcagaaatcttagggtgaaccttaaaactcagaatgagcaatgctgaagagagagagaatgatttattataaggcgttggctcatgtgataatgaaaactgagactttccaagatctactgcctgtaa

SEQ ID NO: 660426 - DNA, 663 bp, Homo sapiens
ataccttggagatattgtaggttcagtcccagaccaccatcataaagcaaatgctgcaataagatatgtcacacaaattttttggtttcycagtgtctgtaaaagttatatttgcactatagtatagtctagtaagtatgagattgcattatgtctaaataaacacatccatactttaactaaaaatactttattaccaaaaaatgctactgatcatctgagccttcacagactatttttgctggatgaagggtcttcctcaatgctgatggccgctgactaattaggtggtggttgctgaaggcaggggtagctgtgtcgatttcttaaaataaaacaacaatgaagtttgctgcattgaatgagtcttcattttatgaaggatttctctatatatgcaatgctgtttgagagcattttacccagaatggaaattctttcaaaactagagttaatcctctcaaaccctgccactgcttggtgagctaaggtcatgtaatattctaagtcctttgttgtcatttcaacactgttcacaccaggagtaaattctatctcaagaaaccactttctttgctcatccataagaagcaacttttcatccattcaagtcttatcatgagactgcagcaattcagtcacatcttcaggctccatttataa

SEQ ID NO: 660427 - DNA, 528 bp, Homo sapiens
taatctaattcagtcaccatataggcaagctggccctttgccataccaatttcattcattttgtacattaaaaccaaccacagacataccttggagatattgtaggttcagtcccagaccaccatcataaagcaaatgctgcaataagatatgtcacacaaattttttggtttctcagtgtctgtaaaagttatatttgcactatagtatagtctagtaagtrtgagattgcattatgtctaaataaacacatccatactttaactaaaaatactttattaccaaaaaatgctactgatcatctgagccttcacagactatttttgctggatgaagggtcttcctcaatgctgatggccgctgactaattaggtggtggttgctgaaggcaggggtagctgtgtcgatttcttaaaataaaacaacaatgaagtttgctgcattgaatgagtcttcattttatgaaggatttctctatatatgcaatgctgtttgagagcattttacccagaatggaaattctttcaa

SEQ ID NO: 660428 - DNA, 577 bp, Homo sapiens
tttacaacttactttggccagatccatcatgaatcattatctatggcagttatagccttatgaaatgtatttcttaaataataagacatgaaggtcaaaattattccttgatccatgaactgcagaatggacattgtattagtaggcataaaaacaacattaatctccttgtacatctccatcagagttcttgggtaactaggtacattgtcaatgagcagtagtaataatttgaaagsagtctttttttctgagagtaggtctcaacagtgggcttaagatattcagtaaaacatgttgtaaacagatgtgctgtcatccaggctttgttgttccatttatagagcacaggcagagtagatttagcataattcttaagggccctaggattttaggaatagccagtgagcattgacttcaacttaaagtcaccagtggcattagcccctaacaagagagtcagcctgtcttttgaagctttgaagccaggtactgatttctctcttgctataaaagtcctatataacatcttccaatataagattgtttcatctgcaatgaaaacctgtggtttagt

SEQ ID NO: 660429 - DNA, 577 bp, Homo sapiens
tttacaacttactttggccagatccatcatgaatcattatctatggcagttatagccttatgaaatgtatttcttaaataataagacatgaaggtcaaaattattccttgatccatgaactgcagaatggacattgtattagtaggcataaaaacaacattaatctccttgtacatctccatcagagttcttgggtaactaggtacattgtcaatgagcagtagtaataatttgaaagcagtctttttttctgagagtaggtctcaacagtgggcttaagatattcagtaaaacatgttgtaaacagatgtgctgtcatccaggctttgttgttccatttatagagcacaggcagagtagatttagcataattcttaagggccctaggattttaggaatagccagtgagcattgacttcaacttaaagtcaccagtggcattagcccctaacaagagagtcagcctgtcttttgaagctttgaagccaggtactgatttctctcttgctataaaagtcctatataacrtcttccaatataagattgtttcatctgcaatgaaaacctgtggtttagt

SEQ ID NO: 660430 - DNA, 502 bp, Homo sapiens
agaatggatattctgaagatatttgaacacgttgcatttttacaacactttaccaatatctaccacttgatttcaggaaaagactttgcagagattatttttaaaaaagaaaatctttcccattaactctttgccatttaaaggaagggccacaaagggttaagtccagggattagcctccctgaactgacagcagtggctcattaaggagcctggagtaaaagaacagggctgagacacacagccagcacaaaaactgtttaaacaatatgatgtgaaggatacacaaagttaacctactagaatttcctgcttctcattcctgagagcccctctgactcaacactatggcttatgaagtaaatgcattagaactcctcatacacaaaagagaaattaagatactggatagctgggtatcawgtagaactgcagcaatgatgctgaaaaaatcaggaatcacgacaagtaaattttaataggaaagtgggacaaagactgt

SEQ ID NO: 660431 - DNA, 620 bp, Homo sapiens
attgtttttcattgcagacttgctcataaagcagtacaactaaagaagtaagcactggaatgttctatcatagtccacagaatagaaagagagatgttgggaagagtcttagggacagtccttaaggattcatgaaggaggtggctgaatcttatgayaagaatctttaaatgctgaaccatgcggtagacagaggtagaaagagcagacagtttaaggttgaacaagtaatctatccaaaagatgcaaagagaaggtcctgtggggtttaagtgatcatcagcagagagctgcattagcacaggtcaggctgggcatcttcagaaacaggagaagcctgcataacacatttaaatggcccttcgggtgttgtatgtttcccagggtctgtatagatctgggaaggcatgctcccaggggacctgaggaatgccagattcaaggccactctgccaaacactctgtgcaaccccagacagtgatatcactgtagaaagcggggcaagatttcagaagagcccggcaaggatgctaaatttcatcagagtgagctctaattaaagtcaacatttttgaccagtatgccttcccaagatctagagaatatagattcaaaatgt

SEQ ID NO: 660432 - DNA, 620 bp, Homo sapiens
attgtttttcattgcagacttgctcataaagcagtacaactaaagaagtaagcactggaatgttctatcatagtccacagaatagaaagagagatgttgggaagagtcttagggacagtccttaaggattcatgaaggaggtggctgaatcttatgataagaatctttaaatgctgaaccatgcggtagacagaggtagaaagagcagacagtttaaggttgaacaagtaatctatccaaaagatgcaaagagaaggtcctgtggggtttaagtgatcatcagcagagagctgcattagcacaggtcaggctgggcatcttcagaaacaggagaagcctgcataacacatttaaatggcccttcgggtgttgtatgtttcccagggtctgtatagatctgggaaggcatgctcccaggggacctgaggaatgccagattcaaggccactctgccaaacactctgtgcaaccccagacagtgatatcactgtagaaagcggggcaagatttcagaagagcccggcaaggatgctaaatttcatcagagtgagctctamttaaagtcaacatttttgaccagtatgccttcccaagatctagagaatatagattcaaaatgt

SEQ ID NO: 660433 - DNA, 640 bp, Homo sapiens
ttgacatttttcttaggcaattaaaaaatgagtttgtaatctgtttatatcaaatggaaatagcagtgaaaggaagtagcttrgaaacagccagattgcaaaaggaagccagcctggaagtaaatggctggtgtaggtaatacgcacacttttaacaaagatttagctatacttacaatatcaacaataggttgagccaacacccaaaatgttggcattaaaattttgccttaacaattccaacacacgattatcatatcaagaaacggtcacttataatatttatgcattcattaacttttctcaaaacattattacccactccctgaatagcttaacataggatcctaagtaaaactctaattagaaaatttagcaaaactctaattagaaacacctataaagaataagcagaagatagttgtcagtgtttctaatgccctgagatacctctgattctcactatctttgctatttaaattcacaaccactgtattcactacaatattggaggcaaaaaatggcaactctcagaggaggcagaagacgacattatcaaggagtaagaatgctcttaaacacacaactatttatacaaacggatgtttttctattccaataagtcaatcaaagactacac

SEQ ID NO: 660434 - DNA, 544 bp, Homo sapiens
acttacaatatcaacaataggttgagccaacacccaaaatgttggcattaaaattttgccttaacaattccaacacamgattatcatatcaagaaacggtcacttataatatttatgcattcattaacttttctcaaaacattattacccactccctgaatagcttaacataggatcctaagtaaaactctaattagaaaatttagcaaaactctaattagaaacacctataaagaataagcagaagatagttgtcagtgtttctaatgccctgagatacctctgattctcactatctttgctatttaaattcacaaccactgtattcactacaatattggaggcaaaaaatggcaactctcagaggaggcagaagacgacattatcaaggagtaagaatgctcttaaacacacaactatttatacaaacggatgtttttctattccaataagtcaatcaaagactacacttattccaataatgttgatactttgaaaaactccattcctacaattagcaccagagcaatgtgacaaagaatgt

SEQ ID NO: 660435 - DNA, 576 bp, Homo sapiens
ctcagtatatgccatgagccagtcctcatgctagtcactggggtgacaatgttcaacaagacagacaagttacctgccccaaatttataatgttgagatttttgaaataatcactctgggtttttttctgcattgaatgtcaaactagaccaaactgaagatagtttaaccatgtatttagcaaccagttttagagctgccctatataaacgatttggcttcctggggcagttcatctgtgattctcagaaactgtagttaatgtgggtaaccaggaaggatcactaacactgccatgcggtgcagcagcaggtcaggctcagcttcctaaaccagtgccaggatcagccacagcaaagtgacggggaagcacgagccatcttggcttattctaactggggtggacagcagagacacttgargtactccttacagcacagctccaagccatgtgacccagccgaacagtgccaaggcacaggggaagttggcctgcagccatcactactgagtaattcatgttcaccaaaagctctggtcagacaaggaggcccaggggcagaacagctcattgcc

SEQ ID NO: 660436 - DNA, 683 bp, Homo sapiens
atgagttctcatgagatctgatggtttaaaagcatgtggcacttaccccttctctctcgctctctcactctctctctctctctctctctgtctctctctgtctgtctctctcctgctctgccatggcaatacatggttgttttcgcttcaccttctgctatgatcgtaagtttcctgaggcctcccagtcatgctttctgttaagcctgtggagctatgagtcaattacacctcttttattcataaattacccagtcttgggtagttctttatagcaatgtgagaacagactaatacagtaagaatggactcaaagccaaagaagggaatcctaaggcgggtttcatgttctttgtgagcccctatacctggcattctactactaatatacaaccaatcacactgatggaaggtagtaatttatacaattttcttcctatgaacttcctatgtactcttaaagagcaggagccatgctttagatgcacaataaatgtatgtcaaattaaaattgttgaactggaygctctttaccccaaaatgcagcgcagactgatcagaacactagtgcttgtcagatccactgtgcacatctcctttagtaagtaaattcttctggctatgaagtggagaaaaaattggaagataagtggagatgccagtaggccaattaaggagctaat

SEQ ID NO: 660437 - DNA, 620 bp, Homo sapiens
cactatctgccaggcctgcaattctattaaactgtcagcatgataaatgacaaagagaaggcatcagggagaaaatctacagtaaagcactgtggtcataaaacaagaagaaccaaaaaaggatttarggcaagtacacaaaccatcctttatgataaaattttcctttgcaaggagagaacaaagcgactgaactataaactcctgagtccaagcagaaggcagtgataccgtcagtcatccctccaccccaatgtgtggctcacagatcagtgatgcacgatccagcagtcccacctctacttccaaccaggcctcttggggctcagtgaaaacacacttagtccacgaaagagatggtattttaaaaggtggttactctgtgcatcccttttgctaatgaagaaataatttctcaaatggaaaataatttggttactgcttttgaaccacaaattatctccagagagcagttacccagagcatcactgccttgcttctaaatgtagcccccacaaatggtatcatctataaacagagcacaaaaataggcttctgaatatttgggttttggaatgagttccagtgagtctcatttagaagtttccaggtatttatac

SEQ ID NO: 660438 - DNA, 620 bp, Homo sapiens
cactatctgccaggcctgcaattctattaaactgtcagcatgataaatgacaaagagaaggcatcagggagaaaatctacagtaaagcactgtggtcataaaacaagaagaaccaaaaaaggatttagggcaagtacacaaaccatcctttatgataaaattttcctttgcaaggagagaacaaagcgactgaaytataaactcctgagtccaagcagaaggcagtgataccgtcagtcatccctccaccccaatgtgtggctcacagatcagtgatgcacgatccagcagtcccacctctacttccaaccaggcctcttggggctcagtgaaaacacacttagtccacgaaagagatggtattttaaaaggtggttactctgtgcatcccttttgctaatgaagaaataatttctcaaatggaaaataatttggttactgcttttgaaccacaaattatctccagagagcagttacccagagcatcactgccttgcttctaaatgtagcccccacaaatggtatcatctataaacagagcacaaaaataggcttctgaatatttgggttttggaatgagttccagtgagtctcatttagaagtttccaggtatttatac

SEQ ID NO: 660439 - DNA, 620 bp, Homo sapiens
cactatctgccaggcctgcaattctattaaactgtcagcatgataaatgacaaagagaaggcatcagggagaaaatctacagtaaagcactgtggtcataaaacaagaagaaccaaaaaaggatttagggcaagtacacaaaccatcctttatgataaaattttcctttgcaaggagagaacaaagcgactgaactataaactcctgagtccaagcagaaggcagtgataccgtcagtcatccctccaccccaatgtgtggctcacagatcagtgatgcacgatccagcagtcccacctctacttccaaccaggcctcttggggctcagtgaaaacacacttagtccacgaaagagatggtattttaaaaggtggttactctgtgcatcccttttgctaatgaagaaataatttctcaaatggaaaataatttggttactgcttttgaaccacaaattatctccagagagcarttacccagagcatcactgccttgcttctaaatgtagcccccacaaatggtatcatctataaacagagcacaaaaataggcttctgaatatttgggttttggaatgagttccagtgagtctcatttagaagtttccaggtatttatac

SEQ ID NO: 660440 - DNA, 620 bp, Homo sapiens
cactatctgccaggcctgcaattctattaaactgtcagcatgataaatgacaaagagaaggcatcagggagaaaatctacagtaaagcactgtggtcataaaacaagaagaaccaaaaaaggatttagggcaagtacacaaaccatcctttatgataaaattttcctttgcaaggagagaacaaagcgactgaactataaactcctgagtccaagcagaaggcagtgataccgtcagtcatccctccaccccaatgtgtggctcacagatcagtgatgcacgatccagcagtcccacctctacttccaaccaggcctcttggggctcagtgaaaacacacttagtccacgaaagagatggtattttaaaaggtggttactctgtgcatcccttttgctaatgaagaaataatttctcaaatggaaaataatttggttactgcttttgaaccacaaattatctccagagagcagttacccagagcatcactgccttgcttctaaatgtagcccccacaaatggtatcatctataaacagagcacaaaaataggyttctgaatatttgggttttggaatgagttccagtgagtctcatttagaagtttccaggtatttatac

SEQ ID NO: 660441 - DNA, 532 bp, Homo sapiens
caattccctaatgatatatgatcttcaacattttttcgtatatttccgtgccatctgtatgtcttctttggtgaggtatctgttcaagtcttttgcctattttttttatcagattcttcattttcttattactgagttttaagaatcctttgtatattttgtatatcagtcctgtatcggatgtgtcttttgcaatattttctcttagaatttggcttgtcttctcattcttttaacattgtattttgcagagaagaagtgtttaattttaatgaagcctagcttatcaattacttctttcatgtatcatrcctatggtgttgtacctaaaatattatcatcatacccaaggtcacttaggccttatccaatgttgtcatctgggagttttatatttttgcattttagatttagttctataatctattttgaagtaatttttatgaatggtgtaagatctgtgtctggagtcaattttttgtgaatggatgtcctgttgttctagaatcttttgttgcgaagactatctttg

SEQ ID NO: 660442 - DNA, 601 bp, Homo sapiens
ataaaccgtaaagccctggaggcagagcctctgtcactaacctttttacacccctagcacctctcccagtgttcagcacgtgctctacaaatgtttgctgtggcagggctctggctgccaaacattaggctatttctatggtttttttagaaagttttgttgcctactttcaccgaggaaatttacaagcagatgtcacatggaacttcttttttccatcacttacacagtcacgcaaacacattcacacagacttttcccacttccaactggtgctagttgaaacttatgcacatttactaaagggggaaacaaccttctgaggagtaaggcagtgataaaaaagcaacctgatactagaaagcaagttgggggggaatttatatgtatatgtgccactgcttttcatggtcttgcacactgtaagtgaggtatgagaaaatccctaataaaccttacaattaatatgatttccttctttggggaagatatctttaccattccttttataaaaaggaatatawcaatgaagtagggttggggggggggggtggatatatatagccaaaggcacagtgatgccttagagaggggatgaaaa

SEQ ID NO: 660443 - DNA, 565 bp, Homo sapiens
acatgatgaggtttgaatcatgcagttgatctttttggaaacctagcatgcagcagcctgcataaactttccactggcacctcatccaccgccctacacgaagcacctcatctcattaatttctcgccttcccaacctgcctccagcttccaagatacattccagaatgaattcatcatattcaaaatgtcgttaccttgtctttctcttggaaggagtgtctcattaaktgccctggccaggtaatcttgctctctgacaagctcccatcagccttcgctgggaaattcccagtccctttgctgggaaacttgaatctggaacaaatctagatactcccacgttgcccctaaagaggctgcctccaactcaggcccactccttgctgagctgacaagcagaagccaagaaagggtcattgctactgaatcttgcattgctggagagagaaactggtcacctcaaaggatttcttgatctgtgagcctcaagagaacctcgaactgtggcagtttcctatggaaacactggttcattggcagcatcatgagccctacagaggcaa

SEQ ID NO: 660444 - DNA, 579 bp, Homo sapiens
gctttgggctgcaagtaatagaaaacccaaaaacaaactggtttaacaatagaaagatgttttctcacataacgatttggtgaatcttttcatctcataactgcctgcctctgggtgccaacctacttccccctgtggatgccaaatggctgcagcagctccagcagtcacacacagacacaaccatatccaggaacagaggaccctctcttttaagggtctctgttcttgagctcctggactctcaaagtgctaggatgacaggcaggagccactgcactcaactgcaaagaaagctttcccagagacttcttcttcccctctaatgaggcatggcagkgtgacacacagattttaaaactgcccctggcaagaggctgagatggcaacaaggaattcttgttaaaatggacactggagaatcaggcagcataactctgacaataaagatatggacaaggaacctcccagaagcatcataagacagaagaattcgtcaaaagcaaaaaatttaataagcctcaaataagcctcctgtatcttaaactatgtaggaaaaagggataccctaccataccc

SEQ ID NO: 660445 - DNA, 444 bp, Homo sapiens
caaacttaatgttacattccatggtgacatatttcagatattgtgcttaaatttggaaaagaaaagaatgccaggggatattttcatttgtcaacattgtccttgaattcccatctgaggcrcttctgcataaagtagaaataagacatataattgcgggaggaagagacaaattcatgttatttgcagctggtatatgtcaagaaaacccaagacagccatctgaaaagctattaaaaataatcaagtttcaataatatggccagatacataataaatatgccaaagtcaatagttttttaatatactagtaataacagatgagaagacataagagaaaaagaggttccttccttaataacaataaaaaataaaatacctaggaatagctctaaaaagataatggaagaatccatatgaagagaaacataaaggtttagtgtg

SEQ ID NO: 660446 - DNA, 444 bp, Homo sapiens
caaacttaatgttacattccatggtgacatatttcagatattgtgcttaaatttggaaaagaaaagaatgccaggggatattttcatttgtcaacattgtccttgaattcccatctgaggcgcttctgcataaagtagaaataagacatataattgygggaggaagagacaaattcatgttatttgcagctggtatatgtcaagaaaacccaagacagccatctgaaaagctattaaaaataatcaagtttcaataatatggccagatacataataaatatgccaaagtcaatagttttttaatatactagtaataacagatgagaagacataagagaaaaagaggttccttccttaataacaataaaaaataaaatacctaggaatagctctaaaaagataatggaagaatccatatgaagagaaacataaaggtttagtgtg

SEQ ID NO: 660447 - DNA, 533 bp, Homo sapiens
atctattccacacctctcccccagcttcggaaggttttctggcaatcttgaatgtcccttaaatgtaggagcatcacctcaatctctgcctttctcctcctgtggtgttctttctgcgtgactgctggtggccaaattcctcctttgtraaagaacactagtaatatcggagtaggggcccactctactctgttatgacctcattttaactaattacgtctgcaaggaccctatttctaaataaggtcatatcctggggtgctccaggtatgggcttcaacacgtgaatttggagggttgggggcaattcaacccataacaccgggtgagggacttgggtggtctctctgtgcctcagttccctcacctatggaatggagatgacaatacctaactcataaacctatcgtgggtgtttgctgagttcctgtacgtaaagcacttaagctagtggttcagcattagtgccttacaaatgttaactgctgttatctcattcatcttttgtaacaactgtgtgctgtgcaacaagg

SEQ ID NO: 660448 - DNA, 533 bp, Homo sapiens
atctattccacacctctcccccagcttcggaaggttttctggcaatcttgaatgtcccttaaatgtaggagcatcacctcaatctctgcctttctcctcctgtggtgttctttctgcgtgactgctggtggccaaattcctcctttgtgaaagaacactagtaatatcggagtaggggcccactctactctgttatgacctcattttaactaattacgtctgcaaggaccctatttctaaataaggtcatatcctggggtgctccaggtatgggcttcaacaygtgaatttggagggttgggggcaattcaacccataacaccgggtgagggacttgggtggtctctctgtgcctcagttccctcacctatggaatggagatgacaatacctaactcataaacctatcgtgggtgtttgctgagttcctgtacgtaaagcacttaagctagtggttcagcattagtgccttacaaatgttaactgctgttatctcattcatcttttgtaacaactgtgtgctgtgcaacaagg

SEQ ID NO: 660449 - DNA, 565 bp, Homo sapiens
ttagtgccttacaaatgttaactgctgttatctcattcatcttttgtaacaactgtgtgctgtgcaacaagggtgacaactggtatgcctgccagagctgggcaggtcacacaaacagacgaagtgggctgccagtgatggggcccaggcaggtgagacagtaagagcccccatttaaaggcattctgctcaacattgttacataataatctatggcatgaaactcacctatggaggcgagagctccttgttgctcttgatgtcaatggaaaaaattgaccatgacctacctggtccttaggtggggttaacagctattctgaaagaagaatgctgatttgacaagaactgggcgtgaagccaaccatgtggtctagaaaggacacaattgcctttaagccaaggcctaagcctatcaagactgagttaatgaggctgccccatcaagccagcggaggtcagccctcaccagccctggctggctctctggctgcagagttgctgagcagggctggagaacagaccaaatggggccagccaagttygcacatcctcagagccaccc

SEQ ID NO: 660450 - DNA, 610 bp, Homo sapiens
caaattcttatgttgaagttttagccctcagtgtgactgtagagattgggcttttagggaggtaattaaagttaaataaggttataagggtggcactctaatctgataagattggtgcccttttaagaagaggaagagtaatcagagagctcgctctcttcctctgcccaatccctctcttggggggtgtgtgtgtgtgtatgtgtgtgtgtgtgtgtgtgtgtccagtgtgggctcacagggaagaggtcatgggcgaacagagtgaaggcaaccatctataagtgccagagagccctcaccagagaccaaccctgacggcaccttgaccttggatttccagcgtccagaactgtaagaaaatacatttctattgtttaagacatccagtgtgtgtttaagccaggccagtgtgaggtattttgttacagcagccagagaagactgatacactggggtgccatgcccccgagactccttccaaatctctcctttcaaaacgcaccaccctcastcctgattccttcagagctctttctgcatggcagtgggagtcatgagttacctcagactttcccccaaattctcaagacattccttaagatgtaag

SEQ ID NO: 660451 - DNA, 610 bp, Homo sapiens
caaattcttatgttgaagttttagccctcagtgtgactgtagagattgggcttttagggaggtaattaaagttaaataaggttataagggtggcactctaatctgataagattggtgcccttttaagaagaggaagagtaatcagagagctcgctctcttcctctgcccaatccctctcttggggggtgtgtgtgtgtgtatgtgtgtgtgtgtgtgtgtgtgtccagtgtgggctcacagggaagaggtcatgggcgaacagagtgaaggcaaccatctataagtgccagagagccctcaccagagaccaaccctgacggcaccttgaccttggatttccagcgtccagaactgtaagaaaatacatttctattgtttaagacatccagtgtgtgtttaagccaggccagtgtgaggtattttgttacagcagccagagaagactgatacactggggtgccatgcccccgagactccttccaaatctctcctttcaaaacgcaccaccctcagtcctgattccttcagagctctttctgcatggcagtgggagtcatgarttacctcagactttcccccaaattctcaagacattccttaagatgtaag

SEQ ID NO: 660452 - DNA, 577 bp, Homo sapiens
gagagtgggagcattatttgttttgctcgttgctggatgcccagtgcctaggatcatgcctggcacataaaatcactctgtaaatatttgtggaataaaggaaaaaataaatgaatgaacaatgtatagaaaagcacttggtaacctataaagtccaagtataggacaaataaaaatacatactttatttatttattttaatttttttttgagatggactcttgctctgttgcccagcctggagtacagtggtacgatctcagcccactgccacctctgcctctcgggttcaagagattctcctgcctcagcctcctgagtagctgggactacaggcatgtgccatcatgcctggctaatttttttgtatttttattagagatggggttttgccatgttggctgggctggtcttgaagccctgacctcaggtgatccrcctgccttggcctcccaaagtgctgggattacaggcatgagccactgcccccagcctacatactattttaaatccactgcacctgttcttattctggagtggatgctgaattctgcccttggacaaggccctcagtgtg

SEQ ID NO: 660453 - DNA, 577 bp, Homo sapiens
gagagtgggagcattatttgttttgctcgttgctggatgcccagtgcctaggatcatgcctggcacataaaatcactctgtaaatatttgtggaataaaggaaaaaataaatgaatgaacaatgtatagaaaagcacttggtaacctataaagtccaagtataggacaaataaaaatacatactttatttatttattttaatttttttttgagatggactcttgctctgttgcccagcctggagtacagtggtacgatctcagcccactgccacctctgcctctcgggttcaagagattctcctgcctcagcctcctgagtagctgggactacaggcatgtgccatcatgcctggctaatttttttgtatttttattagagatggggttttgccatgttggctgggctggtcttgaagccctgacctcaggtgatccacctgccttggcctcccaaagtgctgggattacaggcatgagccactgcccccrgcctacatactattttaaatccactgcacctgttcttattctggagtggatgctgaattctgcccttggacaaggccctcagtgtg

SEQ ID NO: 660454 - DNA, 482 bp, Homo sapiens
gatgtctgtaggccatctaagaagagaagtccaatagagaatgggctctatggatctgaacttcaatagggaaatttgggcaggagggatggatttcaggatttcttcttgtcaaaaatgtgaggacacccctggcaaatgacttctatttttccctgtgccatacaaagagatgttatctgctgagtccaccatggggaagcataaaacccagaagtctggaggaggggagacgaggacacwtcaggaaacctcgatgttctagcagtcactaataagggtcccttgggggctggagactactgtgtcactagcctgtacagttgtgtggttctaggtatactaggtagttcagacatagacaaaaaggggatagactgcaagtggctactggagccaaagtttcccctggctacaggacggagggaccatcagtggctgacacaaggaaaaataaatatatctgaaaatattgaccagag

SEQ ID NO: 660455 - DNA, 533 bp, Homo sapiens
agtgggtgcctgcagctggggcccagagtggaaattaatggtgaatggcatgaggtaacttttggaggcagatggaaacattctaaaacagagttgtggtgatggttgcacaactctatgtatttgctaaaataactaaattttccagttacaatgggtgaattttaggatatgtaaattatgcctcarttaactctaaaaaagaaaagcctgtgactcgaaaagttaaggaaaaaataaaatctagggatagggctgaaagttatactcagaatgaatacgtggctttaaattcttttattattaaaaagcaaactaaaaataagtcaactctctattcaacttaataaatgaagaaaaggttaaaataaaagacataggataattaaagataaaagtacagatgaataatactgaacacaaacagaacagtcaaaagaataaatgaacttataaggagacataaccgccactgataaggaagagattaaaaggtgcattaaacaatgaccatgtactagttaacagacccc

SEQ ID NO: 660456 - DNA, 560 bp, Homo sapiens
ccaagctctctctactttgtggctccatccttttctaggtccttggagtcttggccgtttagttggcagatgaaraaagacagcatgaggaaggtacactcatttctttcgtaaaacactttgggagattcatccatactgtgacgtgaagcaacagttcattctctttcattgctgtataatattccattgcatgaacataccatgatttattcattcattctactactaatgggcattaggttgttttccgttttaagctattatcaataaagctattatgaatgtgtcttttggtgcacgtacgtgtacatttctgttgggcatgtacctagaagtagaattcctgggtcatagggcatacatatgcaaagatttggtatatgttggcaaatagttttccaaagtgattagacaaatccacatgcccgtcagcattgcatgagacttccagttgctccacctccttgctgacacttggtattgtctctttttcatttagctatgctggtatggctgcagtgatgtctccttgtggttttaacttgcattttcctaat

SEQ ID NO: 660457 - DNA, 560 bp, Homo sapiens
ccaagctctctctactttgtggctccatccttttctaggtccttggagtcttggccgtttagttggcagatgaaaaaagacagcatgaggaaggtacactcatttctttcgtaaaacactttgggagattcatccatactgtgacgtgaagcaacagttcattctctttcattgctgtataatattccattgcatgaacataccatgatttattcattcattctactactaatgggcattaggttgttttccrttttaagctattatcaataaagctattatgaatgtgtcttttggtgcacgtacgtgtacatttctgttgggcatgtacctagaagtagaattcctgggtcatagggcatacatatgcaaagatttggtatatgttggcaaatagttttccaaagtgattagacaaatccacatgcccgtcagcattgcatgagacttccagttgctccacctccttgctgacacttggtattgtctctttttcatttagctatgctggtatggctgcagtgatgtctccttgtggttttaacttgcattttcctaat

SEQ ID NO: 660458 - DNA, 560 bp, Homo sapiens
ccaagctctctctactttgtggctccatccttttctaggtccttggagtcttggccgtttagttggcagatgaaaaaagacagcatgaggaaggtacactcatttctttcgtaaaacactttgggagattcatccatactgtgacgtgaagcaacagttcattctctttcattgctgtataatattccattgcatgaacataccatgatttattcattcattctactactaatgggcattaggttgttttccgttttaagctattatcaataaagctattatgaatgtgtcttttggtgcacrtacgtgtacatttctgttgggcatgtacctagaagtagaattcctgggtcatagggcatacatatgcaaagatttggtatatgttggcaaatagttttccaaagtgattagacaaatccacatgcccgtcagcattgcatgagacttccagttgctccacctccttgctgacacttggtattgtctctttttcatttagctatgctggtatggctgcagtgatgtctccttgtggttttaacttgcattttcctaat

SEQ ID NO: 660459 - DNA, 600 bp, Homo sapiens
agaataatcacaaagaagcctgtccttttttgcacatctgagtacactgaataaaattccagctgtattcgaatctcagagatatagcctatcctggcctgctctctcggtgtgaccagaacccatcctcctgggcattttatgatttctagactggccactttcttctcattgataccagcttcctgactcgttgccatagttccagtggcaaattcctaagctggccacaagagcagtggcatgctgacgtgggtttgtaccagctcccaagagctggctgttaaattttcaggaattttgtgagccagttaaacacrgccattattaaagatcaaattataaatatgaccaaaatttttaaaaagtattgaatactcaaaaatcatcattttctaattattttcttatattttactattatgttttctgggttattatatctgttacatttgtatgatggaaatactttgtaatgaattgttactgtgtgtttcttcccaatttcatgttcagtaaattcaggtagctcaaaatcaactatagtgggagtatttacactatggaaattggtaaatgctacatatcagcccccacctc

SEQ ID NO: 660460 - DNA, 525 bp, Homo sapiens
gcttgttcaactattcttgatccataaaaggtgcattacttccctaagaccacaatcatgaaatgtggattttttttctctattagacaatggagtccatgtgacttaacatgaataacttctcaacacacagggcaggagaggaactggaagagataacttattccattcccagattgcttactgaccaacaycaaggcagaacagggctctagcagagccagggagtatcacccgctgcaaccagcccctggaatgaatgacccatgtaccattggcaggtgacttttgcctgtaccatcatgctctgtgctccagccacgagtgcctgtccctggacttggcagaaactctcactccctagacccccctctcagcttcaccttgagaaatgccctcttctctccctgactttctgcaagctcatgtaagtgggcttctgtgagcctttagtgatttccccaggcaaaaaccatcaatcaaagtgtgtgcttccatagcaatttgcacctgaaatatggcatc

SEQ ID NO: 660461 - DNA, 323 bp, Homo sapiens
tccaaaatggctacacacttgtttagctgtcctgggcaccttctgggccgtctttactgaatcagaatttttgatgtagggttctgcayggtatgtaatgtttccctgtagcaccttttcgattctcgcagctagaaaaatttcaggatgtggattcatcactgagaaaattccctgttttatgtagcataactgagattcagaaattccatgaatgaaagactcaggtgaagagccctttgggttactgtcactgcacagttggattgaagagccccacagcatttcatggacagatgggggattcaagtctacatgaaagt

SEQ ID NO: 660462 - DNA, 563 bp, Homo sapiens
tttgcactctagaacaaatgtacccaatagatatttacagaacatttcatccaatgactacagaatacacattctttttctcagcacatggataattctcaaagatagaccatacgttacaacacaaaacacatcttaaaaccgtcaaaaaattgaaataacagcaagcatcttctctatgatagaataaaactagaaatcaataaccagaggaattttggaaactatacaaacacacagaaagtaagcaatatgtttstgaattaccagtgggtcaatgaaaaaattaagaaggaaactgaaaaatttcttgaaacaaataagggaaacacaacatgccaaaacctgtgggatatagagaaagcagtactaagagggaagtttatagctataagtgcttatgtcaaaaaagaagaaaatttttcaataaacaacctaatgatgcaccttaaaaacctagaaaagtgaaagcaaacaccaagtagtagaaaaaaatgataaagatatgagcagaaattaatgaatttgaagtgaagaaaacagtacaaaaatcaatgaaaagt

SEQ ID NO: 660463 - DNA, 563 bp, Homo sapiens
tttgcactctagaacaaatgtacccaatagatatttacagaacatttcatccaatgactacagaatacacattctttttctcagcacatggataattctcaaagatagaccatacgttacaacacaaaacacatcttaaaaccgtcaaaaaattgaaataacagcaagcatcttctctatgatagaataaaactagaaatcaataaccagaggaattttggaaactatacaaacacacagaaagtaagcaatatgtttctgaattaccagtgggtcaatgaaaaaattaagaaggaaactgaaaaatttcttgaaacaaataagggaaacacaacatgccaaaacctgtgggatatagagaaagcagtactaagagggaagtttatagctataagtgcttatgtcaaaaaagaagaaaatttttcaataaacaacctaatgatgcaccttaaaaacctagaaaagtgaaagcaaacaccaagtagtagaaaaaaatgataaagatatgagcagaaattaatgaatttgaagtgragaaaacagtacaaaaatcaatgaaaagt

SEQ ID NO: 660464 - DNA, 624 bp, Homo sapiens
accaaatgattatacactaatttgatagtggagatgatacatgagtaaaatattgttaaaatacaatgtatagaatagatgtgtttataattaaaatctttttttttttttgaggtggagtttcactcttgttgcccaggctggagtgcaatggtgcaagctcggctcactgcaacctctgcctcctgggttcaagtgattctcctgcctcagcctcccaagtagctgggattacaggtacctgccacaatgcccagctaattttttgtatttttagtagagacggggtttcaccatgttggccaggctggtctcgaactcctgacctcaggtgatatacccgccttggcctctccaagtgctgggattacaggsgtgagccactgcgcccgtcctaaaatcattttccacagtctttcaaattcccttatcttttgggaataggggattaaaaatagtataataggatatatttaataatttgattgctataaacaaagaaaactgaattggggatttaaaactaaatatgtgatgaatctattttaaactgcttttctttaaataaagtctgggccaactacaatagtgcacctatttctatgcaatagatttattcaaatc

SEQ ID NO: 660465 - DNA, 502 bp, Homo sapiens
caacatcttctgcaactaaagttcaaaatcataatgaatcaattgtgcaaaagcacaggaatatctaattttaaaaaacttttcaaaatgaacgctaagcccttctcatttaactatttgccttgctttataggctataaaagtatgtattaataggtgtgataayattctttgtttttagggttttataaatatttcaaagacaaatacaagcagagagatttctaatagacaagctacttacacaattctgtgccctgaaaggtgtctcaaaccgaagaaaagaaggcaataacctaatgaaaaaggggcccagcattctttttcatcagaagcttggtgttctagagccgaataaggatcagtgggtagcccacagagtgtcctggtggcaccaataatatccatctcttttgagaaatttggacttggctcagaccatctgccatcactgcagcccaaggttacctttcatttggaaattatgctgtcaacttggttt

SEQ ID NO: 660466 - DNA, 560 bp, Homo sapiens
aaactaaataataatgccaattggatattaccttgttgagggataccttaaaagaggtacattttaatcaagaatgacctataaaaccatatcattcactctctttctatctgctttatcaaccaagctgacactttgccttttatcataccaaagaagatacatttcacttgtacatgatttacacattctgcctacaaatgagaggatatgaaaaacaagatcatgcacccctgttyttcacaaaacatatttaaattatatcattggttttgaattgtctcctaattttttagatctttgcattttttatgttcttaggaataaatggctatgggtcaattttaggatttactgctttccagaagtaatccacaaccatttattgcaaataaaggaaagtaaaaaatacaaaaatacaaaaaaaaaaaaataggatagcagatacaaattgaaatggaaaaaaaaaaaaaaagacaaacataatccaaaccaccccacaggctgtttgtaggacaggcagaagtaagtgcttgtctgggcagtgagttgataccact

SEQ ID NO: 660467 - DNA, 567 bp, Homo sapiens
attacagtgctttacacctgctccccttattttctcatccttccctagttcttgtcccagatatcacctgctcagaaagcttcagtaccctcttcagacactctaggatcacaaccacaagcctctaagcctactagacttccctgtatacaattccagacaatcccattcattaaaccaacggattgcytgagccttgagcctgggaagtcaaggctgcattgagccaagatcgtgctactgcaccccagccttggtgacagagagaaacactgtttcaaaattaaaaagctcccactgaaaaataaaattccaggaaattcccctttttaccatttattagctacaaagtaacacacttctgattctaacagaccctctgaatgaagcggactgctcctgcaggacccaggagacccccccaaaactgtgagtgccccaactgtggaagggggaaagggaaaccctcctctcctgaacacacacctgcactggagaagatgaaggtctgtttgctggaaaagtttccaactttaccagaagctgagtcaatttggaaagccaagg

SEQ ID NO: 660468 - DNA, 572 bp, Homo sapiens
caaaaaaaaaaaaaaaaaaaatcttcacctaggtacattgccatcaggttatccaaagttaagacgaaggaaaaaaatgttaagagctgtgasacagaagcacctatcagattaacagcagatttctcagcagaaaccctacaagctagaagagattggggccctatcttcagcctcctcaaacaaaacaattatcagccaaggattttgtatccagcgaaactaagcatcatatatgaagcaaagatacagtcattttcagacaaataaatgctgagagaattcgccattaccaagccaccactacaagaattgctatgctaaaaggagctctaaatcttgaaacaaatcctggaaacacatcaaagcagaacctctttaaagcataaaccacacaagacctgtaaagcaaaaatacaagttaaaaagcaaaaacaaaacaaaaaaaaaaaacaaagtagacaggcaacaaagagcatgatgaatgcaacagtacctcacatttcaatactaacatcgaatgtaaatggcctaaatgctccatttaaaagatatggaaccacagaatggat

SEQ ID NO: 660469 - DNA, 572 bp, Homo sapiens
caaaaaaaaaaaaaaaaaaaatcttcacctaggtacattgccatcaggttatccaaagttaagacgaaggaaaaaaatgttaagagctgtgacacagaagcacctatcagattaacagcagatttctcagcagaaaccctacaagctagaagagattggggccctatcttcagcctcctcaaacaaaacaattatcagccaaggattttgtatccagcgaaactaagcatcatrtatgaagcaaagatacagtcattttcagacaaataaatgctgagagaattcgccattaccaagccaccactacaagaattgctatgctaaaaggagctctaaatcttgaaacaaatcctggaaacacatcaaagcagaacctctttaaagcataaaccacacaagacctgtaaagcaaaaatacaagttaaaaagcaaaaacaaaacaaaaaaaaaaaacaaagtagacaggcaacaaagagcatgatgaatgcaacagtacctcacatttcaatactaacatcgaatgtaaatggcctaaatgctccatttaaaagatatggaaccacagaatggat

SEQ ID NO: 660470 - DNA, 594 bp, Homo sapiens
acagcagaattctaccagacattcaaaaaattggtaccaatccttttgacggtattccacaagatagagaaagaaggaaccctccataattcattcaatgaagccaacatcaccctaataycaaaaccaagaaaggacctaaccaaaaaactaaactacagaccgatatccttgatgaatgtagatgctaagatccttaacaaaatacttgctaactgaatccaacaaaaagattatcaaaaaggtaatccacaatgatcaagtgggtttcatacgagggatggtttaatatacacaagtcaataaatgtgatacaccacataaacagaattaaaaacaaaaatcacatgatcatctcaatagatgcagaaaaagcattcagcaaaattcagaatcactttacgattaaaactctcagcaaaatcagcataaaagggacatgccttaatgtaataaaagccatctatgacaaactcacagccaacataatactgaatggggaaaagttgaaagcattccctctgagaactggaaaaagacaaggacgcccactctcaccactcctcttcaacacagcactggaagtcctagcca

SEQ ID NO: 660471 - DNA, 579 bp, Homo sapiens
atacaatatacaaatggccaacaaacatatgaaaaaatgcacaacatgactaatgatcagggaaatgcaaatcaaaaccacaatgtgataccatctcactcctgcaagaatggccataatcaaaaaatcaaaaaaacagtagatattggtgtggatacagtgaacagggaacacttctacactgctggtgggaatgtaaactagtacagcctctatggaaaacagtgtggagattatttaaagatctaaaagtacaactaccattggatccagcaatcctactgctgggtatttacccagaggaaaagaagtcattattcaaaaaagatacttgcacacgcatttttatggtggcccaattcacaattgcaaaatcgtggaactaacccaaatgctcatcaaccaaacagtggataaagaagctgtgatatatatatatatacatatacatatatatatatataccacataygtatatatatatgtatatgtatatatgtatatatacatatatatatatacaatggaatattacacagccataaaaagaaatgaattaacagcatttgcagtgaccta

SEQ ID NO: 660472 - DNA, 555 bp, Homo sapiens
gctccttcaggggagacacttgttcctcccaccacagagcaagtcttttcccagccagatcatcctgagacttgactataatgaaccatctagaataatacgggattgtgggcagtatttgaggaaggcaagtatcatcatgtaragcatcctcctcagcttggtctccaggcaaggggagtctgctctccactagcaaggaggggccaggaggttcctctgcagggaaacctcaagtccatcatccacctaactgttcccattccaggtctctatgtctcactttttccctattaggacctggacttaagtataggagacttgccagagtggtaaattcagcccttttattaattcagctgctttctcaattagatattaggcctaattttcagcacagtctgtccttcagctgcattcgaagacaatctcttcaaatcagctttcatatcatgcctgagggcttttattgcacttaacgaccaactaatcccactgtccttataattaccatggtcttcaatatctcccaaatgttactgtattagccagtgc

SEQ ID NO: 660473 - DNA, 618 bp, Homo sapiens
ttataattgaatacaataagatagtctaccaatgtacaagaaaatttcttataattcagtatataccacaatatagtcaaggctttaaaaagtttctctcattttgactttaatagaaaagtattctaagagcagtactcaaagtattcaacccactattgggctaagattwgttgttcatgttagcaatgtatatttttgaagtatccaatctcaatgcttgaccaaatgagatgaagtccttgttttaatttggtttttcacaacttctaatttcctaagattaaatgaggcaaattgattttttctttgccagatttgatatactattgaagagcataaagacctactttctatttcgtggtctattcctttaccttgatggtcaatcatgaagacaacatgattgagtgaaataaatttctccttactgcttttaaagcaatggtgctcatttgagtattggacaactagaaacataggaaaaagtagacaaattttatgggaagggattaagcacaaataccttatttaaatattcatgcttaaaaaagaattctctctgaaatctctcatatttagagtagttcttatacagcaggaattttgctaaacttg

SEQ ID NO: 660474 - DNA, 534 bp, Homo sapiens
ccatctcaaaaaaaaaaaaaaaaaaggaaaatatgtttaaattatttcctcattgcaaaaacttgtatttattatgtttatggtttatttcttatctcctcccctggaatgtatgctccacaaaggcattgtgctttttatctgacttgttcaccacaatgtcatcagaacctagtagctgctcagtgaatatctgttacagaaatcaatagatctatggtaaatgactctggccattttcccaaacctgtaycatagattttaaaatcgtataaaaattgattagtaacaatggtttttattgaagatcaagtgtgatatggtcttaaagattcagacttagacttgaattcctgctccatcacttaacttaatcactttgtgactttgagcctgagcctccatttccatttcaaaacaatggaaatcatgacacctacctctgtaattattgaaagaattgaatttgataagtgtgcacaatttctcagcacaatgactaacacatactagttattcgttaaatgttagtaa

SEQ ID NO: 660475 - DNA, 623 bp, Homo sapiens
ttaaaatgtccatactacccaaagaaatatacagtcagtgcaatccctatcaaaattccaatgtaatttttataaatacattaaaaatactcctaaaatttatatggaaccacaaaaatattgaatagtcaagtcaataacaagcaaaaagaacaaagctagaagcatcacgctacctatttcaaattatactacacagcaatagtactaaaacaccatggtgctggcataaaaatagacacatggatcaatggaacagaagagagagcccagaaatgaacccawacatctgcaatcaattgattttggacacatatacaatgggaaaaggacatcctcttcaatagtgttgagaaaactggatatccatatgcaaaagaatgaactgagacccttatttcacaatatatacaaaaatcaactcaactcttaaccataagaccagaaactttaaaattactagaagaaaacgtagcagggaaaactacatgacattggtctgaacaatgattttgacaacctgtggattcagagaaaatatttacaaaccatacatccgataaaggattaatttcaaaaatatataaggaactcaaacaactctatagaaagaaaataatagt

SEQ ID NO: 660476 - DNA, 589 bp, Homo sapiens
aaaggaatgaaaatgtaattaaaagataaagactacaagaaggaaaaatgtaattacaagagtatcctttagaagagtaaggtaggatggagtgtatgtattttcttcataaaatagttaccatgtttactgataattaacaatatgtttatatgaggtaatagtaatrggatattaaattgggaggggaaatatcagttttgcatgagtaaaaactacgcaaaattattttgaatgagtttatttttgcaggaaaaatcaacgaccagctacaaaaaacaatttttaaagttctacgaattctgatgtatccctacctcctacctaccaaaatccaaaagcacatctgctccatgtagctttccttgactccccaagaataattccctgttccatctccaatccagtttcacaaatttgtttacatctctaggatcttccactattgtataacaatttatatgcttccttattttcccatctctgctgtgctgggaaccccttaagggaaaggagctgtgtctttcatgtcctgtgaaatccaacagtcaattctaggtcctcctcttgatctcttggaagctttttt

SEQ ID NO: 660477 - DNA, 530 bp, Homo sapiens
aatgtgtaaatatcacttgggattccttcatctacattatrttcaaaagctgacatacattttgggtgcctcactcaaactcctctagttctaatatacagagcatatttcagagtaaccctaagttcggctgacggctaggtctaaagggtaggagcagtgggatgaaggtgggaaaagtcactcttgtttattacaagtgtgcctaagaaacaaccctgggctctgctccttactcccttccagggatgactcaacgcgtcccaacaacctttagagctttcacagcttaccatggaagaattgcatttcttcccccatcctatctttagttttgagttttgtagcagacccctcactggtaaaatattcttaccgattaatgtttcacttgacatatagcataaggataagagctccattttgaatttagattgtatgttgagttagattgtgtacatggtttatatgtcggggtacataggtgtgtaaaataagctcattccagctgaaacctctttacgatgttc

SEQ ID NO: 660478 - DNA, 578 bp, Homo sapiens
ccaggctggtatcaaactcctggactcaagcaatccacctgtctcggcctcccaaagtgctgaaattacaggcatgagccaccgcacccagcctccatcactcaataaagacatattttcatgagtattcttaattcttcaaagttgaggwgagtagccaaaggataggtgaggcaatattaattgaggagaatgtgaggatcatgggaagtggtatgtaaaaagaaatggaaaagttgcttgggaatgaaaaaaaagagagggctttgtattctgaaacagggctcaagagcatggcctttgagctcacgaaataagtaacttcctgccaaatcctgacagacaaaaagtatattagtagttttcagggactgtgaaagggctgaatggggagtaactgctcttgggtacaaggtttctttttagagtgattaaaatattctgaaatgtattatggtggtggttgcacaactctgtgattctaccgaaaactattgaattgcactttaaatggatgaattgtgtggtatgcaaattatatcccaatgaaaatgctgaaaaaataattggaaggggga

SEQ ID NO: 660479 - DNA, 634 bp, Homo sapiens
aggaacaagacatgtccactgaagtccctgtccttacagagcaaaaagcttctaaagagttggcagaataatgggaactcaccaaccctacacacacatgaatcatttctgatagatgagggctaacaagtgcatagtcttgggaatcttcccacagcaacaggatgcagtccaagtgttctgttaaaaactaccaccgagcagccagcatatgctcaacactgctggcctctggcagtgatttagaggtgaaaccttttgtgtccaattagtctacgccttgactcatgcagtgcctaagaattcacctttatttatgaagttcagggtctcagataaatttgacaagagctgctgaaagttcaagtgtttgcaaggatattagttttctcatttaatcataatttaattttgattaacaagtggacctagttagagaaaactgaaaatagctccatttgaacctcatgttagtagaaatattccttctcaatcttgttttccaccttgaatgctggatttatttctaagcttatatgttatacctcatyaatctaatgctctaagtcagtggttctcatcctcggccacttggggagctttaagaaatatgaatacctaggtctcaacccca

SEQ ID NO: 660480 - DNA, 591 bp, Homo sapiens
gactccaggttctgcctagaaacgcagaggcctggcctggaattttaccaggggcccgcctctagtgacacagtcacctacggagggccttctgctcattcccacgaattcccaccgtccagattgggccacttctttctcagctctaatgactttcctcagttccgtgggttactcctgccaactcsacgccggccgccatgacactcgctcggaaagcggcagcggatcatagaaaagcgccgcggtggcgtagacaggccccgcgaagccgccggacgtgtccttggcgcaagggaggctgggatcgcggaggaccgagcgcgggctggattaaccgcagccagtgcctagcgcaaggttaggtgcatgcaggcggccagcttcggccggggaaggaatggcctggataactggggcatcgcggcgctcctcggcctcctgcagctgcgtttcaaagcagagccgacccttggtgggtagtccggggaccctgcggaccctccttgtgttgttgaaacctagtgttttaattgggactacacccagcagtgccgggagacttggcggggacgttccactgcgcaggaa

SEQ ID NO: 660481 - DNA, 591 bp, Homo sapiens
gactccaggttctgcctagaaacgcagaggcctggcctggaattttaccaggggcccgcctctagtgacacagtcacctacggagggccttctgctcattcccacgaattcccaccgtccagattgggccacttctttctcagctctaatgactttcctcagttccgtgggttactcctgccaactcgacgccggccgccatgacactcgctcggaaagcggcagcggatcatagaaaagcgccgcggtggcgtagacaggccccgcgaagccgccggacgtgtccttggcgcaagggaggctgggatcgcggaggaccgagcgcgggctggattaaccgcagccagtgcctagcgcaaggttaggtgcatgcaggcggccagcttcggccggggaaggaatggcctggataactggggcatcgcggcgctcctcggcctcctgcagctgcgtttcaaagcagagccgacccttggtgggtagtccggggaccctgcggaccctccttgtgttgttgaaacctartgttttaattgggactacacccagcagtgccgggagacttggcggggacgttccactgcgcaggaa

SEQ ID NO: 660482 - DNA, 587 bp, Homo sapiens
cctgcccaaaatttttgagtttggtttcattctgctcataactttggatcaggccagtatagtccacttgtaatttagaattattatcactgtcaaccaaaacctgtgcttgaagttggtgaagctcttcctgaagctgggctgactcgtgttgcatattttgtactgtggtcatcacctgctgcttccactcttccattttctttacttgctgttttaacttgtcacgttcctgtagaagctcctcaaattgattactattaacacctccagcctcattaccagtgctggatgtttgtaaaactgccaataaagtctgacatttctgacttagtgcatctatttcgatgtctttttctcgaatgatacgtgataaattytgaatagtttctctaaacatatcttggccactactttcaaatctagtggacaattttttattttcatcttgcagtttgataagagctgcttccttggcagcaacaatatccatcattttgtgatattctgtttttagatggctattttccctagtcttctcattcaaaacagcaaataccttttctctttccatagcataagcctgc

SEQ ID NO: 660483 - DNA, 532 bp, Homo sapiens
ttatagaatttaaataagtataaccataaaattcttcaggrgacacattagtatgaagtgaaatatacatgcatatttcagtaacagccatattattttgttgacaagcctacactagttaaatttattgaattcacttagatttttttcgtgctttttcaggacccaaaatagttttggtttgtttaaaatcttccagctttgagattgataactcttagaaatccctctattcaactgcagtagcatctgatcttctaaatgtagttccatgctggaggatgcaatttagcccagataaatccagtttgccaaccttaacaactagatttgctcatcttattcaataactgctcagttatttttgacaacacactcagcttttctgaattcaaattttttcttttaaagaaggagtaataactatttgccagttacttgcctcacaggggtgtcaagcacctgtgagatcacaagttctcatgggccattacagctagtaatcagcagctttgttctttaggtttttgga

SEQ ID NO: 660484 - DNA, 532 bp, Homo sapiens
ttatagaatttaaataagtataaccataaaattcttcaggagacacattagtatgaagtgaaatatacatgcatatttcagtaacagccatattattttgttgacaagcctacactagttaaatttattgaattcacttagatttttttcgtgctttttcaggacccaaaatagttttggtttgtttaaaatcttccagctttgagattgataactcttagaaatccctctattcaactgcagtagcatctgatcttctaaatgtagttccatgctggaggatgcratttagcccagataaatccagtttgccaaccttaacaactagatttgctcatcttattcaataactgctcagttatttttgacaacacactcagcttttctgaattcaaattttttcttttaaagaaggagtaataactatttgccagttacttgcctcacaggggtgtcaagcacctgtgagatcacaagttctcatgggccattacagctagtaatcagcagctttgttctttaggtttttgga

SEQ ID NO: 660485 - DNA, 477 bp, Homo sapiens
gccacaaatctgttcttcttttaaaaaaattgtagtaaaatatcatttagtcatttttaggtgtacaatttagtgactttaartatatttacgttgttgagcaaccaccaccaacatccatctgcagaactctttttatcttgcagaactgagaccatttgcccgttaaacaataactccctattccccacttttcccaaccccctggcaagcaccgttctgctttttgtctttgagaatttgactactttacagacatcatgtaaatgaaatcatacaatgtttgtccttttgtgtctggcttatttcacttagcgtaacgtgttccaggttcatccatgttgtagcatgtgtcagaattttcttcctttttaaggctgaataatattgcattgtatgtatatactacactttgcttatccattcttttgtcaatggacttttgagttgtttgtgcctttttcctattttgaataa

SEQ ID NO: 660486 - DNA, 583 bp, Homo sapiens
ctcaatctacttatgacagttctctccttcaaattcttccatgattccctgatacttgtgcaaagctgtctttgaatgagacatgacacagatgtctcttctggtcttctcagtcaagtcatcttttctgtttttctcctctggcaaacccctctggagagaataaatgtctgctcttgggggtctggaggtgtagctctaagcataccactgtaagttctagatttcattgaaatcccttacaaagttatccaaatgttgcaaccgtgccacartatctgagtttattatacaaacgttgcaatccacaccacagtatctgagtttattttaatagaaaaataagagtgtatattgtcatgcctgttgttaagtaaactgtgcttctaaggctggaagaaccttttgacatattttcttccaaggctccaggttgagagaagggaaggctttacaggataaagtttaaactcataagcatgagatatgaaaggtttcatgccttgatctctgctgatacttcccagcatcttctgtctcttcttcccttcctctcattaccaacctaagtacagcctgcctg

SEQ ID NO: 660487 - DNA, 396 bp, Homo sapiens
ttttgcttccttcttagtagcaggaggtggaagataytataatttgtcgtttactttggagaaaatgtcctggcatgtcccagactactaggatccttaaaacttcacagttgtggtggacccttgaatgtctgtagggattatgtcctaccttctggagcacagaagtctttaacaaggtctctgtattagtctgttctcatgctgctaataaagacatgcctgagactgcataatttataaaggaaagaggtttacttgactcacagttcagtatggctggggaggcctcaggaaacttacaatcatggcagaaggggaagcaaacacatccttcttcacatggtggcagcaaggagaagtgctgagcaaaagggggaaaagctgcttatacaa

SEQ ID NO: 660488 - DNA, 558 bp, Homo sapiens
cacaatcatgactcactgtaaccttaggctcctgggctcaagcgatcctcctgcctcagccycctgagttgctagggctacaggtgtgcatcaccatgacagctaattttttgtagagacaggggtcttgctacattgcccaagcttgtcttgaactcccctcaagccatgctcctgccttggcctctcaaagtgctgggaatacgggtgtgagccacctctcctggccatactaattattattaataatccatatatctccaccttgaagaagcaaaatcaatcaccctattattttagtaaatagagatacaataaagtcttattggctgtataagaccaggtatactactagctagcactaccacttgctgagcacttattacatgtcatacgctgtcaaaaacctgcaacatacagcaatttaatctttacggcaaccttatgaggaaggtagcacaattatcttcactttgcagaaaaggaaaataaaggtcagaggcaagttacataatctatgtaagcctcatctcatttttaaactgtgaataacagcat

SEQ ID NO: 660489 - DNA, 597 bp, Homo sapiens
tttttttaaactactttgagtttctattacttgcaaacaagggtgctaagttataaaatagaatgttctttcttttcccttaccccatctacacaggtacataaacccaactatcagggctcagctctaaggtcattttcatcccagaaccatgtttgatccatatcatttaactaatctctcccttctctgaactgctgtgatattttatgcatctctcatattagttagattcatattttctatcttccactrtactatattttcttcaaggataaggtctgtcatctttgtaatcttccaagaactgagtacagtatttttgccaccacagaaaatcagtagatctttgctgaataattgaattaaatgaatgaatgaacataactaaagaatagccagaatccttatgttttattacaggaaagtttagtctgaatgagttgaagttattcacaaaaaaaaaaaaaggattttcttttccaaagaaaaataaaagaaggtatggccaactgattgctagacaaagatagtgagtataaaattaagaccttacatttatatttattcatatctgaataaataaactctggaaag

SEQ ID NO: 660490 - DNA, 598 bp, Homo sapiens
tgcctatattaagtttactacttaagatgttataagtcaaatgctgagctgcttcctttagctaatgggaatgctattttagctaataggcattataaaatgataaataaagcaggttttgtggtagagagtatttgcctacaaaatgaaaggaaaartctggatgcctaatgtaatatgcaggcagtgatagcaccatggtcaggttttgaaagtgctgtggctcaaataacttagagataaagatgatgtgccctgaaaaattctgttagaggtctcaacaaagggcacagtgatgataatcatgacgataaggacactaatattgaagctaaacatgaagagttcaaataaaattgcttcctattaaaaacagtataataaagaatccaaaatttttcatagtcttcatctattaactagtgtttctctttgcagtggaggggaaggtatgtccttttgtcagaactttttgaaatatacactttcagatgggtgagttttgttgtatataaattataccaaaatagagctgatttttaaaacatgtcaactattagattgaagaggaccttagatattttatctagtcatcccc

SEQ ID NO: 660491 - DNA, 494 bp, Homo sapiens
ttttttgtggctcagtagtattccatggagtgtgtattccatggtatatacatatgtgtatgcataccacattttctttatccactcatgggtttatgggcacttaggttgatgctatatctttgcaattgtgaactgcactgcaataaacatacacatgcatgtgtctttttgatatactgacttcttttcctttggatagatacccagtagtggatttgctgggtcaaatggcagatccactttcagttctttgagaaatctccatacggttttccatagaggttgtactaatttacattcccatcagtgtttctttttcacatctacatgaatatctattgtttcttgactttctaataatggccattctggrtggagtaaggtctgatctcattgtagtttttatttgcatttccctgacatttagtgatgttgagcattttttcattttttttttttggccatttgtatatcttcttttcagaaatgtc

SEQ ID NO: 660492 - DNA, 514 bp, Homo sapiens
ccctccactctctcaagctctgagatttatactccctccatcatggatctgaacagctctagttcagcactaggggaatggacatcaagccagccttaatattaggcctgtttgttgtctcctactccatcttgggcacgtaaagtttgactactgygcttctaaacctaagcccttgccttgtagcctagttctagcatgtaccttaaatactgaccttcataaactgctcagtctcccaggttccatacctttaccttgctcatgccagtttccacactcattctccattcccactgacatcatttgattactgacacaaaatcccacttgtggagctagagccacctactttctctggtgctctgcccacctggacttctttccactgctcacaacaagatgtactcttcagcctcagctctgttctgtgggttctccaacccatcacagaccagagtcccagttctagccctccttttctcacactatattccgtcttaaggagaataac

SEQ ID NO: 660493 - DNA, 563 bp, Homo sapiens
tctgtctcaaataataataataataatatttatattgaacacactttgaaataataatacttttaaaatattgagttaagtgaaatatattttttaaattaatttttacctgtttcccrtaacatttttaatgtggctgatagaaaattttaaattacatatgaggtttgtattatatttctattaaacagcactattatattatattcactattatattatgttcactattatattatggttaggagcatcgtctagagtcaggctgtctgagtttgaaacccagtttcatcatatgtaaagtggagttaataataacataattatatataattgtgaagattacaggggtatttatatataaagtacatagaacagtgcctaacacatactgagcagtcaatatatgttcactatatatatctccctggtaatatactgattcccatttatggactccaaattttagtatttcactaaattttagtgattcatttagtaagtgtattagtcaactctggttgccataacaaaataacatagactgatggcttaaacaacaa

SEQ ID NO: 660494 - DNA, 586 bp, Homo sapiens
ttctttttgtaataggcttgaattaattataattcttagcctatatcacctcttggagtattaagtttaacagctgcctattaaagtaagttgtttcttcttatttattttaaaattgatttgtcaaatactgaagtgtgcgcccaaatttttgtattttggaattagatataaatggtcttttttttttttaacaaatggtccttttaaaatttgattatatttttttcagattttgcacttctatatccatgatctgtggtgtcaatctatcctcactcagcaattcttttattttcttaatcatcttacagctttacagccttttctagatctttacttgagattaagcagtcaagattctaacagataggaatttgaacaaaggtaggataacattctctattttttccagtttttagtatgaggatgttactatttttcacttctgtattcatggttttatctctttctgcttttatctagttttttggctgaggtaacatattaggtaaaaatcttctggaaacaatccagatgggctcctaaatcctgtccctmtgttggaaatcacagcttggaactc

SEQ ID NO: 660495 - DNA, 419 bp, Homo sapiens
gtttggctttgttaggaaactgccttccaaaggggctataccattttctattacyaccaacaatgaatattgctccacattctcatcaccatttgatgttgtcagtgttttgcactgaagccattctaataggtttgtagtggtatttcattttaatttgcaattccctaatgcaatttaatgttgacatttttcatatgtgtatttgccatctgtatatctttggtgaagtgcctgttcagatcttttgacaactttttaatgggaatttttaaattgttgacttataagagttctttgcatatatttttatttcaattttagttaacaaataataattgtatatattaatgggatacatagtgatatgatacctaaaatgtctgctgatcagattggaataattagtatatccatca

SEQ ID NO: 660496 - DNA, 579 bp, Homo sapiens
tgtgttcataacaactccatctttatgggcctgtttcctcaccggtaacacaccgagaaagcagagtaggaagacagagattagactggataacttctatgatccccttcaagttctataggtgtacaactacctgagaaagtatgggataaagtatatgagtaatcattggtgtgccctttagtttttgtttctttattcctaataataggacagaccagacatgcaataaatatttgctgacttgaatatgggtgcacacaattattgccaaagcaaattcataggacaccattaaatgtccattaatgcagaaggcattagaggcacagctgaaatctattagtaaataatcattaattgmccaacatccaccctgccaaatgctgtttttattttttatttttccccactggttcttacttggcctggccacacagagaaagaagcccagcagcagctgtatctattagcaatatcatgatatgaaaacatgacaactggttttaaaatgtgattatgcaatatgtgtggttgcaggatgattctgtatatctgtaatttgcacaataaattcat

SEQ ID NO: 660497 - DNA, 616 bp, Homo sapiens
acagctatcatatggtccagcaatcccactgctgggtatatacccaaaagaaaggaaatcagtatatcaaagagatatctgcactcccatgtttgttgcagcactgcttacaatagctaagaattggaatcaacctaagtgtctatcagcagatgaacggttaaagaaaatgtgatatgtatacacagtggaatactattcagccataaaaaagaattagatcgtgtcatttgcaacaacatggatggaactggaggtcattatgttaagtgaaataagccaggcacagaaagacaaacattgtctgttctcacttatttgttggagctaaagataaaaacaattgaactcatggacatagagagtrgaaggatggctaccagagactaggaaggggagtggggggctggtggcaaaaatgaggatggttaataggtacaaaaaaaaaataaaatgaataagacctaatattaatattttatagcacaataaggtgactatagacaataataattgtacattataaaataactaaaaaagtgtaattgaattatttgtaacacgaaggataaatgcctgaggggatagacatcccattctccatgatgtgataact

SEQ ID NO: 660498 - DNA, 669 bp, Homo sapiens
ggctgattttatttaatttttcataattttgtcttgaacttatggatatgccaaatagtgagtagggaagagttttacmgtgagtggctgccaaattaaagtttaatttgatttaaactttagaatatgtaatcactgatatatataaccctaagtcttactgagtatatagtagtctttttattgcttgctgtcccacaatatacaataaatggcagctgcatacattaatgtacagagtatgcattatatatctatatcaatactgaatacatcacacatgcacaatgtattatataactgtctcatatgcatatattacaggtactttatataatatagaatgcatatgtataaccaatttaggaacaagcagtatcatgagatgttacgtggcagtacactctgtttttaagagtttggccctgaagagattagaaatatatgaacattgagtccaattattcacacaactattcaaaacagtattttggggaaaaacatatgttcaaaacctctcctcaaagaatatcccaaaacttcagtgctaaatgaaaccacgatcaaatgctagattctgaacagcaaatatggtctgtggattccaaagtggatcagataagagtggaccaagctaaagccactccctcacctgccctgcaaaaaaca

SEQ ID NO: 660499 - DNA, 529 bp, Homo sapiens
tatctccaaagggggaaaaaatcatattattctaaaacagcaacccaaaatgattagcctgaaatacttcctctatgtgccccatgtagaactctgattttttacctcctcttataaacctgcttcccacaatacttccaaggaagcagataagaaragagccctccactaactaggctgagctttctctgtttagggagaaggtgggtgttgctcaataggaagaaaccctatattcctgatttacctggccaacccaacccatcctcccctggggatgtttctggcaacccctttcttcttggactgcatccagctaataccccatgtgagaaacaactgccactttacgctgatcacactccttagcattcccaacttaagttctgttatgagtgttaagggtccccaggtggatattttaccatggaatctgcatttttttcccttggtcttttgaaacatccataaacacctaataacttttcttaccagaaatactgcagcaattgtttaaaaaaaaaaaaaa

SEQ ID NO: 660500 - DNA, 529 bp, Homo sapiens
tatctccaaagggggaaaaaatcatattattctaaaacagcaacccaaaatgattagcctgaaatacttcctctatgtgccccatgtagaactctgattttttacctcctcttataaacctgcttcccacaatacttccaaggaagcagataagaaaagagccctccactaactaggctgagctttctctgtttagggagaaggtgggtgttgctcaataggaagaaaccctatattcctgatttacctggccaacccaacccatcctcccctggggatgtttctggcaacccctttcttcttggactgcatccagctaayaccccatgtgagaaacaactgccactttacgctgatcacactccttagcattcccaacttaagttctgttatgagtgttaagggtccccaggtggatattttaccatggaatctgcatttttttcccttggtcttttgaaacatccataaacacctaataacttttcttaccagaaatactgcagcaattgtttaaaaaaaaaaaaaa

SEQ ID NO: 660501 - DNA, 556 bp, Homo sapiens
aaagtgcattgatgtgtctggaaatttcaatgaaaaattaagtgatttctaattgacttgcctgaaggatgaattatgaaagcgagcatttctgaaaataggtaacaaagccctaatactcaaacttgccagaattatcctacaaattctcatacacctaaatacatgtcatatattagtacagctttagaaataatttgggcaatcttatgataataaaacaatctaagagcacttataactactcagcttctttctaggagtcctatgtaatgctctaacattcagaaagtaagtaaaactgaattattaaaagccacccaatgtggagttttgcctgatacaacaaaaaaattacagccaattcaygcacacccttcatctgtcaagaaccacagcagtgaattcagcaagccaagaaaactttaataaaattacacaggcctcagcatccaagagcagtctctccatccaaaacttacaaattccaaggccagagaacagtgtgactaatcctaacgaaaataaaaaccagctgcctgaagcactgtaataa

SEQ ID NO: 660502 - DNA, 643 bp, Homo sapiens
gggtccgtttcaggtcctagaggctgcctaaaggtctttgacacatgagctttctcaatgtggctgtttattcatccagcaaggagaatctctagytccagtctactaagatggagtctgatataatgtaagataattacaggatgatgtcccatcatctttacaacatagcataacctaatcactggaataacattccatcatctttttacattttgttggaagcaagccataagtcctgcctacccttaaggggaggagattacacaagagtgtgaacactaggagatgggaatctttggggctcaccttggcatctatctgacactaaccttattatgccatacaaattgtcaactaaatgaaaacttttctatagcaagggttcatataaaaggccttaaacatttctcactcatatagatacatagctagatagacagatacagaaatacataggcacacacacacacataccatacacatactatcacagagcttgagagaaccgtgtatgaagttagacacctggtgtctccaatatctgtaataactacttcaagacttagtggcttaaaacaatcacaatcttatcttgctcatgagtctatgggtcagtatttggagagggcacagcaaagta

SEQ ID NO: 660503 - DNA, 643 bp, Homo sapiens
gggtccgtttcaggtcctagaggctgcctaaaggtctttgacacatgagctttctcaatgtggctgtttattcatccagcaaggagaatctctagttccagtctactaagatggagtctgatataatgtaagataattacaggatgatgtcccatcatctttacaacatagcataacctaatcactggaataacattccatcatctttttacattttgttggaagcaagccataagtcctgcctacccttaaggggaggagattacacaagagtgtgaacactaggagatgggaatctttggggctcaccttggcatctatctgacactaaccttattatgccatacaaattgtcaactaaatgaaaacttttctatagcaagggttcatataaaaggccttaaacatttctcactcatatagatacatagctagatagacagatacagaaatacataggcacacacacacacataccatacacatactatcacagagcttgagagaaccgtgtatgaagttagacacctggtgtctccaatatctgtaataactacttcaagacttagtggcttaaaacaatcacartcttatcttgctcatgagtctatgggtcagtatttggagagggcacagcaaagta

SEQ ID NO: 660504 - DNA, 558 bp, Homo sapiens
ttccaccatttcaccttgtccaggaagtgtttctccatttaaatgtggacattataatgtgcaaacatatttaagactcagcagtttagaaaaagctgaaaatatgctctattctcttcccatttttatgaaaaatttcaaacacacacaaaagtcaagagagtagaaaatgaatccccatatacacctcattcataccccaaaattatcaagattttgctattgtatcatctgttcctctttctttttgttttcctatgctaaagtactttatatcaaatcatagacaacatatcgttttacttcaccaggcttcattatgtatagttcccataatccgaatgtgtcatggaagggacctggtgggaggtaatgtaattggtgcagttactctcatgctgttctcaccgtagtgagtgagttctcatgagayctgatggttttataaggggcttttcccccttttgctcagcacttgtccttgctgccaccatgtgaaggaggacgtgtttgcttccccttctgccatgattataagtttcttgaggcctcccccag

SEQ ID NO: 660505 - DNA, 590 bp, Homo sapiens
gtttgtgttttaggctaagtgttatgaaacagtcaaaatgtttttaaaacttaaaaatttataatatttaaaagtcacagtaagctaaagttaatttattattgaagaaaacatttttcaagaaattggccatgcatggtggctcacgcctgtaatcccagaattttgggaggcggaggtgggtggatcacttgaggtcaggagttcaagaccagcctgaccaacatggtgaaatcctgtctttactaaaaatacaaaaaattagctgggcgtggtggcaatcacctgtaatcccagctacttgggaggctgaggcacaagaatcacttgaacccaggaggtggaggttgcagtgagctgagattgtgccattgcactcaagccagggcaagagagcgagactcccawctcaaaaaaaaaaaaaaaagaaaaagaaaagaaattaagtatagcctaaatctacagtgttcatagtctacagtggtgtacagtaacatcctaggccttcacattcactcaccattcactgactcacccaaagcaacttccagtcctgcaagctccatttgtaagtgccctctacaggtgta

SEQ ID NO: 660506 - DNA, 578 bp, Homo sapiens
gtgtgtgtgtgtggctattgtaaatgggatcatgttcttgatttggttctcagcttsaacattattggtgtatagaaatgctactgatttttgtacattgattttgtatcctgaaactttaccaaagtcatttatcagttccaggagccttttggtggagtctttacggttttttagatatacagttatactgatagcaaagagagatagtttgacatcttttcctatttggatgcctctttaggtaatttcaaattatatgcctttacttacacttttttctcttcttttttttgagaacaggtctcactctgttgccctggctggagtgcattgacaggatcatggctcactgcagcctcaacctcccagctcaagcaatcctcctgcctcagcctcccaagtagctaggattataggcaggcaccaccacacctggttaatttttaaattttttgtagagatggggtcttcaactcctggccttaagcaatcctcccaccttagcctttcatagtgcaaggattacatgtatgggccactaggcccagccgctacctgtgctttttaactgatta

SEQ ID NO: 660507 - DNA, 540 bp, Homo sapiens
atgtttttccatttgtttgtgtcatttataattttttttcagcagtgttttgtagtcctttttgtagagatctttcacctccttagttatatatatccctaggtttgtgtgtgtgtgtgtggctattgtaaatgggatcatgttcttgatttggttctcagcttcaacattattggtgtatagaaatgctactgatttttgtacattgattttgtatcctgaaactttaccaaagtcatttatcagttccaggagccttttggtggagtctttacggttttttagatatacagttatactgatagcaaagagagatagtttgacatcttttcctatttggatgcctctttaggtaatttcaaattatatgcctttacttacacttttttctcttcttttttttgagaacaggtctcactctgttgccctggctggagtgcattgacaggatcatgsctcactgcagcctcaacctcccagctcaagcaatcctcctgcctcagcctcccaagtagctaggattataggcaggcaccacca

SEQ ID NO: 660508 - DNA, 578 bp, Homo sapiens
atccttggctgattgcactgtgaaattgctgacctgcatctctctggggtggagcccccaggagacaagcaaaaggcccttggccacaaccattactaaggtccctttctctgtcctacttagggaggaaacataaaccatgagatcacctcaaagctgtagtgggcagcctgggagtgctaaactgcaatgtacagccaacattcatgtgggmgaggagcctacactttgagagctttgacagggagcatggttgcaactgtgaggaaatataggggagccacaagaacttaccaactgaccactacacctaagtgtcacctacaggataacattcgaaagcttcaacaccaaaaatatcttactgacatacacccctgcgaaaccaaagatgagaagtcagctacaaataaaggccctgcacgaagccatggccttgtgaaaacatccagaaaataagtctattgaaagtaaacaatttacactgtagttaaaggaacacctaaacacagaggtgagaaagaatgaatgcaagaattccagtaactcaaatgaccggagtgtcttatgtccttcaa

SEQ ID NO: 660509 - DNA, 614 bp, Homo sapiens
ctgttgttaagtggagatgtaatcgatatcttatattgtactagtttcctgtgactgttctaacaaatgatcacaaatttggtggcttagaacagcagaaatttattctgtcaattcgggagctcagaagtccaaaatcagtatcattaaacaaaatcaaggcattgaaagtattggtctctatctggaggctgtaggaaaaaatctgttycttgcctcttccatcttttggtggctgctagcattccttggcttgtgggcacatcactccaatcttgaaggttagtatctttatttttttaatttttcactttaatttttttgttagatgctaaagcacaacaatttaaatttattttttaaaaattcagcttttattttagatacaggggaacatgtacaaattattatatggacgtattgtgtgatgctgaggtttgggtatggattctgtcacccagatggtgagcatagtacccaataggtagtttttcaacccatgtcccccttccttcctcacccctctagtagtccacagtgtctatttttgccatctttatgtccatgagtacccagcatttagctcttacttataagtgagaacatttggcatt

SEQ ID NO: 660510 - DNA, 606 bp, Homo sapiens
tattctgtcaattcgggagctcagaagtccaaaatcagtatcattaaacaaaatcaaggcattgaaagtattggtctctatctggaggctgtaggaaaaaatctgtttcttgcctcttccatcttttggtggctgctagcattccttggcttgtgggcacatcactccaatcttgaaggttagtatctttatttttttaatttttcactttaatttttttgttagatgctaaagcacaacaatttaaatttattttttaaaaattcagcttttattttagatacaggggaacatgtacaaattattatatggacgtattgtgtgatgctgaggtttgggtatggattctgtcacccagatggtgagcatagtacccaataggtagtttttcaacccatgtcccccttccttcctcacccctctagtagtccacagtgtctatttttgccatctttatgtccatgagtacccarcatttagctcttacttataagtgagaacatttggcatttggttttctgttcctatgttaatttacttaggataatggcctccagctgcatccatgttgctgcaaagaacgtgatttcattctttttttatgga

SEQ ID NO: 660511 - DNA, 570 bp, Homo sapiens
ttcttctttttttaaaaaacttgatttgtagttgatgcaagttcttttttttttttttggtcacccaggctggagtgcagtgacgtgatctcrgctcactgcaagctctgcctcccaggttcatgccattctcctgcctcagcctcccgagtagctgggactacaggcacccaccaccacgcccggctaattttttttttttttgtatttttagtaaagacagggtttcgtcgtgttagccaggatggtctcgatctcctgaccttgtgctccgcccaccttcgcctcccaaagtactgggattacaggtgtgagcccacgtgcccagccagttgatgcaagttctttgttgggtatatgtgttgctaatatcttccccctctgtaacttgccttttcattttattagttgtgtcttttggttatcaagagttcttaattttatagtagttcaatttatcaatcttttatttcatgattagcacatttgtgtcctatttaagtacctttgcttactccaaggtcataagattgttttgcagatttatcttctagaagctttattttaaac

SEQ ID NO: 660512 - DNA, 553 bp, Homo sapiens
aagaacatcctcttgcctcacttaacatgaaagtggatttcttagctgtaacttgaatagcagtatttctccttcccttcatttagctagtcaggtctttggcataagtttccttagaaggaaggtggatactgaagagggggatgccttctttcagatgttatgaacatccagtggggatgtggttgtgttgtaagcctgaaaattgtttaccagaaggctaatgtgattgaattctcwattatcactttaaaaaataattatgtggtcaactgctatttgaaaaaagaaaatattctcaaattagatttttattcccatttaaaaatagaactgtttcataattgctcaagaaaaatgaagcctttatgatttctttaggcatatgcaaaactaggggcaaaagactgagtagttttatgtaattgtgctcatttaaaaataagtaaaagtttagtaaaataatatctaactttattttaatgttctagactttacagctttataatccaatttatagtgcctatgtagaaatttgtttcagtaatttttg

SEQ ID NO: 660513 - DNA, 565 bp, Homo sapiens
gaagtaaagtctcaaaaatgactgctgtttaaaacataaattttacagtcagaacattaatttgctaccaagaaagacttaatgaaataatcactttaaatagctaatttcaccatattcataaaatttaaataacattttatatactagtcatataaagaaagttaatagtaattcattattttattttccaagtatttattgtacaccttctatgagtcagtctgaagatctttcttaagcatttcttgtaattcaggtctgctagcaacaaactctcttagtttttgtgtatgacacagcttttatttcaccttcatttttaaaaaatagttttactggatataggattcttgattgacagattatttttaatttcagtaytttgcatcattccactgccttctgtcctaattgtttatgatgcaaagtcagctgttaatctcactgtgacctccttgaatgtaatgagtcatttttctcttgtgatttttaagactttctctttgtttttgtcttttaacgttttgctatgatatgtctgagggtggatatttttgtgttt

SEQ ID NO: 660514 - DNA, 583 bp, Homo sapiens
cagttatttgtgcacgcagtagtaagggaaagaaaatgaatgacttgtaacagatctgtgcttacaaatgtcaaagttgtcaatgagtcactgactttaaaaggtcataccattttatgcttctacctcttaaacttagtaataaagacaggatatgtgctatacttcctactcttaatgcatttgtatcccaattttccatgtcaaagtwtggctttaccacctgccactgtttttatatgattccttccaagtcaagcctttcctctcctctgagatgtttattaatcttcaagaggtgctgtcactaaggcctcagactgtggaatttttaataatatttggctaatagtgatacgtgtgattgatttggacagcccctcaatctcagaaataaaattgggtaagaattatatgaactctaggatcattgttaaaattctggtcagcacaatttagtaagcagattgtgttatattccttttctgcatgtcaagtaggtcaaacgtgaattgttttattccagatctttatatctattttacttatgtttgtgtacttgactggtcatgaactgaaagaa

SEQ ID NO: 660515 - DNA, 583 bp, Homo sapiens
cagttatttgtgcacgcagtagtaagggaaagaaaatgaatgacttgtaacagatctgtgcttacaaatgtcaaagttgtcaatgagtcactgactttaaaaggtcataccattttatgcttctacctcttaaacttagtaataaagacaggatatgtgctatacttcctactcttaatgcatttgtatcccaattttccatgtcaaagtttggctttaccacctgccactgtttttatatgattccttccaagtcaagcctttcctctcctctgagatgtttattaatcttcaagaggtgctgtcactaaggcctcagactgtggaatttttaataatatttggctaatagtgatacgtgtgattgatttggacagcccctcaatctcagaaataaaattgggtaagaattatatgaactctaggatcattgttaaaattctggtcagcacaatttagtaagcagattgtgttatattccttttctgcatgtcaagtaggtcaaaygtgaattgttttattccagatctttatatctattttacttatgtttgtgtacttgactggtcatgaactgaaagaa

SEQ ID NO: 660516 - DNA, 592 bp, Homo sapiens
atgcattcctgtagtctgttttctactggatcatcttttttgtcgattcataaacattttatatacatatgtatataataaaattaatactgtattatttctttgttagttttatgtattacaactatcttctacaagcctaaagcttgccttttaaaagtttgtttattggtgaggtggcgggcgcctgtagtcccagctactcaggaggctgagggaggagaatgatgtgaacctgggaggcagagcttgcagtgagctgagatcgcgccactgcattccagcctgggcgacagagcgagactgcrtctcaaaaaataaataaataaataaataaataaaataataaaataaataaaagtttgtttattatatcctttatcacacaatgttgtttcattttaatatactcccaattcgtcagtctttttttttatggtttatttttttattttatgttttttattttatgtttatttattttatggtttattctttttgtcttttcttatctcagtggcatgatgatagttttctatatttcttgtgttagacgtttgcatttcatcaccaattgccccagcagtgctta

SEQ ID NO: 660517 - DNA, 592 bp, Homo sapiens
atgcattcctgtagtctgttttctactggatcatcttttttgtcgattcataaacattttatatacatatgtatataataaaattaatactgtattatttctttgttagttttatgtattacaactatcttctacaagcctaaagcttgccttttaaaagtttgtttattggtgaggtggcgggcgcctgtagtcccagctactcaggaggctgagggaggagaatgatgtgaacctgggaggcagagcttgcagtgagctgagatcgcgccactgcattccagcctgggcgacagagcgagactgcgtctcaaaaaataaataaataaataaataaataaaataataaaataaataaaagtttgtttattatatcctttatcacacaatgttgtttcattttaatatactcccaattcgtcagtctttttttttatggtttatttttttattttatgttttttattttatgtttatttattttatggtttattctttttgtcttttcttatctcagtggcatgatgatakttttctatatttcttgtgttagacgtttgcatttcatcaccaattgccccagcagtgctta

SEQ ID NO: 660518 - DNA, 511 bp, Homo sapiens
taataccatttctaccgtaaaccatcatatatgggttcttctgaatagtaatgatccactattataatcactatggttgtatagttttgatggatgttagggcaagtctggattgctggccaggtaaatttctacccccactccctttttctttttcaraattgtcctggaaatttcttgactgtgtacttaaaagtgaattttaagctaggcactgtggcatgcatctgtaaatgcacccgtaatcccagctacttgagccaggagtttgagaccagcctaggcaacacaacaagaccttgtcccaaaaaaagagaattttagtttcagcttgtcaaattctttggggatttgattaacattccattgagtttataattttgagggaattgccacttctaaattctgaaatttctatcaaagaatatagcagtacatcaatacttttattagggctttttttctttttattagtaaagttttagaatattcttcacaaacacctccacac

SEQ ID NO: 660519 - DNA, 632 bp, Homo sapiens
gtgagtaaggttggcaatggagtttcttagagcagccccacaatgtgctatgctttttttttctcactgtttatttcttagcttattgaccctatctatttgccttcaagttttgttctttgggccttttagggattctgtgggctagctaataaccttctacaaagccttttctgctaaaaatatctcagttcaatactattgtttgcaagtataagcctgactaatggagagtttcaggtggtaggtgttgcaccccgcccccccaccaaaaaaatgataaatacctcctctgctaaaatatacatgtagagattggragtgttggtcttcactcagtatttgtaaaaaaaatggattaacagacctagagaatgtgcacaaccgttggttgtgacagcaaaatattctactgtactagtcaacctgtgagtttcaagcctcaaatgctatatgacacattggatgcataattaagctgcagcattgcattaatatcaataactagcatttgttgagtgctcaccagacagtgctatataggttattttataagttattttatgtaatcctcaaaataaacctttgaagtatttactagtggcatctctattttatagaagaggaaatta

SEQ ID NO: 660520 - DNA, 569 bp, Homo sapiens
cattcaactctgagaaagtctctaacctaatctgtttttagcttcaatggcctctcctgccagataaaaccaaagtaaggaaayagaatgtcttgcgaaaagctgtggaaacgcacaggcaactggaataatggagccatatcccagatacaacttggagctataacttatctcttgacttctaaattaagacacagattaatggcgcatacatatatatatataaccttatatctatatatatctcctagcattaaaccagggactgctctcaaccttgttcaacataatgttcagtatatttactgcaaaaggacacgctttcggagaaaaacaatgccgtacagcaatgtgcaaatcacttgatcctataaagggtcagtttcctttctgtaaaacagggttatttatcattaccctgcctcatagtgccactgagaggctcaaacaacacagtgaatgtgaaactgctgaagtatttttactatgtaaggtgctccttttgtgaacgtctaaactttcttctaataagagctttactgtaaggttctttagaatatccatataaa

SEQ ID NO: 660521 - DNA, 546 bp, Homo sapiens
cactgcataacaacgttttgatcagtgatggaccgcatatacaatggtggtcccataagattataatggagctgaaaaattctattgcctggtgatgtgatagccatcctaacagtagtgcaacacattaccttttctatgtttagttatacaaatactattatattacaattgctaacagttttcagtacagcaacatgtacagatttgtagtctaggagcaataggctatactgtatagctcaggtttgtagtaggctatgccatcaaggtttgtgtaagtayactttatgatgtttacagaatgataaaatcatctaatgatacatttctcagaacacatccctattgttaagtgatgtgtgactgtttagaaaaatgttttatgggctgcaataaatacacaaatataaggaatgattataatcatatttgtgttttagttgtaaagagttagtttaagcaatgggtttattgaagaataaaatcaggatcaaggaaatgggaaacacctacatggaccttatcagctgcttgcttggtgtg

SEQ ID NO: 660522 - DNA, 516 bp, Homo sapiens
gtaatgagtaactgaaacaagaaaaggacaatttatatacaaaattaataattttcccctcatttttatataacacacattaactgtattatgcaatcatctgtaacaatactgccaayttcatgtggtgcaaagagtatctggagtcagctgagcaagattcaggttacagaacaacagtaaaatatgtgttttattttgagaagttcaagtaatctctccaagtttgcttttctttaaaatggtgaggaatattatcaacataacttgataatgatgttaatgtagaacaagtagtcatcagtgagtattttaaagagtcatttgagattttcagtacacaaatataatcaattacaggtattttgttaacaaaaccttaatattaatacagaatgtgctaaactaacaggcaaacaggaacaccataaaactgtaattcttctccctttctcccataatcagtactagaggctggtcattattttaataaggaacagattgtaagcccattca

SEQ ID NO: 660523 - DNA, 480 bp, Homo sapiens
ctacctatgtttgctcaaggctctarggcggtacagtcagcaggtggcaaagtgggacagacttgtgtcctttccttcagggcggcaagttcccccagaccccgggtgggtccggaggtgtcatccatgagccatgtactggagtaaaaaaccttagacatctacctggtgttctgttgtactgctgctgagctggcactcaaatcatgagatgcaggccttcccgctcttccctccactttccacaggcagaggatcctaaccctgtggacaccaccatcactggcctatgaggagtgctgccaggcttccactgatgttcacttaaggcccaagggctcttcaattagcttgaggtgaatgttgccaggtctgagactcatccttcagggtgctgggatcccctctggaccagggcaggtccagaagtaccaacctggtatctaaggtgcacgacaaagctccctttacttttctctg

SEQ ID NO: 660524 - DNA, 480 bp, Homo sapiens
ctacctatgtttgctcaaggctctagggcggtacagtcagcaggtggcaaagtgggacagacttgtgtcctttccttcagggcggcaagttcccccagaccccgggtgggtccggaggtgtcatccatgakccatgtactggagtaaaaaaccttagacatctacctggtgttctgttgtactgctgctgagctggcactcaaatcatgagatgcaggccttcccgctcttccctccactttccacaggcagaggatcctaaccctgtggacaccaccatcactggcctatgaggagtgctgccaggcttccactgatgttcacttaaggcccaagggctcttcaattagcttgaggtgaatgttgccaggtctgagactcatccttcagggtgctgggatcccctctggaccagggcaggtccagaagtaccaacctggtatctaaggtgcacgacaaagctccctttacttttctctg

SEQ ID NO: 660525 - DNA, 480 bp, Homo sapiens
ctacctatgtttgctcaaggctctagggcggtacagtcagcaggtggcaaagtgggacagacttgtgtcctttccttcagggcggcaagttcccccagaccccgggtgggtccggaggtgtcatccatgagccatgtactggagtaaaaaaccttakacatctacctggtgttctgttgtactgctgctgagctggcactcaaatcatgagatgcaggccttcccgctcttccctccactttccacaggcagaggatcctaaccctgtggacaccaccatcactggcctatgaggagtgctgccaggcttccactgatgttcacttaaggcccaagggctcttcaattagcttgaggtgaatgttgccaggtctgagactcatccttcagggtgctgggatcccctctggaccagggcaggtccagaagtaccaacctggtatctaaggtgcacgacaaagctccctttacttttctctg

SEQ ID NO: 660526 - DNA, 480 bp, Homo sapiens
ctacctatgtttgctcaaggctctagggcggtacagtcagcaggtggcaaagtgggacagacttgtgtcctttccttcagggcggcaagttcccccagaccccgggtgggtccggaggtgtcatccatgagccatgtactggagtaaaaaaccttagacatctacctggtgttctgttgtactgctgctgagctggcactcaaatcatgagatgcaggccttcccgctcttccctccactttccacaggcagaggatcctaaccctgtggacaccaccatcactggcctatgaggagtgctgccaggcttccactgatgttcacttaargcccaagggctcttcaattagcttgaggtgaatgttgccaggtctgagactcatccttcagggtgctgggatcccctctggaccagggcaggtccagaagtaccaacctggtatctaaggtgcacgacaaagctccctttacttttctctg

SEQ ID NO: 660527 - DNA, 447 bp, Homo sapiens
tcagagggagagaaaaaaattggcaaagggatctgagatccgcaggttgtgaccagcctcttctccagggcttgaggaagggtctcttttccctgtgctgagatttaaggctctcgttgaaaagttcacagtaatgacagagctttgattttttttctttcttcttcttctttttttgcctggtayccctaacttagattttccaaaccatgtccctaacttcaccacagcctactgcaaagtaaactctggttgcaaagagtggtgaagtcagaaaagattaagtgactttatgtaataatcgagggttgctttagggaggctgcctctttatgtaataattgagagttgctttagggaggctgtgatgttggaatagcatcgttcttttgtggtaaacaccaagactttttggacttttttttttttttttggttttaaggagcg

SEQ ID NO: 660528 - DNA, 447 bp, Homo sapiens
tcagagggagagaaaaaaattggcaaagggatctgagatccgcaggttgtgaccagcctcttctccagggcttgaggaagggtctcttttccctgtgctgagatttaaggctctcgttgaaaagttcacagtaatgacagagctttgattttttttctttcttcttcttctttttttgcctggtatccctaacttagattttccaaaccatgtccctaacttcaccacagcctactgcaaagtaaactctggttgcaaagagtggtgaagtcagaaaagattaagtgactttatgtaataatcgagggttgctttagggaggctgcctctttatgtaataattgagagttgctttagggargctgtgatgttggaatagcatcgttcttttgtggtaaacaccaagactttttggacttttttttttttttttggttttaaggagcg

SEQ ID NO: 660529 - DNA, 566 bp, Homo sapiens
ttattaggaatggttcctgagtaaaatgaaaatatgtcagtctgccataaatgaaattcattattttagaatttcaaactttcttcttaaatgaagtgtggtaggaatcctattttaacaactgtaagctaaagaattagctgtgaatcttgcccagtttcaataataaatcagtgaattccaatggttgcacaaaatttatcttatcaggccaatatatttactattaattaaatgtatattgagtatgtatatttagcatgttaagtgagttagattcttttgacatatattctatackgctaaaataaaattgactcatataggacagaatggaattacattttgtgaagttataaaatctgagctatgattcagagtgtgggaggaagtactgacgttatgaagctcataagtacctagtagtactaagctccaggttccaaaagtggcatattgtcactatagcaaccaccatgcttatttggatttgaaacccaggcaacgaatggtggataggactataatattaaggtaggtatctgctctggtggattgatatgcct

SEQ ID NO: 660530 - DNA, 547 bp, Homo sapiens
gtgcatctgttgtttcagcagcaaggcaatgacaatgaaaaaaagattgggtccaataagattgcaaatgagggacattcacagcctttgtagaatcatctctggtttttacaatatcatgattctggttttctcagaagaagtaaaacagtgagagataaataacattaataatttgacaatcaaaagagaatgtgtatgtcagaatggaaaaaggaacctattctgttagggagacaactaaaamcatcatgcagaaattaattttaattgagacaaaagatttaggaaaaagttgctctgtaggttggagacacaaattttattttagaccagcagactattagaaatgctggtacaaaactcaagaaaggagtcagaattaaagacaaacacatagctgtgtcataatcctacccattttataactgagaaatatgggagaaaagattgttgtcgcctctctaatatacccattataatcttcaacctgctgagtactgggggattaggatcatgggggaacaaacagataaacaacagctaa

SEQ ID NO: 660531 - DNA, 417 bp, Homo sapiens
tggtgcaaggtagagatctagtctcattcttctgtatatggatatccacttttcccagcaccatttattgaagagtctttttactttttaattttaggttcaaggggtgcaggtgcaggtttgttacacaggtakattgtgtgatgctgaggtttgaaattctaatgatcccatgacccaagtggcagatacagtacctgataggtagttttcaacacttacccctccctcttttctccctttttttggaattcctagtgtctgttgttcctgtctttgttccatttgtacccagtatttagcttccacttacgagaatatgtggtatttggttttctgttgctgcgttaatttgcccatgacagtggccttcagttgcatccatgttacttcaaaggacatgatttcattctattt

SEQ ID NO: 660532 - DNA, 609 bp, Homo sapiens
ctggtaggccgggtgagaaaggacttgattctttccatgggcttgcagctttctttctgccttctgtctgttcctgtgagcatcagtcctgcaacacttcctcaccaggcaggtaaaattccctcctatatatatattttgagattgmgtctcctctgtagctcaagctggggtgcagtggtgtgatcttggctcactgcaacctctgcctccgcagaaaattcttgtgcctcagcctcctgagtagctgggattacaggcatggggcaccacacctggctaattttttgtagagacgggattttgccatgttggcaaggctagtcttaaactcctggcctcaagtggtccaccagtcttggcctcccaaagtgctgggattatagacatgagccactgtccctggtctcctcctatagtttatctaaagctagtatgcaaattttccaacacccgaagaaaaaaatttatcatgtacaatcccctttgttcccaacatgtgcaccaagcaagtggcatctcttcttcagaggtttgggtccccatgggatccttcttccacatttctaagttttaacaacctcttcccttgtttccccaactctatca

SEQ ID NO: 660533 - DNA, 609 bp, Homo sapiens
ctggtaggccgggtgagaaaggacttgattctttccatgggcttgcagctttctttctgccttctgtctgttcctgtgagcatcagtcctgcaacacttcctcaccaggcaggtaaaattccctcctatatatatattttgagattgcgtctcctctgtagctcaagctggggtgcagtggtgtgatcttggctcactgcaacctctgcctccgcagaaaattcttgtgcctcagcctcctgagtagctgggattacaggcatggggcaccacacctggctaattttttgtagagacgggattttgccatgttggcaaggctagtcttaaactcctggcctcaagtggtccaccagtcttggcctcccaaagtgctgggattatagacatgagccactgtccctggtctcctmctatagtttatctaaagctagtatgcaaattttccaacacccgaagaaaaaaatttatcatgtacaatcccctttgttcccaacatgtgcaccaagcaagtggcatctcttcttcagaggtttgggtccccatgggatccttcttccacatttctaagttttaacaacctcttcccttgtttccccaactctatca

SEQ ID NO: 660534 - DNA, 583 bp, Homo sapiens
ggggtattttcttgaagaaactgtagccaattctggttagtctaagtcaaaacataaacttattaatagaatacagagataattaacagaattgaatgttgaaatagatgttgtgaaaagggaacactttcacattgttggtgggaatgtaagctagtacaaccactatggaaaacagtgaggagattccttatagaactaaaaatagatctaccatccaggagaaagtgttagagggtggtgagggatgaaaaaaccacacattgcatacagtgtatattgcttgggtgatgggtgcaccaaaatctcagaagtcaccactaaakaactgattcatgtaaccaaacaccacctgttccctaaaaacctattgaaataaaaaaaaggctatgttcactaaaaaattagattgaattaattatgtgtagccaaagaaggttagtctatattcctatctccatattgaataaaagaatttaaaaagaataaattaatgaaataaaaaacacttctatttctttgaggtttctatcatctttgtttaactcatctcacagtgcagcacagtgtattttcattaaat

SEQ ID NO: 660535 - DNA, 568 bp, Homo sapiens
gaattttacagagaaacagaaccaataggagatatctatctatctatctatctatctatctatctatctatctatctacctatctatcatctatctaaatatatgactatagatataratgaggggatttattataggaagtggctcatatggttacggaggctaagaagtgccatggcctgctatctgcaaactggagaaccataaattctggtggtgtgattcagtgcaagtcaaaaaaggcctgagaatcagagggctgttgggtataaatccaaaagcccaaaaaccacttgtgtcaatgtccaaaggtaggagaaaatgaatatctcagctcaagcagagaaagtaaacttgcccttcctctgcctttttgttctattcaggccctcaatggattgaatgatgcccacagatatttgtgagagcagatcttccttactcagtctactgatttaaatgctaatctcttctagaaacagtctcatacttgtacccagaaataatatttagcagctctctagatatcccttagcctagtcaagttgacacacaaaagtaaccatca

SEQ ID NO: 660536 - DNA, 596 bp, Homo sapiens
ggcccatggctgcgggctgcttgaggagtccttaggtaatgtgggcaggtttcaggtacatacagaggcttgggagggaaaaccagaagacagtggggactcgtactttccctaaatttggaggtggggctcggtacatggattagggatggggtatcaggggcaacctctccagcgtcatggtgggagttttataccctggctctttaatctcagctggcgttccagggatgtaggaggaaggaccagcagacagctgtagtgctggctcccaccaaagactcaaagccagtctgaacacaaagcccacgtccttgcgctttctgctagttcccagggttactggggaaaagcagtgattgaagaacatccttttctcactttgaaatrtattcctccacgcaagctgctaaatctgtttccaagccacagtgctatctgacttaattaattagcatctatttgcaaaccagcaattaaagggctaaagtccttttaggtggcctaattaggtctgacaggacattgtcagatgtggcctgtcctttctccataacatcctagaaattttcagccatggttttaaaagcaatcac

SEQ ID NO: 660537 - DNA, 390 bp, Homo sapiens
actttcctgggtgaggcctcaggggcaggaggtggggacctggcctgttgataagaaggccctaggctgccctgtgtggaatgttcctttgtgtttagcagccttggtccctcaagacctctgygctctgcctgcctagcagtttggcatggtagaatttccatgggcttcagagtcagatagatctgcctaaaattacttcttagcacagggcacctgaccttgtcagtagaatgggtataatacccatctcaggaggtggtcttgaggattaagtgagataatggggacgtgtcagcctctctccctgagcctagcacatagtatttgcacaataatggcacctgttatcacttcagacctcttgggcctagggtagcagattgccag

SEQ ID NO: 660538 - DNA, 547 bp, Homo sapiens
tcttttaagctattgagatgtgtgagttatttatatatttgggatattgatcccttatcacatatagagtgtgcaaatattttctcccatcctgtaggttgcctttgcactttgttgtttgcttcctttgctttgcaaacaatgagctatratcccatctttgcagaaattgctttcttgccctctatcaagtctgagtaagtaaaatcagaaaattacttatctgcctgtggcttcacagcatcattaattgctaagaagttagaattctaggtcctcctttgtagctgcagatcagttgactaagatatcatatggtgacaatggtgggagaaagttaatgctgcacaaattgcaatgatgccttttcagaaggattgaaggcaactaaacattctgaaatcagtttagaatgaatcattcacatatgttctaaggcttacttggcacaagctttaggtagtggtgcttgtgaggtagagtttccctgaaaaccttatagccctgcccaaacccacatatcctgccaagtgagaaacaagcagcc

SEQ ID NO: 660539 - DNA, 601 bp, Homo sapiens
agttatttttcaaaatggaatcagcatatttcaaccaaaatgtaaactctggtaacacgtatttttccctctgcttatattatggacaataactygaatgtctttggccaaaaaaaagctttaaaatttttcccactttcagggcatttgtgattgttattaaatagtgcaaaattatatgatactagtttaattttattatacaaagaaggaaattgagaattcagaatcatagagcttaaagcatatttttcttgaggacatctgtagaattaccaaagggctaaactatgcaactgagtatagatactattgattaccataatctagagtttctattttcagcttaaactgtaaagacagatgtcctgattcctagtaattaaaactgtatgcacatttcagctatgcatatacctatcttttgtctttgaaaattcagtgtagaatattctaacttgtcttacatattaatattacattgtaattaatattttgcagtgccattcagaagtccttattgtctctgaggatagaatatttattttggcttttttatacccacagttaatattggggctagaagtacttaattccattt

SEQ ID NO: 660540 - DNA, 568 bp, Homo sapiens
tcattacaatacaattacaattcacatgggtttaaaaaaaaatgtatgagtggttgtttcttttttgaaggcactgtacaaaagatatctctctcatattttcactgaatagttaacaggggaaactgttcagtgctttttttttttttccacccatgaggcacacactgacatgacatttgtttgatatttcactaaagcaggttgttagcgtggttgtggcagtctggcacactttcagactaaaagtattttcttatcatgtgcaattaaggctacatcagcagaatagaatagaacaaatcccatcaaggcttttcttcccatctgcatttataatagctaygtaattaatgtgaaacatttaaatgagcttgtttatatagtaaatcctatagtctttgctgataaatgttttgaagactctagctacaattctacactcaacttcatccattaatttaagggaactaattacaatcaattacaataagcttaagaaaaccctcctttgtaatatgaaaaaaccatggtagaatacatcttaaaacaataagacatatcatac

SEQ ID NO: 660541 - DNA, 558 bp, Homo sapiens
tgagtgtgaatctgccttgtgatgttggtgatgggtgatgggtttgaagtactttcatccaggatgggagatcttaactgttctcacagtggctggtagagaggccttgggttcagcttttgtcagaaattgtaagaattcatctttagaccacaaaggagattgacatttatcttttccagcttatcttgtgaacaacaaaaaaaatcccccaaaaatctgacagcctaggtctctgaaatggattggtggtgatgagagtgctagttaaactttcccctaaggttttttcctctttaaaggaaggaccttatcagcctaaaggaaaaggagagaaaggaagtgggccacagtttataccttatggctgccagtgcttctgtcacaggaaactgctgccctcctcttgcccagtacacaagctggctcctgagtgggcawcttgctggggctctgaccactccactggcaagcagctgaatgtggcttcttggttagacctctgctgaccatttaggaccaggatgaatttgactaaggctgtgctcccacaaagag

SEQ ID NO: 660542 - DNA, 558 bp, Homo sapiens
tgagtgtgaatctgccttgtgatgttggtgatgggtgatgggtttgaagtactttcatccaggatgggagatcttaactgttctcacagtggctggtagagaggccttgggttcagcttttgtcagaaattgtaagaattcatctttagaccacaaaggagattgacatttatcttttccagcttatcttgtgaacaacaaaaaaaatcccccaaaaatctgacagcctaggtctctgaaatggattggtggtgatgagagtgctagttaaactttcccctaaggttttttcctctttaaaggaaggaccttatcagcctaaaggaaaaggagagaaaggaagtgggccacagtttataccttatggctgccagtgcttctgtcacaggaaactgctgccctcctcttgcccagtacacaagctggctcctgagtgggcaacttgctggggctctgaccacyccactggcaagcagctgaatgtggcttcttggttagacctctgctgaccatttaggaccaggatgaatttgactaaggctgtgctcccacaaagag

SEQ ID NO: 660543 - DNA, 540 bp, Homo sapiens
aaactaccctggtgttaaaatagtactcaacggcaaacaccagggaccaccacttttctgatgaaaccattaaccactagaaaccattaaccatggaaggaaaagtgttataatcttargttttttttttttttttcgagatggagtctcgctctgtcgcccaggctggagtgcagtggcgcgatctcggctcactgcaagctccgcctcccgggttcacgccattctcctgcctcagcctcccgagtagctgggactacaggcgcccgctaccacgcccggctaatttttttgtatttttagtagagacggggtttccccgtgttagccaggatggtctcgatctcctgacctcgtgatccgaccgcctcggcctcccaaagtactgggattacaggcaatcttagcttttaaaagtaatttatttttcttcatttttatgattatcatcatcatcactttgacagtcaccttgctggcattttgaaatgagcagtcctagagctgaatccaggttatgctgcttagctgtgaaagcac

SEQ ID NO: 660544 - DNA, 540 bp, Homo sapiens
aaactaccctggtgttaaaatagtactcaacggcaaacaccagggaccaccacttttctgatgaaaccattaaccactagaaaccattaaccatggaaggaaaagtgttataatcttaggttttttttttttttttcgagatggagtctcgctctgtcgcccaggctggagtgcagtggcgcgatctcggctcactgcaagctccgcctcccgggttcacgccattctcctgcctcagcctcccgagtagctgggactacaggygcccgctaccacgcccggctaatttttttgtatttttagtagagacggggtttccccgtgttagccaggatggtctcgatctcctgacctcgtgatccgaccgcctcggcctcccaaagtactgggattacaggcaatcttagcttttaaaagtaatttatttttcttcatttttatgattatcatcatcatcactttgacagtcaccttgctggcattttgaaatgagcagtcctagagctgaatccaggttatgctgcttagctgtgaaagcac

SEQ ID NO: 660545 - DNA, 540 bp, Homo sapiens
aaactaccctggtgttaaaatagtactcaacggcaaacaccagggaccaccacttttctgatgaaaccattaaccactagaaaccattaaccatggaaggaaaagtgttataatcttaggttttttttttttttttcgagatggagtctcgctctgtcgcccaggctggagtgcagtggcgcgatctcggctcactgcaagctccgcctcccgggttcacgccattctcctgcctcagcctcccgagtagctgggactacaggcgcccgcyaccacgcccggctaatttttttgtatttttagtagagacggggtttccccgtgttagccaggatggtctcgatctcctgacctcgtgatccgaccgcctcggcctcccaaagtactgggattacaggcaatcttagcttttaaaagtaatttatttttcttcatttttatgattatcatcatcatcactttgacagtcaccttgctggcattttgaaatgagcagtcctagagctgaatccaggttatgctgcttagctgtgaaagcac

SEQ ID NO: 660546 - DNA, 540 bp, Homo sapiens
aaactaccctggtgttaaaatagtactcaacggcaaacaccagggaccaccacttttctgatgaaaccattaaccactagaaaccattaaccatggaaggaaaagtgttataatcttaggttttttttttttttttcgagatggagtctcgctctgtcgcccaggctggagtgcagtggcgcgatctcggctcactgcaagctccgcctcccgggttcacgccattctcctgcctcagcctcccgagtagctgggactacaggcgcccgctaccacgcycggctaatttttttgtatttttagtagagacggggtttccccgtgttagccaggatggtctcgatctcctgacctcgtgatccgaccgcctcggcctcccaaagtactgggattacaggcaatcttagcttttaaaagtaatttatttttcttcatttttatgattatcatcatcatcactttgacagtcaccttgctggcattttgaaatgagcagtcctagagctgaatccaggttatgctgcttagctgtgaaagcac

SEQ ID NO: 660547 - DNA, 616 bp, Homo sapiens
tttatgatttacttgcttattttattttatttactctctgttgttcccactaagatgtcagctccatgagggtatggcagggatttctgtctgttttatttactgatgtctccccaggaccaaatataggacctgacatataagagrcactcagtaaatatttgttgactggaaggataaatgagttatattcccactgacgcagaatgttggtgttgtgaacagaaaatcgtatctggcattttgaactattctaagatcaatctctttcacattcctaccaaatgtccattttttttctggtttcttaccaaaatggctaaccatggggaaagttttgggcatttgatctagtgaacaaatgtagacttcaataaatggccactgaggaagccaagacttcctaggagttcttatcccccatcaactaccaagctatggtaatgaaggcatttttactcacccaatccacgtcatcccttctccatggaggcagaacctaatcctaatgttcacacctttgagaccatgtgctcaggaaatcaccaggcctggtatgactggtttagtcacctggtcttattctcctggttgtatgagacattgtatgagacat

SEQ ID NO: 660548 - DNA, 616 bp, Homo sapiens
tttatgatttacttgcttattttattttatttactctctgttgttcccactaagatgtcagctccatgagggtatggcagggatttctgtctgttttatttactgatgtctccccaggaccaaatataggacctgacatataagagacactcagtaaatatttgttgactggaaggataaatgagttatattcccactgacgcagaatgttggtgttgtgaacagaaaatcgtatctggcattttgaactattctaagatcaatctctttcacattcctaccaaatgtccattttttttctggtttcttaccaaaatggctaaccatggggaaagttttgggcatttgatctagtgaacaaatgtagacttcaataaatggccactgaggaagccaagacttcctaggagttcttatcccccatcaactaccaagctatggtaatgaaggcatttttactcacccaatccacgtcatcccttctccatggaggcagaacctaatcctaatgttcacacctttgagaccatgtgctcaggaaatcaccaggcctggtatgactggtttagtcrcctggtcttattctcctggttgtatgagacattgtatgagacat

SEQ ID NO: 660549 - DNA, 665 bp, Homo sapiens
tagttgttttcttgtaattggatgtagtatatctcaattccagtaagagtttttaatgtttaggcacctgtaatatatgagtatatttaagctgtccacaataatcatcctttcagaagtattatccagagatgattatcactaccacgtgcttaagattttaagactagaaaattctgaaataaaactaaagcatcttgattttgaaaaaaatgattgtgtctatatcttgcattccgtttttaaatccttccattttggttaagtgtttcacaaaatcctgcaaatctatacagtattgaagagaggcaacactgcaaattccccttgatagatggagggccctcaactgccaggacatttttctttgcctcatagcaactgctcccccctctttatcactgttgtggttaaaatagcaaaaggaaaatgaaaatggggttctgacacttccaagaagaagtggatgatcttgattggtcataggatgtaaggaataggcatcatttaaaatcagatctctttgcctttctttctaaaaacaagtaaacatttcccttctaatggctaataatcaattgcttsacagtagtccaagcttggctgtgattctttcttagttatatcgatgatatatacacacaggacaaggaacaaacagcaat

SEQ ID NO: 660550 - DNA, 561 bp, Homo sapiens
ctatttttgaaatggctttagattttattgtttaatgccaaatgacaagatttgaatgatcctaccttcagtctcttaaaataatgactttacattgactttgttaytgttcttgatctctagagggaaagcttttctttcctaatatgtttctctagttatttaagtatgtacatgaaaaaatatatagaagtaaaatggttcaattaattgaaaaataaacttattttattaaatatccatccttaccatttgctaaaaagccagcaaataactgtttaaattttagtttattaaatattctagtcttccttatgccttacaatggtataataaggatagctgttatggcatgatatgtaagttagcagaataaaaatagtaacacaccttggaggaggggtgtcagatcttatttgtccagagctgaacctcttatttttgtctaagcttttttttaaagtaccatgttatactcctttgctcaactgatatagatgtagtttctataacacagaattcttattgatgtttacataataaagttccaggccctaaatc

SEQ ID NO: 660551 - DNA, 590 bp, Homo sapiens
agggcttggtggtttgttcagatgccaattaagggacccgaaggcctgtacattttaaaagtccatgtagggaacaaagtctgatatgtagggatcctgttgtgatttgtttttttgtttggttgtgtgtgtgtgtgtgtgtgtgtgtgtgtgtgtgtgtatgtgattttgggggtttttgttttgttttgtttttccagcatctcagtgactagcagtgtggctttatctggtctaagttgtatttgtttccaaacagcttcrtctgttacaatgctaattgggcagcacagaaacactttgcaagtcgaatttttttaaaagttaacttaccccagcaatgaacacagattgaaaatcagttaaaagccagtgagaacaaatgtctcttaaatcgaggatggaacaaagggaaggtgggggcacatcccttaatgtcaataggcagaaagctgcacgtgcacaatgggcatgggagggaccacccaaggtgactcgtgtcagttctggagaccgacagagacctggagcctgggggccaggctagccacccagagttctgctcaggagggagccaaggtggtggggaa

SEQ ID NO: 660552 - DNA, 455 bp, Homo sapiens
gagcacaggcataggggttggttttagagtttggtgagcaagatcagaaatctgaatgagttaatcaggactaagatgcagtggcagtttaagggcctatcccacaccaggaggtggctgatgatactgattaaccaggaaagaagtgctgaaaatctcatgcctaaatttgcagctatcatggcccaaaagtattgcatcctctctcagcttaatttgggtaacgttttgcttctctrcctttatcatgcgacttctctgcttctcactagttttctgaaagcagttgagtggttgtcttatgtatgtgtcctgtcagcccaactagacagcaagctcattgaggagggtctttctcctactacattttgtgttaccaaaggtgctcgtggagctcttcattcaatccccagtccttgacactcagggagggctacatctgatgaacacaaatg

SEQ ID NO: 660553 - DNA, 574 bp, Homo sapiens
gctcattgaggagggtctttctcctactacattttgtgttaccaaaggtgctcgtggagctcttcattcaatccccagtccttgacactcagggagggctacatctgatgaacacaaatgaatgggaaatttgtaattgacaagctgggtgagtaattttttccaagttgaaaattttgctttgctatgaaaagacatgctttgttcacacccaacatcttgtcgctcaataaaagatctcacagcctttataatttatgtgatgctcaaatgccagatgactggttcatggccaattccattgttaggagatacatgcagaattggtatttagtgctgtttagctgagattcctgcttctttgtcaggatctttttttcttttctctttttttagttctagccattgacaatygaatctgatgtggaactcagacttctgtgactctaaaatcatatattctaaaacctaggctgaaaacaaacgcacttcaatgctttgttttctaagtgtcctttccttttccaatcagaaaaaaaagatgaattagcattttatggtgtctattagtggg

SEQ ID NO: 660554 - DNA, 549 bp, Homo sapiens
atgggtgtgagggtaaagtacatccttctcagaatgttgcagaaggtcttcatgagctcaccctgtctcctgccaatcacacatctcccaccacttccttacttgaactcagtgcttcagctataatgatgataatgatgatatcgaacatctttggagctcttaggatgtaccccacacgtttctaacattttacctgtgttatctcaattactcttcacagtcctatgaagtagttcctgttagtagtatttttatggataaggaatctgaggtaacagagaggttaagtagcttttctaaattcaaatggctccaagactacccaggagagtgtgcagttcactccaggatatttcctctgtgtagaccaccatcacctgaggtcttgtgtctggtgtactcatcaccttggaagccagagtttgcattctgtgcctcctgaaaagctggcagtgcctccagaggctgagtcttwtatgctaagtttgggcattcacagcgccctatgcatccagtcaagggggcatgagctaccgtggttttcct

SEQ ID NO: 660555 - DNA, 414 bp, Homo sapiens
tttacaatttcagcattagatcacattctattccttttgtcgacatcatatctttggttgggttttcagtgattgctgtcataaaaagcaagtgtcatgtggaaatcaatgtagagcaagaaatgagtgtggcagtgtcctrtatgagtccagaatttgagaagttgtacagtgccaaacatgtacacttagtaattgttggttatttaaaaatgaaataaatacattttctttcaattaatgtgtaacatttttcccaagaatgactaagttgttagagcataaatacttcttaagttgtttgatcctaaatatttataatacatgaaactgaaaaaatcattgagacattgagggcattatgaattaagaaaatgtggtaacctctggtctagggacacatcaaaccatact

SEQ ID NO: 660556 - DNA, 527 bp, Homo sapiens
agtgccaaacatgtacacttagtaattgttggttatttaaaaatgaaataaatacattttctttcaattaatgtgtaacatttttcccaagaatgactaagttgttagagcataaatacttcttaagttgtttgatcctaaatatttrtaatacatgaaactgaaaaaatcattgagacattgagggcattatgaattaagaaaatgtggtaacctctggtctagggacacatcaaaccatactcaatcttgtcctgttatgtcctcaaaaatacacattcagtcgtttcaaaaatcagtgctgggagaactagatagccacatgcaaaataacagtgttggacctttacccacatgtagaaattaactcaaagtggatcaaagacccaaataaagagctaaaactagaaaacccttagaagaaaagagaagtaaatcttcatgaccttagatataaaaatagtttattagatatggcaccagaagcataaacaaagacacattgcattttgtcaaaattttgtgca

SEQ ID NO: 660557 - DNA, 425 bp, Homo sapiens
ccatggcacacatttacctatgtaacaaacctgtgcatcctgcacatgtgtcccagaactttaaaattaaattaaattaaaatgacaagtgttgataaggatgtggagaaattagaacttttgtttattgctgggaggaatgtaaaatggtgcagctgatgtggaacacaatgtggtagttcctcaaaaggctaaacatggaattaccaaataactctgcaattccacttctctcratatacccgaaataactgaaaacaagtattcaagcaaatacgtgtacaaaatgttcatagcagtactattcacaataactaaaaggtaggaacaacccaagtgttcatcagctaatgactggataaacaaaatgtggtatgtctgtataacggaatattattcagccataaaaaggaatgaagtactga

SEQ ID NO: 660558 - DNA, 632 bp, Homo sapiens
agaccctacctatctctacaaaaataaattaactgggcatggtggtgcattcctgtagtcctagctacttgggaggctgaggtgggatgagcacttgaacccaggagtttgaggctacagtgagctatgattgcaccactgcactccagcctgggtgacagagcaagatgctgtctctgaaaacaaaaaacaaacaaacaaagaaaccaggcacagtggctcacgcctgtaatcccagcactggggactttgggaggctgaggtgggtggatcatgaggttaggagtttgagaccagcctggcaaacatggtgaaaccctgtttctactaaaaatacaaaaatgagctgtgtgtgatgkcgagcacctgtaatcccagctactcaggagggtgagtcaggagagaatcgtttgaacctgggaggcagaggttgcagtgagctgagatcatgccattgcactccagcctaggtgacaaaagtgaaattccatctcaaaaaaaaaaaaaaaaaaaccaaagcaattgtatgacttaatatccaaaatacataaacaacttttacaactcaatagcaaacaagaacaacaatgaataatccaatcttgaatagacatttctcaaaaagagacaca

SEQ ID NO: 660559 - DNA, 604 bp, Homo sapiens
aatcatcagggtaattcacatcaaaaccataatgagttattacctcacacccgttatgatgaacattaccaaaaaaaaamccccacaaaataacaagtattggcaagaatgtggaaaaattggaacccttgtacactttgggtggggatataaaatggtgcagctgctatagaaaacagtatggaggttcctcaaaaaattaaaactcgaactacatatgatccagcaatcccacttctgaggtatccaaaataattgaagttaggatcttgaagagatatttgcactcccatgtttactgtagaattattcactatagccaagaggtgaaaacaaaaataaatgtcctttgatggatgaatggatatagaaaatcttaccattatatacacacagtggaacattgttcagccatgaaaagatgaaaatcctgtcatattctagcatgtgtctgaaacttaagtacattatactagttggttggtgcaaaagtaattgtagtttttgctgtcacttttgtaccaaccaaataagggaaatgcaccagtcacagaagaaatagtgcatggttccacttacataagttatctaaagtagtcaaact

SEQ ID NO: 660560 - DNA, 547 bp, Homo sapiens
tctgcccgccttggcctcccaaagtgctggaattacaggcttgagccactatgcccagtcaggagatgaagattttagttactgaattgagatggtgctttgtgcttaaacttatgcctagtgtttcattattggaacgttaagcatgtgggagttatttacatcctgccactcaaggtcatcgccgaggtctgatggcaaaaattcaaaaaattgcaaccccaggcataaatgggttaaagtgactgcatgaccagaaaaatcacaagaccttcctgaattttcatcttagggcaatggaagaaatagcctcagaaggtaggcataaaggaagggagggaatacaaagaaagtcgctctctgattacatcctgtaagccatgttgctgcatgtgtttycctctgattctctgacttaagcaagggttatatactgctgcttcaagaaatgaaactgtcatgaggaggtcaaaaatattttcaggaccaaaaggcacttggagcagatgtccctaaaattaaaaacaaaaacaaaaacagaaaaaca

SEQ ID NO: 660561 - DNA, 547 bp, Homo sapiens
tctgcccgccttggcctcccaaagtgctggaattacaggcttgagccactatgcccagtcaggagatgaagattttagttactgaattgagatggtgctttgtgcttaaacttatgcctagtgtttcattattggaacgttaagcatgtgggagttatttacatcctgccactcaaggtcatcgccgaggtctgatggcaaaaattcaaaaaattgcaaccccaggcataaatgggttaaagtgactgcatgaccagaaaaatcacaagaccttcctgaattttcatcttagggcaatggaagaaatagcctcagaaggtaggcataaaggaagggagggaatacaaagaaagtcgctctctgattacatcctgtaagccatgttgctgcatgtgttttcctctgattctctgacttaagcaagggttatatactgctgcttcaagaaatgaaaytgtcatgaggaggtcaaaaatattttcaggaccaaaaggcacttggagcagatgtccctaaaattaaaaacaaaaacaaaaacagaaaaaca

SEQ ID NO: 660562 - DNA, 522 bp, Homo sapiens
taactattataacgtctgacacaataatcacataacaacaaaagctcatctaattaaagtgcctctcttcacccaactcaggactatctcagccttgagagcctgcagtggggaagaaaattayggttgattcttcatgtcttattattctacctcttcccccactcagcagccactgtttgttcatggctccacctgggctggagcagagggaaaggaggagaggcaggggccaggaaaagtctttcttgcctagtgttgtaggtccctgggaaacagactgaggttttggcacaggagagctttgtgaggcatgttctcaggaacacaccataagggagggagagaagcaggtctgggcagtaggaggtggtgaactgcagtgcagttgccacagaggtcgcagccactcccaggggagctctgaaactggaatggcctttcaagtatgccatggggaccagacactgcttgtaacggcagttgggttcaagcggcctctaaggagaggacgtcaccatc

SEQ ID NO: 660563 - DNA, 522 bp, Homo sapiens
taactattataacgtctgacacaataatcacataacaacaaaagctcatctaattaaagtgcctctcttcacccaactcaggactatctcagccttgagagcctgcagtggggaagaaaattatggttgattcttcatgtcttattattctacctcttcccccactcagcagccactgtttgttcatggctccacctgggctggagcagagggaaaggaggagaggcaggggycaggaaaagtctttcttgcctagtgttgtaggtccctgggaaacagactgaggttttggcacaggagagctttgtgaggcatgttctcaggaacacaccataagggagggagagaagcaggtctgggcagtaggaggtggtgaactgcagtgcagttgccacagaggtcgcagccactcccaggggagctctgaaactggaatggcctttcaagtatgccatggggaccagacactgcttgtaacggcagttgggttcaagcggcctctaaggagaggacgtcaccatc

SEQ ID NO: 660564 - DNA, 402 bp, Homo sapiens
acacgagttctgagtggcatgtgagacttagcaagaggcccctctcgcctcacaatgtgagctgcacatgtgcacccacacttgagtctgacccctaagcatttccaacaccagggatgttaaaggtaagcttttttgaaacagctctttcctttgtatcttttgctctttactcacaaaagacaaaaagaayaagtgtatttataactctttgcaaccaatgagaattccacatggggcgggggaagatgggaaaaagtgatctgtaacctttcatgatatcctgtttgcccctctgggaatttgtgtaagcgaagtcatgtcagtggaagcagcaacacataatgatccctggaccatgtatgttggacagctgggagaccagaaatgatagagagggtg

SEQ ID NO: 660565 - DNA, 402 bp, Homo sapiens
acacgagttctgagtggcatgtgagacttagcaagaggcccctctcgcctcacaatgtgagctgcacatgtgcacccacacttgagtctgacccctaagcatttccaacaccagggatgttaaaggtaagcttttttgaaacagctctttcctttgtatcttttgctctttactcacaaaagacaaaaagaataagtgtatttataactctttgcaaccaatgagaattccacatggggcgggggaagatgggaaamagtgatctgtaacctttcatgatatcctgtttgcccctctgggaatttgtgtaagcgaagtcatgtcagtggaagcagcaacacataatgatccctggaccatgtatgttggacagctgggagaccagaaatgatagagagggtg

SEQ ID NO: 660566 - DNA, 632 bp, Homo sapiens
ttttcacggattgtttaaaatataagctccaagattgatccaggcatatatgcatttatgatgggtttaggaatctagatgaagaaagctaactctttaggacctcgctggaactcttcttggtaatgttatgcttagtttcctggtgtgctttcaagtatttcatggaattttaatgagaaaacaacattttaaaaaccaaaatcttatgtaaaatgctgctttcttctagggagtgtatgggtgcagagtgtgtgtgtgtgaggggggtgagagagagagaagaaagagagagaaagaaaaagaaagagagaaagaaaaagaaagaaagaaagaaaaagaaagagagaaagaatctcagagaaaggaatagggatgragctaagggaagagagaagtattggataaagtactataaaaagcaaactctcctagtgtccataactttctctagttggctggtacagtttgcagtaattttcattaccgtttcttaatgccaggttctcagacacaagtgataatatgcatcaaaataaagactttgtgtttccccaagtcagtactgacttccagggaggacagggaagaaagggcctatggacctacaatgcagcccataggctgaacac

SEQ ID NO: 660567 - DNA, 632 bp, Homo sapiens
ttttcacggattgtttaaaatataagctccaagattgatccaggcatatatgcatttatgatgggtttaggaatctagatgaagaaagctaactctttaggacctcgctggaactcttcttggtaatgttatgcttagtttcctggtgtgctttcaagtatttcatggaattttaatgagaaaacaacattttaaaaaccaaaatcttatgtaaaatgctgctttcttctagggagtgtatgggtgcagagtgtgtgtgtgtgaggggggtgagagagagagaagaaagagagagaaagaaaaagaaagagagaaagaaaaagaaagaaagaaagaaaaagaaagagagaaagaatctcagagaaaggaatagggatgaagctaagggaagagagaagtattggataaagtactataaaaagcaaactctcctagtgtccataactttctctagttggctggtacagtttgcagtaattttcattaccgtttcttaatgccaggttctcagacacaagtsataatatgcatcaaaataaagactttgtgtttccccaagtcagtactgacttccagggaggacagggaagaaagggcctatggacctacaatgcagcccataggctgaacac

SEQ ID NO: 660568 - DNA, 558 bp, Homo sapiens
caagtaaacaaattgaatattatattggatatatgtaaaagatatgcattctatagaatggagtagggactacatttgttcagtgccaagtatcagatactatacatgtatacatgcatttaatatgggtattaaccatatgtggtagatgacattatctctagatgaagtttgaagacactgagactaaaagtaattgcacacaatcagtgtgacagccaacatgaaattttttacttcagaatcaaggcttcattaatgcccaagtccatgctctatccactctatcacactgcctttggagtgaaagagttttgaatttagttgcagctttagaccagatagacctaacaagaattcttctctttcaattcattagggaaagctttatggacaaagtagaagttctgaaactgaaaccacttgaagaaaagagtctggtgacttatagaggagaacattttctagcaaaacgtatagtctaaaaaaagttccagggcaaaagtgtgatgactggatgatgaaagcacagtgracttccctgagatgacctgaggg

SEQ ID NO: 660569 - DNA, 488 bp, Homo sapiens
cactttacaaattattttttacctctgtgcaaaggacagtgcatctgttgaagaaaaccagcaacacttgcttgattcccgcccccaccaaaaaaaatgggctaattcatattaatttaaaaacattttattgatgaaaaatgtgaatcatatgcaagcagccttttccccccctctctcgttagaaaaaaacacaacagtttgtacctgctggcaaaattggtttactctgcaaagatggtactgtgttttacccctcctggcttattaaagagttaaacacttttgaaattatatttatttcatttttacatttctcttccttagcctctgtgtgtccattgaaaacattgttgggtcctttmacaattttcctagaactgccttccaatcgtgtccatggagaggtggttatactctgttctcccagtggctcagacacgcagcttgtctagaaagccacagccgctgtggaggaggtaagaggt

SEQ ID NO: 660570 - DNA, 594 bp, Homo sapiens
aaagcctctgagttatttccctcactaagcaagggtcagccaggcgcagtgactcacgcctgtaatcctagtactttgggaggccaaggtgggcagatcatttgtggtcaggagtttgagatcagcctgggcaacatggcaaaaccctatctttacaaaaatacaaaaattagccagggatggtggtgcatgcctatagtcccagttactagggaggctgaggtggggggatcatttgagcctgggatgtggaggttgcaatgagccaagatcgtgccattgtactccagcctgggtgacagaacaagaccctgtctctctcatttttttaagtatagcaagggtctttgtctgaaagcctagccaagtcttcagaagctaactataaagtagggagccacagaattccttgtaacatggtaagccaaaaagcctttcaaatatgttccttttctttagcatcctagaaatataaaccttaatggcacctatagctactgcagtaatagtgtgaatgcacattacagccaatcctacacrgtaccatgtctacaccctattgaagcacttggattactgttatttgctgtagtg

SEQ ID NO: 660571 - DNA, 570 bp, Homo sapiens
tggctctgccttctagatagcagtagcaaaattagtgaaagtgctaaaagtctctgatatgcagaaataatggcgtaagctgtcttctctctctctctctgtccgccttggctgcccaacagggaagggccccctgtccaatggacacgtgaccaatgtgaccttacctatcattggagatggctcacactccttaccctgcccccttgtcttgtatccaataaataacagcgcagcctgggatttggagccactactggtctctgtgtcttggtggtagtggtctcctgggcccagctgtcttttcttttatctctttgtcttgtgtctttttttctacaatcttttgtctccgcacacggggagaaaaacccactgaccctctggggctggtcgctacagctcatggtaacctcaaacccaaaaacataaaatggatacacaaaaaaataaaaagcaagaaactrgatgacatcaccaatgaaaatcactttcactagaggaagacaggatggaaataaagaaggaagagaatattgtaaaacaaccagagaacaaataaagtaggtg

SEQ ID NO: 660572 - DNA, 554 bp, Homo sapiens
tcattttgaagatgactttttcttgatttgatgtttttttttggttgctgtaaacctttgactattttctatagctccagccagcaaagttggttcagacagtttctgctttggttttttaaaaaattctctctgggataacaagagcatacatttttctagtccactattttgctaacatctccccctttgactttttaaaaaaagttttattgttgttgtttgtagaggctgggtcttgtgttgctcaggctggtcttcaactcctgrccttaaatgatcatgccaccttgaagttttgatcttaagtagttaacttttgcacccaacttggtgggtggtttgtgtctggctaagacactgtgcaggtgctcagagatatgtgattgctgtttaaggaaggagagaatctgtgtagttgaactctaacccttgagccagtttggtctccatattctcgtggactgcttggttaagtcctgctcactgactgttatggtttgttttggtatgtgaacatttccctttcttcgttttgagcttgttttttttga

SEQ ID NO: 660573 - DNA, 553 bp, Homo sapiens
gggtccttcacttataatagaaaccaaatatgcttgctggcttagttaaatccacaaattatttgtcacataacatttcaacaacaattttgaacatataaaagttaaggtaccaaagaaaatcccactgtcaatgataatcaaactaaacaactacacatctttttgtatgtgatttaattgcccagatttcaaagaaagccacataatcttatgagttaaaatatttctttttcttattttaagcatggcaggacagcttttcaaaacataacttgtagtattgggtgccattccaactaccaattcagatcctttgacatggcggctcagtttgctaatcttggcttatacttttaaaaacaacttactacaactttacgtggtagcattctgtttttcttatagtttatagctgaaaaatgtactctttaattactcttgatattgacaaagggcactgtgactcattttatttttcaacatagagctaaaaggtacatgaatcatccttttraaatttggaatgcaggcaaaacagtggctgtgaatg

SEQ ID NO: 660574 - DNA, 558 bp, Homo sapiens
gccgattacatgacagggcacgatttttcccctgagataaattgtgtgaacatgagttcaattaatttaatactcctaatctcactgacctattgagtggaaacaaaatgacatgtcagtgcggataggggagggaaatgtaaagagtgagggaggyacaaaacaagttaacatgtggataccagcatataatttgtttttgttttttattttgttttaagtgcagattctggccaggaacgatggctcacaacagtagtcccaacactttgggaggctgaggtgggcagatcacttgaggccaagagtttgaaaccagcctggccaacacggtgaaatctcatctctactaaaaatacaaaaattagctgggtgtggtggtgggtgcctgtaatcccagctacttgggaggctgaggcaggaaaaattgctttattctgggaggtggaggttgcagtgagccaagatcgcgccactgcactccagcctgagcgacggaacgagactccatctcaaaaagaaccaaaaaaaaacaaagcaaaaagtgttgtttctatt

SEQ ID NO: 660575 - DNA, 558 bp, Homo sapiens
gccgattacatgacagggcacgatttttcccctgagataaattgtgtgaacatgagttcaattaatttaatactcctaatctcactgacctattgagtggaaacaaaatgacatgtcagtgcggataggggagggaaatgtaaagagtgagggaggtacaaaacaagttaacaygtggataccagcatataatttgtttttgttttttattttgttttaagtgcagattctggccaggaacgatggctcacaacagtagtcccaacactttgggaggctgaggtgggcagatcacttgaggccaagagtttgaaaccagcctggccaacacggtgaaatctcatctctactaaaaatacaaaaattagctgggtgtggtggtgggtgcctgtaatcccagctacttgggaggctgaggcaggaaaaattgctttattctgggaggtggaggttgcagtgagccaagatcgcgccactgcactccagcctgagcgacggaacgagactccatctcaaaaagaaccaaaaaaaaacaaagcaaaaagtgttgtttctatt

SEQ ID NO: 660576 - DNA, 536 bp, Homo sapiens
ctcctgctttgccctctgccatgagccaaagctccctgaggcctccccagaagtagatgctgccatgcttcctgtacagcctattaaaccataagccaattaaacctcttttgtttaaaaattacccagtctcaaatatttcttcatagcaatgtgaggacagacwaacaatacaggatctgaatggatgcccaacagaaagagccctgcactaggtagaagtcaggccaccaaggctctagtcctggttatgctactaaaatagctgtgtgacctcggtaaattacaactcagagtgtcggtttccacatatgtaaaattagggaattcaaggatctacttgcctaaggactcttctgataaaagaacaaatggcatctgcaaatgagtaaatattatggagtcacatatagaatggagtgatacttcggttaacataaacagctatgaaaatattctccaagggtccagagtctacaatccacaagcccctcgtcttccattagctaaatgtatgagtttctgaaaattatctc

SEQ ID NO: 660577 - DNA, 585 bp, Homo sapiens
cttcaactcctttgttagtcatgtgctaggatatgagagttaaggtaaaaggatattactatgtgtatagatatgtttgtgtaatagtcatgttaggcttctcaacataatgaaatattctttggaacattgttccaaagagtcttctgaataataaatgcagtaaatttaggtgtttgtataaggatcctcaactacttaaccaaactaaaggctggattgtagagccttgaatctgcagatagaatgcccatattcacatctccaatgtaccactcactagctgcatgacactggccaagttacttatcctctcgatacctccattttattgcctttacaatgcrgataataatagtacccacatcaagagatggtgataattgaatgagttaatccatgtggagtacttagaacagagcttgttacacggaacactaccaaaaagtgccagccattgtttttgagttgaaagggaaagccacttaaaattagtcttagttatcataatacatcaattaaaaataaaaggatacaatctcatacattttaatgtaaaattagtaggaagactttatttcagct

SEQ ID NO: 660578 - DNA, 623 bp, Homo sapiens
catttgactgatttcatcatcattgtcagcatggatcagatatttggggttccatgaacacctattgtgctttccccagcatctggggcaatggagcwgacagggccagtttattctgtaagtggttcaaagtttctttttcctggttttcctatcatagcttacattttgtctgaggaaaaggcacagtttggaatctatcaaaagcagttaaattgttggaaacatctaacacattacaaagtataattaattaaatttatcaatgcagttgctgttttcctagaataaaatgggggttttagaaagtcaaattcagcagttattgacaagagtcagaaaagcatgcagtgacttggtgggaagctcgggacaggtcttgactgagagcactgatccttggggtcgagggcttagaaaaaaatacagaaactaatgagaaaaagagagccagctaattacaaacttgagtaataatgtcactgtcaaatcttgggaaaaggactgacagattctatttaacctataaatcagtagttgtcaattaggtggtctctttaccactggggtgaaatatggaaatgatttatttaaattaaagacaaggcctttgtattacttat

SEQ ID NO: 660579 - DNA, 623 bp, Homo sapiens
catttgactgatttcatcatcattgtcagcatggatcagatatttggggttccatgaacacctattgtgctttccccagcatctggggcaatggagcagacagggccagtttattctgtaagtggttcaaagtttctttttcctggttttcctatcatagcttacattttgtctgaggaaaaggcacagtttggaatctatcaaaagcagttaaattgttggaaacatctaacacattacaaagtataattaattaaatttatcaatgcagttgctgttttcctagaataaaaygggggttttagaaagtcaaattcagcagttattgacaagagtcagaaaagcatgcagtgacttggtgggaagctcgggacaggtcttgactgagagcactgatccttggggtcgagggcttagaaaaaaatacagaaactaatgagaaaaagagagccagctaattacaaacttgagtaataatgtcactgtcaaatcttgggaaaaggactgacagattctatttaacctataaatcagtagttgtcaattaggtggtctctttaccactggggtgaaatatggaaatgatttatttaaattaaagacaaggcctttgtattacttat

SEQ ID NO: 660580 - DNA, 595 bp, Homo sapiens
ccaaatccacaacataatatgtatcatacttaaaactttttccttacagaaggagtagggttgaaggaaaaaaatcctgtttagaacttacattcaagaaaaattattattcatacatatacccaatttcttatgttaaaggccactgaattaaaacaagaaatggcatttgagtcccagatacataaataaaacctacgtgtttggcactgtagctcctgtttagagatgtttatamtttattatgactataatacataccctagccctaataactttgaaaaacaaaattatggaatctaggagtttcaggtaatctctaagatctacaagaaattatgacatttatcctaagcttatcaatgatttctattttatccaggactctaattcaaattttacggcaagaaccaacataaagaaaataaatattatacaaataaaaacagtttcttccatccctctttcttactcatatacataaacccatttttccatacatacacaggtatgaatcacaattaaaagaaaaattaattcccaaagtacagtctgtatttttcaagtgtagaattctctatgatctatgcaaggc

SEQ ID NO: 660581 - DNA, 559 bp, Homo sapiens
agggacagggctgctccagggagggagctcccacaccatttataagacctaagaagctacaggaaggtgccattttcaaagctagcctctcataaactgcacactgtccttcaggccagcagcaccaagactgagacattacaaaagctcaagttatcactgctggaatgmggagtaagatgggagcattcccacagccagggataagaagcaagcaagacatgagctgcagcagccagtgccaggaagcgggtgctgtcaggacagagactggcatgtaagtgagcagaatgagttgctggtgggacttggttgcgagttgggtgggtgctcctacagctggggtgggggaacaagctaagcatcagctaccactgccagggtagggggtgaacccccaggactggggctagaaagaaacgtgcattccctacccactggcccaggctgttgccacaaagacagcagctccctctccagtggtggggcctcagcatggctgctactgtctctaacacaagcacttagcctgaggcctaaggatcatcctggccaccac

SEQ ID NO: 660582 - DNA, 533 bp, Homo sapiens
atagacaaatggaacagaatagagaaactaggaataaatccacatatttacagacaactcatctttgacaaagctgacaagagtctctgggtggggaaagaatacgctcttcaaaaaatggtactaggaaaattggataaccacatgcagaagaatgaaatgaacccttttctctcacaatatacaaaaatcaactcaaaatggattaaacacttaaatatacgacccaaaactataaaaatactagaagaaaacytagggaaaactttcctggacattggtttcagcaaggaatttatgactaatacctcaaaagtacaggcaacagaaacaaaaatagacaaataggacttaaactaaaaagcttctgcatagcaaaagaaataatcaacagtgaagagacaacgtgttgaatgagagaaaatatttgcaaactattcatccaacaggcaactaatatccagaatatataagaaactcaaacaactcaaaaggacaaagataaataacatcattaaaaagtaggcaaagta

SEQ ID NO: 660583 - DNA, 552 bp, Homo sapiens
tctgggttccctattctgttccattggtctacatatctgtttctgtacctgtagctgtttgggttactgtagacttatagtagtttgaagtcaggtaatgtaatacctctggctgtgttctttttgcctaatattcctttggctgtttgggctctttttttttttttttttttttttttgttccatgtgaattttaraatagcttttctagtgctgtgaaaaatgacatttgtagtttgataagaatagcattgaatctgtagattgctttgggcagtatggccattttaatgatattgattctttcagtccatgagcatggaatgtttttgcatttgtttgtgtcatctatgatttcttttagcagtgttttgtagttctccttgtaaagatctttcacctccttggttagatgtattcctaggttgtgtgtgtgtgtgtgtgtgtgtatgtgtgtgtgtgtgtctactgtaaatgggattatgttcttgttttggcattcagcttgaacattatcagtatataaaaatgctactgattttttgaacactg

SEQ ID NO: 660584 - DNA, 578 bp, Homo sapiens
ccttgcccttttttgttttccatttgcatgatagatctttctccaacmctttactttgagcctatggattgttacatgtgagatgggtctcttgcaaatagcagacacatgggtctttttttctatccaactgacactctgtgccttttaagtgggatggttagaccatttacattcaaagtaaatattgacacatgaggctttgatcgtatcatgaacttgttagctggttgctttatagtttctattatgtggttgcttaaagagttggtgggctatgtacttaagtatatttttgtggtagcagatatcattcttgtttccatgtttagaacacccttaaggatctcttataggcctggtctagtggtaataaattcccttagcacttgctggcttagaagaatttttatttctcttttgcttatgaagcttagtttgggggggtaagaaattcctggttggaatttcttttatttaagaatgcttaagataggcccccagtatctcctggcttgtaagatttctgctgagtcaattttctttttgaagacattaagtaatatacttttcaaatt

SEQ ID NO: 660585 - DNA, 496 bp, Homo sapiens
aagcatcagtggctactaaaaccccccaaaatagaaacaactagacatgtatgcttcttgatgtaagtacaccatatcaccartgaagtgttcttgtcaggtaatcaaacctgaatgagatcaagcttctaaatctaactactatttcacaggaaattttaaaagaatgcaatcaacaaaatccaaaatgtgaaactctgtagagaaaatgactcaattttcgtcaacaaataaattgcaagaaacaaaaagaaatgagggagaacttatggattaaaagatttataagagacataacaaccaaaggtaatatgaggaccttactgaaatttggatttgaacaaaccaaccatttaaaaaatgagataatcagagatatttggaggctaactagctatttgatgatattaaggaattagtattaatttcaattaatactaatgattatttttattggatggtgatgattttttaaggattcttcatattttataga

SEQ ID NO: 660586 - DNA, 496 bp, Homo sapiens
aagcatcagtggctactaaaaccccccaaaatagaaacaactagacatgtatgcttcttgatgtaagtacaccatatcaccagtgaagtgttcttgtcaggtaatcaaacctgaatgagatcaagcttctaaatctaactactatttcacaggaaattttaaaagaatgcaatcaacaaaatccaaaatgtgaaactctgtagagaaaatgactcaattttcrtcaacaaataaattgcaagaaacaaaaagaaatgagggagaacttatggattaaaagatttataagagacataacaaccaaaggtaatatgaggaccttactgaaatttggatttgaacaaaccaaccatttaaaaaatgagataatcagagatatttggaggctaactagctatttgatgatattaaggaattagtattaatttcaattaatactaatgattatttttattggatggtgatgattttttaaggattcttcatattttataga

SEQ ID NO: 660587 - DNA, 642 bp, Homo sapiens
agttagttctgttattttggtctctgttggaggctttccttaaatgtctggcaatctgtctgtctgcagacatttaagagtgagataataaaaagctgactggaagcccatgttsaccaatatacttttcttatcggcaattaagcagaaatccagacttttctttaggaaactccccagatgtcagtatccataggtctttcctaggagctggtctctaatcttctgtcagctagcattaatggagcttagtagcagaaggaggctgagaggagctacttattttccactgtaagaactttcattcaacctctctgtttctagtggggcccttactcctgtcttccactgtgcctggtgcaccaaaatccaaaggctctcttattcaacatatctaataaataaataatatagtcacattacatatacatataaacacacaaatgggattataccatccacattactctttatcttgcttctttcttttaacaacttgtcagagatgcttttctgtgtcagtacacacagctctacttttcactaagcataactgttccccagaggcatcatccttaaaatgacaatttgatctgaaaatcatgttacctctttaaggaaaaatgtccaatcagaagaaaa

SEQ ID NO: 660588 - DNA, 590 bp, Homo sapiens
aatgtttttatccttctcatggtatcacatctagaagcacacaatattcatctamcctcattggtgattttaattttgattacccggtcatggtattgtaaggtctttcttctgtgtaattagggatttttcttttgtaattagtaacaatccataggaagatacattgagagcaagcaaatatcatcttcttcatactttccccatagatttagcatctgtgcgtgacttgctccaaccaatctttactatatgattgcaaaatgctaattttccaactctacttctccctctacacttagtggacagaaaagtcctctaatcttccattcattcactcatttatctatttttatcactatgtattcatagatttcttttttattcaatgtttattctattcttacaattgattttaaatctttggtctgctttgttaatttttagcacagttgattttattattatgaaaaagctttattctttgagaatttgtgctactgtaatttcaaaatattttcataattattattcattttatcttcatttgaactgtctactgctacataaaaaacccttccaaaatctag

SEQ ID NO: 660589 - DNA, 520 bp, Homo sapiens
tattagcgattaaaagacttttcttccaaattcaaagtgtgactcagttctttataataaatcatatctatatattctattagttttgattctctataaaggagagatattattatatgtgggattctgtttcattaatcacatatctgcttatatatatccaagatatgtgcttcttttttttgttgctttgttttgttttgttttgttttgagactgagtctcgctctgtcacccaggctggagtacagtggcgcaatcttggctcactgcagcttccacctcctgggttcaagtgattyttgtgtctcagcctcccaagcagctaggattataggcacgtgccaccaggcccagctaatttttttttttttttttttttttttagtaaagatggggtttcaccatgttggccaggctgatctcaaactcctgacctccagtgatccaccccctttggcctcccaaagtgcgggatttataggcatgagccactgcacctggtggatatgtgcttgtt

SEQ ID NO: 660590 - DNA, 551 bp, Homo sapiens
ttaatcacatatctgcttatatatatccaagatatgtgcttcttttttttgttgctttgttttgttttgttttgttttgagactgagtctcgctctgtcacccaggctggagtacagtggcgcaatcttggctcactgcagcttccacctcctgggttcaagtgattcttgtgwctcagcctcccaagcagctaggattataggcacgtgccaccaggcccagctaatttttttttttttttttttttttttagtaaagatggggtttcaccatgttggccaggctgatctcaaactcctgacctccagtgatccaccccctttggcctcccaaagtgcgggatttataggcatgagccactgcacctggtggatatgtgcttgtttctatttaagatatgcagagaagaataaaaacagagaattataagtaaagcaaatagttttagaaaaaataaggattgtgccaaaatgaggaagaattgtctagcacaggtaatcaaatatcttaagtagaaagaagatttaacaatgtttcctaatgataaatt

SEQ ID NO: 660591 - DNA, 622 bp, Homo sapiens
tttccctgttaagaggcctcccgacacctacctacctgcgcttccacactggcattcaggatttcccattgtcttgtttcaccagcctgtcaccaggcttcttactggatgctctcttcaatatcaacttatttgaattaccatttgttatcaaaactttcagaaaccagctctgtcagacatggtaaaatattccccacacatgcagcaaaatccccttctggcactacacaccctcagtgggcagtctaattccagggtcctgtttcttctggtgtgcccattctatacacattaactrtgccacatctgcctaaaacatgacaggtaacaagatttgatatacaggagagttccatcttaaaaaaaaaggattgctaaaagaaaaccaaaagccaattttctgcctctgtttccccaagattttcttccctccttcatttcttgtttgtttccaaaatatctacctgaaaacttaacccaaaacaggaaaagtaatagaagaataagtttaaagaaccagagggtcttggggaaagttgagtctttgaaagtgtgagaaggtgttaatgttagcttaatcattggctaggcctacttttttcaaagcttactttatatc

SEQ ID NO: 660592 - DNA, 597 bp, Homo sapiens
attgcttttgtaccaccatgaagtcgaaaaatcattaagtctaactgtcataagtcagggaccatctgtacttaagtcttaaacaagagggacaattgcccagcatcctgagctcagacagtgggtaggaaagttttaccaaacacactgctgactttcttgagcctttcaaagatatgaaatggtgctttgtaacagtaagttgaaagctgacatgatgttatttctttgaagactttgtgaatagctatgttctctgcctttttatttccctactacctaatacatagaaagttcttactactattttttctgctgtgttgagagactcttgttttccaccatcacattttgactttcttcctctgtgatccttaacttactccacctacagtatagtcatttgaacactcgtctaactcccaacctacccctactctttccattctcaaataaagcaccttgagggcagggcctatgtctttttyatctcagaatcctccaaactaactggcaaggtgactggtacaataaatttagtatttgttgaactgaagccttctgaaagtgtccttaaaagcaactctgtgggaataa

SEQ ID NO: 660593 - DNA, 623 bp, Homo sapiens
gcaaactaacacaagaacagaaaaccaaataccgcatgttctcacttataagtggaagctaaatgatgagagtacatggacacatagagggggacaacacacactgggtcctattggagggtggaggttgggaggagggagaggatcaggataaataattagtgggtactaggcttaatacctgggtgatgaaataatctgtacaacaatcccccatgacacaagtttacctatataacaaactgccaatgtacccctgaacttaaaaattaaaaaacatttcattctgtagatacatcaccttttatttrtttattcaccagttgatggatatttgtattgttcccacattttggctattataaataatactgctatgaacattcatgtacaaatttttgtatggaaatatgctttcatttctcttgcctctatatctagaaatagaattgctggatcattggtaactctatgtttaatagtcagttttccaaagtgaagacaccattttatattctcaccagtaatgtatgagagttgtaatttcttcacattcttgtcagcacttcttattttcttttttgttatagccttccagcgtgtatgaagtggttatcacattg

SEQ ID NO: 660594 - DNA, 547 bp, Homo sapiens
cagcttactgcaacctccacctcccgggttcaagcaattctcttgcctcagtctcccaagtagctagtattataggcatgtgccatgatgcccagctaattkttgtatttttagtagagatggggtttcaccatgttggccaggctggtctcgaactcctgacctcaggtgatccacccgcctcagcctcccaaagtgctgggattacaggcatgagccactgtacccagccagaaatacttctttaaatatgcttttcaaaactatctcccaaatacgctgattccttcatatttactttctgtatttgcaatttaaaaacctatcactagtcatgttgatccagatgctgctagggttttaacaaatcttactatgattcattatatgaatcccttttctagatttatgcaaatatagtagaagatggcttgaagttcaaatgaatatattttcttcttggtcccatatttctacagtgtgattttcaaggtgactcaattttcaatactgaaattttgaatactcagaaaatgacatttacacc

SEQ ID NO: 660595 - DNA, 601 bp, Homo sapiens
aatgactgcaatcgtaattgacttggaagatgaaaactggaaattttyctctgcctttaaagggcttggtaattaatcataaatatgtagaggcgaagactgctgtttgatgcaattataagagtctgtagctcatctcccctcactttgcactgttagcctcaaattatgtgaaagacttagcacccttataaggagctcctgaggtggactagagaatctagatgtggtggtttctgttgaataacccttatggtggtcaattttctacaacatttgctttgatcgtagtaatatgtttgttggtcttttcctcattaaattattttcagaatctttctcccttgattttatagacttctaaatataaatgcacacaattctctgaaccaaatagaatacatgttttcaaatttatatggtttttacctacatagaaataagtgcttcaaataagaaaccattatttccttaatttcaaagggtaaatgcattcagtgttgcagtcaacatttgacaagtctttatcaacatgtcttgggtttaaggaagagtctccccgactaagatgaaagaatactgcttagtttagtgctataga

SEQ ID NO: 660596 - DNA, 601 bp, Homo sapiens
aatgactgcaatcgtaattgacttggaagatgaaaactggaaatttttctctgcctttaaagggcttggtaattaatcataaatatgtagaggcgaagactgctgtttgatgcaattataagagtctgtagctcatctcccctcactttgcactgttagcctcaaattatgtgaaagacttagcacccttataaggagctcctgaggtggactagagaatctagatgtggtggtttctgttgaataacccttatggtggtcaattttctacaacatttgctttgatcgtagtaatatgtttgttggtcttttcctcattaaattattttcagaatctttctcccttgattttatagacttctaaatataaatgcacacaattctctgaaccaaatagaatacatgttttcaaatttatatggtttttacctacatagaaataagygcttcaaataagaaaccattatttccttaatttcaaagggtaaatgcattcagtgttgcagtcaacatttgacaagtctttatcaacatgtcttgggtttaaggaagagtctccccgactaagatgaaagaatactgcttagtttagtgctataga

SEQ ID NO: 660597 - DNA, 572 bp, Homo sapiens
ttgcacaaaatattaaattgtcccatgtatatattaaagtgattgtttagaatatttctttcattgtaagcaccaytagtacataaactattactgctttgttcactacagtatcagccatataaaaaaatgaaagaaagtcttcaataaacatttgagcaattagactgaatacttctcctatataatttgtaatagttcctattttattaaggtgatgctttctttcatcatgagctttacttcagtaacactgctgtataagaaacattgtttctgtaaaagtcatcagtattttagatttgttagaaaaaaagcataagctattgacatggaatgactatatataatagcaaatggtgaaacagttcttatcttgaagatgaggtacatgaagtgtacatcaaataaataatacaataactaactttgtgaatgtaaggatattattaaaagtttccttgaatactatttagtcaattttttgtggcattgtgtataaacgcagcagagttttgaagttcacctctgaatgctggttgagagctagaaaagatcgtgtgttaaatgag

SEQ ID NO: 660598 - DNA, 572 bp, Homo sapiens
ttgcacaaaatattaaattgtcccatgtatatattaaagtgattgtttagaatatttctttcattgtaagcaccactagtacataaactattactgctttgttcactacagtatcagccatataaaaaaatgaaagaaagtcttcaataaacatttgagcaattagactgaatacttctcctatataatttgtaatagttcctattttattaaggtgatgctttctttcatcatgagctttacttcagtaacactgctgtataagaaacattgtttctgtaaaagtcatcagtattttagatttgttagaaaaaaagcataagctattgacatggaatgactatatataatagcaaatggtgaaacagttcttatcttgaagatgaggtacatgaagtgtacatcaaataaataatacaataactaactttgkgaatgtaaggatattattaaaagtttccttgaatactatttagtcaattttttgtggcattgtgtataaacgcagcagagttttgaagttcacctctgaatgctggttgagagctagaaaagatcgtgtgttaaatgag

SEQ ID NO: 660599 - DNA, 593 bp, Homo sapiens
ttaatagatactttctgtgttataaacaaaacaatctcttccatgtatactatttaaatataaaataattttaaatgtttatttaatagattcagtatgtaaatacaagaacctcttatgtgttagctgtttccacatcatataaatttttaaatgtctaattatttaatagatatgttctgtattagaagtggttatgtttttttctataaacatatttaatgctgaacttatgacacagtctttcaaaattsaatttcatttccaccagtaatgaggtttcttttgggccaaaatgtaagttgtcttccttcattcattaattcattatagtaaggtttgtttactgaaggtcttcttcctgataggtactgtcccaagatctgaaggaacactaatgaatgaaatatagtttttgccttcatggagttaacatgtgtaggtcggttggtagacacaacacaaaccaataaaaataagaaaactgtggattacaatatctgccataataaagttgagacagggcaacagaatagagaacaacaacttgtagaggtaaggctgtttttgccaagatacttaatgaggcctgt

SEQ ID NO: 660600 - DNA, 593 bp, Homo sapiens
ttaatagatactttctgtgttataaacaaaacaatctcttccatgtatactatttaaatataaaataattttaaatgtttatttaatagattcagtatgtaaatacaagaacctcttatgtgttagctgtttccacatcatataaatttttaaatgtctaattatttaatagatatgttctgtattagaagtggttatgtttttttctataaacatatttaatgctgaacttatgacacagtctttcaaaattcaatttcatttccaccagtaatgaggtttcttttgggccaaaatgtaagttgtcttccttcattcattaattcattatagtaaggtttgtttactgaaggtcttcttcctgataggtactgtcccaagatctgaaggaacactaatgaatgaaayatagtttttgccttcatggagttaacatgtgtaggtcggttggtagacacaacacaaaccaataaaaataagaaaactgtggattacaatatctgccataataaagttgagacagggcaacagaatagagaacaacaacttgtagaggtaaggctgtttttgccaagatacttaatgaggcctgt

SEQ ID NO: 660601 - DNA, 593 bp, Homo sapiens
ttaatagatactttctgtgttataaacaaaacaatctcttccatgtatactatttaaatataaaataattttaaatgtttatttaatagattcagtatgtaaatacaagaacctcttatgtgttagctgtttccacatcatataaatttttaaatgtctaattatttaatagatatgttctgtattagaagtggttatgtttttttctataaacatatttaatgctgaacttatgacacagtctttcaaaattcaatttcatttccaccagtaatgaggtttcttttgggccaaaatgtaagttgtcttccttcattcattaattcattatagtaaggtttgtttactgaaggtcttcttcctgataggtactgtcccaagatctgaaggaacactaatgaatgaaatatagtttttgccttcatggagttaacatgtgtaggtmggttggtagacacaacacaaaccaataaaaataagaaaactgtggattacaatatctgccataataaagttgagacagggcaacagaatagagaacaacaacttgtagaggtaaggctgtttttgccaagatacttaatgaggcctgt

SEQ ID NO: 660602 - DNA, 449 bp, Homo sapiens
tgaatgaaccatgggagtgtggttatctcttcagcatgttgatttcatttactttgtatgtgtagccactactaagattgctggatcatatgatagttgaatttttagttttgtgtggaacttccgtactgttttccataatggctgtactagtttactatcccacgaacagtataaacagtttgttagtgttcccttttcacacatcctcgcctgcattttttttcttttttttatratagcccttctaaatggaaggaagctgtatctcattgtggtgttgatttgcatttccctcaggatcagtaatgggcatttttgaatatacctgttagccatttgtatgtcttcttttagaaaatgtctattaagatctttctgcaacagacattctcgagacttcggatatagcatgaagaagtcagacatcatttttgtactccctcttg

SEQ ID NO: 660603 - DNA, 570 bp, Homo sapiens
gggctgaggcctctaaatggtcaattgttcagtcacaggattaatttaccttttgaaagacttttaaaatatccaaggagttcagtcaacaggagcagatgaggaaatgtgttcaacatagttttgaccgaattgaaggggtatgagccacacagatttatgtgtgggkattatacatgttttcaagtatactttatcatactgttttgtgaaaatatgcaaatgatttttcaggggaagtagacatgcagatttttttttaaatcgctttaaacacttttagtattggtgtattttccaacaatgtctactactaaatttcacattttctttcatcttcaaattaaatatagacacatatatccctgtggttatctggacaaagataaatgcctggacacaaaatgagagaatgcacaattatagtagaataaattagatccgattgaaaatgaaaatctgtttataaattctcaagcatggaatcgcagtgcctacgaactgccccttctagggagacagagcctggatgtcgtgatttagtaagtacaacaactcatcaaaagataa

SEQ ID NO: 660604 - DNA, 488 bp, Homo sapiens
aaggttaattcattctactggaggatcaggggaatcatacaacccttggaggggattcttcagagttccctgtaactagatgacatttcacttattacagctgatataatattttttattatcacttatgtttttagattttcaaagtttcttcctttgtaaattcttgcatcatattcctgttctcttaaaattctacaatttaacccctttaatgttacttctattatagctttttagcacctccttttatgctcrccaatatgtatacgattgtgaaagtaaagcttggcaattactgagttaatgtgatgtgtgtagaggagacagactacaccacctgatttgatttcaaaatgaatcttcatttagtcctcaaagagttattaaatgatgctgttagtcactagttattgaacagcggcttattttcttgaaatgtattcagaataagattcttttctcaaatatttcatttaattaggttc

SEQ ID NO: 660605 - DNA, 485 bp, Homo sapiens
cctgcttttaaagcactaatttagcaattattcatttcaattataccattgtcatcaagggctgctctattggatggacttgactttattttgcaaccttgtaaaatatccctctatatttgtatgaaaactgaagaccaaatgtatttcacatctagttgtgtccgtggaagtaattcctacatatatatrtgtttttttaattcctggcttataatttttatatcataattctgatatggctttatagtataaagctaaaactttgtaaaaaatagctatctcaaaaaatatcaaaaagtgataaatctgtgaaggaaatagaaatatgcatgtagccatatacctactattaattttgaggtttctccaacttatttacccttgaatatgttttaataaattaattagacaaaacttatttttaaaactatgaaaatgaggatgaaacagtttctgattagagaaaatttgtatctcaagag

SEQ ID NO: 660606 - DNA, 485 bp, Homo sapiens
cctgcttttaaagcactaatttagcaattattcatttcaattataccattgtcatcaagggctgctctattggatggacttgactttattttgcaaccttgtaaaatatccctctatatttgtatgaaaactgaagaccaaatgtatttcacatctagttgtgtccgtggaagtaattcctacatatatatgtrtttttttaattcctggcttataatttttatatcataattctgatatggctttatagtataaagctaaaactttgtaaaaaatagctatctcaaaaaatatcaaaaagtgataaatctgtgaaggaaatagaaatatgcatgtagccatatacctactattaattttgaggtttctccaacttatttacccttgaatatgttttaataaattaattagacaaaacttatttttaaaactatgaaaatgaggatgaaacagtttctgattagagaaaatttgtatctcaagag

SEQ ID NO: 660607 - DNA, 569 bp, Homo sapiens
atgagctttcagctttgtctgtcaccatctgtacttctctttacatacatggtggaccttgatgctgtgtgagacaggatttagagcagttttctgttgcaactgttggaaatgtaaggtctcagataaataattagagtgagtcttaaaattgaagcctctcaaagttgaaagtcagctttgaacatgagaatgacgggacaggasgaacgaaaagaaataaaaaaggcaagtctagtgatcatgattatgatgattgtttgtgtctctttgaatgaagcaggctcttgctcatcaaagtttctgattgaaagcttgacaaaggcagggaagttagtggaaatggaagaggaagaacaatatggaatatctgaaatatatgatcacttaaagtaaaagtaatgtagaatagcagtaagtacaagttaccaattttaaacaatagatattaaatgttttggaattgtggaaaagaaaagatagggtcaataaagatactccaactgatgtttctgagtgtcatgatctaaaaaaatataaatgaaaaactttttttaaaaaagattact

SEQ ID NO: 660608 - DNA, 544 bp, Homo sapiens
tttctttctttgagacattttttacgattacggatagtcaggaccttagataactggaaaagggctcacgaagttggtttgaggctatcctaagactgtctatgtcactgttactcacctagaaatrcttggattgttagaggattgcaacactgtactgattgccttccactcctcagctgtctctgtcctgtacttaccttgtagaaatgcaaaacccacatcactgtcaatgtgtcacttctgtaagctactactttccataactacccattattataggataaggtcttgtttcttcaacttcttacccagtgtttcccattttctgctccatcttcatacagacatttcattaagtaatgacactgtgttaactgagttttcattttactgttgttttaagtacagagttaaaatgtatgggtcattttgtataagaccagtcaacaaggttaaaatattaaataatacaaaatgatatattggcatcaaaaatgcactaggctctgttttaaacacacacacacatacttattgaatc

SEQ ID NO: 660609 - DNA, 536 bp, Homo sapiens
acaactctacaaagtttaatatttaaatgcactgagggtctaatatttgttaccacatgctaagtcccattttaagaaaggagtaaacctcaaatccatttaccatataaaaagctatctgtactaaaaaaaaccttcaaatgaagatagatattaagaaaaaagaatatatgtggtaatgcatgtgttagttaattataatgaaacrttgcactatatatatatagaaaacatcgtgcacaataaatgtatcacttctatgacagtttttaaaaagtagtgactaaattgtagcaaaagaacatataggttgtctatctgtcaatgatgactgcaaaaaaaatgaaacaatttgaatttatggagtctgtttaggctatgtaaaatttttttcacatttttaggtagcaactctttttaaatgacgagtttttgtttttgtttttgtttttgcataagaaagcacattctgaccaagattctggaatattttcacaaagcataaaaaagttggtcgatgtctgcctaggtagctt

SEQ ID NO: 660610 - DNA, 536 bp, Homo sapiens
acaactctacaaagtttaatatttaaatgcactgagggtctaatatttgttaccacatgctaagtcccattttaagaaaggagtaaacctcaaatccatttaccatataaaaagctatctgtactaaaaaaaaccttcaaatgaagatagatattaagaaaaaagaatatatgtggtaatgcatgtgttagttaattataatgaaacattgcactatatatatatagaaaacatcgtgcacaataratgtatcacttctatgacagtttttaaaaagtagtgactaaattgtagcaaaagaacatataggttgtctatctgtcaatgatgactgcaaaaaaaatgaaacaatttgaatttatggagtctgtttaggctatgtaaaatttttttcacatttttaggtagcaactctttttaaatgacgagtttttgtttttgtttttgtttttgcataagaaagcacattctgaccaagattctggaatattttcacaaagcataaaaaagttggtcgatgtctgcctaggtagctt

SEQ ID NO: 660611 - DNA, 620 bp, Homo sapiens
atttttcctcatatcagcaaccagttctccaactctctggacaccaactgggtaacctacaatttaatgaaattctgacactaactatctggagttagtatcagatcctgcaagctaaggactccgttccacatgactgccttcacttcagatgccagctgcaagtcctggaccactgaaacttttgaccaactagcaataaatgcaggggtttcctgcaatctctttcttacgcttgataatttgcagcataaggaactcaggaagacactttatttactattactgktttataaagcatacaaatgaagagccctttgaagaggttcataaagagaagtccaaaagtgagcctctgtcctgctaacttagggtacaccaccctttcaacatatggaagcatcacctgtctggaagttctccaaacctcattactaaatctcagctcctcttctcttccaagaagttgtggggagtggtattaaaaggttgttgattggagtggggggattgaaagtagacttcgggctgggcacagtatctcacgcctgtaatcccagcactttgggaggccaagacaggcaggtcacttgaggccaggagttcgagaccagcctggc

SEQ ID NO: 660612 - DNA, 620 bp, Homo sapiens
atttttcctcatatcagcaaccagttctccaactctctggacaccaactgggtaacctacaatttaatgaaattctgacactaactatctggagttagtatcagatcctgcaagctaaggactccgttccacatgactgccttcacttcagatgccagctgcaagtcctggaccactgaaacttttgaccaactagcaataaatgcaggggtttcctgcaatctctttcttacgcttgataatttgcagcataaggaactcaggaagacactttatttactattactggtttataaagcatacaaatgaagagcsctttgaagaggttcataaagagaagtccaaaagtgagcctctgtcctgctaacttagggtacaccaccctttcaacatatggaagcatcacctgtctggaagttctccaaacctcattactaaatctcagctcctcttctcttccaagaagttgtggggagtggtattaaaaggttgttgattggagtggggggattgaaagtagacttcgggctgggcacagtatctcacgcctgtaatcccagcactttgggaggccaagacaggcaggtcacttgaggccaggagttcgagaccagcctggc

SEQ ID NO: 660613 - DNA, 593 bp, Homo sapiens
tatggatttagtgggacctacacaaaagttgacatataagttgccttactgatgtctgtctgaggatcatgttacataattaggattatttgtttctcacagttctgtccagaaaaaagtggaaaagtcttaataaaagatgcgcaattcacgaggaactacttgtgcttattcctaagccagtgtctatgagaaatgatacatgctatgcatcattcagtgatatctttcccaccatgagttaaaggtattactcaatggagattaaactgttattttattgggcttacattatgtctctcaaaccattaccagtgacattgtggtcatggaaatgtaaaagaaaatcatagtaatttaaataatgacaagtyttttagagctttgtattttttattattaggaaaaaacaataaatgtaagtttatcagaaaaaaaaatggctgtgatgcaattcaaagtattaccacaatgcttgcttttatcatattatgaacacttttcctgtggggctggattaggccatttctaatatacacaagagtattaacctcttttaagtattcagatagccattgactacttatttgaac

SEQ ID NO: 660614 - DNA, 461 bp, Homo sapiens
tagttacaccagtgcgtgtgttttctttattcaggcatcctaatgttgtaacttttacctatacaggacattttttgtattactcattaagctgctaataaaatggcaaagtttaagcagtagggaaaaccggtgaattattttacaaaattctctgtgcttcatggagcgaggcatttcagttttacagaagatgcatgctttctgactcactcacagcagctctttttgtcctacaaaccatttcttcccagtgggaaacagatcatatcatacatctttataagtatactgtgcactgtagggaagggtggtgcattttcaaagtaatatggtggatctgctgacacaaggcaaacagtacctttagtatttagcctcaratgtaagtttttagctggaggccatgattccaagattgctacacacagtcaggtctcaattacccctactgatggaga

SEQ ID NO: 660615 - DNA, 632 bp, Homo sapiens
cataaattcagctgcgtgaccaaaactaaaaaaatccaagaattaatagctatttgtagttaagtctaaggtactgacctctgaaagaaagacaatgcaatggacaatgactactaaggaagtttgaacatcactggaaacggacagatgttcatgatgaaagagtgcttggacagagcaaagcatgtggagaccacttatagatgattttgtgtggttcagcccatgtctgctaggtactcaatttccttatgttgctgtcctcctgcaagcttctgtgactttggcttttgaagggctttctttcaaccctcatggagggtgggtgtgaggaaatgcttggggacagacataccctagarctgccctcaaccactgccaaatgaatgctggaggataaatattccctgattttctattctttggaaacaacaactctgggaagagtggtagaccatttcccagatgtgcccagtggacttgagtcctgatgtctgcagatataacctgttctttgatgcctatcatgttggctgacttgcattcattgtcttgctttattttattctaagctttctaagatcatcctagcaaagactcagctatactcaaatcccagtattttgggtctg

SEQ ID NO: 660616 - DNA, 598 bp, Homo sapiens
agaattgtcaaggtgaatcaaaggctcatattgccatttaaatcaggagttgcaaagttctctgttctcactggctagctgcttcttgtcattcagagctcagctttaatctcatctcctgatagacaggtccttcctgaccatacagtctaatstagccattctccctcacgtcattctatcttaagtctctgcattacactacacttgctcatttatttacttgcacattgtctgtttcacctcaagctctgtgagaatagagaccttttctgtctggcttacttatctctctccagtgtcaaaaaccatacattatgtgttcccagtaaaatttgattgaattaatgagttatgaatcaaaatcataatttggattgtctttagaagaaatatcttaagcttttacaatttggtgttatttacccatcaaagagagtgctgtggcattcacgataagatgtacatttgctcacttgcggtaattagaagcttatgcagtgagagactgagttgaacctgacaaagaggttgaagttgttactaattctggattaagagaagatgttttgaataattctatatcatcaaagagtac

SEQ ID NO: 660617 - DNA, 479 bp, Homo sapiens
ctaaccaacagttcatactcaactgcttggaaaacactccccaaaagaataatgctcatttcttcagtgttgttatcttaatcaactctcatcttttcattgatattttgatggaacttatatctgttaatgtttccaggggtgtaaaatgagtcggagaagcaaattccttaatggatatatttggttaygggattacgcattaaattagagaaataatcagttgcagaggggttggtcgttggtattgtttcatagggatctgctaaaaaaaacagaagactgtggtaaatgaattagattgtctgtttcttagcataatttctgcctttaattattgctttacactgaactagaaagaaaatattaaaataaccaaaaaataaagagcatttatattaaaattctaatcaaagtcgggtaaatttgtttcatatatgaagtttaaattagtctgctgttctgattggtttacacta

SEQ ID NO: 660618 - DNA, 563 bp, Homo sapiens
ttaaaacttctaactttaataacctcgctgtgtcataattcaggcaagctggaacataatccatattattagggccccagcagtactgactaatgaagaaaagaaggaaaatgggatttagtggacacatgggagtgagcccaggaaacctgtaaggctagattcttattgggagctagcatgggagtagcccagaacgtccaaaaacatatccaggtgtttggaacatgccagcaagcagaggaatacgaggttttagacaatctgacaattcatagtgaatttcagccatgcctggaagtacaacaaataaaattttgtactttttgttgatgaggtgaatgttaaaatcaaaataaacaaaaactatacatagagttaaggccktagtttagtggaacactcttagatcaggttccctggcccaataagaaacaggggtgttagggaagtggaattggaagtctaggcattttctgggtcaagcaaatgcagatgatagcagctaccccagaagagcatgtgttcagccctcccacaaatgctgtagacactggatctca

SEQ ID NO: 660619 - DNA, 577 bp, Homo sapiens
ctgagctgatggagttgaaaaactcaacaagaatttcaaaatacaatcacaggtattaacagcaaaatccaccaagctgaggaaagaatctcagagcttgaagaccagctctcctcaataactcagtgagacaaaaaataaagaataaagaagaatgaacaaaacctctgagaaatattggatgatgtaaagagaccaaatctgtgactcattgacatccccgacagagagggagagaaaacaagcaatgtggacaacatatttcagtatattgttcatgaaaatttcctcactacagasgccagctgatatggtttggctctgtgtccccacccaaatctgatcttgaattgaacttccataattctcacatgtgggagggacctggtgggagataattaaatcatgggagcaatttctgccatactgctttcatggtagtgaataattctcctgagatttgagggttttataaggagaaaccccttttgcttggctctctttgcctgctgccatctgtgaaagacgtgacctgctcttccttgccttccaccatgattgtgaggcttccccagcc

SEQ ID NO: 660620 - DNA, 617 bp, Homo sapiens
aatgcccttcaaaagtgtaaattaataagactctatttgtgctttaaaaaggctaggttggtttgcctcctacatgttccatagagatcaattcagcctggtggccgcaacttgacttggactctgccactctcagtgtgaatgctgggccaacctctgctctttaaattaaacaagggagtgttttcctgtgtgttacccggttatcaaaaataagattcccctaaacagaactgattataactggtaacagaagcaaaaccattgtcccatctggcaatattcatataatttcaggaattctgctttattattaaatgcaggggcagtgtttacaaagatgcagtctcatatagtgagacaagaatttggtcttttctttttttcaggatagtgaatttaaaagtgaaaaaaaaaacagtgaatgaatcatgtattaacttacataacatctaagaatttctgtgattttcttcaccaaatcatctactctactgataggttgttcaacagtactgtagactcatttagtgtcacatacacattctctgcaatatcagtgtctgtgatagtggttttatatttatagagyatggcttttatatgcttgatactgt

SEQ ID NO: 660621 - DNA, 576 bp, Homo sapiens
ctggtgaaacctatcaacatgaacttttttagaattctagaagtaactcaaaaagctgcaacaatccagagtatttatttgagaaaaatcattgaatttcaaaaagagcaaagaactttgtggcatttttttgctttctctatgttcatcccactctcccttaccaaccagcagcttcctgaaagcagtagctatggaaaccagcagggtatcatccattggtgagagacaacagatttggaacccctcaaaaaactccatcctcactgatttgtcactwtttgacctgtctggcagatccctgaaaaagccccattcacaagttctatgtttttttacctcacgtagagctcattcagtgaggaaaggcctatcactcaggagtttgttgaaaaaaaataaataacctcagctgcagttgtgaacattgttgctgtctgaagtagtgataccatttgggccaaacaatagactgactacaactttaaaggacaatttaaggaaagagaagaccataggagatatgataatgtccgccatacttctggagatctagaaggccgcaggcatgtgcac

SEQ ID NO: 660622 - DNA, 609 bp, Homo sapiens
tttcttattatcattattaaatacttgatgttagaatccaagcagcttcttttttcctttgaccatgacgatttcttaaatgtcattgattgaaaccacagagttgaaatgtgttttagggaataaagctttgttggaagaaagtcacctgtgtaaataaaacattataagtagaaccctgcatagttttcctttgcttttggtatgtgcagacctttaatctatagctttcattcttctttataatgtatatcaaatcatgaacatgttcttttttgagaaataaagtgtattctacctctctcacatgatccctgcccctctttctaatcttttgtgatctatagaaacatgagatgttttcaaaccaaatattgagtctatctgaccacaaaatggagatttcctctttagtgaaagtgtgtgttgatggattttatgttgtgcartttaaactgcttctcaaccattaaatatggacacttaaatgcatttaggatttagacatcagcttttagtggcatcagccttcctattttgttctctttttttgcacaagtattaaacacagccaacagtgacttcagattaattcatggatatgaaact

SEQ ID NO: 660623 - DNA, 608 bp, Homo sapiens
aacacagccaacagtgacttcagattaattcatggatatgaaactcatttgtcacagaacctgacagattttcacaatrctaatagaaggccagcatttttcatttaaatattgaacttggtgttgcatagttgaataatgaaaatgattcttctttcttaaaaaattaaaatcaattttggttggcacagaatttagataataattttatactcacttaccttggtatcattctgttagtaaattagattaaatttagaaaagattgttttacttttaaaaataaatccagtctgaaactgcagccatccttggtgatctaaagggttctgggaataagctatttcatattggccctgtaatattactgtcatggtatctacaggtttgatcccattagacagtcttctttgtattatctagtacagactggatgggagaaacaatgtgattggctttgctaattaacctcacctcttgtgggaagacagagtcctcacagcccagcacttcacaggtcattaaccagttgacctggtattcagtgtactcctctggacccatcagtgactaccctctgtacaaaaaataaaccaaccaatagcatt

SEQ ID NO: 660624 - DNA, 584 bp, Homo sapiens
agtgacttcagattaattcatggatatgaaactcatttgtcacagaacctgacagattttcacaatactaatagaaggccagcatttttcatttaaatattgaacttggtgttgcatagttgartaatgaaaatgattcttctttcttaaaaaattaaaatcaattttggttggcacagaatttagataataattttatactcacttaccttggtatcattctgttagtaaattagattaaatttagaaaagattgttttacttttaaaaataaatccagtctgaaactgcagccatccttggtgatctaaagggttctgggaataagctatttcatattggccctgtaatattactgtcatggtatctacaggtttgatcccattagacagtcttctttgtattatctagtacagactggatgggagaaacaatgtgattggctttgctaattaacctcacctcttgtgggaagacagagtcctcacagcccagcacttcacaggtcattaaccagttgacctggtattcagtgtactcctctggacccatcagtgactaccctctgtacaaaaaataaacca

SEQ ID NO: 660625 - DNA, 608 bp, Homo sapiens
aacacagccaacagtgacttcagattaattcatggatatgaaactcatttgtcacagaacctgacagattttcacaatactaatagaaggccagcatttttcatttaaatattgaacttggtgttgcatagttgaataatgaaaatgattcttctttcttaaaaaattaaaatcaattttggttggcacagaatttagataataattttatactcacttaycttggtatcattctgttagtaaattagattaaatttagaaaagattgttttacttttaaaaataaatccagtctgaaactgcagccatccttggtgatctaaagggttctgggaataagctatttcatattggccctgtaatattactgtcatggtatctacaggtttgatcccattagacagtcttctttgtattatctagtacagactggatgggagaaacaatgtgattggctttgctaattaacctcacctcttgtgggaagacagagtcctcacagcccagcacttcacaggtcattaaccagttgacctggtattcagtgtactcctctggacccatcagtgactaccctctgtacaaaaaataaaccaaccaatagcatt

SEQ ID NO: 660626 - DNA, 549 bp, Homo sapiens
tgattgacatatcccatccacccattcattcagaattggatttgaagaggcaacaattacctcacattgagctttcctggcrattaaaaaaatatgcaatttaggaagcatatattttattatagttgttagcccataactacaagttttaaataggaaaattgtatattttaccttaggaaagcaagttagtaaaatgcactttaacctgctaatggtttttttaaaaatcagggagcttacacacgtagtctcatgactggttaggcatgaacacaatttgacttttaataacagttattttctcactggtgatattaatcttaaaatttagtctctgacatactttctatagtctttatatttcaaatgtgtggacattatctttaattcttttgactatatttagtattagaactttataagacccgttctcaaagcttcaagatatgcctgaggaggaccaaagaagtttggctaaatgtttcctagtaaatataatggaaagacactggattaaacaaagttaatcaggttttttgcaataca

SEQ ID NO: 660627 - DNA, 549 bp, Homo sapiens
tgattgacatatcccatccacccattcattcagaattggatttgaagaggcaacaattacctcacattgagctttcctggcaattaaaaaaatatgcaatttaggaagcatatattttattatagttgttagcccataactacaagttttaaataggaaaattgtatattttaccttaggaaagcaagttagtaaaatgcactttaacctgctaatggtttttttaaaaatcagggagcttacacacgtagtctcatgactggttaggcatgaacacaatttgacttttaataacagttattttctcactggtgatattaatcttaamatttagtctctgacatactttctatagtctttatatttcaaatgtgtggacattatctttaattcttttgactatatttagtattagaactttataagacccgttctcaaagcttcaagatatgcctgaggaggaccaaagaagtttggctaaatgtttcctagtaaatataatggaaagacactggattaaacaaagttaatcaggttttttgcaataca

SEQ ID NO: 660628 - DNA, 549 bp, Homo sapiens
ttggctaaatgtttcctagtaaatataatggaaagacactggattaaacaaagttaatcaggttttttgcaatacatgttctcaaagcctttctatgttacatattttgggactctggactctggcagagaaggttaagaaaccgacccctgctcttctttatacttagaaagctcactggactaatgctctgtagttttcactttgccaaatgatattttagtgcttaatctcttagatagcatctttcaaaacatctcccttgatgatttatagatttttatgaagtctggtgactagattagatgatttatgactatacctctagcagggtgcatgagtgaacacaagatatttttgaattatctgagtatattcatttgaagtggcaagaacaagggtcattaacttattaaccatgkggaaaaactagaaaattgatggtgtcatctgctcagaagttatattcagttcattgctttggatcatgcttatgtcctaaactcttttatactgaagtgtcaacgatttaaccagccatctccttat

SEQ ID NO: 660629 - DNA, 543 bp, Homo sapiens
attaaaactattggttatttaacccatttcctgtttagaaacagtgcagcctgctgccagtactcatttatcagggcaaaggggaaatggtttaagtaaaatccttttactattcatagaagttagtagtagtgcaatagagcgagactccatctcaaaggaaaaaaaaagttagtagtagttctggattgtcttgctggataattttcacttcattacaaactcccaattatttcttacaacggtataartatattctggtacttattcttctccattgttaaaactggtatgatggttgattggtgtgattaacaagtcaatagaggacttgtaaactcttaactcttaagtgacaaaatgcttggaaactcccatctgctgcagcaatgtgagactcacagttacctccatacttcagaatagacagaacataggacaattattacttattcatttctttgtgctaatatttacatcacctttggacatacaatcccccagatcacagatgtgctctataaatatacaaccaccatctgg

SEQ ID NO: 660630 - DNA, 556 bp, Homo sapiens
actccttcccgactcagagccacttcttccacgtcctttctaacacagagctgactaaaccctggcctgtagtcttggagaaaaatggcaaactcctcacaatgactgccagttacctctcaaagtctttcacaaaagcagcccctttgcctgactgctaatataagacatgacattacttccattccatttawactgtttgcatttgacttaatttcccaaagttaggtgttaacctaaataaactagtacctaacttacatctgcatgcccaagagaggaaaacaaaatggcttcttccagaacaatgaatttgccctaaaaaggacatcgtgtttctgctcttagaaccatcaaaagcaagtaattgtcctgttatatgaaagaaattgtgtaagtgatataaatggaatgtacatagctgctttttaatttttttttttcattttgttaggaattaaaatacagactgaatacccaacacctggaaatcctaacgttgacaaataggttctgaagaaacagaagtaaaaaacatgttgacatattaaaatag

SEQ ID NO: 660631 - DNA, 647 bp, Homo sapiens
atttccaactgaggtacccagctcatctcactgggactggttagacagtgggtacagcccacaaagggctaggagaagcagggtgggagtcatctcaccagggaagcgcaaggagtcagggaactccctcccctagccaaaggaagccatgagggactgtgccatgaggaatggtgcactttggcccacatactatgcttttcccacagtcttcacaagccacaaaccaggaaattcccttgggtgcctacaccaccagggccrtgggtttcaagcacagaactgggtggtcattgggcagacactgagctagctgcaggagtcttttcataccccagtggctcctggaatgccagtgagacaaaaccattcacttccctggaaagggggctgaagccaggtagcccagtggtctagttcagcggatcctacccacatgtagcccagcaagctaagatccactgccttgaaattctcattgccagcacagcagtctgaagtcaacctggggtgctcgagcttcgtgcagggaggagcatccaccattactgaggcttgagtagacagttttcccctcatactgtaaacaaagccgccaggaatttcaaactgggcagaggccaccgcagttcagcaaagccagacgg

SEQ ID NO: 660632 - DNA, 647 bp, Homo sapiens
atttccaactgaggtacccagctcatctcactgggactggttagacagtgggtacagcccacaaagggctaggagaagcagggtgggagtcatctcaccagggaagcgcaaggagtcagggaactccctcccctagccaaaggaagccatgagggactgtgccatgaggaatggtgcactttggcccacatactatgcttttcccacagtcttcacaagccacaaaccaggaaattcccttgggtgcctacaccaccagggccgtgggtttcaagcacagaactgggtggtcattgggcagacactgagctagctgcaggagtcttttcataccccagtggctcctggaatgccagtgagacaaaaccattcacttccctggaaagggggctgaagccaggtagcccagtggtctagttcagcggatcctacccacatgtagcccagcaagctaagatccactgccttgaaattctcattgccagcacagcagtctgaagtcaacctggggtgctcgagcttcgtgcagggaggagcatccaccattactgaggcttgagtagacagttttcccctcatactgtaaacaaagccrccaggaatttcaaactgggcagaggccaccgcagttcagcaaagccagacgg

SEQ ID NO: 660633 - DNA, 647 bp, Homo sapiens
atttccaactgaggtacccagctcatctcactgggactggttagacagtgggtacagcccacaaagggctaggagaagcagggtgggagtcatctcaccagggaagcgcaaggagtcagggaactccctcccctagccaaaggaagccatgagggactgtgccatgaggaatggtgcactttggcccacatactatgcttttcccacagtcttcacaagccacaaaccaggaaattcccttgggtgcctacaccaccagggccgtgggtttcaagcacagaactgggtggtcattgggcagacactgagctagctgcaggagtcttttcataccccagtggctcctggaatgccagtgagacaaaaccattcacttccctggaaagggggctgaagccaggtagcccagtggtctagttcagcggatcctacccacatgtagcccagcaagctaagatccactgccttgaaattctcattgccagcacagcagtctgaagtcaacctggggtgctcgagcttcgtgcagggaggagcatccaccattactgaggcttgagtagacagttttcccctcatactgtaaacaaagccgccaggaatttcraactgggcagaggccaccgcagttcagcaaagccagacgg

SEQ ID NO: 660634 - DNA, 327 bp, Homo sapiens
ttatgttagtatgacctaccttagccagttatgaaaattatatgaaaatcctgaacaaatctaatgcagttgtgggagtctagtagtgatggatcacatggcaagttcttggaccttatcatcaaaacagtctgggaatttytgagctctcactgttgctgcaaaaaaaaaaaaatacattttgtggtttgtgcatgaattaaagaatcttcagtcaagactttaaattggagcttttgcaaataataaaaagcctagttagttaaaatgtaaaatcatcttccaggttcactgagtgtgcaagaataaaatttaatggaaccggca

SEQ ID NO: 660635 - DNA, 643 bp, Homo sapiens
cagtaaaaatcaagcagaaacgtgtaatacagaagctattcagaatgaagaaggatgaattcaaagagaaacaaatcaacagactgaaaaatcctgaaagctgacacatatcaatggtgaaaacattggtagattgccagaaagtattttggcggaagatattcaaatttagcagagctaactttagaatgaggaaaggcagttagctagagaaaaaagcgaaaacaaaagtgaataaaaaaattggagttgattttamgacgagacatcatagtccctttgttttaatgacaaaaaaaaacaaaaaaaagagttaaaatctttttacttgctgaagaattactgaaaatgaaaatccattgtaactaagcaacaacactatgatttctctgatttagtatgctgtcatataatcaacaagagaaaataagaatattgtaaataaagtgtaattttactgatcctggccaaatagatctgaaaactacaggccacatcctcccattgatccattctccaaagctccactgatggaggtaagacactaacagccttagctgaaaactgcttatcttcatgattcaggatggcaggaaagcagatccatatgtctagatgtgttctttaagtatgcaattaattt

SEQ ID NO: 660636 - DNA, 506 bp, Homo sapiens
ggttatatgttttcttactgttgagctttaacagttttttatattttggatactagtcctttatctgacatgcaagacaaaggaaaccacatcataaagttcacagggataaaattcacaaggcaaagaagatcagaaaatggatctggctaggatatagggctagcaaacagggttccaagagagaaaacgacaataatagagatttttttcatgtcagtatatatgacacttgtttaaaattaaaaatataaaactaatggggasaaaggttaaactttaagtttgaaaatctttcccttcaatcatggattgagtaatgaacatgaaatacacaccgaggaacactacaaagccataaaaaaaatgaagtcatgttctttgcagcaacatagatgtaactgaaggtcattttcctaagcaaactaatgcgggaacagaagaccaaataccacatgttctcacttataagtgaaagctaagcgttgggtacacatggatataaa

SEQ ID NO: 660637 - DNA, 536 bp, Homo sapiens
tctatcctgggcaaatctgcacaaagggttaaacctaaccttmattcaaaaaaataagagacaaacattaccaaaagtacccaaaactttatgaaatacccagcaccactggtgctaatataataaaatttctattatgtatagtagattcttaataattcatttaccaatatacagatcttcacgtagttaaaagtgacaactttatcttaccctgttaataaagagtcagaaactgaaaataaggcagccgatttttcttatcttatggaacaatttagaaatatattgaaaatcttcaaagattatcctactccaaacttatccacttaataatttccctgaaaagctaccattaaaaattaattatttaagaccacatttctcaaagtctgctcaaggcataacagattgtcaaatactactggttacagcagaatcttaggaaaatatcctactttggactaagaccttctgatatagacaagcaaaatctgtttttccttttatggaaagtaaaagagatgaatatacct

SEQ ID NO: 660638 - DNA, 413 bp, Homo sapiens
agattaataacacatgaggtcttatytcaatttgaactacttctgtctcttttactccaagttgttaaaatttctttaaaaatttttaacctcctgtctataccgttattttaaaacagactctttagaacacactcctctctaccttggccttagaaccagggtgctatggggacaatacttttacattcttaaaaatctcttttgggattaagaggcactcccttaagactgtgagaaactctgttgtctaggtgagaggtcaaagaaggcaagtccttaagattctaaaagccctattatctatatgagagtctaagggataatccctttgtctttctgaggactgtacaaagggccttccaattacaccctgaactgatcttcactttcattctgaggctgttctggta

SEQ ID NO: 660639 - DNA, 578 bp, Homo sapiens
ttatggtggcatagtattccgtggtatatatgtaccacattttctttctccaattcactgttgatgggcatctgggtttattccatgtctttgttatggtgaatagagctgcaaygaacatatgggtataatgtgactttttgatagaatgaattattttcctttgattatatactcattacattgctgggtcgaatggtagttctattttattagtgagttatttgagaaatctccaaaatgctttccacagtgactgaactagtttgcattccctccaacagtgtataagcattcccttttctcctcagcctcaccaacatgttgtttgttgaatttttaataatttttaataatctggtgagatggtatctcattgtggttttggtttgcatttatctgaagattagtgatgttcagcatttctccatatgttcattggatgcttgtatgtctccttctgagaagtgtctgtttatatccttttcccatttttaattggattttttgttttttttgcttattgatttgtttaattttcttgtagattctggatattagacattcgtcagatgcat

SEQ ID NO: 660640 - DNA, 371 bp, Homo sapiens
ccagaggctggataatatgttttatgaaatcaaataaaagatattttggtgatttcagcatttttggaggcccagaaygatcaattgaggccaggagtttgaaaccaggctgggcaccacagtgagacaccatctctaccaaaaaaaaaaaaaaaaaaaaaaaggaaaatatattaaccaagtatggtggtatgcctgtggtccccactactcgggaagctgaagtgggaggaccacttgagccccagaattcaaggctccagtgagccatgactgtgccactgctccagtcagcctgagtgaaagagcaaaaacttttctctaaaaaaataaaataataaaaaagatattttgcaatttttaggtaatgc

SEQ ID NO: 660641 - DNA, 562 bp, Homo sapiens
aatgtctgtgccaagtatcctatcccagaggctggataatatgttttatgaaatcaaataaaagatattttggtgatttcagcatttttggaggcccagaatgatcaattgaggccaggagtttgaaaccaggctgggcaccacagtgagacaccatctctaccaaaaaaaaaaaaaaaaaaaaaaaggaaaatatattaaccaagtatggtggtatgcctgtggtccccactactcgggaagctgaagtgggaggaccacttgagccccagaattcaaggctccagtgagccatgactgtgccactgctccagtcagcctgagtgaaagagcaaaaacttttctctaaaaaaataaaataataaaaaagatattttgcaatttttaggtaatgcaactccagaaagcttgaaatctctactttaaggtagagatctttatttccttgtcctacagcagctgccatggacaaaacatattattttctaccctatcattcacctgagacttcatggtggamagagcacaaatatggctgaggcatcaagataatttccggctt

SEQ ID NO: 660642 - DNA, 455 bp, Homo sapiens
ttggatttgggcatctcctgatgttgcatttgaaataactctttgtgtgggttctttgggttaattgttgtaataatttaatatcaacaaaaggaaaaaattatgacttcattaacttccatttgtcccatatcaaagattaaaatcccattacttgcatgggtcatagtcagattaacctaatcttactgtgtagtacgtgttcactggcagtgcacaggcattcaggtaacagggaaatagaagaaaattaatatttaagtgcctactacwtgtcactgtgttttatatatgcaattttatttaatttcaatgaggaaggtgttattatttgtattatacggatgaggctactgaagcttgtgaagttatcacttgtttaattaacacaaaatttgtcctacaatatcttaaaatattaacacattggagcaacaatgatggatttgagtatt

SEQ ID NO: 660643 - DNA, 455 bp, Homo sapiens
ttggatttgggcatctcctgatgttgcatttgaaataactctttgtgtgggttctttgggttaattgttgtaataatttaatatcaacaaaaggaaaaaattatgacttcattaacttccatttgtcccatatcaaagattaaaatcccattacttgcatgggtcatagtcagattaacctaatcttactgtgtagtacgtgttcactggcagtgcacaggcattcaggtaacagggaaatagaagaaaattaatatttaagtgcctactacatgtcactgtgttttatatatgcaattttatttaatttcaatgaggaaggtkttattatttgtattatacggatgaggctactgaagcttgtgaagttatcacttgtttaattaacacaaaatttgtcctacaatatcttaaaatattaacacattggagcaacaatgatggatttgagtatt

SEQ ID NO: 660644 - DNA, 585 bp, Homo sapiens
tatattttccttaaatgcctcatgttaatttcagtgaactaggcttgcatgggtgaggaagaattagaatcagattctagaaatttgttgttacagtaagattttgttaatacctggagtgcctttaaacatagttttgtaaaaattattatttattttaatataagggttctcaagatttycttcaaagttgaattccagtgatatcatgaataaaacatattgatcagattttctaattatttatttttggtatataaaaatgatattgattttgtatattgattttataaaaaacatttcatataactcacgcattaggtccagtagaatttcagaaagcaaccagcagaaaacaatcctattaaaaaaatggacaaagaacatgagcagacatttctcaaaagaagacatacatgtggccaacaagcatatgaaaaaatgctcaacatcactaatcatcagagaaatgcaaatcaaaactacaatgagataccgtatcacactagtctgaatggctattactaataagtcaaaaaataacatgttggcaaggttgcagagaaaagggaacgcttgtacgct

SEQ ID NO: 660645 - DNA, 582 bp, Homo sapiens
atgggtgaggaagaattagaatcagattctagaaatttgttgttacagtaagattttgttaatacctggagtgcctttaaacatagttttgtaaaaattattatttattttaatataagggttctcaagattttcttcaaagttgaattccagtgatatcatgaataaaacatattgatcagattttctaattatttatttttggtatataaaaatgatattgattttgtatattgattttataaaaaacatttcatataactcacgcattaggtccagtagaatttcagaaagcaaccagcagaaaacaatcctattaaaaaaatggacaaagaacatgagcagacatttctcaaaagaagacatacatgtggccaacaagcatatgaaaaaatgctcaacatcactaatcatcagagaaatgcaaatcaaaactacaatgagataccgtatcacactagtctgaatggctattactaataagtcaaaaaataacatgttggcaaggttgcagagaaaagggaacgcttgtacgctgttggtggggatgtgcrttagttcagctactatagatagcagtca

SEQ ID NO: 660646 - DNA, 573 bp, Homo sapiens
attccatcctcttatgaagatccattcagttatttattcattcaacctacattttgtagtttctgctttgtgccatttttatctgtgttttactctggaatgtagaagtgaatgagaaaaacatggtccctgccttcgagaaccttacattctatggggaatacatgaactaaccaaataattgtttgaactataattgggaagatgttgcgaataagtagcagaaggtgctaggagtgtgtaaaactgaactaatctagcctgacgagctcctgtgttattctcacgttagtgttttcaaatcctgctactttagtgaaccctaccagaattatttaaataagagtttccaagagttgtcagatgtttttaagcatggaagtmtttttattttcccccacaaaatgtctattacttgtaaagagcaaatcttggaatgtagtttggaaaactctcagaaaggggacaagggaaagtttagtaagtagttgagtcttcatcgtcagcttgtagttttccccttctgcagagaaagaccagcagaatcaaaggtgtggatgcaggacacacagg

SEQ ID NO: 660647 - DNA, 629 bp, Homo sapiens
gtggtgggggatgaagtgaagaatacaattargaataaaattatttctgctttagaagtgtttacaaactagaaaggaagacgatcacaatgtaaggtggaataaactaatttaacactttgaggattgatgggctctcagtgacagggaagaaagtaagaaaaacatattctaagttaattaggaccaaaagcataataagagcatgaaaatacatggtgtaatgagaaaatggctaaagttaagctcaatgaaagaatatgcatttggaagtaatctgaacaatcatacagagatcagctgtagcagcctatgaatgtcattttaggtaattttgactgtattctgtaggccataggctgttgccatttttttctttattaaaaaaaagtgatatgtactctgacctacattttaagtagctaattctggaccctgtgtaaaaggtacagtagtatattgaaagtctgaagacagaaataccaattagaaaactacaagaatattctgggtatgaggtaatgtcattgcgtgctctacaggaggaagaacaaaattaaatgatagactgatgaagcaccatcacgcaggtagaacaaatagaacatagtaatttaacagtggcaagg

SEQ ID NO: 660648 - DNA, 629 bp, Homo sapiens
gtggtgggggatgaagtgaagaatacaattaggaataaaattatttctgctttagaagtgtttacaaactagaaaggaagacgatcacaatgtaaggtggaataaactaatttaacactttgaggattgatgggctctcagtgacagggaagaaagtaagaaaaacatattctaagttaattaggaccaaaagcataataagagcatgaaaatacatggtgtaatgagaaaatggctaaagttaagctcaatgaaagaatatgcatttggaagtaatctgaacaatcatacagagatcagctgtagcagcctatgaatgtcattttargtaattttgactgtattctgtaggccataggctgttgccatttttttctttattaaaaaaaagtgatatgtactctgacctacattttaagtagctaattctggaccctgtgtaaaaggtacagtagtatattgaaagtctgaagacagaaataccaattagaaaactacaagaatattctgggtatgaggtaatgtcattgcgtgctctacaggaggaagaacaaaattaaatgatagactgatgaagcaccatcacgcaggtagaacaaatagaacatagtaatttaacagtggcaagg

SEQ ID NO: 660649 - DNA, 535 bp, Homo sapiens
ttttatatgtaaggattaatcaaacccccccagaaaactgtgatatgtaaggggtgagaagaaaggtaataaactcaatggtgaaattgacaaggatccacattaaaagcaagagtagcaaaatatagccttagttaaagaaataagataaagctaactaaagaacaatgtcagagaatcaatggcacagaaaggttaaagaatgaaragtgtccaataacggtcgaatacagcagaaaatttggggaagatgaggactaggaatgactagaaatggcaaaaaatacattactgatgacctctgatttggtagtttcaataaagtgtaggagacagaagccataaagaaacatatagatggatggtaaagaaatagagatagcaatgtaaaatagtctttcaaaatatttagtaaacttaagaaaagacatgaggtgagggaagcagggcctggtaaaagagtttggttttatttgtttacatttgaaatatgagtgtttgttgacttcagaaaatctggtgaatataaagaaag

SEQ ID NO: 660650 - DNA, 535 bp, Homo sapiens
ttttatatgtaaggattaatcaaacccccccagaaaactgtgatatgtaaggggtgagaagaaaggtaataaactcaatggtgaaattgacaaggatccacattaaaagcaagagtagcaaaatatagccttagttaaagaaataagataaagctaactaaagaacaatgtcagagaatcaatggcacagaaaggttaaagaatgaagagtgtccaataacggtcgaatacagcagaaaatttggggaagatgaggactaggaatgactagaaatggcaaaaaatacattactgatgacctctgatttggtagtttcaataaagtgtaggagacagaagccrtaaagaaacatatagatggatggtaaagaaatagagatagcaatgtaaaatagtctttcaaaatatttagtaaacttaagaaaagacatgaggtgagggaagcagggcctggtaaaagagtttggttttatttgtttacatttgaaatatgagtgtttgttgacttcagaaaatctggtgaatataaagaaag

SEQ ID NO: 660651 - DNA, 598 bp, Homo sapiens
gaacaattgctgccactgcaattgggttttcttaagaaatatatttgtattaaaagaataaagtaaatctgtttagtgcctgaaaaattcagcttctacacatggcttattgaactatacaacattatactacagctttcatgtaaacctaattttacaccgtagctgccttgggaaaagatgcaatgagtgycacaaacagcttgggaaatatttcatagtctttccattcagaatagggcacaactggccaaattgaggtcattatgcctgaattcaagatccagctctgccatttgggatgtcaccataagcaagttactaaccttttatgctaaccttttcttcagtggaaactatctgatagttctgttgtgaggattaaatagctagtgcatatacagttcataaaaattaccatgctctcctctagctgtcctcctccttttccatctcctcctcttctttctcctccttccctccttcctttcttcctttttctcctcctcctcctttcccttcctcaatgccacctccttgctcctctcctctcctcctcctcttcatttccttctccttctctcttttttacctcatt

SEQ ID NO: 660652 - DNA, 598 bp, Homo sapiens
gaacaattgctgccactgcaattgggttttcttaagaaatatatttgtattaaaagaataaagtaaatctgtttagtgcctgaaaaattcagcttctacacatggcttattgaactatacaacattatactacagctttcatgtaaacctaattttacaccgtagctgccttgggaaaagatgcaatgagtgtcacaaacagcttgggaaatatttcatagtctttccattcagaatagggcacaactggccaaattgaggtcattatgcctgaattcaagatccagctctgccatttgggatgtcaccataagcaagttactaaccttttatgctaaccttttcttcagtggaaactatctgatagttctgttgtgaggattaaatagctagtgcatatacarttcataaaaattaccatgctctcctctagctgtcctcctccttttccatctcctcctcttctttctcctccttccctccttcctttcttcctttttctcctcctcctcctttcccttcctcaatgccacctccttgctcctctcctctcctcctcctcttcatttccttctccttctctcttttttacctcatt

SEQ ID NO: 660653 - DNA, 444 bp, Homo sapiens
agagtgcagtggcacaatctcagctcactgcaacctctgcctcccaggttcgagagattctcctgcctcagcctcccgagtagctgggattataggcacctagcaccatcctggctamtttttgtatttttagtagagatggggtttcactatgttggccaggctggcctcaaactcctgacctcaagtgatctgcttgcctcagcctcccaaagtgtggggattacaggcgtgagccaccacaaccggccctagctcctcttcttataatgagaccactgatactgaattagggtccacctcagggacctcatctaaatttaattgcctccttaaagatcttatatccaaatacagtcacattctgaggtcctgtgggttagactttatcatatgaatgggagtgtgcgacgtagtgaagcctcaacaataaataagaagaat

SEQ ID NO: 660654 - DNA, 426 bp, Homo sapiens
atgcatttttgaatccttggaaaggatgaaactgctaggacatatgcctttgaaaggaatccacaaaaaaaaaaaamaaaaaaaacccacaaaaacaattctatcccaaccacgacaatgtaagcttaatcttgttatcagcagaaattagaaataacaatgtcataaatatattatctttcaaaatattatcttataacatcaaatatgtgcaataaccagtaatggtgagatatgatttcagaatcagttccacaaaggtacaaatattgccagtatttagtgtggtgaaggatgtgaggaaacagctagttggtggtatgcaaaatattaacaccattgtggaaaacatgacatcttgagtcagagaagtatactttgacccagcaatttggtccctagaagtttattcaaagtagagattgg

SEQ ID NO: 660655 - DNA, 593 bp, Homo sapiens
ttcaaaaaactttggcctccacagtcttttatcttaacctgaacattctccttttattgatcccaggtcttcaaacaaactcaaccaattgtcaaccagaaaaatgtttaaattcacctatagcctggaagaccccacttcaagttttcctgcctttctaaaccaaaccaatatgtttcttcaatgtatttgattgatgtctcatgcctctctaaaatgtataaaatcaagctgcgytctggtcaccttgggacatgttctctggacctcttgaggactgtgtcatgggccatggtcactcatatttggctcagaataaatctcttcaaatattttacagagttcaactcttttcgtcgacacatgttgacataggttaataggcagagatgggctccaagctcggcgggactcgccagcctgcttttgagcacaaactctgcacattcctttctgatatttagctaaacttcactaagagaattttgatgaaaggtactgaggaaagaaaaggtaattttgaattggagacactacagagaaagaagggcatacatataaggcactgaacagctaaaggctacaagaaggca

SEQ ID NO: 660656 - DNA, 606 bp, Homo sapiens
acacttagcttacctgacttctcatcattctacatggagaattaaatcctcctgcttgaaagtttttaatttgtatacttctgtaactttcttgacctcatcttacatctctggcattcttattaatatcatgcataaactttcttctttcctatccaagaaagtccatgattgaagacttcaccaaagccatcctcaccttgcactgagaggatacttgttatgggctgaatcacatcctcctgaaatttatatgttgaagtcctaacccttcagtatctcaaaatgtgactatatttggagataaggttcttcaaacaggtgattaagttaaaatatggtccttagaatgggccttaatccagtctaatttcctccttatagaagaagaaattcacacacacagagacaccaggagtgtggatacrcagaaaaagaggccacatgaggacacagcaagaaggtgaccatctgcaaaccattgagagggtcctcagaataaaatcaaaccttccaagaccttgatcttggacttctagcctccaaaactgtgagaaatttctgttgtagtctgtggtattttgtcatggcagctctagcaaactg

SEQ ID NO: 660657 - DNA, 543 bp, Homo sapiens
agagaatgtatcttggatgctcactggatttctgattttgctgttgcttggcagcaagaaatagtgaaaaatctagctccctgaataagatgacattgtcatattatacagaattaaaattagcattaccctctttgcccctcaaagatagaattgtgtgaaaaaaaaaaaaacaaacacaacgcattctccaggacccttctgataaattctactcacatcattttccccagtcagtaaggtcatccttggcaagtactgcatcactgatcctgtctatttcagcttgaaaataaaataaatccatatttcaaagttaaggtcatcagagcagtggtaacttccaaacacgttttttcagtactttgatatatccaaatatttctgccaatggataaaatgacaaaactgtcactctcaactccggattctagaagaacttctgaaattgaaaagtgtgtatgttccrcagctcctatcctcctctagcagaataaaaagggccaaaagaactccttgtttacaaaagcatttgcaggcaaa

SEQ ID NO: 660658 - DNA, 554 bp, Homo sapiens
aactgtttgctggcttgatctgtgacactggtgtttcttcatatcaatggccatgagaagtcatattggtgtaacttcaccaaagcaagagacccatttggagtcaaaactgtttatgcctcactggggcacaattatyttaggattttttgttttgttttgtttttgtttttgtagggttttggtttgtttggtttttgtttttcagacggagtctcactctgtcacctaggctgaagtgcagtggcatgatctcggctcactgcaacctccgccttccaggttcaagcgattctcctgcctcagcctcctgagcagctgggattacaggcatgtgccaccccatgtggctaatttttgcatttttagtagggaggggatttcaccatgttgagcatgctggtctcaaacttctggcctcaagtaatccactcacctgggcctcccaatgtgttgggattacaggcgtgagcccccacacccgaccttgtagggtttttgtttctttggttggttggttggtttggttttggttttgttttccctagacaaag

SEQ ID NO: 660659 - DNA, 554 bp, Homo sapiens
aactgtttgctggcttgatctgtgacactggtgtttcttcatatcaatggccatgagaagtcatattggtgtaacttcaccaaagcaagagacccatttggagtcaaaactgtttatgcctcactggggcacaattatcttaggattttttgttttgttttgtttttgtttttgtagggttttggtttgtttggtttttgtttttcagacggagtctcactctgtcacctaggctgaagtgcagtggcatgatctcggctcactgcaacctccgccttccaggttcaagcgattctcctgcctcagcctcmtgagcagctgggattacaggcatgtgccaccccatgtggctaatttttgcatttttagtagggaggggatttcaccatgttgagcatgctggtctcaaacttctggcctcaagtaatccactcacctgggcctcccaatgtgttgggattacaggcgtgagcccccacacccgaccttgtagggtttttgtttctttggttggttggttggtttggttttggttttgttttccctagacaaag

SEQ ID NO: 660660 - DNA, 641 bp, Homo sapiens
tatggatagagagattgaggtgggatctgaaaatatcttgaagtttggggcacaagtaaagctgctttgtatctaggagacagagtggggcataaagtaggtaaggaagccattcgccatattccacatggaaccatgaattgctcaggtgtcttgagaactagaagtttgaaagcaattaaaacaatgactttgacctttacactgattctcatgatggatataaacaacagtgaagcttccagaagcaactcggaacaaatcagaagtraacaagtaaaaattgaagtagaaaagaactcaaaggatactgttgtgaattcatctgatagctggcttggggcccaagacagactccctctgagagaatctcataaattatcaggagacactttgaggatgctacttgtaggcagtcgtccaatgggaaagcatcccattacactttgagtgtaaaaagaaagtgctctcttccttacagtcacaagctataaggcctagaatatttgagttatgtatatgggacaatgtacactctgggtttagcataaaagcatcacagaatcttaagcataaacataattggagtgagttagaagacaaggaggacattgtcgccaaactgcttgaaaacaatttaa

SEQ ID NO: 660661 - DNA, 641 bp, Homo sapiens
tatggatagagagattgaggtgggatctgaaaatatcttgaagtttggggcacaagtaaagctgctttgtatctaggagacagagtggggcataaagtaggtaaggaagccattcgccatattccacatggaaccatgaattgctcaggtgtcttgagaactagaagtttgaaagcaattaaaacaatgactttgacctttacactgattctcatgatggatataaacaacagtgaagcttccagaagcaactcggaacaaatcagaagtaaacaagtaaaaattgaagtagaaaagaactcaaaggatactgttgtgaattcatctgatagctggcttggggcccargacagactccctctgagagaatctcataaattatcaggagacactttgaggatgctacttgtaggcagtcgtccaatgggaaagcatcccattacactttgagtgtaaaaagaaagtgctctcttccttacagtcacaagctataaggcctagaatatttgagttatgtatatgggacaatgtacactctgggtttagcataaaagcatcacagaatcttaagcataaacataattggagtgagttagaagacaaggaggacattgtcgccaaactgcttgaaaacaatttaa

SEQ ID NO: 660662 - DNA, 547 bp, Homo sapiens
acctcctctgtgctgcacaaaatttttttggaaaggattaatgaaggtgaaacacatgagaaatgctggttcctgagcacatggaaacctataagtatccattcaagttgatcaatagctgcagatcctatattatacatcatggacactaggttatttgattactcctttctcttactccactgaataaaaaacacttttctggtgaaatttagatattcaataaccaggcaattmaagttagcaataacatgacagtatgagatatgatggcacatgataacaaaagcctattttcaaagaatataatttagcaccataaaactatcaatgcttttcagcaaaagaatttgttcagtataaagattgttttggaatacttaaaaaaaaatccagaagtagatatcctcctattaaatatactactggaagttctggccagggcaatcaggccagagaaagaaataaggggcatttaaacaggaagaaggaaagtcaaactctccctgtttgcagatgacatgatcctatatctagaaaatcccat

SEQ ID NO: 660663 - DNA, 425 bp, Homo sapiens
ttcaactgctgctattttatcatttcctcattttgagtttggatggaacctggtacctgtttctcaccaatagaatacagcgaagataaaaagatgtcttacacttccagcagacttgttctccctttccttctggcttgaaagaataggaaacagaaatagaaacaaaaaacagcaatagactacataaactttagaaaaagttgtactacagcatgtacagtcactatgtagctcagcaatgaacagtatttatggtcctaacaatgtaaattctgaatgttaattctacaaaaattccaaattgggaatgaggggaaaagtatgtgtcttaaatatggtgacrgtgacttgagtctactgctgtgataaaatgccatagaactgtaaaccaaaagcaaacaaacagacaaatagacaaaaag

SEQ ID NO: 660664 - DNA, 602 bp, Homo sapiens
catttctggaattccatacactgtgcctttttcaagtactaagatgctattatttcataaattcatcagcagctttattcactctttgcagttttctgatcagtgcttcctctttctctcttccctgcctccccccttaccaaccctgacactacctcagccattccagttctttttctgttaagctcctgcawctcccctaacccctcccatcttcctttacttaaaagactgtgcatggacatgctgggtgaagccctctgaagtgaactaatctccccagtaggaaggaaaggatttagaccacaggtaacaccaaccctcctgagttatctgaaagagaaatcgagactgctgctatttagagctactggaaaaggcagtgggctttctctgagatggtgaccttcaaagttccactcagagcagctcaacatagtaggaagattctgagactctctccaaaacaccagtaacatcagaagtaattcttaggatatctttggagagaaatggaaggtagagccgatatcaaagaaagtcataaggaataaagaacagaggatacatatttatgaatttttatatttaaaatattttac

SEQ ID NO: 660665 - DNA, 586 bp, Homo sapiens
caaaaccaattgacaatatctaaaattttataataaagaaagaggaatgataacatactattttgtttggagataagtgacagaaagttttgaaaattatctttattctacaggttattgatgttatatttctatataatatggaaccataccattcttccgatatgtattgtaaagttatgataattataaaagtgtaacactgcccaagtagtcaataaacagwtctataaagcactataaaaattcaaattttttttttacgaatgaggttttcaataaagcagacctctgaaaggaggaaggaaagaagttaaatgattgccatacccagggaggtcatgttatacacagataatcttaggtctcatctgtaaaactaagacaagatcctttcagcgtagataatgtcacagaattacaggccactggagcaggaaggtggaataggactttccagcacaaatgagttgaaaatttatgtctacacaatatgtgcaaatgtgcacagaaatgtttatagcagtttttttgataattgccaaaacctagaagcaatccagatgcccttcagtgggcaaatgga

SEQ ID NO: 660666 - DNA, 631 bp, Homo sapiens
cgacattcttagagtagccattttagaactgttgtttcctggagtatttcattccatagaaatactgattgcaataggcttcttctgattgtgtctgctcttttaaattaggtcccactccacattacaagagaagttgtaaggtagaattaaccctaaattcaattatttcctaaagatttgaaaagcagtgctgtttataaatgtctcccaaatcctaattcctgacccaggaaagcaaacgtgtagattttgtcctcagtgccagtttcctctcctacctcagtcaaagtgtcagtcaagtcagctggctctgcagtatctcaggttccaactatgccacctctagtccagctcacaaatactcacgagtccctctacctcgatcctgtttttcctgtaatacattaacttttgacctgtttagacttaatttggtttggtaaataggttggtgatgtatggagacatgagattwtggaaagctaatactcctcctcactgtgaagagagtcttacaatgttgtaagtcacaatgaaataagaagtaataccaactgcaaacaactaagtatcacatactgagagactgacttgacatatcttggccattcataaactgaattgaatt

SEQ ID NO: 660667 - DNA, 423 bp, Homo sapiens
actcctcctcactgtgaagagagtcttacaatgttgtaagtcacaatgaaataagaagtaataccaactgcaaacaactaagtatcacatactgagagactgacttgacatatcttggccattcrtaaactgaattgaattcagtagttcttgggtttgggattataaatagtgtctgaagcaagatttttccaatatgggagaatttatgtatctatttaatgtaagcccttgacctttcttagaccttcagaagtttaattcatttctggacacctgattgccattgctaaatgaattctgtgctcatctatccccttttcactgtctttggtaaccaggatgcaactcctagattctagcctgtatctgtatttttatattttgacttactcccttttaagtcaatatcttccttatatc

SEQ ID NO: 660668 - DNA, 557 bp, Homo sapiens
ctttcatttttcctggagataagagcccatcacatcttcttggccttcttcattttcttaacttctctatagcagatgctatttgagaagtcctcttatcagccagcatagtatttttcgaactctctgtacatgacccacattaagaaacacattatatatcatttctcagtaaacacatagctgaatgtgggtgtatgagtttgaaataattcctgtttttgctgcagcaaatgatattattttctattctacttcttcattttgtttttgcttttggtcagtacaatatgttgtatctyataaacaaaaaaattcatttctcatagtactggaggctgagaagtccaagatcaatggcctgcaggctctgtggctagtgagggtctgctttctggtttatagatggcaccttcttgctgtgtcctcatatggtgaaaggagcaaggcagctctctggagcctcttttataagaacactaatctgctcatgacagctgtgggcttatgatctaatcacttaccaaaagtgtcacctccttatagtgtcaccttgg

SEQ ID NO: 660669 - DNA, 667 bp, Homo sapiens
acagttcattgataagaattcaggattcagtttgaagacctggatgtgagataattttggggtgtatagtggtttttgtcataaatatgagacaatagagaatttgtcataaataaatgttcattttgtataaaatttgtaatttttcaagtcaaatcttgaactcaaggaagagatgaaagtgttaactttagtacaaccacattttctaagtttaaatttaaaatggttacttaatagaaagtaattaaatgagaacaatgatagtgtttctataaatttttaaattattgctatgtatatcacagtarcctcaacatcaacatttaattaatttctttatttaatttggtttacctttagaagaaagtctgaattcacatagaaaattagtttctaaatctaatagttttgaatgacatgctttgcaatctcatgacacactttaatttaactgatccacaagcatgaaagaggatttagagaaaactattatttcaaagttgaattcttacaagttataatataatagctgttaaaggaataaggtttgaagggtgaacgacctgcaactagagctctgcctcccccatttaattgctatttgaccttgacttctttaaaccgtttacttgagatgtaaattcgtaatgctaattatatctac

SEQ ID NO: 660670 - DNA, 587 bp, Homo sapiens
attaaataattattaatgattaaattattaaatcctgaatatcaatagtgctgaggctgagaaatcctctgttaaggggtcattaaatgttagttactattacaatgagaaataacaattacaacaacaaacttgcacaacactgacaaggtaccaggttctattctaatcactacatatattaaccaagtttaatcttcacaaaaagcaaaaatcaaacaaaaactatgaggtcagtactattttgtatctctatcttgcaaacatgaggggtataggtataatgacaaggattcagtctctagttctcctgggagggtaattgaaacccacccgttaaattacagtaagccttgtggagaattattcttgctgggagatatgtttttattataagaagcttatatagattttgaatgctctttccttctttcctctacctacttttactctccaattcatattttaagaatgttggaattttcttatttgttttaaatcagccattcaaatmcaatagtttcccttcctcttcattttcccagcccctcccctgattattagaggttactttgcaaggattacag

SEQ ID NO: 660671 - DNA, 613 bp, Homo sapiens
tttgagtatttattctaaagcttaagttggctttcccgcactttgatgtataagcctctttctgaattttctccaaatggattgagtaacactgcaaaagtaccttccaaagcaaaggtttgcaagatggtgacagaatgttgaacatctgccctttggggacattagaaataaaatggcttctttcttggattaatgcagttgtttgaaaactgattacttattgaggctttcgctcattttttaaagatctcattttgcttagaaacaatgctcgcaggcaccatatttttaagtaggggtgtgtgtgtatrtgtgtgtgtgtgtgtgtgtgtgtgtgtgtgtgtgtgttttaaccaagactgagagaagctgaattaaatgtaatcaaatagctgttcttgggacctagtgcaatgaaaaattgaggcattcagccaaatccttaatcttccttacaaaaatacctcttacttctcaggcaatacaggtaaccttaagaaaataaaaagatgtccatttatcaccaacactccaaaggccactctctttttgtatctactcacttttcttctctctcaatgacctagcatttctattgatgaaatgtgac

SEQ ID NO: 660672 - DNA, 532 bp, Homo sapiens
acaaagctcagaatagtatatttaagtgtttacatatgaagcaagtctgcagaaagtaggagagataaatatggttacaggtaccaactcattttggcaaggaggaggccagagaggcactgataatcakgtggaatctggtacttggtatccacactgctttgctctctgcctttccttttccctgttccagctgaatgtgcctgtatccctccacttgcatgctcaggcctaccaatactttaggtaagttgagactctgaacagggaggataccagaaacctacagctcctaaagcactggattttaatcagattccattactgttgctggacttacacatgcttggattgtgaaaacttttgaccacgctctttgcctatactcacaaccttctgccacccaatttcccaaagctagtttttcatctttgttggctgagttcctaacctctggatccctggtaaccattctactctacctctttagctgataaacaacctgaacctaaactttggcccacccaagtct

SEQ ID NO: 660673 - DNA, 532 bp, Homo sapiens
acaaagctcagaatagtatatttaagtgtttacatatgaagcaagtctgcagaaagtaggagagataaatatggttacaggtaccaactcattttggcaaggaggaggccagagaggcactgataatcatgtggaatctggtacttggtatccacactgctttgctctctgcctttccttttccctgttccagctgaatgtgcctgtatccctccacttgcatgctcaggcctaccaatactttaggtaagttgagactctgaacagggaggataccagaaacctacagcycctaaagcactggattttaatcagattccattactgttgctggacttacacatgcttggattgtgaaaacttttgaccacgctctttgcctatactcacaaccttctgccacccaatttcccaaagctagtttttcatctttgttggctgagttcctaacctctggatccctggtaaccattctactctacctctttagctgataaacaacctgaacctaaactttggcccacccaagtct

SEQ ID NO: 660674 - DNA, 616 bp, Homo sapiens
tcttaattgtatgtgggtgaaaacattggaaggtaataaggaaaatcacagaataatgagaaaaagttttagatgtaataaaatgtcctcattgttgctatttacgtatatttctcatgggtgctaggcttgttttgctgtattctgttactttcctgctgaggccagccatttatatcccatgtcgcacagtacttctctcagaaaccaagtcagttctagttcccattatcttgacagagacagtttctcagtgaggaaaacaaaactgggaagagaagaaaggctttcatgctctggtcccaccccttgggtccaggcccaggttcttaggctctgtgtgccaggatattgatcccctctctgaaatatactaggagttagagtgagttcaatcctgtaatcccagaaagtccatttttttcttaaaatccaattatctggatccatgttcctttttgtgtttatctcttctttaccacttcctggtatatttgacccttgaacamtgtgagggttgcaggcactgactccctcaaccagttgaaaatctgtgtataactactgacttctcaaaaccttgactactaatagcctactgttgacctgaagcttc

SEQ ID NO: 660675 - DNA, 554 bp, Homo sapiens
tcattaaggggaagtgaatcgggataaaggtcttcatccttgctgtcttcatattgagtaggctgaggaggaggagaaaaaagaagggttggacttgctgtctcaggggtggcagaggcagaagaatatccatgtgtgagttgacctgcatagttcaaacccatgttgttcaagggttgactgtattttgtaataaaaataatagctaacatttactgagcacttactatgtagaagggactatgctaartttccctggtaactctatgctctcaatagtcccaggaaatgggtattatatgaatccctgttccagagaggaagaaagtgagactcaggagtaaaatgacctgcctaaaagcagacaaccaaaaatgggcagaacagtaacttaagtctttctgacaacagaaacactcttaactacttgatttattggactaaagaaaatcgacccttccctgttggccttgtctctgttctgttatggaataataaggaatcaagcattgacattaggccagaaagttacttagaaatatatagaatgccaa

SEQ ID NO: 660676 - DNA, 554 bp, Homo sapiens
tcattaaggggaagtgaatcgggataaaggtcttcatccttgctgtcttcatattgagtaggctgaggaggaggagaaaaaagaagggttggacttgctgtctcaggggtggcagaggcagaagaatatccatgtgtgagttgacctgcatagttcaaacccatgttgttcaagggttgactgtattttgtaataaaaataatagctaacatttactgagcacttactatgtagaagggactatgctaaatttycctggtaactctatgctctcaatagtcccaggaaatgggtattatatgaatccctgttccagagaggaagaaagtgagactcaggagtaaaatgacctgcctaaaagcagacaaccaaaaatgggcagaacagtaacttaagtctttctgacaacagaaacactcttaactacttgatttattggactaaagaaaatcgacccttccctgttggccttgtctctgttctgttatggaataataaggaatcaagcattgacattaggccagaaagttacttagaaatatatagaatgccaa

SEQ ID NO: 660677 - DNA, 610 bp, Homo sapiens
tgttcaattcattctcataaatacgtttttgaatgatttgctttttgctattatcttttcagattcatatttagagccctttttaatgttaactttgtattcctccattagcttgctttcaaatagcttatttaaagagttctttgaagttgaaaagttttatgttaagtgtgaagcattaactctacttactctgcaaacaaataatgtgaaggtcatgaaaagctaacatattaaaacagaagcaaacaaggaaagggcaattttcaaaagaagataaaatttaataacaatactaataacagttgatggctcaagatctttttattttcagtcttggaaatattgactcatttgtcattagaaagtcccacaaagctgastgtaaagaaatagttacaatcttgtctaatttgaatgcttgccccagactctcagaacaggaggaagagaaacccagcactttttaattgattttcatatttcctaggttgccttccctgagagtgaggcaaaacagtggcaaaataccatttgactagcaaacagaagaattgaagttgagttcagtttgaacggccttgagtgcctctctctattcttttctttt

SEQ ID NO: 660678 - DNA, 530 bp, Homo sapiens
tatcatgagactagcaccaaaggggaaaatctacccccatgatccagtcaacttccacaaaccccatctccaacackggattacaattcgagatttgggcagggacagaaacccaaaccacatcagggggaaggaaggaagaaatggagggagggtgtatattggaaggaaattttcaatgtagtaacctattgtgtctggagaattgcagtgagagctattcagatattttagtggtagctacgtcatcctccatcaaaatttcatagtcaggtctcgattacggcagtatcaagattgctgaactctatatgctagacaattgtatggaaagccatgtttaccaatcttgctaaggagctatagacacataaagcttgttgattcatcactgatttctaaaggccaaggtcaccattttttactaaaaaattcctgtctttacatataattaagtcttttaggacatttgagggtaagaattagtccaatagatggtctttttattgaatagtactttacagtttaca

SEQ ID NO: 660679 - DNA, 649 bp, Homo sapiens
tgataagcatgtcacattcatatgtaaagcatgaagtttaaggaactcagcaaataaaagaacagagatcctatagtgcatttatttaaagttttttcttagcagtgcaattcctggttatttgaagcaataagtaaaagaataattgttgtgaactgctttgatataaaataaatgttactaaatgtttctttcactttaatcaygtcatccttattccacactatccctgttgactagaaataaactccccagaaacttaagggatgctgcctatttatcaaaagattgacactgaaataattactctttgtagtagatctattttactattagcaaacttcagatattccttaaattcaatttcaagcacacattgttaaataagagagaggattgctaaacttttacatatctcctaacacaagtagatgctgcagacacagtgtatttttcaggcattctaaaccacttgtgagcaataaaaacacacaaatagagttctatttcttgtcatggaagctcacctatccactttcccactatcttatttctgctctatttctattggtgctaaaaatggttttgctcagctgtcaaagttaataataagttaatcaaaataaagtttattttacaattgttgtgc

SEQ ID NO: 660680 - DNA, 649 bp, Homo sapiens
tgataagcatgtcacattcatatgtaaagcatgaagtttaaggaactcagcaaataaaagaacagagatcctatagtgcatttatttaaagttttttcttagcagtgcaattcctggttatttgaagcaataagtaaaagaataattgttgtgaactgctttgatataaaataaatgttactaaatgtttctttcactttaatcacgtcatccttattccacactatccytgttgactagaaataaactccccagaaacttaagggatgctgcctatttatcaaaagattgacactgaaataattactctttgtagtagatctattttactattagcaaacttcagatattccttaaattcaatttcaagcacacattgttaaataagagagaggattgctaaacttttacatatctcctaacacaagtagatgctgcagacacagtgtatttttcaggcattctaaaccacttgtgagcaataaaaacacacaaatagagttctatttcttgtcatggaagctcacctatccactttcccactatcttatttctgctctatttctattggtgctaaaaatggttttgctcagctgtcaaagttaataataagttaatcaaaataaagtttattttacaattgttgtgc

SEQ ID NO: 660681 - DNA, 649 bp, Homo sapiens
tgataagcatgtcacattcatatgtaaagcatgaagtttaaggaactcagcaaataaaagaacagagatcctatagtgcatttatttaaagttttttcttagcagtgcaattcctggttatttgaagcaataagtaaaagaataattgttgtgaactgctttgatataaaataaatgttactaaatgtttctttcactttaatcacgtcatccttattccacactatccctgttgactagaaataaactccccagaaacttaagggatgctgcctatttatcaaaagattgacactgaaataattactctttgtagtagatctattttactattagcaaacttcagatattccttaaattcaatttcaagcacacattgttaaataagagagaggattgctaaacttttacatatctcctaacacaagtagatgctgcagacacagtgtatttttcaggcattctaaaccacttgtgagcaataaaaacacacaaatagagttctatttcttgtcatggaagctcacctatccactttcccacyatcttatttctgctctatttctattggtgctaaaaatggttttgctcagctgtcaaagttaataataagttaatcaaaataaagtttattttacaattgttgtgc

SEQ ID NO: 660682 - DNA, 596 bp, Homo sapiens
agtgctatttctaaattttgtcaaattcttagatcaccatggcaaaaacgtgaaagagagttaaaatttaatccttaaaaatgaatcaaattgaagaatagtcacttttgtctactgagttctactcagtaatagaaaatcagtaagcgattggaaattggcaagataacaactggagataagccagtggtcaagatgtatatgttgtagtaatgtggaagyacacttctagtgttctctgtcctattttagactatttatgtatgagtggaaaaaacaaactgtttctcctactacactctttcaacacagaatgcttctgtgactacatgtgtggggattttttccccaaacaccaagcaaacaattgtgcagtgcacaccagctaggatcctgtaatttaattccatcctgacactatttacctggagatagcgtcagatcctacaggttgagagctcagtcccacaacactgcccccaacttctgatgccaattgcaagcacaggtcgtggcctgtgcttccgactgactggctagaaattggggttcccataactccctccttgggttcaattaatttgtaagaacagctc

SEQ ID NO: 660683 - DNA, 627 bp, Homo sapiens
tattataaagcatattacaaaggatacagatgaattgccagatgaaggaggtgcctagggtaaggtatgggagaaagggtgcagtttccacgtcctctcctggtgcactacccttcaggaacctccattgtaaagctatatggaagctctctgagctctcttcttttgagtttttaaggaggtttcattatgtagacatgattgatcaaattatttgccattggtgatcaatgtgacctatagcctccctcctctccctggaarttggagggtggggttgaaagccccaactctctctaatcaacccttggtctttctggtgaccagctcccatcctgaagctatctaggggtctccagccaccagtcatatcattagcataaaaaagacgctcttataacttaggagattttaaggttttagtagtcatatatcaggaaattaggaagaagaccaaatacagtcatgtgtattgatgggggcacttctgataaatgcactgttaggtgacatcatcattgaggcaacatcaaagagtacatttacacaaaactagacggcatagcctacaattcacctaggctatatagtgtagcctattgctcctaggctacaaacttgcatggc

SEQ ID NO: 660684 - DNA, 627 bp, Homo sapiens
tattataaagcatattacaaaggatacagatgaattgccagatgaaggaggtgcctagggtaaggtatgggagaaagggtgcagtttccacgtcctctcctggtgcactacccttcaggaacctccattgtaaagctatatggaagctctctgagctctcttcttttgagtttttaaggaggtttcattatgtagacatgattgatcaaattatttgccattggtgatcaatgtgacctatagcctccctcctctccctggaaattggagggtggggttgaaagccccaactctctctaatcaacccttggtctttctggtgaccagctcccatcctgaagctatctaggggtctccagccaccagtcatatcattagcataaaaaagacgctcttataacttaggagattttaaggttttagtrgtcatatatcaggaaattaggaagaagaccaaatacagtcatgtgtattgatgggggcacttctgataaatgcactgttaggtgacatcatcattgaggcaacatcaaagagtacatttacacaaaactagacggcatagcctacaattcacctaggctatatagtgtagcctattgctcctaggctacaaacttgcatggc

SEQ ID NO: 660685 - DNA, 594 bp, Homo sapiens
tgtaatcttataggaccactatcctatatgactgtggattatgaccataaatattttacaaaatgagaagactcagcattggtgcagaactcagctttggtcaagaagaaagcaatgccagtaatgggacttgaggaagaaattaattctgttacctcataaatagaggaagctggacatataggacaatcactattcttaataagaatcacagggcccaaggtaagaaagcagagayaaaagtaccacatgctgagtattttaggtgttccttttcattttgttctaagggagagaaagtcctctgaaagtcattatttcttctctcttcctctttcccatcctcaatttctaattatcttcccttctgcctttggattgttgttgatctccaagaagctggggagagaagtgacaaggcttttagacaatagtctaatttctagcaaaaaatatttgcaggtgttctatatgaagagaaagattttctactgagggaagaagaaacaaaaaaagaatggctttgatgcatatttaaagatttgaattagatatttggaataattgtacaactattaaaaatatttactgcta

SEQ ID NO: 660686 - DNA, 592 bp, Homo sapiens
aaacaaatcctttgtaccaggcattgagaaagcaaaaaaaaaaaaaaaagtggggacagagaatgctgatgactgaccagaggtgcagatataacttcttctgttgcttatttttttcctctaaagtcttaagtgtttatatttacaactctctttacagagatctttaacatttattctctcattacatctcaatagcattcttctatatttaggaaaatagcatgggtctcattttacagatggtgaagctgaggcatagatacgagagactctcaaatcatatttaaagtaagaacttagagtagattgcaagtcctttgwtttctaatttaaccaccttacgactatgccttcccatgggagtttcatgtcactgcttctcccttttccttggcctaggcagagggaaaagatctacagttcatactcgaatatcaaacaattttttaaattagatagtcacctttaaaatctgaagagctgccaggtagaggaaagactacacttattctattttcacacaaaagacaagacccagagtaaaagctgaaagccatgggaaggtatattttctaaatattattttaaa

SEQ ID NO: 660687 - DNA, 562 bp, Homo sapiens
tatttaccctgtacactttttaaatctgcatccatttgacatacaacttgcatgcaccagcccccaacactaacaccattatacacacttaaagattctgatgtgccccttgcattggaggatgcagaagagaaacctgacagaaagaaatagggagaaaaaagctaaaggyttttaatcaagttgttagtgatttggtgtttgatacaaagccttaatcctcttttctccccaaaatcgtttataaaatgtatattactgctaatgctttctgaagttaaatatgttttctgaagatttcatgaatgcagagtttggcttcaagagcaaagattctccatggagacctggtcatatgttggttgtattagtatttcctatttttcagaaactgtactcagtgctacaaatggaaagatgaattctacgtgaggagacaaacactaacaaatagtaatcacagcactgccataagtgttaataaaaaaaagcaggcttatactattttacatggaaagaggaaaaaatgattaattttactaagagaggtcctgagaaggct

SEQ ID NO: 660688 - DNA, 605 bp, Homo sapiens
ttagtatttcctatttttcagaaactgtactcagtgctacaaatggaaagatgaattctacgtgaggagacaaacactaacaaatagtaatcacagcactgccataagtgttaataaaaaaaagyaggcttatactattttacatggaaagaggaaaaaatgattaattttactaagagaggtcctgagaaggctttccaaaggagatgatatttgagctgacctttgaagcataattaagagcttaccagaaagagaggagttaggaaagtcattaaaaccaggaaaaaaaaatcttagagaaaacattgtgttttagaaaactgtacatagattcatgtggttgaaatgcaagttgtgtgaggatgataaggcagaagtcaaatcacagagtcatggagaggaggtaagaattgctggtttgaagtcttagaagaacaaaataggattaatgggatcaatacatatgactaagctaagccctgaagaatgggtaacattgattatcataaacagatcacccaaggcggtcctcatcatgtcttttatcttctatatcctcttcagtacttaatcagtgctgagaataagatggtatgcacatg

SEQ ID NO: 660689 - DNA, 605 bp, Homo sapiens
ttagtatttcctatttttcagaaactgtactcagtgctacaaatggaaagatgaattctacgtgaggagacaaacactaacaaatagtaatcacagcactgccataagtgttaataaaaaaaagcaggcttatactattttacatggaaagaggaaaaaatgattaattttactaagagaggtcctgagaaggctttccaaaggagatgatatttgagctgacctttgaagcataattaagagcttaccagaaagagaggagttaggaaagtcattaaaaccaggaaaaaaaaatcttagagaaaacattgtgttttagaaaactgtacatagattcatgtggttgaaaygcaagttgtgtgaggatgataaggcagaagtcaaatcacagagtcatggagaggaggtaagaattgctggtttgaagtcttagaagaacaaaataggattaatgggatcaatacatatgactaagctaagccctgaagaatgggtaacattgattatcataaacagatcacccaaggcggtcctcatcatgtcttttatcttctatatcctcttcagtacttaatcagtgctgagaataagatggtatgcacatg

SEQ ID NO: 660690 - DNA, 537 bp, Homo sapiens
aatgaaattggcccattttttaaaaaatagtctagggccaaatttctagactccataatgaaatggtggaagcttgtcttttagaggagctaaatcactagcctactcactgttgttatcccagcttcaaatttcatttcagwttatccattttaataaaagagtctgtattatttacctttgccaaaaaggtttttaatcccctcattaagatttttaatagatattgcaagtctaggacaagagccactaagaagtaattttaaataactaccttgtcagcctcataggttatactggactgaagaagagtgattcgaacataataaaccagagaatgtcaacacctgttttgccattattttaacttgtgtttaatgtctttttgcattaaaactgtattaaagaccttcaatatagtatgacagggctatactgtatggaatagtaatattttaaaaaatcaaatgcagtttaaatgtttagagtatttatgttctttgtggttcagatgaacacaatagctaaatcattact

SEQ ID NO: 660691 - DNA, 537 bp, Homo sapiens
aatgaaattggcccattttttaaaaaatagtctagggccaaatttctagactccataatgaaatggtggaagcttgtcttttagaggagctaaatcactagcctactcactgttgttatcccagcttcaaatttcatttcagattatccattttaataaaagagtctgtattatttacctttgccaaaaaggtttttaatcccctcattaagatttttaatagatattgcaagtctaggacaagagccactaagaagtaattttaaataactaccwtgtcagcctcataggttatactggactgaagaagagtgattcgaacataataaaccagagaatgtcaacacctgttttgccattattttaacttgtgtttaatgtctttttgcattaaaactgtattaaagaccttcaatatagtatgacagggctatactgtatggaatagtaatattttaaaaaatcaaatgcagtttaaatgtttagagtatttatgttctttgtggttcagatgaacacaatagctaaatcattact

SEQ ID NO: 660692 - DNA, 537 bp, Homo sapiens
aatgaaattggcccattttttaaaaaatagtctagggccaaatttctagactccataatgaaatggtggaagcttgtcttttagaggagctaaatcactagcctactcactgttgttatcccagcttcaaatttcatttcagattatccattttaataaaagagtctgtattatttacctttgccaaaaaggtttttaatcccctcattaagatttttaatagatattgcaagtctaggacaagagccactaagaagtaattttaaataactaccttgtcagcctcataggttatactggactgaagaagagtgattygaacataataaaccagagaatgtcaacacctgttttgccattattttaacttgtgtttaatgtctttttgcattaaaactgtattaaagaccttcaatatagtatgacagggctatactgtatggaatagtaatattttaaaaaatcaaatgcagtttaaatgtttagagtatttatgttctttgtggttcagatgaacacaatagctaaatcattact

SEQ ID NO: 660693 - DNA, 654 bp, Homo sapiens
acctactgtgtgaaagttttagacctggttggtgaataaaactgaatcagatctaactctcactagaaagagcacccagttagatgatacttaatattcattacccagaaaaacatgttatattgtgatgtatttcattgtacctatgtaatatgtatgtaatgtgtaagaaatgtgtaaaatattgtaaaagtttatttttgttgtcttttgctttttaagttggagtcagattaaaatacagtatttgagaatgggatatttaaccagatttttttttaagtaagatctacttatgcaagaatagatagtacagggaaaaaatccagggatcagaggaataaagaaatgaataatagtggaattataaaacttgaaaagaacacaagggaacatctgtttctagtgatgtgtaaaatatgttgacccaaaataatctctcttctctgaaattttgtactattttattaacatttataatacattgccttattttgtatatacttgcatgtatccgtgagcccttgatgggaatcatgtgagtytttatattcccacagaaagtgcttagtatgtagttggacagaaaaaaatgtttgtccaggtcagaataagtttgtggaagagaatggtcctagaaatgatgggtatgag

SEQ ID NO: 660694 - DNA, 616 bp, Homo sapiens
acttccatgagtgattcattgacctcatatagttgttctcagactttggtgggtagcagagtcacctgaagaacttggtaaaaatacaaagaccctggcctcaccctatttcagcaagcctgggcttttgtgtgctgaatcagctctccaagtgatcctgatatacatcaaagtttgggaacactgccttactgagtactkactgtatcatactctacataagaatacatgaagacaaacagatatataagaagacatgggccctgactatgaaatcataacaattcaattatagtggctactttctccttagccactagacaaagacatgcaggtaatttctcccagtgagtcgagcttcttatctaagtgctagcaatatatggaagttgtttacatgatggttggaagacaagcttggcattgaacagacctggatttgaatccctttcccaccaatatctaatgatcttgaagaaggacataatacctctctgagcatcaatttcttccactgtaaaatggtgtgataatacttcctcataatattatatttaggaatgaataatcatggaaaacagaaaagttttaccacaatctcttgcacagaagaagt

SEQ ID NO: 660695 - DNA, 616 bp, Homo sapiens
acttccatgagtgattcattgacctcatatagttgttctcagactttggtgggtagcagagtcacctgaagaacttggtaaaaatacaaagaccctggcctcaccctatttcagcaagcctgggcttttgtgtgctgaatcagctctccaagtgatcctgatatacatcaaagtttgggaacactgccttactgagtacttactgtatcatactctacataagaatacatgaagacaaacagatatataagaagacaygggccctgactatgaaatcataacaattcaattatagtggctactttctccttagccactagacaaagacatgcaggtaatttctcccagtgagtcgagcttcttatctaagtgctagcaatatatggaagttgtttacatgatggttggaagacaagcttggcattgaacagacctggatttgaatccctttcccaccaatatctaatgatcttgaagaaggacataatacctctctgagcatcaatttcttccactgtaaaatggtgtgataatacttcctcataatattatatttaggaatgaataatcatggaaaacagaaaagttttaccacaatctcttgcacagaagaagt

SEQ ID NO: 660696 - DNA, 616 bp, Homo sapiens
acttccatgagtgattcattgacctcatatagttgttctcagactttggtgggtagcagagtcacctgaagaacttggtaaaaatacaaagaccctggcctcaccctatttcagcaagcctgggcttttgtgtgctgaatcagctctccaagtgatcctgatatacatcaaagtttgggaacactgccttactgagtacttactgtatcatactctacataagaatacatgaagacaaacagatatataagaagacatrggccctgactatgaaatcataacaattcaattatagtggctactttctccttagccactagacaaagacatgcaggtaatttctcccagtgagtcgagcttcttatctaagtgctagcaatatatggaagttgtttacatgatggttggaagacaagcttggcattgaacagacctggatttgaatccctttcccaccaatatctaatgatcttgaagaaggacataatacctctctgagcatcaatttcttccactgtaaaatggtgtgataatacttcctcataatattatatttaggaatgaataatcatggaaaacagaaaagttttaccacaatctcttgcacagaagaagt

SEQ ID NO: 660697 - DNA, 427 bp, Homo sapiens
caggtaagcaataataatagtacctggttttaactttttataacaaaagagtcattgaagaggggaagagagacggtctcaaatcactagtgccattctttccctatccccttgaagcagctgtgtggcatggacagagaatctgtgcactttgggagagcacagttactggggaactttttacattgcatttcagtgctgccctgtcagagtaaagaataaagccacgctgggtgcagccagtgccaacygtggagaaagtatttggaccagccctagccagaggagagtcacccaccccagcagttagaacttgagtttcttgcaagcttcatgactacaagctgaagtgctctggggttctaagtaaacacgaaaggcaatctaggacacaaggaccgaaatttccaggcaactcctaatgcaa

SEQ ID NO: 660698 - DNA, 547 bp, Homo sapiens
atataaggagctcaaacaactctatagaaaaatatctaataattcaattaaaatgggcaaaggatttgaatagacatttctctgaagaagacatacaaatggcaagcaggcatatgaaaagatgcttaacatcactgattatcagaggaacgcaaatcaaaactacaatgagataccatctcacaccagttaaaaatggcttttaactaaaagtcagaaaataacaattgctggagaggatgtggatccagcaattctacagctgggtatatacctcaaagaaagaaaatgagtatattgaagagatagctgcactgctatgtttgttgcagcactgttcacaatagccaagatttaaaagcaacctgtgtccatcaacagatgaatggatgaagaaaatgtggtacttatacataatggagtactattcagccataaaaaaggataacagcctgtcatttgcaacaayaggagtggaactggaggccgttatgttaagtaaaataagccaggcacagaaagacaaatatcccacgttcccatttat

SEQ ID NO: 660699 - DNA, 570 bp, Homo sapiens
atagtttataaagtactgaaagcaattttaccaagaaatgtgaagtwccattttatctgatggttttatagcttagagattgggtttctattttacctatttctttcccttgaaccgtatgaatttgttatgtttttcatgagattgccaaaaacaaaagaaataacctaagaattaaacaaggtgagttagaataatttgatccaaacacaaaggttcagcttaaaagcaaaaatgagtcccagcttatggtgacttcatagactgacagtgtctcactttgaaccatccctagctgctctcttccagccactacaacgtaatgacatataattcagcatccataacccaaggcgaagctaagtaaaagaactggtcttctgatggtatggttacatttaaacccataatccacaattctagtgactctatgagtatgttagagtcccatgtagtgaatggggccatgcataaatgtttctgttctcagctcttttcagactcacgataggactgcacttttttaatccatttgaagttaggtgagggtgtatgactctctggccaatg

SEQ ID NO: 660700 - DNA, 570 bp, Homo sapiens
atagtttataaagtactgaaagcaattttaccaagaaatgtgaagtaccattttatctgatggttttatagcttagagattgggtttctattttacctatttctttcccttgaaccgtatgaatttgttatgtttttcatgagattgccaaaaacaaaagaaatawcctaagaattaaacaaggtgagttagaataatttgatccaaacacaaaggttcagcttaaaagcaaaaatgagtcccagcttatggtgacttcatagactgacagtgtctcactttgaaccatccctagctgctctcttccagccactacaacgtaatgacatataattcagcatccataacccaaggcgaagctaagtaaaagaactggtcttctgatggtatggttacatttaaacccataatccacaattctagtgactctatgagtatgttagagtcccatgtagtgaatggggccatgcataaatgtttctgttctcagctcttttcagactcacgataggactgcacttttttaatccatttgaagttaggtgagggtgtatgactctctggccaatg

SEQ ID NO: 660701 - DNA, 570 bp, Homo sapiens
atagtttataaagtactgaaagcaattttaccaagaaatgtgaagtaccattttatctgatggttttatagcttagagattgggtttctattttacctatttctttcccttgaaccgtatgaatttgttatgtttttcatgagattgccaaaaacaaaagaaataacctaagaattaaacaaggtgagttagaataatttgatccaaacacaaaggttcagcttaaaagcaaaaatgagtcccagcttatggtgacttcatagacygacagtgtctcactttgaaccatccctagctgctctcttccagccactacaacgtaatgacatataattcagcatccataacccaaggcgaagctaagtaaaagaactggtcttctgatggtatggttacatttaaacccataatccacaattctagtgactctatgagtatgttagagtcccatgtagtgaatggggccatgcataaatgtttctgttctcagctcttttcagactcacgataggactgcacttttttaatccatttgaagttaggtgagggtgtatgactctctggccaatg

SEQ ID NO: 660702 - DNA, 570 bp, Homo sapiens
atagtttataaagtactgaaagcaattttaccaagaaatgtgaagtaccattttatctgatggttttatagcttagagattgggtttctattttacctatttctttcccttgaaccgtatgaatttgttatgtttttcatgagattgccaaaaacaaaagaaataacctaagaattaaacaaggtgagttagaataatttgatccaaacacaaaggttcagcttaaaagcaaaaatgagtcccagcttatggtgacttcatagactgacagtgtctcactttgaaccatccctagctgctctcttccagccactacaacgtaatgacatataattcagcatccataacccaargcgaagctaagtaaaagaactggtcttctgatggtatggttacatttaaacccataatccacaattctagtgactctatgagtatgttagagtcccatgtagtgaatggggccatgcataaatgtttctgttctcagctcttttcagactcacgataggactgcacttttttaatccatttgaagttaggtgagggtgtatgactctctggccaatg

SEQ ID NO: 660703 - DNA, 515 bp, Homo sapiens
tagacttaggtgtagcactgatttccctgaccccaaacctcaagatcagctaagtttacacaatgaaagcaaaccagattggagtaaagtgattccattcatttcagtcatgctcatgactgatacccagtgtcatgaccaaattgatcactcaacrgtatccatcaatctttgcaacactggaattgagcagattagttgtgctatggcctgttcatttcaccttctatagatacagctcaatctgagaggagaaagaagagtaagttaattaaagatagagggttccttctgatggtttatgaaaatcacctcatttcccttcttcccaaatttgtatgtctgatggacctaatgtgttctaggccttgcttcttcatgtgtattttccagatctgtagccttggcatcatctcaagccccttcccagactaactcactcagattctatattaaacaaggcctccttctgcccccatgacttctatgcatgccaaatttgagaagcactggtc

SEQ ID NO: 660704 - DNA, 515 bp, Homo sapiens
tagacttaggtgtagcactgatttccctgaccccaaacctcaagatcagctaagtttacacaatgaaagcaaaccagattggagtaaagtgattccattcatttcagtcatgctcatgactgatacccagtgtcatgaccaaattgatcactcaacagtatccatcaatctttgcaacactggaattgagcagattagttgtgctatggcctgttcatttcaccttctatagatacagctcaatctgagaggagaaagaagagtaagttaattaaagatagagggttccttctgatggtttatgaaaatcacctcatttcccttcttcccaaatttgtatgtctgatggacctaatgtgttctaggccttgyttcttcatgtgtattttccagatctgtagccttggcatcatctcaagccccttcccagactaactcactcagattctatattaaacaaggcctccttctgcccccatgacttctatgcatgccaaatttgagaagcactggtc

SEQ ID NO: 660705 - DNA, 512 bp, Homo sapiens
gtgctttcaaatttctatatattatcatattctgtcttcacagagtctggagacataggtggtactttttatattttacagatgactaagctgagtattggcaggtttaatgactgccgaccaaggtgttaatgttaagggcaggactaygcccaggtgccacagggccctaaaaccctgactctcagagcctaatccagcattgctcccattataagggcaggtgttcactcagactctgagtaaatgtcggagaaacaaatttactgtgttacaaggcttctcttccacttttaacagtgtgagctacctagcttaactttcatagagtgttccttattctacttcaaagaccgcaggacaggctaatccttttatatcataatctttttaataattgaagacaattatacctgttccccaatcttaattctttttaaacatctttccagattttttcgatgacattggtagcagatttttcttttccccatatagtgttaaaactagag

SEQ ID NO: 660706 - DNA, 582 bp, Homo sapiens
tttatatcataatctttttaataattgaagacaattatacctgttccccaatcttaattctttttaaacatctttccagattttttcgatgacattggtagcagatttttcttttccccatatagtgttaaaactagarcacatacaagccagagatatcattttcacctcctgaacttctttgatttggttcttcccattcactacgtagcccaacatacacacccagacacttgtggggaaaagccctctgtattagtccattttcacaccgctgataaacacttaccggagactgggcaatttacaaaagaaagaggtttattggacttacaactccacatgactggggagacctcacaatcatggcagaaggtgaaaggcatggaggagcaagtcatgtcttatatggatggcagcaggcaaagagagagcttgtacagagaaattcccatttttaaaaccatcttctgagacccattcactaagatgagaatagcatgggaaaggcctgcccctgtgattcagtcaactcccaccaggtcccttccacaacatgtgggaattatgggaactacaaga

SEQ ID NO: 660707 - DNA, 588 bp, Homo sapiens
agaatagcatgggaaaggcytgcccctgtgattcagtcaactcccaccaggtcccttccacaacatgtgggaattatgggaactacaagatgagatttcgatggggacacagagccaaaccatatcaccctctttaaaatattgtattctgtgctccaaatgcaaactagaacattgtatggggaactagtcaacattccttttaaagcttaatgcccacagttaaacacagcactgcacatgtgatcttagattgccatctctattgaacagaagccatgcacagcatgctgtatcccatcttccaccctttctaatccaaagactctccctttaccctgctcctcaaacatgaccaaccttcctaaggaaaactcctaaatatgtcttgggagctctgacttagattctttggcttctctttcattttaaatcctggaaaagttcaaattggatcacttaggtaaccataatgagatctctacattttcaagaatctattctcatgtaataataccttaaaaagaaaaaaagaaacgtccttcatttaaaactagaccgatgatgtgtcaatatagggtcataggt

SEQ ID NO: 660708 - DNA, 580 bp, Homo sapiens
tttccatacattctgctttgctgtgtatgaaatctccatacattctgctttgctgtgaacctaaaactgctctaaaaaataaggactrtcttttttcttaaaagagaaaaattaaactcaaaaaattaaaaatgggttgattttattttctggattcttccaaataatcacccgaagttttaaaagaattaacaagatgccaatttttaaaaaagaaatagtaaaaccttaaagtttacatggaactgcaaaaggcccccaaacggcaaagcaatcttgagaaagaagaacaaacccagaggcatcacacttcctgattctatggtgatacagttaatcaaaacagtatggtacaggcataaaaacagacatattgaccaatggaaaagcatagagaactctgaaataaataaatctacatacttacaattaactgatctttgacaaggaggacaaaaatatacataaggatgaggaaaagataggctcttcaataattggtgtttggaaaactggatatctacatgcaaaagaatgaaattgtcccttatcttacaggatgaacaagaagcaactcaaa

SEQ ID NO: 660709 - DNA, 552 bp, Homo sapiens
tttatgcattgcaagaaatacattcattggtttgctgcttctgacaggtcttcacttgatttaatttagggcttgaagcatgttaacattactttagaatgataaacatagactgctctaatgaaagtttatgctgaatctctctcaccctgtaacaattttttacagagcaaaacaatacatttcaaatctgttattatttagccattcttgattttccaagaacagtgttaatagaaaagtgccataaatggaactgacaacaacatataagtttgttaaaggatggtagaaacctcagaaaagtccccagtagagttgggctayaaaattaggtttctaaaaaacagatgatttcccatcctaaaattgcagccatcctccatattatttttcaaagtgaacaatccaagggcaattcaactttatatggcattttcaatgggattttaaaatgcacttcttgaatagaaagatttctgtattataaagccattatttagcatttctttttctccccctcagtatctggatttattcctcttttcccca

SEQ ID NO: 660710 - DNA, 552 bp, Homo sapiens
tttatgcattgcaagaaatacattcattggtttgctgcttctgacaggtcttcacttgatttaatttagggcttgaagcatgttaacattactttagaatgataaacatagactgctctaatgaaagtttatgctgaatctctctcaccctgtaacaattttttacagagcaaaacaatacatttcaaatctgttattatttagccattcttgattttccaagaacagtgttaatagaaaagtgccataaatggaactgacaacaacatataagtttgttaaaggatggtagaaacctcagaaaagtccccagtagagttgggctatraaattaggtttctaaaaaacagatgatttcccatcctaaaattgcagccatcctccatattatttttcaaagtgaacaatccaagggcaattcaactttatatggcattttcaatgggattttaaaatgcacttcttgaatagaaagatttctgtattataaagccattatttagcatttctttttctccccctcagtatctggatttattcctcttttcccca

SEQ ID NO: 660711 - DNA, 552 bp, Homo sapiens
tttatgcattgcaagaaatacattcattggtttgctgcttctgacaggtcttcacttgatttaatttagggcttgaagcatgttaacattactttagaatgataaacatagactgctctaatgaaagtttatgctgaatctctctcaccctgtaacaattttttacagagcaaaacaatacatttcaaatctgttattatttagccattcttgattttccaagaacagtgttaatagaaaagtgccataaatggaactgacaacaacatataagtttgttaaaggatggtagaaacctcagaaaagtccccagtagagttgggctataaaattaggtttctaaaaaacagatgatttcccatcytaaaattgcagccatcctccatattatttttcaaagtgaacaatccaagggcaattcaactttatatggcattttcaatgggattttaaaatgcacttcttgaatagaaagatttctgtattataaagccattatttagcatttctttttctccccctcagtatctggatttattcctcttttcccca

SEQ ID NO: 660712 - DNA, 612 bp, Homo sapiens
ataaaatgctaagaaacactgagccaaaaattttaaaaaggagagtggaaaaggaggacaatgtcatcttgtatgtgggacctaaagctgtgaataatatcttcttgaaagggccacgtgggttaaaaagacaagagagcaggggaggaagccctcaaggactccaacatctaagtgataaagtatacaacaaactttccaaaaacaagactaagaaggggccaccagagatgcaagcgaataacccaagagagagagaattgtcatggaaaccaaatgaagaaagaatctcaagagatggggagtggctaactgagtcaaattctacagagaagccatgtaaggtgagaaccaaacatcactggctctggtcacaaagaggttgtttgtggtatttgctgagcagtttagtggagctacagagacagagatgaagcctatttctaattgtttgaggaattaatgcaaagtgagaagtggagttatttattgtagatcgttatttcaaaaaatgtttctaggaaggtaaggggaaatataggtttctagctcaagaaaaatgcraggtaaaattaaggtttttcttttataataggagaaacttaagagcca

SEQ ID NO: 660713 - DNA, 571 bp, Homo sapiens
aaggattctcaaatactggaggcaataatagtcttgaacaaatggaagatgggtacaaactgagatgtttctaaacagttgggtagaacctgagaatattcttccgatacaactaagttgctggacatgggaaagaaggagacaggacaaagatggaggacagagagaagtttggaaggatccttgaatgaaaaggctgaggaaaggaaatggactgatagggacatgcataaaaattgcccattactgttgaagtggtactgtgcttagaaacataaacttctggttccaatctagttgtaagcagatgtccattcttaatcctggacctaggggttgggaaatgtggcagtattactrtgagattcagcaacagtatactcaagcatcaaggggacactgaagcagacaaaatggcaagtgtgcattctgaaaacttgtgaagttattaagaggctcaacatccctcataaagatttcagcatctacctctaaattccatcctgctttcctataccctttgggcaaaaacaagccaaatgtctcttcttcctaccagctgcatactccc

SEQ ID NO: 660714 - DNA, 610 bp, Homo sapiens
ggtgcattagtaaaatcacatttagcccaaatataaagtgtgccaaagctgcttaatcattgttttgatagtcaaaataccatcacaccagtttcacagtacagggagaaggaagactcttggacgcctctgcttcccattattattggtgaaattaattatttatggagctcgggcagtgtaytaggtgctccaaaagatgcaaacaaggtgaggtttctgcccaaaaggcacaggagaaaaatcagagtagtaaagagttctgacacatacacccagccagtgagtgatgatcaagtgtatgagggtcttttgctttgatttttcagtttgctcaatgttttcagttttcagcctttggaagaatcacaaagtgaatattgttactaaagaatgccatggaaggtgtaagctatcaggaacctcatccatgagaaatattaatatatatgaatctggacagtcaatgttagctttacaaactatggagggcagcaagaaagaacccagatcctggaaggtgttccctgaattgagtgatttggacctggaggattcactagtggtgattattttatatttattatagagtccacaactacagcttttc

SEQ ID NO: 660715 - DNA, 582 bp, Homo sapiens
taaagagaagtatctcccccagcatgtgctcatgtattgaagaaggtactcagaataataagaattctaaaaactgctaatagccttggtagaaaaacatagtagttgttaaagaaaaccaagttttgaagaattaaatggtttgttttgtgccagcccataaatctggtatgtagcaatgagatttctgacctacttccaattgtgtatttggtacycaatcctacatggaagtcaattgacacttccagagaagacttaggacaaactcctaagaactcataagtctgaggcatgacaatgaaagtctgagaggaatcagagtttcattcattcctaattccaaataatgactggagttttgactccagtcgaaaggaaaatatacacattaaaaacaataggtttggggctaaagagattgtagctctaatgagctatgtgtagcatgtggggtccctgatttcaccccaggaaaatgagctgagaaacagtgtcttatggagaaactgaagtgtacacattgcccagggaaaatgagctgagagacagtgtcttatgaagaaacggggggattcccag

SEQ ID NO: 660716 - DNA, 549 bp, Homo sapiens
tgccatgtgcatgcagtttgttgcagtatctctcaattatttatggtacagggatagcacagataaaagaatcatagcatctcaaggttggaagtgcttaaaggtcatgcagttcagtcacatatatgatggttaatttaactccgtagccttcttcctgtaccaggtakacttctagcatgtgcttaaatatctttagctgtggcaaaaggctagctcatttcatccttgagtaattccattagattttggctcaatctaaaggacaactctttctattccctctgtaacttccatacctattctatgataatgaaaggcaaggaccgtgcttttcaatctttgtatgttggtacttattacagtgttcaaccgacacatagtagggtttcattaagtgtttattgaataaaattgaaatacagagataaaaattgtgtcacccaggccatcttctcttcaggccaaatattccccagttcctttaagacttctttagttgtgactttaacttcctaatcatcctggcaccttctcattgaatgactc

SEQ ID NO: 660717 - DNA, 556 bp, Homo sapiens
tttattataacataacaaatataatgaactttggtacaaaatatttccatggtcatgttccatctcattaggaaggaattataaagatttaacttataaaggtagtagccatcaacctgagagaaaatgtaaactgtgtagaagaatgctaaacgcaatgtattttgttgttgttctggcccaaagagcaagaacaataaagcacatgccaggtactcccggatcctaaattgagccacaagcccttctataaaacacatgctaagagattcaaaactaaccctgtaaccattagttccttatctacaattagactatttaataatccaatccttttaaaaaaggcaggtagaaaataggtctatgggaagaactgtcagtgtttcatgaggtcctgccccctgtcagagggcaaggtgagccaagtgaggaatatttcaagagaactgctcagcactgtatgtgggtctcctcrcctttgagaaatccaggaactagtaatgctacattaaagatgctctgatgttagaacaaggagaggtggctaatttatggt

SEQ ID NO: 660718 - DNA, 510 bp, Homo sapiens
cacagagaagctaaaggatctgcccaagatttcctcctgcagtaaggagaaacaagcaacagcatgtttccagggacagtcataaaaaagaagttgttcaccccaacatgctaaggaaagtcagaaagcaatacactatgtcaatcatattctatgataaaatrtgtgtttccagaaattaaaacagtcctaggcaaacagtaactacccaataaatgcttattatttgactgagaactgtaaaacctttaatgatctttccttatccatttagtgcatcgctggcagaatctacatctccaacttttattgaatacactggatcacatagcttctgtcctttgtggcttattttccattggagacaactagtttcctcagcacagaccaaataatgaggaccataaagcttgctccttttaaagcatttatagtaaaataatttagttctctgagtttgtacatttccccgtacagaaccaagttttctttggtaggttgttcaactaa

SEQ ID NO: 660719 - DNA, 595 bp, Homo sapiens
gaaatggcgagaatacaatttttatcaaagcagcaacggtaaaacaatagcacaaaatagaaagatggagattgctactatttattctaggatttttacactggaaaattgaaaattaaaacatcaaagaagtgttaaatacctgcgtgatgccatgacctcatctgcctctcttctttgccctctcgtgtttcatctctcagtttaaactgcactcatagactgaatatctttatattygactgtaatttatatttacatgcagacccatttgtaaactagagaaaattcaaagtggatatttatttgtacaactagctcctaggccagtagtgacagtcaccatacctaaatactagcccatcaagaaaagaaaaatgctacatggaattaaaaatgtcaaccaagtaagaacactgagggactttctgtcaaaaaggacaggtgatgctattaaatgacctgcttttctaattataattaatttttttgtagcatataaaatgcatgcttagcgaaaatatttggaaaataaggaaatcgttttgatattattaccaagaaataaagactgcaatattttagtgtaattata

SEQ ID NO: 660720 - DNA, 561 bp, Homo sapiens
ctggttttccctctggtttcatcaggtctttgaagttcatggacaagctgcttcccaggagcccaggccctctctgcctcaggtgtgtgttcacgtggcatctgggccttctgggctctcaccacaccttacatttgatcttcctgaaatatggcccacgttggygcatcctggggccctgctcaggctatccctgagcctgccgactgctctgtcttccagagtgagctaaacacagtctcttctccttcgcaggctccaacaactactcccgcaggcagcgtgaatgcttccttcagctttcctttctgctaaaaggctactttatatcaccacctccatggattgccatagaattattttggcttctcttcttgcatccacccttagactacgtcctgcttatagaaatacattgactttgagtttatgtcccctctggtaggttcatctttgtcttcccagcaccaggcataggtagactttgcaaataacaggggcagaacaaatgacattcaagaatggttgtgtctatacctgggcactgatcttcaatatgga

SEQ ID NO: 660721 - DNA, 539 bp, Homo sapiens
atattaagggggaaaaaagtgcttgagcaattgaattcatcccctttgacttcactcctaaaatgtttattttatttcttaaaaaggtaagttagttaagcagtgaaaatgggatatgcactgtccaattaaaaagttaacaaacattttttggcataggagaggagttgttcccaccatagtgactcaagggaaagagatggggaaggagaaatagccttttctcccaaaggtcatctggccacagaagccagrgacgtactgactgtcctggtgtgggtgccaggcatcggagctgacgagcagagcattaagggcatgtgtgcatgcagccagcttccttcttgctctttgggttgtagaggtcataagtgatactgctttggatccaggtaatctctttaaggctttgatggttattctccctcatgtctcgctacaaaactttttttgaggagtaggagaaaaatggaggttatttataccaacttataaatgaggaccttgacctccagagaggtcagaattacctagaaagc

SEQ ID NO: 660722 - DNA, 495 bp, Homo sapiens
tgctatttctatctttcaaattagatttatttctcaaacttaacttaccagggtctttgttctaatcccagattgtatcaactggcaattacttgctttcaggaggtacagcaaaatttaatcttttgataaaaacatttaaaacaactattatttgtgatgcttttttcagataactgagtgaaaatcagttttatcttaagtaacagttcttatcgtattatgagaattgtatttctggcactaaaagcaaagctcttattagacctcaggattagtgatctttgggaaacatttaaggatcatgagcccagattgcaaacctaggacctcatgctaatctgagatcctttctattgacaagagtttagtcatcgccagaacccgaaatccagaccgttccaagcccctttggcaaaataggtgcctctgttacaggyaatttgtgctttaaggtttcatcttggtcattactgctgctgcagctgatttaaa

SEQ ID NO: 660723 - DNA, 514 bp, Homo sapiens
atttgcttaatgctatgcaaataagcttgaaattctttacgaaataggtggttttctaagaaatcataaataaacaagttgatctcagatggatagactttctgcatataaatagttccgtaaaagaaattgaagactttttttaaaaagctgctcctcccaaaatccctggctgagatagttctaccaatgaaatcctcaaattttaaggwatgcattacttcaatgttctttgactctttgggagcatagagaaagaagagaagcttctaaattccttttgtgaaaccagtctaccattgattttaaaactgacagagaggataaagtaaaactacagacgaatctcacatatgaatattgatgaaaaatcctaaataaaatattagcaaatagactccagcagcacactaaactagtttgaagatggcaatctgagcttccccctccctgcacccaatccatagaaatgatagtaaagctattttgaaaacaaacaaataaattcatgcac

SEQ ID NO: 660724 - DNA, 546 bp, Homo sapiens
tttctgtacagctaatacccatttcacttgtctttgcatacataaaatatactcaactacactcccaggtaaacaatctcaaatccagtatactcaatctttcgacagtatgctgagacttagtctttctactcttcaagttcagagatgggaagctgaggagagccaagaagcacgctcgttcatgctgcagaggccccagaaaggtgggggagaccmccctaaaacaatgactcagagagggataagatcagagatttaaaaacttcatttaacaagagtgtacagattaaaatttcaaggcacatgaggaaagctgacatcataaaagttacctaaatacaactaagggaagatgtattttcataaggaaatagaaataattatgtaattgggaaaagactctaaatataagaataaagttctcaaagtgataagaatgaatagcatacagaaagctagacagaagactaaaagaaaacagacagattgatatgaactgagaggtagtaagcaattagaaaacccacaattgtaaaatataga

SEQ ID NO: 660725 - DNA, 468 bp, Homo sapiens
aagattttacagcgagcaacaggagagtctgaggaggtgatgggaatacagtgggagagggggccatgacatcatacagcaaagagtactcagggtagaagcactggaaatgcaaaagcctttcagtgggagggcactgggcatgtctggggaagaactggggaggggaaagggaagaaaggatgacaggacatgaggtcacatatgcaggtggggcaaaataagagggggtctcatcgatgttggaaggactttgggttttattttcaggattctgagcagagttgggacttcattgacttatattttagagaaatctstctgtgcaaagaatagacacagggcagcaaggatggagcaaggccaccaggtggaagacaaccacaacaacggaagggaggggtcactctgtctggggccagggtgctggaagcccagagttttccgatgtgaagtatgagcagaaca

SEQ ID NO: 660726 - DNA, 468 bp, Homo sapiens
aagattttacagcgagcaacaggagagtctgaggaggtgatgggaatacagtgggagagggggccatgacatcatacagcaaagagtactcagggtagaagcactggaaatgcaaaagcctttcagtgggagggcactgggcatgtctggggaagaactggggaggggaaagggaagaaaggatgacaggacatgaggtcacatatgcaggtggggcaaaataagagggggtctcatcgatgttggaaggactttgggttttattttcaggattctgagcagagttgggacttcattgacttatattttagagaaatctctctgtgcaaagaatagacacagggcagcaaggatggagcaaggccaccaggtggaagacaaccacaacaacrgaagggaggggtcactctgtctggggccagggtgctggaagcccagagttttccgatgtgaagtatgagcagaaca

SEQ ID NO: 660727 - DNA, 630 bp, Homo sapiens
aaaaaaactaataaatccacaatcataatagaagattttaacacattcctcccagatcaaatgtcacatcaagtaaacaaaaaataagtagaaatacaaaaactttgaatataccactaacatgcagtgccaaacagaaaatacaaaccttttcaaattcctctgacagagacaatagaattgaatacagataatgtatcaaataaaatatcaatatattcacaaaagcagaaaataggaagaaaaatatctgactatagtatttgtataaataagaacgataggaaaaacaaaytaaaagttttcacattgaattggaaatttatccctctgcatatgtcttgagttacagaagatattaaaacagaataaaatacattttagaaataataaaatgaaaaaactacaaaacaaacccttagagatatgaccaaagaaatataaaggaaaatttctagtcataactgcatttattagaaattgaaagctggaaaaaaatattgagatttcaacttaaaatgctaaaaatacaataaaattaaacaaattagaataaaaaattaatcaatttagaggcagagatgtcttacatagggaacaaaaaaaggtataattaatagattccaaagc

SEQ ID NO: 660728 - DNA, 528 bp, Homo sapiens
gccacagagattaaactcaaagcaaagggcatgaggaaaaagaaattactagggtttgctgaaacttctactgaattaaaattttatttttagacttcacatattgtctatagagaaaaataggaggaggaatcaggaagtgaaastcacttgattttgaatgcaagctcagtgatttatcatccaggcacctgatctttcatattctcacttttctctttttcctctggtaaaatggggttaacaaacctcacctcagcaatgtggcctatgtgtagccagtggttctttgattaagattctagaattgtttgcaaaatatagaagaggtggcaatgtccttctggagatcccatccaagaatataaattgtctggagaagtgtgggctgcaggttcttgtttggatttgaattgaaataagcaaagcatcaaccaagctcctggaccatcataggcattcaagcagctatagtcaatattatcattgttatgctcaaattcctcctgacaaaacttatttgggcca

SEQ ID NO: 660729 - DNA, 552 bp, Homo sapiens
tgcgccgtgctgtcctgttccaggcactgaacaccttccacatggttggtcagaggtggtttcctggggttcaacatgcacagttgaacagggccctgtgcttagaaggaccctgatcttggtttaatgctctgatgtcaccatcttgaaattcttaatttttgaacaagggactcagcattttcattgtgcactgggtcccacaaatgatgtagcaggtcctgtgcttggcactctacttagccctcatttcccaaagatacatcaagtcttccagggaagaccctgcagttttatccacaactcagacatgtgagcaagcagtacagataccgaaaaaaaaaaacctcctctcctccagctgcctgaactggtcccccaaatgctatttccttggggcccctactcacccctccttgtggcagtaactcacgtcagaccctcctcctggcaggccgcccccgctcagctctcaggttcctcatctcatcccacagcccacctgtttacagcgaccycaatcgagcgtgggctgtctcctttcttggcctc

SEQ ID NO: 660730 - DNA, 620 bp, Homo sapiens
tatctgaggagctgtgaaggagtggagaggacgagggmtgcgtgtgccagtggggttggctttccagggcttgattgattttctccttctgttgatgctcttccacattgcccagggcagggctctgaggggcaggcgcaggaaccagtggagcgacattcttggcagcctgtttgtgctcccagcagagaggctttgttctaggcccaaattcccaggcctcccgctgtctggggaggctgcccaggaagtgcacatctgcctggccttcacctccctgaggctccccccgaccggccccaagtgcaagcacaggctgagtgcttatctaaactcctgggacagaagagactatgcccagcacctgaacccctggaggagggaagcaggggacagcttggtttttccctcaccaggaagagaacactgataccaatttgtatattcattgagttctccatccatgtaacccaggtggtcactgtgcccctcccccacccccagctattcacacttaaacttgtcccaggatttcgagagtcgcagccctgggcctatgagctctgcttgtctctgcagctcacttcctgcttctgtctgccttggtgctcctgcatgta

SEQ ID NO: 660731 - DNA, 370 bp, Homo sapiens
actatatcctcacgtattgaagagaaagagatcatctttctttctatctcttcttgtaaaggcactaatccattcatgaaggtttcacccttatgaccttattacctcctaaaagcsccacctctaagtgccatttttggccaaggtttgtggcaaccctgcattgagcaactctatctgggccatttttccaacagcatgtgctcactttgtgtctctgtgtcacatttgggcaattctcacaatatttcaagctttattattactattatatctgttacagtgatctgtgattaattatctttgatgttatgattgtaattgttttagtggtgccataaaccatgtccatataagacaatgaaattaa

SEQ ID NO: 660732 - DNA, 370 bp, Homo sapiens
actatatcctcacgtattgaagagaaagagatcatctttctttctatctcttcttgtaaaggcactaatccattcatgaaggtttcacccttatgaccttattacctcctaaaagcgccacctctaagtgccatttttggccaaggtttgtggcaaccctgcattgagcaactctatctgggccatttttccaacagcatgtgctcactttgtgtctctgtgtcacatttgggcaattctcacaatatttcaagctttattattaytattatatctgttacagtgatctgtgattaattatctttgatgttatgattgtaattgttttagtggtgccataaaccatgtccatataagacaatgaaattaa

SEQ ID NO: 660733 - DNA, 612 bp, Homo sapiens
catagctgagctcccttccagatttataatatatccattcccccaagtgcttgacatggatgtgttagagagttgaagacactctttaatgttcaatatttctgtgattaacgttttattggacggtgggcaatggaaatgctatccccgcacaagagaattcaaataggggacattgtctgttgcataaaacctccatttaaagattttttttaaatgttttaaaagtgactttggaaggaagcttcaacctgaggagaaggatcaaaagtaaaattgatggcttcaggatggaatttttcccttcagtaacttagccatcctgatagagataatgctgtccacctgtcaaggcgaggcggcmggctcactgcagagaaagacagcaaggaccttcagagcctgctcaactccagaagcttgttaaggggctgggagagaaagagcaattgccctccctcttgtccttcccctgtcctctttctccaagcctgagagaggactgcaaggccactggtccccagaaagctgatgaggatgagtggctcacggttctgtgtggcttgttaatcacaccagctagcagtcctcttcctatgtgcctgccactgt

SEQ ID NO: 660734 - DNA, 525 bp, Homo sapiens
ttttgctgtggccacagcacccaccccagtgtaaagagtctattgaatgtggctggggggccatgggtcatgggagcctgtaatcccagcactttgagagtccgaggcaggaggatcccttgagctcaggagttggagaccagcctggacaaccgagcaaaattccttctctacaagaaatacaaaaattagccagacatggtggtgcactcctataatcccagctacttgggaggctgaggtgggaggactgcttgagcccaagaggtggaggttgcaaccagccaagattgtgccactgtactccagcctggatgacagaaccagaccctgtatcaaataataataataataattttatttaaaaagaatcagctgggcttggtggctcatgcctgtaatcctagcactttgggaggcccaggcaggtggatcacttcaggccaggagttcgagaccagacttgctaacayagtgaaaccccatctctactaaaaatgccaaaaaatagctgggcgtggtggt

SEQ ID NO: 660735 - DNA, 519 bp, Homo sapiens
ggtgaggggcccttggaggagccggtccctccacagtgcctgcaacaggctgggggcccagcccaacactagctcctcactgagcaccccctccatgtctttcttaaccagggtgtagaggcaagcactgaaggcccatgatcagccgtgggagccacgggaatcaattgcttccagtacgactggatgcatcggaaagagcctggggcaaggctggaggccacaagaggagctgccaggccacataagcagggaacaaagccgatgatcacacgcccatcagtgagccaacttggtgaagggaaatgcccaagttctcagcacctgcagagcytaagacataacaagcagcatgccctgacgctcaccaaggccaggtgctgtggtaagtatttcccatacattgccttgcttgttaaaatttcactatattcctacatgggactaactatggcttagaaaggcaaccactgtggtagagagtgacagagacttgccaactctgctgtcccacagcct

SEQ ID NO: 660736 - DNA, 603 bp, Homo sapiens
tggggctagctaatggcagttatgggggaatactcagctctgcacatttggatcagagaagcatgctcttggccacctagcaagtatggagacgtccctaccccccactgagaaataagactcccatggggatgggctgattcctctttttggaattcaggatctggtataaaaatgggacccttaattttgggcgatctgttttgccttctagctgtgcctgcttattaggccatagaaacgatatgctttcctggccctgttcctccaagggytccattctgaagccagtaatccaatttaaaaagtgacagatgaaaaatcttacaagtactaaatcttcttctgtctgtgtatttatatgtgttgtgtgtgtgatatgaaagagctttaattaattggcttaaaaaataagggcttaaataaaatattttatcagagaagtaaaaagtgtaatgccttttagttcatgtaacttaaataagctttggcaaataaaggcagttttaaagattattggtaaaataaaaatatcttcaaaatttagacatttcatttaaatcaggcaggtcagatactaagtttttcaaatgctttaaggtc

SEQ ID NO: 660737 - DNA, 531 bp, Homo sapiens
tgcacttctgtctggttcctaggttccacatctagtacataattaaaatcccttacttaccaaggtttttcaaaaataaaagtcgctaagagttaacattgtaatatgtaattgagacactggagaaacagttttacaagcaaggtgtgtaagaaaagtgaaatgtgttttggtaaaagattataagaaggcatgraaatgtagatttttctgcctagattaaagggttaaagggttgtgtcaagttagatagggtaaagctgaaggtttaagccagttttggaaggcttgtgaaaaactaatgttgtaaaagaaattctgtgtgtgaacatattggctaaagttaaaggggtattattcagttttttcataaagtgagcattgaaataaaagcacagcaggttttctttagagcactgatctgctcttcaacaaaaatttgtaaagggttataaaagatttatgagaatcttaccttatggtcaaactgattaaactggatagatttgtctataaggttttattaagaat

SEQ ID NO: 660738 - DNA, 586 bp, Homo sapiens
taaaattgttgtatgccacagaagtaacaaaaatttctttgttaattgtggctttaatagtggctgtcctaaaactttttgtcatctgctgacaattgtcttgtttttgtcctcttcaaaaggtggttttataatcagctataggaattttacaggtgctctttaatgcatgtttctgataactttggagattgtgacactagagtaaaggaaaaaactttcaggattcctggaaagctaaaatgttcatgaatatcaagcggaacggagttaactgcatgaactgcattaatagaagactgaagtaawctttttgactttttgcttaaaatgttcctgatgctttgttttctttttgagtcaaggaaacttttcttttgagccattaacagcttttaacaattgagaaaagtatacttctgtgaacaaaatttggagcatatttgtttctctctacctgatttctcaaaaatttggaaactactcgttagtattcttaatttatggcagtatagttatttgcataagtgcaataagaatctgttttcttttgtaacagtacacagttggagaaactggttatttt

SEQ ID NO: 660739 - DNA, 618 bp, Homo sapiens
actcttctgctgcctcttgatcagcagaggttgcttctgttatgccgacatttttaaagccaaatatctttctaaaattatcaaaccatactttgctgggattgtattcttcagctttagatcctttgctttcctttttctttaagttgtcatataacgacttcacttcttctcaaactgtattaragttgacaggtatacctttcttccagcaatccacacctatataaaagctgcattttcaacatgagataaaaagttatttcacaaaaaatgcagtttttatgcctgctggtgtagctgcagtgaagcttcacaattttctctttatttttaatattatttaacttttgagatgggatctcactctgtctcccttgctggagtgcagtggcacgacatggttcactgcggtctccacctaccaggctcaagtgatcctcctgcctcagcctcccaagtagctgggactgtaggtgtgcaccaccacacttggctaatttttaaaattttttgtagagacagggtccccctatgttacctgtgctggtcttgaacttctgggctcaagccctcttcccgcctcagcctcccaaagtgctgggattacaggcatga

SEQ ID NO: 660740 - DNA, 618 bp, Homo sapiens
actcttctgctgcctcttgatcagcagaggttgcttctgttatgccgacatttttaaagccaaatatctttctaaaattatcaaaccatactttgctgggattgtattcttcagctttagatcctttgctttcctttttctttaagttgtcatataacgacttcacttcttctcaaactgtattagagttgacaggtatacctttcttccagcaatccacacctatataaaagctgcattttcaacatgagataaaaagttatttcacaaaaaatgcagtttttatgcctgctggtgtagctgcagtgaagcttcacaattttctctttatttttaatattatttaacttttgagatgggrtctcactctgtctcccttgctggagtgcagtggcacgacatggttcactgcggtctccacctaccaggctcaagtgatcctcctgcctcagcctcccaagtagctgggactgtaggtgtgcaccaccacacttggctaatttttaaaattttttgtagagacagggtccccctatgttacctgtgctggtcttgaacttctgggctcaagccctcttcccgcctcagcctcccaaagtgctgggattacaggcatga

SEQ ID NO: 660741 - DNA, 585 bp, Homo sapiens
cccattcctacctctctctatccagctattccttatttacccatctgccatccatctatccatttatgtatccacctatccctccatccaaccactaacatgcccagcaacccaggagaatgactattgggtatataaccaacagcttgccataggatatgagaatctttttttttttttccgatatggagtttcgctcttgttggtcaggctggagtgcaatggcgcaatctcagctcactgcaacctctgcctcccaggttcaagcgactctcccacctcagcctcccgaatagctgggattacaggtgtgtgccatcaaccccggctaattttatatttttagtcaagatggggtttctccatgttggtcaggctggtcttgaactcctgacctcaggtgatccacccgcctcggcctcccaaagttctgggattacargcgtgagccaccgcgcccggccgagaatcttcagttactatatttaaatcattttttctcgattcaaatcagtgtttactaatttgctattaagttcatagtgttctaagcactgctgggtaggggtcaggattcagaaagaa

SEQ ID NO: 660742 - DNA, 625 bp, Homo sapiens
agttctcatgcctcagcctcccgagtagctgggaacaggcttcatccgggttcaagcaattctcatgcctcggcctcccgagtagctgggactacaggagtgtgctaccatgcccggctaatttttgtatttttggtagagatgaggttttgccgtgttgaccaagctggtctttaattcttggcctcaggtgatctgcctgcctcggcctcccaaagtgctgggattacaagcatgagccactgtgcctggcctcattaattcatcgataaatgtttctgtatgaatccctcaacaattaggactcttttaaagcataatcccaaacacgattttcacattgctcaaaaattaaaaacaattccttgatgttaagtatccattcagtgttcaaatttccccaattgtctcatgaatacgtctcatttttattgtcactgtagtgtagtttgttygcaagaatcagaatccaaagtccatatgttgtaattggctgatatttctcttaagcttctgttaatctataaattctccttatgttttgttttttttttcttttattccttttccttccactttgttgatgaaacctgtaacttttttcctgagaggaaatctggccgcc

SEQ ID NO: 660743 - DNA, 621 bp, Homo sapiens
catcagggttgtcctccagcgctgctggcggctccggcgtgggagagatggaggtgatgcggatgctgggacactcgagaacacggccacccccagcacccccagcaccccctcctggtcctcccagcctcaccgacctggcgggctggctctcccaggtgccaggtgagggggctggtcgcggcggtggcgaatgcatgccaggccgagggggtggaggtcggggaataccgataggtgcagcgccatagggagggggctctcccaaggccagacggcagcatggcggggcatcctctgagtccagttctgtcaaaatgggaagaggagcagagggagagggggaaagagagaagcaggtgagatggctatgttccttgagtggccaggccrcaagtccttctatgctccctgcccctcagcaaagagaccttctgagccacaagacaaaagcagagttggacctgggaagatggaggagattgaagcaggcatgccaggcctttgcccactggcccctggatcctaggaccgagggtacccgatccagtgggtcttaaggtgagagaggtgggtccagaggggctggagctggggctgggcctggaggcgtgtttcttg

SEQ ID NO: 660744 - DNA, 412 bp, Homo sapiens
attgtggcaaagtcttgtacctgtttaccaggatttaaaatggttaagattgattttttatctattttcttgaattgtgctaactcctccttcttcaaggaaaacaattttactggaaaaaattattactgataggttctgaaaaggaactgcaatatagtgttgaaataaattaaacccatttagtaaacagaattgacatattcaaatgaagatgctctagttttctgttccaccagtctttgctacgcatacatgtgaaagcgattctattttctaccttggtttctgaactttyctaaagcatttctgttgtttttaggagtagccagtccctcttgactggggcctgggaaagtcagcctcaccctctggacatgtaactacagcaaactgcctgggctgccaggca

SEQ ID NO: 660745 - DNA, 610 bp, Homo sapiens
acatacacagttgctttgagaccttcagaaggctaagttaggttccttaacatactctcataaaatacttcttacttctsttttgtaattcttataagagttataataaattaattataagttgttattaatttgttttacatgctctttgaaggcagggactatgctttgtattccctagtgcctagtacggtattataaaataggtagcaaatatcagtaactgttattcagaaatgataattactattagttttactgtatttatatgagagttatttcatattgagaatttgcaaagtacttctgcatgccttatctcatttgatcctcataagaattctagtgttattttcatttaacagataataaaactgagatctaggttacttatggccaagggaacacagtaaatacaggagtgggatttgagtcctggtactccagggccagtgctcttcactgttaggttaaactgattccttagagagtagaaaaagattttgtatgatactaaatttcaaaagatgttactgtctatgtgcttccattatgagttaaaaatcttactggttctttcattgatgtctcactgtgtgtattaccattt

SEQ ID NO: 660746 - DNA, 619 bp, Homo sapiens
tcttattattaaatagattactgaagctgtgattgtcaaatagaaacatgtttaaacatgtccagagcttacttttatttattaagaaggatgtgatcacaaaatgtgtttaattataatgtagctatgctrtatgttaaatttggatctgttcccatagcagataagatctgttaattaataaagtctaaagttatctgtacagagtagaaaaccctaattcttaacattagtatactagtcatgtcaatcagcatgtccacatcctcctgcttgcatctctctgctggactaaggagccagcctccgtctcttccttaagcaaaggggtgggatcaagtttcctaagggcacctaatccatagactggttgctgaacctatgaaatgacttgataggaaaaagtttccttagtaagaataatgataattaagtagactaattatactctcttccagcctccccaactaatggtaaagactctagcagactgatttcgggtcacttttatctaatagacttaaaggtcactataagccatagacaaaaccctgtttaacaatggctaggtcctgtgctaggtggaaacatgcaccacctcatctacttttctccgtgg

SEQ ID NO: 660747 - DNA, 576 bp, Homo sapiens
gaggcaggaactgagtatatacatgtgtgttagataccaatgcatgatgtccggtgactggtggggtgagctacacttttgtagatgctggtgagtacaggtaattacatgtggagcagatgcctttctccagctgtcaggatttcatataaaccccttgggaaattttgtcatcattgcaggagaagcatggtgtaggggaaggagagaatcttgaawtgacagactatttattcagtgaaacagcgtaaatcaaaagtaaccgggttaactttaagtggcatgactaagggattaaaaatatttttttaatgttgaaattaaacattaaaaaatgtttaaataagaatgcttctgatgcatgctaaagtgagagaaaaaaacaaaaaataaggataaaatgcataaagcatatatttagagtttaacaaatcatccaggttaagaaataggacatgctattgcttcagaatcttccagtatggtcattcatgatcacagcctcctccttcctcccagtggtaactactgtattgatgattggttaacatttctttgaaaaaagttttttaaaac

SEQ ID NO: 660748 - DNA, 572 bp, Homo sapiens
actcacagagagagaggagagagaaaggaacagaaagaatatttaaagaaataatagataaagacttccaaaagctgatgaaaaataatcttcccatccaagaaactcaataagcttgaagtaggataaactcaaagacatctacatgcattatcatcaarttgctaaaagtcaaagacaaagagagattaaaagttgtaacagaaaaacaactaatcatgcaagggctcattaatgagactaatagctagcttcatatcggaaggcagtgagatgacaaattgaaaatcctgaaagaatgaggctgtcaatcatgaattttatattaagcaaaactatccttcaaaaatgaaggagaggttgggcacagtggctcacgcctgtaatcccagcactttgggaggcagaggtgggtggatcatgaggtcaagagattgagaccatcctggccaacatggtgaaaccccgtctgtactaaaaacaaaaaaattagccagatgtggtggtgtgcacctgtagtcccagctacccaggaggctgaggcaggagaattgcttgaacacaggaggtgg

SEQ ID NO: 660749 - DNA, 606 bp, Homo sapiens
ccaaacccaggagctctgaccccaaagtctctgcttttttgctacactaataccccgtggctctaccatgacaccagacacagctacgcaaaacactggtctgtgtctaaatctgatgaccactgagttgaaagggattctttctatgttgaaaacaaactggataactactgagtttaagaaataaaatgaaatgagtgtactctggaaaagaggtcaaagagaaaagatacccttgctacatatgcttaaaattaaaaataaaagtgattgtttattaatgggtaatatcttttctttttctttgagataaagtctcactttgtcaactaggctggaatgcagtggcacgatctyggctcactgcatcctcgatgtcccgggttcaagcgatcctcctgccttaaccccccaacccctgagtagcttggactacaggcattgccaccacatccagctaatttttgaattttttgtagagatggggtttggccatgttgcccaggctggtctcaaattcctgagctccagcaatccaccttccttggcctcctaaagtgctaggattacaagcatgacccaccgcgcctagctttaatgggtaat

SEQ ID NO: 660750 - DNA, 430 bp, Homo sapiens
cctgtttttgtaaataaagttttgctggaacatagcccatgctcattcatttatggctgctttcatgctacaagagcagagaagagtagatgcaagaaagacgtatggcccacaaagcctaaaatatttatcccctggccctttataggtaaagtttgttgacccatgaattaaataaaatgtgaaataatagctaactaaaaggcaggaatgaagaaaagtggtaacttttaacctagaagaatgccactaataacatatgytggaaatctcatttcttatataatccctttcaatttttttttttttttttttttttttttaagatggagtattggctgggcgcgggggcttacacctgtaatcccagcattttgggaggctgaggtggatagatcacctgaggtcaggagtttgagacccacctgtc

SEQ ID NO: 660751 - DNA, 430 bp, Homo sapiens
cctgtttttgtaaataaagttttgctggaacatagcccatgctcattcatttatggctgctttcatgctacaagagcagagaagagtagatgcaagaaagacgtatggcccacaaagcctaaaatatttatcccctggccctttataggtaaagtttgttgacccatgaattaaataaaatgtgaaataatagctaactaaaaggcaggaatgaagaaaagtggtaacttttaacctagaagaatgccactaataacatatgttrgaaatctcatttcttatataatccctttcaatttttttttttttttttttttttttttaagatggagtattggctgggcgcgggggcttacacctgtaatcccagcattttgggaggctgaggtggatagatcacctgaggtcaggagtttgagacccacctgtc

SEQ ID NO: 660752 - DNA, 430 bp, Homo sapiens
cctgtttttgtaaataaagttttgctggaacatagcccatgctcattcatttatggctgctttcatgctacaagagcagagaagagtagatgcaagaaagacgtatggcccacaaagcctaaaatatttatcccctggccctttataggtaaagtttgttgacccatgaattaaataaaatgtgaaataatagctaactaaaaggcaggaatgaagaaaagtggtaacttttaacctagaagaatgccactaataacatatgttggaaatctcatttcttatataatccctttcaatttttttttttttttttttttttttttaagatggagtattggctgggcgcrggggcttacacctgtaatcccagcattttgggaggctgaggtggatagatcacctgaggtcaggagtttgagacccacctgtc

SEQ ID NO: 660753 - DNA, 628 bp, Homo sapiens
tgtgaaaccaaagtagggtcttcaaaattacttacacttaaaagtacctgagtagaactctatatattctctttctaaaaatataaaactgaaactacttaaattgttttgaggccttggatgttttttttcttgtaagtaaaagattcttgaccaaaaaaagagatccccatcctgccatatgcttaaaaacctggaaatatcayggttactctgtaaagccaggatttttctctcttccagtactagcaattataaagattacttatctaataatgtacacaaaaagattgaggcagaaattagtatagttgctattcaagttaaatttaaataccttgtaacacttaccttatccgcacacattgacactttaatgtcctgctgagatatttcataatgccggatattaaaaacataattaccagccaattttaaaatatcagctgagatatactctagtacagccacaatatatagggatacatggtagtccactttgtaccctaatacttcctgtgaaaagaataaataatttaattgcaaaatgtagcactgtcaagtattacacacttaaaaaattcctatttaacatccttgcttataaaaaattttctattaactacat

SEQ ID NO: 660754 - DNA, 568 bp, Homo sapiens
tatattttccaagtatagtcttttaaattaatctttattttttccttattttagaatgtattcttggttattttgcacaaaaggcagaagagactaagtctgcattaacggcaaagaaagaaagcccctgctcaacaggcatgacagctgatcacgcacctattcacagtctttaaatgtcttgatcttacagaaggatttattataaaaatgatcgtatggttactacctaaattcacagaggaagaccgccaccatctacaggaaagatgcaccctagcaatgcacccaaacatgaaagactgatttgcaggagttgcccctttcttgttccttaaaatgatttcaagtcytaaatcgcaatttggtcgtgaagacactgaagacactgaccaaattttctaagggtaatctcttgtaaacaggtaagacaccgtttgcaggaagtgggaaggcgctttaaatttaccttgagaactgtaaaatgaataagaatattatgactcactgacatttcacacatgtgaaacatccatattacaaaaaaccattgcctcataagtggata

SEQ ID NO: 660755 - DNA, 561 bp, Homo sapiens
agcgaagactttggcttatatagagggtccttacttttctctcctgttcccagactccagctataaactactgtgmtgtcaaactactagaccatgtatgttctctttactcataggagagtaaacttgttagaaatctcattcttggctaggaatatcagaaggcttttctgggccaagtcaggcctgaagacatattttgtttagctaaggctgtatttaaatttaattgttaacattttaaaatcaagaggcttcatataaaaatgtatattttcagcttctcttgacaaagatctggcaacactgggacctactgcattcgtgcaagagagtaatcagcaggcaccgggtagtggctgccctctttataaaaatatgccatccatttccagttggctatacttcccacctggcactcttcacccttttatgtaacttgcctagtctctacaggcatctgagttctgatgtctgggctgagcaaacagaaatatgatccacgtgcatgtggaggatagtccaagaatgacagcagtaaaaagtttcccattcagggcc

SEQ ID NO: 660756 - DNA, 638 bp, Homo sapiens
tgctgctggtgggtaaacacaaatccagccagaaagagaaatactggtctcccatacttgcaaacatcttgaatctctagttacttcctcaggccttcctcctgcggttttgtttttttgagatagggtctcactgtcacccaggctggagtgcagtggtgcaatcatggctcactgcagtctcaacctccctgggctcagatgaacctcccacatcagcctccctagtatggatgggamtacaggtgtacaccaccacacccaagtaattttttgtatgttttgtagaaacagggtcttgctatgttgcccagcctggtctcaagctcctgggctcaagtgatctgcctgccttggcctcccaaagtgctgggattacaggcatgagccacctcacccagcctcctcctgtggtttgtgagtgcaggtacaacttgttatctctccacattcgaaagcccaaaagactaaattacattccctaacaatggactcctccgaaaggagacctcttccagagctccccagctgtctgtggaatagtagttggtgatggagcatgttctctgaactggccaccttcagtaagccctgtagcattcactggtcctaaccatcagtggtcgaatcttagaatg

SEQ ID NO: 660757 - DNA, 567 bp, Homo sapiens
tctgtaagtgtttagtattcagaatgtataaggaactctcacaactcaaagtaaaaagacaaataagtcaatctgaaaatgggccaagcatttcttctaaatacagaaaagatacccaacatcattagtcattagagaaatgaaaaccacagtttagagactatctcayacccagtgagatgggtataattaacaaatgttggtaaaaatgtggagaaaactggaacccttatacactgctagtgagaacgtataatggtatggtagattaggaacacagtttggcaagtcttcaaaaagttaaacagagttcccatataaccttgcagttctcctctaggtatatactcaagaggtctgaaaacatgttcacacaaaaatttgtagatgaacgtccatagcagcattattcatctcatcaatggatggataaggtgtggtacagccacataaaggaatattattcagccacaaaaaggagttaagtgctaatgtgtgctacaatgtagataaggctcgagaatactgtgctgagtgaaagaagacagtcacaagaggccacacagt

SEQ ID NO: 660758 - DNA, 567 bp, Homo sapiens
tctgtaagtgtttagtattcagaatgtataaggaactctcacaactcaaagtaaaaagacaaataagtcaatctgaaaatgggccaagcatttcttctaaatacagaaaagatacccaacatcattagtcattagagaaatgaaaaccacagtttagagactatctcatacccagtgagatgggtataattaacaaatgttggtaaaaatgtggagaaaactggaacccttatacactgctrgtgagaacgtataatggtatggtagattaggaacacagtttggcaagtcttcaaaaagttaaacagagttcccatataaccttgcagttctcctctaggtatatactcaagaggtctgaaaacatgttcacacaaaaatttgtagatgaacgtccatagcagcattattcatctcatcaatggatggataaggtgtggtacagccacataaaggaatattattcagccacaaaaaggagttaagtgctaatgtgtgctacaatgtagataaggctcgagaatactgtgctgagtgaaagaagacagtcacaagaggccacacagt

SEQ ID NO: 660759 - DNA, 583 bp, Homo sapiens
agtggttccccctctatcacagaacttatctatttgttttcttattcatcatctattgctccctttagactggtagtgggacccaaaaggtactaaacaaatctttgytgaatgagtaaattagaagataatatgcatcaacaatgcacaaattatgctctacttcttgtattaatcattattttcacatttagatatcacttttcacactaatatagtttgcaaaggattctatagttccctaattaaaatgataagaattatctgagacacaggattccttttttaccaagcggtttacatcaaatacttaccacaggagctgttgagatccacatctaaaaatacactaaggtctgaagaagcagatactggtggagtagatggtgtatttggagaggttggtgctgacactgttgattccagctcagtttcagcaatccgactaaagcttattttacatggttctctttctaatggtgttgggtgacctcgtaaagtacctgaggtagagccatgtcggcctgtgttaggccttattccaggagattttaaggaaaaagttgatttcctaggctgagaa

SEQ ID NO: 660760 - DNA, 561 bp, Homo sapiens
taataaatattgatgcaaagcaaaggcccatgatttaattttttttcttttagtatggtcactttttattaactacaaaaggtaatgatataaaaaagaaacagaataaacatttaccaaaagttattaatataccaccactcaaaattcagaaaatgtgttgttttcacgtacacatacrtgaaataaaataataccataacaaaagggtgctgtatctgtgtttaaagaaggggttgttggcaaacaccacagctcacttctgctgaaatgtacacaactgatatatgcagcacagaaagctggcaccaagggcttacaaccttaatttgcctgcaagaaggaacggagatttaccttcagagcacgttcttgattgttttcagcagtcagatgtctcatgttgtttgctgaagtctggttctgctctttcacatgatgaagctcctgctctaaccgtttgcactgccacaggggaagaatcccattaagtaaaggagttatagcattttttttcaccaagccacatgaattaatgtaaataatatcattgtattctct

SEQ ID NO: 660761 - DNA, 621 bp, Homo sapiens
cttatatcagacaaaacaaatttcaagacaaaaactctaaggaaagacaaacaaggtcattatataatgataaagtggtcaattcagcaagaggatgcagcaattttaaatatatatgcactcaacattcgagcatccatatatatataaagcaagtattattagagctaaagagagatataggctccaatacaataatagctggatatatcaacatcccactttcagagatgaacatattttccataaagaaaatcaacaaagaaacttcggactgaatctgaactacagactaaatggatctactagacagttacggaacatttcgtccaacggccgcagaatgcacattcttttcctcagcacawggatcattctcatgggtagatcatatgttaggtcacaaaacaagtcttaaaacattaaaaaaactgaaataatatcaaacatcttctctaaccacaatagaagaaaactagaaattaataacaggaggaattctggaaactacacaaacacaccaaaattaaacaatatgctcctgaatgaccagggggtcgatgaagaaattaagaagaaaactgaaaaacttcttgaaacaaatgataatggaaacacaac

SEQ ID NO: 660762 - DNA, 621 bp, Homo sapiens
cttatatcagacaaaacaaatttcaagacaaaaactctaaggaaagacaaacaaggtcattatataatgataaagtggtcaattcagcaagaggatgcagcaattttaaatatatatgcactcaacattcgagcatccatatatatataaagcaagtattattagagctaaagagagatataggctccaatacaataatagctggatatatcaacatcccactttcagagatgaacatattttccataaagaaaatcaacaaagaaacttcggactgaatctgaactacagactaaatggatctactagacagttacggaacatttcgtccaacggccgcagaatgcacattcttttcctcagcacaaggatcattctcatgggtagatcatatgttaggtcacaaaacaagtcttaaaacattaaaaaaactgaaataatatcaaacatcttctctaaccacaatagaagaaaactagaaattaataacaggaggaattctggaaactacacaaacacaccaaaattaaacaatatgctcctgaatgaccagkgggtcgatgaagaaattaagaagaaaactgaaaaacttcttgaaacaaatgataatggaaacacaac

SEQ ID NO: 660763 - DNA, 640 bp, Homo sapiens
aaggaagaaaggctgtgattctcccgaaggtaacttctacttccgtttacatttcctatattaaaatcacttcaccacaacttattataattgccacaatgttagcctgtgaaatttgaaggtttctttatagagaatagacagggagttataaaaaatgatatttatcataattttgttgatgattttgcctacagtaattatagagaagtgttaatcatttacaccaagatgatccctaatttaagcaaattatgcaagtgctgtatgcactttatttaaaagaaaaccaagttgttatttatttcaytatatttttcagcagtttttctgtacaatatgtgaaaattgaacagttgaacaaagtcaactcaaggtactatcagattgctttatctacaggttttagggttataaagataaaattaaggttattgtttctttgagagctaaagcacttagtaaaacattcattgaggtttcttctttgcagtctgataatgttaaacatgctttatatcacatttataagcaacagaattatttcaaaaaatgtagctaatgataaggatgaatgtcatttacttttgttttgatcaccaggaaatattgtttactttactttaaaatttatgtgagc

SEQ ID NO: 660764 - DNA, 636 bp, Homo sapiens
gtagtcaaagcaatcttgaaaaaaaaagaataaagcttcaggcattatatgacctgacttcaaattatgctacaaagctayggcaatcaaaacagcatggtaactggcataaaacagatacatatggaaccacaggatagactaaaaaacaaaacaaaaccaaacacatagaccaatggaacaaaattgaaaacccagaaataaatccacacatttacaacccactcatttttgacataaggaactaaaaaaggtaaatattcaatatatgccagatgtctgctccattttagccctttagatacaacaaatactgtcctgaacacaaaagtcacaaaaactaatttatcacttgtctgtttaacccatccctctctgatctctcctcctggcatcctaattttctggctgtgtactctgtgtattttagtggtaaaagaaggacagggtagaatgataagtctgaggaagtaatctaaacaggttgcaaaaaaaaaaaaaatgaagaggacacaaaaacaaaagctacacagtctcttaactttagaagtatctgatgttctgataacagcccttttattacacccacggcttctcaagatctcaacctgctgggatagccattgggtttaacaa

SEQ ID NO: 660765 - DNA, 636 bp, Homo sapiens
gtagtcaaagcaatcttgaaaaaaaaagaataaagcttcaggcattatatgacctgacttcaaattatgctacaaagctatggcaatcaaaacagcatggtaactggcataaaacagatacatatggaaccacaggatagactaaaaaacaaaacaaaaccaaacacatagaccaatggaacaaaattgaaaacccagaaataaatccacacatttacaacccactcatttttgacataaggaactaaaaaaggtaaatattcaatatatgccagatgtctgctccattttagccctttagatacaacaaatactgtcctgaacacaaaagtcacaaaaactaatttatcacttgtctgtttaacccatccctctctgatctctcctcctggcatcctaattttctggctgtgtactctgtgtattytagtggtaaaagaaggacagggtagaatgataagtctgaggaagtaatctaaacaggttgcaaaaaaaaaaaaaatgaagaggacacaaaaacaaaagctacacagtctcttaactttagaagtatctgatgttctgataacagcccttttattacacccacggcttctcaagatctcaacctgctgggatagccattgggtttaacaa

SEQ ID NO: 660766 - DNA, 638 bp, Homo sapiens
cacgatggctcacgcctgtaatcctggcactttggaaggctgaggtgggagggtcacttaagcccarttcgagaccagcttgggcaacataaggagactctgtctctacaaaaaaatcaaaaagtagccgggtgtggtggcatgcacctgtagtcctagctacttgggaagctgaggcaagaggatcccttgagcctaggagattgaggctgcagtgggccatgattgtgccacagcactcaagcctgggcaacagagcgagaacctgtctcaaaaaaaaaaaagactttgaattttattatttccaacctcatgtgggatactgcatgctaatccatttcattttcttacctggatttcttccacacactgcatagttttactgacctcaagaccctaaatccaaccttctatctcctaggctcaacaaataaagtacatccaataagaaataagggattaagcataaacttctctgacttcatctctcttcacttctaaatacagctatatatttattggttattactcttgtctgagttcatttctccctgcctcctctaagtctttgccaaatcaagaattgtctctagctacactcatagtttttttttcattttctgctcttccttagaatt

SEQ ID NO: 660767 - DNA, 638 bp, Homo sapiens
cacgatggctcacgcctgtaatcctggcactttggaaggctgaggtgggagggtcacttaagcccaattcgagaccagcttgggcaacataaggagactctgtctctacaaaaaaatcaaaaagtagccrggtgtggtggcatgcacctgtagtcctagctacttgggaagctgaggcaagaggatcccttgagcctaggagattgaggctgcagtgggccatgattgtgccacagcactcaagcctgggcaacagagcgagaacctgtctcaaaaaaaaaaaagactttgaattttattatttccaacctcatgtgggatactgcatgctaatccatttcattttcttacctggatttcttccacacactgcatagttttactgacctcaagaccctaaatccaaccttctatctcctaggctcaacaaataaagtacatccaataagaaataagggattaagcataaacttctctgacttcatctctcttcacttctaaatacagctatatatttattggttattactcttgtctgagttcatttctccctgcctcctctaagtctttgccaaatcaagaattgtctctagctacactcatagtttttttttcattttctgctcttccttagaatt

SEQ ID NO: 660768 - DNA, 626 bp, Homo sapiens
tcttaccatgtcccccatcatcctgaagcagctagcttgacagaatagcaaaatggtcttttgaagacttggttacagtgccagctaagtggcagtcccttgaggggctgggtaagattctccaaagtaacatatgtactctgtatcagagtctattatacaatgtttttttatccatagccaggattcatgggcccaagaattaagggataaaaataggaatgactccattcacttttacccctmgtgatccactagcaaaatatttgcttcctatctctgcaaattaagatgctgttaattcaagcatcttagttccaaatggagaaaagctttcgcgggaggacataacatggataccacttgtctggaagttgaaattaccacctggaattcctcatgcctttgaatcaacaggtgaggaaggaggctgctatactgcctgggatcacagatcctcactaccaagaggaaactgggttgccactatccaatgggggtaaggaggaatatatgttgaatacagaagatcccctagggtgtcccttatattcatgtcatatatctattcctatctagtgaaaatatccttcaaaaatgagagtaaaatgaagacattcatataa

SEQ ID NO: 660769 - DNA, 544 bp, Homo sapiens
ggtcatcttagatatattgtgatgtcaaacatgactttctcaaaaagataaaactaaagagtgatataaaaatatcagatcagtgattgccgttgagaggtgggaacatgaattgattggataggkcatgaggaaactctggggtaacactgtagtaatgttctgcatcttgatcgtggtggtaactatacagttgtatgcacttgtcagacgtagagaatgtgcacttagttttctatatttcaatgtgcataacttttaaataaaaacaaaataactgcaataatacagaattccatctaatgatatactatgctgaagggtttagaagccaatatattgatgcctgcatttacatgaatgcatcataagtgagacgaattgatggacagagggatgcctaataaatacctagataatgtgataaatcaagtttagcaaaatataataatagattccaagtggtatatatataaacgttcactgtaaaattcatacaaattttccatatgtttaaaatttctcataataagatgttggggtc

SEQ ID NO: 660770 - DNA, 512 bp, Homo sapiens
aaactttaaattatgcctacaacagtctaacttgacatagtcatgataattagtaagaattttgctgaagtaaatgtctatgggctcaagtttcaattgatttcctataccatgcaaattctgactgacatccttgcactctaagtgaaaagatccatgcgtgaaatgtcgcatttcttgatttatccctaaatcagtcaatatcacccttttcttttctgaaactacagtcgttcaccttgttcaatcctaagatgccaaacgttgacctccaatgataaacaaatttcacatttttctgaaaattcttatttgttggcttttattctaatcagaaaattctgatttgtttgcttttattctctctcattttctacacaccaccacacttaacatgttaaaaaagtaccaacaatagcaaagagactgaaraaaaggtatcatgatctgaaaagctgaagtatacaaatgcaaacgtatataagagtatgtatatgtaggtaattttaact

SEQ ID NO: 660771 - DNA, 514 bp, Homo sapiens
tggtgggggccagttttgtcaccattgggtagagtaatttacagatgaacaaaaggggaaggctagaataaacagtgtggtaatggattagaattaagaacatcagtgtgaactcatgtttagcttgatatagatacaaacggatagatgcataaataagagatatgtgtatgtatacatcagttagtgtatatagtatatatatagatatgtgtatacatcagttagtgtgtatatatatatacacacacacatatacatatacacacacatatatatagtataagatactactatatatatatatrtgtgtgtgtatttcctactctgtctgcagaaagggtctagaagtagtcatactcccccaacaaagggcacaccccatacccagatcttggtttctaatactattttccaataaaaggatctagagttccttggaggaatgactgaatctactggaggggcacagctctatacatccttacataaggtgaccctggagcattctgcc

SEQ ID NO: 660772 - DNA, 594 bp, Homo sapiens
ggtggtattgtaaattactacagccattttggaaaacggtatgaggttccacaaaaaactaaaagtagagttaccatgtgatccagcagttccacttycaggtatgtatccaaaggagtcgaaagaagtatgttaaagagatgcctacactcccatgttcactgcagcattactcacaatagccaagatatggaaacaactgaagtgccaaacaatagataaatgagtttttttaatgtggtacaatggaatacaatacagcctttaaaagctaggattcaggtttttcagctggaaaagctgaaaaaaagaagggatattctgtcatttgcaacaacgtggataaacctagaggacactatgctaggcgaaataagccaagcacagagagacaaatacctcatgatctcacatatgtggaatctaaaaaagtggaactcacataagtaaagagtagaacaatagctaccagaggctggggatgagggtggaggaggaaagaagagatattggtcaaaaaatacaattttcagttagacaggaggaataggttctggtgatctattacacatcaaggtgacttataatgaagag

SEQ ID NO: 660773 - DNA, 586 bp, Homo sapiens
atttaggttgaggaatatgtatctgacttgttaactattcaagaaaatatacattatttaaaagatagattcaattatggaatatatgaaagaagactaatttggataggcaaaggactgaaaactgacctatgtcttatttattttattcctgcaaygagtatgataacttcacaaaaaagttaccaatattaatatcacgtagaagaaaccttcttctacgtgatattgataagaccaaggattctacaataacgctgtcagcacatcctatatttttgcaatttattgaaacacaattgaataacagaatataacaaataattaatttaatgggaaaataacatataaatataataaatcccatttggtaaacatagacttactaaatctgagctattaaggagattattgacatcacaatgaaacacatttaaaaaattaaaatcacgtaattttcacagaacaccaccaaatttctgaaagtgcatgaagaaaaaaattcatatctataatataaacacattagttgccctagagttataaactcagtaagagcatccttgccttaagaaactcaaagtgc

SEQ ID NO: 660774 - DNA, 586 bp, Homo sapiens
atttaggttgaggaatatgtatctgacttgttaactattcaagaaaatatacattatttaaaagatagattcaattatggaatatatgaaagaagactaatttggataggcaaaggactgaaaactgacctatgtcttatttattttattcctgcaacgagtatgataacttcacaaaaaagttaccaatattaatatcacgtagaagaaaccttcttctacgtgatattgataagaccaaggattctacaataacgctgtcagcacatcctatatttttgcaatttattgaaacacaattgaataacagaatataacaaataattaatttaatgggaaaataacatataaatataataaatcccatttggtaaacatagacttackaaatctgagctattaaggagattattgacatcacaatgaaacacatttaaaaaattaaaatcacgtaattttcacagaacaccaccaaatttctgaaagtgcatgaagaaaaaaattcatatctataatataaacacattagttgccctagagttataaactcagtaagagcatccttgccttaagaaactcaaagtgc

SEQ ID NO: 660775 - DNA, 529 bp, Homo sapiens
gttgatgtcaggagttcgagaccagcctggccagtatggcgaaaccctgtctctactaaaaatacaaaaattakccaggcgtggtggtgcacacctgtagtctcagctactcgaaaggctgaggcaggagaatcacttaaacccaggaggcaaaggttgcagtgagctgagacagtaccactgcactccagcctgggcaacagagtgacactctgtctcaaaaaaataaattaagtaaataaataaataaataaataaataaatgtaatcagaaatttaaggcaggataaacaaaatcggtacaagaaagtcatggctcaagtaagaaagaagcccaaaatatggtacaattttaagtacttggttaagtattttaaagattcttttgtcttgatccaaagaacattctatttggcacacggttgacaaattcaatcaaaaggataggagccataattttagaataccacatggttagcatggtcagcaatgttgtttcctatttttcaaatcttaacatcaacttgta

SEQ ID NO: 660776 - DNA, 492 bp, Homo sapiens
tcccttctttgttggcataaaccagaaattattttaaggtagttcttgagaagatacagagtcaaaaatgagttagaaatgtttgaagagttgtgtaaaaataaatacctgaagaacttaaacttgaagacataaaagaaagtgtctgtcatggaatttgaacacattatacgttcattagaaaatattgattaatgcaaaaactatgagtgacctccatacatatgaaagagtccgcagagtactgatttcgaaatttgagattctgttttgttttttagtataattaacagtataaagtaagatttttagttctctaagatctttaaaactttctttccccttgcactctcttgcttaaccccacctcattgattttaaaagacaacagcacagcaaacgatgacattaacttcttcgtaaagatttttcagactttatgctrtggaatacagtgaactgttaagtctttgaaaactgccagttttattt

SEQ ID NO: 660777 - DNA, 600 bp, Homo sapiens
tgctcaacatcaccactcatcagagaaatgcaaattaaaatttcaatgagacatcctcattgacaccactcagaatggccattattagaaagtcagaaaataacatgttggtgaattggcagacataarcgaactcatatactattggtgggaatgtaaattaggacaacctctgtggaaaacagtatggagatttctcaaagaacttaagacagaactactatttgatccagcaatactactacttggtacctacctaaaggaaaagaaatcattacattgcactcgtatgtttatcacagcacaatccacaatggcaaagatgtggagtcaacctatgtgtccatcatagataactggataaagaaaatagggcatatatacacaatagaatactactcagctataaaaaagaatgaaatcatgttttttgtagcaacacgaatggaaccggaagtcattatcttaagtgaaagaagccagacacagaaagacaaatactgcatgttctcattcataactgggtgctaaaaaatgtgtacccatggacatagagagtggaatgatagacaatagagactgagaaaggtgagggggtac

SEQ ID NO: 660778 - DNA, 395 bp, Homo sapiens
atactcattcattcaaaacacttattgagcatcagagacatgccaagcactgattcaggtataagattcagcggttaaaaaaaaaaatcctaaaggacaatccactaatacagtatagtgtcatgtaagcatgtctattatgaaaaaaaataataataaaggagggtaacaaatagagtgatgtagtaagagggtacactattttagatagtgtgatcttgtgacattgaagcaggaagttgaacaaagtaaaggaacagactcatgtgacattcygggggtagaacactccaggcagagaaaacacatggcagggccctgggatgggagcacacctagaatatttgagttattaaggaacctagtgtggctggagtgaaccaagagtagaaaca

SEQ ID NO: 660779 - DNA, 547 bp, Homo sapiens
tctaatggcagctacagttgagagtcattggtgtaaaagacagaggaaagagtgtaatattcattttatagtccaaaataaagtaggttggtaggatgtattcattcaccatcagggttttcgatacctgtatgcccacttatagacactaattctaattgcaaaagcaaatgattcccaacagtcagtgaccaaccaaacatacttgacgtttgataactgcattagtttccaaggacagccataacaaagtaccacaaactgtgtggcttaaaacaacagatatttaatatcacatagttctggaaactatagaagtctggaatcaggtgtcggctgggctatgttctttctgacaactgtaaaggagagtccttccttgcctcttctagtgtttggtgtttaccagcaattgttggcmctccttggcttgtagatacatggcagtcttctccctgtgtgtcttcagattgtcttccctctgtgcatgtctgtctctgtgtccataatttcccctttttatggggacaccactagtagtggatta

SEQ ID NO: 660780 - DNA, 661 bp, Homo sapiens
cattctaaaaaactagggaaaagcatctaaagtaaaaatagatggctgattcttaacgtcaaagaatgcaagcttttccaattttcagtataccataaaatgtgattaaaatggtaacttagaagacacagatacccactgtgactaatggcaggtcaaaaagaatcaaaaatatcacattcaactttaaaaacttcagacttcagacatgcatttaaggaatatcaaatactgaacgggtaatagagattttactaaataaatatgtgccagtgctacgtatgtacaaatgctgaaataaaatgattgttttgaagtcttttacttggtacctgtgcacagaaaacraaaccaaaaccaaccaacaaaacaaaaattcttgtaggaaaacactgaaatgtagtttttgcctagaaattttcataatgaaaatgggactgtgataaatttaaattcccatgcttaaggtactattgaaaatttcactttctcctcccacacttagttgactatgaagacttggttgctttataacagttcactcaattcactcaatttcttaattcccagtatctaatttttttcctaggccctagtgattatgttcaaagctattataaactttctggctttacgatatccttactttatcagatatatg

SEQ ID NO: 660781 - DNA, 575 bp, Homo sapiens
attaaacacatctataaaatatataattgggtatcttcaaacaatacatcaagttagatgatttctcaaagaacatgaccatagacctactaggattttaatttttaacctcagaagaaggttaagaacctagtaaaaagaaacataactaagtaacttgtgtaacgatacccaaaaagttaaaagctattttcaaaaggataaaaatgaccaggtttcaattaaacctccacttcacagkaaggcttggattgcttaccattgtgtatttccatagtatattgttccctacagctgattccttagaggttgttctattttgtcctgatgtcatgtctctctgtttatcagaccagagataatgaggttcctcagtcaaaagtagtcatatatacactgtcgagtgatatatgagatagtctgacatgatgagagagagaagaaaagagtttgtggtggaagcagaactcaaaacattcacaggcagaaactgattcatgggcagtgagcagaagccatggaggagagaaaggcaggggagagagatgtatgccagaaagacagtgcagcaatgg

SEQ ID NO: 660782 - DNA, 616 bp, Homo sapiens
tggtgagggcctcaggctgcctctgcccatggtggagctggcttgtacacagatcacatggtgagaaaggaagcaggagaaagaggcgggaggtgtgggatgcttttaacaactatctttaatcgagaaagaacaaatagagtggtaactaatagagtgagaactcactcattaccatgagaaaggcaccaagtcgatcacgcaggatctgctcccataaccccaacacctcccactaggctccacctcccagcaccaccacactggtgattaaatttcaacatgaggcttgtaggggccaaacagccaagctacagcagtgtctaaattggacctaatcagayctgaattcagttatgcctgttacaatttataatagggatacattgaagcacctccataggcgggcttactaggtagtgagtggtctgtaaaacatattgggttttatggaaaactgctgagaaaacatactgggcaggaagtgagaagaaattaaaggtctatgataaatctcttcaagtatttgaagaggcagtttacagaattctgtgttgcttcagagggtaacataatccagctcagaataggacttattagaattgtacaataggat

SEQ ID NO: 660783 - DNA, 600 bp, Homo sapiens
aactaaagaggttttgtatggcaaaaggaacggtcagcagagtaaacagacaacacaccaagtgggagaaaatcttcacaatctatacatcttagaaaggactaatatccagaatctacaacgagctcaaacaaatcagtaagaaaaaaaacaaacaatcccatcaaaaagtgggctaaggacatgaatagacaattctcaaaagaagatatacaaatggccaacaaacatgaaaaaaatgctcagcataactaatgatcaaggaaatgcaaatcaaaaccacaatgcaataccacctgactcctgcaagaatagccataattcaaaaatcaaaaaaacagtagatgacggtatggatgcagtgatcagggaacacttctacactgctggtgggaaggtaaactagtacagccattttggaaaacagcgygaaaattccttaaagaactaaaagtagagttatcatttaatccagcaatcccactactgggtatctatgcagagaaaaagaagttatatgaaaaatttacttgtatacgcatgttcatagcagcaaaattcacaaaatcttgaattttgtgaattcaatttttgcaaaaa

SEQ ID NO: 660784 - DNA, 425 bp, Homo sapiens
tagccctgtccttggtcttttcaactatgtgaacgataagtttcatttatgcttgagcaatttggggtgtggttttctaacccttgaaacaagcaaatactatccaatacaaatacattcattttacaaaatttaccatggcaagcaaatgtattaatgcatttttgaaagayagtcaataacagttgaaacaaaaaggcttacaggtgcttaaagtctcagttttcttttaaacaaataattgttaaaaccccacaattcttcaacaacgctgattacctcaagtttttttttttatcctttctaagatgagagtctgacgatgtttcttaagctcttatattgtttaggaattgttacataatgtttttcctaatcactgataacatttttttctggttcgcacttatagttggacaagaaat

SEQ ID NO: 660785 - DNA, 536 bp, Homo sapiens
ttcccaaactgctacaaaacatggaactcaggttttggaatcaattcatatatggaatcaattttcaaacactgaaatatcaatctattacttataattgtataaaattgcccttaaaaaacagggataaaattcattaggaattgataagttacaacctaactagtaaatataagaactaaagaaaaattaattctttatatttcaccatatacatcaagaaacaggtacygttaagggaatggccaagtaagtatcaatcagttcccaaattaatcttggaggttattttgagaggtttagtcctaccctcagaatttcacaaataattcctttgtgcaatccatgtaagaaatgttctctgaaatcacacttgtttgtatatttgataattttttttaaaaaactggtagtttctttgtgctgtaagctttaaataaagagatgtctgcctttttaaataataaaataaaaattaatgaataggaataaaaataaaactgaatgacaattttatatcagtagctatatttttc

SEQ ID NO: 660786 - DNA, 596 bp, Homo sapiens
ctccttttctagtaaaaataatagtctttctagtatttaaaatgartaatttatgtactaaaattcaatgtaaaaaattgtcacttttaagaaagaaggacaaaaatgctgatacaagttgagaataaaatacacaaaaatgactctggacttaaacctaaaatagcaagtatcaaaagaaagtgaagattaaatagtcataaatcacaaacaatacctgaaacaagatactggattacactgaaaacacttgcatggaatatgtaaaactatgttgcatgattttgtgaaattattaagaacgtacaaataaaagataatataaatgccatttagatacgattatggttgtacacgattcaaagttaacattttctaaagaaaaggctgtaagttatcaaaactccaagagggtgacattcatctgaagatacatgaaatttttttcaagactgtgaaatatattcttaaaaaaaaatttaatataaatacaaaagaataaaaatcttggaaatatgctttttgtatcgaattttaaatactaagtaataaattataggatctataaaatgtgtctatgagtcagtaggcaagag

SEQ ID NO: 660787 - DNA, 596 bp, Homo sapiens
ctccttttctagtaaaaataatagtctttctagtatttaaaatgagtaatttatgtactaaaattcaatgtaaaaaattgtcacttttaagaaagaaggacaaaaatgctgatacaagttgagaataaaatacacaaaaatgactctggacttaaacctaaaatagcaagtatcaaaagaaagtgaagattaaatagtcataaatcacaaacaatacctgaaacaagatactggattacactgaaaacacttgcatggaatatgtaaaactatgttgcatgattttgtgaaattattaagaacgtacaaataaaagataatataaatgccatttagatacgattatggttgtacacgattcaaagttaacattttctaaagaaaaggctgtaagttatcaaaactccaagagggtgacattcatctgaagatacaygaaatttttttcaagactgtgaaatatattcttaaaaaaaaatttaatataaatacaaaagaataaaaatcttggaaatatgctttttgtatcgaattttaaatactaagtaataaattataggatctataaaatgtgtctatgagtcagtaggcaagag

SEQ ID NO: 660788 - DNA, 580 bp, Homo sapiens
gcactccagcctgggtgacagaaggagaccctgtcttgaaaaaaaaaaaattccaattcagtagactttgggttgggccagattttaytattttggaaacatttttttgattattcaaatacatgcctttgtaaagaacctttaacctatatttattacctaacctgacctctgctaggtattgtctttaaagctatccaggacattgtttccaaaaatatatcagagacacctgctcttctacacccttttggccattgtaatacgaaaagtcaatagggtcagaaaaagaagggagaagataatgagctccttagaaaataatttacatttttctacttttaaactttacatttacaagagtcaaggcttccactatcaccaatgagagtagaaggtaaggaggaagatagtaatgaaggtacctactattgatgtgggcagagataggaaaggcctaggaggaagacctgggaacactgagagtcttacatattcaatttttttccaggtcagtgaacattttcttatgaaaacaatttcattctaccacccaaattcctctccctgaagtactgtg

SEQ ID NO: 660789 - DNA, 469 bp, Homo sapiens
gcaatgtttgtgttttaaatctttataatgtttgaaaaagaaaaagtactaccactgagaaccactcgtacttgcacataactatttactttagctaatcagaaacactagttccactgtggggaaaattaacattyataagatttatcaaagattctgttggtgtatcatatctctagaaagtggaagcctactttctgactcttttatgcataaattaaatagacagctacaaatttaacttctattaatttgcattgtgcttgtttattttccattgcattacatatttttccagatactttcatttctcttacataattaaaaagagacacctatttgttgtccaccataagcacccaactctttagactaatttgcgatatcaagtgctttactaatttaatttttctataactagcacaaaattttgaacaattgtatgtgtttaaaattcattaatttggga

SEQ ID NO: 660790 - DNA, 580 bp, Homo sapiens
acaatcttctccttgaataaaaaatatartaaggtatttggctcatatcttgttattcacaagccaggacagtctgttgttcacctcttggcatgtactctattttggggagagctgcatactctgagaactgcaattgaacgaagatggacactctcgatgggattccactgactgatcaatgttcatcgcaactgatagctcttcctaatttttctgtgtaggcgttacagatatttttgaatttcagaagaaatgagttctgcgtttctatgtattttcttctgccttgcttttgggtgtagttttaagaatgaagaattagagtatcttctctctgaaatattttttttcccagaacatattgattctgtctaactgaaactttttagcctttgaccaaaatctcctaatttatcctattcctgtagcaacaaccactctatcctctgcttctatgaatttgcctttctcagattctgcgtatgcaattatgtggtatttgcctttctgtacctgacttatttcacttaacataatgtcctccaggttcattcattgtgttacaaatgataggatt

SEQ ID NO: 660791 - DNA, 575 bp, Homo sapiens
attttctgtcttactaacattgtaatcagtaaagaggcttgatatactttcatttgtcctaaatttaagattttgtgttatctatcttggataatgttccatgtataattaagaataatctgtattctactgctgttgtatagaatgttstgtatatatctgttaaatccatttggtctaaagtgtagctcaagtccactgtttccttattaattttctgtctcaataatctgtgcatggctgaaaatgaggaattgaaatcctctactgttatggtattcttgtctattgctgccttctgatcagttaatatttgcatcgtatattaagatactctgatatcaggtgcatatacatttacaattgttatagcctcatgatgaattgacttctttatcattatgtaatgatcttctttgtctctttttacaattttagacttaaagtctcttctgtctggtataagtataggtatccctactctctttggtttttatttgcatagaatgtctttttccatcccttcagtattagtttatgtatttccctaagttctaagtatttctcttgtaggt

SEQ ID NO: 660792 - DNA, 594 bp, Homo sapiens
ttttgcctttctgattttacatttaacatgcagtcttctcctccagtctttattgcctagtttyaggagataaacagccttatcaattaaattgactaggaattctgaggttctctcagactttttcttaatgaatatcccttctccacagctcttgttttcattcaggtgagagattcttaagactataggctttctctgtgtcctgcaaaataagccaggtgctgagatcctcttgtttattttccctacggttgtgttctgaaagtctcatttgtacaccttctcccaaccctgcagagtttagctggttgtttgcatgagatgcttgcactcactgtatccaggggtaagctcagagggccggcataggagcggaatggaggtgaggcatgtggagcatttgtggttcccataggccagtttcaaggggttctatagatgaggcaaactaagtatgtcataggcagccttcctgatagagtttgcagagcaagcagtagggcacacagcctctcatccctatctccaccctctccaaatcactcagctgtgctgatcaccacagttttctggttgaggcaagaaagaaag

SEQ ID NO: 660793 - DNA, 594 bp, Homo sapiens
ttttgcctttctgattttacatttaacatgcagtcttctcctccagtctttattgcctagttttaggagataaacagccttatcaattaaattgactaggaattctgaggttctctcagactttttcttaatgaatatcccttctccacagctcttgttttcattcaggtgagagattcttaagactataggctttctctstgtcctgcaaaataagccaggtgctgagatcctcttgtttattttccctacggttgtgttctgaaagtctcatttgtacaccttctcccaaccctgcagagtttagctggttgtttgcatgagatgcttgcactcactgtatccaggggtaagctcagagggccggcataggagcggaatggaggtgaggcatgtggagcatttgtggttcccataggccagtttcaaggggttctatagatgaggcaaactaagtatgtcataggcagccttcctgatagagtttgcagagcaagcagtagggcacacagcctctcatccctatctccaccctctccaaatcactcagctgtgctgatcaccacagttttctggttgaggcaagaaagaaag

SEQ ID NO: 660794 - DNA, 470 bp, Homo sapiens
atatatcttgtgtatctgaaattttgtacccttgactaaaatatctttgtttttttctcccccaagtctctggaaaccaccattccaatgttttagtttttgtcattgagaaatttcaaatacccaaagcctatagtatcttgttaggaaatgtaggcatttttactttctggtccataatgttaatattcatatattatgtagtatgtggatcgaacatatatagtcacatcaagtataatagtatatcaacaattgacaaatttatattttttattaaagtcagataataatgtatttgtatgaaagtatagtttctaatttaatgtcrtcctccttcacagtaaaaatttaacagaaacacaaagacaatagaattgaagtggaattattacttcgctttttgtttaaaagaatgtgatatcctcccatgttgatcttacatcggctttgttttgtcgtttttgttt

SEQ ID NO: 660795 - DNA, 599 bp, Homo sapiens
tgagccctggcagttttcaagccccaatagtgctttcctggggctctgtttggcaccatgcctatcttgtaaagtccttgcttaatgtgagctggattgataacagagacttaaataatacaaacaactgcttaaaagacatgttcagaatacttggaataaatgcatgactcctcattgtgaatatttaacgagcacatttaaaatgtaaggttctataattttgtttaaaaggaattaatgtatttttatattattaaactatagatgatataatctttatttattgagaaactcagctacctcaaaactgtacaaatgagagtyatcaccagtgatgtcattaagttccatgactttaaaaaagattaggttggtgcaaatgtaatggcgaaaaccacaattacatttgcagcaacgtaatactatttctatgtgatttccaaatttatgtctgtagggcagatcttttcacttgagttcatgctcatataactcatattctcatataccttacatcccaacataaatgtgtaatatgcttttgcaacttaacatacccattctcatttaacatatgcaatccttcttcacatccc

SEQ ID NO: 660796 - DNA, 589 bp, Homo sapiens
caaaatcaaagtttaataccttctaaacctgtcttatttcttctttcattgtccttttcaggaagaatggttacaayaaaacaaaagttagatcactcacttctcagttaagaagtcttcaataacttcccttcttttttagagtaaaagctgaagtcagatttagctgatttctctgacccatctactaccatctctggactcaatttttccttctcgatggcagccacactgtcctttcactgtgtcctgaatactccaggcagtttcccccagactgtcagacttgatgtttccatggtccatgatgatctttacctagatgaatgtgagttttgctctttcaccttctgtactagtcaagttccaaatattgattcacaatttttaagtatttaaaacaggcattttaaatatttggaaatagcagatttaacacatggtatttgctatctcctgctgggaatactaaatacacatgaatttaaaacagtagggagctatctacctctttctttcattgccaaaagaaagagacaatattatcagactgtaagatctggggtcaagaagaaaatgttggaaccac

SEQ ID NO: 660797 - DNA, 589 bp, Homo sapiens
caaaatcaaagtttaataccttctaaacctgtcttatttcttctttcattgtccttttcaggaagaatggttacaataaaacaaaagttagatcactcacttctcagttaagaagtcttcaataacttcccttcttttttagagtaaaagctgaagtcagatttagctgatttctctgacccatctactaccatctctggactcaatttttccttctcgatggcagccacactgtcctttcactgtgtcctgaatactccaggcagtttcccccagactgtcagacttgatgtttccatggtccatgatgatctttacctagatgaatgtgagttttgctctttcaccttctgtactagtcaagttccaaatattgattcacaatttttaagtatttaaaacaggcattttaaatatttggaaatagcagatttaacacatggtatttgctatctcctgctgggaatactaaatacacatgaatttaaaacagtagggagctatctacctctttctttcattgccaaaagaaagagacaatattatcagactgtaagatctggggtcaaraagaaaatgttggaaccac

SEQ ID NO: 660798 - DNA, 615 bp, Homo sapiens
tataaattttaaaacatttttgatacagacatgattcaaaaaagaaaaccatttgctttttatatctcatgataaccatttccacataattacctggaacaaaatcaatcagataataatgtgttactcttttaaaggtatrcagtttaggaatacagcaattcactggctcatttattttccacaaatgcaagcataaagaaaatgaagatgcgattttgattgaagacattaagattatttttcatgaagagttaactacatttttcacagtatatgattttattgttttggattctattacataaaggtatgaaatgtgttacaattaccaatccttagtcttttacagaaacacagtggaagtcactcaaatgccattgatttttgggttgacgtaatcagtgtatacctaagaaaagagcctaactctgttactaaatatactcacaaaagtgcatcaaaatactcatcaagtgataaaaatagcatgggtgagaaggactggggttgatatttttctgaatgttaaatgcacgtgaagaaataatttctatctgcagattatgttatttgatgctaaagaggaattgaatatacattgataacactaac

SEQ ID NO: 660799 - DNA, 615 bp, Homo sapiens
tataaattttaaaacatttttgatacagacatgattcaaaaaagaaaaccatttgctttttatatctcatgataaccatttccacataattacctggaacaaaatcaatcagataataatgtgttactcttttaaaggtatacagtttaggaatacagcaattcactggctcatttattttccacaaatgcaagcataaagaaaatgaagatgcgattttgattgaagacattaagattatttttcatgaagagttaactacatttttcacagtatatgattttattgttttggattctattacataaaggtatgaaatgtgttacaattaccaatccttagtcttttacagaaacacagtggaagtcactcaaatgccattgatttttgggttgacgtaatcagtgtatacctaagaaaagagcctaactctgttactaaatatactcacaaaagtgcatcaaaatactcatcaagtgataaaaatagcatgggtgagaaggactggggttgatatttttctgaatgttaaatgcacrtgaagaaataatttctatctgcagattatgttatttgatgctaaagaggaattgaatatacattgataacactaac

SEQ ID NO: 660800 - DNA, 577 bp, Homo sapiens
tggtctggtgttgagtgcctgcatcttttcctggagcacagtgcaagctcttggtggatcaccattttggggtctagaggatggtggacctcttctcacagctccactaggcagttcctcagtggggactcagtgtggaggctccaatcccacattttccctctgtattgcccaagtagaagttttccataagggctccacccctggaccagacttctgccttgacctctagacattttcagagatttcatcctctgaaatstaggtgaaggctgctaaggctcattatttggctcatggttctgcaggctgtacaagcatgacaacaccagcatctgcttctgctaaggttttaatgctgcttcttctcattgcagaaggtgaagggaaactagtgtgtgtaaattacatgttgagacaagagacagagggtaggtgctcttttaaaccaccagctctcaggttaactctttcaggaagtaatagggtgagaactcattcattaccatgaggacagcatgaagctgttaataagtaatccacatccatgacccaaacacctcccactaggccttgc

SEQ ID NO: 660801 - DNA, 545 bp, Homo sapiens
agtgccagattacagagtaccctatatcagacccctttccagctcttcaaaattaatactcagccatttactgctagcataatctctctgctaaaaacaaagaaygacatatcaagaacctctttcctgaggctagaaagttttagaaacaccatttccaagtctcaccttggaatcgtcaatctctacatcacacatttcttgctgtccaccgacctctaactactctcttggagcagccagcccactcacctatgtgacttacttttattgtgactttaaagacaggattacttttttcctgtctaggaaactaacgagcaaactatatgaggaaaaaaagaaaattctaagataatttccttgttcatggcatcccattttgatgttactaacctcacttctggcttctgccttcttatttcagataaaatgtctggaatgaaccagactctagcatgtctgccatcaccaactgtatttacaaaatgatatccaggcttcattcctatggatgaatttcctcattgtgcttctaatgccta

SEQ ID NO: 660802 - DNA, 591 bp, Homo sapiens
ctttcctgaggctagaaagttttagaaacaccatttccaagtctcaccttggaatcgtcratctctacatcacacatttcttgctgtccaccgacctctaactactctcttggagcagccagcccactcacctatgtgacttacttttattgtgactttaaagacaggattacttttttcctgtctaggaaactaacgagcaaactatatgaggaaaaaaagaaaattctaagataatttccttgttcatggcatcccattttgatgttactaacctcacttctggcttctgccttcttatttcagataaaatgtctggaatgaaccagactctagcatgtctgccatcaccaactgtatttacaaaatgatatccaggcttcattcctatggatgaatttcctcattgtgcttctaatgcctaaaatagactgcaataaatatgtaaaatctgtgctggaactttgagctaatccccccaccatgaagggtaggccactgctgcagatagtgatgacctacagagtgagcttgctactttacacagctatacattgctgttgcaaccatagattcaaactctccttccat

SEQ ID NO: 660803 - DNA, 545 bp, Homo sapiens
agtgccagattacagagtaccctatatcagacccctttccagctcttcaaaattaatactcagccatttactgctagcataatctctctgctaaaaacaaagaacgacatatcaagaacctctttcctgaggctagaaagttttagaaacaccatttccaagtctcaccttggaatcgtcaatctctacatcacacatttcttgctgtccaccgacctctaactactctcttggagcagccagcccactcacctatgtgacttacttttattgtgactttaaagacaggattacttttttcctgtctaggaaactaacgagcaaactatrtgaggaaaaaaagaaaattctaagataatttccttgttcatggcatcccattttgatgttactaacctcacttctggcttctgccttcttatttcagataaaatgtctggaatgaaccagactctagcatgtctgccatcaccaactgtatttacaaaatgatatccaggcttcattcctatggatgaatttcctcattgtgcttctaatgccta

SEQ ID NO: 660804 - DNA, 591 bp, Homo sapiens
ctttcctgaggctagaaagttttagaaacaccatttccaagtctcaccttggaatcgtcaatctctacatcacacatttcttgctgtccaccgacctctaactactctcttggagcagccagcccactcacctatgtgacttacttttattgtgactttaaagacaggattacttttttcctgtctaggaaactaacgagcaaactatatgaggaaaaaaagaaaattctaagataatttccttgttcatggcatcccattttgatgttactaacctcacttctggcttctgccttcttatttcagataaaatgtctggaatgaaccagactctagcatgtctgccatcaccaactgtatttacaaaatgatatccaggcttcattcctatggatgaatttcctcattgtgcttctaatgcctaaaatagactgcaataaatatgtaaaatctgtgctggaactttgagctaatccccccaccatgaagggtaggccacygctgcagatagtgatgacctacagagtgagcttgctactttacacagctatacattgctgttgcaaccatagattcaaactctccttccat

SEQ ID NO: 660805 - DNA, 645 bp, Homo sapiens
aatgataaacttagttttgactatttttagtttgatgggctggaaaaaaatgcaagagtgggacatttgtaatgcagaactgctatgtgcaatccttcacaatttctgtttgttgttctgatttattatgataggtgatttcaagctctccaaggaacatgagatgagatggtgaatgacactgagcatatgagttaatgacaataaaccagcaatgcattgcttaccagtctgatttataatctctaaaacagatttctgtagttttaaaaccacttgctgtatagtgaatagaaaaaaaaacataaaagcctgtgatttatgaaacatattaaacaactctaaatcgttttgaaaattctttaccttactattaaggtgaaaaaagttctgaaaaaataaaaacccataaaaatgaacactgaaatactaaaaaaatctagtgtgttatactgtatacatttttatttttaaataaaaccttaaagttgaaatacttgtttggtttaattaatcatattttttggaaaagctacttttaaggaaataattgtaatagaaaaatcctacwtatttatataaattggttgcactttaatagaatctttagtatatattttaaacatagtctttataagcctatat

SEQ ID NO: 660806 - DNA, 645 bp, Homo sapiens
aatgataaacttagttttgactatttttagtttgatgggctggaaaaaaatgcaagagtgggacatttgtaatgcagaactgctatgtgcaatccttcacaatttctgtttgttgttctgatttattatgataggtgatttcaagctctccaaggaacatgagatgagatggtgaatgacactgagcatatgagttaatgacaataaaccagcaatgcattgcttaccagtctgatttataatctctaaaacagatttctgtagttttaaaaccacttgctgtatagtgaatagaaaaaaaaacataaaagcctgtgatttatgaaacatattaaacaactctaaatcgttttgaaaattctttaccttactattaaggtgaaaaaagttctgaaaaaataaaaacccataaaaatgaacactgaaatactaaaaaaatctagtgtgttatactgtatacatttttatttttaaataaaaccttaaagttgaaatacttgtttggtttaattaatcatattttttggaaaagctacttttaaggaaataattgtaatagaaaaatcctacatatttatataaattggttgcactttaatagaatctttagwatatattttaaacatagtctttataagcctatat

SEQ ID NO: 660807 - DNA, 626 bp, Homo sapiens
tgtaaggaaataaacagttttattaggcagaaatcatctgtcaataggacagaaagctacttcaggttactctccctacctcttttaaaccattctttaataaatatttagccccatttaaagatgaataataatctgaaaagaactcctatatgactcctgtacagtaatacagtaaaataccagaaacacaattttaaaagcagcaggaatttaaataattatcaaagttttaaaagtacacagtgttttttttcttttaagacagcataacaaaatgtaaagtgatttggaaaatctcagggaactaacaggagtagaaaataaaaacatttaaaaaaattaaagccatattagaaacatttatagaatgtatgtgatgggaaagacagttactttggaaaaatcaaactgaacaaaatggaagtagcaaagatagtcacacacacacacacacacacacgcccttaaatatgtaggatgaaattatccaacacacatatgcatccatatgcaattcctttgtcacacgatgcctttggwtgcccttaatatcaatggcaatcacatgaaaaaaaataactaccatgtgtatatgcttgcagaaatttgcatgtccaattgca

SEQ ID NO: 660808 - DNA, 626 bp, Homo sapiens
tgtaaggaaataaacagttttattaggcagaaatcatctgtcaataggacagaaagctacttcaggttactctccctacctcttttaaaccattctttaataaatatttagccccatttaaagatgaataataatctgaaaagaactcctatatgactcctgtacagtaatacagtaaaataccagaaacacaattttaaaagcagcaggaatttaaataattatcaaagttttaaaagtacacagtgttttttttcttttaagacagcataacaaaatgtaaagtgatttggaaaatctcagggaactaacaggagtagaaaataaaaacatttaaaaaaattaaagccatattagaaacatttatagaatgtatgtgatgggaaagacagttactttggaaaaatcaaactgaacaaaatggaagtagcaaagatagtcacacacacacacacacacacacgcccttaaatatgtaggatgaaattatccaacacacatatgcatccatatgcaattcctttgtcacacgatgcctttggatgcccttaatatcaatggcaatcacatgaaaaaaaataactacmatgtgtatatgcttgcagaaatttgcatgtccaattgca

SEQ ID NO: 660809 - DNA, 596 bp, Homo sapiens
atttccttcagtgtttccagcactttctactgacaagacctaacagtggtgtcagctgacagaggacaaaggttttcagaatccagctccaggatcacaaaagagggcaaagaagggtatatttggtgcagaaaatcagtaagtttaaggaggattttcccctcgctacgttttatgcatttatagtagtacaaaagggagctatgattagggtgaccatatatcccaggttgtctgggacagttacaattcatgcttattgttgtaagtgttataaatagtgtccagtggtccagtrttataaatagtgtcccctttcactctcagaaattttcttgttaaaagaataaattatgtggtcagagtggtcactgttttagctgacattaaactaactctctcaccactagttgctagaaattctataaatgctccctcccctaattttgcggaaggtgacaatgagccaccaaggcagtctaggagcttaaggggccaagatttcagggagaagagatgtgtagtcaggtgagttcagtaccctgagctgcctttctccttgcagtgtttgtaagtggaagcaaataagaagctgt

SEQ ID NO: 660810 - DNA, 605 bp, Homo sapiens
agtaggactgttgtctgtgtaagaagaggaagagacaccagagtgctctttcactgactatgcactgaggaaaggccacgtgaggacaaaatgagtaagcagatgtttgaaagccaggaagagagccttcagcagaatctgaatttaccttaacctcgatcatgaacttttagcctccagaattctgagaaaataaatgtctgttggttaagacacccaatatatggtattttgttatggcaaactaagtggactaataaaacatattatgttggcaatatggcaaatatggcaaaaaaaactttattacaattagaatattttaaaagtagaatggaccagcaatctctgtcatcaagccaggcctgtgttttggagcactctaatacttttttttttataatttgatttttatttatttatttatttatttttaattaattttttattatactttaagttttagggtacatctgcacaatgtgcaggtttgttacatatgtatacatgtgccctgtttgtgtrctgcacccagtaactcttcatttaacattaggtatatctcctactgctatccctccaccctccctccaccccacaacagg

SEQ ID NO: 660811 - DNA, 574 bp, Homo sapiens
tagcaatatccacagaatcattatctgtaatagcagaaaaaaaggaagacaaatacccagcttatttttattatttattcatttttgagatggtgtctcccttggtcgcccgtgctggaatgcattggcatgatctcgcctcactgcagccttcgcctcccaggttcaagcaattctcctgcctcagcctcctgagtagcttggattacaagtgcgtgcccccatgcccagataatttttgtatttttaatagagacagggtttcaccatgttgtccacgctggtctcaaactcccaacctgaagtgattcaccctccttgtcctcccaaagtcctgggattacaggtgtgagccacggcayctggctaacacagcttaaatattaaggtgagaaaggataaataatgttgcatacaatcaaggaaaatgtaaacattaataaaaatgatagaactctgagaactgcagcaatatggatacacctcctatacattaagtgaaaaaagtaagtttcagaaaaatatatataggatgatagtttatataaatgcataaacattacaaatgaaaaat

SEQ ID NO: 660812 - DNA, 577 bp, Homo sapiens
aggctttttcttatgcctattaagaaacagactattaaaaagtaataacaatatactgaaacaaatgaccacaaccactttttactccctagtccattcagttctatgtawttaattcttttaagggtaggttttggatatgcctctcttttcatgaagtcatgctttggattaaaaagagtcctggcaacctcaatagaccacgacagagtctgacaaatgactaagtcggctctcaggtttcaagcttggactattatttgaaatatcaatcattaatagtacctggttatctttttctacagtgttttgaggttgcctttcttagagacattagagctagcctgtgagccttcggggaagctcaaataatctgtagatgagactgcatagatgtagttaatttattatagtaacacattttaaaacagaaggagactaaaattctttgccagagtaaaatacatagttatttcatcagaatttgttaaatgattctattgaggatcacagcatgtgaatggaccatgatggcactgtcagatctacaaaccttacaatccattctgtaaatgtg

SEQ ID NO: 660813 - DNA, 483 bp, Homo sapiens
gatttcaagccactctagaatttttgattatttatttaggtgtatttgttatctcctttacttgattttatgctaggtgggagagaggcttatttctaaatcctgttggtatacaacataggacctaacaaagatttattcagtgacttaaattttgcttctaaaaatgtaataattccactagttttgagttttaaaaaatgatgaaaakttacttgtaactatagggaaaatttctgtttcctttaagataaaattgacattttgatgttttgggcattgtgttcagttgtatgcagaattaatctcccaatatcaaggtctttcattcaaattattttctttagcaaaaaggccatttggcaagaaatgttcttttgaaccctatagctcttgaattggtgccatcgtgttaaaatccctaacactgttttgtaccatttgaattgggatgtaaaaagaaagctattattaacctgcaac

SEQ ID NO: 660814 - DNA, 626 bp, Homo sapiens
acagctaggaaaaactgttgcaacacatgtagcagataaaagactagcatctcaaatgtataaagaactcctatgaaccaataaataataaaccaaaaagaagactgcaataaatatttaatagaagaggaaaaacaaaaggtcagtaaacatatgaaaatattcataatgctattagaatttagagaaatgcaaattgaaactacaatgaaattcaatctcatatccttccaattggcaaaaattaaatgtgtgtgtatatgcatgtgtcttctgttgctactaagtattggtgaagatgcaaattgctagtaacattcacatagtgccagttgaagtataaatttgtctaaccacttgggaaaataagttggcattacctactraagtgtgaatatgacaatgttctacgatccagaaattcttctcataggcctagcaatacacatagacatatacatgaggagatatatatggatgaatttatttatgtgtgtattataaatgaacctagataacagaccagaatgtggacagtaaaaacagatgcatgtgtgtatgtgattggctggctggggggtaggggtggggatacccaactcaaaacacggagttaagtggaagtc

SEQ ID NO: 660815 - DNA, 552 bp, Homo sapiens
ggtaggcagaaaaattatcccctctgtcctccttccgcscatcaccaaggatggcaacctactagtccccagaaatggtgaatatgttgtgttaagtggaaaggggaaattaaggctgctggtggtattaaggttgctaattagttgagatggggatcttgggataataagaatactctggtttatccaggtgagactaatgtaatcacagggatttctataagggagaggaggtaggagagtcaatgtgaaagtggaaaggagagtgctagaagccgagaaatgcaagcagtctctggaagctgacgatggccaggaaacacatttctccctcgtgtcttcagaaggaatttaggcctgccagcgccttgattttcctccagtgtgacccgttttagacttctgaaactctacctccacaattgtaagaaaatgaatttttattgttttaattcaccaagtttgcagtaatttgttgtaatgggactggggagctaatacaagtatcattacaaatctgcatggtagatacaattatcacggtattgtaga

SEQ ID NO: 660816 - DNA, 526 bp, Homo sapiens
tgacgatggccaggaaacacatttctccctcgtgtcttcagaaggaatttaggcctgccagcgccttgattttcctccagtgtgacccgttttagacttctgaaactctacctccacaattgtaagaaaatgaatttttattgttttaattcaccaagtttgcagtaatttgttgtaatgggactggggagctaatacaagtatcatyacaaatctgcatggtagatacaattatcacggtattgtagatgtgcaaatgaggtccagagtaaaaaatgacatgcttaaagaaagtccgccattaaatactgattgaaaaattagctcaggtgttttggttacaaaccccatggcactttttacataaaatgagagggttgaatgacatactttctaaggtctttccagttctaacactcaatgatttaaagtgtcaaatgaaatcacagactaaaatgtgagaatttgttggctgtgtacctctcggttctcaggagcatttctaaagcaaaaaggttttggtatc

SEQ ID NO: 660817 - DNA, 596 bp, Homo sapiens
aagtaaatgcattatgagttcctggattggattctaagacaggagagagasgagtatgggcaagctggtataattccataaagtctgcagtttgataatatgaaccattgctaatttatcagttttgagaattatatgtggttatgtaagataatagcattgggagaagctggttgaagttacacggaaatgctctttattgcttttgcaactctattttaagtctgaatttattttaaaataaaaagaaaacaatatggaataggagtcaggattttgtgggaaaaaatcctgagcagtataagaaatgctgcttttctgatttgcttaatgacacagagaaagtgtggggaaaatgcactttcaagtaaaaaatgattcagaagagtggtacactagggagatttaagaataatgggaccaatttgttttgtttttattacttttatatacaacataataatatatacaatataaatccatggcagaaagatttttaaaaagaactatttttataagtataaaataaaacaattagaaaacattgttctaacttaattggcagcatttatagtgataatggtgacatgagagcc

SEQ ID NO: 660818 - DNA, 596 bp, Homo sapiens
aagtaaatgcattatgagttcctggattggattctaagacaggagagagaggagtatgggcaagctggtataattccataaagtctgcagtttgataatatgaaccattgctaatttatcagttttgagaattatatgtggttatgtaagataatagcattgggagaagctggttgaagttacacggaaatgctctttattgcttttgcaactctattttaagtctgaatttattttaaaataaaaagaaaacaatatggaataggagtcaggattttgtgggaaaaaatcctgagcagtataagaaatgctgcttttctgatttgcttaatgacacagagaaagtgtggggaaaatgcactttcaagtaaaaaatgattcagaagagtggtacactagggagatttaagaataatgggaccaatttgttttgtttttattacttttatatacaacataataatatatacaatataaatccatggcagaaagatttttaaaaagaactatttttataartataaaataaaacaattagaaaacattgttctaacttaattggcagcatttatagtgataatggtgacatgagagcc

SEQ ID NO: 660819 - DNA, 570 bp, Homo sapiens
atggtttggatgttttctactccaaatatcatgttgaaatctgatttgcaatgctggtggtgggtcctggtgggaagtatttggataatggggatggattcctcatggatggcttagcaccatcctcctggtaatgaatgagttctttctctgtagttcatgtgaaatctgattgtttaaaagagtgtggcacttccccttctgtctctttctctttcactctcttgttacctctctcatcatgtaacatgcctgctccttctttgccttccaccatgagtaaaagctccctgagacctcacccgaaggcaatcagatgctggtgctatgctttctgtaacagctggcagaattgtgagccaactaactagaactacagaagactgatgaaaaaaatcacagatgacataaacaaatggaaaarcatcctatgctcatggattggaagaatcaatattattaaaatgaacatactgcccaaagcaatctacagactcaacacaatccctatcaagttaccaaggtaattcttcacagaattaaaaaaatgttaaagttcatatggaacca

SEQ ID NO: 660820 - DNA, 625 bp, Homo sapiens
atggtgctggcatctgctcagcttctagaggggcctcagcaagttacaaagtcccaatcatggtagaaggcaaaggggcagcaggcacttgatgtggtaaaaggagcaagcaagtggcaggaggcacttcatgtggtaaaagaaggagcaagtgagacagaaaaaaaaagagagagagaattggtggaaaggtgctatacamttttaacaaccagatcttgtgcaaactcaccgactgtcatgaagtcagcaccaagctgtaagggatatgcccacatgacccaaacatctccagcaaggccccacttccagccttggggattacaattcaacatgagatttgcacagttacaaatatccaaattatatcattctgcccctggcctctcccaaatctcatgcgcttctcacattgcaaaatacaatcgtgccctaccaagagtcccccaaagtcttaactcattctctcattaactcaaaattccaaagtccaaagtgtcatctgagacaagtcccttccacttatgagcctgtaaaattaaaaacaaattagttacttccaaaatacaatggaggtataagcatatcggcattaagtaaacatttctattccaaaagagaaagt

SEQ ID NO: 660821 - DNA, 625 bp, Homo sapiens
atggtgctggcatctgctcagcttctagaggggcctcagcaagttacaaagtcccaatcatggtagaaggcaaaggggcagcaggcacttgatgtggtaaaaggagcaagcaagtggcaggaggcacttcatgtggtaaaagaaggagcaagtgagacagaaaaaaaaagagagagagaattggtggaaaggtgctatacaattttaacaaccagatcttgtgcaaactcaccgactgtcatgaagtcagcaccaagctgtaagggatatgcccacatgacccaaacatctccakcaaggccccacttccagccttggggattacaattcaacatgagatttgcacagttacaaatatccaaattatatcattctgcccctggcctctcccaaatctcatgcgcttctcacattgcaaaatacaatcgtgccctaccaagagtcccccaaagtcttaactcattctctcattaactcaaaattccaaagtccaaagtgtcatctgagacaagtcccttccacttatgagcctgtaaaattaaaaacaaattagttacttccaaaatacaatggaggtataagcatatcggcattaagtaaacatttctattccaaaagagaaagt

SEQ ID NO: 660822 - DNA, 622 bp, Homo sapiens
caatttgcatatcttttctttctttttcttgtctgattactttgctagtacttctaatactacgttgaatagaagtggtgttagtgggcaccctcgctttgtacmacagccaataaggcataatgtccccttatgcttcaaagggtaagacactacatagtggtgattctggaccctaggatggtatgacatggcagtatcctaagctctctgagatgggtacagtggtagcatggacccaggaatagcagaatgcaatcatggacgacccaggagtggcagaatggccctgtggggcaggggcagtgaagggatgatttcactacctgggaagacagtacacttcagcagttcagactctgaaaaattagttcagttatagggaagcaggatgctacagtagtttggtctggagggtcaggtatccaagcttagctgattctctgtttccttgctatgtggaatgccccattagctcagccttgggaggtgcttctgcttggctaggccgaaacattgattccctgggagacagaacaccacttcagcttaagcactgtgggtgaacatatgactgccttgggtggccaagaaaacattttctcagaaggcagcgtgctga

SEQ ID NO: 660823 - DNA, 590 bp, Homo sapiens
ggctaggccgaaacattgattccctgggagacagaacaccacttcagcttaagcactgkgggtgaacatatgactgccttgggtggccaagaaaacattttctcagaaggcagcgtgctgagtcagctcagaccccaaagtgctgagtgcagcagcaattggaaggagcaaatgaagcagctacccagcaactgggtccctctggataggatgtagcagtagcttgggtagaggagggtagtccaccaagagtgggtagagccacagtgacaaagcctcaccaatggaagggtattctggctgcatgcccccagagcagggcacagtacaacaatcattgtgattccaagatgacactgtgcagtagcagtgtgggccataggagggcaagcagcattggctccttctctgtggcgatcacagctgtgtggagtccaagtagctccctcacctgagcttagtaactgagtacagtaggagttactttcagtggtgaggactgtaggtgtccaaggtggagatgggggctgctgaggtccccttgttactttattcctgtagggagaagtctctcctggttccaagctgat

SEQ ID NO: 660824 - DNA, 622 bp, Homo sapiens
caatttgcatatcttttctttctttttcttgtctgattactttgctagtacttctaatactacgttgaatagaagtggtgttagtgggcaccctcgctttgtaccacagccaataaggcataatgtccccttatgcttcaaagggtaagacactacatagtggtgattctggaccctaggatggtatgacatggcagtatcctaagctctctgagatgggtacagtggtagcatggacccaggaatagcagaatgcaatcatggacgacccaggagtggcagaatggccctgtggggcaggggcagtgaagggatgatttcactacctgggaagacagtacacttcagcagttcagactctgaaaaattagttcagttatagggaagcaggatgctacagtagtttggtctggagggtcaggtatccaagcttagctgattctctgtttccttgctatgtggaatgccccattagctcagccttgggaggtgcttctgcttggctaggccgaaacattgattccctgggagacagaacaccacttcagcttaagcactgtgggtgaacrtatgactgccttgggtggccaagaaaacattttctcagaaggcagcgtgctga

SEQ ID NO: 660825 - DNA, 590 bp, Homo sapiens
ggctaggccgaaacattgattccctgggagacagaacaccacttcagcttaagcactgtgggtgaacatatgactgccttgggtggccaagaaaacattttctcagaaggcagcgtgctgagtcagctcagaccccaaagtgctgagtgcagcagcaattggaaggagcaaatgaagcagctacccagcaactgggtccctctggataggatgtagcagtagcttgggtagaggagggtagtccaccaagagtgggtagagccacagtgasaaagcctcaccaatggaagggtattctggctgcatgcccccagagcagggcacagtacaacaatcattgtgattccaagatgacactgtgcagtagcagtgtgggccataggagggcaagcagcattggctccttctctgtggcgatcacagctgtgtggagtccaagtagctccctcacctgagcttagtaactgagtacagtaggagttactttcagtggtgaggactgtaggtgtccaaggtggagatgggggctgctgaggtccccttgttactttattcctgtagggagaagtctctcctggttccaagctgat

SEQ ID NO: 660826 - DNA, 701 bp, Homo sapiens
tccccttgttactttattcctgtagggagaagtctctcctggttccaagctgatccccgctgggagatgaggtggcaaaggcaaggtgtttcctcttattctctatgtgatcattctaactttctgtgttatttgcggtttctgcactctattgatatattccagcacttgcttttagttattttcttcaaaatgtagttgtgtatttgctgctttgtctttgtcagtgggacaagtgccagggggctctaggttggctatcttgttgatgtcactattccatagtttatttgaaaatagttaagaataaatcaggtataatataatattcttttgaataatgttaataagaataatatactctgttaatattttaaattttcaaaattactcaatattgataaggatcaaaagcagaatttttaacactaagcacatattgaattgcccattgcaatctaaaaacacctactkcaattctgcataatgtaaaaatcaggaagcagtttttcacttgttaacagtgtaaaaaaatatgacacaacctgaagaatattatctccaatatggaacaaattatgtatgccttagggaatgaaaaccctgtcacctttttaaacaaatttttatatttgcatcataatttataaaatttatttggatataattttgacttacagaaaattgtaaagatagcacag

SEQ ID NO: 660827 - DNA, 633 bp, Homo sapiens
ataagagattcaaatatattttttagatttccattttcaaaaatgtgtctcccccagaattcctatgttggaagtcttaacactcaacacctcagaacataaccttatttggaaattggggtcattagcagatgtaattagttaagataagaatataatggaatagattcaacccttcatctaatatgactgttgtctctatgaaaaggggaaatttggagccagagatagatatgcaaggaagaaagatgatgtaaagagacacaggggaaatatggtcaactaacaagccaaggagaaaggcttatttttctctcacagtcttcagaggaagcaaacttggcagacatttgattttggacttctaacctccaaaaccataagacaataaatacaattttggtgtttaagccactctgtaatattttgttacaaycttttaatttaaacaacaaaattggtattttaagttataaataaatatgagttttcactgaaggataaatattttatctagcattctctttttactctcattcttaacacagcactatttttttctgggccattttcttaatctcgtgatgcatactggctgatttctgtttattttctgaggtatatttatgtaaa

SEQ ID NO: 660828 - DNA, 535 bp, Homo sapiens
ggaggtaagaaagaaaatagagatgatactataaracctgagaaaggccacttttctcccctatgaacctaatttttaaaatttctgactgacaaatataaaaattatttgactgtgaagtacaatccactgggatacaactatagagcaaggtctctataatttctactgttgcagaagaattaccaagatagaagccattatactgagtgctgggaagatggcagaacaaaaagcctgttgtaaaaaggaagacattcccaatcaatgaattacattcccaatcaatgaattagattcaggattttgacttcactaaatctctgatttttcttactagtccataaagttttagttcactaatacatattgcatgtgttggagtggttaaatttcatccaagtataggtttctagaccataaagaataccgcacatctggcaaagacagagacatgcttgtcacttagaaattctgtacagagttaaacgcaagtttaactctgagtgaactttgcctctcagtgtcatgaatg

SEQ ID NO: 660829 - DNA, 625 bp, Homo sapiens
atatgtaaatcaataaatgtggtataccactgaacagaatgaaagacaaaaactgtatgatcatctcaatagttgcagaaaaatcacttgacaaaattcaacatcctttaatgataaaaacttgcaacaatgtaagtatagaaagaatataccccaacacaataaaggtcacattatacctgttacaaaggtaacattatactcaaagcttctcctctgaaagcaagcacaagacaaagaggtccactctcaccagttttattaaacatagcactggmagtcttggccagaaaggaaataaataaaaagcattcaaattgataagaaagaaattaaattgtctccgttaccagacatggtcttatatgtgggaaagtctaaagactccaccaaaacctattacaattaataaacggtcagtgaagttataggatacaaaatcaacgtatgaaatttgtagcatttttatacactaacaatgaactatctgaaaaagaataaagaaataaagataacctcatttccaatagcaccagaaagaataaaatacttggaaataaattaaaccaagaggtaaaggatctgtacactgaaatgatgaaaaatcaaagaagaaacacacaaa

SEQ ID NO: 660830 - DNA, 583 bp, Homo sapiens
gcagtaagctgacatcgctctactgcactccagtcccggcaacagagtaagacccgtatcaaataamtaagtacatatgtaagacatgtcaaagtgttaacaataataattttttgattttagtttttttctttttttaatgaaggcttttcttaaaaatctttttggttctgtgatttggattcaaactgagtgaaggatttttacactctgtatatttcaatttttttatgtgcatgtattattttgctcataaaatacaatgagcaggtattattttgataaacaggcaacttttaaaattgatcaataatgactttggggaaagctcaacagacaaatgtaggaatcatgacattattcgatgttggacttcagtgcagttaaggatagtcatgttttagactcttctggatgattttgcaagccttgtatttcttggcattggtttatattgtccctgggcattctgttgttatttttagcatgactgttttgacccacaggttgcatactatttctgctgaatcaagactacactgtcctgaacaggattatactggtatatggatgacttttgttg

SEQ ID NO: 660831 - DNA, 583 bp, Homo sapiens
gcagtaagctgacatcgctctactgcactccagtcccggcaacagagtaagacccgtatcaaataactaagtacatatgtaagacatgtcaaagtgttaacaataataattttttgattttagtttttttctttttttaatgaaggcttttcttaaaaatctttttggttctgtgatttggattcaaactgagtgaaggatttttacactctgtatatttcaatttttttatgtgcatgtattattttgctcataaaatacaatgagcaggtattattttgataaayaggcaacttttaaaattgatcaataatgactttggggaaagctcaacagacaaatgtaggaatcatgacattattcgatgttggacttcagtgcagttaaggatagtcatgttttagactcttctggatgattttgcaagccttgtatttcttggcattggtttatattgtccctgggcattctgttgttatttttagcatgactgttttgacccacaggttgcatactatttctgctgaatcaagactacactgtcctgaacaggattatactggtatatggatgacttttgttg

SEQ ID NO: 660832 - DNA, 454 bp, Homo sapiens
tgcatttttgaggaatttatccagatatctttgagtggttttgttattttgctttttaacctcatgtatcaatataatcagataatcataatattatataagaatctactcaaatcctactcttgaggtttttcttgcccaagtacagtaaactgtagaacatttctttaaaaaacggagacttataaaactctgggatatgagaattatttttagatgaacagtactggggaggagagaaaaagaagagagtrtaagtggaaggagatgaagagagagaagcaaaatagaatggtgaggaaaaatagaaacatgatttccagttagtacttctgtcctcattccattagcaacagaaatagcctcttgtcacagcatcttgtctgactggaaggctaacaccattttctagaggcatagaggagagctgtgctgttttgattctagcacaagg

SEQ ID NO: 660833 - DNA, 643 bp, Homo sapiens
gccttttcgttctcactccttgcctgcttctgatgctttgaccacttttataggtgagtgctccagaataatggatggtcttgggtggtgaataaaggtggataaatagggacagggatggttaaattgggagccgttcttatagccttgatgggttacttttccsccaagtttccttctccactaaaatgccacaacaatgcttgttggattgatgaggtggctagaccaatgtgttgttttttcttcttctttattctttaagcttcccttgagagaataaatagtaatggagagaactatttacgtagtcatttttaaataagtgaactggcaacctacagaatgggagaaattttttgcaatctatccatttgacaaaagggctaatatccagaatctacaaataacttaaacaaatttacaagaaaaaaacaaccccatcaaaaagtgggagaaggatatgaacagacacttctcaaaagaagacatttatgtggccaagaaacatatgaaaaatgctcatcatcactggtaattagagaaatgcaaatcaaaaccacagtgagatatcatctcaggccagttagaatggcaaccattaaaaagtcaggaaacaacagatgctggaaaggatgtggag

SEQ ID NO: 660834 - DNA, 529 bp, Homo sapiens
atgcgttcatgtcctctgcagggacatggatgaagctggaaaccatcattctcagcaaactaatacaaacacagaaaaccaaacaccacatattctcactcataagtgggagctgaacaatgagaacacatagacacagggaggggaacatcacacaccagggcttgtttggggttagggggctaggggakggatagtaggtgacgggttgattggtgcagcaaaccactacggcatgtgtataactgtatgaggaaactacacattctgcacatgtaccccagaacttaatgtataataaaaataaaacataaaatataaaaataaataaataagtttgacttttctttctcttcttcgcatgtgagttgggaaaaagtgctgtatgaccttagaagagttggtcataattgaccacaaaatcattaatctctaactctaaaacacattttaaacaaattcttcgttgggtctgtcgattatccacaaacatcacgaatgcaacatttttatttagcttgataattca

SEQ ID NO: 660835 - DNA, 514 bp, Homo sapiens
cattttcctcatttgttgaattaggaggtgggctccaggggttggagcaagcctcttggagtgacagtcatcaggatatccttgatgggccctgcttccttgggaactggcttatctgtctttgggaagaatgatttcccaccatcttcctggtcgaatggctgcaggagttcatttcccacttttgtagctctgagacgctctcaaaattatctccctctcggaatcctaatgatgagttccattgctgtgccaccttggccaagtccttccctmtctggcctcattcttcatctatgtgtgtgtgtgtgcatgagcacacgtgtgaccattaagtgcccatccaggttttgtagtttagggtatgggacgttttcacatctaggatgagtgtcgtgctagagtgaaggattcacatatgcaaatggatcccagtttgccccatcacaccctttggtgaggattccccagaaaataaggaactcagatcctaggaacatttataccaagttca

SEQ ID NO: 660836 - DNA, 438 bp, Homo sapiens
ccacttattcaatattaacaaattayagatttgtttagccttttcatagtatttgtttttttccatctttttagttttggtccatcttttttttcaatatttaaagtgagtttcttatagacatcaactagtttggtctttctttttcatccaatctaaaatttgctgccctctaattggttgtttagaccatttatatttaatgtgattattgatgtgataattgacattattggttttagatttatcattttgctatttattttctatttgtctcatctcatctcctagtatctctctgcctgttaacatgccttagacctctggagctcacagttttaattccactttgtgggctttttttttttttcctgtagttggcccattaagatattcattgattgattacattggctatgtcactcaacgtttattgct

SEQ ID NO: 660837 - DNA, 600 bp, Homo sapiens
gtggtacatatacacagtggagtactatttggccataaaaaagaatcagatcttgtcatttgcaacaacatgggtaaaattggaggttattacattaagtgaaataagccaggcacagaaagacaaactttgcacattctcactcatgggtaggagctaaagattaaaacaattgaactcatggagatagagagtaagacaatcggtatcagaggctgggaagcgtagtgggggtcaggtaaggggtgatggctaatacgtacaaatatatacctwtttgtgtgtattatatatacaatgtatatattgtatattacatattgtttatattatgttacatataatatataataggtacaaaaatatagttacaatgaatgtggtctagtatttgatagcacagcagggtgactacaggcaacaataatttatcatacatttcaaaattacaaaaagaatataattggattgtttgtaactcaaagacaggataaatgcttgaggttatggataccccatttaccctgatgttattattatgcattacatgcctgcatcaaaatatttcctgtaccccataaatatatacacctactatgt

SEQ ID NO: 660838 - DNA, 521 bp, Homo sapiens
gttttaccttccttctgttcctttatcctacagttagcaataaaatgcctattgactggttcatataatgcagtggacagatgcaagggaccatgctgaagataagtgtattgaatttaggaactaattgaatttgagaaggaagaagttgtctcaagtcttgaacatttataacagaagtaagagcatggactaaaaggtcagtcatttaagtagtgcagatagagattttttttttcttttcgtagagatgagatctcactatgttgcccaggttggtctcaaactcctgggctcaagcaatcctcctgcctctgcctccctaagtgctgggattacaggcatgagccactgtgtttggtaagatactattgtaagggatatcttattttggaatttgaaaatgctatggtttgaacatgtttcacaaaatgcatgtgttggaaacttaatcccyagtacaacagtgttgggaggtggggcctaataggaggtgtttaggccatcagggctccatcttc

SEQ ID NO: 660839 - DNA, 433 bp, Homo sapiens
gagaaccgtctagttttattcttccacatgtagatatccagttttcctagtaccatttcctgaagagattgtccttttcctaatgtgtattcttgacatctttgtcaaaaatcagttggttataaaagcatggattcatttctagcttctctattctctttcattggtctatgtgtctgttttcatgcagttaccacrgtgtttggttactactcttttgtagtatattttaaagttaggtagtataatgcctgcagctttgttcttttttctcaagattctttagctattcagggactttatgtggttccttgcaaattttaggattgctttttctatttctataaagaatctcattggtatttctataggtattgcactgattctgtagattgctttgagtagtatggccattttaataatattaattctt

SEQ ID NO: 660840 - DNA, 515 bp, Homo sapiens
gccccctcctaaacaaatcatctgatttcccatttctcattacaaagccaaatcaacttacatgtgttatgtttacacttaaagtgttaagagcatttaaaaccctgacaacaaagtgaacccttggggcataaaacaactgtttggataagggaccaagtttgcggttgttgccttttgaaaggyttagtttataactccttccttcctatcttccacagtgctcctgcccccaccccgctgttattactcctccttctccatacaggttaaaccttctcagatccaacctttaaaatgacagcatccaagctgaacaagaagatgctattaaagggcattaaattaaatacagtatatcctcctacaacttcaatcagaatttcagaccaagtgttatttagttcagctctcaagtggagcagaataacaaatcgcacactttgatttaccttcttcgaatgccaaatggagacaggtgataaagaacgcactcatgcacaggctatgaagtt

SEQ ID NO: 660841 - DNA, 515 bp, Homo sapiens
gccccctcctaaacaaatcatctgatttcccatttctcattacaaagccaaatcaacttacatgtgttatgtttacacttaaagtgttaagagcatttaaaaccctgacaacaaagtgaacccttggggcataaaacaactgtttggataagggaccaagtttgcggttgttgccttttgaaaggtttagtttataactccttccttcctatcttccacagtgctcctgcccccaccccgctgttattactcctccttctccatacaggttaaaccttctcagatccaacctttaaaatgacagcatccaagctgaacaagaagatgctattaaagggcattaaattaaatacagtatatcctcctacaacttcaatcagaatttcagaccaagtgttatttagttcagctctcaagtggagcagaataacaaatcgcacactttgatttaccttctkcgaatgccaaatggagacaggtgataaagaacgcactcatgcacaggctatgaagtt

SEQ ID NO: 660842 - DNA, 587 bp, Homo sapiens
tggacatttaaaactacataagctgaagccttttcaattatactttgttattaaaatagtttaatgagcacattcaacttcaaagttccaagctttcaattacccatctttacgagaattaatatggctcctgccctccagaaactttgttttctaaaacaggaatacacaaaatactcaaagaagatttgcatagtaggttaccttacaacgcaatgttaagtctgtttcagtattttatccttacatgtrtagtttcagaaggtcggtttgcatgcatgagagacgaattccttattggatctgcttatctccatgttcattaaggaccttaagcaaaatataagtttattctctcattagtaattcagatttcattactctgctccttcagttaaaatctttacatgctggcagctgttttgaaatattttgaaagttgctttggcattcacccaaccaaaaggactccagttagcactaaactgtatactctctcattttatacccctgcaacatataaatttcagtgcgtgtagagacttggaaaaggattatttgatgttttaaccccaaatacatgcata

SEQ ID NO: 660843 - DNA, 472 bp, Homo sapiens
ccctagcccacaaaatgtacgtcattagtttttttcctgtggaaagagaaaacaaaaacaaaatatttctttaaagactcgaatttcaagaaatttctaaatgtcactggtttgagagctgccctaatagtaaaactagagcaaacatttcaaaagcaaccaaagtccacttcctgttttacattcttctgcttctaaaagggtagggaatatattgcaaagacccaagatcctgaaagtacagaagaacaaaccaaaagagtgaatagagagccctygccagtttactttagaggcttactttcctacctggagggccagaaagaacaggtcctgttcaatatgtacgaggccagagagcgggattggtttgttaaggctgtcactgagattagagcttcccggagctcctgtcctaacatcaagtcaatttcttgctaaactcattctcattttaaatgggaaaaagatt

SEQ ID NO: 660844 - DNA, 472 bp, Homo sapiens
ccctagcccacaaaatgtacgtcattagtttttttcctgtggaaagagaaaacaaaaacaaaatatttctttaaagactcgaatttcaagaaatttctaaatgtcactggtttgagagctgccctaatagtaaaactagagcaaacatttcaaaagcaaccaaagtccacttcctgttttacattcttctgcttctaaaagggtagggaatatattgcaaagacccaagatcctgaaagtacagaagaacaaaccaaaagagtgaatagagagccctcgccagtttactttagaggcttactttcctacctggagggccagaaagaacaggtcctgttcaatatgtacgaggccagagagcrggattggtttgttaaggctgtcactgagattagagcttcccggagctcctgtcctaacatcaagtcaatttcttgctaaactcattctcattttaaatgggaaaaagatt

SEQ ID NO: 660845 - DNA, 597 bp, Homo sapiens
ttaactgggaggtaacacttgtgaaagatacagggcaagaaagtgggattagacagggaaagctttcagacttttagatgtactctgaaagtgtgtgagaaaatgggaggaagcaaattggagagcctcagactgccatgcagacctaaccaattcttggccaacccaatgggaagtttccaatcaaagattgcccatagaggagcacagcattgggcagaaatatcaggccctagaaccctgccatgctcagtcgtgaggatggggctgtgcaggaagagtgtggtctgagctagggtgctgtggtggatcctgaagtcactgcagatggagattagccaattgcaatctgagtgtcacacttccatagctgccacggttgtttaatgaacaaatgtttatttctcacttcaaaaaacagtaatgggcttgggcttggtggctcacgcctataatcccagcactttgggaggctgatgtggtggatcgctaaaggtcaggagttcgagaacagcctggccaacatggtgaaaccccatttccactaaaaatacaaaawttatccatgtgtgatggtgggtgcctgtagtcccagtt

SEQ ID NO: 660846 - DNA, 585 bp, Homo sapiens
gcagacggggttgtggtgggccgcagaggtgaagcaacagagcaaagcaagcaacaggaaattagactcaggtttgcaagcttagcaggagtcatactttaaagacttgaatgccagatcatggaatgtggattttatctcacatacatctgttaactgaaagtcatgcacaagaatgttcatggccacagtatgcaagcccccaactggaaatttcccaaaagcccatcaagagtagaatggaaaaatcaatcagagtatattcatgatagaatgagaaagaaaaggaacacaactccatacaatatggctaaatctcaacaacgaaagaagtcgcacaaaatagtacataygtaacgtttcaatttacagaaatagtttcaaaacaggcaagattacattatgctgttaggggacaggaatgggttactttcaaggtggaagaatgaatagcttcaggggtgctgataatattctgtttcttgatttgggtgctgattttacaagtataatttgtaaaaattcatggagctctatacctagtttttttgcgtgtacatgatatttcaataaaaggttttaaaa

SEQ ID NO: 660847 - DNA, 584 bp, Homo sapiens
ttgaaataattctttaaggaattattttgtaaataataatataatttgtttatataactcgcatatgttttgtgaccatatgtacaaatgaaaagtgaatataagaaatgggcccctgagaaactgatataaatcagttttccattttgttgttgttgttgttgaattatgattccttacagtgccatttagtatgttaaataatggtagttcattgaaaacaaaaatggtaagtaaaggtacccaagtcagtttattttcctgtcttaaacagaaatgacaatgaatctgggacataacttcatagggtagtaatttaactccaggaagccagattagaatgcagtaatacaaataatgagcaaaacacaatcaaacattagagaaataacccttaaactgacggacgtacaaatagaaaggacttttattatgtagaatatacccttttactgaccattttcaagatccttaagtataagaattaaaatcaaaacaaacttttakgtttgcctctggtaatttttatatgatacaaaagtccattttatttttacattggctcaaatgatagtgtataggtt

SEQ ID NO: 660848 - DNA, 546 bp, Homo sapiens
catccctgcatccctggtatgaaacccacttgaacatggtggattatctttttgatatgttgttggatttggctagctagtattttgttaaggattttagtgtctattttcatcagagatactggtctgtagttttctttttcagttaatgtcctttcctggttttggtattagggtgatgctggcttcatagaatgaattagggagggttccctctttctctgtcttgtggactagtatcgaaaggattggtaccaattcttcctttaaatgtctggtagaattcagctgtgaatccatttggtcctggactttttttttttgttggtaactttttaattaccatttcaatcttgttgcttgttattgttctgttcagggtatctaattcttcctgatttaagctaggagggttgtatttttccaggaatttatccatctcctctaggttttctagtttatrtgcataaaggtgctcatagtagccttgaatgatcttttgtatttctgtggtgtcagttgtagtatctcctgttttgtttctta

SEQ ID NO: 660849 - DNA, 628 bp, Homo sapiens
tatattaatgataagtagcaactttggtttctttgttatacgttggtgcagatattttggttggcattgattttatattaaaaatatatatatattttatcgcattttcagtttgataaaaagacttctactataataactataatatacccttaaatatttatcagtacatattcctctgtattttagtagtggaattatctatgtaattgagtgaaaacaggagtaaccacagatgcataaaaaaacacatctgtaaattattgcatttgccatcttttattaaagactgccttgcaattctgtttcacggaaatgaattaccagtaggtctttagartatgctaagatgacgaaaagggaagaaggaattcttctcaaaagatttgaatgtagtctttgagttgtagctaaagaatagtctgaaccctctatctactcatgtcattctttaaaaatagtggaaagaaatggttccaaaagctatattttgaagctattatctgttgtcaagggcaaactagcattttaaagctattgctttgatatggtttagctttgtgtccccacccaaacctcatcttgaattataaccccgaggtgttaagggaagaacctgatggaaggt

SEQ ID NO: 660850 - DNA, 551 bp, Homo sapiens
tgtcgcccaggctggagtgcggtggtgcgatttcctctcactgcaccctccccctcgcgggttcaagcaattctctgccacagcctcccgagtagctgggattacaagcgcccaccaccacgcctggctaatttttttgtatttttagtagagacggggtttcaccatcttggccaggcaggtcttgaaatcctgacctcttgatccatccgcctcggtctcccaaagtgctgggattacaggcgtgagccacygcgcctggccaaatattctttacatcttacctggcataaagtgatgtggtggagggatgcttaaatcctgatttacaagtattagtgagaaatgaggagcactgccctaacttaatagacttaactgtacgggctaaataagcctcattttttttttttttttaatgctctggtggtatagatgcagtctatctaaataaagtcagaacttgagagttttaaaaattaacttttttttttttgagacagagcctcgctctgtcagctcactgcaacctccacctcccaggttcgaac

SEQ ID NO: 660851 - DNA, 479 bp, Homo sapiens
accctgtgtgggtgctccaaacccacatttaccttctgcattgccctagcaagaggttctccatgagagctctccctacccacagcaaaagttctgcctggacatccaggtgtttccatacatcctctgaaacctaggaagaggttccaatgctcagttcttgacttctgtgcacccgcaggactaacatcatgtggaagttgccaaggcttggggcttgcaccttttgaagccatagccagagctgtaccttggccccttttagccacagctggaactgaagcagctgggatgcagggcaccatgtcctgaggctgtacagagctggggaktgccctgggcctggccaatgaaaccattttttcctcccaggcctacagggaggggatgctgtgaaggtctctgacatgccctggagacgttttccccatagtcttatcaattaacattcagctcctctttacttatacagatttctg

SEQ ID NO: 660852 - DNA, 542 bp, Homo sapiens
tgtcatggaagagctgacaggaagagctgtaaggaattgcgaggcaaaaatcaaagtgaaaattagaacccataaatgtaaatggagggctgaagccattttgactctgagggcatttgccaatttcaggaaatttgagctgaggtttcccaaggctcctccagaaagttctgggaaatcaggtctctaaatgaagactagcctagaaaacagacctccaggagtccttttcagtttaaacattatagaatttataargcttgtctatgcattcctttgacactgctggttcaggtgattcaaggacagttgtggcgccattagaaacttgctttgataccaagcatctagaaaatcttgcttgaaatcacaatattagggttacaaagcagaagcttgatattcttggagtcagtactcagagacatgaagcagctcagcacaattggttcaaaggaggaaaaataaactaagagattggatctgacagaagcagcaccttcctttctctgttaagaagggaggaaggaaatcctgtgata

SEQ ID NO: 660853 - DNA, 562 bp, Homo sapiens
cttaactgagaataattatcttttttacattacattttaatgtggaattttcattgaaatataacttaatgtacaacaggccattaaatgtacgccacaagtaaattttttcaaagtaaacagcatccagatctattttagacatttccagcacctcagaaactccttcttgcccatttctagtccacccctgacactgacttccagcaccataggttttttgcctatttttgaacttcatataaagggctacggtatggaacaggatgtactcttttgtgtctggttaatttttctcaacattatgattgtgaacwgtatacatgttgtaaattgaagttcatttgttcttattactgtatatttcatattttcccattctgctgaggggctcgggttgcttctggttttgaccacttacaaatagtaatgctgtggatatttttgtttacatgtttcaaatattttctaccattactaatgttcgacagtatctgatggaggtatgttacaatttcccactcttttggatatacaaatgcaaattaagcatttccctaat

SEQ ID NO: 660854 - DNA, 467 bp, Homo sapiens
ttataatattctctctagatgtgttagatgtattcttaggtccttcatttttgtgttattgtaaatggtattgtcagaatcttcagaagtaattattggccaggtgcggtggttcatgtctgtaatcctagcactttgggaggccaaggtaggcagacacttgagccaggtgttggagaccagcctgggcaacatggcaaacctcatctttataaaaaatacaaaaattagccagtggcacacgyctgtagccccagctactcacgaggctgaagtaggaggatcaattgagcccaggaggcagaggctgcagtaagccaagatcgcaccactgcacttcagcctgggtggcagagggaaaccctgtctcaaaaataaataaataaataaataaataaataaataaataaataaatgaatgaatgattattaccagtctcacagctgaggcagaaatttaaaacaaa

SEQ ID NO: 660855 - DNA, 467 bp, Homo sapiens
ttataatattctctctagatgtgttagatgtattcttaggtccttcatttttgtgttattgtaaatggtattgtcagaatcttcagaagtaattattggccaggtgcggtggttcatgtctgtaatcctagcactttgggaggccaaggtaggcagacacttgagccaggtgttggagaccagcctgggcaacatggcaaacctcatctttataaaaaatacaaaaattagccagtggcacacgcctgtagccccagctactcacgaggctgaagtaggaggatcaattgagcccaggaggcagaggctgcagtaagccaagatcgcaccactgcacttcagcctgggtggcagagggaaaccctgtctcaaaaataaataartaaataaataaataaataaataaataaataaatgaatgaatgattattaccagtctcacagctgaggcagaaatttaaaacaaa

SEQ ID NO: 660856 - DNA, 608 bp, Homo sapiens
ccctttatatattaagattaatattaagtgaagatatatcctattagttctgtccctctaaagaacactgactaatacacttagcttaaaagagaataactatcatagaaggataaagtggagatcaagccatctgaatactttgattctttgtttttactgttatgttaatttcttataattttttcaagtaaacaatcttcccacatctttcccttcattcctcttcctctctccatttcttccrtctttgttacattagtaattgattaatgcaggtttgtgattaactttctaaagttaagtggttctttagggcatataggaaataatatcaatagtcattgccatgtaattattggggctattttgacaaagtcagttatggtaatcacaggatcagctctaagataggtgacatctatccaatattatactaaaatttggtaagttccaaaagtgatcctgctgtgtcctaactaattctactagttgacagttcattcaaatagtgattcagtcaactcactgtatcacttggaatttccctttccaaattccagcatctcttagagggaaaatgcgtcaaatagttttcagtatttaac

SEQ ID NO: 660857 - DNA, 585 bp, Homo sapiens
tgtttttaaatatgaatattgaaaggtataaagactcacttgggaaatgtcaacactgtattcctcctacacaggtctaacaaaatctgtcttaaaaatctgtcttaaaaaattgtcctgcactggcatcaaataatagcagaaaaactgactmcatttttttaaaataatagctttctgttgtgaaattgtaatttgttatactcagaggagaacagctcttcttgaagaaaacaaataattttctaaaagcagtatattaaagatcttaagttgcttcactagcttgattttataccacttccatcaaatgggatttggctgatgaaactgcaaagtgaaacagtctatattttgtttacagtcatttttcaaatgcttggaggatgtaggatggaaattatcgttgcctgtgagtctacttacttgtgaaatgcttatgaaatgcctgtgtactgaacattaaggtgaataaagtactgcccccttttcaaaaaagattccagttaacaagagagtgaaaccagaggggcagggaagttgcgggtagtgtgctattgaagattggaagtttgttcagtttag

SEQ ID NO: 660858 - DNA, 585 bp, Homo sapiens
tgtttttaaatatgaatattgaaaggtataaagactcacttgggaaatgtcaacactgtattcctcctacacaggtctaacaaaatctgtcttaaaaatctgtcttaaaaaattgtcctgcactggcatcaaataatagcagaaaaactgactccatttttttaaaataatagctttctgttgtgaaattgtaatttgttatactcagaggagaacagctcttcttgaagaaaacaaataattttctaaaagcagtatattaaagatcttaagttgcttcactagcttgattttataccacttccatcaaatgggatttggctgatgaaactgcaaagtgaaacagyctatattttgtttacagtcatttttcaaatgcttggaggatgtaggatggaaattatcgttgcctgtgagtctacttacttgtgaaatgcttatgaaatgcctgtgtactgaacattaaggtgaataaagtactgcccccttttcaaaaaagattccagttaacaagagagtgaaaccagaggggcagggaagttgcgggtagtgtgctattgaagattggaagtttgttcagtttag

SEQ ID NO: 660859 - DNA, 532 bp, Homo sapiens
cctggatttttctaataccaactaactggccggtgcttccacctttgtcccctgtatagtctgttctcaaaagagcagcgagtgagcacatatggcttttgtaacaaaactttctatgtatgtgtgtgtgtatctacctatctatttatgtttatatcaatcatcaattatctatctatgccatagacttttgattatgagttaaattgattaaacctgttaaaatacaagtgtaggaaaaataaaatgaaaggttgatgacagtaataatataaattccttaattgcagtcaccatcttagaattatgtatgtacttttggatgtagctttaataaacrgtatctgaattttaacaatcacccagtatttaatgttcgagacctctgttagacttcctgttcctccataagccaaatacattttattactttatgtttcttattttatattttattgataatttttttcaaatattttaaatagaggttatcaaatttaactatgaatatatactttaaaaggaaatataa

SEQ ID NO: 660860 - DNA, 544 bp, Homo sapiens
aaattaaaccatgaatacttccacatgctgcagacagtgttatagtatgagtaggtgtttgtatccaacctattattgtattctgagctgccttgattgatctgttttcaaacttccactgccgtaaatctgcagtaatggctattgatacacttatttttaaatgagaccataatgcttccgagactttttcagtttttaaggtaaaagtagaattatgcagatttgaattttataaactaaacttttaagaaacartgtttcaatttctttgatttctgttgttattattatttgactgcgtttgttatttttcatttctcatccagtgctttttgtagctttctcctctccactcactctcccatctctttcttgatttttttttaatggtaatgactaaaagatgcctgtcttttggctcaggctgattgcttttgattttgtattcatttatataatttatattcagtactgaaaatccacttttagttcctttactagtagtgccaaataaccatgggcatcattgtctggcacagca

SEQ ID NO: 660861 - DNA, 544 bp, Homo sapiens
aaattaaaccatgaatacttccacatgctgcagacagtgttatagtatgagtaggtgtttgtatccaacctattattgtattctgagctgccttgattgatctgttttcaaacttccactgccgtaaatctgcagtaatggctattgatacacttatttttaaatgagaccataatgcttccgagactttttcagtttttaaggtaaaagtagaattatgcagatttgaattttataaactaaacttttaagaaacagtgtttcaatttctttgatttctgttgttattattatttgactgcgtttgttatttttcatttctcatccagtgctttttgtagctttctcctctccactcactctcccatctctttcttgatttttttttaatgrtaatgactaaaagatgcctgtcttttggctcaggctgattgcttttgattttgtattcatttatataatttatattcagtactgaaaatccacttttagttcctttactagtagtgccaaataaccatgggcatcattgtctggcacagca

SEQ ID NO: 660862 - DNA, 598 bp, Homo sapiens
tgattttgtattcatttatataatttatattcagtactgaaaatccacttttagttcctttactagtagtgccaaataaccatgggcatcattgtctggcacagcagaaggcagcaacaggttgtagaaaaatatagtgaatagattgaaataaaaggaaaaattgttatgtaagaaagagattctgcagggtgtggcagctcatgcctgtaatcctagcacstggggaggtcaacgtgagtggatcatgaggtcaggagcgagaccatcctggacaacatggtgaaaccctgtctctactaaaaatacaaaaattagctggatgtggtggcgcgtacttgtaatccagctacttcggaggctgagacaggagaatcacttgaacccaggaggcagagtttgcagtgagccaaaattgtgccactgcactccagcctggctacagagcaagactccgtctcaaaaaaaaaaaaaaaaaaaaaaagaaaaaaaagaaaaaagaaaaacaaaacaaaacaaaacaaaaaacagaaaagaaaaagaaaaaagaaagagatgcatctggttcattgccagctgcctggggtgctgctccatg

SEQ ID NO: 660863 - DNA, 598 bp, Homo sapiens
tgattttgtattcatttatataatttatattcagtactgaaaatccacttttagttcctttactagtagtgccaaataaccatgggcatcattgtctggcacagcagaaggcagcaacaggttgtagaaaaatatagtgaatagattgaaataaaaggaaaaattgttatgtaagaaagagattctgcagggtgtggcagctcatgcctgtaatcctagcacctggggaggtcaaygtgagtggatcatgaggtcaggagcgagaccatcctggacaacatggtgaaaccctgtctctactaaaaatacaaaaattagctggatgtggtggcgcgtacttgtaatccagctacttcggaggctgagacaggagaatcacttgaacccaggaggcagagtttgcagtgagccaaaattgtgccactgcactccagcctggctacagagcaagactccgtctcaaaaaaaaaaaaaaaaaaaaaaagaaaaaaaagaaaaaagaaaaacaaaacaaaacaaaacaaaaaacagaaaagaaaaagaaaaaagaaagagatgcatctggttcattgccagctgcctggggtgctgctccatg

SEQ ID NO: 660864 - DNA, 598 bp, Homo sapiens
tgattttgtattcatttatataatttatattcagtactgaaaatccacttttagttcctttactagtagtgccaaataaccatgggcatcattgtctggcacagcagaaggcagcaacaggttgtagaaaaatatagtgaatagattgaaataaaaggaaaaattgttatgtaagaaagagattctgcagggtgtggcagctcatgcctgtaatcctagcacctggggaggtcaacgtgagtggatcatgaggtcaggagcgagaccatcctggacaacatggtgaaaccctgtstctactaaaaatacaaaaattagctggatgtggtggcgcgtacttgtaatccagctacttcggaggctgagacaggagaatcacttgaacccaggaggcagagtttgcagtgagccaaaattgtgccactgcactccagcctggctacagagcaagactccgtctcaaaaaaaaaaaaaaaaaaaaaaagaaaaaaaagaaaaaagaaaaacaaaacaaaacaaaacaaaaaacagaaaagaaaaagaaaaaagaaagagatgcatctggttcattgccagctgcctggggtgctgctccatg

SEQ ID NO: 660865 - DNA, 608 bp, Homo sapiens
tcaaactttgggagccttcccctagatttcagaggatgtatggaaatgcctggatgtctaggcagaagcctgctgcaggggtggagcccttagggagaacctctgctagggcagtgcagaggtgaaatatggggttggagcccccagagggacttcactggggtacttcctagtgaagctgtgagaagagggccactgtcctcccgaccccagaatggtagatccatggagagcttgcactgtgcccctggaaaggccacaggcactcaacaccagcccatgaaagcagctatgggggctgtatcctgcaaaacgtcaggtgcacagctacccaaggccttgggagcccacacttttcatcagtatgccttggatgttagacatgggatcaaaggagawtatttttgagctttaaggtttaatggctgccctactgaacttcagacttcaaaacaaagtcctggaactcctttgttttgacccatttctccctttttggagtgggagcatttacccaatgcctgtatccttattgtatcttggcagtaacttgtttttgattttacaggctcataggcagaaggaacttgccttgtctaagatgagac

SEQ ID NO: 660866 - DNA, 608 bp, Homo sapiens
tcaaactttgggagccttcccctagatttcagaggatgtatggaaatgcctggatgtctaggcagaagcctgctgcaggggtggagcccttagggagaacctctgctagggcagtgcagaggtgaaatatggggttggagcccccagagggacttcactggggtacttcctagtgaagctgtgagaagagggccactgtcctcccgaccccagaatggtagatccatggagagcttgcactgtgcccctggaaaggccacaggcactcaacaccagcccatgaaagcagctatgggggctgtatcctgcaaaacgtcaggtgcacagctacccaaggccttgggagcccacacttttcatcagtatgccttggatgttagacatgggatcaaaggagattatttttgagctttaaggtttaatggctgccctactgaacttcagacttcaaracaaagtcctggaactcctttgttttgacccatttctccctttttggagtgggagcatttacccaatgcctgtatccttattgtatcttggcagtaacttgtttttgattttacaggctcataggcagaaggaacttgccttgtctaagatgagac

SEQ ID NO: 660867 - DNA, 608 bp, Homo sapiens
tcaaactttgggagccttcccctagatttcagaggatgtatggaaatgcctggatgtctaggcagaagcctgctgcaggggtggagcccttagggagaacctctgctagggcagtgcagaggtgaaatatggggttggagcccccagagggacttcactggggtacttcctagtgaagctgtgagaagagggccactgtcctcccgaccccagaatggtagatccatggagagcttgcactgtgcccctggaaaggccacaggcactcaacaccagcccatgaaagcagctatgggggctgtatcctgcaaaacgtcaggtgcacagctacccaaggccttgggagcccacacttttcatcagtatgccttggatgttagacatgggatcaaaggagattatttttgagctttaaggtttaatggctgccctactgaacttcagacttcaaaacaaagtcctggaactcctttgttttgacccatttctccctttttggagtgggagcatttacccaatgcctgtatccttattgtrtcttggcagtaacttgtttttgattttacaggctcataggcagaaggaacttgccttgtctaagatgagac

SEQ ID NO: 660868 - DNA, 517 bp, Homo sapiens
gaaatagagataatagtatttgcactgtatggttttttaaaggattaaatttttggtgttcttttttatttcttttaatgtgtgtacctactctatctatgaaaatgatcgataaaattcattttatggattgtacatttggtgtcaaggtttaggactctaactggccctggtcctaaatattttcttctctttttctaaaaagcttttttttttttcattttacgtagtacacttaagtcctgatacatttttgaaaatgtgtatgtaaggtttgagggttaggttgaggttaagcttttttgattgtttgctttttgctagatgatgtctaatttctccagcacagttggttgaaatactatctttcctctgttaaaatgcttttgctccttggtaaaaacttagttgagcatatctgtgttsgtatatttctgggttttctatcctgttccatcgatctatgtgtctgtccctctgccaacatcacgctgtcttaattactatagctataagg

SEQ ID NO: 660869 - DNA, 570 bp, Homo sapiens
tctttgtacttgctttcccattgcttataacactcctctcctgacctatgacccgaattcatgtggctctccacggtatcgcctctacagaaattccttccagtgctaccctactataaaaaaacacctcaatgccaacctgtagtctctactctttaacctttcccttcattgtccctaccacgatccgaacccacgtgtacttggtttttcttttccttcagaatgtaagctccatgagaggtaggcctctgtccgtttcttgtatccccagtatctraacaattcttaagagttttgtgctcaatcttaatttttcatatgaatgaatgaaattgaagatgtccctgatggtcgtgatgaagatcttctgtccttgaatccatcccagttagatctacgatcaagtacgtgccagcaaaatgcagggtgttagagctttgaccccgattcctttgtgaaaggcctggtaagctcacctgcattgtcttcctttgggggtgtagtcattcctttagctgagttggtaaccccgtgtcttatcggcctatcgatataagttctaagaag

SEQ ID NO: 660870 - DNA, 620 bp, Homo sapiens
aggtaaatgaggcaggacttagctattttccaggtatagagaacatagtatatgcaaaaatgtaggcatcaaatagcttggccctttcggggaactccatgcatttcactttggcttgagtggaaagtagatgtgaatggaaagaaatgaaagaaccaagatgtcaaaaagctttccatagcttcacaaggagtttgccttttatcctaaaggttgtgggataaataagaaaaatttgattctttattgtggacaatgaattggaggagataaaggctactggcagagaaaccagttaggagactgttgcagcaatccaggaagacataaattgaggtggtaaatatatggaggacagtatagatttagagttggcaaactttttttttttctgtaaatgggcagatagtgactatcttaggctttgtgagccatatggtctctgttgcaaactactcacctctgcttttgtagtgctaaaacagccataaacaatacrtaaacagatgagtgtggctatgttccaatacaactttaagcaggtggcagatcagatttggcacgtggtctgtggtttcatggtttgtgaaaagactgtggactttggagtcagacaaatg

SEQ ID NO: 660871 - DNA, 581 bp, Homo sapiens
tggtcccttttcttcatatcattgtgaacaattgctatcttttgactttttgataatagkcatcctatcatgtgtgaggtgacatctcattgtggttttgacttgcatttcctaatgactaatgatgttgagtaccttctcatatgcttcttggccattcgtatgtcttctttttagaaatgactattcaggtcctttgcccattttaaagtcgggttatttgtttctttgcttttgagttgtatgggttccttatatattttggatattaacctcttatcagattagtggtttgcaaatatttcctcccattctgtaggtcgccttttcattttgataattgtttcttttgctgtgcagaaactattttgtttgatgtggtcccacgtgtttgtttttacttttgttgcttgtacttttggtgtcatatcaaaaaaatcattgccaagaccaattttaaggaaatttccctccatgttttcttctaggacttttatgatttcaattcttatgttcaagtatgtaatccattttgagtggatttttggatatgatgtgagatgaagtcccaattttattct

SEQ ID NO: 660872 - DNA, 539 bp, Homo sapiens
tatagatataaatgcagttatctacgtctaaggattaaaaaaatcaagtaaaattattttcctttcctcaaaacctcagggattacaaaggaagacccctatatgcaactgaatctaaaaatgcactgtataaggtggaacccagaatgtatatcatttgcattattatatcataggataataagccagaaaaagagctctggttctagacataattatatagtcctacctatgttacacagttgttatgagatctagtcaaataacattgcaagcatgttttaagcttttaagtacaaaattattgttactattctcagaatactcaaaatccagcccctatgtgtctgttcctgtcaaaagaggtcaacttaagatgtattttattcatcaaatcttgctccacaaggctgttagataaaaagatctgtccttctttgtccattstgaaatcaggtcataactaggctggtgaaccccaagagccaggtcagttgtgacttattcaagtctttcagaacagccagtgaaatggttgg

SEQ ID NO: 660873 - DNA, 644 bp, Homo sapiens
ggttgtatagtgctactttgtatggctgtaacattctttatttaagcaattctatattgaagaacatttaaattacttccaatattaatattaaaaataatatgataaaaatgattttcataagtattttggtacatggacaattacctatttgggagcaaatttctagaagatttttggcacaaaggttaygcattttttttattggatatatagtgtcaaacctgaaagactgtaatgacttaacagtctactgacatattttgagtgtgtccatttctcttattccttgcaaatggtgattttgcccatttaaaaatacctctgcttgtctgaatttgaatttattgtatggtttttattttggatattcagtgattagtgaggttgaatgtatttattatgtttattgaccatttgtatgttttgcaaattgcctactatgtcctctatccattgtttttattagtatgctgtttcttttaaattaacttttatgatctttttaaaaaacatattagcgatataagcctttcgtttatcttacgtgttgcaaatagtttttccagctaacaattgattcttcggtcctattttagtaactatttatttatttattatttgccacgtagaaattttaaatt

SEQ ID NO: 660874 - DNA, 367 bp, Homo sapiens
tggtttgccatgctccatttccatgggactgatttaacrgaagtttcaattaccacccctccccctcaatttgttgtgggaagtggtgggtggaaagagagataacaagaaacaaagagggaacacaaaaataccactgtattttgtaactacgtgaaaaatggtaaaactaaaatagtttcatttttcatttgattttttttaacctaactgtgttcttcctttttcacttattgacatctatcagttctcataatattcctgtgctgtagaagaggcagtaatacattttattcttgggccttgttctgggtcaaacagggccatggtagagctaagacaaagttcaattctcctttctctttat

SEQ ID NO: 660875 - DNA, 530 bp, Homo sapiens
gagctcagtgcatagacatcctatcttgttgaatgtgcacgacacctcgagatgtaggcaggatccttccttttttacaggggagaagacggggccttggtgaggtgaagtagttcccagggccttccatccaggtgatggrgccaggaccttgcttctagttctcctgcctcccaagcttggctgtttcctacagctgcatacggccccacccagagggaggcagtcaccagagaaagagaatggcagtgacccagagggggcacagagctacttcctgctcagggagtgctgggcagcctcctgcgggggggagaggggggcattgaatgggcccttcagagaaggctgggagctcaccaggtcctgaggaagaggagggactgcgtgcaggaagcctcaaggcacgagccagcttagcatttgggggaactccaagtatttggtgtatacagtgtctgcagggtgcctgggcaggggtgttgggccaagcggtgtggcaggggaccatgtgtgctctggccaggggc

SEQ ID NO: 660876 - DNA, 552 bp, Homo sapiens
taggtcataatgtcaactgaaaataatattgtcttgtcaattataagtgttataaaacaaagattctctttataagtaaattcactgtctgatattagaaaacaattgaagtttaaaatacttttgcagtgataagccacaattaaagcaaatcawatacatacactaacaaaagcaaagacatttattgcctctttgttgtcttcaaggcatccacttattcattaataagttcattaatttatttcctcattcctttagtgatcaataattattactattttaaattatgtatacataataattgtatatatttagggtatatgtgaaattttgatacaagcatacaacatgtaatgatcaaattagggttgttgggatatccatcacctcaagcatttattatttacaggagacctattgtgcaggcacaattctagttttcatgtggtttgcagtgtagtgatgaagacagacattgaagggatgaatggacaaatgataataaaaataaaaatataaagagtcctgattgctactggagaaagtata

SEQ ID NO: 660877 - DNA, 506 bp, Homo sapiens
ttttaaagctgaaatgactcagtaatgcaatatgtattttttatttcttaaccaatttctctggaattttctttacactaaaaactgttctagaatacaaggattttatttaaagctacaacttacaaatatgaaacaagaaatgcttctcagtatctcatatcccttccctttttttcctaattatcttccgtttcttcgttctttaaartgaacagatgggctgttccaaagtttttacaaatctacttgctgaacattcttacagactaagcaacaattgaaaatgaaatccaccagttgttttactgctctaccatcaactggagcaataaaatgattccatgagggaattgttgccactagaaaatgtgataatgcaactttccatttccatttactttcattagtgataatagataatttcttcttgtttttcctcctatctttttctgcatataacagtgatttcaaattctttcagctgcagaaactttctttaaaaa

SEQ ID NO: 660878 - DNA, 578 bp, Homo sapiens
taatttcttcttgtttttcctcctatctttttctgcatataacagtgatttcaaattctttcagctgcagaaactttctttaaaaattatcttctgcatatttctagttacacagaagtagaaccccatggtgaagggtcaactcccaccttcttgtcttaagccactggagtggcctttgagatatatccatggaaaaaacagttgcaaaaacactgggctgaaagctttacctttccctaatgagtgccattatagttgacattttaaaccaaagtttacctttctatggcaggacttttggggcttcacagttatggccaatgtgttaatactaaaacaaattatataatttttaaagtcatttgatgcaatgaaagcttggtrtcatattgtggcttgtttgcttgttttatagaagatctataaactgtgttttgctctgaaaataactatatagacttagaaaataaaaggagcctaaataatttggaggattaatacaaatgtgacataaagaaatatacctctaggctagtaatctgaattcttgacagaacaataaaaaccaaaattgt

SEQ ID NO: 660879 - DNA, 628 bp, Homo sapiens
tttaccattttattgctttcagacgttatcaaaaatcaagtaaatattttgggaggtttatttttgaagttttccctctattccattaatctctgtctttaagctactagtatattgtctggattattgtaccttyagaataatcttgaaatcaaacggtataattctttcatcttttttcttcttttacaaaacataattatttcttattttttacattatcatattaaagtggcttattaattctatttttaaaactgcttaaatttagattggaattgagtattgtctaggggtctattttgagaaaacaaatattttgacagtattgaatattctgatacatcaacaattatttggattcttcattttttcttaatgtttcatagttttcagtgtacatgtcttacaaaatgtgaatttcccataaatatgtttttgtagacactatgttatacgttcttgttttaattttgatttccacttttttttcagagtgtagaaacgtaaataatttttgtatattgaccttgtattctgcaaactggataaacgtatttattagttttctaatgatagtttttactcttaaaccaaccttatatacttaaaccccaggacacaatct

SEQ ID NO: 660880 - DNA, 628 bp, Homo sapiens
tttaccattttattgctttcagacgttatcaaaaatcaagtaaatattttgggaggtttatttttgaagttttccctctattccattaatctctgtctttaagctactagtatattgtctggattattgtaccttcagaataatcttgaaatcaaacggtataattctttcatcttttttcttcttttacaaaacataattatttcttattttttacattatcatattaaagtggcttattaattctatttttaaaactgcttaaatttagattggaattgagtattgtctaggggtctattttgagaaaacaaatattttgacagtattgaatattctgatacatcaacaattatttggattcttmattttttcttaatgtttcatagttttcagtgtacatgtcttacaaaatgtgaatttcccataaatatgtttttgtagacactatgttatacgttcttgttttaattttgatttccacttttttttcagagtgtagaaacgtaaataatttttgtatattgaccttgtattctgcaaactggataaacgtatttattagttttctaatgatagtttttactcttaaaccaaccttatatacttaaaccccaggacacaatct

SEQ ID NO: 660881 - DNA, 495 bp, Homo sapiens
tttggagtccagtgcatggctcggattttctcgaattccattttgtctcttcaaaatgttctgtctatgtgtcatactccagagagccctaatcacattgtcatgtgttcacatttgatttgttaaaaaatggtcattactgaagatttttgaggagagaagtaacatgatcagagtcacacttaraaagatttctctgacaactctctggaagatggattagagaggagagagactgaaggaggggaaataagttacaatttgatttaacagcccagaagagtaataagagtctacactataatgatgacaacagtaataagaaagaggagatgggaaaaaaaaaaaaaaatatatatatatatatatatatatatatatatatatatatatacacacacacacacacacgcacacaatctatgtatatgttacatatacagttaatatatgtaaaacatatgtatagttatatataaaacatagatatagatg

SEQ ID NO: 660882 - DNA, 495 bp, Homo sapiens
tttggagtccagtgcatggctcggattttctcgaattccattttgtctcttcaaaatgttctgtctatgtgtcatactccagagagccctaatcacattgtcatgtgttcacatttgatttgttaaaaaatggtcattactgaagatttttgaggagagaagtaacatgatcagagtcacacttaaaaagatttctctgacaactctctggaagatggattagagaggagagagactgaaggaggggaaataagttacaatttgatttaacagcccagaagagtaataagagtctacactataatgatgacaacagtaataagaaagaggagatgggaaaaaaaaaaaaaaatatatatatatatatatatatatatatatatatatatatatayacacacacacacacacgcacacaatctatgtatatgttacatatacagttaatatatgtaaaacatatgtatagttatatataaaacatagatatagatg

SEQ ID NO: 660883 - DNA, 389 bp, Homo sapiens
ataatatttggcaagaagtgattataaattattttaaaaaatcaarcataaaagaaaagtgaactttctggttccttaagtaggcctatggagacacagtggcagagccaggtggattattctccttgattttcaaaatcagtgttttaatggagggctaattacgtagaagagaagaaatgatggtatgcaagaaaaacaaattgtatagataaaagctctttttgtgtgtggtggggaggagatttacacattttggtggtagatttggacagaactagaatttccatgtattttggcgttgggcagcagaacagccgaagtcttagtaaaacacacatacacacagagatgtgcacacacaggcacacactcacagaaacgtgcct

SEQ ID NO: 660884 - DNA, 389 bp, Homo sapiens
ataatatttggcaagaagtgattataaattattttaaaaaatcaaacataaaagaaaagtgaactttctggttccttaaktaggcctatggagacacagtggcagagccaggtggattattctccttgattttcaaaatcagtgttttaatggagggctaattacgtagaagagaagaaatgatggtatgcaagaaaaacaaattgtatagataaaagctctttttgtgtgtggtggggaggagatttacacattttggtggtagatttggacagaactagaatttccatgtattttggcgttgggcagcagaacagccgaagtcttagtaaaacacacatacacacagagatgtgcacacacaggcacacactcacagaaacgtgcct

SEQ ID NO: 660885 - DNA, 587 bp, Homo sapiens
ttaaatgttaaagtcctggtactactggagtgttaatgtctgagacattgtcacactggcacaggttgtgcttagggcccagcaaagaagaacatcaaatcattttagaraattatttcatgctttatatttaaaacaaaatcaaatgttatttttaaacaacaaagaacatcaaatcattttagaaaattatttcatgctttatatttaaaacaaaatcaaaatcaaaatgttatttttatgttaaatagatgatttatctatttaaaataagataaatagatgatttatctatttaaaataagataaatagatgatttatctatgggaaaaggcagaaatctgttgtaattcctaatacttacttaatggtttagctggttatggtttgaattaaaaatatatgggacatgtatattctttatcatatttagggtcgctaaaggtcctaaaacagttcttagcatcggcaagccatatgattaaactgattctttggagactgagagtagagaataatgattcaatgagaagcatatgggctattgaaaatatttctaagctgatgactatgatgtttccttaaa

SEQ ID NO: 660886 - DNA, 587 bp, Homo sapiens
ttaaatgttaaagtcctggtactactggagtgttaatgtctgagacattgtcacactggcacaggttgtgcttagggcccagcaaagaagaacatcaaatcattttagagaattatttcatgctttatatttaaaacaaaatcaaatgttatttttaaacaacaaagaacatcaaatcattttagaaaattatttcatgctttatatttaaaacaaaatcaaaatcaaaatgttatttttatgttaaatagatgatttatctatttaaaataagataaatagatgatttatctatttaaaataagataaatagatgatttatctatgggaaaaggcagaaatctgttgtaattcctaatactwacttaatggtttagctggttatggtttgaattaaaaatatatgggacatgtatattctttatcatatttagggtcgctaaaggtcctaaaacagttcttagcatcggcaagccatatgattaaactgattctttggagactgagagtagagaataatgattcaatgagaagcatatgggctattgaaaatatttctaagctgatgactatgatgtttccttaaa

SEQ ID NO: 660887 - DNA, 407 bp, Homo sapiens
agctgtcttgtgaccacttgtctttactatttgaaaacaatctaacctggatgatagagccaaaggcggttgtcttaagttgttttggagatgattagcctgtacagtatatacaaacttttcctattgtttaaacaaaagaaatcatagataactatttctttccagaatatcatcttagtttattactttagcattcaatttsactaactgaacctagatccatacacaacttaaaagagaatattttctttgcaatatttgtcttgtagaaactaacaacaaacaaaacctttttcttgctgctgttaagcaggggaaattctggcttgcaactccattcccctctcaataggtacccccagttcaaatatgcacatgttgcaagaaaaggccagcttcgtatt

SEQ ID NO: 660888 - DNA, 451 bp, Homo sapiens
gtgctaatatccacgagagtcagctttgctgtctgggtcctaagaaagagaatttttaggggtcrttagtgctctcaaatcagaaagacagcaaatgggacaatttgcagttagaagatctgaaaaaggtagtggagaccttaagaactgggagctggtgagggcaaggcaaatgtctaggtccctacacaccagtagagttttagctccagaaaaagagtttgaatccaaaccaaaggtgagactagaagcccatatatttggactgggaaacagagcacagatgtaaaagagaacacaaatctaggggtaaaaaggaatccaggactcagacccaggaccttcgatgctcagtttatactgaaataactaatttaaatcaccagtaacaatgtctttttatagtttctgcataataatcagagcttctctgaacaactactaagtacgt

SEQ ID NO: 660889 - DNA, 574 bp, Homo sapiens
ttatcagtaagttatttttgttcctccaggactatcaatgtcctcttcaaatatagttgaattcacatttgcacagtgaaccagttttctgggaactattatgaagtattaagtagaagctttggctggatatattaaataaaggcataaaggcataaaatatcaattgctaaagacaataccctaagttttgaataatttttttttttttttttttttttgagacagagtctcgctctgttgcccaggctggggtgcagtggtgcgatcttggctcactgcaagctccacctcccgggttcacgccattctcctgcctcagcctcccgagtagctgggactacaggcgccgccaccatgccaggctaatttttcgtattttttagtagagatggggtttcaccttgttagccaagatggtcttgacctcctgacttcatgatccacccactttggcctcccgaagtgctgggatwacaggcgtgagccactgtgccccgacttgaagaatttttttaattaacaaaagttaaagaaatgtcatttctctttttgattgaactctcttaatcat

SEQ ID NO: 660890 - DNA, 397 bp, Homo sapiens
ttaaagttttgctttcttatttgaaatatatttattccttgatgtcaagtcaaccgctccattttaaacattagagtagaactgaaaattgatccttgcttaactttttctttattcaaaagagcctcattgaatattgtcagagagtagttttgagaagaggctatgaaactgcaagtctttccaagttgacctttctggtgaagcggtgatctgatgtcaccagataagagtaaaacagtttatgctttgtgcttttaaaatgggttataaacaacatgagtttgactttattaaattaacttttcttttctaacaaacaccatctgtttaagcttggcaagtcttccacaggaaaaaatttraaaaatatgtatcctgaaatagaaaagagagt

SEQ ID NO: 660891 - DNA, 587 bp, Homo sapiens
ttgaaacatgatatatagaaggtcctgggttcccagsatacgaagcattcatatcttggttttttttatgagtttgctgaacattcacaactagctctttttctaattctctagagcatacatgaagtaatctttctttaggtcctttgctcctctttccaaattcctgaatgagcaacatagagacctgtaatagtgtctaaaatagcccaagaggaagtaaaatggtttatatgggtacaatctcagcttcaaggacaaaagtatattaattaataggagcatatttcaaagttcacttctaaagcttgccatttcattactgtcttggccaaagtacaaaatgatgatggtctatattatttaactacaatgaaatggccataaaatgttactgatattgagagaaaagtagattagcctgtattttttccatcagctcctttgaaagacaaagtgctaccatttcttccttttttctgtctaatctctggttcttttttttttttttttattcccattcctcctcctttttcttctttactccatcccctcatcgttctaccttcttctctagtttcacctct

SEQ ID NO: 660892 - DNA, 601 bp, Homo sapiens
gggaactaaatacatatgagaggtgatgaaaccccatgatcatttgaacatagccctcttttagagattgcttgagtctgtggggtagcagggagcagtagatgattgagagttatctggggacaattttaacacctttgtcttgtgtaaaggtattataaagttacgrtatttaagtgttcaagaataatgaagtacatgagagaatgttgcgatcttaacttggaatctaacagggtgtttacaacatgaattattaaatacagcattcttgggtagctttatatttcctgactaacacagcttctcagggtaactcatcatgtagcttcagaaaggatcctttggctttacagaatttgctatgagataaacgtcaatttagatgcaagattttgaaagaaaatggaaatttgaatacatattatttatacttttatttccataaaccagaggagtttcccctaacattgtttttatttaacaagtcatcagtaatagctttgagaagaaataattcatgtaactgaagttcaagacaatagtggacttgacagtatgtaactgtgctgagtgctggtgtactggtcagggtaatgtg

SEQ ID NO: 660893 - DNA, 577 bp, Homo sapiens
actccattttaagtagttattttaatcactccttgtttgtagtcagtgttttagamatagagctcaatatttgctaaaacatttaagagattgtgattccccttagaaatcttttcttgtgtgttaaaactctataggcaagacacttttctaaaaaatatttgcctgtaatttcagtccttttattttattcccatagagagaaaaatatgttcaccatttatacaaaatcatatactttatctgaagagagaatatactttcttggctaaaaaagctgagtttgaggtctatttcataaaattatttctcaacccatgcacacttttgctttccatattatttgttttcatacttaaattatgagatccttgacaaaatatatactacttaaaggactaatcaatattaagaatgtgtttagaaaatatacatttaaaatttatttgcatgtgcacccacatttacattcctaaatgaaaaatactaaagcagtctcagtcttgaagataactgtatgctgactaggattgtggtaaagaaattctattgcaacatggggcaagggttcacaact

SEQ ID NO: 660894 - DNA, 577 bp, Homo sapiens
actccattttaagtagttattttaatcactccttgtttgtagtcagtgttttagaaatagagctcaatatttgctaaaacatttaagagatygtgattccccttagaaatcttttcttgtgtgttaaaactctataggcaagacacttttctaaaaaatatttgcctgtaatttcagtccttttattttattcccatagagagaaaaatatgttcaccatttatacaaaatcatatactttatctgaagagagaatatactttcttggctaaaaaagctgagtttgaggtctatttcataaaattatttctcaacccatgcacacttttgctttccatattatttgttttcatacttaaattatgagatccttgacaaaatatatactacttaaaggactaatcaatattaagaatgtgtttagaaaatatacatttaaaatttatttgcatgtgcacccacatttacattcctaaatgaaaaatactaaagcagtctcagtcttgaagataactgtatgctgactaggattgtggtaaagaaattctattgcaacatggggcaagggttcacaact

SEQ ID NO: 660895 - DNA, 577 bp, Homo sapiens
actccattttaagtagttattttaatcactccttgtttgtagtcagtgttttagaaatagagctcaatatttgctaaaacatttaagagattgtgattccccttagaaatcttttcttgtgtgttaaaactctataggcaagacacttttctaaaaaatatttgcctgyaatttcagtccttttattttattcccatagagagaaaaatatgttcaccatttatacaaaatcatatactttatctgaagagagaatatactttcttggctaaaaaagctgagtttgaggtctatttcataaaattatttctcaacccatgcacacttttgctttccatattatttgttttcatacttaaattatgagatccttgacaaaatatatactacttaaaggactaatcaatattaagaatgtgtttagaaaatatacatttaaaatttatttgcatgtgcacccacatttacattcctaaatgaaaaatactaaagcagtctcagtcttgaagataactgtatgctgactaggattgtggtaaagaaattctattgcaacatggggcaagggttcacaact

SEQ ID NO: 660896 - DNA, 356 bp, Homo sapiens
gcgacaagctccctttgactgctcacttctccagtgaggcttcaagcttctaggcatcaagattagtaaggctgtcttctgggtgggccagtttgtttctcagtgacacgaaaacattgcctggggtgtgcactgggtgaggcttgtcagtcaagatatgattttgcacttctgatggattttccaactattcactacaagttaaagatactagaaatatatacttccctatatctcttctcctaaccacattgaattgtttttatttgaacagttgyatgcagcatgacagcagtacattagggttggaaatacacttaaatgttcagtcgatacatccatctggtgcttaaatt

SEQ ID NO: 660897 - DNA, 587 bp, Homo sapiens
atggtgagttttcagccttagatttaaaattcttataacttttattctttttttgtacttccacagtgaatagggcattcagtgttatgttcaactcaaggaataaaacagatatcctagactaatttctgatctcagaagtagaactttcaatatctyaccactagctaaaatgtttgttgtgtgatatttgtagataccactcaccaaatcaagaaagtttttacctatttctagtttgcagagatttagtcatgagctgtttttaattttatcaatgtttcccatgtcagttgcattgatttggttttatattttgtatttttttctatattttattaacatgaatgatgaccagctattggttttacatacttggaacaaattgaacttgtttgtggtttactttcttatttatttttctgaattcaattagctaatattcaaattagaattattgcatctgtgtttatgaaggagcttatgttaaatttcctggtattgtttagtatcaagagtgttataacttcatagaaagagttaggaagtgttttcactccttataaaacaggttgtgtaaggctggt

SEQ ID NO: 660898 - DNA, 588 bp, Homo sapiens
atgattctttatattttgaaataatgctagtgtttctgcaactgaatattatggatttataaatgtggctgggcaaggtggctcacacctgtagtcccagctacttgagaggctgaggagggaggattacttgagcttrgaaggcggggttgcagtgagcagagatcaggacactgcactccagcctgggcgacaagagttaaacggtctcagaaataaaaaataataatacattttaaaagaaataatatgtcaataatcgtggatcaaattacttctcaagaagttttaaaaaatgaacacatttttattgcttcttatcaatcagtaaagataatggaggtggattctgtgattctttatatttttgaaaaatgctaatatttctgcaactgaatattatagatttatacattttattgttcttcccagaaattttaacacacacttcctatgctttatgatttcagttattttattcagagaaaatatttcgaatcacaaaatatgattctgtgatatcttcagagaagtttgtagaagtatgctggcttgtttaaaatttaattccaaacataatggaagttg

SEQ ID NO: 660899 - DNA, 567 bp, Homo sapiens
attcaatgtgtagtagtagtaacatcagagtaaatggcgtattcatcacctcaagcatttatcatttatttgtgttataaacattccgattattcttttagttattttaaaatgtacagtatcatygactgcagtcattctgttgtgctatcaaacactaaaccttattcattctctttaactatatttttgtacccatttatcatcccttggtccccctctgccaccccatcactaccctttccagactttggtaaccatcattctactgtctctttgagttctatttatttatttatttatttatttatttatttatttatttagacagggtctctgctgcactgccttgggttgggggaggggtgacgcaagtacttccttggctaccccagctggtgtgccactaagttgtttgcaccccaagttcacttgctccaagcctgggacagcaccaggacttgcctaggagtggcagtctttgtggcttagactgcctttaaaatttgtttagaaccctagagcactttagccatggtactggggctagctggaacttagtttctg

SEQ ID NO: 660900 - DNA, 567 bp, Homo sapiens
attcaatgtgtagtagtagtaacatcagagtaaatggcgtattcatcacctcaagcatttatcatttatttgtgttataaacattccgattattcttttagttattttaaaatgtacagtatcattgactgcagtcattctgttgtgctatcaaacactaaaccttattcattctctttaactatatttttgtacccatttatcatcccttkgtccccctctgccaccccatcactaccctttccagactttggtaaccatcattctactgtctctttgagttctatttatttatttatttatttatttatttatttatttatttagacagggtctctgctgcactgccttgggttgggggaggggtgacgcaagtacttccttggctaccccagctggtgtgccactaagttgtttgcaccccaagttcacttgctccaagcctgggacagcaccaggacttgcctaggagtggcagtctttgtggcttagactgcctttaaaatttgtttagaaccctagagcactttagccatggtactggggctagctggaacttagtttctg

SEQ ID NO: 660901 - DNA, 567 bp, Homo sapiens
attcaatgtgtagtagtagtaacatcagagtaaatggcgtattcatcacctcaagcatttatcatttatttgtgttataaacattccgattattcttttagttattttaaaatgtacagtatcattgactgcagtcattctgttgtgctatcaaacactaaaccttattcattctctttaactatatttttgtacccatttatcatcccttggtccccctctgccaccccatcactaccctttccagactttggtaaccatcattctactgtctctttgagttctatttatttatttatttatttatttatttatttatttatttagacagggtctctgctgcactgccttgggttgggggaggggtgacgcaagtacttcsttggctaccccagctggtgtgccactaagttgtttgcaccccaagttcacttgctccaagcctgggacagcaccaggacttgcctaggagtggcagtctttgtggcttagactgcctttaaaatttgtttagaaccctagagcactttagccatggtactggggctagctggaacttagtttctg

SEQ ID NO: 660902 - DNA, 597 bp, Homo sapiens
gctgtgtcaggcagctactgctaaaacatgggggatgtgtaggtgattcaaggctgtctttactatccttttcagtgcctctctccttgatataatgctgaaactaagtaccatgattgctcagctaagttttggttcttatgaaagtgctttcttgcatgaatggttgtttaatctggtgtttctgtggaagggatgatctctggagggtwctgtttggccatccgctctctctctccttcctctgtctctcttttttttgtttgtttgtttctttatggcttctttctttcattcttttgctttaatcaagtattttaaagttcctctttatcttgtattatcttcttgtttcacatttagtattattttatcattttagtaattacagtagaacaaaatattttatgtgtatgtatgtaatgatttatgcacacacatgcgtacatgcaacttaaggtagcgtaaaaatagtaaatgaacttatgatagcgactaaaataaccacatacctggaggaaaaatacaggacaatatgttccagtgttctacactggaaactacaaaagctaattaagaacaattagagggacctaa

SEQ ID NO: 660903 - DNA, 625 bp, Homo sapiens
tcagctcagttgtttcatatctgctttcaactttttttcccaaaatatttctaagttgttcattgtgtaatcaaaatgtctttgtaggctcatgtctattcctccacacagtaactgctatcattacttaaaggtccactacctgtcaggtactcaattagggcatctcacaaatgtgtggaggaaagaattgaggaggtgatgcatgtacatcatagatggaagtgtctcaaacatgcaatacagattatggattaatactacaaattaatagctataatatttaagaacactgtattttatacttacaataaaagactatacattagttacagtaacgatattatagcagagcaagttgattgtcagagaatgttatttgtctgttgactcatggctaataattgttggtcttgtactggaacccagatcttagcaattccatagtctgtgttgcaaagtgatataayatatcagcttgtcataggactaataattatgacatatctgcttttagagtcctcaaatttacaccagcttttttgcagtggcacaatctcagctcactgcaaccttcacctgctgggttcaagcgattcttgtgcctcagcatcctgagtaactg

SEQ ID NO: 660904 - DNA, 535 bp, Homo sapiens
accatatgcagtcaacagaagccatgctgtacccagaataatttgcttagatattttttctgccaaatattctattttatcactcagagtttctgtcttccacaaagcactaggacgtcagcataattcagccaaattccttgcaactttacaacaaagattacctttcctctagttttcaataacatattcctcatttacatcaggaatttcatcaaaatggtctttaccatccatatttctaccaacacactgttcaagatctttttggcaatctctaagaagattgagactttttctatgactgtcttcttccgagtcttcatcagattgtccttcatgctccagtcacagaaatgtaagcaktttttctagaataaacttccaaattctccagcctctccccattactcaatccaaagctgctttcacatttttaggcatttgttccaacagaacctcacttctcagtaccagtgtcttagtttattcagttgctgcaaaaaaaaaaaaaaaagaaaagaaaaaaaaagta

SEQ ID NO: 660905 - DNA, 592 bp, Homo sapiens
cttccgagtcttcatcagattgtccttcatgctccagtcacagaaatgtaagcattttttctagaataaacttccaaattctccagcctctccccattactcaatccaaagctgctttcacatttttaggcatttgttccaacagaacctcacttctcagtaccagtgtcttagtttattcagttgctgcaaaaaaaaaaaaaaaagaaaagaaaaaaaaagtaccttaggrtaatttataaacagcagaaatttattactcacagttctggaagtagggaagtccaagatcaagacaccagcagatttggtgtctggtgagggcttgtttcccaaagaacgtgccttcttactgggtcctcatatggtgaaagggcaaaggggcaaacaaacttcctcagacttggggcactaatgccaatcacaaggtttctcacctcatgatcttgtcacctaccaaaggccccaccgttttgtaccaaaatattatgaattagatttcaaaatacgaattttggaggggcaaaatcagatcctaacaagtagcattttattgagattttttgcatcaatattcataagccatattagt

SEQ ID NO: 660906 - DNA, 560 bp, Homo sapiens
aagtttataagatcttggactgatcatgttgtctttattcagccactttcttggtaatttgtttagaccaagaattccatgttggaaattaagcgttctactaagctagaaggcagggttgttgttgcgaagtctaatagcatcattctcttaatctttttaacatttctttttctctttgaagctttttgaatcagctttttgctctaacattctgaaatataatggagatgtaattatcactagtctactttcactgcttcttttgggcatttattcagtgaatctttctgtctacaaagtccacaaaatttcttcaacattatgatacaatcctgctaagttttttctttctgctatgtttttctaatttctcatatatgttttctatttttttcatgctcttttgaaatggattccttttgtaaaatggatgtgatatcctttttcatatttctgaaaatattaataataattttcattaccgggggggtggataattttactgcataatctgttttctctaattatgttttttacytgtatatttacatggtctc

SEQ ID NO: 660907 - DNA, 525 bp, Homo sapiens
gtggataattttactgcataatctgttttctctaattatgttttttacttgtatatttacatggtctctgtcttttgtttcgttatctttttctggatatctaatttaaatctctgtgtgcatagatggagttgaccaatgctagccttcagtgtagggagacaccagtttgattcattgggaaatctccataattttaattttaatttgtatatcttcytttggtcacatttttcggaaaacattttggtatcctgcatgggagaatataaaccttgttgtgttcatttgagaagtgaaaagaggagactactggatatatcagaattccgtgtgaagagtcaaatttcctgttttccgtgtggtcccattacctttaattttgctggatacctaatagtgcagaaggcctctagtttagtctctttagagaataaatcttctgccttcttcctggtcgggggcagggaacacacattgattgaggaactctggtggttcaacttcttttaaaatggattttca

SEQ ID NO: 660908 - DNA, 525 bp, Homo sapiens
gtggataattttactgcataatctgttttctctaattatgttttttacttgtatatttacatggtctctgtcttttgtttcgttatctttttctggatatctaatttaaatctctgtgtgcatagatggagttgaccaatgctagccttcagtgtagggagacaccagtttgattcattgggaaatctccataattttaattttaatttgtatatcttcttttggtyacatttttcggaaaacattttggtatcctgcatgggagaatataaaccttgttgtgttcatttgagaagtgaaaagaggagactactggatatatcagaattccgtgtgaagagtcaaatttcctgttttccgtgtggtcccattacctttaattttgctggatacctaatagtgcagaaggcctctagtttagtctctttagagaataaatcttctgccttcttcctggtcgggggcagggaacacacattgattgaggaactctggtggttcaacttcttttaaaatggattttca

SEQ ID NO: 660909 - DNA, 566 bp, Homo sapiens
agtttcgcatatttggatggtgttgtcttatttgaggaattatttctgctaaattcttcctagattgaaagtaggaaattgcatttatctaacctatcttctagtggttttagtttgctgcattataaacaggccaactcctcccttcccatagcaacctgtgcttcattttcttaatatttctttaatgtttttgaaataatcttactcaagatatagattctttggggaaatcctaattatatcartcaagtttcatgtaacagtaatgttatacatcaatcatttcattgactatatttattatttttcataggctttgcactaaaataatcaaactaatttcatttaaaaatattctggatgttctgaaattcaggctggaggtgaaaatttggctgcatgagatttttattgggtttacaggttaactgctgtcattgggaatactgaaataatattgcttagtcaatgacctcattgggttaaacggaacaccaaaagacagtcttacaggaaaaaataagtagttagaattttgttttatttaagaggattatagatat

SEQ ID NO: 660910 - DNA, 566 bp, Homo sapiens
agtttcgcatatttggatggtgttgtcttatttgaggaattatttctgctaaattcttcctagattgaaagtaggaaattgcatttatctaacctatcttctagtggttttagtttgctgcattataaacaggccaactcctcccttcccatagcaacctgtgcttcattttcttaatatttctttaatgtttttgaaataatcttactcaagatatagattctttggggaaatcctaattatatcaatcaagtttcaygtaacagtaatgttatacatcaatcatttcattgactatatttattatttttcataggctttgcactaaaataatcaaactaatttcatttaaaaatattctggatgttctgaaattcaggctggaggtgaaaatttggctgcatgagatttttattgggtttacaggttaactgctgtcattgggaatactgaaataatattgcttagtcaatgacctcattgggttaaacggaacaccaaaagacagtcttacaggaaaaaataagtagttagaattttgttttatttaagaggattatagatat

SEQ ID NO: 660911 - DNA, 515 bp, Homo sapiens
attagtatatgggaacctggttccatatttggttagcctctgataaaaattgtctcttagcatcccatactattttaagcttgtttttgtcactcctcaatatgatgccaaattatctatcagaragagcctaacacctttaagtgtcatctgtataggcatttacttatcaacagaggtttcataaattctattaatatagtttaatgtttaccaatgccgtttgctatttcataaattcatacagtgcaagaaatgctggaagtatggaggactgtctctccttaccagaaaataggctaatgcttactgtaaaacattcttctaaaaatattcagtgcttgtggttgtagtctgaagtaggagttttaagagactttcctgatttttttttaaaaaacacagtggaagtttatttctcgttcacatgaaatccccctcgtgtttcctaagaagcttcccagatgagttttgcagacacaacggacctttctttagtgtctctacctgaattt

SEQ ID NO: 660912 - DNA, 572 bp, Homo sapiens
acatagagacaattagtgaattggacagcaaatcagaagaaattattcaaaaaaagtacagagaagcaaaaataagaaaaaaatatgagaaaaggtaaaaaacatggagggagaaaakatttaatgaataatgtggaaagagacagcagtaaaaatatagcacaaaacaatatttgattacctaatatctaaaaatgtcatagagctaatgaaagtcactaatgacaaatatacaggtttagaggaccccaagcatgagctatataaagagaaatctacacctagacatactgttgtgaaactacaggtagataacagctggggtggggtggggaaggaaatacagattaactttaaaaaacagcagctgcattctcatcagtgaaagctaaaggacagagaaagtaactttttcagtgttctgcgagaaaatacttattaatgcatcattctatacccagcaaatatatctttcttttagcatgaagatgaagtaaatcaattctcagccaccatcccctaccaccaccaaaaaaaaaaaaaaaaaaaaaaaaaatccaaatggttgtatt

SEQ ID NO: 660913 - DNA, 572 bp, Homo sapiens
acatagagacaattagtgaattggacagcaaatcagaagaaattattcaaaaaaagtacagagaagcaaaaataagaaaaaaatatgagaaaaggtaaaaaacatggagggagaaaatatttaatgaataatgtggaaagagacagcagtaaaaatatagcacaaaacaatatttgattacctaatatctaaaaatgtcatagagctaatgaaagtcactaatgacaaatatacaggtttagaggaccccaagcatgagctatataaagagaaatctacacctagacatactgttgtgaaactacaggtagataacagctggggtggggtggggaaggaaatacagattaactttaaaaaacagcagctgcattytcatcagtgaaagctaaaggacagagaaagtaactttttcagtgttctgcgagaaaatacttattaatgcatcattctatacccagcaaatatatctttcttttagcatgaagatgaagtaaatcaattctcagccaccatcccctaccaccaccaaaaaaaaaaaaaaaaaaaaaaaaaatccaaatggttgtatt

SEQ ID NO: 660914 - DNA, 572 bp, Homo sapiens
acatagagacaattagtgaattggacagcaaatcagaagaaattattcaaaaaaagtacagagaagcaaaaataagaaaaaaatatgagaaaaggtaaaaaacatggagggagaaaatatttaatgaataatgtggaaagagacagcagtaaaaatatagcacaaaacaatatttgattacctaatatctaaaaatgtcatagagctaatgaaagtcactaatgacaaatatacaggtttagaggaccccaagcatgagctatataaagagaaatctacacctagacatactgttgtgaaactacaggtagataacagctggggtggggtggggaaggaaatacagattaactttaaaaaacagcagctgcattctcatcagtgaaagctaaaggacagagaaagtaactttttcagtgttctgcgagaaaatacttattaatgcatcattctatacccagcaaatatatctttcttttagcatgaagatgaagtaaatcaattytcagccaccatcccctaccaccaccaaaaaaaaaaaaaaaaaaaaaaaaaatccaaatggttgtatt

SEQ ID NO: 660915 - DNA, 636 bp, Homo sapiens
ttctctagttcctctggttagtttgataagctattttaagagtgatggcaattgagtgaagatcatgttctyatccccatgacagccagtaagcttagtgctctttcatggccataggccatcactcaataatagctaaaacatattacccaacagagagcaagggatggaaatgtaaacagattagaatgaacatgtaacctatccaccatagcaaaatcttcttaaagagcttaaagtgctgatggtaaagaagtatttatactatattagatcaagggaccatgaggtaaatgccagcgtcatagtgtaagttagaagaccaagctttttctggtgttagatgatttttggacaaatttgtcttcagttttcccattcagcactccaaaattgacttgtaaatagcaactcttctgtagcaccttcaggttatttcagataggagtttctggtgctatacacagtattaaatgcatcctacagagtttgaaagtgaatcaaatacagtaatgaggaaaggggggaagtctatgagtttcagaggtttcctcggagacttgtaaaatatgcattagaagtaagcaatttaagcaccatgaattttattactagcccaaaagttaccctgagtct

SEQ ID NO: 660916 - DNA, 530 bp, Homo sapiens
aattttctttttacatgactgtaatttctcaaagtgaattctcttcttctcctctgatattatgctgtgttcaccccatctttaatcataatatgtttggttggcttcttagcaattgtcagcatctttgccacatgtttggaggcctgatatcagtttgtcaccatgtactgtatttttcctgtctggttgggagcagagagcaggtgcttggaaatcctgctctcatccattctccacacatgactggtctatgttcagctgaattatggtgaatatcacttgagaactgctgtagtaactgcacttcaagacctgcctgtaatcttgccctgctatttgatattcattcagcaaagcacataaatgaaattattaaaactatttaaggactcagatatgctcatatcatcttcaagacttatcatcttattataatacatgagaaatcagcgtaattytgaagaagttaagcttgacccagagtttggaacacaattgaaatacctaattgatggtttgttattaaa

SEQ ID NO: 660917 - DNA, 556 bp, Homo sapiens
aagtttatttctcgttcacatgaaatccccctcgtgtttcctaagaagcttcccagatgagttttgcagacacaacggacctttctttagtgtctctacctgaattttcatggcagaaaatagcctctagttgttgtatagctctaaaggttctcatttattcagatatacattatattgtatatccatgattccttgccttctagtttaagctatcatttaaacaataagggctagggttaaaaatgctctttttacagcccagtggtgtcttatttggcttttattacagaactattttatttaagcttaattataaatatttactaatgacttacctatgtgccatttgatgccaaaagtatattaaggagtattaatatgaattgtataatataacaactggagttactaaatgaagcatgatartgagacatatcaaaaagagtatagcagaaacagactggaatttgttggtagtctcagtagggaagcatgtgtttgtatcttgtaagatttctgtactcagtgtggagtgtcacagatgaagtgatac

SEQ ID NO: 660918 - DNA, 547 bp, Homo sapiens
agataatattttctggtttaagatgaacagaaaatacacttgtcaatgttttctcacagtcttttttttaagtaacaaaaacaaaattataagaacaaattaatgataaaaaaaaaraaagaaaggaggtagtgagaggccacaaaaatggagaattcccagtaaaggagaatgagtacatctttaaagagaaatcagagttgatagggtatatcccaagaataaacatggttttgtccaaggagccaagaagaagctccaggttctaaatccacaaattaaaagaaaaggaatgtgtcatggggcaacaaaaatgggctactgaaatgtaaatccatgagagcaggggtttcattggtcttgtttgctgctggaactgacatagaattttgcctggcaataaagagttcagtacagcatacagaaatttactaccagtagagtaaggagatctgtcattgttttatagttattttttcctctttatggctaaccaagatatggagttagaataagctcagctttgttgcactctcaggctttattt

SEQ ID NO: 660919 - DNA, 548 bp, Homo sapiens
gatataaagacgagaagaacttacagcattagcacaaaacattttttaaaaatttaggtctcagcttcattgttatctcctcagaaaagtttttccctgaccattgagtatgaagtatctactcgtcattctcaatcacagcatcttaatttaattatctcccttgcacttaattctaatccaatgttttctcatttatttaagtttttattattttttgttgtttgtattcctgtgttaaaatgtaatcttgttttctgtaatgctcacaactgtgagctgaggacgtcgaataattcctggcatgaaggattacttgatgcacattggttaaatggggataatgtcattagtctttgaactgcaatgtaggagttccaagtttttaaataagattaacatgtcatataataaaaaacattgatcaaaattgaaataccaaacaaaagtctctkaaaagccacaagtattcaataaatatcaatttcttactaatatgagttgggaagtaaaacaataagggctaaaactgactaaaatatttaggt

SEQ ID NO: 660920 - DNA, 597 bp, Homo sapiens
gactctctggaggaggtgacatatggtgctgagtcttaaaagacagggtgttgattaccaggggaagagagaatggcatgagtatgtctatttaaggcagatggaagagtttggataaaggcatgtaatcatggcttagtatgatgtgtttagtgctttctaaatagttgttattgctaaagtkcaaggcacacgggaggaggcaaaactaaaaagcagatgggatgaggccatgcaaatcatcatatgcacattaaaaattttaagtttttagataagttggaagtattgaaggattttaaccaagtgagtaatatcaggtctatgtttaaggtaaatcaatcaattggtaaagtggagaatgtatctgaagggtatagaagacaaatatcagaagtagattcgaacatcctaggccaaagacgatgaaggtctaaattggaaggttggatccagaaataagtggttgcccagatttgatgcataataattaaacaaaattgacaagacttgtagattatatatacaggtaaaggtaaggtccttataaacaaaatacctgagatttctcactaggtgtctgaattgttggtagag

SEQ ID NO: 660921 - DNA, 646 bp, Homo sapiens
tgatattgctgatagagggggttgaaaataattctacaaaatcttgacgctgtgcttttgaattaattcgagtcttctttttgaaaatctgagcctgtgagaccaagctatactttttcaatatttattaaattacatttctaaaatctaggaactatagctggctataatggatatccctattggttaacacaaagacgatgtgtttgatttcttacaagttttttttttttaattatcacttcaagaaatatatacttggcagccagaactggattcagagtaacatgttaccttattactccctctgcttgttaatagatgaaagtcaagtccacaatttgtcatacgcttgatacccctagctaaagtgaatctcattatccccattttgctcttctttctatgcaattctgtttctaaccctcactcatcacaaacccctctcaaacctcaaatttaatgttaatattatccaatctgttttagttggagtggtctgtcattgtttttacataatactrctttaatttatctaaacttattttttaaaacttgtttaaaagaggctttttatatagaaaataaaaatataaaacaacttgtcaatcttccattatggtctatatttatttatttatttggt

SEQ ID NO: 660922 - DNA, 643 bp, Homo sapiens
taaaaatatgtgtaggctattgacagagaaattgtmctaccaaatattaaacatattataaaagtgcaatgaaagcgttatagacgtgactcatgaattgattaacaataaaactggctagatagatacagacctatataaatgtaataatgcatgcaatgaataagactttagtttaaaattaaaaaaaatgaaagcaaatatgttgggagtcagtttgcctctgttagaatcctagcttcacaatttctgtcatgtgatatgggggaaaagattcaaactgtctatcactcagttttctcattagttaaacaacaataattcctatttcacagggaccatgtagagattaaataagataatacacataaagcaaaacttcttaacctgtgatccagtaacacccatgaggtccatgggtaggcattaagggcttggaattttatggaaaaaattacatcttcattttgataagctgtgactgaagtgtactatttcctctatcatgaatgtaggcagcaaaccacagtagtattagcaggagctatggtgttaccgttagaaatcagatatttttatacactacattactgtttttgtaaatatctcaaaatcttgtttgatattagccaacataatagtg

SEQ ID NO: 660923 - DNA, 643 bp, Homo sapiens
taaaaatatgtgtaggctattgacagagaaattgtcctaccaaatattaaacatattataaaagtgcaatgaaagcgttatagacgtgactcatgaattgattaacaataaaactggctagatagatacagacctatataaatgtaataatgcatgcaatgaataagactttagtttaaaattwaaaaaaatgaaagcaaatatgttgggagtcagtttgcctctgttagaatcctagcttcacaatttctgtcatgtgatatgggggaaaagattcaaactgtctatcactcagttttctcattagttaaacaacaataattcctatttcacagggaccatgtagagattaaataagataatacacataaagcaaaacttcttaacctgtgatccagtaacacccatgaggtccatgggtaggcattaagggcttggaattttatggaaaaaattacatcttcattttgataagctgtgactgaagtgtactatttcctctatcatgaatgtaggcagcaaaccacagtagtattagcaggagctatggtgttaccgttagaaatcagatatttttatacactacattactgtttttgtaaatatctcaaaatcttgtttgatattagccaacataatagtg

SEQ ID NO: 660924 - DNA, 643 bp, Homo sapiens
taaaaatatgtgtaggctattgacagagaaattgtcctaccaaatattaaacatattataaaagtgcaatgaaagcgttatagacgtgactcatgaattgattaacaataaaactggctagatagatacagacctatataaatgtaataatgcatgcaatgaataagactttagtttaaaattaaaaaaaatgaaagcaaatatgttgggagtcagtttgcctctgttagaatcctagcttcacaatttctgtcatgygatatgggggaaaagattcaaactgtctatcactcagttttctcattagttaaacaacaataattcctatttcacagggaccatgtagagattaaataagataatacacataaagcaaaacttcttaacctgtgatccagtaacacccatgaggtccatgggtaggcattaagggcttggaattttatggaaaaaattacatcttcattttgataagctgtgactgaagtgtactatttcctctatcatgaatgtaggcagcaaaccacagtagtattagcaggagctatggtgttaccgttagaaatcagatatttttatacactacattactgtttttgtaaatatctcaaaatcttgtttgatattagccaacataatagtg

SEQ ID NO: 660925 - DNA, 565 bp, Homo sapiens
tcagcattctaaattgtcaggaataaaataccactgacagatttagcatcccacacaggcaaaagcattctttagtaacaaggaagaactttaccatatggcaccccgctaggtggtggaatacaaaggtcttccaaagtacttattataattcrtataccatgagaagctgactaatgttttattttctttttaatcagagatctactcactgtcatgtctttcttcctgcctgcatcttctaactttggacataaacttcctaataagcaccatcacaaatcttttctcagttgcaaaaagaaaatacaataggagtcctgaaccaattaaatgaacatcatgagtagaagagaaagaaatgtgtaagatagatggagattgctaccaaatgttaacagccacaggaagacaaaaggtaaagagcaaaaaggtcactgaacaaatattttaataatgctttctttgaaattccatcagttacacattattacctttaccatgctgcagaaactcaggagggataatgtgaacagtattatttataatacaacaaacctcaaca

SEQ ID NO: 660926 - DNA, 649 bp, Homo sapiens
atcttgaattggcattatttagccagcaatagcatcagctagtaacagaaagcagttataaggaaaatgagcactaggagattattattatgtcaaaatatatgtaaataaaaacatcacacacacactaaaatgtagaagaacaaagccccactggaaaacaaaacaaaacaaaacaaaacaaaaaaacaaaaaaacaatggtaactacttggcacatagtcatctaattagaaagcacagttttgatacatccttactttggcaaaatattaagtccgttttccactggattgtttggagactattagtattcaggcttgaatccatggaatagggacatgtatttgtgtgtcacagattgaaggaaataatgatgacagaaacagcctctgcctcctatctagtgctgcagagacatcttaatagaggtgaaagaaatgcttttcttttttaaagccattttaggaaatagttatagacctccggggcagagcagagaggtagatcaggaaatatttatgcagaggagggatacctataaaaacygtagaacattgatcataagggattgcagaattactctgacactaattcaaattggagcacgacagtggccaccaaaggtgtttgttttcaagacagcacag

SEQ ID NO: 660927 - DNA, 454 bp, Homo sapiens
aagttaaaaagtagaagcattgcactgcagatatatattaagttttcacaaaatatatgtactcattatgaaaagtaaagggtcttaaatatggaaaataaagagttyctatagccctaatatttattttgaaccttttccctatggatgagtgtcctcaaatatttctagactatatagacaagttaaagggagactatattaaaagtactttaaaaatttaattagattattctttcattatttattaaatggcagcactgatacagtattttcaaagtttttttttaagtccatacagatgaaaatattcatggaactgttctttaatcactataggaatcactccctcctggcatccttggttacttacacattgtcatttttggttggagttaatttttgtccccatgaaatggctaaccaaggtgtaaaaacatatataagctaaggg

SEQ ID NO: 660928 - DNA, 535 bp, Homo sapiens
agtgccagtaattctaaacaatgttagcgactaaattagtctgttaacttggyatgccctggaaataatagatgatcatagcttggaccaaagattcagtcatttattcattcaaaaatatgtttaagtgccatctatgtgacaggttgtgttgtagacatgggaatgcagtagtgaacaaaaattctctcctgcaaggagcctatatttttgtacagggaagacagacaatattaaatacatgattagcatctccactggtgataatttttcttaagatgcccaagaggaaattttaattaagcacttggctataagctccaagtgctgaagcaatagctgggctaaagatatagttttgtatgtcatctgttggtaggtagctgcgataatcatgcatgtaaaaaaaaaaaaaaggagcttaaaaaagagctttcgaaagaagtgtgcagccgagagaggagtctaaaccctagcatgtaggagatgctccaacatttaatattcaggcaaagaaagatgagcttgcaaagaa

SEQ ID NO: 660929 - DNA, 535 bp, Homo sapiens
agtgccagtaattctaaacaatgttagcgactaaattagtctgttaacttggcatgccctggaaataatagatgatcatagcttggaccaaagattcagtcatttattcattcaaaaatatgtttaagtgccatctatgtgacaggttgtgttgtagacatgggaatgcagtagtgaamaaaaattctctcctgcaaggagcctatatttttgtacagggaagacagacaatattaaatacatgattagcatctccactggtgataatttttcttaagatgcccaagaggaaattttaattaagcacttggctataagctccaagtgctgaagcaatagctgggctaaagatatagttttgtatgtcatctgttggtaggtagctgcgataatcatgcatgtaaaaaaaaaaaaaaggagcttaaaaaagagctttcgaaagaagtgtgcagccgagagaggagtctaaaccctagcatgtaggagatgctccaacatttaatattcaggcaaagaaagatgagcttgcaaagaa

SEQ ID NO: 660930 - DNA, 573 bp, Homo sapiens
aacagtacctagttgaggaaccctaatccagaataataaacctagttaaatctgcctactccagaattcaaaccctggttttaagggctaaaaccgggatttccagttaaaaatttaggttttttttgtgtctaaatatatatattattagaaaaataggctaggcacagtggctcacacctgtaatcccagcactttgggaggctgaagtgggtggctcacctgaagtcaggagttcgaggccagcctggtcaacatggcaaaaycccatgtctactgaaaatacaaaaattagccgggcgtggtggtgcatgcctgtattcccagctacttgggaggctgagacatgagaattgcttgaatccgggaggcggagattgcagttagccaacatcgtgccattgcactccagcctgagcaacaagagcaaaactccaaaaaaaaaaaaaaaaaaaaaaaaacaggatgtgaagaaaataaaaagaataaaaacgaaacaaaaaaaccctataatctcaccatcacaacatactctgttatcctttttgtatatatttactaataatctttcat

SEQ ID NO: 660931 - DNA, 550 bp, Homo sapiens
tgaagaaaataaaaagaataaaaacgaaacaaaaaaaccctataatctcaccatcacaacatactctgttatcctttttgtatatatttactaataatctttcatatgtatttttatataattttaatcccattatgaactatatatctagattatttcacttaaaatgatacaataatcatagccatcttatttattcattgcataatatttaatcagttatacatatataccataatttgcctaaccactgtattattgatagacatttagataagctttaatttttcaccaytatatattaaaaagtcttaagataggtttttagtaatcacaaactatgatggttaatttaatgtgttagcttgactgggctaagggatacccagatagctggtaagatatcatttctggatatgtctatgagggtgtttctagaagagattagcatttaaattaatatactgagtaaaaaagatctacctttaccagtgtgggtgggcattatgtgatcgattgaaacactgaatggtacaaaagggtggagaaa

SEQ ID NO: 660932 - DNA, 550 bp, Homo sapiens
tgaagaaaataaaaagaataaaaacgaaacaaaaaaaccctataatctcaccatcacaacatactctgttatcctttttgtatatatttactaataatctttcatatgtatttttatataattttaatcccattatgaactatatatctagattatttcacttaaaatgatacaataatcatagccatcttatttattcattgcataatatttaatcagttatacatatataccataatttgcctaaccactgtattattgatagacatttagataagctttaatttttcaccattatatattaaaaagtcttaagataggtttttagtaatcacaaactatgatggttaatttaatgtgttagcttgactgggctaagggataccyagatagctggtaagatatcatttctggatatgtctatgagggtgtttctagaagagattagcatttaaattaatatactgagtaaaaaagatctacctttaccagtgtgggtgggcattatgtgatcgattgaaacactgaatggtacaaaagggtggagaaa

SEQ ID NO: 660933 - DNA, 506 bp, Homo sapiens
tgtgctgacctgtctctgcgtccgaattctccttttttataaggatacgagtcatgttaggttagggctcacatgaatgaccycattttaacaaaattttctctgtagaaaccctgtttccaaataagtttatattctgaggtactgggggttagggctttgacttattgtttttgggagatccaattctacccataacaaatggtagatgctggtctggcacactggctgtagccctggagtaagatcttggaggcttctggctgggccagtgttagcaatcagtcctttgatgctggactgtggggatacccggagagctcttggagagaggattgaagggaggtgctagacaaatatgtgaggcagaggctgtttaccagttggtaggacagcattttaagtatcatccttgggtagagagattgatttactttgcagtatattttaggggtgctgagaaggccatttccttgtaaaattcctgtttgttgacgaatatttga

SEQ ID NO: 660934 - DNA, 589 bp, Homo sapiens
gagtcacactggctaaacaacttgtccaaggccacaactagtaagacttccagagtctatgctgctaaccagtatagtagtgtgcctctatgtacactctatgtaaatagcatatgtgctaataataagagaactaccgtattttcactgttcttgggttggtctcatgatatatttttaaatgattttggcacaatctatctcagattcattttgtagtaatgaggaacatagaaaataaataaaactaaagattggctcactgggatgcattccattccctcctctccctttctccwgcagaggttataggccttggctctgagcatggccacattgattaggggcagatgttatatgatctgagacattttcctggcctcagcttttgataatgtctgaaattttaatcctggggattcattgtacttatagaagctctcagataaatagttgttgatatgatttacctatactgggatattcaagtttgagtacctactccttgctgttagcattttaattgcatctgagattactttcttagatgactagctgtgataagactctcaaggacagggacctcgtt

SEQ ID NO: 660935 - DNA, 650 bp, Homo sapiens
gttgggtttaccaggagtctctagttttcttgctttatgaatatttgagacacaattatagagactatttctcttcttcaagagggctagttttccctcccttgattctcctatttctatagtattttacagctctaagctgccttttatgttatcttactatcamctcttaagctcattaataatttatgctccacatgtgtgacttggtagctttaattagctgttactattttctagaaaagatggttttgagtatcattacatggaaaaaactacttaaggaatgtatgtagttaaaaatgaaataattttattggaactgtgttttagcctccaaatttactttcctttggtattttccttttattttatgtatgaaaacttgtttataaaatattatttttgtatattagcggattttttactttaagtgcttacagtgttttgggaatgcttttgcattgcctttccccaatatcccatttccattgccacatcaattttcaagtggttagtttatattcttttataggctataaatttgtaagctatatgaagaatggcttgtgtttttgtctaatatttcataagcctttgtacttagtctgaccacaattgggtatcttttaaagacttgaaatgattgc

SEQ ID NO: 660936 - DNA, 650 bp, Homo sapiens
gttgggtttaccaggagtctctagttttcttgctttatgaatatttgagacacaattatagagactatttctcttcttcaagagggctagttttccctcccttgattctcctatttctatagtattttacagctctaagctgccttttatgttatcttactatcaactcttaagctcattaataatttatgctccacatgtgtgacttggtagctttaattagctgttactattttctagaaaagatggttttsagtatcattacatggaaaaaactacttaaggaatgtatgtagttaaaaatgaaataattttattggaactgtgttttagcctccaaatttactttcctttggtattttccttttattttatgtatgaaaacttgtttataaaatattatttttgtatattagcggattttttactttaagtgcttacagtgttttgggaatgcttttgcattgcctttccccaatatcccatttccattgccacatcaattttcaagtggttagtttatattcttttataggctataaatttgtaagctatatgaagaatggcttgtgtttttgtctaatatttcataagcctttgtacttagtctgaccacaattgggtatcttttaaagacttgaaatgattgc

SEQ ID NO: 660937 - DNA, 591 bp, Homo sapiens
tgcttccagccattgtatttttttaaattatactttaagttctagggtacatgtgcccaatgtgcaggtttgttacrtatgtcagactcagctgactcgaagggccctgagccttcaatcaggtagaacttggctccaagaacaatatagctcaatgcacttctatggaagtagagtctctgtgtatgtgttgctctccttatcagaaggtatggctgttcgagtatcccaacagcggtcataaagatgtcttaagactaaattagtttgaaatcaacttgaatgcatcagaattcacaggaagtggggaaagagaagatattgcaaaatctaatatcacaatctgtcaattttttaaagctttgagccattgggtttgaccagtgttcctctgaactggtctttttaaagtgatggtgggataattttatgattgaaaagttctgtaattaaatgtagcataaaagaaaacttctagaactaaagaaatttagaaaaccgtgtaagtttgggtttaatttactgggatgaatgaactcttatttcatctgaataagtgcctctagataaacctgagaaaatcagagaacc

SEQ ID NO: 660938 - DNA, 550 bp, Homo sapiens
tgtgcttgcttttctagttctttaagatgcatcattaagttatttattttaagttttttttttcttttttgatgtcggcactcatagctataaacttccctgttagtactgcttttgctgtatatcataggttttggaatgttgtgtttccattatcatttgtttcaagaaatttttaaattttcttttcaatttcctcattgacccactggtcatttgagagcatattgtttaacttccatgtgtttgtatagtttccaaaatccctattgttgttaatttctagttttattccaytgtggtcagagaagatgcttgatattatttcaatttttttgaatgttttaaaacttgttttgtgacctaacatatggtctatcctttacaattattcctgtgctgaggtgaagaatgtgtattctgtagttattggatgaaatgttctgtaaatatctgttaggtccatttgttctatagagcagattaagttcaatgtttctttgttgattttctgtctgggagatctgtccagtgctgaaagtgaatgtaa

SEQ ID NO: 660939 - DNA, 550 bp, Homo sapiens
tgtgcttgcttttctagttctttaagatgcatcattaagttatttattttaagttttttttttcttttttgatgtcggcactcatagctataaacttccctgttagtactgcttttgctgtatatcataggttttggaatgttgtgtttccattatcatttgtttcaagaaatttttaaattttcttttcaatttcctcattgacccactggtcatttgagagcatattgtttaacttccatgtgtttgtatagtttccaaaatccctattgttgttaatttctagttttattccattgtggtcagagaagatgcttgatattatttcaatttttttgaatgttttaaaacttgttttgtgacctaacatatggtctatcctttacaattattcctgtgctgaggtgaagaatgtgtattctgtagttattggatgaaatgttctgtaaatatctgttaggtccatttgttctatagagcagrttaagttcaatgtttctttgttgattttctgtctgggagatctgtccagtgctgaaagtgaatgtaa

SEQ ID NO: 660940 - DNA, 598 bp, Homo sapiens
ttttcagcattgaaaacaggcatggttatgattgatcactggtttaccacctcttattaattaatacattttgaaggaatatttttatgtatacaaaatctcgttaatatttggaatatagttgcaaacatgagtttattttaacgaaaagatcaggataatcaagacaaatgttgaaaaaaatttcaaaagatttttctcttgtatttcattgagaataaggcttatgtaaaagcagattgtttgaatctccgtttctagtcaatccagtccccgtcttgactsccagttctgctgcattctaaataagcgactgtgagcaattctcattgcttttctgagtctcacttccttctgtataaaagtgggaaaaataatagcacctacatcatagcactgttaaaaggattaaataaattacttcatagaaagcttttagaacgctgtctaaagtttaagtccttataaatagcagttattagctattattttcatcaactttctacctaacatgttctagaaatcaccgctatttttagtggcctctttagtctgtaaataaatgtaacataaataataacactgttaggcacttact

SEQ ID NO: 660941 - DNA, 597 bp, Homo sapiens
tctgtgaattcattaaactaattctccatccagttttgttcccttgctggtgaggygttgtgttgtgatcccttggaggagaagaggtattccagtttttggaattttcaggctttttatgctggtttttcctcatctttatggatttatcttcctttggtttttgatgttggtgacctttggacggggtttctgtgtggacgttcttttgttgatgttgatgctatttctttctgttcgttagtttttcttctaacagtcgggcacctctgctacaggtctgctggagtttgctgtggatctattccagacctgtttgcctgggtatcaccagcagaggctgcagaacagcaaagattgctgcttgttccttcctctggaagcttcatcccagaggggcacccaccagatgccagctggaggagaactcatgtttcttatcaccatacttcgatattgctgagggaaacacttgccattttatcaaggattatcagcacagggattgtgaatcctaaacatttatttggagttaaagattggcttatcaaaggaaatcttttataagattattctcagtagctgaaataataagtt

SEQ ID NO: 660942 - DNA, 574 bp, Homo sapiens
tatcacttaaaggttaataggtttccccacgtggctgttagaggcagctaaaggcttctttcagcagaaacattctttcaaatatttatcatctagcatgggccacgcaccatgccaaggtttggggacacaaagacaaattatggcctctctcattttttaaaaaagctcatgccaaaagggagatttaatacatatataattgtgacacaaattgtgtaagttttgttagagatatatagaaaatattgtgagaatagacgtcagaaaattatttgctttgttgaaaagagttggagaattgttcacagtagagccatgccttagagatgagttacctttccagatagaaaaaagagaggattytagggagtgaaaacagcatgtgttgaataaagttcaagccccttaaaggcctgacctttaggcctacttatttatattcagcttgtgctgttgccattagttgtttatgttagccttctcctttccaatttttttttgtatatgacttggtagctgacaccatacattggctgttttttttctccctccccattatggatagtctttt

SEQ ID NO: 660943 - DNA, 566 bp, Homo sapiens
ctagttatttagagttggttaattcttggaattgctttgaatgtcatgtaaatattgttattattagtttgttaaaatgattcaaccagtcttttaggtgtggagtctattgcgctttttcaaattagtaatcaagttgtttctggaaagtgagagtcagtgctgctatgtatctcaaccacaacttgtatctaggacaaataccttaccaggtccctaagactatgtttctctctgagatgttggataattcagacttctcaaagatgaaggcagcayagccaagtggtaagatttgacagacttggagtcaaatcctggatctttcactactaactgtgtaacggtggagaaattatttaacctctctgagcctttgttctccatatgtaaaatgggacaatatttattcacaaatatttgttgactgcttcctatgtgctaggcattgttgttctggtgacattctaaggattagaagattaaaggagatgatgtgtggcacaaagttgatgctcagcattagcaagtcatagttcccctcatctttaccgtaattcacttta

SEQ ID NO: 660944 - DNA, 303 bp, Homo sapiens
aacagttttatgatagtggtaataaaaattaaggcagattcctggaatcatttctctcccactctgtgatgaatgcatcttttatcgtgagatttcattgttcagggtctttggtaatcgtggagcaaatggccatrgtgggtttttgaatctcactattattgatgtgctttatttaattcagcttttcaatttctccttttagcctgaagttacacattaattactcttgtgtttgtcatagagtcattgacctaacttgagatagtcagagtattttaaatttagcaaattcttccccag

SEQ ID NO: 660945 - DNA, 615 bp, Homo sapiens
ctgaaaacccaacctaaactggcttatgctgtttaaaagagagagtttattggtacatatgagtcatatgtgaaacagcctcaactgtgcctgaattcatggctaaaactacacaaccaggarctgggttcttgatactcatttattggatctgcttcttcaatgttggctctattttgggacttcatatagttaataggtgcctgtcagcaactcagagatttaaatccaggacaaaaaaagttagagtctttgtcccagtattcccagaaaatgccctgacagccaccaggcccagactgaattaggttaccagcctgccttacactgatcattgtggccaggaaaggtaatactctgactgagagaggttcacccccagaactgacgattggccctgcccagatcatattaattgagaatgggagggggtacatccttaagcaaacattaatgcagttgccagaagagggaagggaggttggagaggcgaagggcaaatagacactatagatactgtatgcatctccctccttagactgggcatattattcagacactgtggtatgtttgcattcccagggctccataagatgactacaaaacccagtatca

SEQ ID NO: 660946 - DNA, 588 bp, Homo sapiens
tttttactgtgtctttatttcttttagaaatagattcttcctttacmgtgtatattccaataatgctataataaatatggagacattttccatgactatgagggtttccatgatggaaccaccatctagtggctttggaagaaaataggaacaattaagaattcagagacagtccaccatcaaattataaatttggcagttttaattttggaattaaaacagccagattgtgttcatttaaaatgttttatattggcataacagatgttttcccctaagaatgttcttagcaattaaaatatatagatacataaagtatgtgtgtgtatatatatattttaattcagtgttatgtggtattgtggtttttatgtcaccagccagaggaaattttaaaatggtcgtattagtagacatcttaacaaactcttcttgtacaaaccctgattcaaggaaaaaaataccctgagatatcaaagcagatggttgtcttaatctaaaaaaatctcaacaaggaagactctacagcttcatttaccaactcatattagggcccacaaagaaaaattgcaatttctaaagaaaaaa

SEQ ID NO: 660947 - DNA, 588 bp, Homo sapiens
tttttactgtgtctttatttcttttagaaatagattcttcctttacagtgtatattccaataatgctataataaatatggagacattttccatgactatgagggtttccatgatggaaccaccatctagtggctttggaagaaaataggaacaattaagaattcagagacagtccaccatcaaattayaaatttggcagttttaattttggaattaaaacagccagattgtgttcatttaaaatgttttatattggcataacagatgttttcccctaagaatgttcttagcaattaaaatatatagatacataaagtatgtgtgtgtatatatatattttaattcagtgttatgtggtattgtggtttttatgtcaccagccagaggaaattttaaaatggtcgtattagtagacatcttaacaaactcttcttgtacaaaccctgattcaaggaaaaaaataccctgagatatcaaagcagatggttgtcttaatctaaaaaaatctcaacaaggaagactctacagcttcatttaccaactcatattagggcccacaaagaaaaattgcaatttctaaagaaaaaa

SEQ ID NO: 660948 - DNA, 582 bp, Homo sapiens
tcctggctatgcactcaaatttggccctaaaatctctaggcaccatagctgtctctgtccactggtcacctcaggagcttcttaaggctttgcttctcatcctttactttaaaatcaatttcttcttttctttgttttaaaacagggtttctctcttctatgtctgtttctttagggtgcatttgtttmtcttctctttcagatcgatgactctttgggacaatttgataaactttctaattatggttcctgttaaggttttgcctctggatgtatttcctttgggggaaatgccagaagggtatgtttgcactctatctagcctctttagacttcaagagctgtcttggttcaggctgctataacaaaataccatagacgaggtggcttaaacagcagccatttatttctcacagttctggaggctgggaattttttggggacacaaacatttagtccattgcaagagtcgcgattcctcacttatctgcgagaagggactgggcatccactggcagagaactcattgccactagcaggtgacaacactgtgtctaggatgctctttagttcctgcttata

SEQ ID NO: 660949 - DNA, 595 bp, Homo sapiens
gagatacttttcccaccaaattacccgagagtgtgatgtgatataccacagtttattccaaactgggtaacagactctgtcacagtatgcctaacattgtgcttattgatgtctattgcaatttctatttattggtttgtgttcccctctgtttgtctttaacatctatatctccagtgcctagcacagttcctagcacagagtaagagcttagagctaacatgtgctgaatgttactgcatgccaggctccttattacgtcctttgcatgcattaactcatttaattctcattatgaccctgtgagccaagagctgtgatgatctctactgaacagatgacgagttagaatagcaggaagtttggtccattttccaagatcatttagtaaatgacagaatcaggatyggaatagtaggatcccaaagcccatgtttttaactgggacatatctcctttgtagaggacagagtcgcagaaatatttgttagatgagtaacagtataagtaatcagttccatgtattcagtagcaaagttagcaaaagctcctgagtctctgaactctcaggccagtgagcctcctttaacagtgg

SEQ ID NO: 660950 - DNA, 466 bp, Homo sapiens
cagtttattccaaactgggtaacagactctgtcacagtatgcctaacattgtgcttattgatgtctattgcaatttctatttattggtttgtgttcccctctgtttgtctttaacatctatatctccagtgcctagcacagttcctagcacagagtaagagcttagagctaacatgtgctgaatgttactgcatgccaggctccttattacgtcctttgcatgcattaactcatttaattctcattatgaccctgtgagccaagagctgtgatgatctctactgaacagatgacgagttagaatagcaggaagtttggtccattttccaagatcatttagtaaatgacagaatcaggatcggaatrgtaggatcccaaagcccatgtttttaactgggacatatctcctttgtagaggacagagtcgcagaaatatttgttagatgagtaacagtataagtaatca

SEQ ID NO: 660951 - DNA, 595 bp, Homo sapiens
gagatacttttcccaccaaattacccgagagtgtgatgtgatataccacagtttattccaaactgggtaacagactctgtcacagtatgcctaacattgtgcttattgatgtctattgcaatttctatttattggtttgtgttcccctctgtttgtctttaacatctatatctccagtgcctagcacagttcctagcacagagtaagagcttagagctaacatgtgctgaatgttactgcatgccaggctccttattacgtcctttgcatgcattaactcatttaattctcattatgaccctgtgagccaagagctgtgatgatctctactgaacagatgacgagttagaatagcaggaagtttggtccattttccaagatcatttagtaaatgacagaatcaggatcggaatagtaggatcccaaagcccatgtttttaactgggacatatctcctttgtagaggacagaktcgcagaaatatttgttagatgagtaacagtataagtaatcagttccatgtattcagtagcaaagttagcaaaagctcctgagtctctgaactctcaggccagtgagcctcctttaacagtgg

SEQ ID NO: 660952 - DNA, 610 bp, Homo sapiens
gtcttgcaaggatgttgtaggacttttccttagttcagctaaagatgtggtccttgtcatacaaccgccaaaattaggcttgcagacaatttgaagggtgagaaaaatgagatatattgggaaaatgagtaaaatgagatgtatccctttttttatcgcccaggaagaaaagggaaacaggcactccgcaaagccagggtcctgctagtaggcttcccgctttgcagattgaatcccagggaccatacttaggaagaggagagagaggccaggctcctccccctgcaaagagcgtgaatttcccaaggctccaccccagtgcacattcctcccagtgygcaggacttaggaggttctgccggggagcccttcctacctggctgtctcaaggaggcctaccgtcctctttttaaagcagcatgtatcgtaagtccttttttaaacttttttcctttccctcttccttttaattctcaatattttcccttgaatagtatgattagaagacttaatgctctttttttaagttgggagggagaagaactctgttaagaaataaaactggcaacaagcagttctgttttctgtgaaataggatggccaaagaaaa

SEQ ID NO: 660953 - DNA, 610 bp, Homo sapiens
gtcttgcaaggatgttgtaggacttttccttagttcagctaaagatgtggtccttgtcatacaaccgccaaaattaggcttgcagacaatttgaagggtgagaaaaatgagatatattgggaaaatgagtaaaatgagatgtatccctttttttatcgcccaggaagaaaagggaaacaggcactccgcaaagccagggtcctgctagtaggcttcccgctttgcagattgaatcccagggaccatacttaggaagaggagagagaggccaggctcctccccctgcaaagagcgtgaatttcccaaggctccaccccagtgcacattcctcccagtgcgcaggacttaggaggttctgccrgggagcccttcctacctggctgtctcaaggaggcctaccgtcctctttttaaagcagcatgtatcgtaagtccttttttaaacttttttcctttccctcttccttttaattctcaatattttcccttgaatagtatgattagaagacttaatgctctttttttaagttgggagggagaagaactctgttaagaaataaaactggcaacaagcagttctgttttctgtgaaataggatggccaaagaaaa

SEQ ID NO: 660954 - DNA, 610 bp, Homo sapiens
gtcttgcaaggatgttgtaggacttttccttagttcagctaaagatgtggtccttgtcatacaaccgccaaaattaggcttgcagacaatttgaagggtgagaaaaatgagatatattgggaaaatgagtaaaatgagatgtatccctttttttatcgcccaggaagaaaagggaaacaggcactccgcaaagccagggtcctgctagtaggcttcccgctttgcagattgaatcccagggaccatacttaggaagaggagagagaggccaggctcctccccctgcaaagagcgtgaatttcccaaggctccaccccagtgcacattcctcccagtgcgcaggacttaggaggttctgccggggagcccttcctacctggctgtctcaaggaggcctaccgtcctctttttaaagcagcatgtatcgtaagtccttttttaaacttttttcctttccctcttccttttaattctcaatattttcccttgaatagtatrattagaagacttaatgctctttttttaagttgggagggagaagaactctgttaagaaataaaactggcaacaagcagttctgttttctgtgaaataggatggccaaagaaaa

SEQ ID NO: 660955 - DNA, 464 bp, Homo sapiens
tacaagtgaggctagaggaagttagctcacagcagactccataggaaataagagaagaggaaaggcaacgtggcagaaagaaattctatggcagtagtgaaaccattgtacagtgaagttggtgakgcacaaacatctgtgttaacacggaactgctgactgggggaaagcaccacaccactaacttgaccaagtagtttgtagttcccttgcttgggcagataaaacttacataagcgtggtcagagttttacatcaatgcaaattattaatgttttctcagatcctgcctgctctctgattttatctcagataaaactaggacaaacgctagaagaaatcctattagggagattctggcttatccagagcagcctcaagggtggccacgcaaatggattttcagggcaagtggagcagacgtgttgtcagccctccttataaccagtttatccttctctgcc

SEQ ID NO: 660956 - DNA, 640 bp, Homo sapiens
gaacttattgcaggagtgaaattgggtatgggaaataggactgtattgttttctgttgctgtgtaacaagtgaacacaaaggtggttgaaataacacaaacttactagttcacagctctctaggtcagaagcccaggtgggctcacctgggctcttggcttacaaggtcaaaaacaargtgtcggctcttgtctggaagctctaaggaaaaatctgctctcaagcccattcaagtgttggcacatctagttgcttgtgtttgtgggtctgagtccctctgtccttgctgtctgtcaggggtgtgccctcagctccttgtggaccctccaatttcaaagcagcaagtgtgcatcgagccctactcatgcatatctgagacttcctcttctagcttcctgtctgctaccagccagagaagtgtcttttcctctgaagtctcctgtgattagatcaggcccacttgaatgatctctcttttgtaaggtaaactgtgccacataatataaccttgaagtgatgtcacattcacaggtctggtgattagagtatggaatcttaggggcctctcatagaaattttgccttaccacaatgcttttgtaatattgagtgggtgcagaaggctaacttaaatttagctg

SEQ ID NO: 660957 - DNA, 487 bp, Homo sapiens
tcattgttgacagtgcatggatcacttagcacaaggcctagaatgtagtagctacttaatatttatcagatcccttctcagcaggagcctatgtcttgcatttataatgactttctmtaaggccttaattgctcccatctgaccaagcagttaagttactatgataagaagttgggatccctaagtccagtctctggctcagtgaactcttaggcttcaaagatatagatttcaaggcttcaagagatacaaggatgggtttggggggaattttattgtgttcctcttggaagattggctttggccattctttatgagtataagatccagaccagtcctttgccctaggaaatttctcctgtcattatgtaactactaatattgaatgttgaactcacctctggtcactcaataaaccctactgatgcaacagtaaaatcctgttcttgtcaaaattagttttattttttacatatgttattagccc

SEQ ID NO: 660958 - DNA, 608 bp, Homo sapiens
ttttccattaatgttagaaaatatgttatgccataggaatttttatgtaatacttgccattcagtctcaaagcaaataggaaatttgcttgtagttttgtgctcattagaattatttttcaaccagaaggattttctgaaatcagagtttggcctttttagtctgtgtgattttcagggagaagaacttgctcagtgtttcttcmaatccttccctaatggctgatcctcctcacacagcacccatatgtaaatgtatttctgagtgagggctttacaaaaaggtggctgcaaaagttttctttttataccaatctaaacatcagcttctactaaatgcaaatgttatgcacatgattggagtgatatcattttattaaaactcttctcataatctacctctaaaaggctttctgtttccattatagctaggttattgatgctaaatagttcagcaaattgggttgttgaagcacatctgccatgcattattcattaagtacgtctttcacaaatcgtagctgtctgttgcctaatcctggagtcccagtagcactacttcttggggaatctgcttccttcgtgagccaagaaatggagtcacaggca

SEQ ID NO: 660959 - DNA, 608 bp, Homo sapiens
ttttccattaatgttagaaaatatgttatgccataggaatttttatgtaatacttgccattcagtctcaaagcaaataggaaatttgcttgtagttttgtgctcattagaattatttttcaaccagaaggattttctgaaatcagagtttggcctttttagtctgtgtgattttcagggagaagaacttgctcagtgtttcttcaaatccttccctaatggctgatcctcctcacacagcacccatatgtaaatgtatttctgagtgagggctttacaaaaaggtggctgcaaaagttttctttttataccaatctaaacatcagcttctactaaatgcaaatgttatgcacatgattggagtgatatcattttattaaaactcttctcataatctacctctaaaaggctttctgtttccattatagctaggttattgatgctaaatagttcagcaaattgggttgttgaagcacatctgccatgcattattcattaagtacrtctttcacaaatcgtagctgtctgttgcctaatcctggagtcccagtagcactacttcttggggaatctgcttccttcgtgagccaagaaatggagtcacaggca

SEQ ID NO: 660960 - DNA, 556 bp, Homo sapiens
ttaattaattaacctctgtcattgtgtacagataaagccactgagtcctgcctagaaagtgaatgggcaaggtcagggtgctttcatgctctcgggagtggtgaagaacagccttcccttaatcctattcctgctcctctccacctccctttcccagcaggaagttggtggcttttgttttgaagtcaacaagggagaaatatgaagaagcagggcatgaacttaggaagcttatggggaaaagatccttaaagggaataaaatgaaaccatggaaatgagagataaggtattggttaatgcctagtaggtggcagagccttattaactttctctgtctctgattcattctctctctctctctctctctctctctctctctstgtgtgtgtgtgtgtgtgtgtgtgtgtgtgtgtgtgtgtgttgggggatgagtgagagctaaaaaatatctgagtggttagtgataattccaagtctgtcagtgaagaatacacggcactgtggtgtgaaggtagtctgggtttctaaagaatcacaaacgaggccccagagag

SEQ ID NO: 660961 - DNA, 475 bp, Homo sapiens
ccatggtatgggactagcaccacctcccaaaggactcacccagtcactcaatggaagttctcccaggcatacctggaggaagccacacccatctgcataccttgtaacaggcctgccatttgcaaaccctgaagcagacctacatctttgcaccagccctactgaccaaggtcctgaaggcaattcagtctacccagcgactgcataggatccatgcctgcttgagcccctggtaactgtgaacccagcagcagtcacgtgacccagctccaacccytatttaccatgattctggcaatcctatcagcccagcgacccaacaggagaagatcttcagctgctgaaaccgtgtataaagacaggaataggtatttgctcctttaaatgcacagacaccaatgcaaggctacacaaataatgaagaaacaggcaaatgtgaaccactaaaggaaaatagtaaagctttagcaactga

SEQ ID NO: 660962 - DNA, 537 bp, Homo sapiens
tcccaggcatacctggaggaagccacacccatctgcataccttgtaacaggcctgccatttgcaaaccctgaagcagacctacatctttgcaccagccctactgaccaaggtcctgaaggcaattcagtctacccagcgactgcataggatccatgcctgcttgagcccctggtaactgtgaacccagcagcagtcacgtgacccagctccaacccctatttaccatgattctggcaatcctatcagcccagcgacccaacaggagaagatcttcagctgctgaaaccgtgtataaagacaggaataggtatttgctcctttaaatgcacagacacyaatgcaaggctacacaaataatgaagaaacaggcaaatgtgaaccactaaaggaaaatagtaaagctttagcaactgaccccagaaatagagatctatgaattgcctgaaaaagaattcaaaataatctcaaagaaattctatgggatgcaagagaacaaagatataaaactaaaaaaatcaaggaaacagtgcatgaac

SEQ ID NO: 660963 - DNA, 588 bp, Homo sapiens
ttattaaatattatttaagttttttgttgaatacagcactaaagccatcagggcctgggcttttctttgttggaaagtttttgattattgattcaatctccttactcattactggtctgttcaaggctraatcatgaaagaataaaaggctatatgtctcttgaaatttatccacttttctagcttatccaatttgttggcataattgtttatagtagtctcttgtgatcctttgtatttctgtagtatcagttataatgtctcctttttcattaataattttatttactcgagccttctgtctctttttagtctagcaagtttgttgattttgtttcttttcaaatactcttaagttacattgttattttttattgtttttctactctctatcttataataattactcagaataaaacaaagcaatgcattcattcaaatataaacaaaatggaatgcaacttaaaacagaaaacaggttcaaaatcaaaatttaacttcccattttgcttgtatgagatcagaatcaattaaaaagcatacctttgtctcccaatgataactgtgccttgtttttttgaattgtta

SEQ ID NO: 660964 - DNA, 519 bp, Homo sapiens
tatatggaaagtgctctcatggaggcatgccaaaatactgtagaaagaaagaccttgaaggatgactagagtgacctgayaaggggctgccaggggaacactggggcagatgggaagaattccatatctcagagactgggacgaatatgtggtgattgtttccagatgtttaaatgattttaggcctgaaagacaatttttgattattaaaaaaattatcatcttgaaagtcctatttcctacacattctgcataaattctgtctctatctgtgtagttatatattaatatgtacatatcagttacaatatctgtaaagatatcactatatcaacaacaccaatagtagtaattataccaactacgatgccaggcacagtgccaagctctttattccttagaacacaccaaggcagaagataatatcattattctgattttatagttggggaaaccaaagcatcatgaatgaaaaaacacacagtgatatcatgatttaacaagtcttactgaaagtga

SEQ ID NO: 660965 - DNA, 611 bp, Homo sapiens
gcttagtaaagccttatgggtgtggaagagggtggggagggatacttagtttcaaaaagaacggaattacttgaaaacaatctatattcatccagaagtattcctgaagcttcagagttgagaatatcagtcttagaactcacctgaaaatccttgctctgggacatccctggacaatgtttttgtttgtctctgtgaaactctgtgaaagtatctggaaagagaaacttttgtgaaactactgaaagggaaacccagaggcatccctgggtgagggaaattgcgagttggaatttaggtatgtcttggctgaaaacatcacacttttaaattttttattttattttttattttttttcttgagacagagtctcgatccgtcrcccaggctggagtgcaatggcgtgatctccactcactgcaacctccgcctcccgggttcaagctagtctcctgtgtcagcctcccgtgtagctgggattacaggcacccgccaccacgcccagctaattttttgtatttttagtagagatggggttttgccatgttggccaggctgtcacacttttgtaaaaggatagctcagtttgttaaatgccagagttctcatt

SEQ ID NO: 660966 - DNA, 617 bp, Homo sapiens
gggtaggaatattgagaccatcttagaattatgcctcccacaaatggtttaaatgaatagacattaataaagggactaagtacaaaggtgtgagcagggttaaggaagcaaagggggcaaagtgaagcagtcagagcccaacaacaagaggatgttattatcataacctggtaagactttggactgtagggraatgctctggccctagaggaaagtagccactgccagagttttctactgaggatagaatggagaaggaaacccctatgtctctcttcctgccttctgatcttctgtcaaactgaaccagaaaccaagggctcagaaattggatcatgcagtccatagaggtcaacctcctagggcctagaagggcagtgaattgacttgacgtggcaaataaccatcacactgcttaagaaatggtagttatgattaaaccattatctctagtttatgaacatatttctgagtctacaagtgtgaaggactggcctaccctttcaactttataagtggctctgattggtgggtgagagagaggaagtggccttttttttttctttgagctgaactataataatgagctgcctctagcacgtttgttttcatggagg

SEQ ID NO: 660967 - DNA, 544 bp, Homo sapiens
tctctcttcctgccttctgatcttctgtcaaactgaaccagaaaccaagggctcagaaattggatcrtgcagtccatagaggtcaacctcctagggcctagaagggcagtgaattgacttgacgtggcaaataaccatcacactgcttaagaaatggtagttatgattaaaccattatctctagtttatgaacatatttctgagtctacaagtgtgaaggactggcctaccctttcaactttataagtggctctgattggtgggtgagagagaggaagtggccttttttttttctttgagctgaactataataatgagctgcctctagcacgtttgttttcatggaggagataattggcatatatttgtagcaactggcaatgtaataatgaggttataaaaattcataatgaattggaactattccataaatatgtattaaaagaagaaaacagaatgttaacttatatccatattttaaaagaaataagtagattttttttaaaaacgtgaattctataggttccattgatagattaacgaa

SEQ ID NO: 660968 - DNA, 522 bp, Homo sapiens
agtttattatgattagcaagctaaagtggttttatctttatgcccttgttgtttctggcataaattctaggtcaaatactcacactgctaaatgagtatttttcagtggagtcttgtaagttgtagacagtgctcttaaatcttcctggctgagttgccatccattgaatcaccaagctgagataggatcaaagtcattttttaccccraaaaaaaggtaagtttttattttaaaaaaaaaaaaaagaaaagactcactccagagaatatctttagtcactgaaagggaaggtcacagtgtatttttttctaataaattattcactgatgcatttggaataattctggagaagaagaaattcacatttcttactataaggaagtatagctcttgctagaacattctcatgatttgtgttttcaatcagtttactgttattatagttaatccacctactatctctgagaagtgggttaaaattattaaccctgttttacagattgggaaatggagacaaggtg

SEQ ID NO: 660969 - DNA, 590 bp, Homo sapiens
atatcctgctttggacagcctatgctttttgaagtgtgatgagaatacacattggctggagtacactgagatggtggtggtttaactcccaccattaagtttatgacatcgtccagggttagatctcactcataatggtggtgatatctcacatttacaaggcactttcatcatgaaggatcccacagtgccctctaagcatacgtctacaggaatgaygattttctgtgatgcagccatttctcaggagagcaacaccaccaccaactggtggttgtactcactgaggacagggggatggtgacagtcaggccttaattttaaagcaataatgtttacttacccactttgactagtaacattcttcaaaagattttctgaaagattttgatgattgtgaactcagaggttaacttttacatggcccttggttggactgtctcttaacatcaaaccaatttagtattttcattttaaaagataatagttctctcttctgatttaataaaaaatagatgttctgtgtctcctctactacccaaatgttccttggacatttctttctttctttctttttttttttttttttt

SEQ ID NO: 660970 - DNA, 620 bp, Homo sapiens
cagtagggacttataggtaaaactcctatctccctgggacagagcaccagtgggaaggggtgctgtgggtgcagtcttcagcagacttaaatgttcctgcctgctggctctgaagagagaagcagatctcccagcacagcactcaagttctgctaagggacagactgcctcctcaagtgggtccctgacccctgtgcctcctcaatgggagaccttcctgcaggggttgrcagacacctcacacaggaaagctctggctgggatctggcgggtgcccctctgggatgaagcttccaaaagaaggaataggcagccatctttgctcttctgcagcctccactggtgatacccaggcaaacagagtctggagtggacctccagcaaaattcagcagacctgcagcagaggggcctgactgttggaaggaaaactaacaaacagaaaggaatagcatcaacatcaacaaaaaaaatgttcatacaaaaaccccatccaaaggtcaaaaacatcaaagaccaaaggtagataaatccacgaagatgaggaaaaaccagtgcataaaggctgaaaattccaaaaaccagaatgcctcttctcctccaaaggatcacaactcctca

SEQ ID NO: 660971 - DNA, 567 bp, Homo sapiens
aaaaggccgaagaacagagacccagaaccatcaaatgagacatggggtctttattagggctcaacatacaagaaagagagtccaggtgcagtgggctgggcaggaaaaccacaaccacttgcaaacagcatgcagtttagacagcaktttcacttaacaccctctccttaatgacctccacctggcaaccttcatttaactcaaaacttagggcctcaatcccctgcacagcctgtgctccatgagacaggacaggggctcagatgttcctcatagacagggaacggatctccaggtaggccacttctggattccctagcttggaacacacattcaggggcatctgccatataggattattctgagtacgcttaagttattgctgtcaggtgcatttaccttacatcttgaaataaccttttaataagtctctcagcatccagcctatccccagtgctagtttattttgaacattgtcaactaggtaagttttctgaaacacacaactgatcaaatcccatacaaacccttcagtagctctccaccgcctgtcaaataaagccccaa

SEQ ID NO: 660972 - DNA, 560 bp, Homo sapiens
gttccaacatgctgagaaaacattattctacaaagtaagtttatttctaatgtcaattgtattgctcaggattatttctttgcttcgtgcttgaagacatattagtacaaatggggataataataataactaccctctattgagctactgtatttttccaggcgcttcatgaggagtagtatgatatagcatagtggtgattctggcagtacctacttcatggggttgttttaaaaatgaaatgaaataattcaagcaagatgcttatcagtaccctacataaagaaagtgctcaataaaagtcagttattattgattttattattgctgctttgagaggcagtcttagtgtagtacaggttaagagaacaagctctgaccctaaactggctgggttgaagtccagactctttgaacaggggcaagtgaacatctctgggcctcagtttccttacctgtaaaataggaataataataatatctatacatgagactattwtaaggattccatgtgtttaaaacaatgcttggtatataacacaatttttttttttttttgt

SEQ ID NO: 660973 - DNA, 602 bp, Homo sapiens
agacttctgtttggtttggctttggttttttcccctcccacatctaaactcccttcttgttttgaaggatccccacagtgttgaatcttggtaggaggcagagccccatctcccacttcaggaactaaagggactggatatttcttctggctggtgcttggtggatatagccaggtatccgaggcttggccactgaatgccctgcctggggcttcaactctggagctagtgatataaagaggaaggatcagttaggacttatttggggcagcatacggtatccagtggtcgggggggcaaacacaatgcctggcagtggcactgtcctgtggtgttggggccatgctgctggccgtagcgtgttacaccatctgggggatcctgctgcatggctgtctttgttcctgtccattttatatgcttttttcagctttcctgttgattctgcaagatacttaatttcctttcagtatatttcttctstaagttagctagagaccatgtctattgtttacaagcaataatagccaacatttgaatagtgcttactgtatgccaggcgctgttctaagcagtttacatatattaattcatttgatact

SEQ ID NO: 660974 - DNA, 635 bp, Homo sapiens
gctgcttgtgaaatgcccttgctctgctaggaaaactgggtcaagcatagcwtatgttcctcatggaaataatttcacagaagtatttatttctctctgtcataactacagaaaatcagggacagtacttgcaacaatacaatttcttgctggaacttacagataatacaaagaaccataaataggaaccatattctctattagctttcagggtatacactttagattttagatgccgccacagagcaatcaaactgccttatgtcaccctctctttcttactgtgcttgaccactattcctcacaatgtacatacctatctctcctaagggttctttctattttacagctgttggtctgcttctctctcaccctgcattaggcacatctcaccttgcattaggcacatgttaagagggatgggagattgacgctgtatactctatcttattgccttccactgtgttttgaaaagcatcctaggacttctgtgtgtcctccaaaagtgtttctcctgttgactttttgagaagttgggtcactggccttcccatcatgccagggaagataagaggacattgaattggctccctggagtaaagaatcggagtgataaattggactatcaacaccta

SEQ ID NO: 660975 - DNA, 567 bp, Homo sapiens
aagaaaaaaaaaacttcttttaaaataaacaagtttaaatgggtcaaattaaagaatattaattagaaaagatgtagatgtgtctgcatggcagatatagtcaaaatcatgaccgtaatgcacaaatggccacactgtgaagaagcggaactagatgacctctaaggcccaatattctgacagatctgagggctgcccaatgagatcgctaacccaggactgttggcactagccacctggcctggcagagagtggggtaagcaggcttgagagtggctgtatgcatagcagggtttcccggtgtggctttactcagagctctccagggacagtgcagctagattatctctgtttcaatgcatttgccctcttgctccaccttccccagaccatagggtcagcctgagaagcaacctgtccagcaatcagggccatttcccggggttcagcgctgccgcgtaaactcagcgaatgcaacgttaggaccccrgtacccacaggagcccggctccttcacttgtgcttgggcgaaccaagccatggcgggaagggagttgcccggagtcc

SEQ ID NO: 660976 - DNA, 567 bp, Homo sapiens
aagaaaaaaaaaacttcttttaaaataaacaagtttaaatgggtcaaattaaagaatattaattagaaaagatgtagatgtgtctgcatggcagatatagtcaaaatcatgaccgtaatgcacaaatggccacactgtgaagaagcggaactagatgacctctaaggcccaatattctgacagatctgagggctgcccaatgagatcgctaacccaggactgttggcactagccacctggcctggcagagagtggggtaagcaggcttgagagtggctgtatgcatagcagggtttcccggtgtggctttactcagagctctccagggacagtgcagctagattatctctgtttcaatgcatttgccctcttgctccaccttccccagaccatagggtcagcctgagaagcaacctgtccagcaatcagggccatttcccggggttcagcgctgccgcgtaaactcagcgaatgcaacgttaggaccccagtrcccacaggagcccggctccttcacttgtgcttgggcgaaccaagccatggcgggaagggagttgcccggagtcc

SEQ ID NO: 660977 - DNA, 501 bp, Homo sapiens
cttcccaaaggcaggcacatggaagcatcctcacccccgctgcttcccgtggcggccctcacagaaggcgcgtctgtctggcatcttggccgtgaatcagagctgcttgtgatgaatcagagctgctcgtgcagccctttgcagaggcataaatccgcaccacccttgttaattggttaggttttgacattcctgacagctctgcccgccgcagatggtgtaattgstgggtctaacgagaaggttgagcaccttcccgtttgtcaccccgtcattctccagcacggctggattctgccctgtgactgttatgcctggcacggatctcagctggatccctgcccctcctgccgaggtcctctctgagcacctgctccccatcacacagacttttatttaccctggacttctccgggtgccagcacctcatccttcacacactagcagccacggccggcacttccatgggagagttcactcccggctgcatctatcaccatc

SEQ ID NO: 660978 - DNA, 501 bp, Homo sapiens
cttcccaaaggcaggcacatggaagcatcctcacccccgctgcttcccgtggcggccctcacagaaggcgcgtctgtctggcatcttggccgtgaatcagagctgcttgtgatgaatcagagctgctcgtgcagccctttgcagaggcataaatccgcaccacccttgttaattggttaggttttgacattcctgacagctctgcccgccgcagatggtgtaattgctgggtctaacgagaaggttgagcaccttcccgtttgtcacccygtcattctccagcacggctggattctgccctgtgactgttatgcctggcacggatctcagctggatccctgcccctcctgccgaggtcctctctgagcacctgctccccatcacacagacttttatttaccctggacttctccgggtgccagcacctcatccttcacacactagcagccacggccggcacttccatgggagagttcactcccggctgcatctatcaccatc

SEQ ID NO: 660979 - DNA, 457 bp, Homo sapiens
cagtaatgccccactccttatactgatcttctgtattagtccatttttgcattgctataaaaaatgcttgaggttgggtaatttataaagaaaaaggtttaactggatcacagttctgcaggctgcacaagcatgatgccagcatctactgggcttctggtgaggcctcaggtagctttcaatcagtgtggaaggtgaagggaagccagtgtgtcacatggtgagaatgggaacaagagagggagaaggggaaggtcccaaactcttttaaacaaccagatctcacatgaaccaagtgagaactcactcatcacccagggaatgggtaaaccattcatgaagaaccacccccgccccatgatccaatcacctcccaccaggccccacctccaacactgggaatcacawttcaacatgagatttggaggggacaaacatccaaactatatcatacagt

SEQ ID NO: 660980 - DNA, 327 bp, Homo sapiens
tcgacactccccacgcagggctcccaggattcggggatgggcagggctcgggtcctggtccctccaagtgggggctgcctctccagagtggacaggggacccgcggagggggtgtcttatcccggacgggaggragacgctgcctcctggaccaggtactgggacccacgggcccacccccagttgcgtcacccggcccaccgccccctgagacatcacaatctgggggccgggacccgcgcctcatcacagccggtttgtaaccaaacaatccaacctacaaacaccccggaaagaaaaaaaacacaagctggcctgacccagcct

SEQ ID NO: 660981 - DNA, 560 bp, Homo sapiens
gtagagaccaggaggtaacttcccaagatcatgtgactcggaagggacaggtgagggagggggagccggaatgtggatgcaggtctgtctccagggcctttctgttggacaggatccttccccgcggatgcctcttggcccagactgggtgcaaggcctgccccgtgcatgccagacaagcacacgttctgcccccagcccttctccttccagaggtgccctaagagattgtgtcctgaaacccagctttttcctgcttcattgcagcgatcttaactgtaattctgctgttctgttttcttggttaaattttgtcttccccgtgcaagcaggggccatgccttttcctcatctttgtagtctgtccagtccctggcacatagtaggtgcttagcaaatatttctggaaatataagtgaatccagcccactcccccacccrttctttggcaggcaggctgactgcacgcactctcctggctgtttagggtgaggtaggtaggaagaggttcgcctggggagtggggaagccctccagccagacttctggcctcctcctcc

SEQ ID NO: 660982 - DNA, 596 bp, Homo sapiens
ttctaggctgttgaggctgagggtaggaagtgtatcaacaggtatacagaatagtcactggtcttgggctaaatggtgacttcaagtgtagtggctgcatagtcaaaaatgaattagatgagtacaaaagtgacgaaatgaaagaatgtcaagaatggaccacaaagacagtgttttatgacctaaagattaagatttatccatttgtgtacaattgtggactatataaaataaaacaagactttgacctcagtggataagaagtatttggatgtactaatcaatatttttggtctgggtcagtggtgggttcatctgtgtttgttgtatttaaaaaaataaatgaaaacattgaaaagggtgagtaggaatcaaatatgattgtcactccaagtctgcgtcatctgcatccgttaggaagaatatctgggttggttccttcttgggtaagatgcacagggacatatgtttgtgagagtcatgattcttgtttttgattagagtggtgaattaatacacackcatttgtaataatacaaattaataaatgaataattgcggagagctatgcttgggccagtggtgagactgtcatg

SEQ ID NO: 660983 - DNA, 593 bp, Homo sapiens
aggctttccccttcccgctggccctgtgaggcatgcaggatctgtaagtaataaactgcttctgttgtttcatttcatgtgttttgttgagttgcttcctctgtgtctcacctgaccaacacacttgaattgaacttctttcctggtcagggatctcctagagaatggctatcttggcaggaatagactagatgtaggtcagacaagaaccacaggggtactgccagtgtaaatgagtttcctatgagagggacacctggtaatggataggatgcttaggcattagactgtctgctgggataaagacgtatcccrtaaaagatacgctgtaaacacccatgaccacctctcctgcatccccatcaggcagagctagaatttatattcactctcttgagacagacctcaagaccatgttagaagaaagtacaacactcatcatcctagaattatgattattccaattcagttcatccaaggtccctttaaaaatgcattggttaaagagtcagttaatattcttttttttggcatggtggcatgttggatgttgattttagtactaaaaataaataaataattacctaagtgtg

SEQ ID NO: 660984 - DNA, 615 bp, Homo sapiens
taatccaatgagaggaatattcaattttatgtttttctaatccatgggtactgattgtattattattggctaatcagtgatgaatcaatgacragtgaataaatgaatgagaaaaaaatgggaacagcacatgctaaacattaaagtgtatactgctgaaacaaggattattttccttttttttttttttttttgagacagagtctcactctgtcacccaggctggagtgcagtggcgcagtcacaactcaccacagcctcgacctctaggcttaagcaatcctcctgcctcagcttccctagtagctgggaccacaggctcatgtcaccacacctggctaatttttttgtattttttgtagagatgaggtttcaccatgttgcctaggctggtctcaaattcctgggctcaagtgatccacccgccttggcctcccaaagtgcatgagccactgtctggcctattataagtagtttttattaagcaccaaaacccgtaaaaataatggctatggtttaatggttaattcttttaggtaaggatggttagtttgtttaggtaaggaagacatgaaaagatcatgtaataatcgatgctgttctgtgttgttggtg

SEQ ID NO: 660985 - DNA, 615 bp, Homo sapiens
taatccaatgagaggaatattcaattttatgtttttctaatccatgggtactgattgtattattattggctaatcagtgatgaatcaatgacaagtgaataaatgaatgagaaaaaaatgggaacagcacatgctaaacattaaagtgtatactgctgaaacaaggattattttccttttttttttttttttttgagacagagtctcactctgtcacccaggctggagtgcagtggcgcagtcacaactcaccacagcctcgacctctaggcttaagcaatcctcctgcctcagcttccctagtagctgggaccacaggctcatgtcaccacacctggctaatttttttgtattttttgtagagatgaggtttcaccatgttgcctaggctggtctcaaattcctgggctcaagtgatccacccgccttggcctcccaaagtgcatgagccactgtctggcctattataagtagtttttattaagcaccaaaaccygtaaaaataatggctatggtttaatggttaattcttttaggtaaggatggttagtttgtttaggtaaggaagacatgaaaagatcatgtaataatcgatgctgttctgtgttgttggtg

SEQ ID NO: 660986 - DNA, 617 bp, Homo sapiens
ttatccttcttaattttctttcaaaagatagatatgagattaaattaacctattacaaattaaatagtaaataagcaaatagatgaatacataaagagggwcaagaaggatttgtcaattaaataaaattttattttattttaagaataaaataaaacttaaaaaaagaatgagcattggtgaaaatgtaccctgaaacaaaatttaagatcaatataattctgaacaagtgggttccactacaaaacagatggaagaaaataacttcattcagtttacaattgtttaatatgtcattttttcaccactcttaatttacacattctgccattgataaagatttaggtttctaagctattgacagagaaaacacaagtaaggaaaaaaatgttgtcagggaagtaaaacaagtggttcctttatgttctttgttaaatgtttaaaatttgaaaaagttgaggaaaggctagagaaagagggccctgcctggaccacattgagtgtgggactgtataaggattttggttggtccatatgtgtaacagtgagatccactgttgaaggagatttggtggattagctcttggagaaattagcctacatctatcagttataat

SEQ ID NO: 660987 - DNA, 543 bp, Homo sapiens
taaatgtgggtataatgtaccctaatgtaaagttgtagcacttgatcctgaagaaagatttcgaggaaagcaaaggggggtcgtggccgaagggatctctgtccttcaggttggcctgagccaactgaaagcggtcttcctgctgtccttccttggccaggttcttttgtgatcccactctcccttctcaccaccttcacttccctcctccaaaacacactcggagtcccattcattgttgaaygcccagcactgtaaaactggcacacactcatgctaaatagatatttgttaagtgaattgatgagtgcttaaaaatctccatggattttctatcagtctttggataaaagttacaatctttacaatgacctacaaagccgaggctgatcgtgtccctgtgactgcactgacttcatctcctaatgttctccacgtccctcacactgttccagctacactggcttccttgcagttcctcacataagccagggctaatgccacctgagggccttgtcatttgctattccctctgcctggaat

SEQ ID NO: 660988 - DNA, 463 bp, Homo sapiens
acacactcatgctaaatagatatttgttaagtgaattgatgagtgcttaaaaatctccatggattttctatcagtctttggataaaagttacaatctttacaatgacctacaaagccgaggctgatcgtgtccctgtgactgcactgacttcatctcctaatgttctccacgtccctcacactgttccagctacactggcttccttgcagttcctcacataagccagggctaatgccacctgagggccttgtcatttgctattccctctgcctggaatgcgttctccagatacctacatggcttctttctcaacctcctgaagtcttctcaatgaagtcttcctacgcctcattccttatgtcaggtatctatttattgttgtgtaataaaccaccccaaaatttagtggcttaaacaggaatgatttgttatttgygacaattttgcaggtgagtgggtgtt

SEQ ID NO: 660989 - DNA, 463 bp, Homo sapiens
acacactcatgctaaatagatatttgttaagtgaattgatgagtgcttaaaaatctccatggattttctatcagtctttggataaaagttacaatctttacaatgacctacaaagccgaggctgatcgtgtccctgtgactgcactgacttcatctcctaatgttctccacgtccctcacactgttccagctacactggcttccttgcagttcctcacataagccagggctaatgccacctgagggccttgtcatttgctattccctctgcctggaatgcgttctccagatacctacatggcttctttctcaacctcctgaagtcttctcaatgaagtcttcctacgcctcattccttatgtcaggtatctatttattgttgtgtaataaaccaccccaaaatttagtggcttaaacaggaatgatttgttatttgcgacarttttgcaggtgagtgggtgtt

SEQ ID NO: 660990 - DNA, 627 bp, Homo sapiens
ggagggaattgcttgttgcttttacaggatattgttagaggtagaattagccatatgatatgctgatatcataaaaccacggattctagaaaacacacatacagatcagtctaattttttaaacagtcacatctcatgttgtaaatgaaagacagtagggtgacatacgaaaatcatattaatggatggtttcatctaatgtctgtagccagaaattgcaaaggaattcagtgactgctacatgattagctgtgtagaatgaaaataactattatttgctcatatgatttctgtttaagcaagtgaaataccacagctgggggataattgctggcaggstttgctgggtgaactttaaataaatagaaagagaaaggtaaaaacatttaaagggaaatatttaaataatgctttcaaagcaaatgctgagaaagaaggtataagcgtcctgaaacatatcatgagacctttatgaattattaaagaccaaaccataatgttatcttttctgttaaagataatgctagtataaattgggagcatttataaacttctgtaggatggcagacacagaatatatatcataaagttgattgcttttctgaaataaaattagtggatacagac

SEQ ID NO: 660991 - DNA, 618 bp, Homo sapiens
ttgtatttttaactctccaattttggatgttgaaaactaacatcccaaagaggggtttkatcaaaatgagaattataaaacaaggaaggatatttgattcatgttatctaataatgcaagtttacacaattttaaggccctttctgtatgtgaaacgagaacctcctctcttattttcctagtggtgagaatggccctctgaaatgccaccattcttttagcctagacacacttcatccctagtgacaaaaacctactgatgtttgagactcagatatgtgtccttcctgggcacagttataattctaactttttttttgttatgagaaagaatgatcccagatttgggaaaatgagaagagggaacgttgcttagaaagcacatgctgtgaggacatggttataccaggcacagggaattcggggggaaatggagtcatcatccacaatcacttgttaatgttcaactatatacatatggcactcttgaggcaccgagagagagggggaaatacctgcctctctcctacccccaattgaaacagtgaaataaccagagatgggttataacatttttcagagaaaggtagacttaaatggatttgtaaaaataaaatt

SEQ ID NO: 660992 - DNA, 563 bp, Homo sapiens
tattttcctagtggtgagaatggccctctgaaatgccaccattcttttagcctagacacacttcatmcctagtgacaaaaacctactgatgtttgagactcagatatgtgtccttcctgggcacagttataattctaactttttttttgttatgagaaagaatgatcccagatttgggaaaatgagaagagggaacgttgcttagaaagcacatgctgtgaggacatggttataccaggcacagggaattcggggggaaatggagtcatcatccacaatcacttgttaatgttcaactatatacatatggcactcttgaggcaccgagagagagggggaaatacctgcctctctcctacccccaattgaaacagtgaaataaccagagatgggttataacatttttcagagaaaggtagacttaaatggatttgtaaaaataaaattctttgttggcaacaataaaggaagctgtatttattttagggctgattcatttttgtcacagaactattaacttattgtaaagatttattttctaactatcagtagattgaattctt

SEQ ID NO: 660993 - DNA, 618 bp, Homo sapiens
ttgtatttttaactctccaattttggatgttgaaaactaacatcccaaagaggggtttgatcaaaatgagaattataaaacaaggaaggatatttgattcatgttatctaataatgcaagtttacacaattttaaggccctttctgtatgtgaaacgagaacctcctctcttattttcctagtggtgagaatggccctctgaaatgccaccattcttttagcctagacacacttcatccctagtgacaaaaacctactgatgtttgagactcagatatgtgtccttcctgggcacagttataattctaactttttttttgttatgagaaagaatgatcccagattwgggaaaatgagaagagggaacgttgcttagaaagcacatgctgtgaggacatggttataccaggcacagggaattcggggggaaatggagtcatcatccacaatcacttgttaatgttcaactatatacatatggcactcttgaggcaccgagagagagggggaaatacctgcctctctcctacccccaattgaaacagtgaaataaccagagatgggttataacatttttcagagaaaggtagacttaaatggatttgtaaaaataaaatt

SEQ ID NO: 660994 - DNA, 618 bp, Homo sapiens
ttgtatttttaactctccaattttggatgttgaaaactaacatcccaaagaggggtttgatcaaaatgagaattataaaacaaggaaggatatttgattcatgttatctaataatgcaagtttacacaattttaaggccctttctgtatgtgaaacgagaacctcctctcttattttcctagtggtgagaatggccctctgaaatgccaccattcttttagcctagacacacttcatccctagtgacaaaaacctactgatgtttgagactcagatatgtgtccttcctgggcacagttataattctaactttttttttgttatgagaaagaatgatcccagatttgggaaaatgagaagagggaacgttgcttagraagcacatgctgtgaggacatggttataccaggcacagggaattcggggggaaatggagtcatcatccacaatcacttgttaatgttcaactatatacatatggcactcttgaggcaccgagagagagggggaaatacctgcctctctcctacccccaattgaaacagtgaaataaccagagatgggttataacatttttcagagaaaggtagacttaaatggatttgtaaaaataaaatt

SEQ ID NO: 660995 - DNA, 603 bp, Homo sapiens
caacccatttcttctcttctttgcttcttttgtagtgcaaaatgtatctcctcctgtataaggcaagccctccacctgttctctcttaaaccctcctgcctgcargcaccttgctctagagcagtggtgctaaagcataagtttgcatcagaatcactttcaggtagttttttaaaaccctggggcccacccccagagtttctgatttggttggcctgggtgaggccagagagtctgcatttctaacaagttctcaggtgatgctgacactgcttgttcaatgaccacactttgtgaatcaatgcctgtattagggttttccagaaaaacagaagcaataggatatacatatatagaaagagatttattacaaggaattggcttatggcattatggaggctgccatgtcccaagatctgcagggtgagtcagcaagctggagactcaggagagacaatagtgtaattctagtcagaaggctgccaggcttgagacctggaaagagccaatgtttcagtttgagtctaatggcaggaaaaaaactgatatcacagtttgaaggcaggcaggcaggctggaggaattctctctcacttagaggag

SEQ ID NO: 660996 - DNA, 633 bp, Homo sapiens
ggaattctctctcacttagaggagggtcagcctcttttattccgttcagaacaaaatactgattggatggagcctacccacattagggagggcaatctgcttttaccaggttagatattaatctcatccagtaacaccttcatggaaatgctcagattaaagtttgaccaaatatctgggcacttgtggcccagtcaagttgacacttaraactaaccgccacattcataggcatgggcaaagacttcatgactaaaacactaaaagcaatggcaacaaaagccagaattgacaaatgggatctaattaaactaaagagcttctgcacagcaaaagaaactatcaccagaatgaacaggcaacctacagaatgggagaaaatttttgcaatctatccatctgacaaagggctaatatccagaatctaccaggaacttaaataaatttacaagaaaaaaacaaacaactccatcaaaaagtgggcgaaggatatgaacagacacttctcaaaggaagacatttatgcagccaacaaacatacatatgacaaacatacaacaaacatggtcattagagaaatgcaaatcaaaacaacagtgagatactatctcatgccagttagaatggcaatca

SEQ ID NO: 660997 - DNA, 633 bp, Homo sapiens
ggaattctctctcacttagaggagggtcagcctcttttattccgttcagaacaaaatactgattggatggagcctacccacattagggagggcaatctgcttttaccaggttagatattaatctcatccagtaacaccttcatggaaatgctcagattaaagtttgaccaaatatctgggcacttgtggcccagtcaagttgacacttaaaactaaccgccacattcataggcatgggyaaagacttcatgactaaaacactaaaagcaatggcaacaaaagccagaattgacaaatgggatctaattaaactaaagagcttctgcacagcaaaagaaactatcaccagaatgaacaggcaacctacagaatgggagaaaatttttgcaatctatccatctgacaaagggctaatatccagaatctaccaggaacttaaataaatttacaagaaaaaaacaaacaactccatcaaaaagtgggcgaaggatatgaacagacacttctcaaaggaagacatttatgcagccaacaaacatacatatgacaaacatacaacaaacatggtcattagagaaatgcaaatcaaaacaacagtgagatactatctcatgccagttagaatggcaatca

SEQ ID NO: 660998 - DNA, 553 bp, Homo sapiens
tcaaaatactcaccctctactctaggcctttgaacacgttgctctctgcggaaacaagctgtatctctcacctccaagactcctgtatttcctcccttggccctgcccatattatgattaggtggggttgttactgtttatgaaactcatctgtcaaatagggtgcctcatttaatcctgagagggagattggctggtctgaaatgaataaaaaatgcgtgtaaaatatcccacataatgcctaccatataagatgctcaatagatagaaattattttctctaacatmtatctatctatctatctatctatctatctatctatctatctatctatttatatatatatctcacttctgttgacatcaatctcatccactagtttggaaatctccaaatgcttttattcctttccaagtcctggtgtcatgcttttaaagatagtaattataatgctgactttttaattagaatattgatataaagaggtattgccaattcagaaatgatttttacaacttttgtggccaaatatttcctttagagtattgaatc

SEQ ID NO: 660999 - DNA, 640 bp, Homo sapiens
ggagggggaacatcacacaccagggcctgttgtggggtgcggggagcggggagggatagcattaggagatattcctgtctgtactttcttcagtcatatgcttcaaatatttccacacatctctatttctactgtggctatgtttagctacgtctccatcatctctcaattaagagcctactaactcatccttctgttttcacccttgtcctwctttcattcattctccacgaggccactggtgtggtttttaaatagtaaattgattatatatcttccctgcctacaattctcacatgaattcctattgcatttagaataaaattcaaattccgtactgtggtttggaccctgtctgattctttagtttcagtttctgccactgtaacttccctcccgtgaatcttttacatgtattgatttggagaatctaagagaggccaagttcttttcacatcaggatctttctacccttgattttccctccccagctctttgcatgcctacttccttttaaccctttaggtcttagcttaaaaatcctgaccctagtctataaggattcacttctggactattttgtatctcatctacttacttgttcatttgttcattgcctgactcactagaatttcggctt

SEQ ID NO: 661000 - DNA, 640 bp, Homo sapiens
ggagggggaacatcacacaccagggcctgttgtggggtgcggggagcggggagggatagcattaggagatattcctgtctgtactttcttcagtcatatgcttcaaatatttccacacatctctatttctactgtggctatgtttagctacgtctccatcatctctcaattaagagcctactaactcatccttctgttttcacccttgtccttctttcattcattctccacgaggccactggtgtggtttttaaatagtaaattgattatatatcttccctgcctacaattctcacatgaattcctattgcatttagaataaaattcaaattccgtactgtggtttggaccctgtctgattctttagtttcagtttctgccactgtaacttccctcccgtgaatcttttacatgtattgatttggagaatctaagagaggccaagttcttttcacatcaggatctttctacccttgattttccctccccagctctttgcatgcctacttccttttaaccctttaggtcttagcttaaaaatcctgaccctagtctataaggattcacttytggactattttgtatctcatctacttacttgttcatttgttcattgcctgactcactagaatttcggctt

SEQ ID NO: 661001 - DNA, 602 bp, Homo sapiens
acactgttggtaggaatgtggattagttcagccattatggaaagcagtttgtggatttcaaagaacttaaaacagaattactattcaaccaaaaaattctattactgggtatataccaaaggaaaatagattattctaccaaaagaaacrtgcacttgtatgtttgtcacagcactattcacagtagcagagacatgacatcaacctagatgcccatcaatggtagacaggataaagaaaatgtggtacatatacaccatggaacactatacagccataaaaaagaataaaattatacccttgcagtgacatggaaacagctggggccattatcccaagtgaattaacgcaaaaacagaaaaccacatactgcatgttctctcttataagtggaaactaaacattgggtacacatgcttataaagatgggaacaatagagacaggggattactattggggttggggcaagggttgaaacactacctattggtaactatgctcactacctgggtgacaggatcattcatacacaaagtctcaatcacatgtaatttgccgtgtaacaaatctgcacatttatctcttgagcctaaaataaaag

SEQ ID NO: 661002 - DNA, 602 bp, Homo sapiens
acactgttggtaggaatgtggattagttcagccattatggaaagcagtttgtggatttcaaagaacttaaaacagaattactattcaaccaaaaaattctattactgggtatataccaaaggaaaatagattattctaccaaaagaaacgtgcacttgtatgtttgtcacagcactattcacagtagcagagacatgrcatcaacctagatgcccatcaatggtagacaggataaagaaaatgtggtacatatacaccatggaacactatacagccataaaaaagaataaaattatacccttgcagtgacatggaaacagctggggccattatcccaagtgaattaacgcaaaaacagaaaaccacatactgcatgttctctcttataagtggaaactaaacattgggtacacatgcttataaagatgggaacaatagagacaggggattactattggggttggggcaagggttgaaacactacctattggtaactatgctcactacctgggtgacaggatcattcatacacaaagtctcaatcacatgtaatttgccgtgtaacaaatctgcacatttatctcttgagcctaaaataaaag

SEQ ID NO: 661003 - DNA, 602 bp, Homo sapiens
acactgttggtaggaatgtggattagttcagccattatggaaagcagtttgtggatttcaaagaacttaaaacagaattactattcaaccaaaaaattctattactgggtatataccaaaggaaaatagattattctaccaaaagaaacgtgcacttgtatgtttgtcacagcactattcacagtagcagagacatgayatcaacctagatgcccatcaatggtagacaggataaagaaaatgtggtacatatacaccatggaacactatacagccataaaaaagaataaaattatacccttgcagtgacatggaaacagctggggccattatcccaagtgaattaacgcaaaaacagaaaaccacatactgcatgttctctcttataagtggaaactaaacattgggtacacatgcttataaagatgggaacaatagagacaggggattactattggggttggggcaagggttgaaacactacctattggtaactatgctcactacctgggtgacaggatcattcatacacaaagtctcaatcacatgtaatttgccgtgtaacaaatctgcacatttatctcttgagcctaaaataaaag

SEQ ID NO: 661004 - DNA, 546 bp, Homo sapiens
agacaggataaagaaaatgtggtacatatacaccatggaacactatacagccataaaaaagaataaaattatacccttgcagtgacatggaaacagctggggccattatcccaagtgaattaacgcaaaaacagaaaaccacatactgcatgttctctcttataagtggaaactaaacattgggtacacatgcttataaagatgggaacaatagagacaggggattactattggggttggggcaagggttgaaacactacctattggtaactatgctcactacctgggtgacaggatcattcatacacaaagtctcaatcacatgtaatttgccgtgtaacaaatctgcacatttatctcttgagcctaaaataaaagttgaggaaaaaacaaaaacaaaaataaaactaccaactrtgggccacgtctttatcatattaagtcactccatagtgattcctcttctgcctccctcttgtacatttaagaactcttgtggttacattgaccctaggcaatccaagataatctccctaaagtcagctg

SEQ ID NO: 661005 - DNA, 576 bp, Homo sapiens
accacacattttataccatttttattatttactatgaattgtacatgtgatttagatttgctgctttctcatttagttttgatataaacctgtatagttatatttctgccagagtctttctgtgttttaaagtatgtgtcttgttttattttctggttatatataaactagacatctaatcctttttgagaaagaaggttttggtctgaaagcatacaggtggtcttaaattaaaggaaattaaaactgtgtagttgctrtagtctcggtccaatttctagcatttaaggtgtttctgtaggtaataagctggttactcatatgctatttgtttatgtttacctgacttctcttaaacaccaaggagataaatgtcgtagacctaaccatatccatattttgatatttaggatgttctttctctatgtaaggagaacagtaccttttctgactactctgaaatgaatcaagaacaaatctgtgtggaattttggaccataatcaggaacaagaatctcgggaatccttggaaataaagtaattttcttacaatttaaacttactttctgtcagagg

SEQ ID NO: 661006 - DNA, 517 bp, Homo sapiens
tattcggtaagtacgtgtttattggatacctactctgcaccaggcagtggctagtaccctagacactgacaatacaaaagtgaatagacacacacatatgtccctctgctcttgggtattcagacatgtaaacagttaaaactcaatgtagagtaaatgctataatggactacaaacaatgcgtcacagaagtatgtaagataaggatcaaacccaaacttgagggattaggaaaagctttctagaggaaattacatctcagctgaaaccttaatgctaaataggagggagctagaagaaggaggcagaaagagtgtttgaggcaggagagcctggtgagacttgggatgaaaacacttcataagcagagtatggagtggggagagcggaagctgccatsatgagcagaggccaagttcagaagggccttgaaagccatgccaatgagtttaggatttgtccttagagcttgattgaaatagtaatctagtaagtgaataataaggcctagggttat

SEQ ID NO: 661007 - DNA, 393 bp, Homo sapiens
atctaactttttctatgatattcctaatgagaatttgaattctgcttaaatcctactgaaagttatggtagatgttccaagtgctaactgaagcttctgacatccttccttttacagctgtctcatctccttgaaattatacatggccatggactgctttggccaatgaaatttaagtgaagtgatgtgaatcacttccaggcagaagcatttaagagctgatttatgattcaagctctgtttccttgccacagtggccsctggagacttgtgtttagatggcagtgtcataggatggtggatcttctgtcatcttgagtctttgaaggctacaatgcgtaggatcttttgtgacctgtgctggacaaataaagtagtataaataagaaacaa

SEQ ID NO: 661008 - DNA, 393 bp, Homo sapiens
atctaactttttctatgatattcctaatgagaatttgaattctgcttaaatcctactgaaagttatggtagatgttccaagtgctaactgaagcttctgacatccttccttttacagctgtctcatctccttgaaattatacatggccatggactgctttggccaatgaaatttaagtgaagtgatgtgaatcacttccaggcagaagcatttaagagctgatttatgattcaagctctgtttccttgccacagtggccgctggagacttgtgtttagatggcagtgtcataggatggtggatcttctgtcatcttgagtctttgaaggctacaatgmgtaggatcttttgtgacctgtgctggacaaataaagtagtataaataagaaacaa

SEQ ID NO: 661009 - DNA, 553 bp, Homo sapiens
cagcctaaaggtttccctgtacattaacttgatgtataaatggactgtaatttattcttgtaccaatcacagagttttggccaatcacaggcagccagctgttcaaacagtgttcaaataaggcaaatcccaagttgtaatgtatccagctgtttctgtacatcacttttgttttctgtatgtcactttcttttttctgtccagaaatgttatccaaccatgtggcaactccggagtcactcagaacctactctggctctagagactgcccaacttttaaatcgttttttgctcaattaaactctgttacatttaatttgtctaaagcttttattttaacagaggcaatgttcataaatatttttctatgtcacaaaataaaaattccagtataatttaaaatgactaaattaaaacaaacttattgtrtagttgtcacataatgtatataactaactcattgttggacttccgattgtttccaatgctatggtggacattttgtgtttgtgctacatccttagggcagatttttttttttttttttgaaaca

SEQ ID NO: 661010 - DNA, 624 bp, Homo sapiens
tccatgaaatcttgacaacataggaaattgtcattaaaaagtacccaaaatagtttatagagtatttgatgaaaaatgattattttattgttggagtttttatttctttgattagtaaggaggttgagatttgttacatgwttttggttatatgtatttcttctttcatacattctttgtgtaatttgctgagtcttcttacttgatatttatttttcttgctgatttataagagctcttattgtattaataacactaaccctttgtcacacaagcactcattagacaaacaagggatgatgacacaatatttctgttatttttccttaatgttatttcaaaagtgcatttctgtgaattgatacaaatcacaaacttgtcctttagaaagctgcttaatattatatctcacatgtatattttccaatttaaacaatgtatagatactttccaaaatgttcacggacatcctcagtgttgaagtagtattttattaagaatgtaatgcagaaatatgctaatactaaactaggtttccactcctttgttgtaggatctaggcaactgttaaaccatgataaattaacaataaaaatacaaaaaatctgtgacactaataccatt

SEQ ID NO: 661011 - DNA, 624 bp, Homo sapiens
tccatgaaatcttgacaacataggaaattgtcattaaaaagtacccaaaatagtttatagagtatttgatgaaaaatgattattttattgttggagtttttatttctttgattagtaaggaggttgagatttgttacatgattttggttatatgtatttcttctttcatacattctttgtgtaatttgctgagtcttcttacttgatatttatttttcttgctgatttataagagctcttattgtattaataacactaaccctttgtcacacaagcactcattagacaaacaagggatgatgacacaatatttctgttatttttccttaatgttatttcaaaagtgcatttctgtgaattgatacaaatcacaaacttgtcctttagaaagctgcttaatattatatctcacatgtatattttccaatttaaacaatgtatagatactttccaaaatgttcacggacwtcctcagtgttgaagtagtattttattaagaatgtaatgcagaaatatgctaatactaaactaggtttccactcctttgttgtaggatctaggcaactgttaaaccatgataaattaacaataaaaatacaaaaaatctgtgacactaataccatt

SEQ ID NO: 661012 - DNA, 611 bp, Homo sapiens
ttaaataccatgttatccagtatacaggaggcaatggcatataactcaaagaaattgatcttttaatataaactgtatctgtgttctgccctaactckagccaagaagaaagctttactaagtttaaagttgcctgtgctcaattcaattataatctgcccttaaacttaataattctaggatcttaaagcaaaatatacaaccttttctttatgatttttgtttatagattcctacttgaagaagaatgaggtagcactcatttcagatttattatcattttaaacaagaagcttcctcctagttacagggatattcatgaaaatattataaataatggctatttgtagcacttgaagggctttattaataagttatgtcaagccatctaatgcattctcctcggagttattattcaccaacactttatagattagatatctgtttttatattgcttttgaaatgtggtaggatttttatattcaggaaaatattcttttgtttctctgttcagtttatttgacggtatgatttactcagtttaggtatcatttccatgtaaaatttacacattggaattcgtagttattataaaataattgtctctgtg

SEQ ID NO: 661013 - DNA, 504 bp, Homo sapiens
cctggaaggtggaggttgcagtgagctgaaatcgtgtcactgcactctagcctggcaacagagtgagactctgtcccccaccccaaaaaaagatttttagttatttgtcaatatctatggagcatttactaagtacaacataccttattaaatgatttgcctaccttttaaaatggaatcttttcagcaaccctctgawgttctcttattatttccattatgaggaaactgaagcacaaagtatttgagtgacttgcccaaggtcatacaactaacaaatgttgtaactgagactccaatacaggaaatctgatttcatagtgtgtctttattatattaataaagtgaggctatcactttttcagatattaaaaggaatccaattgaaccaagaaagaacatgctgtaagaaatagttcaatagcagaagatcctttaatagtatgtgaaaggagaaatattctcatagtgatgaaaagaagaaaagaaaaggaaaacctgtag

SEQ ID NO: 661014 - DNA, 590 bp, Homo sapiens
atacaagccaacattgtaaaggatgatttactctaagataatgctgaaakagatgtggtatgaaattttgttaaatttataagataaatttgggatattcttttactggacaaactttttattaagaatatattgtttcttgaaacactaagttttgggataagttattaaaacaaatttgggagtggcttagttgggtgtttctcacttggatctctcatgagattgtaaacaagatgctagccagcgctacagtcacttgatagcttgtctcagggatttgcttccattggttcattcatgttcaggcaagttggtgctggcaattgtcaggagacaccagtttctggtcatgtggatctcttcatgggaaggcttcaatgtttttatgtcatggcatttgacttgctctaggatgagtgatctaagagacaggaagaaggaacccacaatgtcttttgtgatctaggcttgtaagtcaaactctgccacaactgaaatatcttactagttacacagatcagccttattcagtttgggaggagactacacaccagcttgaataccaggaagtgagaatcattgtggac

SEQ ID NO: 661015 - DNA, 590 bp, Homo sapiens
atacaagccaacattgtaaaggatgatttactctaagataatgctgaaagagatgtggtatgaaatkttgttaaatttataagataaatttgggatattcttttactggacaaactttttattaagaatatattgtttcttgaaacactaagttttgggataagttattaaaacaaatttgggagtggcttagttgggtgtttctcacttggatctctcatgagattgtaaacaagatgctagccagcgctacagtcacttgatagcttgtctcagggatttgcttccattggttcattcatgttcaggcaagttggtgctggcaattgtcaggagacaccagtttctggtcatgtggatctcttcatgggaaggcttcaatgtttttatgtcatggcatttgacttgctctaggatgagtgatctaagagacaggaagaaggaacccacaatgtcttttgtgatctaggcttgtaagtcaaactctgccacaactgaaatatcttactagttacacagatcagccttattcagtttgggaggagactacacaccagcttgaataccaggaagtgagaatcattgtggac

SEQ ID NO: 661016 - DNA, 596 bp, Homo sapiens
agtgtatacaatgagaaagctcttttattagttaacagatgttagcaaaactcatcctcacaacttaaaacttctttctgccaaaagagcattaaatttggtttggattgcaactggtgataccaccatctatatggctagcagaaatactttagtgtccttgcaaggcagtgagttgaaggagcaggagggaaagatggcagaggctggatcaggaaatagaagtcagccactcattgtaastcttggaaaattctgaattgggtaaagcttgttttgacactcttacttgctctttctagacttcttttcccaatgcatggattcccttcctgtttttttccacttaatgtgcacagaatatcttgcttttttcctcagttaaaacttgctttcaggaaagatttggtttcagctgcttgtatctttgttgagaatataacatactgtcattctcaagtgtatgtacactttaagcacagtattggttagttacccatgtcactacctatgggttgaaaggcattgctctcttgtgtggaaggaattttaagcttcaaaaactatgtgagagtgattttggagggctggaaaag

SEQ ID NO: 661017 - DNA, 580 bp, Homo sapiens
gagtagacttgttccaaaggcagtgggtatgtggatcttaagttcaggagatgcagagttgggagtcagcagtctatagaagttacttgaagctaagaatgttcatgcaaatgcctccaggagagtgagagtttgaatagaggagattcaaggagagaaacttagataaagctaccacgatcacaatgtaaggggaaaccttaaacatgtccaggcactaccagggaggatcgttatttgaagtatgtgtcacatctatattatagtcaacagtattcaaatccaatgacaacaggcaggtgcactgtgcttttcttcaaagctctttccataaggtagcaaatgagccatcttgtaacctcatcagaagagaggagtgrccttccaaccatcagctgagccttggccctcctctggcctatgctattcagccacctaagtatccaaacagcatggccgggtttgcacataggagttagaacagatcactggttgtcctgaaaccctgccttagctctgtcttttcccaaagtagcttacttcttcatttaaatctatatcacagctactagcctggtgc

SEQ ID NO: 661018 - DNA, 595 bp, Homo sapiens
tgtttggcctctttcccattgatcacatagcctttttctttttgtacaattttagtatgattaaccctcccacccccattaaagttcttcagccttcttagtagaaagctctgtgaagtttgattcacccacggaagttacttcatggagtggaagcatttgagaaatcagatcttggctttcttcttgtggacagatcaggtggctgaggcctggagggagcttgatttgagatgagtagtttgtatgcctgactaagtcaagtagccacttrcttcccttcacacttaatcaaatcctaactctctaactgaaactttgtaccatttgaccagtacctctcctttccccattcccccgctcccagcctccgtaaccactgttctactctacgcttcttcaccttctactttcttagattccacatataaataagaccatgtggtatccgtcacatatttcacttagcataatgccctccaggctcttctgtggccatggatgataatcatgtattgtatatttcaaaattgctaaagagtagatcttaaatgttttcatcacaagaaaaggaacttggtgaggtgatggatag

SEQ ID NO: 661019 - DNA, 640 bp, Homo sapiens
ctcttttaccaaaaacacatttcactttccctacacaccttgcatgtaaaactgtttttccagtagtctcaagtagatgttacactgttaactcttagcagtgtttatttttagtgaaaaacttggtaagcaattttaattatgtactaggtatggagcctaggacaccaggcagaagtgcagataaggtckgacacttactagcatagctaggaggcatggctaactccacatgtccctaggccttacctagaatctaatggctgtaggtaagtttaacaattttcaaaagtcaaagaggcagtttataaagttaaagcgtttagcaaacctaaaatttgacctgcctgatttagaccgaatgtctttattttaccaataatctttaaaattttctttacttcccacagcttaagtcacacgaattaaaaggcattacgctttttatttttctgacaaaatatttgatttaaacacttatttttaagccaattaatcaaagccttttatatcacacacacaacacatataaatacacagacagaagaaaatgtagtagttgtaaggtttttcctttgccagtttcttaattggattagtggctttatggtggagccctggaggaacagggcaaggaaag

SEQ ID NO: 661020 - DNA, 597 bp, Homo sapiens
ccagcattgtaaatagcaacaatggtctcaatctcattcacagctcaccacggatacagctaaacctagtaatgctttctctaattaaggagtatcaatccccccaaataaattatttcatttctggcagctgtggaaaaggcttctctgaataccaagagtctttttccagcttgacattgtctaaacttggtgaatttaaattttaaacattaacttaaggaaaaacaaaaacacttaacaatctatgcacactccattctttataacccaaggcatgtctagaaaacagatattcagcagaagctacccaagccatcrtaatgattcatctctatgagactcctgggcccatgagatgatcaaattcttgagattagggaccacacctttcagataatttatgtatattatctcagttatttgtacctcagaatactttataaattaggtactaaggaaatcaatgcacacagaagttttgtaacttggctaaagatacacatttaatatagagctggaatttcagctcagggagtgtggctccggaaactgtcctcctaaccaacatgatcctaccacccttgcctgtgatgg

SEQ ID NO: 661021 - DNA, 590 bp, Homo sapiens
agtgttcactgcctctcaactcactgaacttacatccttctggaagtatcttcataatttaatgttaatcactcaggcaaatcaaccaataattatattacaaagttaatttggcatagtcatgtccaaatcctccagatttgactctcatttccttgccatctcatcttacatgatcaaatacacccctgccacctattcttttagctgttccctggactttgtcattcattcatctgacaaacatttgctataacatgccatgtgtcaggtacatcaccaaaaatatgccactactgaaatattaatttagagatcctgtgatcaggtatactcttcaatccttctggcttaattctagctcttcatgatacagatgacatttagaatccaaaggacaccatgtcaatcattcttaccagtatttcaagtccctttgtcctttcaatttctgtcacaccactaggcagaaccttaattctaaataaatatggccatttatctttcctgggtttgggttcaaaccatatattagagaaaaatctctcaaccagacgtaytgtgtccagtataaattcatgttcattatc

SEQ ID NO: 661022 - DNA, 598 bp, Homo sapiens
atcttgatttacatacaaatataatgttgaattactaaagatcccaaatattatagtggggatccttgaaattcaaattgaaactttacattgctgagacagtgttgcctgctacctcctctcatattttatatgagctattcacattctatcgggtacaatttgagtggggtttttaatctgttgaatgtaaaaagagggtatttcctatgatttagaaaagaaaatttaaaaaatatacataagcagaaacatgattagacttaaggaaaatgaatttttgataaatggtgaactaaayaaaagcatattattcttttctttcattttatatatactgatagaatttcaaatacatatataacagtcatatgaaaacatgtatattttgtacctcatataaaatatatattatagtttatggcataaggtattcttttgggccagaagtcaaagataaatgtaatcaagtcaaaagcacataagagccagcttaaagaagttgtaacaatttgtgcacaaaaaataataactgcaataacatttatctaaaagagagtcaacattaaaaacaaagtgcatttgtcaccattaaaaa

SEQ ID NO: 661023 - DNA, 569 bp, Homo sapiens
actttaaattcagtcgtccacattgcacatgtggaaactaatacacacacaaattccagaaagaaaaattactatgttagcctcatagtaatagaaaatacctgaaagcaacaacgatggaggtgggtggtgaaaaaggggtaagaggaggcttgaaatgatcaaaaactttaatgtcaggttaaggggtttggacttcatactgcaggccattgggaacagaatataaagagtgattatgaattaaaaagctaagatgattgaggatttgagcctgaataactaaaagaattctaacaccattaacataaatagataaayagtaagcaaaggaaacttttcttattctcttttacacacatctcataccatgctacagcttaagcccattttatcatttcatttattactaaaattacattagcttataatatgttctatgtattgaatttcatcacttttacttcttagatggctcttctttaaaaaattaatcaattatttgagtacatctgcttaggtcataagtatctgacatactggtgatttttaagtctcaattctaaatg

SEQ ID NO: 661024 - DNA, 560 bp, Homo sapiens
gtatgcaaaatatttcccctttaaacaactgaagagaacacaaattaccatgaagtaaactgttttcaaaagaaaatttcttaagaatatgcttttaaaaattaattatattcatagtcatctccattcaccatttaaagaattttaaaatgcatatccaaaattaaagcctatattatagtatgttttcaacacaccaaagggtcaaaaaaactatctttctacgtaagcctcaaagatattactgtacttctctatgagagagagagatagagagagaaagtgtgtgtgtttgtgtgtgtratgtaaaggcaacaagaagtattacttgctcaattatggcaataatgaaaatttcccttatatgcctattttataatataataaagtcagtagaacaacctggaacttagtcataaaatagtttcatatcagtgatcttaggaatattaatccttctgcattatttcctaatctataaaatgtgaattatagcaacatcttcatgaagatttaaatcatttaaacagaacttttgtgatttatcaacttgtgcaaaa

SEQ ID NO: 661025 - DNA, 627 bp, Homo sapiens
cttactccaaaagagcaagtgtttaagtttcacaaattctgaaaagaatcttattgaataaaactgaaaaatatatttatcatgaatartgctagtaaaaggtaaaggaactctaaaattacaaaatatctgtgtatttttagagatagcattgattattttgaaattaaataatagggacttctatattaaaacactgaagatcagggacatataaaatatctgggctattaaagatcataaatgtgggaggttttagtaattaacataatagtgtaatagccctcttcattataaaatcatgatatttataaaagactttcaaataggttaaatatgaataattgaaatatgccaggttctaagatacctttaatgattatacctcatcattttccctatccctgattgccacattccaccactaaaataaagggtgtaaaggactagatgagatcactgaaaatcaaaatctgagagggaaaaatgaagtgaagacaataaacagaaataacaaagggagatatgttttaccattcctaagtctgtatttcagtgattagcaagattcatgaggaggtacacataaaaatatccttaagaactctttccataaaggaaatacaa

SEQ ID NO: 661026 - DNA, 227 bp, Homo sapiens
tatttatattgtctctaaatgttaagttcaatgaacactcatttacaaaatttttttgagtgcctattatctgccaggcactattctaggttccgggggtatagtgagaaactagactgacaaatattctgcccttatgaaagaaagggaaaagactggcagatgatgaggtcacaaaggtagatgggggtgatttaaggacayggtagggggttgtattatatctg

SEQ ID NO: 661027 - DNA, 590 bp, Homo sapiens
gcccaatatcttttgggaaggagcatgattctacctaccacaccacttaagtaattttcatgcaagtgggagacaagatatgattgatgctttttaaaagatttctctgggtgagtttgctctaggaggcaaaatggaagcaacagactcagtgaggaggctgctgtagtacagacaggagatgactaaggcttgagacattaaattacacattttatatctgtaacagtcatgatcagctaatgagtagtaaagagtgaggactcagggctcagacttcctgtttaaacctaattataccacttgcaagctttgtgacgttgagcaagttacttaactaagttgtttcttccactgtcaagtgatcattatagaactgctatgagtattcagattaaaatgtgtagaatatctgacagaatacrgtgcctgacacatagtaagacctcaataaatattggctacattatttttatctgtgcctggaattgctcgatttcttttatataattttatgacaaatttatggttgccaaaatgtaagtgtaaaaacaactaaataaatttaatacctcgataagtagagagtg

SEQ ID NO: 661028 - DNA, 637 bp, Homo sapiens
gcctgccttataaaaggactcagtaaatatttatgaatgaatgagaatgccattattactaaatgctcaagattactttcttttaaaaaattgagaaatcatggccaagcaaaagtaaataaagcagttacccgagatgctgtcagcatttcatcactggaaagtagacactcacagaagtgaggtggaattgacaaaggtgctaaccaggagtaccartaagtcataacaaaatctgaatacaatgaatttaaaataatatgcacagaaacacagattttatcatttgaaatgggagtgattaaatgtttggctgtctacattatatattagactatcgataaaagtcattattactggagttacccccataaagcccttctcatttgccttattcttcagcatttttacatcaagtcacaagcacacaatactctattatacttgttctctcattgttttccatggtcactagaccttcctaatatacagtctaatctggactcttctaccttttcggcatctcttttaaacggagtacagcaagacgatggtcctaaataaatggttgcatgttgattagtaaaataaatgagtgaaatcattcacatataaataaaggtttccttagtacatg

SEQ ID NO: 661029 - DNA, 637 bp, Homo sapiens
gcctgccttataaaaggactcagtaaatatttatgaatgaatgagaatgccattattactaaatgctcaagattactttcttttaaaaaattgagaaatcatggccaagcaaaagtaaataaagcagttacccgagatgctgtcagcatttcatcactggaaagtagacactcacagaagtgaggtggaattgacaaaggtgctaaccaggagtaccaataagtcataacaaaatctgaatacaatgaatttaaaataatatgcacagaaacacagattttatcatttgaaatgggagtgattaaatgtttggctgtctacattatatattagactatcrataaaagtcattattactggagttacccccataaagcccttctcatttgccttattcttcagcatttttacatcaagtcacaagcacacaatactctattatacttgttctctcattgttttccatggtcactagaccttcctaatatacagtctaatctggactcttctaccttttcggcatctcttttaaacggagtacagcaagacgatggtcctaaataaatggttgcatgttgattagtaaaataaatgagtgaaatcattcacatataaataaaggtttccttagtacatg

SEQ ID NO: 661030 - DNA, 660 bp, Homo sapiens
gtggcctaaataccttgaaaaaaatgttcagattcttcccaaaaaaaccatttccacaaacagcaaaaaactgttttcaaatataaccaaagtggcctaagttctgaaagtacttgaaatatacatatatatatatagatagatagatatagatatatatatcaaaaagatgctaataaacatggcatcacctcagagggaaattccacctgttcttaactgacaccaatttaaatattgatagctgattccataatatttacttattgattagaattatttttacttatctcttcaaatggatttgtagttatacgtacataagactttaatacatgttttacatagtttttaaaataatattatttttgctttagagtaagttctattagaaagaaacatattctgattctaaatgaagctgccctgycatgaagaaaggctttttctgttgctatacggtaagctatgaaatacaggacatcataatcattccactgttctcatcactctctaggagaatcctttaataaacaaaattcagaaggaatagcaaagggtgtgaaatagagaacccatgccaaatggagagaggatcaaaaaaagagaaatcaaagttgcacagaaaaatactatttgtagtgaactgaatggtggccc

SEQ ID NO: 661031 - DNA, 660 bp, Homo sapiens
gtggcctaaataccttgaaaaaaatgttcagattcttcccaaaaaaaccatttccacaaacagcaaaaaactgttttcaaatataaccaaagtggcctaagttctgaaagtacttgaaatatacatatatatatatagatagatagatatagatatatatatcaaaaagatgctaataaacatggcatcacctcagagggaaattccacctgttcttaactgacaccaatttaaatattgatagctgattccataatatttacttattgattagaattatttttacttatctcttcaaatggatttgtagttatacgtacataagactttaatacatgttttacatagtttttaaaataatattatttttgctttagagtaagttctattagaaagaaacatattctgattctaaatgaagctgccctgccatgaagaaaggctttttctgttgctatacggtaagctatgaaatacaggacatcataatcattccactgttctcatcactctctaggagaatcctttaataracaaaattcagaaggaatagcaaagggtgtgaaatagagaacccatgccaaatggagagaggatcaaaaaaagagaaatcaaagttgcacagaaaaatactatttgtagtgaactgaatggtggccc

SEQ ID NO: 661032 - DNA, 589 bp, Homo sapiens
atctttcttattctttcaatgatgatggtgtaggaaagtgtttgcaatgggctgggcacatggtggatgtttaataattcatggttgcaatcacacaatgtcagtccctggtcactgggagtcatcatgtgccctgacttggggcctggccctctgcctctgtcttgcaggacaatrccattctctgtctcatggggcgtcctcctgctggcaggcctgtgctgcctggtccccagctccctggttgaggatccccaggaagatgctgcccaaaagacggatacatcccaccatgatcaaggggactgggaggaccttgcttgccagaagatctcctataacgtcaccgacctcgcctttgatttgtacaaagagctggctgatctatcacaaaccagcaatgtcttagtcaccccaacaagcgtggctatggcctttgcaatgctctccctggggaccaaggctgacactcgcacagagatcctggaaggcctgaatgtcaacctcacagagacgcctgaggccaagatccacgaatgcttccagcaagttctccaagccctcagcaggccagacacccggctccagc

SEQ ID NO: 661033 - DNA, 538 bp, Homo sapiens
aagttcttcagcttttaaactcttggacttaagccagtggtttgccaggggctcctggccacagactgaaggctgcactgtcagcttccctacttttgaagttttgggacttggattggcttccctgctcctcagcttgcagacagcttactgtgggattgtgatcatgtgagccaattctccttaataaaccccctttcatatatatgtctatcctactagttctatccttctgaagaaccctgactaatacacagggcatcaagtgagacatgcctcttgagggcagtgataaggtttactcttccctaaatccctcttaatgcctacccatggttagacatacagcaagtgcttcygaagtggatgggtgcatggatggatgcaaaggggaaaggaaggaaggaaaaagggaggaagggagggagggggggaataaggaaatcgcttcccctgcagaaggtgaccttcatccttcccttctcagcttctctgtcaatgagatgtgaccaccttccaagctaggccagcccggcag

SEQ ID NO: 661034 - DNA, 538 bp, Homo sapiens
aagttcttcagcttttaaactcttggacttaagccagtggtttgccaggggctcctggccacagactgaaggctgcactgtcagcttccctacttttgaagttttgggacttggattggcttccctgctcctcagcttgcagacagcttactgtgggattgtgatcatgtgagccaattctccttaataaaccccctttcatatatatgtctatcctactagttctatccttctgaagaaccctgactaatacacagggcatcaagtgagacatgcctcttgagggcagtgataaggtttactcttccctaaatccctcttaatgcctacccatggttagacatacagcaagtgcttctgaagtggatgggtgcatggatggatgcaaaggggaaaggaaggaaggaaaaagggaggaagggagggagggggggaataaggaaatcgcttcccctgcagaaggtgaccttcatccttyccttctcagcttctctgtcaatgagatgtgaccaccttccaagctaggccagcccggcag

SEQ ID NO: 661035 - DNA, 466 bp, Homo sapiens
aaatgggcatctcagctatattcagttaccatgcaggccttgagaatttctctgcaaaccacacccatgaaggccttcaaggtaaaagttaaaacccaccagtgtccggtcatttctaaaagtgcatacattttctcacacattcaccgtgcaccagtggagttactgtgaagccgctccactgctgggggaagccaaaggtggaaatgtcaaattacaacacccactggtgtcctgaggacagctgatctgaggagcgagctgggcctgtgacatgggggaagggtttcccaagctgggtgctaaggcaagcacccccactcctggtggggagggaaggagcagatgaagaaactgagactccaccagggaacaggatgcactaggtcatgcctctagtcaggacagaaccaggactcgaatctggacctcctgggcyaagctcagactgaggttcagtgtggca

SEQ ID NO: 661036 - DNA, 607 bp, Homo sapiens
aacaacaaattatcaaaaaaagaaatcaagaaaacaatggcattgacaatagttacaaaaaaataaaatgctcaggaatacatttaaccaaggaggtgaaagacctgtacgttgaaaactataaaacattaatgaaagaaattgaagaggggacaaataaacggaaaggtaacctgtgttcatggattgaaagaaataatattgttaaaatggccacactactcaaagcaatctacagagtcaatgcgatccctatcaaagttccagcatttttcacagaaatagaaaaaacaaccctaaaattcatatggaaccacaaaagatcttgaatagccaaggcaattgagcaaaaagaacaaagctggaggtattatcctcttgattgaaaatatattacaaagctatagtaatcaaaacagcagtattggctaatagaaacagactcataaaccaatggaaaagcatagaggccagtwactaacccatgtgattatggtcaattgatttcaacaaaagtatcaagagcacacaccaggcaaagaacagtttcttcaacaaatagtgctggggaaactgaatatccacgtgcagaagaatgaaattggac

SEQ ID NO: 661037 - DNA, 616 bp, Homo sapiens
cagttcaaatttgatgtctgtcacctgtaatccaaagaaaactgatgaaaaataaaatgtggggaaaggggaaggtgctagactttagaattgaatggccttggatttgaatctcaagggcgtttaacttaacttccatgcagctcagtttcctatctaaagaggagtgacaatggtacccacttcacagagtcattgtgaagatttcgtgagataatccagaggaagcgcttggcagatattattccatgtctgtctctcccaccagactaagaccactggaaggcaggaccttgcccaagtcatccccaattggagctaaacacctatttttctttttacaagtatctgcaccttggtgctaattaagggcacctaagacatctctgccaactgacacagggcaaccacattgatgcaactccagccacattttggtattaaaaaaagacttcatagaattgaacgcagagcaaagttaatttgcagcatttctgtgtttactcagctmtcctgacaaagcctcccattggttaatgactcgggggagaggactaccaagcggtgaaggccactggcccctctaaccattaaccacccaggaagctggcaaaca

SEQ ID NO: 661038 - DNA, 610 bp, Homo sapiens
cagcaccctaaaccagtaaaggttcagagagtgccacccagcaacgtaggcagtatttacaggcagaagaaggaagtgacatacacacataggctgataggttacagctctgtgtttgccttgtttgaacatgtctgagcagttggcaggctgtgattgactgaaagttcagctgctatgattggctgagacttggttacttgttacaaacatatactctcaagttaggtgcagtttgtttacatattaagctaggttacagtttgctacatgaggaggcagctttagcccatctttaatttaatttaacacaacacaacctcctggagcactggtttaaatgakggttcccagcccctcacccagaatggctggttcaacagtgggtggtgcagtaagacctgcttctcctgtaagcatcctgtatttattgtgatacaggtagctccacacagcacagggcctgaaaccactaaccttgcaggcaggcagtgtccaccgactgattccaaccttgggtggattttttttaattgctcttatggaactctttttaaatcatttatatttaattttttccttaaatttgtattgtgggaaaatataatac

SEQ ID NO: 661039 - DNA, 595 bp, Homo sapiens
cacaattttacttctgtccctaggtattcggctactctaggtgtagaattagactctatttgtccttttgtgtctggcttatttcacataacataatgtcttccaggttcatccatgttgtaggaaatgtcagaatttcattcctttttaaagttgaatagtattccattgtatgtttataccagactttgtttattcattcatccattgatagacatttgggttgttttcatcttttggctatggtgaataatgctgctgtgactttggtctacaattatcttttcaagttccttgactagctgcttgcagttctttggtgtatatactcgaagcaaaattgttgggtcaaatgacaatttgtttaatttttraagaactgtcatattgttttccacacattgtagcactttatattcctaccagcaatgcataagggttccaatttccccacatgcaatgctaacatttaaattaaaaaaaaaatttttttaaaggaaatcttgctatgttacctaggctggtctcaaactcctggcctcaagcattcctcctgcctcagctttcagagtagctgggattacaggcacgggcc

SEQ ID NO: 661040 - DNA, 644 bp, Homo sapiens
gtgaaagcagtgtgatgatagaaatgtaaagctgtaaacacattaaaaacaagaagatctcaaataaacaatggcatatattcaaattcaggtgttaactttaggatgctaatgtaatccccataataaccacaaagggatgagaatagaattattaaagtgtttcaatacaaaaaagcatttcagtacaaaaactaaatacaaaaaaggacagtwatataggaaatgaagaaccaaaaatgttatatcttcttgctgtactgaaaactttattaatatgtcattgccctgtcttttggaacttttttaattcaaaatctattttgtctaatattagtgtagtcacccctgctctcttttgattactatttgcatggggtaacttttccatcctttcactttcagtcagtctatttacatttttggatctaaaatgagtctcttgtagacagcatatatttggatcatattttagaaggctaatgtgtaaaaataatttttagtctttgtttataatttagagactagaaaaagagcaaactaaactgaaaaatagcagaaggaaggaaataataaagattagagcagagataaataaaatcaagaatagaaaaacaatagagaaaataaattaaaccaaaatg

SEQ ID NO: 661041 - DNA, 577 bp, Homo sapiens
atggtgttttcaaattatgtaatacatttaagttgatcagatcaaaatttctcttatgttctgtcttattcaatgaatataatactttaaaaaaaaagtactgaccccagacttaacccttttaatattctatttcattatgaacagaaaagtatagtgatgttacaaatggcaatagaatgctagagcggaaagagacttagatatagtctaatccagtgtttttattttcatgtttaaggtttgagacattaatacttgcctagggttccagaagtttcagcagagcctggcttgcaagccaggatttcttattcacattctacactttytctgattcaggctttcttaacatgtataaacaatgaagcttaagtcaaatttttaaaaagtcaaacatttattactgtcacattgggggttaaggaaactttctaaaatcaaacatttatgttaactagggttcaataggttttcttgtaaataatgccttaatgattcagaattcagctagatttagagttagcctgaaatgtcactgaattaatctgaattgtctccatctgtattcaccact

SEQ ID NO: 661042 - DNA, 577 bp, Homo sapiens
ctctatgagcttccagataagaagtaatctatttttaatgaaaaggaagatacggtttctgctcacaaacagattagaatctagttgtgaagaaaagacaactcaattgcatttcatgactgcaaatatttttatccataaatgggtttccctgggtggatgagaagaccacctaaccatatgcaaggcaggttaggcccaaatttaaayattccattgagtttaatttggacttgatataaaatatagtccaggttctagagtcaggaagtcctgggttccagtcctataagtgcattcactagctgtgtgaaaataatgcaaaataaaaaacaagtgccagagggagataattacgctttaaaagtagagaaaagaaagagaataattttgtttagagatgtctatcttattgtgctcctttatttattctcttttttaaaataatatttattgggttaaaaatcacaaataagtacaaagaaaacaaaaaagatccacaatcccagcacccagattaccactgctgacatttaaaaacaaaaacaagagaaataaaggttcatgattagaaagt

SEQ ID NO: 661043 - DNA, 577 bp, Homo sapiens
ctctatgagcttccagataagaagtaatctatttttaatgaaaaggaagatacggtttctgctcacaaacagattagaatctagttgtgaagaaaagacaactcaattgcatttcatgactgcaaatatttttatccataaatgggtttccctgggtggatgagaagaccacctaaccatatgcaaggcaggttaggcccaaatttaaatattccattgagtttaatttggacttgatataaaatatagtccaggttctagagtcaggaagtcctgggttccagtcctataagtgcattcactagctgtgtgaaaataatgcaaaataaaaaacaagtgccagagggagataattaygctttaaaagtagagaaaagaaagagaataattttgtttagagatgtctatcttattgtgctcctttatttattctcttttttaaaataatatttattgggttaaaaatcacaaataagtacaaagaaaacaaaaaagatccacaatcccagcacccagattaccactgctgacatttaaaaacaaaaacaagagaaataaaggttcatgattagaaagt

SEQ ID NO: 661044 - DNA, 580 bp, Homo sapiens
agttgcaatgaatattctcaaaccagacagattgtctgcaagattgctgagggcctacagagtgccataatgacccagaaccagaggcccagaggtgctggtgaggagcttgtgtagagattttctcttgggaagattcagatgcagggttaaaggctttatgaagaattatgatttctagtgatgaatgaagaaagcyagggcaaagccatcccgccaaaaatgaaagagcatcttaagacttgacaacagtggcaattctgtctaccagtgctgtagaataatttacgaaccacacagtgattcagagtggcttaacaattgctggatgatgaatgcatccctggaaacctccctatttctgcaacaatataatgatataaaattagctaattttagtttattcctatatctgggaggctgaggagatggatcagtcaaataattatgggcacaaccctacttgttgaatactccagtgctctataaacatttattagtaagaacctcctatactgaggaaaatgtagaagctttgtggccagggatggactgctttggtgtttatatttacctagca

SEQ ID NO: 661045 - DNA, 580 bp, Homo sapiens
agttgcaatgaatattctcaaaccagacagattgtctgcaagattgctgagggcctacagagtgccataatgacccagaaccagaggcccagaggtgctggtgaggagcttgtgtagagattttctcttgggaagattcagatgcagggttaaaggctttatgaagaattatgatttctagtgatgaatgaagaaagctagggcaaagccatcccgccaaaaatgaaagagcatcttaagacttgacaacagtggcaattctgtctrccagtgctgtagaataatttacgaaccacacagtgattcagagtggcttaacaattgctggatgatgaatgcatccctggaaacctccctatttctgcaacaatataatgatataaaattagctaattttagtttattcctatatctgggaggctgaggagatggatcagtcaaataattatgggcacaaccctacttgttgaatactccagtgctctataaacatttattagtaagaacctcctatactgaggaaaatgtagaagctttgtggccagggatggactgctttggtgtttatatttacctagca

SEQ ID NO: 661046 - DNA, 425 bp, Homo sapiens
gaacttaatcttccccacacacataaaagaaacctgaaagttagcaatttaagactagcatggttacttgacaaaattgtcaaggtccatagctccttgccatccttcagtgtttcttgttctcacagcccaatrtggttgatagagcaccagccatcacatcacatccatgttctgggcagcatgatggaagaagggtcaaagaaactctctaaaaacttcctggaaatcccacataataatttcatttgcatttattggccaaaatgtggtcacatgaccatatctagctgcaaggaaggttgagaaatattctttggctgagttttaggattctattattaagaatgaagagaagaacagatgttaatttaagcaaccagcagcctttgccacagcatgatggaactagtaagttagccctt

SEQ ID NO: 661047 - DNA, 518 bp, Homo sapiens
tttttctttcactgctatggcttggattcatcactcaaatatgctgatgattccgaaatcttgatcccccatccatttttatttctttagctctacatatggacataccacatctcctggacactggaatttggatgttctgttggtacttcaaattcgacatgtctgttccccaaatcatattcttactgggtcaattctctggtttaataacatcatgatgcaccaaatgttaaccataaatctacctattgtggatgttggmttctcatgctcacaccctgagacccaagttacttaggctaataacagttaacatctaacaaggcgcaattaactagttattccttggctttacagtaaagaaagacagcgagaaaaaaaaaaaagactaatgtgagaatatcattagctgatagggatgtgagtgaacactgtcaccttgatcaaatctatatgccaaaggaacagagctctcactggaaaccgtgttaggcaaagcataatctgatatcgac

SEQ ID NO: 661048 - DNA, 481 bp, Homo sapiens
atatctggtccctgcccctggttctgcacacagaactcttttaattaatttatttattttgagacagggtctcactctgttgcctaggctggagtacagtggtgcaatcatagttcactgcaagctcaaattcctgggttcaagtgagcctccctccttagmcctcccagtagctgggactacaggtgtgccaccatgccccactatttacgtggttttttttttttttttttttgtagcaatgaggtctcgccatgttgctcaggatagtcttgaactcctggactaaagcgagccttctgccttggcttcccaaaatgctggaattatgggcatgagccattacgctgggtccacagaacttgtaaatctcttgcaatttgctgagcaataagggctctaggtgcatcttttgttctgtatttggtctctgagctcagttcctcacacagaactcctaatcccttggaatttcctgggt

SEQ ID NO: 661049 - DNA, 481 bp, Homo sapiens
atatctggtccctgcccctggttctgcacacagaactcttttaattaatttatttattttgagacagggtctcactctgttgcctaggctggagtacagtggtgcaatcatagttcactgcaagctcaaattcctgggttcaagtgagcctccctccttagccctcccagtagctgggactacaggtgtgccaccatgccccactatttacgtggttttttttttttttttttttgkagcaatgaggtctcgccatgttgctcaggatagtcttgaactcctggactaaagcgagccttctgccttggcttcccaaaatgctggaattatgggcatgagccattacgctgggtccacagaacttgtaaatctcttgcaatttgctgagcaataagggctctaggtgcatcttttgttctgtatttggtctctgagctcagttcctcacacagaactcctaatcccttggaatttcctgggt

SEQ ID NO: 661050 - DNA, 481 bp, Homo sapiens
atatctggtccctgcccctggttctgcacacagaactcttttaattaatttatttattttgagacagggtctcactctgttgcctaggctggagtacagtggtgcaatcatagttcactgcaagctcaaattcctgggttcaagtgagcctccctccttagccctcccagtagctgggactacaggtgtgccaccatgccccactatttacgtggttttttttttttttttttttgtagcaatgaggtctcgccatgttgctcaggatagtcttgaactcctggactaaagcgagccttctgccttggcttcccaaaatgctggaattatgggcatgagccattacgctgggtccacagaacttgtaaatctcttgcaatttgctgagcartaagggctctaggtgcatcttttgttctgtatttggtctctgagctcagttcctcacacagaactcctaatcccttggaatttcctgggt

SEQ ID NO: 661051 - DNA, 573 bp, Homo sapiens
gtcagtatgaactcaattgatggaggtagttactatgtgaaccagttgsatggttaaagctcttctctacttgtctattaaataacattgcagatgcacaatcattctttgattttaaaaatgtaataaatagataccttttaatctattactttgggagacactgaaccataaagctggtatggaaaacatgcaacaagtatatgaatctggaaataccacttcaagaaagttggacaccattaccacaaataaaaatgtggaaagagtgttaaatttaacaattgctcttggagtaaaattattatttacataattatgacatctatcctatgagtcctcaaaaattattcaagagaatcagaggccatatctgacattccttacattctacagctgtgcagtacatatttagagccatttccattagaaagtgggattaaaaataggtccatgtctatgaagaccatgtgaaagtaaattgctccagaaagtgtcccagatttattatgggtgttgctatagaaacctcaagaagaagtttgctcttagagggcatccttttttattcta

SEQ ID NO: 661052 - DNA, 587 bp, Homo sapiens
ttgttcaagtgaagacatctggatgcctctgcagcctggaaaggtctattagtttaaggatgaagctgttttaaagtccattctaaaacaaacaaaaaattccacccataatccttttatactaatgaattacatcttgaaacatattatggaagttaaaagaaaagtcttagtttataatagtgcaaaaagaagagtcagaaaaaagtcagcatgacaaatacataaaactcaaatatatagagtacatgacaaatacataaaactaatatttatgggagacaagaagcaaagtttcttctgatcttggcaaaaataatgaaaccagatttctatcttaaaataaagaaaatttctatcttaaagaaaattccattttctctggaatcctaatcatttttttcttagaccaaacttagaaataccaattcagtttttaaaaagtcaatagactctgttttagagcagttttaggtttacagaaaaaggagtttaaaagacagcattcccatatactcstcctccccctgccccaccctcaactaatgcagccctcacccacgctaatgcaagattttaataactaa

SEQ ID NO: 661053 - DNA, 622 bp, Homo sapiens
caacagcccctttcttttggctatgttgccaaccaaatgttttaaataagtaaatagcaacaaaacaataatgatagttattcactctggacygagaatttggagccaggattttaaatatgggtttacactaaatgataatctttaaagataatatgagcatattctttatcatctggcaattgtcttaaactgagattgctacttccttctcattgtccaagtttatatttgtgcctgccactgtgtttgtactgtgtgaaagccaaataatttcatggcagcccacaaaaaagaaaggtttccagaagctgaaatagggaaatgtaatgagatctatattcacagagcacatagtagtttgagaaagacgctcaatgaatgctgatgttgattgaacacttagttccaaaaatatctttcttctatagtatcaatttggcaggaaatattataataaatataaagaaattctgcttccatatcgagaaataaatggagtaaattctcacttgatgcagatttcacttttctaaaaatactagccttaacattaatcttcactaattaactaaaatttttatgtaaaaatttcttgtttataggattttgataaactata

SEQ ID NO: 661054 - DNA, 576 bp, Homo sapiens
gttagtattaataatttcatattgccagtgtataagcaggcactgtgctaagacatggaaatgcattagtgaacatggcagacatagttcctgactttatcaagcttatgtggcagactggctgtgttcatttctttataaccattaactataagccagcaggggcactgctgagcctcactacacatagaaggacagaggatcatgcttttctctaggcatgtcttaatcttaacattctccatcagaaaaaaatcaaatcatgtgtttctcttagcttcaaatgtagtgtgtatccgtctgtgacaattggtcatattcttgcattagaatttcacagactgagtcaagtttttctaaggtttgtttttgtttcaggtttaatgggatgtaattgacaaatagaaattgtatatatctaagttgcaaaagttaatgtttatatatataaacatacatacatacacacacacacacacacacayatatatatataaacaactatcaagctagttaacatatccatcaccttatatagttactttttcatgtgtggtgaaaacacttaagatctag

SEQ ID NO: 661055 - DNA, 576 bp, Homo sapiens
gttagtattaataatttcatattgccagtgtataagcaggcactgtgctaagacatggaaatgcattagtgaacatggcagacatagttcctgactttatcaagcttatgtggcagactggctgtgttcatttctttataaccattaactataagccagcaggggcactgctgagcctcactacacatagaaggacagaggatcatgcttttctctaggcatgtcttaatcttaacattctccatcagaaaaaaatcaaatcatgtgtttctcttagcttcaaatgtagtgtgtatccgtctgtgacaattggtcatattcttgcattagaatttcacagactgagtcaagtttttctaaggtttgtttttgtttcaggtttaatgggatgtaattgacaaatagaaattgtatatatctaagttgcaaaagttaatgtttatatatataaacatacatacatacacacacacacacacacacatatatatatataaacaactatcamgctagttaacatatccatcaccttatatagttactttttcatgtgtggtgaaaacacttaagatctag

SEQ ID NO: 661056 - DNA, 631 bp, Homo sapiens
taacatgtattaatcaactgcagaatattgctgagggcacactggactaaactttttttttccagtttttcttttttttccagttttttggactaaacttttataatttcttgcatttcaacatcatttactggaaatgaaatggtggatgcttaaaatcaacatgagtaacatcaacctagttttgaaaagcatgatgaatctagcaagaactctctgcaagtattttttatattctttcactttagaaggtaagatcattcaactaactatagtttatctttaatgttttagaactcttcaagtttttggctcacatattttccaatgtatttatgattatctcaggtatcaagggtcattaacatattcgctgtgactctgaggtctaggcaatggaagttatacttctcccgttaacaacatcacacgatctcaaatggcaacttctgaatcttggttttagatgattgtggcaatctgggtttcattattaaarggagataagatgacagattgggctggttctcactatctcggaataacagccttaagtatttggaaaatgtgagcacaaaaatatttaaggatttgaagagtgtaggttattttccatctggaagataaagtg

SEQ ID NO: 661057 - DNA, 480 bp, Homo sapiens
ttggtcagttctcagtttttgtgtggttttggtttgaattgaatctgatggcagacctttgaccttcctgtatctggatatttatattyttctccagatttggaaagttttctgctattatttctttaataagcttctacctctttattctgtcttctcctttatgagctcctgtaacccaaacattttctcttttgatgctgtcccataatttctgtatgttttcttcaatccttttgattctttttccttgtctttatttttcaaataacctgtttcaagttcatactttcttttgctttatcagttctgctgctgatgccctctattgcgtttttcatttcattctttatatttttcggctcccaaatctgacttttaaaatgatttaaatctccttattaaatttatcattttggtcatttattgctttcctgattttgttgtactacctatctgtatttttatgaaattccctga

SEQ ID NO: 661058 - DNA, 480 bp, Homo sapiens
ttggtcagttctcagtttttgtgtggttttggtttgaattgaatctgatggcagacctttgaccttcctgtatctggatatttatatttttctccagatttggaaagttttctgctattatttctttaataagcttctacctctttattctgtcttctcctttatgagctcctrtaacccaaacattttctcttttgatgctgtcccataatttctgtatgttttcttcaatccttttgattctttttccttgtctttatttttcaaataacctgtttcaagttcatactttcttttgctttatcagttctgctgctgatgccctctattgcgtttttcatttcattctttatatttttcggctcccaaatctgacttttaaaatgatttaaatctccttattaaatttatcattttggtcatttattgctttcctgattttgttgtactacctatctgtatttttatgaaattccctga

SEQ ID NO: 661059 - DNA, 480 bp, Homo sapiens
ttggtcagttctcagtttttgtgtggttttggtttgaattgaatctgatggcagacctttgaccttcctgtatctggatatttatatttttctccagatttggaaagttttctgctattatttctttaataagcttctacctctttattctgtcttctcctttatgagctcctgtaacccaaacattttctcttttgatgctgtcccataatttctgtatgttttcttcaatccttttgattctttttccttgtctttatttttcaaataacctgtttcaagttcatactttcttttgctttatcagttctgctgctgatgccctctattgcgtttttcatttcattmtttatatttttcggctcccaaatctgacttttaaaatgatttaaatctccttattaaatttatcattttggtcatttattgctttcctgattttgttgtactacctatctgtatttttatgaaattccctga

SEQ ID NO: 661060 - DNA, 480 bp, Homo sapiens
ttggtcagttctcagtttttgtgtggttttggtttgaattgaatctgatggcagacctttgaccttcctgtatctggatatttatatttttctccagatttggaaagttttctgctattatttctttaataagcttctacctctttattctgtcttctcctttatgagctcctgtaacccaaacattttctcttttgatgctgtcccataatttctgtatgttttcttcaatccttttgattctttttccttgtctttatttttcaaataacctgtttcaagttcatactttcttttgctttatcagttctgctgctgatgccctctattgcgtttttcatttcattctttatatttttcggctcccaaatctgacttttaaaatgatttaaatctccttattaaatttatcattttggtcatttattgctttcctgattttgttrtactacctatctgtatttttatgaaattccctga

SEQ ID NO: 661061 - DNA, 647 bp, Homo sapiens
ggaatttcaacctgatgatataactggatgggactttgggagtatctcctgtgggaaaaaggaaagaatttcgtttggcaggtcaagtgtagttggatatttatgggtggctaaaggggcagtctgtggaagagacttcttgttatttcttcccaacatccattcctttcttctcctattatgagagatattttgaatttttgacaaatcccagtctcccttgcatctagatgtggccatgagactaagttttggccaaaggggtataaatgatattgttgtacacaactttaggcttgtgaccttaaagtgaaacaggtgtgccctacactgcccattttttckaccttgttttaactgtggatgatgtggatgaggtggtgagctactatggaccatgagaatcagtggagcatactagagatggtgcaacaataagagaaggagcctgggtccctgaatgacctcatggggtagatgtcctaagctagtatcacactatttactcccagactggtggagaagagagaaataatttctggcgaattcaaaacactgttattttggagccctgttacatgcaccttgacctatattccaaattagataagtaagataggtaagatatcttaatgcactttggcatg

SEQ ID NO: 661062 - DNA, 588 bp, Homo sapiens
tgtctcaaaaaaaaaaaaaaagaaaaaattgcaactaaataatttgaaaaattctacaaaatagttaagaaaactttttgtttcataaaaaatatgtttaataataacgctgaataagacatcttatttcttaagtgactaaacacttyttggatgtgaaatcagagaaggctaatttttaaagtccataaataatatgaatttaagtgtattcagatgtttcttattaatttcaatattctgcttccttttgcatgtacatttagggcacaagaccaacacctgatcaaaagtggaaatgctaatccagttttataaaaaatataatgagtagtctccacaatactacataattgctagtaattataaaaatatttcttaactaaagtaggatttctttataattatacatgtcaattcatataacagaatacaatgattgttaaaatgcaggtatcatctaataatgcaccaattcttatttattttattaactgcattgtttgaaaagtaaatacatgaatgtaaaatatggtattatgaagcagtcaaaatcaagaaaaagaaacagtaccaaatataaaatat

SEQ ID NO: 661063 - DNA, 342 bp, Homo sapiens
atacatattccatatataaaaatgttaacaatccataggaatatcaatattctttcatcttttcctggaatgagatacaaagtagtactgtttatataagtggaatatgaagatacgtattctcatgaaaatctcttataaaaagtgatttgttcacctgagtgcccaagttttatggttagataatttaattatcagattaatgtttagataaaagttattgaaaaataatatgtaaaragaaaagttgtgatgctaacgagtgttcactgctatgtacttgagttggttcttgaacaggggttgggatctaaatgttagcaaatacagtgagatttttca

SEQ ID NO: 661064 - DNA, 636 bp, Homo sapiens
gcagaatgggagtgggtggaggagggagaaacaaagatcccagggcaagtgccataatcttcaaccaatgaatccagtagtgagtcacacagagacactcagtatgagtttcaaaggacatatttttaaattagggtaaagaaacagtggcttggaaaaggctataagaacacaaagactgactgtcttgtgcatattatggtgagtggagagaggaagaccgagcagcctctacatctaaggaaagggctagtggggatgtcaagggggaatatgagctgggagcactacttgggtgagagtaagtgaaaagacataagaaggtctctctctttgagtactgatgaagaccggcaaggatgagaggcatagtagagttaactggtcccaaacttccattctgataagggcagaggcactggagaatgtcagcagcctgtggcctaacrgacaatatattcaactctattttgtatgccagtgttttgtttctttttctcttctgcttccagtgtttttcctatttcaccgtgtattagcatttcagccagatatttgagggagagaaatagtgagaagaaatgagcatacaatcaggagatgattgcatattgtcatgaaaccttaaaaaattgt

SEQ ID NO: 661065 - DNA, 492 bp, Homo sapiens
caatgtcacagccatttaacttctgtcaaatttaaggttaaaatccttttagactgtttaacctattctctaccattttcctattatgtatgccgattggcaggagaaatgcatgttaaaacttattttacatttaattatgctacaaagttttcattaaatttctagaaatttctttatatttctaaggcataaagtgaaaagttacaataaactccaatgtaattttgttgttaytttgtgtttattatttataaagttaaactgacatctttttccttactgcaaatcttatgaattgtttctttttttgtaaatatgaattaataaaatataagttttagtctgtaaatttaggatgcaaacatggaacaaatgtgcaataataaatcactttacataatttatggttaattttatatatagccccttttttgaagtaacctccatttcatcagaataatataaaaaagtaagagctggttgatcact

SEQ ID NO: 661066 - DNA, 505 bp, Homo sapiens
acaaccagttggaggaatgtgacagatgtgcatatcagactttccaggatgaggcaatgggccaggtctttataacttgaagagcaaagtcaccaaagcagcctttccccattgtgccaccattaaggtagcagatggcagagcattagcaaaaagamattgagaacagctggacaacatctggtaggaagtgacaacctaatgggtatgctgggttgttcctaattgtgggcaatcactcaaaaagcctggaaagaaacttcaatgtgttggttggtgggaggaagaagttcgtcagagcaataaattctagttcaggaatttgagggaattctgaaaagaagtgactttagagcctggccaaatgaattatggaacattcatttgtttccccccaggttctaaataagaacaaactttttaaaggagtttgtgaggcctatctggacctggaatctactttaggtagatattcgattcatgaatactatttaaaacgtgagat

SEQ ID NO: 661067 - DNA, 546 bp, Homo sapiens
tattaactaaatgccctcattcctgtccatgaggaagtgatcaataagtacygaatataaaaactgtggtattgtagagtagtaataatatcagtggagctagaatttgactgggcagttcttgtgaagtactaaaccttaagtggagctttgaaggatgtacaggattcagacagataaaggaaaaggaaggtggcgtttcaggtaggaggagcataaactaaaacacagaggtagaaatgagaatgagcatggatatggggtacaaagagagctgtcctggttggaaggtttgtcatcagagatcagtgaaagtttccatacctaaagtaggtatggaaaggccatgaaggccacgccaaggcaattagaatttgttcaccaggcacccacagcaacttctctgaaagggactgacagtaataactaatacttcttaagcttttattttgtgtttggctctgtactaagtattttacgtggcttaccctacttaagtcccggaagggaggattttttcagatgaagaaactaaggcagtatgtg

SEQ ID NO: 661068 - DNA, 510 bp, Homo sapiens
ctgaaaacagaaatagaaatagagatggataagaaagacctgggccatctaattcatctccttgttagtgcagggaagtttcctttgacaaatgcttgtgagatattatgcagtaaaagtcatagattataacatttcaatcattttgtaaggtgactatttttcgagttactctcagctttgttctctgaayttcttttcacatatccctgtcatatgtgaagtatatctctttgtacacagaaatggctgagaattacagagatgaatgcagattatttttctgtaatggtgttgagtctagatgaagttgacttctctcgttaggattgtttttgtgaccagtggcacacatttgtgaggtcattacccagaatgaatcatgatcaagcttgtgacttaggatggctaaaaactaacaggaacccttagatatcaaacacgtcccttggtacctaatggcacaaatgcattattctaattgggtcagtggaatacttagtgtgggta

SEQ ID NO: 661069 - DNA, 510 bp, Homo sapiens
ctgaaaacagaaatagaaatagagatggataagaaagacctgggccatctaattcatctccttgttagtgcagggaagtttcctttgacaaatgcttgtgagatattatgcagtaaaagtcatagattataacatttcaatcattttgtaaggtgactatttttcgagttactctcagctttgttctctgaacttcttttcacatatccctgtcatatgtgaagtatatctctttgtacacagaaatggctgagaattacagagatgaatgcagattatttttctgtaatggtgttgagtctagatgaagttgacttctctcgttaggattgtttttgtgaccagtggcacacatttgtgaggtcattacccagaatgaatcatgrtcaagcttgtgacttaggatggctaaaaactaacaggaacccttagatatcaaacacgtcccttggtacctaatggcacaaatgcattattctaattgggtcagtggaatacttagtgtgggta

SEQ ID NO: 661070 - DNA, 328 bp, Homo sapiens
aaaaagaggaggaggtgaaaggaaggggaaggcaattaacattgatttaacatctactacatataatcattttaagtaagtgaatttaccattttaatatagtaaaaacaaaatctcacgtaaagaatgagtaaagcagcctgttcatgttgcactggttgtattggtattggtctttggcgatgagatactgttgtgtctgctgacacatgctgcttttctgaagtcattcttgccccactgaaggtttttgttttctttatctagattcatttatcatcattcaccagggactakgctggacactgaggatgcaaagataataaat

SEQ ID NO: 661071 - DNA, 329 bp, Homo sapiens
ttttcattttcacggaaagcagtcgtttaatgtacagagacaagaacaggtagtaataaaatactcmactgaaaaattcagattcatacctgaggctgctgcctcattagtactgatagggttttgctcagttacaatttcacaagactgtaggatttcttttagtggggtgattttgaggggtaaaggacaaagtcatagtttttcattctgtactttcattttcagatcacagtgttttagaagaatctgggctttacttattcaccaggctttcaatagagaatcacattaatccttttaagctccttattctaatgatttatttt

SEQ ID NO: 661072 - DNA, 532 bp, Homo sapiens
gttagctctccttgttactgtggcaggacttcagtagagtaaccacgggatgaatatgtgagttgcgtgttagttcccagatgccatccctcccaagttagatccctagagggttctcaactgggactgttgtggttatgggagactacaaagaatctcaagctgaccaactttgccctaaatctgatatccttgatagaatgtgctaatggagatcagagatgaggaaggtttgtataacctctagagagatctttctttagatatctacctggcatcttcaagtctatatattcttttcttcccccttccccatttgttgtccaacacccartgctctgtccaacatccaatgctggtcagtgatcaaatctgcctgctttctactactagaaggagattaaaaatcattgattcaaatcatatatttattaaatcaataaacatttattgataatcagctctgttgtaggagctggagatatagcagtgctctagggtttgttgttattattgttctgtggaatacatt

SEQ ID NO: 661073 - DNA, 543 bp, Homo sapiens
ctaataaatatgaattactctgaggatgaatacacacacattcacatacacttccaaacagcaaataccaaaaggaattagcagttcaggagggtggctcaactgccttctgagaactaagggccatgtcctctgtgattaaactgagtcaagcccatctgtaattgagcactggtagaatgggctcattcaagcatgtaacgcccttaaatttttcatttaaattttctgtgccttagaaatgaactttacagtaatctttgctttctaaaaataaatgtgtttcttgttaagcatttagtctcatcacaaattctgttttagaaaaaaacaacagaaaatagtgaatgagaagggtaggagacttaggactcagcgaattctatctcagtgccaagactttaaaactgggaataaatgctacttctccatgacctgggtctgataatttgtctgcaggaacactgtttctagagggtggtktggtacagtgggaggaatagactttggagtgagatccatgttcaaatcccaagtcactta

SEQ ID NO: 661074 - DNA, 527 bp, Homo sapiens
gtactttcacggtgcttcttagtctttaaagagattgatgttttagaaagtttaaaagtaactttttaccctcacgaaggaactttcaaaatgcaaatgatttgaaagtaggaggtatgctgacaaccactggtaggagggccaaccactgttccattttcttctgtttgatgaccaggatttctcctgggggttgaatcctggcttggtgccaaacaagggtctacagactctcaaagcctgtataaaataggagyatgacaaagaaggaaacagttaatccatgagagtgggcaggaggacaggatcttgtggactaggtcactctccatgtgctcctggacagcttgtcagggaggcaaagaaaagtaatggaagaagcagcagaaagggacaataaggacactggtagaaaataacaggaaagacactgaacagatacagcaggaggagtttgaacaatgaaggctaaaatgcagcctttcaaaggtttgtaattcagcctgtggcagagagtagaacatgca

SEQ ID NO: 661075 - DNA, 598 bp, Homo sapiens
gtgtttcaaaataatttttaaattttttttccattttcgtatgtcatccttattttctttcattcacaccacaaagatgccagcagarcttctgaaaatgggcatcaagtatttgttgtgtgtgtccaaatgtgaatacacctgcacatccacatggtctgtgtatagaggggcactttcttggtctttctaagcacatctcttgatagggggagagtacctagtacactgtccactgtacacagaaacccggtgatagtacacagatagagggggctgagtgaagtggaaaaatagcatgtgataaaggtatcatgaattgaatggaccccaattttgctttctttcatgatttctgtttatattcttgaggctacacatagaagcaggaagggaggtcgaaagctagatctccctaaagggacggggtgcttagcttttattataagttcggaacactgggatatctcaggtttctattgtgagtgatgaaactttttagtattggcaagaaaagagataggaaatgtgcaacaaataaaaagttgtgagggtgggatataactcagaagaaacccagagagaatccttgagagga

SEQ ID NO: 661076 - DNA, 692 bp, Homo sapiens
gatgattcacgccccaggtgggacacagcaggatggttcaagacttcaccacacaactcagaatggcgtgcaatttaaaacttatgaattttttatgtctggagctttgcatttatattttcagaccatggttaaccacaggtaactgaaactgaagatgcaaaaccatgcataaaggggactactgtatacaattttatgagttttgacaatctgacaaatatatacacccatgaaacaatcactgcaattaagatagtgaacatacttatcacmcaaaaggttcttcatgacacgttgtaattcttccctcctacccctccctggcctctactccatccctaagcaatccttgatctgctttatgacactattaggttagtttgcatttcctaggattttatataaatttaataaaacaatatgtatttttttcggtctgtcttcttacattcagtgtacttattttgggatatgttatgttgtttcatgtatcaattattaattctcttgtattgctgagaagtagtctattgtatggatataccacaatttgttctatccattcacctgttgatggacatttaagccattttccccaacaccttttttattgccttaagaaacagagttactaaaagctatatttgagtagaagcataataaatagaagcatagtgaataactgtcat

SEQ ID NO: 661077 - DNA, 587 bp, Homo sapiens
tttacatggtgttcactgagtaaaatttggggacatttatcaactacttccaagtgaagagtgattgtatcagtgtctcccaaaatgccacaagctgtttaaaagttacatgggaggttttttgtacaaatctccatgcattcatttccctgaacatttgctagttatgtgctgtgtgccaggcactgtcctagacactgaggatacaaaaatgagtaaaataaagagttctactctcaaggaactcatstatgcgaagcagacacatcaataattttaacacaacgtagtatgtgaaggtttgagctctgtacaagtactatgggtgccaagggtggggaaaccagttaggtggaagatggttagggagagcttgctagagaaggtcacacctgagattaatcttaaaggatgcccagggcttttcaaggggaagagcttgccaggcagaagtgccagccagagtagaatcggagcaagacagctggtgtgagctggaaactttaagcaatccaggtacatttcaaggcagatatgtagcctgtgaagttgcattagctggcatctcagagggccctgtaggtcat

SEQ ID NO: 661078 - DNA, 593 bp, Homo sapiens
gtgtctcccaaaatgccacaagctgtttaaaagttacatgggaggttttttgtacaaatctccatgcattcatttccctgaacatttgctagttatgtgctgtgtgccaggcactgtcctagacactgaggatacaaaaatgagtaaaataaagagttctactctcaaggaactcatctatgcgaagcagacacatcaataattttaacacaacgtagtatgtgaaggtttgagctctgtacaagtactatgggtgccaagggtggggaaaccagttaggtggaagatggttagggagagcttgctagagaaggtcacacctgagattaaycttaaaggatgcccagggcttttcaaggggaagagcttgccaggcagaagtgccagccagagtagaatcggagcaagacagctggtgtgagctggaaactttaagcaatccaggtacatttcaaggcagatatgtagcctgtgaagttgcattagctggcatctcagagggccctgtaggtcatgctcagggcctgggtcttattctctaccctggcaagccattggagagtcttaatgtcagagctgttttgtaggaaggt

SEQ ID NO: 661079 - DNA, 584 bp, Homo sapiens
aaaaacctaatgaatttctagatttgtcagctgtttccaaacagatgcactcagctaatctaatggaaacattttgagcccagatcccaaatatcaatagcttttagtattgcaaattagtttgtctattgggtaaattgggctgtgtggttcttgataaaaagtagcaagtaattttatatggatgttttatgtgtaactgccttgccagggtttaatgttcatatttttccttgcagagttttaagttgaatgtagacagtcattgtgctctcaaggaagctgtggaggaggaaggacaccaacttcttgagcttattgcatctcacaaagcaggtaaatcctcctgaaatattgcaagtctttacgtctccagactattaagaatgaagaagcattgctgtaaattactgcatatattcacttccttatgtattattaatatttacattatcagattgaccttcaagatttataaatgtttcatatactgcatacaatgctgtgatacttataagrtgaaatactgcctccaaatggtctgttcattttattttgggctgccgtttgcctgagtttcaatt

SEQ ID NO: 661080 - DNA, 583 bp, Homo sapiens
tattaattggatttactaatgttaaagactgccgtcttaattctggcctatttactgtatttctcattgaattgactttacctatttccatagacawtttttatcattataaagtctctacacagatacacacagagccttttatttggaatgtgaaactgtaatgttattaatttttatacattgtgatttttgttcctcatgtatttttttaagtcaatatactgagtctaaatcagtttccaagccagtcatctatgtggttatcacatttttgtgtccttatacctcatgttaagaattgcctgtctctattctgagtgacaaatgctgatatggcaggtgatggtaatggtcatttaaaaatatttatattgtttaaaatagccatctaatttactaaataaaaataatgagtaaagattcattcaggcccacaacttctgctttcccctccttttggagaaggactgaaggacatgctgcggatgattgcaagtcaatggaaggagctgcagaggcaaatcaaacggcagcacagctggattctcagggctctggataccatcaaagccgagatact

SEQ ID NO: 661081 - DNA, 576 bp, Homo sapiens
tccatgactaaaagctggatttggcttcttagccattatgtcagtcctctttccatgacgtgaccttgcacaggtcatgtacaaattgtgccatgaaatgcatctccaagcacrgcagttatgatcatctatttcatcttagacctaaagaggaattaaaattaaaacatgataatacataactccagaattcatcttaggtttacttcagaagctactgggagcttgagaagcataatagaaaatctaaggaatatatctagggggtatttttcttttttaccttgtttgagagactgcagaaaaggacttggttttagaaatcttgtaaagaaggaggataggaggaaattcaaagactctgggaaacttctcccctaggactcagcagcataccttatttgttgtatttcattttttaaaaaagtgttttcccaggactgtgagatcttttatacatggaaatagagaatagaattcaccagttctagaaatagagcttcagcactcacatctaagaattgaaaatatgcttataattatatatttttactttaagatagattggtgaaagtt

SEQ ID NO: 661082 - DNA, 576 bp, Homo sapiens
tccatgactaaaagctggatttggcttcttagccattatgtcagtcctctttccatgacgtgaccttgcacaggtcatgtacaaattgtgccatgaaatgcatctccaagcacagcagttatgatcatctatttcatcttagacctaaagaggaattaaaattaaaacatgataatacataactccagaattcatcttaggtttacttcagaagctactgggagcttgagaagcataatagaaaatctaaggaatatatctagggggtatttttcttttttaccttgtttgagagactgcagaaaaggacttggttttagaaatcttgtaaagaaggaggataggaggaaattcaaagactctgggaaacttctcccctaggactcrgcagcataccttatttgttgtatttcattttttaaaaaagtgttttcccaggactgtgagatcttttatacatggaaatagagaatagaattcaccagttctagaaatagagcttcagcactcacatctaagaattgaaaatatgcttataattatatatttttactttaagatagattggtgaaagtt

SEQ ID NO: 661083 - DNA, 588 bp, Homo sapiens
aatagagcttcagcactcacatctaagaattgaaaatatgcttataattatatatttttactttaagatagattggtgaaagtttatcacttcagattaggctttcagtatgttcaattttttaatggtctacagctggagggatttcaaaacatagtgaayaacacctaacaaaagctacatttttttgacctttcaaggcaaaaaacaaaaaatctgaaagcaagaaagcatctttaaattttatacattgtctcctttaaaatgttcttatcttctctttctttacttttcacttacgaagcatgcattattacaggtgtcttataatggagaccaggatttccccctatgacttatccaaccttacatcactgaaagcatgcaacaacagttccttcaccctttttaaagaaacagataagtttccagaacaaagaatatttgaagattttattgtaaattcagaaaactttacagctactacgaggatgacctagcctgagtcccaactaacatcttcatttctttagtgaaaggagacagagagttagctgctttgaactctaggattgtgctcattttatc

SEQ ID NO: 661084 - DNA, 588 bp, Homo sapiens
aatagagcttcagcactcacatctaagaattgaaaatatgcttataattatatatttttactttaagatagattggtgaaagtttatcacttcagattaggctttcagtatgttcaattttttaatggtctacagctggagggatttcaaaacatagtgaacaacacctaacaaaagctacatttttttgacctttcaaggcaaaaaacaaaaaatctgaaagcaagaaagcatctttaaattttatacattgtctcctttaaaatgttcttatcttctctttctttacttttcacttacgaagcatgcattattacaggtgtcttataatggagaccaggatttccccctatgactyatccaaccttacatcactgaaagcatgcaacaacagttccttcaccctttttaaagaaacagataagtttccagaacaaagaatatttgaagattttattgtaaattcagaaaactttacagctactacgaggatgacctagcctgagtcccaactaacatcttcatttctttagtgaaaggagacagagagttagctgctttgaactctaggattgtgctcattttatc

SEQ ID NO: 661085 - DNA, 595 bp, Homo sapiens
aactgaaggggtataaaggagtcgatctggggagcttcttggmaagatgttttgggtaagagcgcaactggctaatattttcttagaatagaacttgatcctgattcttccacagcattggtgagacaaagtattggatctgcattcttttcttttctggctcagaagcttatgtagttagcatgttccttaatataagatcttccgaaacagtgctaatgcaatcaatgggaactgcatttatgtgtcgtcagtcccacatatactgatgcacatatttgtaaggaactgcttgagacactttgctgtcttcctcatgcaaacaagagcacaggtatatgttatcgaaagaaaccagaaatgatctagtaagactaaattgtgcctaaagtaatggaaagaaaaacagcaggccaaggcctggccattatttattgagtgctgacagagaactctgcactctgcccagtgccaggccagacatgagagaagacatgcttttctgcttagtggtcttatcatttcagtgtaagcacatagtgtaacaacttgtctaatgtattttgggctatctgagatctagaataatagatta

SEQ ID NO: 661086 - DNA, 544 bp, Homo sapiens
cattcttcccaacaatgccaggagtcctaactcctattattactttccctttactgacaaaaaaacttaggttccaaacggagtagataatcattgagagagtcttcttagacaccctccataacaagggaaaggacaaacttcttagcccatcatttgattctagctgcttagttaagatttgtgtcaatgttttatttcttaattcttctagtttacccacccttttccaaatgtatttttccttttctttgktctttgctcttgctcatggcttttctcattccctccatctatactgcttttattcatccttagaatagataaatatttaaaatgtaactacaacatgatgatgtagctctggacaggatactgtacctcttcttgctcactgcctagcagtggagacagatgtgcacaaatgtagttctaaattaaggcagactgtgcgatgaatacaagagatacagaaactgggagagggaacgttatttcaatctgatgggccctgggaaggcctaagagaagatggattttgtgg

SEQ ID NO: 661087 - DNA, 631 bp, Homo sapiens
tacacgttatttcagctttaaaatgtattttagtaaattttgtttgattataataatatcatgtgtagttataatatcctttttaaagctaaagacagaaccctactttatcatctcatctttcatgatactttatcttagctgtgtaaatcatggcacaatcccatcttaacatctgttcttcctttctacacttctctcccattttctttgccacttgttattttttttgtaaataaaacaatctttaaatcaacttttagaagaaccatttcacctattttttcccaaataactaggcatttgtaccttaaatatgtgattttattatagtgtgaatttattattatattcatacttccttgaggcaggtctagttggttatgttaatagattgttagattttttaaaacctttgtttaaacagccttgctgaaaggatatactctgagttgcttctttgaaaaacattaaaagcatctaatatgacttggtagytgaccagcacactggttgatgaaatttgtagtctttgctccaaagctctctaacaagattaggtgagattgaacttgagaaggtaaaggtctctaaattgacataaattcaaagggcagaactagatcatacc

SEQ ID NO: 661088 - DNA, 571 bp, Homo sapiens
aacaggatgcttctaaaggactttaaacaaagaagtaacagatttgcaattkgtgtaggttattctggtggcagtgtggaaaacgaattggaggtgggggcatgccagtttaaagtaatatctaatgggcagaatacagactttggggacagcctctatccagggccggtgtcatcttttggtccaagctactcttatgtaagaaagggacaatagtacagacggcagaagaaaattttaaggattaaatgaaaaagtaattgtagtaatcaaccatcatcatttatagatgaggactctgaggcttagaaaagttaaataaggctttttgtctgtttatctagatgttatggaatgagagtgagtggagtaggagataaaggcagggtgaaggtctgaagggagagaacattccaaaaacaaaaacaaacaaatgagcagtaaaaccagatataagatcctggagaagccagatctgggaaaacctggttgaaaggatcacagggtccagcagccacatggaatccagcttcaattggctcaccacagttcttcctccagaaaaaaagga

SEQ ID NO: 661089 - DNA, 571 bp, Homo sapiens
aacaggatgcttctaaaggactttaaacaaagaagtaacagatttgcaatttgtgtagkttattctggtggcagtgtggaaaacgaattggaggtgggggcatgccagtttaaagtaatatctaatgggcagaatacagactttggggacagcctctatccagggccggtgtcatcttttggtccaagctactcttatgtaagaaagggacaatagtacagacggcagaagaaaattttaaggattaaatgaaaaagtaattgtagtaatcaaccatcatcatttatagatgaggactctgaggcttagaaaagttaaataaggctttttgtctgtttatctagatgttatggaatgagagtgagtggagtaggagataaaggcagggtgaaggtctgaagggagagaacattccaaaaacaaaaacaaacaaatgagcagtaaaaccagatataagatcctggagaagccagatctgggaaaacctggttgaaaggatcacagggtccagcagccacatggaatccagcttcaattggctcaccacagttcttcctccagaaaaaaagga

SEQ ID NO: 661090 - DNA, 571 bp, Homo sapiens
aacaggatgcttctaaaggactttaaacaaagaagtaacagatttgcaatttgtgtaggttattctggtggcagtgtggaaaacraattggaggtgggggcatgccagtttaaagtaatatctaatgggcagaatacagactttggggacagcctctatccagggccggtgtcatcttttggtccaagctactcttatgtaagaaagggacaatagtacagacggcagaagaaaattttaaggattaaatgaaaaagtaattgtagtaatcaaccatcatcatttatagatgaggactctgaggcttagaaaagttaaataaggctttttgtctgtttatctagatgttatggaatgagagtgagtggagtaggagataaaggcagggtgaaggtctgaagggagagaacattccaaaaacaaaaacaaacaaatgagcagtaaaaccagatataagatcctggagaagccagatctgggaaaacctggttgaaaggatcacagggtccagcagccacatggaatccagcttcaattggctcaccacagttcttcctccagaaaaaaagga

SEQ ID NO: 661091 - DNA, 526 bp, Homo sapiens
atcagcatgctactcttttcatataacacctacttatatatgaaggaactaattgaggtcttttgagatatattttaggaaatgatctaacagtggtttttaacctaaggaaacacctcactagagagtgcttgggcamaggaggtggcattttgggttgtcacaaagatggggaggtgctacttgcatttcatacataggggttgtgggggcaggggcagctagtgctgttacagtgatgatgcaatgcggccccgtcccaagtggggtggggggcactgtcctgccctaaatgcccacaactctccccacgccgctctcccaccccattgagaagcagtggttggacctacgctcagcattgtgctcccaggccctctctgcgggttcaaacgcctcttgatgtcctcttggtctctgcctccttgcttcctctagttgggatgcctgcacgctggagagagttgggtcttttgtggcttttgtggctctggtcccagtaggagatgacagacacaaccagagg

SEQ ID NO: 661092 - DNA, 441 bp, Homo sapiens
atcggcagtagtaaaagatatttccaagtctgcgatatgaacgggacctcagctttatgatcatcagccagggtcaagtgtgactgaattgctgttcaccaagattaggatgattcctggtatttgtcttggctaagtgacaacctaatcgtgaagaagatttccaacaycagtttgtcctaagagggtaggatggttcactgagaggtggatttttgcaaccacaacaaagaagggggaaaatcacattccagagcatcaaaatacctttcatgcatatttagaacaaataaatatcagtacaagcataagtataaaaagtacttttgtccaaaagagttcttaaataaaataggatatttatttttataatgagttagaattatagacgttgcatatggttatttctcatccaccaatatgccattttaaaaactgtaa

SEQ ID NO: 661093 - DNA, 569 bp, Homo sapiens
agcacaatataaagtattagctttcaaagatgtattcaaatcctatttaaagcttagctctgctgtttttcaataatctttataataaggaaaagagaaaaagattaaagtcctagtaacaaaaaaatacccttatgcctactcaaatccttcctgaaagacatgcaaaatgatattaataactcttaaaatagtttgtagataatctgcaaatatagatcttgggagagagaragaagaaaacttctgtaaatctaaaatgcatgataggatctgtagaaaggaactccagccactttccaaatggaggtcttcacattgagagtgaggatattgccacgtacaaataagaaaaaaacagaaaataacagaagaaaacaaaagaaaatataataaaactcttgtctgatcaattacactactctcattggggaagtgttacactctgaagtggcagcttggaaactccgacatatctatatgctaatttcctaacatctgattgtattccagttttgatcttggccaccctgaagggtctgacttcctttcaagctatcagtttcatt

SEQ ID NO: 661094 - DNA, 569 bp, Homo sapiens
agcacaatataaagtattagctttcaaagatgtattcaaatcctatttaaagcttagctctgctgtttttcaataatctttataataaggaaaagagaaaaagattaaagtcctagtaacaaaaaaatacccttatgcctactcaaatccttcctgaaagacatgcaaaatgatattaataactcttaaaatagtttgtagataatctgcaaatatagatcttgggagagagaaagaagaaaacttctgtaaatctaaaatgcatgataggatctgtagaaaggaactccagccactttccaaatggaggtcttcacattgagagtgaggatattgccacgtacaaataagaaaaaaacagaaaataacagaagaaaacaaaagaaaatataataaaactcttgtctgawcaattacactactctcattggggaagtgttacactctgaagtggcagcttggaaactccgacatatctatatgctaatttcctaacatctgattgtattccagttttgatcttggccaccctgaagggtctgacttcctttcaagctatcagtttcatt

SEQ ID NO: 661095 - DNA, 615 bp, Homo sapiens
atctataatttgtgattgctgttttctttatatattaaaacagtatgtattttgaagtaaaattttattatttcataaaacaaataaaccatgagaacatatgatttatgtagttatgaattcttataaatctatgctactctgaggatgaaacttaaagatggacaaatttggaagaaaactgagataagtctatggctttgtcaatggtatctagtgttttagtaatatctaatattggaaacatcatcagattttagcatcagaaatttgattctaatgacatttgaatgttttgtatgccacagaaagatttcaaaaaccaccaaattttwaaaaaatctgcatatatctaattatgtaacagtagataagttgcttaagtgcaattttcttgtctataatatggaaagattttattaaaacacctttaagaaccctttcaagctctctgattctatgaatatgatacagatattagtatgggcaaataaacaagaatcactgcttgttgtttattttaatgtgttccaataattcctttatactctattgatggagattgtgtgttattctaataaaaatttagaaaaatttatttgtgtgtgtaggcac

SEQ ID NO: 661096 - DNA, 615 bp, Homo sapiens
atctataatttgtgattgctgttttctttatatattaaaacagtatgtattttgaagtaaaattttattatttcataaaacaaataaaccatgagaacatatgatttatgtagttatgaattcttataaatctatgctactctgaggatgaaacttaaagatggacaaatttggaagaaaactgagataagtctatggctttgtcaatggtatctagtgttttagtaatatctaatattggaaacatcatcagattttagcatcagaaatttgattctaatgacatttgaatgttttgtatgccacagaaagatttcaaaaaccaccaaatttttaaaaaatctgcatatatctaattatgtaacagtagataagttgcttaagtgcaattttcttgtctataatatggaaagattttattaaaacacctttaagaaccctttcaagctctctgattctatgaatatgatacagatattagtatgggmaaataaacaagaatcactgcttgttgtttattttaatgtgttccaataattcctttatactctattgatggagattgtgtgttattctaataaaaatttagaaaaatttatttgtgtgtgtaggcac

SEQ ID NO: 661097 - DNA, 480 bp, Homo sapiens
agtgtgtagcggtatctcattattgtttaaatttgcagttcccaatgaaatatgatgtctaacatcttttcatgtggttacttgccatctgcatatcttctttggtgagagtctgttcaagtctttgtccatttttattcaggttgtttattttcttaytgttgagttttaagtgttcttagtatattttggattacagatgtttttcaggtgcgtcttttgcaaaaatttttcccccaatctttagttttacttattctcttcacattggagttcacagagcagaagttttgaattttagtttggtagtttcccattttaaatttgggtctatgattcattctaagttaatttttgcaaaggatttaaagtctaaaaaaaattttttttttttttttttttttttttttttttttttttttttttgcatgtgcatgtttagttgttccacccttatttgttgaaatgaccatctttgcc

SEQ ID NO: 661098 - DNA, 595 bp, Homo sapiens
tggggactatggattgggtattttgtaaaatgcctatgggatttgtctaatatacctcctgttatcaaacagaatgtattagtccattttcacactgctataaagaactaccttagactgggtaatttacgaagaaaagagatttaattgactaaaattctgcakccttaacaggaagcatgactgggaggcctcaggaaaattacaataatggcagaaggaaaaggggaaacaaggcacatcttacatgatggcaggatatagacagaacaatgagaagaactgccacacacttttaaaccatcagatctcatgagacctcactcactgtcatgagaacagcatgggaggaaaccgcccccatgatccaatcactccccaccaggtctctcccttgagaggtggacactacaattcaagaggagatttgggtggggagacaaagccaaacgatatcattctgtctggggcccatccaaaatctcatgtctttctcacatttcaaaacacaatcatgcctttccaacagtccccaaaagtcttaactcattctaacattaacccgaaagtccaagtccaaagtctcatctgagac

SEQ ID NO: 661099 - DNA, 595 bp, Homo sapiens
tggggactatggattgggtattttgtaaaatgcctatgggatttgtctaatatacctcctgttatcaaacagaatgtattagtccattttcacactgctataaagaactaccttagactgggtaatttacgaagaaaagagatttaattgactaaaattctgcatccttaacaggaagcatgactgggaggcctcaggaaaattacaataatggcagaaggaaaaggggaaacaaggcacatcttacmtgatggcaggatatagacagaacaatgagaagaactgccacacacttttaaaccatcagatctcatgagacctcactcactgtcatgagaacagcatgggaggaaaccgcccccatgatccaatcactccccaccaggtctctcccttgagaggtggacactacaattcaagaggagatttgggtggggagacaaagccaaacgatatcattctgtctggggcccatccaaaatctcatgtctttctcacatttcaaaacacaatcatgcctttccaacagtccccaaaagtcttaactcattctaacattaacccgaaagtccaagtccaaagtctcatctgagac

SEQ ID NO: 661100 - DNA, 533 bp, Homo sapiens
tatcacctgtacctatattaagctaaacttatactgatgtctccaatgtaaatccattaccacattgatgatcctagccttctcccttcatttatttgtaaattcccattgcaacagtatgaaaggtggatcccacagtccactatccacttatgtaattatttaactccagcataaatgtataccagtatcagaattcttaactaatggggaaaaacatttgttaactagtgtatagtgcttatgcattgttcttttgcctactctcagactccattcatttccaaaatttcttaagtaaaaaccttttctcctaacaccttcagtgtggttgtttcacatatwtgcaataagcttaaatttttgtcatatattgcattttgtcctgagatctctgaaatgtctaaatgatttttaaaatttattttaaaaatatattatttaacttttatactgcactttcatatggattttgacaaaagtataatatgtatctaacattgcaatattatactaaatagtttcactacact

SEQ ID NO: 661101 - DNA, 632 bp, Homo sapiens
atatctataaacattatcacctgtacctatattaagctaaacttatactgatgtctccaatgtaaatccattaccacattgatgatcctagccttctcccttcatttatttgtaaattcccattgcaacagtatgaaaggtggatcccacagtccactatccacttatgtaattatttaactccagcataaatgtataccagtatcagaattcttaactaatggggaaaaacatttgttaactagtgtatagtgcttatgcattgttcttttgcctactctcagactccattcatttccaaaatttcttaagtaaaaaccttttctcctaacaccttcagtgtggttgtttcacatatttgcaataagctyaaatttttgtcatatattgcattttgtcctgagatctctgaaatgtctaaatgatttttaaaatttattttaaaaatatattatttaacttttatactgcactttcatatggattttgacaaaagtataatatgtatctaacattgcaatattatactaaatagtttcactacactgtaaatccccagtactttacctgtactatttttccccattcctccttgcaatcactgatccttttactgtctgtagatttatttg

SEQ ID NO: 661102 - DNA, 533 bp, Homo sapiens
tatcacctgtacctatattaagctaaacttatactgatgtctccaatgtaaatccattaccacattgatgatcctagccttctcccttcatttatttgtaaattcccattgcaacagtatgaaaggtggatcccacagtccactatccacttatgtaattatttaactccagcataaatgtataccagtatcagaattcttaactaatggggaaaaacatttgttaactagtgtatagtgcttatgcattgttcttttgcctactctcagactccattcatttccaaaatttcttaagtaaaaaccttttctcctaacaccttcagtgtggttgtttcacatatttgcaataagcttaaatttttgtcatatattgcattttgtcctgagatctctgaaatgyctaaatgatttttaaaatttattttaaaaatatattatttaacttttatactgcactttcatatggattttgacaaaagtataatatgtatctaacattgcaatattatactaaatagtttcactacact

SEQ ID NO: 661103 - DNA, 646 bp, Homo sapiens
tatttcacttcactgtctttttgataacatagttttagaaggaaagtctttcataattattttcctttttcctgaaaagtaagttttattttgttttcttctgctgacttctttcaaaattttctctttgcctttgtttactgaagtttgattttaatatgcttagatgttttggtatttatctttctcagtgttctctgaactttctagatcgatggtttgctttggccattaattttggaaaatcctcagccattattccttcmaatatttcctctgtccttttctctctttcttttccttctgctgttttcattatatgtaagttacatttattgattcttctatttttttctaaaaattatttttctcttttctctttgcatttctgtttggaaaatgtataatgatttatcttcatgttaacttaatttttatcagctgatgagcccttgtaaagaatttttcatttctgttaccatggctttgatttctagcattttcctttcatgaaggttttatcattctgtttaatttacctgtctgttctattattctctctacctctttttttacagcataccaaacatattagtaacagttattttaaattccttgatgattccaactctgtgtcacagctgag

SEQ ID NO: 661104 - DNA, 583 bp, Homo sapiens
tatatatgccacaatatgtctcattctaaaggttgaaaatttttatgctatgactataatgacatcattctccctcccacagaaggcttttgcttagagaattcagcaagagaacaaaattaacaggaaacgtcactttcacacacacagatggaaaaatgttaacatctcttgaattctatgacaatctcctagatgagaacatgtatgtcactataacgtaccaacgatgtgcaaacacatcttataagcaggtgcyaaactgaggtcactgctgaaaaatggaagttttggcagcactgagaacaaaagcttcttcctaggtgcaatttcaagctaagcagtaagaatcatgtgtaagaaattttccaggcaggataaaacttcgggatgttttggtgacattgtacagaagagggcttctattctgttccaccttcatttcgcagatcatgcagaaatcttactccttacttaaagattttttggaataaaatcaaacatttttactaaaaaataatattgtgattatttcaatataaaaaagaaatatgtgaactttgccctccttgaagccagacct

SEQ ID NO: 661105 - DNA, 572 bp, Homo sapiens
agtggtataatacagagagaacgactatttacagtgactttaaaacacaataacttgacggtgtatccttggttggatatattctaagacaaaaacttgaaaatarttatacagtttgtggattatatttgtagatgtcattgatacgttattattatgagacttgtatgtgtattaagggaagaacaaataaggatttatgagtatggttaaaggccaggattgctgacatgagagaaacaggaaataaaagtgaaataaaggtaaaaatcatatactcctgaatttgaattggaaacatctttataaaaccataacaaattttgtatttccaaatccagatttcttaggttcgtcctctggatatatatatatatatatagttcatatatatataaacaatttccaatgctatagtaattagcacctctagcactcaaattgtaatttctaaatatcatttcatagtacaagcaataaagactccttggagaaatagaggattctgagttctgggtaggaaatttaagataatcttggggcatcttatcatacaagaatgtgagaaaact

SEQ ID NO: 661106 - DNA, 577 bp, Homo sapiens
aatatccctggagactttgacgccgtgtgaagtttctagtgattaatgggagaaaaataaggccgcctgtcccacagttgccatagcctttatttgggaaagagcttatttatatttggtgatctctctggataactaaacattaactggctcacataaaatatagacagagcgatggattttagmtgatataatacatgttaggtttaggtcctgaggttggattttctctccttgtttgagtatagctattataatttaatgtcagtgctgtttcaagatgaaagtgtttatcttctcctggcctttttccctccacttctgctgttttatttctgtaaatgaaagctacagctggaatattgttttactgcaaatctcacaccagcactgtcagttgtgatgtgacaccagagattcttatctgtaggttgggttggaattattaaacattctcacattgtgcaaagtgttggggatgaacagcagtgcagtgaggtgcatccaacacttctgtctttcccacctgatccttgaaatatgactcttttaaagggctaatgttcactttctatag

SEQ ID NO: 661107 - DNA, 584 bp, Homo sapiens
aaaaatggaattctgaagtatacccaaatgtaatgtgtggaagaagaagggcccctgcagtagcctaagatttaatcctttaggtagaaaaaactaagagaaaatgagaccaacagtgagtcatagaactgaagaggtaatatcaagaagggagggaatagccgcttcaaatggcacagggaggytactgaaagcatctattgaagttgtcaagttagaaatcaacagtgacattactgagagcagtttcagtggagtggtggggaaaaaagccagaacacagcaagtttaagataaatagaaggtagaaaagtttagaaaatgagcataaactaccctttttaaaagctcaaatgtgggaaaaacaagtataagcagtaattttggatacttttgttatggatcagaaattctataagctgaagaaaaatttgatagtaaaagtcaccaatgaccggattaagatttcatacaactatttccagggactcaaaaactcaactgttattcttcattttttttttgtaagaacactaccttttcttagtcatttctaaagcacctacctgaaagtcaacccaaac

SEQ ID NO: 661108 - DNA, 599 bp, Homo sapiens
aatagttacacaaaatgtagtttgaatttttataagctagttttcatcatcattactcaatgtaccaaatattatactctccaatatcgttttcttttgactcatatttctatgcattgaaaaattcctctgtgtttcaatatgagttaaaataatcactagccaggcgcagtggctcaagcctgtaatcccagcactttgggaggccgaggygggtggatcacgaggtcaggagatcgagaccatcctggctaacaaggtgaaaccccatctctactaaaaatacaaaaaattagccgggcgtggtggcgggctcctgtagtcccagctactcgggaggctgaggcaggagaatggcatgaacccgggaggtggagcttatagtgaatcaagattgcaccactgcactccagcctgaacgacagagcaagactccatctcaaaaaaaaaaaagcaataataataataataataataataatcactaaagaaacatatgccatgtaagttaaaactaactttagtcttgagaaatcacataaaggatttatgaaatgtgtaggcaatgaagacaatttcaaataatgacaaatttaatt

SEQ ID NO: 661109 - DNA, 556 bp, Homo sapiens
aaaataaacatttctaaaatttacagtaaaaaaaagcataatcaaagaatcctatcattttctttcttacttatgtaacttgtctgtattaaccaaccacttttaatgaaaatgatggcatagaaagggaaagacaggataacccatatctycttttcctttcagcccacctttatgagtaagccaaagatagagaatgtcggtggaatgcaagcacagcaaaacgtaaaataaaaacatttgagttggttttatgcaggttttgactgtaatggtaagaatgaaacatacatacaagtactagctatgaactgtgcagtttcagtaatgttgcactagttaagtgtgcttgtatttgtatttaaagctggcattcattgcacaatatgaacatgaatggtaaacacttgttaccaatttaattttttaaatttttgtttgcttagaatggcattaaatagtaaatctaaagcaaaaaggcttttcattttcattttgcatttagccctacaaattacatatctagccttagatggcggaccatgtaatctgattt

SEQ ID NO: 661110 - DNA, 556 bp, Homo sapiens
aaaataaacatttctaaaatttacagtaaaaaaaagcataatcaaagaatcctatcattttctttcttacttatgtaacttgtctgtattaaccaaccacttttaatgaaaatgatggcatagaaagggaaagacaggataacccatatctccttttcctttcagcccacctttatgagtaagccaaagatagagaatgtcggtggaatgcaagcacagcaaaacgtaaaataaaaacatttgagttggttttatgcaggttttgactgtaatggtaagaaygaaacatacatacaagtactagctatgaactgtgcagtttcagtaatgttgcactagttaagtgtgcttgtatttgtatttaaagctggcattcattgcacaatatgaacatgaatggtaaacacttgttaccaatttaattttttaaatttttgtttgcttagaatggcattaaatagtaaatctaaagcaaaaaggcttttcattttcattttgcatttagccctacaaattacatatctagccttagatggcggaccatgtaatctgattt

SEQ ID NO: 661111 - DNA, 583 bp, Homo sapiens
ggcagcatctttacctatacggtacaaattctgtgcctttcaccagtaggtggcttattttgtttttaattccatctttattgttttgaacaattcagaatgtgtattctgtctttccacatcacttaaaaaatcttgtttttatttagaggcaaaataatagatttttatcccccttagtgtttttttaacgtaacgcaataaagtatgggtctcccactcagtacttctaagaaatataggcaatatatttgaacagaaacggacttggagaagaagcagtagctcttacctttttattaagtgagaggtagaatgaccgtctgactgatgaactggaaagaattagccattcgctgagccaccatatccagggaatgttcctcttcattaagcgaagatatggacaaggatgtgaagcagccatgtctctcatacattgctkgcaggaatgtaagatagtacagctactctggaaaaggttggcaaattcttagaaagttaaacaaattcttcctataagactcagtgatcacgttcttgggtatttatcttagagaggtaaaaactcaggaccacacaa

SEQ ID NO: 661112 - DNA, 543 bp, Homo sapiens
agaaatagtaccagtacccaccacatgaaatttattcaacacctccagaagtgattttcaaacttggtcgtctcttttccatagttacaaaatttcatacttggagagcttatcaatgggctttggtgagggtcattttttatttcacaggtttccactttgaggaagctgggtatttgtttgactataccatttttggctttacagttttccacrtaggacccaaagatgctgagaatccatggattctatggatgattttcatgacgtctatgaaattttaaaaattgagtaagattatttctgtatgtggacacgtttatattgttgatggagacaggaattctaacaattgtctgatttaccaagaagtctacgatttttttttaaaggaacaatggaggaaggaaagaaggaaaaattgacctgtaaataatttgtaaaaactggttaacttaaccctacctagatattcacttattttaaaagtaaatacttattaagtgcctatgatgtgccatcaatgaaatataacaataacaa

SEQ ID NO: 661113 - DNA, 550 bp, Homo sapiens
cttacagtgggtccccagactcatcctgtggtcayttccccagtgccagatgcataattggcacagaaatacttaccagttggcagaacccccacattggatccctgactcgtagggtgagggctgttattgtggaaaaggccaaatggaagccattagagctacctctatctagaaaaatagtaaatcaaagacaatatcacatccctggagggattgcagagattactgccaccatcaaggacttaaaagatgcagggatggtgattcccatcacatccctgttcaactctcccatttgacctgtgcaaaagacagatgtatcttgaagacagtggattatcataagcttaaccaagtggtgactccaactgcagctgctgtaccagatgtggtttcattacttgagcaaattaatacctatcctggtacctggtatgcagtcattgacttggaaaatgcctttttctccgtgcctgtccataacgcccaccagaagggatttgccttcagctggcaaggccagcaatatacctttactgtcctacct

SEQ ID NO: 661114 - DNA, 609 bp, Homo sapiens
gaaaacgcaattgtgttaatatgacgaagtaagagcttaatataatagacaatgttgtcattgtctaagaacaggtaaaaatagccatggaagatatttcatcactgatggatcatactatattctgagctttaatatattgagtaaggtgattccattaaggtaaatggagaacaaaagagtagggaaaatgtgtgggatggaaaataataaattgaatcctggccatatataattagaggtgttggggatatccaaatggagatgttccacagacacttggaaatgaacatttggaacttaccagaacaagtatatctacagtttggccccataaaaatgatcacataaacaaaaatgtacaagtsggacctaattcaactaaagttctgcacagtaaaaaaagaaaaaaactatcaacatagtaaacagaccacctacaaaataggagaaaacctttgcaaactatgaattgacaaaggtctgatatccagaatctataaggaacttaaatttacaagcaaaagtcaaacaaccccattaaaacatgggacaaaaggcatgaacagacacatttcaaaagaagacatatgcacagccaataagcat

SEQ ID NO: 661115 - DNA, 434 bp, Homo sapiens
gaagtaaaaaagtatagaatagttaataatattaatatctactacatatcaaataacaatattagctattatttagtgttatatatgtcatakgtataattgtcctctgatttattaaatctgcacaactgccaatatttctattttataggtgcagaattggaggcttagagagattaagtcattcactcaagttcccaaagttataagtaaaagatgcagaattggaggctcagagaggttaagacgtttattcaaattcccgaagttgtaagtaaaagagctagatttttttttttaatggaattttgctcttgtcacccaggctggagtgcaatggcacaatctcagctcactgcaacctccgcctcccaggttcaagcaattctcctgcctcagcctcccgagtagctggggttaccggcgcatgccac

SEQ ID NO: 661116 - DNA, 560 bp, Homo sapiens
ggaaagggcagtccaaactcctgtggggcctagtaactgttcaggagcccagagcccagggccccactccacctggcatgctgcatgcttggtgaccaaggcaggcctctgccctgaactgagtgagtgcctactctctgtggctggtccagcctctcagggtggagagtcctgcactcaaaaagatgctgagatgagcttttacaccatgggacttaccctgcacatattcaagttaaatttcagctgccatccttgcctgagtcccagaggagatcagtttcatctggagtttctcataggccgccccccacaccttggccttggccagctgaaaagtgtttagatcaatagcaagcctcatcaactcttttccacccccaacccttactaagtgcatcagacaacagaagccccagggctgacctttgcagcatccattgtcatagyagttattacagacacaaataataggtagtataataatctgtggttaaatgtcctttaaccagagggctcagagcactctgggaacattacctcatgcccctcctgacact

SEQ ID NO: 661117 - DNA, 540 bp, Homo sapiens
atccaaccaatcccctgtcatgggacatttaggtagtttccaatttttataagtagcacggcaatgaccatttgttgttgttgttgttgttgttgttgttgttgttgttgtttttagacagggtctcactctgtcacccaggctagactgcagtggcacagtcttggctcactacaatctccacttccccggccccagcaatcctctcactcagcctcctgcgtagcttggactacaggcatgtgccaccacgcccagctatttttttgtgtgttttttgtgtagacacagggtgtcaccatgttgcccagggtggtctagaactcctgaactcaaagcgatctgcccacctcagcctcccagaaagctgggattacaggtgtgagccacmaatgcctggccagcaatgactatttctgaaatggatacatgattatttcctttgaactaattcccagaagttgaatttctgtgttaaacagatacaaaatcctaagggtttctatatgcagcttttttagacagcacatttattagttt

SEQ ID NO: 661118 - DNA, 540 bp, Homo sapiens
atccaaccaatcccctgtcatgggacatttaggtagtttccaatttttataagtagcacggcaatgaccatttgttgttgttgttgttgttgttgttgttgttgttgttgtttttagacagggtctcactctgtcacccaggctagactgcagtggcacagtcttggctcactacaatctccacttccccggccccagcaatcctctcactcagcctcctgcgtagcttggactacaggcatgtgccaccacgcccagctatttttttgtgtgttttttgtgtagacacagggtgtcaccatgttgcccagggtggtctagaactcctgaactcaaagcgatctgcccacctcagcctcccagaaagctgggattacaggtgtgagccaccaatgcctggccagcaatgactatttctgaaatggatacatgattatttcctttgaactaattcccagaagttgaatttctgtgttaaacagatacaaaatcctaagggtttytatatgcagcttttttagacagcacatttattagttt

SEQ ID NO: 661119 - DNA, 574 bp, Homo sapiens
ccatgttacccaggctgatcttgaactcctgggctcaaccatctgcctgcctcagactcccaaagtgctggaattataggtgtgagccaccacacctggacggttttattttatttttaattttttttatctttttaaacattttcattattttattttttgagtaagggtctcactctgttacccaggctggagtgcagtggtgagatcgtggcttactgtagccttgacttcctggactccagcgaccctcctgcctcagccccccaaatggctggaaccacaggcaygcaccaccatgcccagctaatttttgtatttttggtagaggtggggttctaccatgttgcccaggctggtctcaaactcctgagctcaagtgatccacccacctcagcctcccaaggtgtaggtgtgagccactgcactgggccaattttctctttaattttgaattaggattcagtttacttacataagaacctaggactttaaaaccacctcagtctaatgaccttctacttaattattttaatggaagctcagtggaaaatcgggagaacaacaaagataa

SEQ ID NO: 661120 - DNA, 633 bp, Homo sapiens
tatcttggttattgtgaagacagctgcaataaatatggaggtgcagatacctcttaagtgtaatgatttcctttcctttggataaacacctagtagtgggatcactagatcatatggtgtctctatttttgttttgagaaaccaccatacagtttttcataataagtgaaataatttaacttaccaccaacagtgtatggtagtctaatttttcatgtcttacatttaaatttttaatccattttgagtttatttttgtataaggtgagtgataggagtttagtttcattcttctgcatatggatatccaatttttccagaagcatgtattgsagattgtgtcctttccccaatgtaggttgttgacaaaactaaagacaaagtcttaaaagcagccagatagaaacagtcacctataggtgaaacatcacctatagaggaaaaccaatgtaaatgaaaatacgttttttcgtctgaaacaatggaggtcagaaacaagttacacaatatttttcaggtagtgaaagaaaagagctgccaactctgaatgctacagatgttgtaactatgcttctggagtaaaggaaaattatattttttgaactgtttaaaaatttgttgttagcaagctta

SEQ ID NO: 661121 - DNA, 633 bp, Homo sapiens
tatcttggttattgtgaagacagctgcaataaatatggaggtgcagatacctcttaagtgtaatgatttcctttcctttggataaacacctagtagtgggatcactagatcatatggtgtctctatttttgttttgagaaaccaccatacagtttttcataataagtgaaataatttaacttaccaccaacagtgtatggtagtctaatttttcatgtcttacatttaaatttttaatccattttgagtttatttttgtataaggtgagtgataggagtttagtttcattcttctgcatatggatatccaatttttccagaagcatgtattgcagattgtgtcctttccccaatgtaggttgttgacaaaactaaagacaaagtcttaaargcagccagatagaaacagtcacctataggtgaaacatcacctatagaggaaaaccaatgtaaatgaaaatacgttttttcgtctgaaacaatggaggtcagaaacaagttacacaatatttttcaggtagtgaaagaaaagagctgccaactctgaatgctacagatgttgtaactatgcttctggagtaaaggaaaattatattttttgaactgtttaaaaatttgttgttagcaagctta

SEQ ID NO: 661122 - DNA, 634 bp, Homo sapiens
ccttctgactcccaagtcagtctagcatggggctgttgagattattgttcccaccccagccagggaccagggcctcataggcatcctctgagaccaagggtcttggatgatgtcttgggatcacagtctgctctaacattcaacctgaaagttctgcctgtggtttgaccttctttcctcttgctgtagccaaggtgtcttcttttaccctgcatgaaagatgaaagacagtagctccccatttagtgggggctttgggactgtgtgatatctccccccgccttcactttaagcctcccagaaaagcaggataaaaagatgcttcaaagtcagttggagagatggaactctgccctcttgggggttgccatccctctgccaccctcacaggtgctgtgacagagggaacatatgttgctcctaccccagaggatggagacaacatcttagcagccacagccccacagagctgggctcagcaggccttgacagaactgraaaggcatcctctctcctgggcctgggcctggcctaagcctgggttgtgggcggaggggtggaagcaaagcctgtagacccctcccagaaaggaatcaacaggcttgactgctctccccacgctcactcccaaaca

SEQ ID NO: 661123 - DNA, 451 bp, Homo sapiens
ggcactgcgcttgggcttttttttttttttttttgagactatcactctattgcccaggttggagtacagggcrcgatcttggctcactgcgacctccatcacctcccaggttcaactgattctcctgccttagcctctcaaataattgggattacaggcacacaccaccacacctggctaatttttttttttttaacagagtctaattctgtcacccaggctggagtgcagtggtgaaaacttggctcactgcaacctctgcctcccagattcaagtgattctccagcctcagcctcctgagtagctgagactacaggcatgtgccaccacacttggctaattttttctatttttagtagagatgtggtttcaccgtgtttgccaggattgtctccatctcctgaccttgtgatccacctgccttggcctcccaaagtgctgagattacag

SEQ ID NO: 661124 - DNA, 451 bp, Homo sapiens
ggcactgcgcttgggcttttttttttttttttttgagactatcactctattgcccaggttggagtacagggcaygatcttggctcactgcgacctccatcacctcccaggttcaactgattctcctgccttagcctctcaaataattgggattacaggcacacaccaccacacctggctaatttttttttttttaacagagtctaattctgtcacccaggctggagtgcagtggtgaaaacttggctcactgcaacctctgcctcccagattcaagtgattctccagcctcagcctcctgagtagctgagactacaggcatgtgccaccacacttggctaattttttctatttttagtagagatgtggtttcaccgtgtttgccaggattgtctccatctcctgaccttgtgatccacctgccttggcctcccaaagtgctgagattacag

SEQ ID NO: 661125 - DNA, 451 bp, Homo sapiens
ggcactgcgcttgggcttttttttttttttttttgagactatcactctattgcccaggttggagtacagggcacgatcttggctcactgcgacctccatcacctcccaggttcaactgattctcctgccttagcctctcaaataattgggattacaggcacacaccaccacacctggctaatttttttttttttaacagagtctaattctgtcacccaggmtggagtgcagtggtgaaaacttggctcactgcaacctctgcctcccagattcaagtgattctccagcctcagcctcctgagtagctgagactacaggcatgtgccaccacacttggctaattttttctatttttagtagagatgtggtttcaccgtgtttgccaggattgtctccatctcctgaccttgtgatccacctgccttggcctcccaaagtgctgagattacag

SEQ ID NO: 661126 - DNA, 451 bp, Homo sapiens
ggcactgcgcttgggcttttttttttttttttttgagactatcactctattgcccaggttggagtacagggcacgatcttggctcactgcgacctccatcacctcccaggttcaactgattctcctgccttagcctctcaaataattgggattacaggcacacaccaccacacctggctaatttttttttttttaacagagtctaattctgtcacccaggctggagtgcagtggtgaaaacttggctcactgcaacctctgcctcccagattcaagtgattctccagcctcagcctcctgagtagctgagactacaggcatgtgccaccacacttggctaattttttctatttttagtagagatgtggtttcacygtgtttgccaggattgtctccatctcctgaccttgtgatccacctgccttggcctcccaaagtgctgagattacag

SEQ ID NO: 661127 - DNA, 612 bp, Homo sapiens
taaatctgtgctttactacacagcataagagtgggcgccaactgggtctatagcaagacacaccagaaagggagttggccacctactcagggcattgttgtagcaaaaggatccctgggctgggcrtcttgcacctacaatctgctcctagctctgttccttgctggttgtgtattctggagcaacttgcattgactttcttggttagtaatacaataacatgcctcttcaaatctcctaccattccctctcattcatcgcaaaatcggtagatatttttaatgaaagttcttataaattctggataatgtcggggctcatgtcacatgaataccagaagccctttgaagaagacaattagaaagaagcaagaaagttatgctcaaagtgttaccttttctgtgttggaaaccaaaggcttgctttgctacatgttgtatgcagcctccagcattgagggctgggggaagggggccaacatataccggtttaggtgtatctaacgttgagaaaagcagcattttcaaggcatgtgaaatatccaccctaaaatgtctcagtacagtaagtgaggcctcaacagataattaaaaagaaagagtcatgtaggga

SEQ ID NO: 661128 - DNA, 561 bp, Homo sapiens
taccatcatcttctgaaatcattcactaaaataatgactttacattgtaatggcatcaagaattagccacctatccatctaaaataaaattattttcttaaatttgtatcaccttctttacctctttccccaattcctttcttattttttaaaagcagatatattctatgttagactaactcactctgactttatcttactatataaccctgcctttcaacataatttttgtattttaagatttttatagttacacatttttgcaagacacctcaaacactcttttgaccaaggaaacaaaaarttaatataaattataaatcacgacacactagaaataatgagcacacctagtatccagatcttggtttctaaatattactttccactaaaaagaaccagggcttcttagagaaagactgcttccaattctggggcaataaaagtagatgctgagcctagaaatcttgctgtgccagaaagtaaagaagtgctaaaaaatgatgaggacatttcaaacaaaagaacacaggcattcccactgctcaaaaattctgggac

SEQ ID NO: 661129 - DNA, 558 bp, Homo sapiens
ctgaatctatagtaatggctttgggaaactagccatttgaaaaaatacatagagagagttctctttcatcccttagaacaaacttgctcctgattgagcaaatatttaaattttggaaggaaaaaaaggaaaaactggaagaaattacagttcaaaattgttataattatctaggagaaaaggcctaagtacaaggaaatggggaatagagaaaggaggactgacaaatttgtcggagagaaaaaagaacacttccacatggaaaaaaaaaagtataagcagagtgcaaagacagaagacaaattgtgggaagtgtaaaatacatgatgaagagtcactatccccaaaatgcaaacagcatctccaaatcaataataaaatacaaataacctgataggactggggcaaggcataagaataggcaaccaaaaaaatttttaaatggccaaatactaagatcacatcatcaatatttactgaacttccatgttattcttttttgggggacargttgaaatattactcaatcttaatacatgggtcacatctaacataaaa

SEQ ID NO: 661130 - DNA, 570 bp, Homo sapiens
tgagctcaagcagtttttccacctcaggaccctagtagctgggactgcaggcaagcatcaccacacccagctaatttttttaaaaatgttgtagagatgagggtctcactatattgcccaggctggtcttgaactcatgggttcacgccatcctcctaccttggcttcccaaagtgctgggattagaggcatgagtcaccacgcccagccgcacagtaatagttcttaaaatyttatctgttggcaacaataaacattggagacaactagagaggaaagggcgagaggggccaggttgaaaatcttactggtgggtatgataatcccttggtgaagggatcatttgtacccccaaacctcagcatcatgcagtatacccaagtaacaaacctgcacttatgccctctaaatctaaaataaaagttgcaaaggaaaaaaatctcaactgtaattcattatcttgattgtggtgatagtttcatgaatccctactatacaaacttatcaaataatatactttaaatatgtgtgatttattgtatatcaattatacctcaataacattgtaaa

SEQ ID NO: 661131 - DNA, 570 bp, Homo sapiens
tgagctcaagcagtttttccacctcaggaccctagtagctgggactgcaggcaagcatcaccacacccagctaatttttttaaaaatgttgtagagatgagggtctcactatattgcccaggctggtcttgaactcatgggttcacgccatcctcctaccttggcttcccaaagtgctgggattagaggcatgagtcaccacgcccagccgcacagtaatagttcttaaaatcttatctgttggcaacaataaacattggagacaactagagaggaaagggckagaggggccaggttgaaaatcttactggtgggtatgataatcccttggtgaagggatcatttgtacccccaaacctcagcatcatgcagtatacccaagtaacaaacctgcacttatgccctctaaatctaaaataaaagttgcaaaggaaaaaaatctcaactgtaattcattatcttgattgtggtgatagtttcatgaatccctactatacaaacttatcaaataatatactttaaatatgtgtgatttattgtatatcaattatacctcaataacattgtaaa

SEQ ID NO: 661132 - DNA, 570 bp, Homo sapiens
tgagctcaagcagtttttccacctcaggaccctagtagctgggactgcaggcaagcatcaccacacccagctaatttttttaaaaatgttgtagagatgagggtctcactatattgcccaggctggtcttgaactcatgggttcacgccatcctcctaccttggcttcccaaagtgctgggattagaggcatgagtcaccacgcccagccgcacagtaatagttcttaaaatcttatctgttggcaacaataaacattggagacaactagagaggaaagggcgagaggggccaggttgaaaatcttactggtgggtatgataatcccttggtgaagggatcatttgtacccccaaacctcagcatcatgcagtatacccaagtaacaaacctgcacttatgccctctaaatctaaaataaaagttgcaaaggaaaaaaatctcawctgtaattcattatcttgattgtggtgatagtttcatgaatccctactatacaaacttatcaaataatatactttaaatatgtgtgatttattgtatatcaattatacctcaataacattgtaaa

SEQ ID NO: 661133 - DNA, 643 bp, Homo sapiens
ctaatcagtacatctattawtctaatacatctattattatgtatccataaaaattaaaaatagataaataaaagagcctagagaaaaaaaattgattccagtgttcttttggtatttgtagttattgtcatacatgtttgtatttctctgccttttactgatgacactgaacaaaaagagactgaggtcctcatggtaaatcctgcttctttaagatttttttttctttaagatttttttttcttttttgagacagggtctcgtttggtcacccaggctggagtgcaatgacatgactcaaactcctgggctcaagcgatcttcccagttcagtatcccaagtaactggaactacaggcaccatgcccagctattttttaaaaaaattttgtagagacagggttgtgctatgttgcccaggctggtctcaagctcctgggcttaagaaatcctccaaccttggcctcccaaagggctgcgattacaggtatgagccaccacaccttgccaagattttgttttgacaggcttgtgtgcttgtttcttgtctctctcccccattagaaatctaaatcccttgagaagagaaactttgccttgtttgccattgaaacttcagtctgcctagatgtattataatggt

SEQ ID NO: 661134 - DNA, 576 bp, Homo sapiens
cccatggtagctgattttaagctactagcctgatctcactgaatacagagccaggaagagatccagagccattccagcactccactcgtttatgtgttctgatccgcaatggtcaggctgacttaagggtctgttgctttccagatttactcagccctgttaggaagttcccactatgaagaagtccagctctcttctctactgcggctttaactacctttgtttagacaaacagcacagtcttactctgtgatcttttaagacttggattgtttaaccattttatctcaagttatttacactgttatagttatttccstatattttagcttttccttttattggttttctttctttccttttttttttttttttttttttttttgagacagagtcttgctctgtcacccaggctggaatacagtggtgcaatcacagttcactgcaacctctgccttctgggctcaagcaatcctcccacctcagccctccagagtagatgggaccacaggcacatgctaccatgcccagctaagtttttccattttttgtagagatgaggtttcaccatgttgc

SEQ ID NO: 661135 - DNA, 608 bp, Homo sapiens
agatggttacttcatgagataatttttctcttttcatttgttttgaatattcagtttccttttttgccataccctatgattactaagatttattttttccattgtttttaaattattattatttagaaataatttagatttttaattattcacaaggaatttactattttctctatttttgaaaacctttatgatttattttgaaaaacatagacattttcaaacttagaaagaatagtacaaggaactcacatgcacctgttaccccatttcaacaattaatcagcagtctgccacttaaaaaaacagctattctttcttttttacctctcctcttcctatttttttttcctggagtattttaaagcaaatcctggacatcatatcaactcaccagtaaatacatcaatatgtattcatcttttaccaatacgaactttttaaaaactggcaatcgtgccattatgacagtaatacaacttataataacttctttatataattgaatastaagtctatgtgcaaatttctctatctcaaagatgtattttatagtaggtttgtttaaatcaggatccacacaaggtctagacatcagttattccatc

SEQ ID NO: 661136 - DNA, 589 bp, Homo sapiens
accacttaaaggtattcctaaaccacaaacaatagcatgagggatctgtgccttaaggacatgttcctgctgcagataactagccagacccatccctttatttcagcccatccctttatttcccataaggaatacttttagttaatctatartctatagaaacaatgtttatcactggcttgctgtcattaaatacgtgggtaaatctctgttcaaggctctcagctctgaaggctgtgagacctgatttcccactccacacacgatatttctgtgtgtgtgtctttaattcctctagtgcctctgggttaaggtctccacaactgagctggtcttggtaagcagcgcccaacatggaggctcgaacccaggttgaagggtcaccagagtgatggctggaaaacctggaactaagctggaggacaccggagtactcttaagcaatgcccgtgttgagtaaaaagggtagctcagaagcatcagggtaacaatgagacaagtgtgggctctggttcattccaccttggaaccttttcacactaatgatgaggaggaaggaaagtataacaaagtaacagaccaggtttgt

SEQ ID NO: 661137 - DNA, 589 bp, Homo sapiens
accacttaaaggtattcctaaaccacaaacaatagcatgagggatctgtgccttaaggacatgttcctgctgcagataactagccagacccatccctttatttcagcccatccctttatttcccataaggaatacttttagttaatctataatctatagaaacaatgtttatcactggcttgctgtcattaaatacgtgggtaaatctctgttcaaggctctcagctctgaaggctgtgagacctgatttcccactccacacacgatatttctgtgtgtgtgtctttaattcctctagtgcctctgggttaaggtctccacaactgagctggtcttggtaagcagcgcccaacatggaggctcgaacccaggttgaagggtcaccagagtgatggctggaaaacctggaactaagctggaggacaccggagtactcttaagcaatscccgtgttgagtaaaaagggtagctcagaagcatcagggtaacaatgagacaagtgtgggctctggttcattccaccttggaaccttttcacactaatgatgaggaggaaggaaagtataacaaagtaacagaccaggtttgt

SEQ ID NO: 661138 - DNA, 523 bp, Homo sapiens
ggaaggaaagtataacaaagtaacagaccaggtttgtttgccagctaaagctaaagcagcaaaggaggaagaggttcatccctacccttctgcaccccctccttattttgaagaaaaagagtggcctgaccctccagatctttcttttctggaggaccctgggagaaaagtagttgccccagtgactgttcaagcagctccttgagtgaccgctgtcagttctattctggcaggaattcagcaagctagacgagagggtgatatagaagcttggcagttttctgttagaatacacccccccccccccagatcaacatttgagccttttccttttaaattcaggaaacaccatgaggggcccatcctgggccccattccaaaccagggcatttctggctcaggccattccttcacccctgtacaatgtctgtcccccaccacagctggtagtgccacagtagatttaygctgcacaaaagctgtgagccttctgcctggggaacccctgcaaaatgtcccaaca

SEQ ID NO: 661139 - DNA, 459 bp, Homo sapiens
cagctctctctaaaatggaccaatcagctctctgtaaaatgggccaatcagcaggatgtgggtggggtcagataagggaataaaagcaggctgcccgagccagcagcggcaacccgctcgggtccccttccacactgtggaagctttgttctttcactctttgcaataaatcttgctgctgcccactctttgggtctgcactgcctttatgagctgtaacactcacgacraaggtctgcagcttcactcctgaggccagccagcaagaccatgaacccactgggaggaatgaacaactctggatgggaggaatgaacaactccagacatgctgccttaagagctgcaacactcactgtgaaggtctgcagcttcactcctgaagccagcgagaccattaacccataagaaggaacaaactccggacacaccacctttaagaactgtaacactcaccacg

SEQ ID NO: 661140 - DNA, 341 bp, Homo sapiens
ctagcttatgtacatgtatgtgtggacaccttttctcacttcatctgggctacatgccaatcaggagagtcttatggctgtgttaaatgttaccttttgcagtgttttgctgtgatgggcattccagcttctattaaaacagataatgccccaggctatactagccaagctttagctacattttgctctatatgaaatattaaacacattactggtatcccatrtaattctcaaggagaagccatagtggaaagaatgaatctctctgaaacagcagttgcaaaagcagaggggggaaaacagggactaagggacaccccatatgcaattgaatctagcat

SEQ ID NO: 661141 - DNA, 341 bp, Homo sapiens
ctagcttatgtacatgtatgtgtggacaccttttctcacttcatctgggctacatgccaatcaggagagtcttatggctgtgttaaatgttaccttttgcagtgttttgctgtgatgggcattccagcttctattaaaacagataatgccccaggctatactagccaagctttagctacattttgctctatatgaaatattaaacacattactggtatcccatataattctcaaggagaagccatagtggaaagaatgaatctcyctgaaacagcagttgcaaaagcagaggggggaaaacagggactaagggacaccccatatgcaattgaatctagcat

SEQ ID NO: 661142 - DNA, 601 bp, Homo sapiens
ggctctgcccatgagcagttcgaaatgagttaacgttactaatgacccccacaatatatgttttgtcacttctgtgagcccarttggagcttctttttagtgaagctctggggcagtacaggtaggaggtcttcataaccaagaggcaatgccttccggctcttcatctcagttttaggccaaagagaagggagccagtgacaacatgaactggtaaatgagatatccaggtatgtgcccaccacttttgtccaggctaattccctggctagatggctgggaaccaacttcaaccatgaataaggcaatatcaggtggctagacagcaatcaggtcctctcactccccagtggctcttcttcaggcttagaattaatccccaactcctcacccttttactagcatagctatgaagttcctaaacatgtttaacaaaaaaatttatagattagaaagaccagagagaacttggctcaagatatttttctgcatatagtcagaatataaaagctctgggtgtattcctatttgatttttaaaaagatcagcttaatcaaactgacagtagctgagagagagaaaaaaaagagtatgagatact

SEQ ID NO: 661143 - DNA, 601 bp, Homo sapiens
ggctctgcccatgagcagttcgaaatgagttaacgttactaatgacccccacaatatatgttttgtcacttctgtgagcccaattggagcttctttttagtgaagctctggggcagtacaggtaggaggtcttcataaccaagaggcaatgccttccggctcttcatctcagttttaggccaaagagaagggagccagtgacaacrtgaactggtaaatgagatatccaggtatgtgcccaccacttttgtccaggctaattccctggctagatggctgggaaccaacttcaaccatgaataaggcaatatcaggtggctagacagcaatcaggtcctctcactccccagtggctcttcttcaggcttagaattaatccccaactcctcacccttttactagcatagctatgaagttcctaaacatgtttaacaaaaaaatttatagattagaaagaccagagagaacttggctcaagatatttttctgcatatagtcagaatataaaagctctgggtgtattcctatttgatttttaaaaagatcagcttaatcaaactgacagtagctgagagagagaaaaaaaagagtatgagatact

SEQ ID NO: 661144 - DNA, 601 bp, Homo sapiens
ggctctgcccatgagcagttcgaaatgagttaacgttactaatgacccccacaatatatgttttgtcacttctgtgagcccaattggagcttctttttagtgaagctctggggcagtacaggtaggaggtcttcataaccaagaggcaatgccttccggctcttcatctcagttttaggccaaagagaagggagccagtgacaacatgaactggtaaatgagatatccaggtatgtgcccaccacttttgtccaggctaattccctggctagatggctgggaaccaacttcaaccatgaataaggcaatatcaggtggctagacagcaatcaggtcctctcactccccagtggctcttcttcaggcttagaattaatccccaactcctcacccttttactagcatagctatgaagttyctaaacatgtttaacaaaaaaatttatagattagaaagaccagagagaacttggctcaagatatttttctgcatatagtcagaatataaaagctctgggtgtattcctatttgatttttaaaaagatcagcttaatcaaactgacagtagctgagagagagaaaaaaaagagtatgagatact

SEQ ID NO: 661145 - DNA, 612 bp, Homo sapiens
gtacttcacatggctggagcaggacaaagggaggaggacaggttccacacacttttaaacaaccagatcttatgagcactcactatcatgatgacagcaccaaggcgtatagcattaaatcatgagaaactgcccccatggttcaatcacctcacacagggccgcacctccaacactggggattacaatctgacatgaaatttggtgggacacagatccaaaccgtattaaggcaatagacatttcactaaagaaaatatgcttatggcaagtaagtacctgaaaagatattccagatcattagtcatgagggagatgcaaattaaaaccacaatgagatacygttacatgtctttcaaaatggctaaaacaaaaattagtcacaacaccaaatgctggaaaggatgtggagaaattgcttgtgtgaatgcaaaatgtgacagccattctgggaaaaaacaatctggcagtttcctttaaatttattttattttattttgtttttatttatttatttatttgtttttgagacagagtctcacactgttgcccaggctggagtgcggtggtgcaatctcacctcactgcaacctctgcctcccaggttcaagc

SEQ ID NO: 661146 - DNA, 612 bp, Homo sapiens
gtacttcacatggctggagcaggacaaagggaggaggacaggttccacacacttttaaacaaccagatcttatgagcactcactatcatgatgacagcaccaaggcgtatagcattaaatcatgagaaactgcccccatggttcaatcacctcacacagggccgcacctccaacactggggattacaatctgacatgaaatttggtgggacacagatccaaaccgtattaaggcaatagacatttcactaaagaaaatatgcttatggcaagtaagtacctgaaaagatattccagatcattagtcatgagggagatgcaaattaaaaccacaatgagataccgttacatgtctttcaaaatggctaaaacaaaaattagtcacaacaccaaatgctggaaaggatgtggagaaattgcttgtgtgaatgcaaaatgtgacagccattctgggaaaaaacaatctggcagtttcctttaaatttattttattttattttgtttttatttatttatttatttgtttttgagacagagtctcacactgttgcccaggctggagtgcrgtggtgcaatctcacctcactgcaacctctgcctcccaggttcaagc

SEQ ID NO: 661147 - DNA, 565 bp, Homo sapiens
tctatttggaagaccaccaaacaaatagagcacaagaaataaatgatgaattctcctcatttcccttaagcttttataaaaaatatattttgtaacaaacatactgtacatatcctgagtgtggctgaagacaggtatgagccactgcacctggctcaaaagcaggaacttttactcattactaatgggaatgccaaattgtatagcaactttggaagaatgtttggaagtttcttaccaaactaaacatactctttgatatggtttggctgtgtccccacccaaatctcatcttgaattgtagtttccataatccccacatgttgtgagagggacccagtgagaggtaaytgaatcatggtggtggttacccccatgtttttctcatgatagtgagcgagttctcatgagatctgatggttttataagcagcttttcccctttgcacaacacttctccttcctgctaccatgtgaagaagaacattttgcctctcctttcaccatgattctaagtctcctgaggcttcctagccctgtggaacttggagtcaattaaacctctt

SEQ ID NO: 661148 - DNA, 384 bp, Homo sapiens
gactctaaatgtgaaggtttaggaaaatcttartgatttaaccagtttagatagtttatattttccccttttatgtatgcacaaatatgttatacctgaaaagatcaggccaggtgcagtggctcatgcctataatcccagcactttgggaggccaaggtggtaggatcttttgagctcaggagttcaaaaccagcctgtgcaacacagtgaaagcctgtctgtaaaaaaattaaaaaattagctgacatgtccataatcctaatactttgggaggtcaaggcaagcagtttgcttgagctcaggagtttgagaccagctgggcaacatggtgaaacaccatctctacaaaaaatataaaaattagccaggtgtggtggtacac

SEQ ID NO: 661149 - DNA, 598 bp, Homo sapiens
ggctcatgcctataatcccagcactttgggaggccaaggtggtaggatcttttgagctcaggagttcaaaaccagcctgtgcaacacagtgaaagcctgtctgtaaaaaaattaaaaaattagctgacatgyccataatcctaatactttgggaggtcaaggcaagcagtttgcttgagctcaggagtttgagaccagctgggcaacatggtgaaacaccatctctacaaaaaatataaaaattagccaggtgtggtggtacacaactgtagtcccagctacttgggaggctgaggtggaaggatcacttgatccaggaggttgagactgcagtgagccaacatcttgccactgcactccaccctgggtaaaaaattgagaccctgtctcaaaaaaaaaaaaaaaaaaaaaattagctgggtatggtggcacacgactacagtcccagccacttggatagctttagcccaggaggttgaggctacaataagctgtgatcacaccactgcactccatcctggctgacagagcaagaccctatacatacatgtatatattttatataatttttgttgttatctctgttaaaaatgtccat

SEQ ID NO: 661150 - DNA, 598 bp, Homo sapiens
ggctcatgcctataatcccagcactttgggaggccaaggtggtaggatcttttgagctcaggagttcaaaaccagcctgtgcaacacagtgaaagcctgtctgtaaaaaaattaaaaaattagctgacatgtccataatcctaatactttgggaggtcaaggcaagcagtttgcttgagctcaggagtttgagaccagctgggcaacatggtgaaacaccatctctacaaaaaatataaaaattagccaggtgtggtggtacacaactgtagtcccagctacttgggaggctgaggtggaaggatcacttgatccaggaggttgagactgcagtgagccaacatcttgccactgcactccaccctgggtaaaaaattgagaccctgtctcaaaaaaaaaaaaaaaaaaaaaattagctgggtatggtggcacacgactacagtcccagccacttggatagctttagcccaggaggttgaggctacaataagctgtgatcacaccactgcactccatcctggctgacagarcaagaccctatacatacatgtatatattttatataatttttgttgttatctctgttaaaaatgtccat

SEQ ID NO: 661151 - DNA, 598 bp, Homo sapiens
ggctcatgcctataatcccagcactttgggaggccaaggtggtaggatcttttgagctcaggagttcaaaaccagcctgtgcaacacagtgaaagcctgtctgtaaaaaaattaaaaaattagctgacatgtccataatcctaatactttgggaggtcaaggcaagcagtttgcttgagctcaggagtttgagaccagctgggcaacatggtgaaacaccatctctacaaaaaatataaaaattagccaggtgtggtggtacacaactgtagtcccagctacttgggaggctgaggtggaaggatcacttgatccaggaggttgagactgcagtgagccaacatcttgccactgcactccaccctgggtaaaaaattgagaccctgtctcaaaaaaaaaaaaaaaaaaaaaattagctgggtatggtggcacacgactacagtcccagccacttggatagctttagcccaggaggttgaggctacaataagctgtgatcacaccactgcactccatcctggctgacagagcaagaccctatacatacatgtatatattttatataatttttgttkttatctctgttaaaaatgtccat

SEQ ID NO: 661152 - DNA, 614 bp, Homo sapiens
ccactttggattggaaggaaacatcaatgctgctgtggccattcaatgcctcctctggttcacccggaaggtattcagcttcctcctcattcacatcrtagtaatccaaattgtcctcattatagtcactttccagggctgtagcatggctgaaggaacgtcccaggggaacagaagagtgggcagcggaaaggtctccaactgcagctggcctgacattgtccaacggggaagtgctgccgatatggaaagcccacactccagggatccccaggttgcttagtctaaatcccccggcaacagtcattgtaacaaatgtaacaaaagtgtccattcacccaccttcctagaaggtgaacaacttattttaaaacggaaagacagctgggcatggtggctcacacttataatcccagcactttgcaaggccaaagtaggaggatgacttaagcccaggagtttgagaccagtctaggcaacatagtgagaccctgcctctacaaaacccttttctaaaaaacttagccaggcatggtgccacatgcctgtgcttctagctactcagtaggctgaggcaggagggtcacttgagcccagcagttccaggttacagt

SEQ ID NO: 661153 - DNA, 528 bp, Homo sapiens
actaaggcatttagcaatgaactggcatgatgtttgtgacttactttaaaacatttaaacaggccgggtatggtggcttacacccataatccctgcactttgggaggctgaggcaggwggatcacctgaggtcaggagttttagaccagcctggccaacatgatgaaacccagtctctacgaaaaatacaaaaattagccgggtgtggtggtgggcgcctgttatcccagctactgggaggctgaggcaggagaattgcttgaacccaggaggcagaggttgcaatgagcacaagatcacaccactacactccagcctgggcgacaagagcgaacctccgtctcaaaaaaaaaaaaaaaaaaaaaaaagaaaagaaaaaaatgtaaacaaacaaaaaaatgaatatggcaaaatgtttacaatgtataaatctaggtgatgggcatttgggtgttcatctagttattctctccacttttctgtatatttttgaaattttaaataatgaaaagtgaaatagaagattat

SEQ ID NO: 661154 - DNA, 548 bp, Homo sapiens
aatgaactggcatgatgtttgtgacttactttaaaacatttaaacaggccgggtatggtggcttacacccataatccctgcactttgggaggctgaggcaggtggatcacctgaggtcaggagttttagaccagcctggccaacatgatgaaacccagtctctacgaaaaatacaaaaattasccgggtgtggtggtgggcgcctgttatcccagctactgggaggctgaggcaggagaattgcttgaacccaggaggcagaggttgcaatgagcacaagatcacaccactacactccagcctgggcgacaagagcgaacctccgtctcaaaaaaaaaaaaaaaaaaaaaaaagaaaagaaaaaaatgtaaacaaacaaaaaaatgaatatggcaaaatgtttacaatgtataaatctaggtgatgggcatttgggtgttcatctagttattctctccacttttctgtatatttttgaaattttaaataatgaaaagtgaaatagaagattatattgaaggacatttctataaatttgatgtacagaa

SEQ ID NO: 661155 - DNA, 528 bp, Homo sapiens
actaaggcatttagcaatgaactggcatgatgtttgtgacttactttaaaacatttaaacaggccgggtatggtggcttacacccataatccctgcactttgggaggctgaggcaggtggatcacctgaggtcaggagttttagaccagcctggccaacatgatgaaacccagtctctacgaaaaatacaaaaattagccgggtgtggtggtgggcgcctgtwatcccagctactgggaggctgaggcaggagaattgcttgaacccaggaggcagaggttgcaatgagcacaagatcacaccactacactccagcctgggcgacaagagcgaacctccgtctcaaaaaaaaaaaaaaaaaaaaaaaagaaaagaaaaaaatgtaaacaaacaaaaaaatgaatatggcaaaatgtttacaatgtataaatctaggtgatgggcatttgggtgttcatctagttattctctccacttttctgtatatttttgaaattttaaataatgaaaagtgaaatagaagattat

SEQ ID NO: 661156 - DNA, 548 bp, Homo sapiens
aatgaactggcatgatgtttgtgacttactttaaaacatttaaacaggccgggtatggtggcttacacccataatccctgcactttgggaggctgaggcaggtggatcacctgaggtcaggagttttagaccagcctggccaacatgatgaaacccagtctctacgaaaaatacaaaaattagccgggtgtggtggtgggcgcctgttatcccagctactgggaggctgaggcaggagaattgcttgaacccaggaggcagaggttgcaatgagcacaagatcacaccactacactccagcctgggcgacaagagcgaacctccgtctcaaaaaaaaaaaaaaaaaaaaaaaagaaaagaaaaaaatgtaaacaaacaaaaaaatgaatatggcaaaatgtttacaatgtataaatctaggtgatgggyatttgggtgttcatctagttattctctccacttttctgtatatttttgaaattttaaataatgaaaagtgaaatagaagattatattgaaggacatttctataaatttgatgtacagaa

SEQ ID NO: 661157 - DNA, 572 bp, Homo sapiens
ctttttcaggattcctccaaattgtttttaaacataaccttctttaaaatttcctcttcaagttaacaatataatttcataagcaatattatttattattgcaaataccatttgtcaatttagattaatagttgaaatacgcattggtaaaacataggttaaaaaatatatactttgtaaggtttcaaacttctctcatgtaaactctttcagagctaagagcaatcagcaaaattaacttgtccatccagcagtcactgccctagtttataaccctaggcactcagcatctctcattcgcatcattcattcattcattcattcatccatttattaaatgaccactatgggcaggcactgtgttaggcactagttggtcaaaaggcctcctwactatctcacagcataactctctttcctcttccatctaccctttcatacgagcatcagggttatcctcatttcacagatgagaaaaagacacaggggctaacaggtcttcctcaggtcaggtggcaagtatgtggtggtgggccagccagctctagagcccacaccctaggacaccctaa

SEQ ID NO: 661158 - DNA, 572 bp, Homo sapiens
ctttttcaggattcctccaaattgtttttaaacataaccttctttaaaatttcctcttcaagttaacaatataatttcataagcaatattatttattattgcaaataccatttgtcaatttagattaatagttgaaatacgcattggtaaaacataggttaaaaaatatatactttgtaaggtttcaaacttctctcatgtaaactctttcagagctaagagcaatcagcaaaattaacttgtccatccagcagtcactgccctagtttataaccctaggcactcagcatctctcattcgcatcattcattcattcattcattcatccatttattaaatgaccactatgggcaggcactgtgttaggcactagttggtcaaaaggcctcctaactatctcacagcatmactctctttcctcttccatctaccctttcatacgagcatcagggttatcctcatttcacagatgagaaaaagacacaggggctaacaggtcttcctcaggtcaggtggcaagtatgtggtggtgggccagccagctctagagcccacaccctaggacaccctaa

SEQ ID NO: 661159 - DNA, 619 bp, Homo sapiens
tgtttctttacttatctaataaagtcactttcactttactttgtagactcactccaaattctttcttgcaccagatccaggagccctctcttagggtctggatcaggaactctttccagtaacactactgccyccttttgagctatgtattcatccttgaaactgcttgctattgccacaagtaactatacattaacctaataatgtcacactggacactatcactcatagcctatagcttaacagtgcatagccaatcagtgagcaatgttgtttctgtaaaccaatgtgaattccttacaaacaatttcatatcggcctactccctgtcccccttttctgcctgtaaaaaacctgcttgtaataaaggcggcatgaagctcatatccagggttacttgggtctaagtcttccgggcaactgtcctcactttggctcaagtaaatgttttgttatattttgtgcctctgtcttttcctttcaggtggacgaagctttcctggaatccacagtctgatttagaagccctttctccttgcttccatgtgccctgtgcttgccgtgatcatacctcctatcacacatctctcccataatcctgatctccacatgcttccct

SEQ ID NO: 661160 - DNA, 558 bp, Homo sapiens
ttccagggtgtgtgtgctagcatgtagagaaaataaactcgaacaagttagtatgtcttcacagactcaggcttaattgaaagtaggttaggcctaaggagaaccatgaagtgagaaagtatttaaattaaaatgtgcaatatgaaaagactgttcaagcttttgatatgaatcactgcagatgcaattctgctgtgacatttttaagtagagagagggttggtgtggcagacactattggaacctytcccaacagccatcccctcttttttttttttttttttttttttttttggttttagaaaccccatattgttcaggtaaagggtgcaataagcccgggaatgatgggttgcttcctcagccctggcagatgccctaagattggtggaagccaatcatgattaagcctttcacccttatagtgatacagtctcctgtaacttcaacccttccctccctgttggcctcttcccctctgcctctaaatcccctctgcccagtcttacccataaaaataaaaaacaaatttccctacttatttgttgccttagtttt

SEQ ID NO: 661161 - DNA, 527 bp, Homo sapiens
aagcccgggaatgatgggttgcttcctcagccctggcagatgccctaagattggtggaagccaatcatgattaagcctttcacccttatagtgatacagtctcctgtaacttcaacccttccctccctgttggcctcttcccctctgcctctaaatcccctctgcccagtcttacccataaaaataaaaaacaaatttccctacttatttgttgccttagttttatttctctaactttcaaaaactctactggaaaggaatttatacttcctgcctccttctttccactgcaaaaataatcttcccaaccccatcactgaactgctcagggaaagaccaacagcaaaatcatattaccaaaccctataggtagtttttgtttttatcttactgggccttttwgtttctgatcctactgaccactcatttctagaaattctctactcccttgacttttccagccattttgttgtagtatctcctgtgaatttctcatgctctgcttccgatgtctaaatgtatggcat

SEQ ID NO: 661162 - DNA, 563 bp, Homo sapiens
gcctttcccccaattctttctctacatatgtctaaaaatacatctgaccaccacacgttcctttcatggatctccctcacctctggggaaagctaaggctgtccagcagggaaagccctttgtagcttggcttctgtcaccttctgccctttcccacattatatcttagcaatgatgarctacttcaaggtcaccacccacacaagcggctggaccctggtgggcctctgcaaaggctgttccttgcctgtaacacctttcccatcttctgatgatctctcattcctttcagtactcagttcagacatcacatcacattggcagcctctctcagttccagcttccacggagaacctctcccccagcgcatgcacaacacccgggcacacccctgtctgagctcctcacttatgtggctgaaatggtctgtttatgtctgtcccctccactgtcttcaagggtagttttcatggaatgatacattatttacttcttttttccttatgcctgcttatctactcagtttctctatttcagactgtttttaccatgagcacaggaaa

SEQ ID NO: 661163 - DNA, 563 bp, Homo sapiens
gcctttcccccaattctttctctacatatgtctaaaaatacatctgaccaccacacgttcctttcatggatctccctcacctctggggaaagctaaggctgtccagcagggaaagccctttgtagcttggcttctgtcaccttctgccctttcccacattatatcttagcaatgatgagctacttcaaggtcaccacccacacaagcggctggaccctggtgggcctctgcaaaggctgttccttgcctgkaacacctttcccatcttctgatgatctctcattcctttcagtactcagttcagacatcacatcacattggcagcctctctcagttccagcttccacggagaacctctcccccagcgcatgcacaacacccgggcacacccctgtctgagctcctcacttatgtggctgaaatggtctgtttatgtctgtcccctccactgtcttcaagggtagttttcatggaatgatacattatttacttcttttttccttatgcctgcttatctactcagtttctctatttcagactgtttttaccatgagcacaggaaa

SEQ ID NO: 661164 - DNA, 563 bp, Homo sapiens
gcctttcccccaattctttctctacatatgtctaaaaatacatctgaccaccacacgttcctttcatggatctccctcacctctggggaaagctaaggctgtccagcagggaaagccctttgtagcttggcttctgtcaccttctgccctttcccacattatatcttagcaatgatgagctacttcaaggtcaccacccacacaagcggctggaccctggtgggcctctgcaaaggctgttccttgcctgtaacacctttcccatcttctgatgatctctcattccyttcagtactcagttcagacatcacatcacattggcagcctctctcagttccagcttccacggagaacctctcccccagcgcatgcacaacacccgggcacacccctgtctgagctcctcacttatgtggctgaaatggtctgtttatgtctgtcccctccactgtcttcaagggtagttttcatggaatgatacattatttacttcttttttccttatgcctgcttatctactcagtttctctatttcagactgtttttaccatgagcacaggaaa

SEQ ID NO: 661165 - DNA, 563 bp, Homo sapiens
gcctttcccccaattctttctctacatatgtctaaaaatacatctgaccaccacacgttcctttcatggatctccctcacctctggggaaagctaaggctgtccagcagggaaagccctttgtagcttggcttctgtcaccttctgccctttcccacattatatcttagcaatgatgagctacttcaaggtcaccacccacacaagcggctggaccctggtgggcctctgcaaaggctgttccttgcctgtaacacctttcccatcttctgatgatctctcattcctttcagtactcagttcagacatcacatcacattggcagcctctctcagttccagcttccacggagaacctctcccccagcgcatgcacaacacccgggcacacccctgtctgagctcctcacttatgtggctgaaatggtctgtttatgtctgtcccctccactgtcttcaagggtagttttcatggaatgatacattatttacttcttttttccttatgccygcttatctactcagtttctctatttcagactgtttttaccatgagcacaggaaa

SEQ ID NO: 661166 - DNA, 537 bp, Homo sapiens
gggggagcgccctcccatcagcttagactctcagggtgctgttctgtggagtggtcacttcattaaaaacatctggtgtaccacagccattacttacagtgcgattttaaagacttatttacacaggacagtctaattcagcctctcctatttacaaacccaaatttgtcagacctgaatcattaataagccacacaaatagagtcagtctcttttttaggctcagctggaaaatggacttgacaaagctcagctcagctttccagccctgggctcaggagattctgttgtgttgttatttttgtgtgtgtgtgtgtgtgttttctwtctcctcctctttcttttcctcttttgttttgttttgttttaactgctgcaaggtaaaatataattgggaacagggtggctattttgccaaatccgatgctaactgctaaagaggtgattctcatgctgtccatgagcgttgcagtttaccttgtggagcttaagcattagggtccccaaactggaagaggagagagaccctggttctgc

SEQ ID NO: 661167 - DNA, 595 bp, Homo sapiens
tttgtttttagatttatatatattaaaattcaattttttggtgtacaattctatgagtctttacaaatacttagagatgcataatgaaccccacaatcaagatacacaatggctctgtgaccctaaaatgttcaccagtacttctgctttcctcactccaccctaatccctggctgccactaatctatgtggtctccaaccctatagtggtgatttttcagagtgtcaaatacatagaatcaaatagctttttgaattcctttttttgttcttcactctgacacccacgctggagtgcagtggagtgatcatgagctcaagcgatcctcctgcctcagcctcccatataactgggaccacaggcgtgtgccaccacaccragctaatttttatattttttgtagagacagggcctccctatgttgcccaggttggtctcgaactcccgggctcaagctattctcccacctcagcctccccaagtgttgggattacaggagtgagccatggtgcctggacatttgttcctttttagtgttgagcagtattccattttatgggtgtaccacagtttgtttatccattcactggttga

SEQ ID NO: 661168 - DNA, 619 bp, Homo sapiens
cctagtacatataaaagttatgtttacactataatgcagtgtattaagtgtgcaatagcattatgtctgaaaaacaatgtacataccttaacttaaaaatactttattgctaaaaaatactaatagccatcagagacttcagtgagttgtatctttttgctggggggagggtcttacctccatgggctgctgactaatcaaggtgatggctcctgaaggttagagytggtgtggcaatttcttaaaatatgacaacaatgaagcttgccacattgattcactcttccttccacaaaaggaagcttgagatgctgtttgatagcattttacccacagtagaatgtctttcaaaattgcagtcagtcctctcaaaccctgctgctgatttatcaattaagttaatggactattctaactcctttttcaatgatattcacagcacctttaccaggatcagattccatctcaagaaactactttctttgctcatccataagaagtaacttctcattcactgaagttttatcatgaggttgcagcaattcagtcacatcttcgggctccccttctaattctagttctcttactgtttctaccacatctgcagctccttcctcca

SEQ ID NO: 661169 - DNA, 595 bp, Homo sapiens
gatggctcctgaaggttagagttggtgtggcaatttcttaaaatatgacaacaatgaagcttgccacattgattcactcttccttccacaaaaggaagcttgagatgctgtttgatagcattttacccacagtagaatgtctttcaaaattgcagtcagtcctctcaaaccctgctgctgatttatcaattaagttaatggactattctaactcctttttcaatgatattcacagcacctttaccaggatcagattccatctcaagaaactactttctttgctcatccataagaagtaacttctcattcactgaagttttatcatgaggttgcagcaattcagtcacatcttcgggctccccttctaattctagttctcttactgtttctaccacatcygcagctccttcctccactgaagtcttgagctctttaaagtcatccatgagggttggaatcaacttcttccaaactcctgttaatgttgatattttgaccttcttccatgaatcatgaacattcttaatggcatctaaaatggtaaatactttccagaaggttttaagtttactttcccagatccatcagaggaatc

SEQ ID NO: 661170 - DNA, 595 bp, Homo sapiens
gatggctcctgaaggttagagttggtgtggcaatttcttaaaatatgacaacaatgaagcttgccacattgattcactcttccttccacaaaaggaagcttgagatgctgtttgatagcattttacccacagtagaatgtctttcaaaattgcagtcagtcctctcaaaccctgctgctgatttatcaattaagttaatggactattctaactcctttttcaatgatattcacagcacctttaccaggatcagattccatctcaagaaactactttctttgctcatccataagaagtaacttctcattcactgaagttttatcatgaggttgcagcaattcagtcacatcttcgggctccccttctaattctagttctcttactgtttctaccacatctrcagctccttcctccactgaagtcttgagctctttaaagtcatccatgagggttggaatcaacttcttccaaactcctgttaatgttgatattttgaccttcttccatgaatcatgaacattcttaatggcatctaaaatggtaaatactttccagaaggttttaagtttactttcccagatccatcagaggaatc

SEQ ID NO: 661171 - DNA, 571 bp, Homo sapiens
actctcataatattctcatgggggtcaaagtactatcagtgtcctcttttttatttattttatgtctttctagtgacttaaccttaggtccctatgcttacttaaatttagagataaagggaaaatactaacaatgttcattcttaagtagaagattcttttggtctttttagccatagataagcatatttaatcctagaaggctacacagagttagaaaagaaaaaggaaatatcagagaccttagtgggtatttcctctctctcttttctcttaagagcatttaatcttttggttttctaagcaaatcttttgcagctgcttagttctctgttcgtgtcaaggaccctttgtttatactaactgcacccaaagaattcttctcacacaagttgtaccacttaagckcttttgcgagtctcagactttatcacatctatgcagaaacagaaccatatttttctttctcaacattccttctggtcaaaggcgaatgtagaatatttaattccttaaatgtcaagtcttaacccaatagtgcctgtgatttgcatgtgtcgacgtatgagaa

SEQ ID NO: 661172 - DNA, 565 bp, Homo sapiens
agtgcagtggtgtgatcacggctcactgcaacctcgaactcctggactcaagcaatcacccctttggccttccaagtagctaggactacaagtgtgcatcaccaggcccagctaattttttattttagtagagatgggactcactatgttgactaggctggtctcaaactctgagctcaggcaatcctcctkccccagactcccaaagtgttgggattacaggtgtgagccaccgtgcccagccggttcaaccattttagagatgagatagtcaaagccaggaggggtcaagtgacacatccaagtggctgaggacgcatatgtagtaactgaggatgggctcaaatccagacctttggatccctccatattctttctactgtactatgattgctttacccagaatatccaggttaaaaagtaaaacacagctaatcctctgacatttgctaccacccagctacaggcgactgatgtattattttttggcattatgtagataaaatttcatttctgtccaatctttccaatcttacttgactaacattacttctctccaactcct

SEQ ID NO: 661173 - DNA, 580 bp, Homo sapiens
tacccagaatatccaggttaaaaagtaaaacacagctaatcctctgacatttgctaccacccagctacaggcgactgatgtattattttttggcattatgtagataaaatttcatttctgtccaatctttccaatcttacttgactaacattacttctctccaactcctatgcatttctcagtccctccggaaaatttcatcatctacagggttcatagactcaggtctagcyttagtctagccagaccttcctcacttgtgtgctgtgtgaccttcatcaaatcacttatcctctctgagcctgcgtttcctcattttttgaaatcagaaaaatatgagctgtctcctcaaaatgactgttgggaaaatcaagtgaggaaatgcccgggaagcctttgaggctttgcccgactggattaagtgctcagcagcagtgttccaaaaaataccctgcaagaacaagtgtatgaagacacaaatagtagagggactgtgggctttccaccaaacagtaggtgacaccagttgttccaggctccaaagtgtatttgatgacaatatggaaggtacaatgtggct

SEQ ID NO: 661174 - DNA, 580 bp, Homo sapiens
tacccagaatatccaggttaaaaagtaaaacacagctaatcctctgacatttgctaccacccagctacaggcgactgatgtattattttttggcattatgtagataaaatttcatttctgtccaatctttccaatcttacttgactaacattacttctctccaactcctatgcatttctcagtccctccggaaaatttcatcatctacagggttcatagactcaggtctagccttagtctagccagaccttcctcacttgtgtgctgtgtgaccttcatcaaatcacttatcctctctgagcctgcgtttcctcattttttgaaatcagaaaaatatgagctgtctcctcaaaatgactgtwgggaaaatcaagtgaggaaatgcccgggaagcctttgaggctttgcccgactggattaagtgctcagcagcagtgttccaaaaaataccctgcaagaacaagtgtatgaagacacaaatagtagagggactgtgggctttccaccaaacagtaggtgacaccagttgttccaggctccaaagtgtatttgatgacaatatggaaggtacaatgtggct

SEQ ID NO: 661175 - DNA, 526 bp, Homo sapiens
ttgaggctttgcccgactggattaagtgctcagcagcagtgttccaaaaaataccctgcaagaacaagtgtatgaagacacaaatagtagagggactgtgggctttccaccaaasagtaggtgacaccagttgttccaggctccaaagtgtatttgatgacaatatggaaggtacaatgtggcttgctagaagcatctgataccagccagagtcagttttgtgcatttctttccgattcagtgttcagtgaagtcaagttggtagcttgaatcaaccatggtgggaatatttacaccatgggaaaccagcaaacactataaagcaggcctccccttccctacccagagagctgattgttaaacattccccagaacaccactgatagagatcaggtctaaagtcaaacaaatcaaggtttgcatctaagctctgacacttatagtaccccctagagaagctcctccagtcttctgagtttctagttcctcaactgttagatggggctcatggtacttagtttaaagg

SEQ ID NO: 661176 - DNA, 538 bp, Homo sapiens
cctccccttccctacccagagagctgattgttaaacattccccagaacaccactgatagagatcaggtctaaagtcaaacaaatcaaggtttgcatctaagctctgacacttatagtaccccctagagaagctcctycagtcttctgagtttctagttcctcaactgttagatggggctcatggtacttagtttaaaggcctgttggaaagattaagtggtgtaaggtatttgaaacacttaggccaggacctagcaaatattaatgtcaaatagtggatgacagtggttactattattgttgttagacaatctggagtagtttaagtcttaggtgcatcctatatatttcacttcttttgcatggtactgatgaagacctgaatatgattgcacagtgaacttgactgcctgggttgggaaagaatttgttttgtagggaaaaaaattctatttgggttcttttattgtttctgtttgagaaaatatttaaacaaatttgaacatctaaacaaagactgttttaaagccaaaattca

SEQ ID NO: 661177 - DNA, 538 bp, Homo sapiens
cctccccttccctacccagagagctgattgttaaacattccccagaacaccactgatagagatcaggtctaaagtcaaacaaatcaaggtttgcatctaagctctgacacttatagtaccccctagagaagctcctccagtcttctgagtttctagytcctcaactgttagatggggctcatggtacttagtttaaaggcctgttggaaagattaagtggtgtaaggtatttgaaacacttaggccaggacctagcaaatattaatgtcaaatagtggatgacagtggttactattattgttgttagacaatctggagtagtttaagtcttaggtgcatcctatatatttcacttcttttgcatggtactgatgaagacctgaatatgattgcacagtgaacttgactgcctgggttgggaaagaatttgttttgtagggaaaaaaattctatttgggttcttttattgtttctgtttgagaaaatatttaaacaaatttgaacatctaaacaaagactgttttaaagccaaaattca

SEQ ID NO: 661178 - DNA, 538 bp, Homo sapiens
cctccccttccctacccagagagctgattgttaaacattccccagaacaccactgatagagatcaggtctaaagtcaaacaaatcaaggtttgcatctaagctctgacacttatagtaccccctagagaagctcctccagtcttctgagtttctagttcctcaactgtwagatggggctcatggtacttagtttaaaggcctgttggaaagattaagtggtgtaaggtatttgaaacacttaggccaggacctagcaaatattaatgtcaaatagtggatgacagtggttactattattgttgttagacaatctggagtagtttaagtcttaggtgcatcctatatatttcacttcttttgcatggtactgatgaagacctgaatatgattgcacagtgaacttgactgcctgggttgggaaagaatttgttttgtagggaaaaaaattctatttgggttcttttattgtttctgtttgagaaaatatttaaacaaatttgaacatctaaacaaagactgttttaaagccaaaattca

SEQ ID NO: 661179 - DNA, 538 bp, Homo sapiens
cctccccttccctacccagagagctgattgttaaacattccccagaacaccactgatagagatcaggtctaaagtcaaacaaatcaaggtttgcatctaagctctgacacttatagtaccccctagagaagctcctccagtcttctgagtttctagttcctcaactgttagatggggctcatggtacttagtttaaaggcctgttggaaagattaagtggtgtaaggtatttgaaacacttaggccaggacctagcaaatattaatgtcaaatartggatgacagtggttactattattgttgttagacaatctggagtagtttaagtcttaggtgcatcctatatatttcacttcttttgcatggtactgatgaagacctgaatatgattgcacagtgaacttgactgcctgggttgggaaagaatttgttttgtagggaaaaaaattctatttgggttcttttattgtttctgtttgagaaaatatttaaacaaatttgaacatctaaacaaagactgttttaaagccaaaattca

SEQ ID NO: 661180 - DNA, 577 bp, Homo sapiens
tagatccttgaaggtcagggctaataggactgatcttctaactgatcagataaccaaccatttgaagcactgtaaaagagagatgtttcagatttccttcttttaaacctaaattttaatgattgaattaaatgagcctgccatcaagaatggaaatatattctctgtgcaaaggatatggtttgactgtggyatactaggagtagtctttatagattactatagattatagattattagtcctgctaataaatttttgccggaaggaatgacttaagaatgagtcttaatgaaattcatcatctttggcacatgttttcaatattcaatctataattctgcaaaaacattggggggaagttaatactatcttcttttaaaacttttcaatttaaataatctcttctgtgtcatagaactttggaatcctagagtctcgattgctcacatacctatgcattagagtagacccagaaatgtttcctgaggattatttttgttctgccatgcagagatagggtagccattcatccaggcaactattctggtcaggctccttaatttcagtcaaagaatc

SEQ ID NO: 661181 - DNA, 577 bp, Homo sapiens
tagatccttgaaggtcagggctaataggactgatcttctaactgatcagataaccaaccatttgaagcactgtaaaagagagatgtttcagatttccttcttttaaacctaaattttaatgattgaattaaatgagcctgccatcaagaatggaaatatattctctgtgcaaaggatatggtttgactgtggtatactaggagtagtctttatagattactatagattatagattattagtcctgctaataaatttttgccggaaggaatgacttaagaatgagtcttaatgaaattcatcatctttggcacatgttttcaatattcaatctataattctgcaaaaacattggggggaagttaataytatcttcttttaaaacttttcaatttaaataatctcttctgtgtcatagaactttggaatcctagagtctcgattgctcacatacctatgcattagagtagacccagaaatgtttcctgaggattatttttgttctgccatgcagagatagggtagccattcatccaggcaactattctggtcaggctccttaatttcagtcaaagaatc

SEQ ID NO: 661182 - DNA, 577 bp, Homo sapiens
tagatccttgaaggtcagggctaataggactgatcttctaactgatcagataaccaaccatttgaagcactgtaaaagagagatgtttcagatttccttcttttaaacctaaattttaatgattgaattaaatgagcctgccatcaagaatggaaatatattctctgtgcaaaggatatggtttgactgtggtatactaggagtagtctttatagattactatagattatagattattagtcctgctaataaatttttgccggaaggaatgacttaagaatgagtcttaatgaaattcatcatctttggcacatgttttcaatattcaatctataattctgcaaaaacattggggggaagttaatactatcttcttttaaaamttttcaatttaaataatctcttctgtgtcatagaactttggaatcctagagtctcgattgctcacatacctatgcattagagtagacccagaaatgtttcctgaggattatttttgttctgccatgcagagatagggtagccattcatccaggcaactattctggtcaggctccttaatttcagtcaaagaatc

SEQ ID NO: 661183 - DNA, 575 bp, Homo sapiens
accttctctcctcttgtgacaggtcaaatcttacccaggagccttccaacgtgctatttcacatcttgccctgacttggcttttttttttttttttttttttyccccgagacagagttgcgtcttgctctgtcgcccacgctggagtacagtggctccatctcggttcactgcaacctccgcctctcgggttcaagcgattcttctccctcagcctcccaagtagctgggattacaggcacccgacaccacgcccgactaatttttgtgtttttagtagaaatggggtttcaccatgttggccaggctggttttgaactccagacctcgtgacccacctgcctcggccgcccaaagtgctgggattacaggcgtgagccaccgcgcccagccctgacctagctattgactgcttatcctggagtctaggatctctctggtgccagatctgagacgcccgcagcctctcccctatctccaacctgtctcccccgctagatcgtgagctctgtgggaacattgcccaggcttgtcttgttcaccaacgtgcttccagtgcctggcactgtgctcaac

SEQ ID NO: 661184 - DNA, 515 bp, Homo sapiens
ccatgctggcagctgattagattgtccccacccggattgattgtggatctggctttctcagtccacggactcaaatgttaatctcctttggcaataccctcacagacacacctaggaacgatgctttgcatcyttcaatccaatcaagttgacactcaatattaaccatcacgcaacccaagtgtgagcatgaggtgcatgtagacatggtaaccatggtgatgtaaggaagactatgcataaattcagtagcatgggttccctgtctccaacacaaatttatctcctgttactgcatgatgtccatacatacaagacaatcactgagtccccctaatagcaccattctgcgtggagaccaattagctgctgggtggtgcgtagtggaacaatggcatgttaagttaaagatttcagtgggatgcctagctcagacatgagaccatacaaagatgggatgtcactttttaggatgtgtattctaaatcaacaaccataatatgattttttccgag

SEQ ID NO: 661185 - DNA, 335 bp, Homo sapiens
ggtctttcacttcttataaggagagcaattccaccatggggcccccacctctatgatctyatctaaacttaactatgccccaaaggctcgtcctctaaatgccatcacaggggaagttaggggttcaacatatgaattttgagggatatgacattcagtttacaacaaggatggtaatgttgaatatcagttacagcccaagatctactgcagagttggaagctgtgtggtttcttcatttaataagtctccactagagaaagaaaaaaatacacacatactagaatcatggagaagctgctcccaacatatatgtacacatggattcgagcagc

SEQ ID NO: 661186 - DNA, 657 bp, Homo sapiens
gaatatatttcttgaagaacagaatttaccaaaacagacattagaataaacagaaccgtgaaaaactttgctaaaaattttgaaaagagaaaaataattaacaaatacatagataaatataacttaccaaaatttataaagaatggctttaagtaatcataaaataatttaaagaaaacaccaggctcaattcttgtatggtgaagtctgccaaaattaaaaaaaaaattaaattctatggacaaattcggaggataaaaaataaatataggtcagaaactcagatctacaaacagaaaggaagagcatttttaaaaagtgaagctaaaagaaagacttatttttcttattcttaagtgatctaagaaataatgattagttcaaaatattaatcacaataatgtactttattatgtatgtgtatatgtgcatgtgtgcacatatayataagtgaaatgaatgacagtgatgataaaagagatgagagagaggaattgggatatttaaaaattattattataaggtacttgcactaaccatgaagtagtatagtgttatttcaaagtggacttgtaaatgtatatttcaaactctagggcaacctccaacaaacacgaataaaagaagtaaaactaatgctaagaaaggagagaaatg

SEQ ID NO: 661187 - DNA, 527 bp, Homo sapiens
ttaaatactcattgcttgggttaattttacatatttaaaatgctttttttttttttttttgagacagagtctcactctgtcgccaggctggagtgcagtggcacaatctctgctcactgcaacctcctcctcccgggttcaagagattcttctaccccagcctcccgagtagctggaagtacaggtgtgtgcccccacgcccrgctaattttttttttttttgtacttttagtagatttgggttttcaccatgttggccagaatggtctcgatctcttgacctcgtgatctgcctgcctcagcctcccaaagtgctgggattacaggcgtgagccaatgcacccagccaatgcatatgttttttaataagtgtttctcatacttttccttaatctcctttatcgtactagcatcttattatttactgttgatacaacattctgatttcccctctaagcccaaggtaagctgcttcttactaaaaaccaatcattttagaaacaattaaacatgaccaagcaaagact

SEQ ID NO: 661188 - DNA, 619 bp, Homo sapiens
cctgatctgtctttcagtccaacagttttcccttctccaaaatgtcatacgaatggacttcaacatagactttcagcctgacttcttatgtatagcaacatccacttaaagttcatctaagtagctccatgagttaatagcttatttatttttattactgagtaatattccattatatggatgtaccactgtttattgatccattaatccaactacaggatattatttcaacattgcttgaaatttttggtgattatgaataaaactgctaaaaacattcatctgcatgtatttyttagacatatattttcaaatcaattgtgtaaatattcaggaacacgcttgctaccttgtatgataaatctaagttatatttagtaagatactgccaaactacattgcaaagtgcctttttgtatccccagcagcgatgaatgagaggtcctgctgctctgagtccttgccaggtttgggaattgtcagtgaagagtctatttagatcttttgccttgttattaattaagtacaagctctttatcagatatattatttgtaaatattttctcccagtttatgacttgtcttttcattcttgcaactgcatccttcacagagcaaa

SEQ ID NO: 661189 - DNA, 619 bp, Homo sapiens
cctgatctgtctttcagtccaacagttttcccttctccaaaatgtcatacgaatggacttcaacatagactttcagcctgacttcttatgtatagcaacatccacttaaagttcatctaagtagctccatgagttaatagcttatttatttttattactgagtaatattccattatatggatgtaccactgtttattgatccattaatccaactacaggatattatttcaacattgcttgaaatttttggtgattatgaataaaactgctaaaaacattcatctgcatgtatttcttagacatatattttcaaatcaattgtgtaaatattcaggaacacgcttgctaccttgkatgataaatctaagttatatttagtaagatactgccaaactacattgcaaagtgcctttttgtatccccagcagcgatgaatgagaggtcctgctgctctgagtccttgccaggtttgggaattgtcagtgaagagtctatttagatcttttgccttgttattaattaagtacaagctctttatcagatatattatttgtaaatattttctcccagtttatgacttgtcttttcattcttgcaactgcatccttcacagagcaaa

SEQ ID NO: 661190 - DNA, 494 bp, Homo sapiens
aatatctactagaggcaattagtgaattccacaaaaattcaggtcactaagtgctatggtctgagtgtttgcattcccctcttattcatatgttgaatcctaatcaacagtgcgatggtttgaggaggtagggcctttgagaattaattagtgcatgatagcagagccctcatgaatggcattagtgccctcatgaaagaacaacttgagagctgccttgtcccttcggccacgtgagaacacgcctagaagrtgtcctctatgaggcagaaaatagccttaaacagactttgactctgctggcaccttgatcatggggttgcccagccacgagaactgtgagaaacaaatctcttttgtttataaggtatcctgtttatggtgttttgttatagcagcactaatgaattaagacactaagttagtatcaaaaaatcacttaatttctatgcattagcaatgaccaattagaaaacaaaatttttaaaagaaca

SEQ ID NO: 661191 - DNA, 494 bp, Homo sapiens
aatatctactagaggcaattagtgaattccacaaaaattcaggtcactaagtgctatggtctgagtgtttgcattcccctcttattcatatgttgaatcctaatcaacagtgcgatggtttgaggaggtagggcctttgagaattaattagtgcatgatagcagagccctcatgaatggcattagtgccctcatgaaagaacaacttgagagctgccttgtcccttcggccacgtgagaacacgcctagaaggtgtcctctatgaggcagaaaatagccttaaacagactttgactctgctggcaccttgatcatggggttgcccagccacgagaactgtgagaaacaaatctcttttgtttataaggtatcctgtttatggtgttttgttatagcagcactaatgaattaagacactaagttagtatcaaaaaatyacttaatttctatgcattagcaatgaccaattagaaaacaaaatttttaaaagaaca

SEQ ID NO: 661192 - DNA, 548 bp, Homo sapiens
ttactatagtagccatcttgatttgttatcaatcaaaggtagggctgagactgccaaactgtagccctgaaacaaatccagggagcagcatctatgtccaaatacttactctgaatcatggcaatgaactgtgttcttaggatccattccaacaaagtaatccaggaaatcaggtagccagaaaagacaaaatttgtctcactgcacagaaatatttttcttagagaagacaatggaaatataggctttgtttatcatagaaatagctgatatattcttattatgaattaattttattcttttcaatttgcaatagacatggaatacaccttagaatagaagacagaagaacagtatcataatgttaackcttttgttgacaagttgttggaatttctgaaagtcacttaacctccataagacagtttattttcctaaacaaatagaaagtaacaatctcagattgttataactaaaatttagataagataaacaaatgaaagcaagcatatattcagaatacccagtatatctgaaaaaatttcttg

SEQ ID NO: 661193 - DNA, 548 bp, Homo sapiens
ttactatagtagccatcttgatttgttatcaatcaaaggtagggctgagactgccaaactgtagccctgaaacaaatccagggagcagcatctatgtccaaatacttactctgaatcatggcaatgaactgtgttcttaggatccattccaacaaagtaatccaggaaatcaggtagccagaaaagacaaaatttgtctcactgcacagaaatatttttcttagagaagacaatggaaatataggctttgtttatcatagaaatagctgatatattcttattatgaattaattttattcttttcaatttgcaatagacatggaatacaccttagaatagaagacagaagaacagtatcataatgttaactcttttgttgacaagttgttggaatttctgaaagtcacttaacctccataagacagtttattttcctaaacaaatagaaagtaacaatctcagattgttataactaaaatttagataagwtaaacaaatgaaagcaagcatatattcagaatacccagtatatctgaaaaaatttcttg

SEQ ID NO: 661194 - DNA, 648 bp, Homo sapiens
tctgtaaaagaagcaatattgtacttgttcctatttctcctcaaaggtttagtaacatcaaagtggattaataacctgaagtatttatatatatataaaaattcagtgatacatgatataatgctaaaaaagagccagttggtttttatcttggaacttactttctgctgtaaatagagagaaatctatgccttagcagtttctgttcacccataataaatayatatgcaatgctattttattaaaataatcttcattatatattctatctcaataatatctattagtaaaagctattgatatcggtaatatacttgtcattaaaaaattaacaatgctgtatttggcaccatgtaattagggaaggataatattttaatttcttctaattcttactgtaccagattaaaatttttgattttgtggagataacgtcttcaatcaaaaatagtgtttctatttatgataatcttagtccttatgcagatcagttttgtgagctgatatttgctgaagagagatacatttccataaatcatatgaggaatgttgtttaggatcaacactgtaataaggttagctacatcattaggagaattatctttaaatatacacaatttgcttttttttaaaaaaaggtgcagcatg

SEQ ID NO: 661195 - DNA, 648 bp, Homo sapiens
tctgtaaaagaagcaatattgtacttgttcctatttctcctcaaaggtttagtaacatcaaagtggattaataacctgaagtatttatatatatataaaaattcagtgatacatgatataatgctaaaaaagagccagttggtttttatcttggaacttactttctgctgtaaatagagagaaatctatgccttagcagtttctgttcacccataataaatatatatgcaatgctattttattaaaataatcttcattatatattctatctcaataatatctattagtaaaagctattgatatcggtaatatacttgtcattaaaaaattaacaatgctgtatttggcaccatgtaattagggaaggataatattttaatttcttctaattcttactgtaccagattaaaatttttgattttgtggagataacgtcttcaatcaaaaatagtgtttctatttatgataatcttagtccttatgcagatcagttttgtgagctgatatttgctgaagagagatacatttccataaatcatatgaggaatgttgtttaggatcaacactgtaataaggttagctacatcattagsagaattatctttaaatatacacaatttgcttttttttaaaaaaaggtgcagcatg

SEQ ID NO: 661196 - DNA, 581 bp, Homo sapiens
atcttcattatatattctatctcaataatatctattagtaaaagctattgatatcggtaatatacttgtcattaaaaaattaacaatgctgtatttggcaccatgtaattagggaaggataatattttaatttcttctaattcttactgtaccagattaaaatttttgattttgtggagataacgtcttcaatcaaaaatagtgtttctatttatgataatcttagtccttatgcagatcagttttgtgagctgatatttgctgaagagagatacatttccataaatcatatgaggaatgttgtttaggatcaacactgtaataaggttagctacatcattaggagaattatctttaaatatacacaatttgctttttttwaaaaaaaggtgcagcatgtatctttcatttaatataaaatctcacacaaatatcctaagcaaacctcacaataatggaataaaagcagataataaacttcattttgctatgcaggccagtagtatccacgtatgtaaaatcagagttgaatatttttggcttaaaatacccaatctccgattttcatacaatacactaag

SEQ ID NO: 661197 - DNA, 489 bp, Homo sapiens
ttattgcttttctttttgataaaggtcattttaatggagtgagataatatcccattgttttgatttgcatttctctgatgatcagtgatgctgagcaccttttcatatatctgtcatttgtatgtcttcttttgaaaaatgtctactcagacttttgcccattttaaaattggattattagattttttctatagagctgtttgagctctttatatattctagttattaatcttttgacagatgggtagtttacaaatattttctgtcattctgtaggttgtctctcacttcgttgattgtttcctttgctgtgtagaagctttttaacttgatgtcatcccatttgttcccttttactttggttgtctgtgctggtgaagtattactcaagaaattccagccccattcaatgttctggagagattaccygatgttttcttttaatagtttcatagggtgaggtgtgaggtcctagatgtaagtatttaa

SEQ ID NO: 661198 - DNA, 588 bp, Homo sapiens
ttccattcatctatgtgtttgtttttatgctagtaccatgctgttttgatcactatagctctgcagtgtaatttgaagttagataatgtgatttctccagttttactctttttgttcaggatagctttggctattctgctttttgtggttccgtatacattttaagaatttttttttctgtttctgtgaagaataccatagataccttgatagacattgcattraaactataggttgccttgggtaatatggtcattttaacaatatttattcttgcaatccatgaacagggaatatttttcaatttttgtgtcctcttcaatttcatgcataggttttgtagtttttattgtagatatctttaacttctttagttaatttctaagtattttatttgcagctattgtaaatgggattcctttcttgatttatttttcagattgtttgctgttggtacatagaaatgctattgattttgtggattgatgttctatcctgcaaatttactgaatttgttaatcaatttcaatagtgttttggtggggtatttagttttgtacaaacagaaggtcatagcatcagtaaaaa

SEQ ID NO: 661199 - DNA, 561 bp, Homo sapiens
ttggctgataattgtcttgtttaaggaatctagatacagaattctcagctgataattgttttgtttaagggggctaaagacaggacccagttacttctagcttgcagggtttctgctgagaatactgctgttaatctgatagattttcctttataggttacctgactcttttgcttcacatcycttaagattcttcatgttgactttagataacctgatgactatgtgcctaggcagtgttctttttgcaatgaatttcccaggtgttctttgtgcttcttgtatttggatgtctaggtctctagcaaggccagggaagttttccttgattattttctcaaataagttttccaaacttttagatttctcttttacttcaggaacacaaattattcttaggtttggtcatttaatataatcacaactattggaggctttactcattttttaaattctttttttctttgtcttcattggattgggttgattctaaagccttgttttcaagctctgaagttctttcttttatttgtttgattctattgttgaaactttccagtg

SEQ ID NO: 661200 - DNA, 561 bp, Homo sapiens
ttggctgataattgtcttgtttaaggaatctagatacagaattctcagctgataattgttttgtttaagggggctaaagacaggacccagttacttctagcttgcagggtttctgctgagaatactgctgttaatctgatagattttcctttataggttacctgactcttttgcttcacatctcttaagattcttcatgttgactttagataacctgatgactatgtgcctaggcagtgttctttttgcartgaatttcccaggtgttctttgtgcttcttgtatttggatgtctaggtctctagcaaggccagggaagttttccttgattattttctcaaataagttttccaaacttttagatttctcttttacttcaggaacacaaattattcttaggtttggtcatttaatataatcacaactattggaggctttactcattttttaaattctttttttctttgtcttcattggattgggttgattctaaagccttgttttcaagctctgaagttctttcttttatttgtttgattctattgttgaaactttccagtg

SEQ ID NO: 661201 - DNA, 607 bp, Homo sapiens
tgaggccaacacagcactctgatttgcctaagaattgtagtcattgtggcctagactgcccttcaagtttatttaggaacccagaggcctttaacccccactgatccggcttgccagaactcaagatctgatcactgggatgagcaatttccatctggctagggctggtctaattgctccctctatggtcttgcatcagctgagttctgcccagtttttctttacactatgacaggtcagcattgagttcaatgcaaagttcaacaattgctgtgctgtccctcacccaaacacacaaattctctatctgcaccacctgctgctactaggtgatgggggaaagggtggtgytggcaattcaagactgtcttcctaccttttcaatgcctcgttttaggaaatataaagttagaaacagatactaagggctcacctgagcttgggttcttataaaggtgtttttttttgtgtgtgtgtagatagttgttaaaatgggtgtttctgcagatggaatggtcagtggaggcttatgttcaaccatcttgctcctctgctccagccccattgttttaatgcacatgtatttgtttatttctgatagtaaaca

SEQ ID NO: 661202 - DNA, 607 bp, Homo sapiens
tgaggccaacacagcactctgatttgcctaagaattgtagtcattgtggcctagactgcccttcaagtttatttaggaacccagaggcctttaacccccactgatccggcttgccagaactcaagatctgatcactgggatgagcaatttccatctggctagggctggtctaattgctccctctatggtcttgcatcagctgagttctgcccagtttttctttacactatgacaggtcagcattgagttcaatgcaaagttcaacaattgctgtgctgtccctcacccaaacacacaaattctctatctgcaccacctgctgctactaggtgatgggggaaagggtggtgttggcaattcaagactgtcttcctaccttttcaatgcctcgttttaggaaatataaagttagaaacagatactaagggctcacctgagcttgggttcttataaaggtgtttttttttktgtgtgtgtagatagttgttaaaatgggtgtttctgcagatggaatggtcagtggaggcttatgttcaaccatcttgctcctctgctccagccccattgttttaatgcacatgtatttgtttatttctgatagtaaaca

SEQ ID NO: 661203 - DNA, 616 bp, Homo sapiens
gcagacaatcttaaactcataccaacagcagatatttagctcagtatgcctaggaagaaaatatttcactttctccttcaccttgccctactgcccatgagtctmgttccagttttctttttttctgaaacagggtctcactctgttgcaggttagagtgcagtggctcgatcttgacttactgcagtcctcacctcctgagctcaagcaatcctcctgcgtcagcctcctgtgtagctggaactacaggtgtgtgctgccacacctggccatgttttacatttttttgtagagacagggatctcactttgttgcctaggctggtctcaaactacctggctcaagtgatcctccagtcttcacctcccaaatttcagggattacaggtatgaaccactgtacctggctaggtctagttttttaaaggaaaaaaaaagttgcctaggaaaataatgtagagtatttcaggtactgggaaactgacatcagaatcaaagagagaatgtgcttattattttccaactctggaaaattagtctgtggtgggaaattcaatgggagatgattagaaacgaagctgtgagaatagctgactgtcccaattaacaacgtaaaa

SEQ ID NO: 661204 - DNA, 616 bp, Homo sapiens
gcagacaatcttaaactcataccaacagcagatatttagctcagtatgcctaggaagaaaatatttcactttctccttcaccttgccctactgcccatgagtctagttccagttttctttttttctgaaacagggtctcactctgttgcaggttagagtgcagtggctcgatcttgacttactgcagtcctsacctcctgagctcaagcaatcctcctgcgtcagcctcctgtgtagctggaactacaggtgtgtgctgccacacctggccatgttttacatttttttgtagagacagggatctcactttgttgcctaggctggtctcaaactacctggctcaagtgatcctccagtcttcacctcccaaatttcagggattacaggtatgaaccactgtacctggctaggtctagttttttaaaggaaaaaaaaagttgcctaggaaaataatgtagagtatttcaggtactgggaaactgacatcagaatcaaagagagaatgtgcttattattttccaactctggaaaattagtctgtggtgggaaattcaatgggagatgattagaaacgaagctgtgagaatagctgactgtcccaattaacaacgtaaaa

SEQ ID NO: 661205 - DNA, 704 bp, Homo sapiens
atataaaggatatgtaaagatgaatctgtatattatatgtttaatgtaaaactatgtgtctagcatacagaaacagaaatttcatgtcagaaatattwaaaaaaattaattcttgtgaacttgttaaaaagccccctaatatcatctttctgtgatgaacccaaaagtctcttgcaaaggttaagtttttaataatagctgcttttatgaaggagattatgatataactaagattactgatttaatataaaaggacacagaatagcagatgagagggaaatgtggcacaagtctgcaatgggtttcccatggataacagaattcactattttataacgagtctgctctccttgataacagagccacaaccattcagggtgtttagaaatttattggaggcatttctttgattattgctaaaatattaggggatgttgctgcattagtagatgaagaccaagaatattagacattttataaaccatggagctgtcctgcaaaacaaacaaaattctccaatgctgcacaaattttgaattttcctcattgccatttaaaatcatctgagcctagaatctaactccattatacatataaccaaaatatttttagtggttgtaatatacattgaattttcctggaattcatctataaatcaagggaacgttttctactgttttgctcaacttttaccaaaagttgtt

SEQ ID NO: 661206 - DNA, 704 bp, Homo sapiens
atataaaggatatgtaaagatgaatctgtatattatatgtttaatgtaaaactatgtgtctagcatacagaaacagaaatttcatgtcagaaatattaaaaaaaattaattcttgtgaacttgttaaaaagccccctaatatcatctttctgtgatgaacccaaaartctcttgcaaaggttaagtttttaataatagctgcttttatgaaggagattatgatataactaagattactgatttaatataaaaggacacagaatagcagatgagagggaaatgtggcacaagtctgcaatgggtttcccatggataacagaattcactattttataacgagtctgctctccttgataacagagccacaaccattcagggtgtttagaaatttattggaggcatttctttgattattgctaaaatattaggggatgttgctgcattagtagatgaagaccaagaatattagacattttataaaccatggagctgtcctgcaaaacaaacaaaattctccaatgctgcacaaattttgaattttcctcattgccatttaaaatcatctgagcctagaatctaactccattatacatataaccaaaatatttttagtggttgtaatatacattgaattttcctggaattcatctataaatcaagggaacgttttctactgttttgctcaacttttaccaaaagttgtt

SEQ ID NO: 661207 - DNA, 558 bp, Homo sapiens
cttctgcctggacaccaaggtgtttccacacatcttctgaaatctaggtggaggttcccaaagctcaattcttaacttctgtgcacctgcaggctcaataccacctggaagctgccaaggctttggacttgccccctctgaagccatggcctgaactgtatcttggttcctcttagccatggatggagcagctgagatgcagggcaccaggtcccaaggctgcacacagcaaagggtgtggggggctctgggactggcccattaaaccacttttttctcctagacctccaggtctgtgacrggaggggctgccacgaaggtctctgacatgccctggagacattttcccattatcttggttgtaaacattcagcttcatgttgcttatgcaaatttctgcagtaggcttgtctttctccccagaaaatgggtttttcttttctattgcatcatcgggctgcaaattttccaaatttttatgctctgcttcctcttgaatgttttgccacgtataaactttttctgctagataccctaaatcatctctctcaaattcaa

SEQ ID NO: 661208 - DNA, 558 bp, Homo sapiens
cttctgcctggacaccaaggtgtttccacacatcttctgaaatctaggtggaggttcccaaagctcaattcttaacttctgtgcacctgcaggctcaataccacctggaagctgccaaggctttggacttgccccctctgaagccatggcctgaactgtatcttggttcctcttagccatggatggagcagctgagatgcagggcaccaggtcccaaggctgcacacagcaaagggtgtggggggctctgggactggcccattaaaccacttttttctcctagacctccaggtctgtgacgggaggggctgccacgaaggtctctgacatgccctggagacattttcccattatcttggttgtaaacattcagcttcatgttgcttatgcaaatttctgcagtaggcttgtctttctccccagaaaatgggtttttcttttctattgyatcatcgggctgcaaattttccaaatttttatgctctgcttcctcttgaatgttttgccacgtataaactttttctgctagataccctaaatcatctctctcaaattcaa

SEQ ID NO: 661209 - DNA, 533 bp, Homo sapiens
acaataacagcattcaaaaagcataggaaaaatgacttttatagtggtaaatactgtagctaaaagcctaaaacaaatcactaaactgcactaatctgtaagctttgaggtctgaggaactcactgtcagctaagagaagggcagagctcgcaatcaactgtcctcytgaacacaacaagattgtcaagaaaagaaatccgctgatagagtctcctcaattaactctgcgcgaaaaatgcccaagcaatactcggagggaactcaacaaaaatcaggccaaatatgacatttaactatcaatctttccaagaccagcgattgttaatcagcctagggagaaataaagtagtacacctgacagtggttattttttataagcacatacctactattttacatggaggaatataactacttctgcagaatatgtagtagaaccatttcttcatttttacaggttactaattatgaataagcttaaaatatcctatcattccaaaaataaattatatgagagagagtcctcagtatg

SEQ ID NO: 661210 - DNA, 596 bp, Homo sapiens
ttggcctcccaaagtgctgggattacaagagtgagccaccgtgcctggctcttagattatatttcctataaatgtgattttaagctgtgcaatagactgtgttccccccaaaatttgcatgataaaacctcatcccaatgtgatggcttttgagaggtaattaggtcataagagtggggcccttaggaatggaactggtgccctcataagaagagaccagaaagctggctaggtctcttcccaccctcttcccaccgtcgaaagatgtaataggtacacagtttgcaagccagaagaggtygctcaccagaacctaactatgctggctccctgatcttagacttccagcctccggaactgtgagaaatgaatttctgttgtgtataacgcatccagtctatggtattttgttacagcagcctgaactgataaggaggtacagtgtaggaaattttagaaaatattagagaatgtaagaccactgatctacatgaacacagtaatagttttctactttctgcagcaggaagaacaagccgtgttctctgattgatttctagacttgttaaactgctacaccagcttaactctgagca

SEQ ID NO: 661211 - DNA, 596 bp, Homo sapiens
ttggcctcccaaagtgctgggattacaagagtgagccaccgtgcctggctcttagattatatttcctataaatgtgattttaagctgtgcaatagactgtgttccccccaaaatttgcatgataaaacctcatcccaatgtgatggcttttgagaggtaattaggtcataagagtggggcccttaggaatggaactggtgccctcataagaagagaccagaaagctggctaggtctcttcccaccctcttcccaccgtcgaaagatgtaataggtacacagtttgcaagccagaagaggttgctcaccagaacctaactatgctggctccctgrtcttagacttccagcctccggaactgtgagaaatgaatttctgttgtgtataacgcatccagtctatggtattttgttacagcagcctgaactgataaggaggtacagtgtaggaaattttagaaaatattagagaatgtaagaccactgatctacatgaacacagtaatagttttctactttctgcagcaggaagaacaagccgtgttctctgattgatttctagacttgttaaactgctacaccagcttaactctgagca

SEQ ID NO: 661212 - DNA, 596 bp, Homo sapiens
ttggcctcccaaagtgctgggattacaagagtgagccaccgtgcctggctcttagattatatttcctataaatgtgattttaagctgtgcaatagactgtgttccccccaaaatttgcatgataaaacctcatcccaatgtgatggcttttgagaggtaattaggtcataagagtggggcccttaggaatggaactggtgccctcataagaagagaccagaaagctggctaggtctcttcccaccctcttcccaccgtcgaaagatgtaataggtacacagtttgcaagccagaagaggttgctcaccagaacctaactatgctggctccctgatcttagacttccagcctccggaactgtgagaaatgaatttctgttgtgtataacgcatccagtctatggtattttgttacagcagcctgaactgataaggakgtacagtgtaggaaattttagaaaatattagagaatgtaagaccactgatctacatgaacacagtaatagttttctactttctgcagcaggaagaacaagccgtgttctctgattgatttctagacttgttaaactgctacaccagcttaactctgagca

SEQ ID NO: 661213 - DNA, 600 bp, Homo sapiens
tcaaattaagtgttctaaaatttgaagtgagaacagaaaaagcataagaaaatggatcaataatattgacaataaaaaaatgacatatactcagtacttaccatgttttaattactgtcttaagggcttaatggtttaatatatattagttgacatatctccaaacactctttgaagactgtatggttgtttctaaagctgatatttgctcagttcagatcagtactaagtaactcagttgagaatttcacctagatctgtagttctgcaaacttttgatcctaagaattatgatatmtttctttacaaggaaatacaaaccgtgaaatataaatgtgattttaacagatggattgatgcctcacactaacacacctgcctagaatgtaagggaagattattacaattgcatattgtgtagttttgactttagtccttttgtttaaatctaataaactgttgctagcagtcttcaaatgaacaacacagatgcatttatgtaacagtgccccatgaccaaaagattatgtggtgtcttactatctatcctgttctacaatattaggtttgtgctagtcatacagctgttgctaaatagag

SEQ ID NO: 661214 - DNA, 600 bp, Homo sapiens
tcaaattaagtgttctaaaatttgaagtgagaacagaaaaagcataagaaaatggatcaataatattgacaataaaaaaatgacatatactcagtacttaccatgttttaattactgtcttaagggcttaatggtttaatatatattagttgacatatctccaaacactctttgaagactgtatggttgtttctaaagctgatatttgctcagttcagatcagtactaagtaactcagttgagaatttcacctagatctgtagttctgcaaacttttgatcctaagaattatgatatctttctttacaaggaaatacaaacygtgaaatataaatgtgattttaacagatggattgatgcctcacactaacacacctgcctagaatgtaagggaagattattacaattgcatattgtgtagttttgactttagtccttttgtttaaatctaataaactgttgctagcagtcttcaaatgaacaacacagatgcatttatgtaacagtgccccatgaccaaaagattatgtggtgtcttactatctatcctgttctacaatattaggtttgtgctagtcatacagctgttgctaaatagag

SEQ ID NO: 661215 - DNA, 600 bp, Homo sapiens
tcaaattaagtgttctaaaatttgaagtgagaacagaaaaagcataagaaaatggatcaataatattgacaataaaaaaatgacatatactcagtacttaccatgttttaattactgtcttaagggcttaatggtttaatatatattagttgacatatctccaaacactctttgaagactgtatggttgtttctaaagctgatatttgctcagttcagatcagtactaagtaactcagttgagaatttcacctagatctgtagttctgcaaacttttgatcctaagaattatgatatctttctttacaaggaaatacaaaccgtgaaatataaatgtgattttaacagakggattgatgcctcacactaacacacctgcctagaatgtaagggaagattattacaattgcatattgtgtagttttgactttagtccttttgtttaaatctaataaactgttgctagcagtcttcaaatgaacaacacagatgcatttatgtaacagtgccccatgaccaaaagattatgtggtgtcttactatctatcctgttctacaatattaggtttgtgctagtcatacagctgttgctaaatagag

SEQ ID NO: 661216 - DNA, 600 bp, Homo sapiens
tcaaattaagtgttctaaaatttgaagtgagaacagaaaaagcataagaaaatggatcaataatattgacaataaaaaaatgacatatactcagtacttaccatgttttaattactgtcttaagggcttaatggtttaatatatattagttgacatatctccaaacactctttgaagactgtatggttgtttctaaagctgatatttgctcagttcagatcagtactaagtaactcagttgagaatttcacctagatctgtagttctgcaaacttttgatcctaagaattatgatatctttctttacaaggaaatacaaaccgtgaaatataaatgtgattttaacagatggattgatgcctcacactaacacacctgcctagaatgtaagggaagattattacaattgcatattgtgtagttttgactttagtccttttgtttaaatctaataaactgttgctagcagtcttcaaatgaacaacacagatscatttatgtaacagtgccccatgaccaaaagattatgtggtgtcttactatctatcctgttctacaatattaggtttgtgctagtcatacagctgttgctaaatagag

SEQ ID NO: 661217 - DNA, 607 bp, Homo sapiens
cacctgcctagaatgtaagggaagattattacaattgcatattgtgtagttttgactttagtccttttgtttaaatctaataaactgttgctagcagtcttcaaatgaacaacacagatgcatttatgtaacagtgccccatgaccaaaagattatgtggtgtcttactatctatcctgttctacaatattaggtttgtgctagtcatacagctgttgctaaatagagactccccagaactgtctgagttaatattcactccaatcattctgctgccctgtggagtattagagcatgacagggctgtagtcacatttcaaaggcaraggacttcactgttcttagatcacacacacctaatatgctagtcctacataacttgctcttttttttctttgctattagtctgctcttgctatttgcagtcatttgcccttcaggttttacatctttctcatacatttcaaaatttaattaattttgtgtattttgtaactttaaatcacttacgttatcttgcaataaagaggagtagggacttcagaagtatttatttccttaaaatatgttttctgtacattagggggcactcatgtttttgagggaa

SEQ ID NO: 661218 - DNA, 607 bp, Homo sapiens
cacctgcctagaatgtaagggaagattattacaattgcatattgtgtagttttgactttagtccttttgtttaaatctaataaactgttgctagcagtcttcaaatgaacaacacagatgcatttatgtaacagtgccccatgaccaaaagattatgtggtgtcttactatctatcctgttctacaatattaggtttgtgctagtcatacagctgttgctaaatagagactccccagaactgtctgagttaatattcactccaatcattctgctgccctgtggagtattagagcatgacagggctgtagtcacatttcaaaggcagaggacttcactgttcttagatcacacacacctaatatgctagtcctacataacttgctcttttttttctttgctattagtctgctcttgctatttgcagtcatttgcccttcaggttttacatctttctcatamatttcaaaatttaattaattttgtgtattttgtaactttaaatcacttacgttatcttgcaataaagaggagtagggacttcagaagtatttatttccttaaaatatgttttctgtacattagggggcactcatgtttttgagggaa

SEQ ID NO: 661219 - DNA, 607 bp, Homo sapiens
cacctgcctagaatgtaagggaagattattacaattgcatattgtgtagttttgactttagtccttttgtttaaatctaataaactgttgctagcagtcttcaaatgaacaacacagatgcatttatgtaacagtgccccatgaccaaaagattatgtggtgtcttactatctatcctgttctacaatattaggtttgtgctagtcatacagctgttgctaaatagagactccccagaactgtctgagttaatattcactccaatcattctgctgccctgtggagtattagagcatgacagggctgtagtcacatttcaaaggcagaggacttcactgttcttagatcacacacacctaatatgctagtcctacataacttgctcttttttttctttgctattagtctgctcttgctatttgcagtcatttgcccttcaggttttacatctttctcatacmtttcaaaatttaattaattttgtgtattttgtaactttaaatcacttacgttatcttgcaataaagaggagtagggacttcagaagtatttatttccttaaaatatgttttctgtacattagggggcactcatgtttttgagggaa

SEQ ID NO: 661220 - DNA, 607 bp, Homo sapiens
cacctgcctagaatgtaagggaagattattacaattgcatattgtgtagttttgactttagtccttttgtttaaatctaataaactgttgctagcagtcttcaaatgaacaacacagatgcatttatgtaacagtgccccatgaccaaaagattatgtggtgtcttactatctatcctgttctacaatattaggtttgtgctagtcatacagctgttgctaaatagagactccccagaactgtctgagttaatattcactccaatcattctgctgccctgtggagtattagagcatgacagggctgtagtcacatttcaaaggcagaggacttcactgttcttagatcacacacacctaatatgctagtcctacataacttgctcttttttttctttgctattagtctgctcttgctatttgcagtcatttgcccttcaggttttacatctttctcatacatttcaaaatttaattaattttgtgtattttgtaactttaaatcacttacgttatcttgcaataaagaggagtagggacttcagmagtatttatttccttaaaatatgttttctgtacattagggggcactcatgtttttgagggaa

SEQ ID NO: 661221 - DNA, 538 bp, Homo sapiens
gacacaataacagcattcaaaaagcataggaaaaatgacttttatagtggtaaatactgtagctaaaagcctaaaacaaatcactaaactgcactaatctgtaagctttgaggtctgaggaactcactgtcagctaagagaagggcagagctcgcaatcaactgtcctcttgaacacaacaagattgtcaagaaaagaaatccgctgatagagtctcctcaattaactctgygcgaaaaatgcccaagcaatactcggagggaactcaacaaaaatcaggccaaatatgacatttaactatcaatctttccaagaccagcgattgttaatcagcctagggagaaataaagtagtacacctgacagtggttattttttataagcacatacctactattttacatggaggaatataactacttctgcagaatatgtagtagaaccatttcttcatttttacaggttactaattatgaataagcttaaaatatcctatcattccaaaaataaattatatgagagagagtcctcagtatggg

SEQ ID NO: 661222 - DNA, 423 bp, Homo sapiens
aaattgtgccaccaaggtcacaaagattttatccaatgtttacttataaaagttttatatttagtggccacttacattatcggtcctttttgatgttttagcaattataaataataaacaattccattaaaataaattttatttcacctagtgttcaaagttacacttttgctttccttaggtttatttatcttagaatatcttcttccattcctttactatcaagctttctttatctaccactgtcctctttcaaaatgtgttcayggttgttacataatgctggatcttgtttttacaaatttttaggatttctcttttggtaaatgaatttaacttatttacatttattttaatcagtgaatagatacaatattcttctgtacatatgcaaattgcataagtttgactttttgtgcttca

SEQ ID NO: 661223 - DNA, 423 bp, Homo sapiens
aaattgtgccaccaaggtcacaaagattttatccaatgtttacttataaaagttttatatttagtggccacttacattatcggtcctttttgatgttttagcaattataaataataaacaattccattaaaataaattttatttcacctagtgttcaaagttacacttttgctttccttaggtttatttatcttagaatatcttcttccattcctttactatcaagctttctttatctaccactgtcctctttcaaaatgtgttcatggttgttacataatgctggatcttgtttttacaaatttttaggatttctcttttggtaaatgaatttaacttatttacatttattttaatcagtgaatagatacaatattcttctgtacatatgcaaattgyataagtttgactttttgtgcttca

SEQ ID NO: 661224 - DNA, 595 bp, Homo sapiens
ctaccactgtcctctttcaaaatgtgttcatggttgttacataatgctggatcttgtttttacaaatttttaggatttctcttttggtaaatgaatttaacttatttacatttattttaatcagtgaatagatacaatattcttctgtacatatgcaaattgcataagtttgactttttgtgcttcacttaacatctcatttataaaggtaatttaaaaccttttcctctattacttkcttgacataatgaaaatttccttcctgtcaaaatacctggcatatattcatttcctgattgttccctcagtactccaacctccaaaaccatcatttggtattgttttattcagttatgcattcttttgaatatttttgtttattatacatttagataatagtataattcagtaagttatttactgacccttacacacaatttacgtattagcatcttcttagatttatcacaatccttttttggttatttcctccatttataattttgattagcttcttttgttgtaaaacttttgagactttttgtgttattaaaaataactttatattatatgtttatttaaaattagtttgcta

SEQ ID NO: 661225 - DNA, 595 bp, Homo sapiens
ctaccactgtcctctttcaaaatgtgttcatggttgttacataatgctggatcttgtttttacaaatttttaggatttctcttttggtaaatgaatttaacttatttacatttattttaatcagtgaatagatacaatattcttctgtacatatgcaaattgcataagtttgactttttgtgcttcacttaacatctcatttataaaggtaatttaaaaccttttcctctattacttgcttgacataatgaaaatttccttcctgtcaaaatacctggcatatattcatttcctgattgttccctcagtactccaacctccaaaaccatcatttggtattgttttattcagttatgcattcttttgaatatttttgtttattatacatttagataatagtataattcagtaagttatttactgacccttacacacaatttacrtattagcatcttcttagatttatcacaatccttttttggttatttcctccatttataattttgattagcttcttttgttgtaaaacttttgagactttttgtgttattaaaaataactttatattatatgtttatttaaaattagtttgcta

SEQ ID NO: 661226 - DNA, 595 bp, Homo sapiens
ctaccactgtcctctttcaaaatgtgttcatggttgttacataatgctggatcttgtttttacaaatttttaggatttctcttttggtaaatgaatttaacttatttacatttattttaatcagtgaatagatacaatattcttctgtacatatgcaaattgcataagtttgactttttgtgcttcacttaacatctcatttataaaggtaatttaaaaccttttcctctattacttgcttgacataatgaaaatttccttcctgtcaaaatacctggcatatattcatttcctgattgttccctcagtactccaacctccaaaaccatcatttggtattgttttattcagttatgcattcttttgaatatttttgtttattatacatttagataatagtataattcagtaagttatttactgacccttacacacaatttacgtattagcatcytcttagatttatcacaatccttttttggttatttcctccatttataattttgattagcttcttttgttgtaaaacttttgagactttttgtgttattaaaaataactttatattatatgtttatttaaaattagtttgcta

SEQ ID NO: 661227 - DNA, 595 bp, Homo sapiens
ctaccactgtcctctttcaaaatgtgttcatggttgttacataatgctggatcttgtttttacaaatttttaggatttctcttttggtaaatgaatttaacttatttacatttattttaatcagtgaatagatacaatattcttctgtacatatgcaaattgcataagtttgactttttgtgcttcacttaacatctcatttataaaggtaatttaaaaccttttcctctattacttgcttgacataatgaaaatttccttcctgtcaaaatacctggcatatattcatttcctgattgttccctcagtactccaacctccaaaaccatcatttggtattgttttattcagttatgcattcttttgaatatttttgtttattatacatttagataatagtataattcagtaagttatttactgacccttacacacaatttacgtattagcatcttcttagatttatcacaatccttwtttggttatttcctccatttataattttgattagcttcttttgttgtaaaacttttgagactttttgtgttattaaaaataactttatattatatgtttatttaaaattagtttgcta

SEQ ID NO: 661228 - DNA, 568 bp, Homo sapiens
tatcttgtggaggtatcataatgaatttatttgcattaagtatctcattctgttttgtttcatagtgatataatcctataatggttaggtctgctcttttacgatgtgtatagatttagtatttagaccaatctgagtactttctctattattttatgtatttgtctttttaatattccttgcatttactccctctgacwgtatttataaaatctttttctattttattctttaattatttgtaagatattctagtagtggctagtattatgctattttaattttaatttttttcttttaacttttattttaggttcaagggatatatgtgcatgtttgttatgtggtaaattgtgtgtagcaggaatttggtgtactggtaattttgtcacacaggtagtcagcataatatcctataggtagtttttttaatcttcatcttcctgtcaccctctactctcaactaggcctcagtgtctgttgttcccatctttgtgtgcttgtgtactcaacgtttagctccatcatgcagtatttagttttctgttcctgcattaattcacttagg

SEQ ID NO: 661229 - DNA, 596 bp, Homo sapiens
agctccattcatgttgctgcaaagggcatgatcttattttttttttaaatagctgcatagtactccattgtaaatatgtgcgaagttttctttatccagcccacygctgatgagcatctaggttgatttcttgtcattgctcttgtgaaaagggcggcgatgaacatatgtatgcatctgtgtttatggtagaacaatttatatttatttgggcatatacccagtaatgggattgcagggtctaattgtagttctattttaaattctttaagaaatctccagaccctttccaaagtggctgaactaatttacattcccactagcagtgtataagcattctcatttctctgcaacctcatcaacatctgttattttttggctttttaataataaccattctgattggtgtgagatgatatctcattgtagttttaatttgcatttccctagtgattagtgatattgagaatttttttgtatgctttttggccatgtgtttgtcttcttttgagaggtgtctattcatgtcctttgactattttctaatgaggttattttttgtttgtttgtttttgttttttcttgttgatttcttt

SEQ ID NO: 661230 - DNA, 596 bp, Homo sapiens
agctccattcatgttgctgcaaagggcatgatcttattttttttttaaatagctgcatagtactccattgtaaatatgtgcgaagttttctttatccagcccactgctgatgagcatctaggttgatttcttgtcattgctcttgtgaaaagggcggygatgaacatatgtatgcatctgtgtttatggtagaacaatttatatttatttgggcatatacccagtaatgggattgcagggtctaattgtagttctattttaaattctttaagaaatctccagaccctttccaaagtggctgaactaatttacattcccactagcagtgtataagcattctcatttctctgcaacctcatcaacatctgttattttttggctttttaataataaccattctgattggtgtgagatgatatctcattgtagttttaatttgcatttccctagtgattagtgatattgagaatttttttgtatgctttttggccatgtgtttgtcttcttttgagaggtgtctattcatgtcctttgactattttctaatgaggttattttttgtttgtttgtttttgttttttcttgttgatttcttt

SEQ ID NO: 661231 - DNA, 567 bp, Homo sapiens
acactcactggtcacctgtggggtaaaaattgtctcgtgattttagaaatctgccttttgtgagtagatcattcctgtacacttgcagcacagtagcttcatggggcaataaactgcacctcccttctcagatcaaagctcatacataatgtatcttgtccatgaggctcttcctgatttcagcttatcatgttctgttcaagtagtacttcccccccatatttgtactgtactttttaatgcttagttatggaatcataggatctttgagtgtgtgaaggactctagattggaatactttgtcatccccaaacgttggtgtatcattttaaaggagcccagactcagtatggagattactcttattaaccttcaacattagaacagagcctcaggagcccaggacctttcttttctgtataatgctcatctctgcagaggaaggaacatgcwcccagtgagccctcagcaatgcctgagtgaaatctttgaacttagagaacttagagaacccagtcaatttacaatttattccagttgtagtttaaattaaaaatgaggaaatag

SEQ ID NO: 661232 - DNA, 586 bp, Homo sapiens
atctattatattatttgagattaagttcccattttcttctaacttctctgttaggaactcacagtctgaaacgaatcatgataacaggggaatgaatcccaagacagttaaggagattgctcaacagaattgagccatattaaatggatttaaatccccagctccagataaattaacattgtaaggacatttctacaatcttaaactttttccaactccaygaaggatattttaacacaataaaggcgtctaatttttaacatttcaaaataaaaatagttcatcttccatccacaaatgtgctccgatttctcttttttaaagcctagtctcttagttcacatgattctcccagtcatgtgttcctccttgtatcagctgtctttcccatttgatgaatctgtatggccaatcaagtgtcagatagtgctagcaagccttccaccatttcttaaatctcctagatcctgtgcaatttcactcagataattctagttcagtcttcagttaaattaatgcaataacttcttattgagcatgtattatgtactaggaaatatgattaataatatactgcttatgctat

SEQ ID NO: 661233 - DNA, 586 bp, Homo sapiens
atctattatattatttgagattaagttcccattttcttctaacttctctgttaggaactcacagtctgaaacgaatcatgataacaggggaatgaatcccaagacagttaaggagattgctcaacagaattgagccatattaaatggatttaaatccccagctccagataaattaacattgtaaggacatttctacaatcttaaactttttccaactccatgaaggatattttaacacaataaaggcgtctaatttttaacatttcaaaataaaaatagttcatcttccatccacaaatgtgctccgatttctcttttttaaagcctagtctcttagttcacatgattctcccagtcatgtgttcctccttgtatcagctgtctttcccatttgatgaatctgtatggccaatcaagtgtcagatagtgctagcaagccttccaccatttcttawatctcctagatcctgtgcaatttcactcagataattctagttcagtcttcagttaaattaatgcaataacttcttattgagcatgtattatgtactaggaaatatgattaataatatactgcttatgctat

SEQ ID NO: 661234 - DNA, 539 bp, Homo sapiens
tttttactagactatttatcactgcaaatattccaaatctaattacataagcactcaggggtgagttaaattttggcctctaattgctgttcattgggaatgtggtaattttccctcaagaattggattgatttatcttcttcagtctttccccttggcttgtttcaaagtgctaaaatgctgcttccacaaatatctcactgtcctattatcaccggtatttctaagactttcttacaccagcaacatattctttcagactcattttttcttgacttccatttcttctgaataatcttttttctatgtttctttcattttctccacacagcctatgattcactttcatttcttgttttccattctacaaccatttgctcctactattactttgcttcctgtagtggtattttattttctgtttccagtcgtcatgtaaaggatcatttcttttgctttaawgacctcaacgtttagagtgaaacatcttattcccgagtaagccccatgaggaaaacaaatactcttgaaaacatcac

SEQ ID NO: 661235 - DNA, 411 bp, Homo sapiens
aactaacattttgttacttatcagtctcagcctcaaggggtttttacagattcccctctctcccacttggaatgttgcttgcctcartgtaagaaaccccagcagtcctctcattagacctcctggaggagatccaaggtacccagctaacccaccagatagatatgtgagtgaggccatctggaactaactacctaattcttgtgaaacttctagattgtgacaactacatgaaagaccccagagagagaaagcagtagaaacaggcctgttgattccagcccacattttagaatcctgagaaaattaaatggttgatactttaagctacttagatggaggctggtttgttatgccacaagaaatatctgatacactttattatcgattatctactgtgctactattaga

SEQ ID NO: 661236 - DNA, 411 bp, Homo sapiens
aactaacattttgttacttatcagtctcagcctcaaggggtttttacagattcccctctctcccacttggaatgttgcttgcctcagtgtaagaaaccccagcagtcctctcaytagacctcctggaggagatccaaggtacccagctaacccaccagatagatatgtgagtgaggccatctggaactaactacctaattcttgtgaaacttctagattgtgacaactacatgaaagaccccagagagagaaagcagtagaaacaggcctgttgattccagcccacattttagaatcctgagaaaattaaatggttgatactttaagctacttagatggaggctggtttgttatgccacaagaaatatctgatacactttattatcgattatctactgtgctactattaga

SEQ ID NO: 661237 - DNA, 411 bp, Homo sapiens
aactaacattttgttacttatcagtctcagcctcaaggggtttttacagattcccctctctcccacttggaatgttgcttgcctcagtgtaagaaaccccagcagtcctctcattagacctcctggaggagatccaaggtacccagctaacccaccagatagatatgtgagtgaggccatctggaactaactacctaaytcttgtgaaacttctagattgtgacaactacatgaaagaccccagagagagaaagcagtagaaacaggcctgttgattccagcccacattttagaatcctgagaaaattaaatggttgatactttaagctacttagatggaggctggtttgttatgccacaagaaatatctgatacactttattatcgattatctactgtgctactattaga

SEQ ID NO: 661238 - DNA, 411 bp, Homo sapiens
aactaacattttgttacttatcagtctcagcctcaaggggtttttacagattcccctctctcccacttggaatgttgcttgcctcagtgtaagaaaccccagcagtcctctcattagacctcctggaggagatccaaggtacccagctaacccaccagatagatatgtgagtgaggccatctggaactaactacctaattcttgtgaaacttctagattgtgacaactacatgaaagaccccagagagagaaagcagtagaaacaggcctgttgattccagcccacattttagaatcctgagaaaattaaatggttgataytttaagctacttagatggaggctggtttgttatgccacaagaaatatctgatacactttattatcgattatctactgtgctactattaga

SEQ ID NO: 661239 - DNA, 567 bp, Homo sapiens
gatgtcagtatgaccttgacattccccttatcccgtaaaaggaaaagagcaaaagaatactagaattttaaataaaataatacatgtaagatatactcatcacctagcacatagtggtcaagtaatatattattcttaatatttttattgataatatttttagttaaagggtattaatatataggggtaataacttgrataatttccatttggggatgaactgacagcttagaacctttagttttataagtacgatgacatgtttttctctaaaagcgttactttactttctttcattcaaacttcatctgccccatttctgtccagtcacatcgaattctgaagtctttccatggtttagctgtaatggtttggcagttcagtacttaggcatcacttaatatcttctggaaacttgaaaatttgagagtgcaattctgcttcaagattatttttgaaagtgccacatccctggatgtagccttggagaactcgacagcttaaatattaatgtgaagaagttcctgtttatcactatgcttggtttactatcttttaaaagcatgt

SEQ ID NO: 661240 - DNA, 556 bp, Homo sapiens
cctatgcagctgagtcacctgatgtaggccaacargcaagaacatgacaagatagatacggaaagaagaaatgtggcaaagggagctgtactagagggtgtagtttccccccaaaattcacatccttctcagaatctcagaatgtgagctgatttggaaaatggtcgcaacagatgaaattagttaagatgaggtcatattggagtagcatgggcccttaatccgataggactgatgtcttttttaattttcattttcaagttttattgcttagcagagcaaggaaacagatggggatcaacatgctctagtaaggcacagcaaaagacacacacacaggggaggacatcttgtgacaatggagtcagagattagagtgatgtattgacaagttcaggaatgtcaaggcttgccagcaacaccagaggctaagagaaaggcatagaacacagtctcccagatcctccagagacagcatggtcctgctgtgtatcttgactgcatacttctggcctccagaactgtaagataaaaaaaaatattctgttataagcca

SEQ ID NO: 661241 - DNA, 556 bp, Homo sapiens
cctatgcagctgagtcacctgatgtaggccaacaggcaagaacatgacaagatagatacggaaagaagaaatgtggcaaagggagctgtactagagggtgtagtttccccccaaaattcacatccttctcagaatctcagaatgtgagctgatttggaaaatggtcgcaacagatgaaattagttaagatgaggtcatattggagtagcatgggcccttaatccgataggactgatgtcttttttaattttcattttcaagttttattgcttagcagagcaaggaaacagatggggatcaacatgctctagtaaggcacagcaaaagacacacacacaggggaggacatcwtgtgacaatggagtcagagattagagtgatgtattgacaagttcaggaatgtcaaggcttgccagcaacaccagaggctaagagaaaggcatagaacacagtctcccagatcctccagagacagcatggtcctgctgtgtatcttgactgcatacttctggcctccagaactgtaagataaaaaaaaatattctgttataagcca

SEQ ID NO: 661242 - DNA, 576 bp, Homo sapiens
cctttctctttctttctttctctttctttcttttttctttctttctcttttctttctttcttcctctccctctctttctttccttccttccttccctccttcctttctttcctccttccctctctccctccctctcttctctttctttttttcttcctttctccttccttccttcttccctcccttgctgcatgcctctctccctccctccttccctccttccctcctttctttctttcttccttccttccttccttctttccttccttccttctttctctctttccttttctttgccttytttctccacctttcccttcttccttccctcccttcctccctttcttccctctttcttgtgttctccctccaactacttctgtgtattttaagtatgtcaattgtgccccagttatagcctaaggctaaggttctcttttccttattagtttttgtctttttctgtgctttcttttttttcctgtctggagaaggctgcattaggggtctcatagccacatatcattaaaatgggaattattacattaaattttctaaacttttagtttaagtcat

SEQ ID NO: 661243 - DNA, 521 bp, Homo sapiens
attgttgccaacccagctatccatcttgcatcatcttactttattttaaaaatccttttatttttaaaatctcaaaatatttcaaaattctaaaagcagagcataagaccccatatatcctgccattcaatttcaataaatattaacatttgctatacattttaatgtgtcctatcccacttaatttttaaaatcttcatggaattgtaatatacacagaaaagtgcatatatcataagtgcatatatcattagtgtacagtaaaatgaattttctcaaactgaacacactgatgtaaccagcacacagacaaaacaaacagaatattgtcagcactttcaaattcctcccccattcmcgttccttcctcagttaacactcaccacaccaacacaggaacatattatattattctatttttcaagagtcttttaaagcagataacactcatcctgtcattttattattaagtctaatctaaagacaaaccactctctagtcacaccatgctttaccttcct

SEQ ID NO: 661244 - DNA, 452 bp, Homo sapiens
tcttccaccttaacctccagattatctaggactatagggaggcaccatcacttctggctaaatatatatatatatatagtagagacttgctctcactttgtttcccagactggtcttgaactcygggcctcaagcaattctccaacctcagcatcccaaagtgctgtgattaccagcatgagccactgcatatggcttataatgaccgttatttttaatcttaatttttaaactaccaaaagaatttgcactcagaaacaatgacttccagcatgcagaattgaaaattacctgtcttctttattttgcagatagtgtataattgccatttatttttctaatttagcaaacatttaaaatatatgcatttcttaaaattatttggctcgaagatatttattttgtctaaatcaatttttgaagaaaatacttaaaagcataagtttccaggg

SEQ ID NO: 661245 - DNA, 452 bp, Homo sapiens
tcttccaccttaacctccagattatctaggactatagggaggcaccatcacttctggctaaatatatatatatatatagtagagacttgctctcactttgtttcccagactggtcttgaactccgggcctcaagcaattctccaacctcagcatcccaaagtgctgtgattaccagcatgagccactgcatatggcttataatgaccgttatttttaatcttaatttttaaactaccaaaagaattygcactcagaaacaatgacttccagcatgcagaattgaaaattacctgtcttctttattttgcagatagtgtataattgccatttatttttctaatttagcaaacatttaaaatatatgcatttcttaaaattatttggctcgaagatatttattttgtctaaatcaatttttgaagaaaatacttaaaagcataagtttccaggg

SEQ ID NO: 661246 - DNA, 452 bp, Homo sapiens
tcttccaccttaacctccagattatctaggactatagggaggcaccatcacttctggctaaatatatatatatatatagtagagacttgctctcactttgtttcccagactggtcttgaactccgggcctcaagcaattctccaacctcagcatcccaaagtgctgtgattaccagcatgagccactgcatatggcttataatgaccgttatttttaatcttaatttttaaactaccaaaagaatttgcactcagaaacaatgacttccagcatgcagaattgaaaattacctgtcttctttattttgcagatagtgtataattgccatttatttytctaatttagcaaacatttaaaatatatgcatttcttaaaattatttggctcgaagatatttattttgtctaaatcaatttttgaagaaaatacttaaaagcataagtttccaggg

SEQ ID NO: 661247 - DNA, 529 bp, Homo sapiens
agcttgctaaccagatgcggaagaatgcaacttgactcctcctacctttcaccatatccaaaaatgaactcaagatgrattaaagatttaaatgtaagatttcaaactttaagaatcctagaagaaaacctaggaaacagcattcttaacattgtctttgggaatgaatttatgaccaagtcctcaaaagcaattgcaacaaaaacaaaaatggacaaatgggacctaactaaactaaagaacttctgcatagtaaaagaaactattaacagaataaatggacagcctacataatgggagagactatttacaagccgtgcatctaaaaaatgatttataaggaacttaaatgattaaacaagcaaaaactaataaccccattaaaaagtgggcaaaagacatgaacagtcacttctccaaagaagacatacaagcagtcacaagtacatgaaaaaatgctcaacatcagtaatcatcagagatatgcaaatcaaaaactcaatgagaatctcaccaccagtcagaatgg

SEQ ID NO: 661248 - DNA, 529 bp, Homo sapiens
agcttgctaaccagatgcggaagaatgcaacttgactcctcctacctttcaccatatccaaaaatgaactcaagatggattaaagatttaaatgtaagatttcaaactttaagaatcctagaagaaaacctaggaaacagcattcttaacattgtctttgggaakgaatttatgaccaagtcctcaaaagcaattgcaacaaaaacaaaaatggacaaatgggacctaactaaactaaagaacttctgcatagtaaaagaaactattaacagaataaatggacagcctacataatgggagagactatttacaagccgtgcatctaaaaaatgatttataaggaacttaaatgattaaacaagcaaaaactaataaccccattaaaaagtgggcaaaagacatgaacagtcacttctccaaagaagacatacaagcagtcacaagtacatgaaaaaatgctcaacatcagtaatcatcagagatatgcaaatcaaaaactcaatgagaatctcaccaccagtcagaatgg

SEQ ID NO: 661249 - DNA, 529 bp, Homo sapiens
agcttgctaaccagatgcggaagaatgcaacttgactcctcctacctttcaccatatccaaaaatgaactcaagatggattaaagatttaaatgtaagatttcaaactttaagaatcctagaagaaaacctaggaaacagcattcttaacattgtctttgggaatgaatttatgaccaagtcctcaaaagcaattgcaacaaaaacaaaaatggacaaatgggacctaactaaactaaagaacttctgcayagtaaaagaaactattaacagaataaatggacagcctacataatgggagagactatttacaagccgtgcatctaaaaaatgatttataaggaacttaaatgattaaacaagcaaaaactaataaccccattaaaaagtgggcaaaagacatgaacagtcacttctccaaagaagacatacaagcagtcacaagtacatgaaaaaatgctcaacatcagtaatcatcagagatatgcaaatcaaaaactcaatgagaatctcaccaccagtcagaatgg

SEQ ID NO: 661250 - DNA, 603 bp, Homo sapiens
caatggtggaaaaagaaaatgtggtacatatacaccatggaataatacatagccataaaaaaagaatggaattatattctttgaggcaacatggatgtagctgaaagccattatcctaagmacaggatgaacacagaattaacgcaggaacagaaaaccaaatgctgcatattcttacttataagtgagaactaaacatcgagtgttcatggatgtaaagatggcaacaatagacattggggactgctagagagggaagggaacttgggggctctgcattgaataactattgggtactatggtcactacctggggacagaattatttgtatcccacacctcagcatcacacaatgtacccatgtaataaacttgcacatgcaccccctgaatgtaaaataaaaagttgaaattatatttacccattatatttattaggaagaagtcaaatgaagaaagtgcacttccacataataagataaatatgctctaaaactaaacaaaacaaacaaagagaaatcattaaagcacccggaaaaaagatgggttacctacaaagaatttaaaataggattgaagccagattcctcaacagaaaaaaatt

SEQ ID NO: 661251 - DNA, 603 bp, Homo sapiens
caatggtggaaaaagaaaatgtggtacatatacaccatggaataatacatagccataaaaaaagaatggaattatattctttgaggcaacatggatgtagctgaaagccattatcctaagcacaggatgaacacagaattaacgcaggaacagaaaaccaaatgctgcatattcttacttataagtgagaactaaacatcgagtgttcatggatgtaaagatggcaacaatagacattggggactgctagagagggaagggaacttggggsctctgcattgaataactattgggtactatggtcactacctggggacagaattatttgtatcccacacctcagcatcacacaatgtacccatgtaataaacttgcacatgcaccccctgaatgtaaaataaaaagttgaaattatatttacccattatatttattaggaagaagtcaaatgaagaaagtgcacttccacataataagataaatatgctctaaaactaaacaaaacaaacaaagagaaatcattaaagcacccggaaaaaagatgggttacctacaaagaatttaaaataggattgaagccagattcctcaacagaaaaaaatt

SEQ ID NO: 661252 - DNA, 606 bp, Homo sapiens
taagcagactctgagtaacaagacagattatttcaggctgcagtccactgggagttattctagtcttggggaaagactgggaggtttctaaaccccgattttcacagtaatgatgtcattatggagtttataatattgtagggaatggtcataatggaaaagggttgcacttccttagacaagtatatttagataaatctatgcacaacaaaggaagaacaaaattagtcaaaggttgagctttgattaattgggacwaagacctaaaactctaaaatgcatacagcatctctgttgtacaggtggtacaaaccagtgtgaaacatgaaccaaatgaaaaatataagttactcaaaggatgagagagagtcacaataatggcgtagagtaacccatgaaaaacaaggaacgagttcagaactgaaataaaagcattaactatgccaattcttgataataacttaactcattctgagataccaagttagactgacaactgtgaaattacttggcagttgtatctctccatattacacagtactgtgtgtctttgcttaaggtgatttgtttagcaaagtcaatattgctcatttcacataatgggaa

SEQ ID NO: 661253 - DNA, 608 bp, Homo sapiens
gaatgtggacaagacctggcataatctagatgcctagaggctactaataatgaaataagagagcctagggattgcttcagctccagaagccacagtacagcagaggcacaccagagggagggagccattacaaacttctgaaaaaagaaacaggacaatctctctaatggagaatttacatgaacaagtccagagaagatgcatacacagttttagaggcccccagaacatctgatagtttaggatctcttcccttcgaggttttcactaaaatttaaggttactaaagataagaattctagttaagacayaattctgtatatgaaatgtgccagaaagatgtgttttattgagaaaaagaataattttttctaattcagaagttatctaaagattaattcacattacagacttgaaaaggttatttattaaaacagtaggaaagaggagagagaggtgaagaaagttatggatatgaagatgtatttttggcatggaaggttgtaaagaaaaaaaaattaggacaaaacaaaaagtccaagaatgttatagatagtttgtataagtcatatgtagtttttcttctgtttctctgtatgtgtatctct

SEQ ID NO: 661254 - DNA, 582 bp, Homo sapiens
tgttttattgagaaaaagaataattttttctaattcagaagttatctaaagattaattcacattacagacttgaaaaggttatttattaaaacagtaggaaagaggagagagaggtgaagaaagttatggatatgaagatgtatttttggcatggaaggttgtaaagaaaaaaaaattaggacaaaacaaaaagtccaagaatgttatagatagtttgtataagtcatatgtagtttttcttctgtttctctgtatgtgtatctctgtgcactttcagagaaaataaaagttgaaaaagtttagatagtaaaatattatttaaaacctgatagaaaatkggagaagtgtctaattaaccctgcttatagctaaagctcttagtcttgatgaaggtaaattaagaaatactgtaataaaatacattggcagtttggagattctttttaaacatagttaggcatgaagccagattgaacatggagccaaatttcacataaatgtctgcattgcattgtttaatattattcttgattgtctgcataggtaaaatcatttgagttttatttacatgtacatatata

SEQ ID NO: 661255 - DNA, 645 bp, Homo sapiens
tgtttaatattattcttgattgtctgcataggtaaaatcatttgagttttatttacatgtacatatatatgaaaccattgatttttttaggttctaatggaaggcttttatttgattctatttatkaatagccattttgttcgctttgcattttcagcaacttctcagtggttctatgtatctaaaatgcctaagctacctttgtcagcctgcaaaaaattgatagacgacaccagccacttaaaatttgattgattttgtttacttctggtgatctagagggtatgagctttaaggttcccagcaaaatgtaaaataaaaataaaagacttttgtttacaagttctaagccaaaatagtacattattttgttatttgttaggtgagaataaaaatgtttaaatcatgtttatttccaagataattcaatttaatcaataatttgagttgtttttgaatcttttcctttaagtaatgaagaaaatctgtgatataagtacacagtgttagtgttctgcaaagattggccttgtctgtaaggaaattatgttcattgggatttctctcaaactgattttgttgtctttgctaatattgaaatgtagtgatgttcacttggattaagtagtaataaacatatgtgag

SEQ ID NO: 661256 - DNA, 578 bp, Homo sapiens
tagaaaattggagaagtgtctaattaaccctgcttatagctaaagctcttagtcttgatgaaggtaaattaagaaatactgtaataaaatacattggcagtttggagattctttttaaacatagttaggcatgaagccagattgaacatggagccaaatttcacataaatgtctgcattgcattgtttaatattattcttgattgtctgcataggtaaaatcatttgagttttatttacatgtacatatatatgaaaccattgatttttttaggttctaatggaaggcttttatttgattctatttatgaatagccattttgttcgctttgcrttttcagcaacttctcagtggttctatgtatctaaaatgcctaagctacctttgtcagcctgcaaaaaattgatagacgacaccagccacttaaaatttgattgattttgtttacttctggtgatctagagggtatgagctttaaggttcccagcaaaatgtaaaataaaaataaaagacttttgtttacaagttctaagccaaaatagtacattattttgttatttgttaggtgagaataaaaa

SEQ ID NO: 661257 - DNA, 546 bp, Homo sapiens
cacttaaaatttgattgattttgtttacttctggtgatctagagggtatgagctttaaggttcccagcaaaatgtaaaataaaaataaaagacttttgtttacaagttctaagccaaaatagtacattattttgttatttgttaggtgaraataaaaatgtttaaatcatgtttatttccaagataattcaatttaatcaataatttgagttgtttttgaatcttttcctttaagtaatgaagaaaatctgtgatataagtacacagtgttagtgttctgcaaagattggccttgtctgtaaggaaattatgttcattgggatttctctcaaactgattttgttgtctttgctaatattgaaatgtagtgatgttcacttggattaagtagtaataaacatatgtgagacttttagtgatttttttatcccaagacatttatcactgatgtggcttcatgtatgtacttgaaaacaaaatatatgcaagtgttgcactggtttgaagattttaatggtggaaattgcctaatcagttgtcagtact

SEQ ID NO: 661258 - DNA, 523 bp, Homo sapiens
cacacaccgaggagcttcataagcttggccaaatctagactaacattctggaatcctatctgtcagaagaaattggtaagttagaatcttatgctttcggcttttataattgtggtagaaatttgcttccagtcaagacttatacaatggagaagtctccaaacataggaaaaggcacagatactaggcaggcccccaaatacaaaaatatctgttatgcatataatatatttattttcaaaaagctttatagaaatattgagtgaattttatttaagtctctaagatatagccttagtcaaataacaaagtgtgaaaaaatctttagacacacgtattaataggggtgcagcttaattactgcatgatatggytcctgtacacctgttttgattaccaaatagggtaattaaataaacaattaattgagtaatatcactgtgaatgattcagagtgatatgtattaacacatttgttttcagggatatcaatgtgtaacagtgtaatttttaaggtgggagg

SEQ ID NO: 661259 - DNA, 525 bp, Homo sapiens
cccaacagttttcaactacatcatgctgtcttgcactgtaataaaaaacaataatgaaagcacatacctctcttttcacaagggcaatgccttcatcccagtggctgtacattcgtaaagaacgaaatgattttagtcattctggacccatagttgctgctgctaaacagcacttctttttagcactctaaaaatttagactttaaaaagtctttgagtttacctccaaaaggagttgccccccacaggaactttagagataactgtcctaycttctgaagaaatggtcagttagcttcgcacatttaacacacacacacttcagaatcttgatggacatatatatctgagcaagttccagagtatcatacaataaaattgtatgatgacacaggttaaaggacagatacatctttctagttggggtaaactttaaagaaattgctgaggctttattacacacccattccaggactacttttctttctgcaccactgttcctccacctagaacccacacaatagc

SEQ ID NO: 661260 - DNA, 613 bp, Homo sapiens
taaaatatttaaaataatatttttacgttgctcatttaggtgtattgcattgggggtggatagtgaaatatagatgaaaggatgtgatcacatttaactctgcaaaataaaaaattgacaagcacttattagtttataggcattaggagctaggacagactttagctgttgtatttctaataacttaaaatgcatgtaattaaataatgatttggggaaaactttcatatayactatgtatgtagtgctattattaaaactgtaaatttaatttgattgtgtcatggcttaattgctacagttttcattggtaatacacatctgagaatgttctcagagcttaagattatgcttctatctgtgtccggtagtaaatatatctgtatgggcagataacgtggtgtttatcaagagtttagagcacattttcaaaattttattttcttgaaaaaattatagattccctgggccccacattaaaattctgattaatgagatctgagatgagtcataaaatagtacagagtattcatgtgtgtatactttcttcttgttgtgctggtgctggtggttgggaagaaagagaatatattgatattaagcaatacagaag

SEQ ID NO: 661261 - DNA, 669 bp, Homo sapiens
cagttgttcttgtagagacttgattgcactctgttggctgcgaggctgagaaattaagtaaccccagagagtaagaaattgagcacctccattatttgactctgcctcttccccagggaagagaatggaattttgacttcacagggaagactggctagttgttgccttctgtctccttagattctactactaacagttgtaaatactgtcagttacaacattttactgtagcgtataaattaactcataatacaggctttaggaacatgctawgatttttcttcctgaataagccacatcatcaattgattttcctagtgtcttttaaatactcaatgaaataacaacactgaagattactaaacacacagaaaaacaattatccaatgaaaatcacttttgcttaatattttcagcaaattgtttttcctaaaaatagttgggaggttattattcatttagtggaattgaaagtttatattgtaccatgaaaaaagtcagaaaataaatgtaataagaaaatagatcatcctggctcggcatggtggctcatacctgtaatcccagaactttgggaggctgagacaggcagatcacttgagtccaggagtttgagaccacctaggcaacatggcaaaaccccctagtctctacaaaaattagtcaggc

SEQ ID NO: 661262 - DNA, 523 bp, Homo sapiens
attttatgtgcttcagaacatatgaatttgtcaaaatctgttttttatgcatactgagaacttctggttgagaatacattttatgaaggaacaaatagattatctagggacaataatcacttgaataatatatgccaaagataggttagttagtgttatacttgacacccatctgttcctctactcttagtatgcatgagtatacctttaactttctccaaaccaacctacgaatatgtcaaaggtgtagttatttatgcactatcttgttcctaaaagatagaaaatttacaattcataggaatatataaaataaacaatagcctatagaagaaattggtgatacaggaaaagatatgtaaaacacgggcaggaatgcgaaatgaagtctaaaatgaarctaatacaaaaaaaaaacataaagcataccacctcataatataaatataatgttcttagtgattaaagtcatttctctttatggcaacttaaatgaactttagatttctctttggaggaatac

SEQ ID NO: 661263 - DNA, 581 bp, Homo sapiens
tatcagttaatatgtgtgtagtaagatgataaactgaaatatttatgagctttctttacctgtattgtcagaaacacctacatcatctgtagaagaacaaggtgcattatggaagaaatgcaaagagaaagacctaatgaacaatctgtttcagaactccaaaatatcttctgaaggccacatgagtacaattattctgaatagcaaagcttttgcattaaaaaagtatttggaagaaaaatatgtctttgaagattaaaaaaaaagtcatgttctttgattaatgggaaataagcacaaaataagatcagcccagggagagtaggtgagcatcgtcaacttgggaggtggcaagaactgtatggtctgtagggctggcagtgaaggggtggaatctgagtgaccatgtgsagagacaggtggcactgagatatttctctatgcgctttttctcattatcagtgagttgagcagaagttgagacatccacagatcatcccctcttataaaagttagcatggcattttattttgtttgagaaatgtttgtttagttttgtatttagctcacttcatattcaa

SEQ ID NO: 661264 - DNA, 566 bp, Homo sapiens
gtagcacagtatcatctgtttcaacaaatgtgacaagttcatctactggtttaaaatatacaaacacatagttaattgctctcctttcagaaaacatattggttgttttcaggtgttgctaagaaaaatcaggctaagattaacattactataatttctccttatatgtatatgtacaacagttgcttaaggatttattccaggagttgaattatggtgtcataagatatacgtatcttttacttctaccagataatgtcaaatcattttccaaaggtatcatatcagattacattataccagcaattgttctacattctcacacttagtattgttagactttttaaaattttctctctggtgggtgtaaaattgtattatattgtgattgtgaaaaagtattttatggctgggtgtggtggctcacacctgtaatcccagcacttygggaggccaaggtgggcggatcacctgaggtcgggagtcgcgaccagcttgaccaacatggagaaaccacatctctactaaaaatacaacattagccgggcatggtggctcatgcctgt

SEQ ID NO: 661265 - DNA, 531 bp, Homo sapiens
agccattggcctgtggcttccacaggcaactgttggctttcacagtatcagcagccatagcagaggtggttttaggcaactggttatagcaattgattatggcaatcatggtgtttgtgctggtaaccggcaacgaatggtgccttctgtggtgactaggtcatacttggggacagaaggaagtaagttcagaagagcacaggttttggaggctggtaaccagcaaagggctgaagttttctgcagtagtgcctgccccggcatagaccaccagatctccctatagtacctgatttcttcccccatttttcctaatctcgttattattttcactttgttttgtttctctaatccacgtagaaattttgtaacccaattactggcattaaattcttgtctsttatttccctttaactgactgtaccttgaattatatattaattatatatctacagatttggggggttttctatttagagtatcttataatatgcttattatgaaacacttgtttcttccttttaaatcttg

SEQ ID NO: 661266 - DNA, 583 bp, Homo sapiens
tccagtagtatctcctcaaatactacatattctaaaagttcctcatatttactttttattattgtaataaatgtgttgactgtgtgctagtcttagatatgaagckttaacaagtagcttttacttgggctaaacacaaccagtttaatatacgattttttaaattaacttgtgaatatgtcctcctatattacctttgacaaagaagtagtgactgaatgctcatggtatttttggattgactagaattactgcgtttgaagacacttaaagaatcatttgttgccagtctggagagaggttttcactatgatgtttgtatttacatctatcttgttcaatacttcaaatcaacaatttagatgaatgatttgtcatacctattagatttcagatttaacaagagaacatcaagtgggctaggttcaaaattaaaaaaaaaaacctgtctatatggaatgagacagtttgattttagcagcagagtgtataaaaagccttagaacttttatttggctgaaatctaaatgttagtcattagtgggatatgattgcttgaaaatacagatttaggttatattct

SEQ ID NO: 661267 - DNA, 583 bp, Homo sapiens
tccagtagtatctcctcaaatactacatattctaaaagttcctcatatttactttttattattgtaataaatgtgttgactgtgtgctagtcttagatatgaagctttaacaagtagcttttacttgggctaaacacaaccagtttaatatacgattttttaaattaacttgtgaatatgtcctcctatattacctttgacaaagaagtagtgactgaatgctcatggtatttttggattgactagaattactgcgtttgaagacacttaaagaatcatttgttgccagtctrgagagaggttttcactatgatgtttgtatttacatctatcttgttcaatacttcaaatcaacaatttagatgaatgatttgtcatacctattagatttcagatttaacaagagaacatcaagtgggctaggttcaaaattaaaaaaaaaaacctgtctatatggaatgagacagtttgattttagcagcagagtgtataaaaagccttagaacttttatttggctgaaatctaaatgttagtcattagtgggatatgattgcttgaaaatacagatttaggttatattct

SEQ ID NO: 661268 - DNA, 583 bp, Homo sapiens
tccagtagtatctcctcaaatactacatattctaaaagttcctcatatttactttttattattgtaataaatgtgttgactgtgtgctagtcttagatatgaagctttaacaagtagcttttacttgggctaaacacaaccagtttaatatacgattttttaaattaacttgtgaatatgtcctcctatattacctttgacaaagaagtagtgactgaatgctcatggtatttttggattgactagaattactgcgtttgaagacacttaaagaatcatttgttgccagtctggagagaggttttcactatgatgtttgtatttacatctatcttgttcaatacttcaaatcaacaatttagatgaatgatttgtcatacctattagatttcagatttaacaagagaacatcaagtgggctaggttcaaaattaaaaaaaaaaacctgtctatatggaatgagacagtttgattttagcagcagagtgtataaaaagccttagaacttttatttggctgaaatctaaatgttagycattagtgggatatgattgcttgaaaatacagatttaggttatattct

SEQ ID NO: 661269 - DNA, 529 bp, Homo sapiens
tctagagaatccagtgaattttagcaaatgcaaccatgtttgctaaagctgagatagagcacacacataggatttcaggagatcaaaataagagccactatttcatcactgttattatgtgacggtgctatgggcaatacatggaagctaaatgtaattcygttcatttctttcttattttttctagtctctaattttatgagctcctagtaagctataaagtcttctgggaaaatgctagttcattttaatggaaatatgcaaataaaaagaaagcactgttagaaactatatatatatatatgtacagaaactattatatatacaattatatattatatatgtgctatatatatatatatctgtataatacacacacacacactgagaagtatcacataatttggcattatccagcaatcaatttttgactgctgcttttgtcctgtgtaggatttcaggcttgaatcctaaaaggaaatatttctcaatattatctatattattttatttaaaataattataacct

SEQ ID NO: 661270 - DNA, 529 bp, Homo sapiens
tctagagaatccagtgaattttagcaaatgcaaccatgtttgctaaagctgagatagagcacacacataggatttcaggagatcaaaataagagccactatttcatcactgttattatgtgacggtgctatgggcaatacatggaagctaaatgtaattccgttcatttctttcttattttttctagtctctrattttatgagctcctagtaagctataaagtcttctgggaaaatgctagttcattttaatggaaatatgcaaataaaaagaaagcactgttagaaactatatatatatatatgtacagaaactattatatatacaattatatattatatatgtgctatatatatatatatctgtataatacacacacacacactgagaagtatcacataatttggcattatccagcaatcaatttttgactgctgcttttgtcctgtgtaggatttcaggcttgaatcctaaaaggaaatatttctcaatattatctatattattttatttaaaataattataacct

SEQ ID NO: 661271 - DNA, 584 bp, Homo sapiens
atatatatatatctgtataatacacacacacacactgagaagtatcacataatttggcattatccagcaatcaatttttgactgctgcttttgtcctgtgtaggatttcaggcttgaatcctaaaaggaaatatttctcaatattatctatattattttatttaaaataattataaccttatctttgtacttttacatctttaaaaaaataaagaatcgtatacagtcaaaccattttcattataaagaaatatcctgaataacaataaatggaaaaaactgggagtgttagagagctcatataaagtttataatgggagttacraaaaggattggaaagctgtcatcatttgctaacacattctgcaatgactgcttaaaatcaagttaggttttttttttttttttgaaatcacatttctgtgtcactcctgatatatcattttagctaccctctttggttctgcttattttattatgatgcaatcatatttgctttcattttacagaagtatgacagccctgggaaaaatactgagaattctaacaaagtaccgataatgcaataggaaaaagaaggaaat

SEQ ID NO: 661272 - DNA, 584 bp, Homo sapiens
atatatatatatctgtataatacacacacacacactgagaagtatcacataatttggcattatccagcaatcaatttttgactgctgcttttgtcctgtgtaggatttcaggcttgaatcctaaaaggaaatatttctcaatattatctatattattttatttaaaataattataaccttatctttgtacttttacatctttaaaaaaataaagaatcgtatacagtcaaaccattttcattataaagaaatatcctgaataacaataaatggaaaaaactgggagtgttagagagctcatataaagtttataatgggagttacaaaaaggattggaaagctgtcatcatttgctaacacattctgcaatgactgcttaaaatcaagttaggttttttttttttttttgaaatcacatttctrtgtcactcctgatatatcattttagctaccctctttggttctgcttattttattatgatgcaatcatatttgctttcattttacagaagtatgacagccctgggaaaaatactgagaattctaacaaagtaccgataatgcaataggaaaaagaaggaaat

SEQ ID NO: 661273 - DNA, 584 bp, Homo sapiens
atatatatatatctgtataatacacacacacacactgagaagtatcacataatttggcattatccagcaatcaatttttgactgctgcttttgtcctgtgtaggatttcaggcttgaatcctaaaaggaaatatttctcaatattatctatattattttatttaaaataattataaccttatctttgtacttttacatctttaaaaaaataaagaatcgtatacagtcaaaccattttcattataaagaaatatcctgaataacaataaatggaaaaaactgggagtgttagagagctcatataaagtttataatgggagttacaaaaaggattggaaagctgtcatcatttgctaacacattctgcaatgactgcttaaaatcaagttaggttttttttttttttttgaaatcacatttctgtgtcactcctgatatatcattttagctaccctctttggttctgcttattttattatgatgsaatcatatttgctttcattttacagaagtatgacagccctgggaaaaatactgagaattctaacaaagtaccgataatgcaataggaaaaagaaggaaat

SEQ ID NO: 661274 - DNA, 632 bp, Homo sapiens
ggtggcaggcacctgcagtctaagctactcaagaggctgaggcaggagaatcacttgaacatgattcaagtggaatcatgttccacttgggaggtggaagttgcagtgagctgagattgtgtcactgcactccagcctgggcaacagagcaagactccatctcaaaaaaataatagtaataaataaaataataaaataaaataactaaaagaaaacaaaaaaatctttgtgactgtgttagttcattctcacactgctataaggaactacttgagacttggtaatttatgaagaaaagaggcttaattaactcacagttctgcaggcttaataggaagcatgtctgggaggccacaggaatcttacaaccatggcggaaggtgaggaggaagcaagcaccttcttcacrtggcagcaggagagagagggcgagagaacgggggaagtgctacacactttcaactgatgagatcttgtggaaattctatcagaagaacagcaagggggaagtccacccccatgattcaatcacctcccaacagctccctctgtcaacactgggaattaaaattagacgtgaaatttgggtggggaaacagagccaaatcatatcagtgacttcgggccttata

SEQ ID NO: 661275 - DNA, 614 bp, Homo sapiens
tggctagtgcttttgccatgctgagtatttttaatagcttccctggttgaagcaaaacagttatatatttagagggggagcacaggaaaatcactgtcccaaaaggagcatattttcagaccagaaaatccayaagtggcaccttttttacattgcagctctccttagtagtagaatctggctatgcctttgagccatttcttagtaacatgacttgaactgctgtagaggtcacctggaggttcttggcctttcctgagataagagagcaaataagtgttcaaacaatctaagtaaaagtattgcataggaaccaggagcatgcatttagcttcaaaataggataataatagttttgatatcctaggattattgggagaattaaacgagataaggtgtaatgtactaaacacagtgtctttaacacccattacatattcaatgaatactattatgtgaaacaattgcagacccgggtaatgaagtattgattttcagctatagaagcacgtatttcctgagttgatggctaatggattttttttatttcttgaggaactttctgggaataaaaatggacctatcagtatccctatatttaaacttcaggttat

SEQ ID NO: 661276 - DNA, 546 bp, Homo sapiens
gggtttcaaatggactattggaaatggttcaactaatacttaacactaattatctcaaaagtaccttgtaaataccagtttataccacatcattcaccaaaaatgtgccactgaaaaccctctgaagcagtaattctctctttgtatggcatttatggagaattaatgaccagctaagtctgtggactttgatcagagccagtagttattaatgcataggaaaaattttacactcttgttcatttttccaaaggtatcatccttcgatgtgtgcagcatacaaagccctagacactgcattatatgtgagctccctgttttttttgagcagacygatagactctcttgtgactacagctccagatttcaagcaactgaaaagctaagtaacaggatctgtcaggaggatgtttacaggtttaagccatgttgtcaatacgtagaaaataaagtgagattcagacaaactaaaacacaaaaccaccctagaacctgcaaaaaggagaaatgctttcatgtcttcatattaagtccattgtattatag

SEQ ID NO: 661277 - DNA, 583 bp, Homo sapiens
ttaggtgaagaacatagaacatctgtgtaaaagcataagtaactatatgtacaaacatatacacatacaaaatacatgcatctatacagtgtatatgtatatatacatatatgatatatgttacatttttatatatttatagattgtatatatatataaaacaacaaccctgcaaggtgtagttactattcctatttcatagacgaggaaattgaggttcacagaagttaactaggtkgtctaatggcacacagcaagcaagcaacagagctggaataccaactcgagcagtctggctccagagttgatcttcttacccactctgctgaacacttacaaggtgtcaggatcactgtgctaagtagggcgcatgcatcaattatggcaagaaaagagcaggagagaaagccgagaaaactgtgtgctaaagcaatcaggacaattttcacagagaaagtggggcttgagctagcacgaagggaaaagttggactcagacttacaagggtagggtgttcaggctgggggaatggaatgaactaggcacaggagtaggggcatgcatgtcatggtagcataatttg

SEQ ID NO: 661278 - DNA, 556 bp, Homo sapiens
gagggggattaagagaagagtgaagcctcttgggatcccaggacagtcctggggaggtgtggcaggtgctcaaatgaagaatgcaaagtgagaatgatgaccaggaagaaggaagaagaaaaggctgcaaggttccactggaaacaaacttctagcacagaattttccccatggtttgccccaccttcttgttactactggagtaaataaatgagttgtctttctatctctctgtggtttccattgctggatcctgagctgttaggtctagttggaaaccactcttcaccttaactctgtgtgcatggcctctactattgrtctatttcccccgtggcaggactcagaagcccaaggctctggtcctgtgggatgtgcaatactttatcaggtttgtgataaacaaacccaggtggtagttcacccaatgcctatggctgatttcatacaaatcttcggcagttgaaagttgccaatatgacttcaggtatttacccccaaggattcatcaaatccttcctgttccaaacagtcactatcctctttcaagagaagc

SEQ ID NO: 661279 - DNA, 521 bp, Homo sapiens
acactgtaataaaccttgtttaagcaagtggaacttcagcccaaaaagtttatgtaaaatcatgtgattctggcaccacctggtggyagtatattccaaaagaagaggatgtgtgtgtgtgtgcgtgtgtgtgtgtgtatgtgtgtgtgtgcatttttattaataactaattcacgcatttatttaccaactatttaataggcatctgctaggtgttgctcatataaatctttaaatctctcttggaagacaggaaataaaatatagtatctaaaacagggtccctatctccaaggaaaaaaaatccacagttaaattatgactatcagaatgtaagaaaataatctgttcttgtttagaagtttcctgaaagtatttatgcccctagaactttcaagcaagaagtcctcaggagtgtattgataaacattgtctatgaagtcaccacattgtaagcagttttcaaggaaaataactgcagtggttttaaaatgtcctcaaattcctgacacttcttcctc

SEQ ID NO: 661280 - DNA, 525 bp, Homo sapiens
acagttaaattatgactatcagaatgtaagaaaataatctgttcttgtttagaagtttcctgaaagtatttatgcccctagaactttcaagcaagaagtcctcaggagtgtattgataaacattgtctatsaagtcaccacattgtaagcagttttcaaggaaaataactgcagtggttttaaaatgtcctcaaattcctgacacttcttcctccaaaaggttggccaggtgtagtggctcacacctgtaatcccagcactttgggaggcccaggtgggtggatcacctgaggccaggagtttgagaccagcctggacaacatggtgaaaccccatctctagtaaaaatacaaaaaattagccaggcatggtgatacatgcctgcaatcccagctactcacttgaacctgggaggcagaggttgcagtaagccaagattgtgccactgcacttcagcctgggcaacagagcaagactctgtctcaaaaaaaaaaaaaaaagaggctaatttccctttccttaaat

SEQ ID NO: 661281 - DNA, 525 bp, Homo sapiens
acagttaaattatgactatcagaatgtaagaaaataatctgttcttgtttagaagtttcctgaaagtatttatgcccctagaactttcaagcaagaagtcctcaggagtgtattgataaacattgtctatgaagtcaccacattgtaagcagttttcaaggaaaataactgcagtggttttaaaatgtcctcaaattcctgacacttcttcctccaaaaggttggccaggtgtagtggctcacacctgtaatcccagcactttgggaggcccaggtgggtggatcacctgaggccaggagtttgagaccagcctggacaamatggtgaaaccccatctctagtaaaaatacaaaaaattagccaggcatggtgatacatgcctgcaatcccagctactcacttgaacctgggaggcagaggttgcagtaagccaagattgtgccactgcacttcagcctgggcaacagagcaagactctgtctcaaaaaaaaaaaaaaaagaggctaatttccctttccttaaat

SEQ ID NO: 661282 - DNA, 525 bp, Homo sapiens
acagttaaattatgactatcagaatgtaagaaaataatctgttcttgtttagaagtttcctgaaagtatttatgcccctagaactttcaagcaagaagtcctcaggagtgtattgataaacattgtctatgaagtcaccacattgtaagcagttttcaaggaaaataactgcagtggttttaaaatgtcctcaaattcctgacacttcttcctccaaaaggttggccaggtgtagtggctcacacctgtaatcccagcactttgggaggcccaggtgggtggatcacctgaggccaggagtttgagaccagcctggacaacatggtgaaaccccatctctagtaaaaatacaaaaaattagccaggcatggtgatrcatgcctgcaatcccagctactcacttgaacctgggaggcagaggttgcagtaagccaagattgtgccactgcacttcagcctgggcaacagagcaagactctgtctcaaaaaaaaaaaaaaaagaggctaatttccctttccttaaat

SEQ ID NO: 661283 - DNA, 571 bp, Homo sapiens
atacacacacacagagacacacatagacacacacatacaaacactgtctcacacgcatgcctcccctttcagcagtctgtctttcacacgattgagtgttatttcacagaaaaagggaattctggaagaaagggctaagattgcctgtggattggcgggtaactcctggtgagtcaccagacctcagaaagacagcgcatgaaactgtctgccaaggaggtggagaaccggcccccagaggctcatctgatcctttccctccctcctctgcaatgaaatatcagggaaagggcagtggggtgaattatgtgaatagatgcggtattttatgaaatacaagaagaaaaatgctctaaaacccataatcataaacacagcatatggaaaaatgaaagcgctagttttgagttagaagcatcttttatctactyccactccctccactttctggtcaatattagatacataatcagagaaatgcttaaatttcaccaaaggcttgcttgagttggaagcttgattttttttttttagaagaaattccccaccatccattctactgcaaagattt

SEQ ID NO: 661284 - DNA, 549 bp, Homo sapiens
atcagttttcctggatctccagcttgcagattgtgggacttctcagccccataattgcatgagccaattcctcataataaatctcttcctatatatttccaattggtctgtttccctggagagccctggytaatgcagtgagctttgcacaaagactcaagacaagctgcttactgagggaaaagaattgccagcagagggaagggctaggacaaaagccctaagcagtgggaaagaagaaggaatgaggatacagaaataataaggtcaaggtcatgaagggacttttagcccatgggtaagaactttgactttaactcagaggaactagggagtcattgaaggtctctgagcagaggatgggcctggtctgatttatgactgcagagggaccaattagatgctgttgcagcaatccagataagagatgatgggggcttggccgaggtggccacactatggtggaaagaaagggttggattctggatgtattttgaaagaatgaatgaacgaacaaaactagttcatatgagattctatttgacatta

SEQ ID NO: 661285 - DNA, 549 bp, Homo sapiens
atcagttttcctggatctccagcttgcagattgtgggacttctcagccccataattgcatgagccaattcctcataataaatctcttcctatatatttccaattggtctgtttccctggagagccctggttaatgcagtgagctttgcacaaagactcaagacaagctgcttactgagggaaaagaattgccagcagagggaagggctaggacmaaagccctaagcagtgggaaagaagaaggaatgaggatacagaaataataaggtcaaggtcatgaagggacttttagcccatgggtaagaactttgactttaactcagaggaactagggagtcattgaaggtctctgagcagaggatgggcctggtctgatttatgactgcagagggaccaattagatgctgttgcagcaatccagataagagatgatgggggcttggccgaggtggccacactatggtggaaagaaagggttggattctggatgtattttgaaagaatgaatgaacgaacaaaactagttcatatgagattctatttgacatta

SEQ ID NO: 661286 - DNA, 608 bp, Homo sapiens
taaattacccagtctctggcattttgctatagcagccagaacaaaccaagatagccactatctaattttaaaacaattttgaccaggcattctggttcatgcctgtaacctcagcactttgggaggcagaagtgaaaggatcctttgaggccaggagttcgagaccagcctggccaacatagggagaccctgtctccacaaataatataaaaaattagctgggcagagtggcatgtgcctgtggtcccaactacttgggaggctgagacaggaggatcaccttaaccccaggaggtggaggctgcagtgagctgttactacacaactgcactccagcctgggtgaaagagtgagatcctgtctcaaaaaaagaaattttcatcatcccataaataaattacagtcacactccattctcrcctccccccagcccgagaaacactaatctatttcctatgtctatggatttgcctctggtgaacattttatataaatggaatcatatgtgaccttttgtgttgccttctttaacgttacagaatgttttcaaggttcatccatgtttagcatgtattagtacttctttccttttcatggctgaataatat

SEQ ID NO: 661287 - DNA, 590 bp, Homo sapiens
gatccccaaattagcattccagcttcctactgagcattctgacttctgtctttatattccctggcctaaaagactctccacatgcagtccattttcccctttctctctttcctgccttcacccccatatgcacacatgatttgtgtgacttagtttattcatctgccaagacttagtttagacactatttattccaggaaaccttccctgaccctctttaccatatcttggttagccaccactcctctgtgcaccataactcactgagcttcctccatcatggtgcctttaacaccatttgataatgtgtgtgtgtttgtgtgtgtgtgtgtgtgtgtgtgtattcatctgcataccccactgggctgtattgttttcatgtgtgacttgcttgcccttttaagtccagcacctagaggagataggtgctggccccaatatgcattttcaacaagtatttttgaataaattgagatatcaatttcccctaattttaggtgaggagtgtacctgatacatatacactagcctcattatagtttgtatagataactttgtcttttaatctgwgccatttgcagttttgagat

SEQ ID NO: 661288 - DNA, 566 bp, Homo sapiens
gttgcttttataatcagaaaaacatattttagaagggggaaaataccataatagcttataaggtccttgatacatgctaaatgcttaaccatgcaaatttagttagttggccttatgtcgtaagtccttgctactcaaagtgtggtctttggttcagcagcataagcaacatgtaagagcttgtgagaaaatacagaatctctgggyccaccctagacccactgtatcagaagctgcattttaagaagatctccagatgatgtatgtgcatatttgagacacaaagtttgagaaagcctgctgcaacaagcaatttaactagtagcctagaaaaaaaatgtcctagctctctcaggagagctaccagctagtttctagggagtttgctgtgtagaaatgagtagtccagcaccttcctaaacagcagtgttcaaaaattcatgcatattgaccatctgtcatgcactgagataatcctttgaagtcatacgtgattacactgacttattatttatggatgaataattatttctttaatacattgggttcccccaaaaagcagagcc

SEQ ID NO: 661289 - DNA, 566 bp, Homo sapiens
gttgcttttataatcagaaaaacatattttagaagggggaaaataccataatagcttataaggtccttgatacatgctaaatgcttaaccatgcaaatttagttagttggccttatgtcgtaagtccttgctactcaaagtgtggtctttggttcagcagcataagcaacatgtaagagcttgtgagaaaatacagaatctctgggcccaccctagacccactrtatcagaagctgcattttaagaagatctccagatgatgtatgtgcatatttgagacacaaagtttgagaaagcctgctgcaacaagcaatttaactagtagcctagaaaaaaaatgtcctagctctctcaggagagctaccagctagtttctagggagtttgctgtgtagaaatgagtagtccagcaccttcctaaacagcagtgttcaaaaattcatgcatattgaccatctgtcatgcactgagataatcctttgaagtcatacgtgattacactgacttattatttatggatgaataattatttctttaatacattgggttcccccaaaaagcagagcc

SEQ ID NO: 661290 - DNA, 523 bp, Homo sapiens
tgcatctttttatgccactgcaggagctgaactgcctgctgtgccatgttaattaaaattcagcatcagatctgttatgattgtttcatccttgttctgctctggttgactgggggagaggtggttttgataagagggtgacatcgttcattagggtctaacaagtggcactgtgataaaatggtaagaagttttccaggattacaagctgctctgtctttgatgattttgtttactctgtgtttagctggttttatttcccattaaataatgtgaatttagattcccagataatttcttcaatccttccttcgactcttcttgtttgcttagtacgttgtaaatccggtcaccactgctgtggtgatttactattaaatcactaccgtggcaattacttttataattagttattaacaakcattgttagtattgctcttacaaatttactatttcaatattcaataattacagtttggcctttgtggctcatgctttttcctgtgatactgcaaaataagga

SEQ ID NO: 661291 - DNA, 567 bp, Homo sapiens
cgccctgcttcagctctcgctcagtgggctgcacccactgtcctgcacccactgtccaacacgccccagtgagatgaacccggtacttcggttggaaatgcagaaatcacccatcttctgtgtcactcacactgggagctgtatactgcagctgttcctatttggccaccttgccttagaattcaaaagtatgttcttatatgaatctgtttggcttcctttgttcataggtgttttttcacagataacaaagaaaaactagatgatatatctaatgatgaaaaaaatgaattcctgaacaagataaaacaggtaagaaggcagaagtcatgacttttacattataattacatttcatttttagttaatgtttaaaatatgtgagaaatatagaatttttcaaaaggatgtttttcattgaccaataatatggttgtttgtagtaatttaaaaaattttatctcctcccaaagtactttaattatatyaaagagcaaaggttgtccatgtacagaggaactgttttttggtaacttttcatgtgagtatgggtaccttaggactatc

SEQ ID NO: 661292 - DNA, 583 bp, Homo sapiens
attctttgttatcttgtgagttcttcaacacttctacaaatattttttcatgtagctattttagttgtcctcagatagaaggttgttttgaactattcagcccattgtttccrctaaacttgactttcttacctcgtttgaagcaatttaataagcaaaaaattctgatctcatgtagaacactggtgggtactattttttgtcctcaaatagaaatatttcacaagaagcaagcataatatcaactcaaaaatgttttgaggaagagcttctgaggatgttacattttctatagtttatattctggaaaaggacatactaacgttgctcagcagtcacagtttattcatcccattttgcatttcaatatggattattactctatggttttgcagcagggtttactatttttctatacttaaaaaaatttatagtagaggtctcaaaatatacagttgtatgtttgctatagaattaaatcactcggcatttatggcatattcacggtgggctaagcaatatcccaggtgctctccgagttgccacctgatgcagatggcctcagaggagcagtgaagccagt

SEQ ID NO: 661293 - DNA, 579 bp, Homo sapiens
cctatgtgtatgctgggcacagtggctcacgcctgtaatccagcactttgggaggccaacatggaccaatcgcataagaccaggcatttgataccagcctgggcaacacagggaaaccccatctctacaaaagtacaaaaatyagctgggaaaaaatttgaaaaaaagaaaatcctttgcataaatttagatctagctaccactagcaaaaagacttgctttctattttttaataatttatgtagcaaatagctcatgatctgaactttcaaaactatttttgaaattcttatttgtgtttgcatatttatgtcagccttcaacaaataactctgtttttcatgatagaaatcagaaacagctgacatttatttctcagaaagaatactttctgtcacaaaagagagtagacatcaaaaatatggaagaaggactcatcacactccaggaacttcaacagtatgtttgttgcctttgaaattttttatctttactttctctgcatttattttttaataaatgatagcagtaaatctatgttgatttctaacatactacagaaaaggaagtttagaacta

SEQ ID NO: 661294 - DNA, 610 bp, Homo sapiens
taacaaagaaaaaatgttaatgaaagagttaagcaagtatgaggtaaattttattttgcatctaagaatacttttggatgactacatgagggggagggggaataatatttcatgctattctaatcagttaaatgtaaaataaatatyctagtatgaaagaggctacaatttcattctggatctttcttcttttcctgaagaggaagcagagcaataagaaatattttttcagaaaaaataataataataatcacacttcaaattatgtagaactgttggcaatggccttagagacaggtggagttgtgtaggaagccatttggagctggcttgaaaatagctggggcaagggagattagtaaagtcagtctcagatgtgctctttaaaaagagggtatcatgctgtcttgagaactgccaaaagccaacctgagatagaacagggcatggatgctgggggaggtggagagaaaagccactgaaagtacccagaagtgccaggtccacagaaacacaataaaaaaatgcaccttcccaaggcgatgatattaccctggaggcagccattagcagagcagctgagaacagggatggtggtagaagccttcct

SEQ ID NO: 661295 - DNA, 610 bp, Homo sapiens
taacaaagaaaaaatgttaatgaaagagttaagcaagtatgaggtaaattttattttgcatctaagaatacttttggatgactacatgagggggagggggaataatatttcatgctattctaatcagttaaatgtaaaataaatattctagtatgaaagaggctacaatttcattctggatctttcttcttttcctgaagaggaagcagagcaataagaaatattttttcagaaaaaataataataataatcacacttcaaattatgtagaactgttggcaatggccttagagacaggtggagttgtgtaggaagccatttggagctggcttgaaaatagctggggcaagggagattagtaaagtcagtctcagatgtgctctttaaaaagagggtatcatgctgtcttgagaactgccaaaagccaacctgagatagaacagggcatggatgctgggggaggtggagagaaaagccactgaaagtacccagaagtgccaggtccacaraaacacaataaaaaaatgcaccttcccaaggcgatgatattaccctggaggcagccattagcagagcagctgagaacagggatggtggtagaagccttcct

SEQ ID NO: 661296 - DNA, 557 bp, Homo sapiens
cagagaagcagagctgccaggaaaagggtttattataggacttgaccttctgcaactgtgatatctagttacacagtctggtgaggctgtcagctttacatctggtgctggggcctgaagtcagcagggcaggtacttgggatggaaagaccaacaggaagtgaatggaagcaaaaacaaactagarctcacaggatgagcgagggtggactggaatctgcattggtctctcttttccaacgctccaccttcagggagatgggggacctggatcagaaactggagcctgtcatcactgatctataaatatgcatgtggcttaggaatcagagacaatgagaaaggatctagaaggatctgaagaccgtgtgaaccttactggctgccccactccaacaacctgagcccacaggcaagcaacttgctacactgaacctagtaccccacagtctctttcagagaacggaacaagagaatggcttcttatcacagcagccctgggaacctgagctgcatacaggcaatggaatgaattaatgcatgcacatacaaacttg

SEQ ID NO: 661297 - DNA, 579 bp, Homo sapiens
gataaagcatgtacatatatctttgttccctcataaaactcccaaatatgtatataaaggtttttttttctgaaaaagatacaaatccataagtaccaagacactggaagagataagacatttgctatctgctgatttattatttatttattacctgataatatcaacaaattttgggaagatgtaattggatagaggcagaaagagaaatataaacaccaaaagcctgccaaaaagggcacgatgaaggcaaaaagttctttcccccaaagctgtaaagtcayaggcagtggcatcccctgaaactatgacagctgagatgagtcacagggctaaaggttggttgaaagtctttataaagagcaattagagctccaggtcaaatccccttcttgtgcagttagctgagtgactcctcctcctcaatgctggcaaaagaaactggaccagatggcttcagaccgcaaggcatcagatatggctgagagcagaagacaggtactgtactgagatccccactgagatcccctctgagctcagtttgctgaatgctgccagccagtggtgttgtgaactctt

SEQ ID NO: 661298 - DNA, 579 bp, Homo sapiens
gataaagcatgtacatatatctttgttccctcataaaactcccaaatatgtatataaaggtttttttttctgaaaaagatacaaatccataagtaccaagacactggaagagataagacatttgctatctgctgatttattatttatttattacctgataatatcaacaaattttgggaagatgtaattggatagaggcagaaagagaaatataaacaccaaaagcctgccaaaaagggcacgatgaaggcaaaaagttctttcccccaaagctgtaaagtcataggcagtggcatcccctgaaactatgacagctgagatgagtcacagggctaaaggttggttgaaagtctttataaagagcaattagagctccaggtcaaatcccctycttgtgcagttagctgagtgactcctcctcctcaatgctggcaaaagaaactggaccagatggcttcagaccgcaaggcatcagatatggctgagagcagaagacaggtactgtactgagatccccactgagatcccctctgagctcagtttgctgaatgctgccagccagtggtgttgtgaactctt

SEQ ID NO: 661299 - DNA, 519 bp, Homo sapiens
ccacattctccaatatactttaaattatttctagattactgataatatctaatataatgtaaatgctatgttagtagttgtcatactgtattgtttattatttgtattatttgttgttgttattatttttatttttgtgaatrtattctattcatgtttagtcaaatccacaaatgcggaacccacggatacagagggctgactgtatattttattttgtgaagttgtctcaaggtctggggttcttatcttgaagtccacagacccccttcctagagtccatgaataaatgtggggttgataggtttttctaaggaagaatatctatcctctgctggatacttcagaaattaatttagaatctggctccaaatgtgacctaggcagtataataccctcgtgccctactgtttgaactcagagataatttggggttttctgtttgagcaggaagatgtaaaacaagaattacaacaattacgagatcaagaaagcaaaaaaaacaaagatcattttgaa

SEQ ID NO: 661300 - DNA, 519 bp, Homo sapiens
ccacattctccaatatactttaaattatttctagattactgataatatctaatataatgtaaatgctatgttagtagttgtcatactgtattgtttattatttgtattatttgttgttgttattatttttatttttgtgaatgtattctattcatgtttagtcaaatccacaaatgcggaacccacrgatacagagggctgactgtatattttattttgtgaagttgtctcaaggtctggggttcttatcttgaagtccacagacccccttcctagagtccatgaataaatgtggggttgataggtttttctaaggaagaatatctatcctctgctggatacttcagaaattaatttagaatctggctccaaatgtgacctaggcagtataataccctcgtgccctactgtttgaactcagagataatttggggttttctgtttgagcaggaagatgtaaaacaagaattacaacaattacgagatcaagaaagcaaaaaaaacaaagatcattttgaa

SEQ ID NO: 661301 - DNA, 519 bp, Homo sapiens
ccacattctccaatatactttaaattatttctagattactgataatatctaatataatgtaaatgctatgttagtagttgtcatactgtattgtttattatttgtattatttgttgttgttattatttttatttttgtgaatgtattctattcatgtttagtcaaatccacaaatgcggaacccacggatacagagggctgactgtatattttattttgtgaagttgtctcaaggtctggggttcttatcttgaagtccacagacccccttcctagagtccatgaataaatgtggggttgataggtttttctaaggaaraatatctatcctctgctggatacttcagaaattaatttagaatctggctccaaatgtgacctaggcagtataataccctcgtgccctactgtttgaactcagagataatttggggttttctgtttgagcaggaagatgtaaaacaagaattacaacaattacgagatcaagaaagcaaaaaaaacaaagatcattttgaa

SEQ ID NO: 661302 - DNA, 519 bp, Homo sapiens
ccacattctccaatatactttaaattatttctagattactgataatatctaatataatgtaaatgctatgttagtagttgtcatactgtattgtttattatttgtattatttgttgttgttattatttttatttttgtgaatgtattctattcatgtttagtcaaatccacaaatgcggaacccacggatacagagggctgactgtatattttattttgtgaagttgtctcaaggtctggggttcttatcttgaagtccacagacccccttcctagagtccatgaataaatgtggggttgataggtttttctaaggaagaatatctatcctctgctggatacttmagaaattaatttagaatctggctccaaatgtgacctaggcagtataataccctcgtgccctactgtttgaactcagagataatttggggttttctgtttgagcaggaagatgtaaaacaagaattacaacaattacgagatcaagaaagcaaaaaaaacaaagatcattttgaa

SEQ ID NO: 661303 - DNA, 597 bp, Homo sapiens
taagtgtcaaaacattgaaattttatgtaggtaagctttttattattgttttctttacaggaacaataatccaaacaaatcttgaaccaatctataaacagaaaacctgttatataaattattatctatttttgcaatacatcaaaatactgtattgatgaaaataaatagataacaaaaaacaatatacatcatttctatgtttgctatcagaccccacaagtatgtttgtttttacaattcattataggtgaaaaacaaactgaaacacaacaggtamgtacaattacgccactgttaaggactgcagattacacgtgttaaagcttttcttaataaaatgggaacacattgctaggtacacagaaacatgattttgccctaaagaacagctgaactgttgagagaagcaagggcttcctagcggccttccagtgtagcagataatattaccctgtgtaacagagtattacagagttttgcattttccaagtctgtaagtctaaccataaacaaaacaaagacaaacccaaacattaagatatactgacaatcttgttcccatatatgatagaatagttctcatacactgttaag

SEQ ID NO: 661304 - DNA, 552 bp, Homo sapiens
aaggccaaacagttatccaagttgtaaatgcaaaggaagaattcttgaaggaaatgaaaagtactatttcagtgaacacatgattgataagaaagcaaaacagcctcattgctgatatggagaaagtttcagtggtctggttagaagaccaaaccaaccctaacattcccttaagccaaagcctaatccagaccaaggccctcactctttaattttatgaaggctgagagaggtgaggaagctgcaggagaaaagttggaagctagcagaggttggttcatgagagttaaggaaagaagccttctccatgacataaaaaatgccaggggaagcagcaagtgctaatggagaagctacagcaagttattccaaagatcattgatgaaggtgactacattgcagctggtgactttaagttgaagacaatgttaatttactattcagaacattctagggcccttaagaattatgttaaatctactctactctgtctatgctcaataaatttaacawcaaagcctggataacaggacatctgtttacagcatagtt

SEQ ID NO: 661305 - DNA, 543 bp, Homo sapiens
aggccatgccacaagatgaagtggaaagtttgttcctgctccctctgaactcttctgtatgctcccgtggtctccagggcattctctgtcctcatgcagtgtcttgtctcctctagggaccccttccaacagtaccttcttttccagacaatgcccacattccagtcctttctctttcctatttctaccttttcttcatcaaaatacatttatcccatccattcyttcagggtcttgatgtatgttctgataaagtagtttatggtaagatttaaaaagcaggtcaccacccattgttctgttccttccttagacatttgcattttaactgtggactcctgacatccttaactacctgggcttggaagccaaaagtcttatctcccaaatacacaccacccacctccattgccccccagtggtcaatcccaaagatgacactgttgagacagaatgccctttgcttccctgagttctgtttgaacgtccccacaaatgacacccttggattgtcactgcattgaccaatgactccacgtacca

SEQ ID NO: 661306 - DNA, 579 bp, Homo sapiens
tggatgacaaaaggctatagccactattaaagctacaattatgtagcagttttgtttacttttgtggcatacaacaattttacataacaattataattattaataatgtacactaaattgtatcaacattatagaagtttcccataattttggaacacatactaataacatttatataaataaagtccaaagtaaaccaaatgccacttagtcttctatttgaaacattttcctctattttaatgtcacaattttcagcattattaattagaatcctgcatttaagagcacctgttaaatttgatagctgaktatgaaacaattttcaccaaaatgagacaattgtctgtggatgataaaaatattttaaggcagccacagttaaagacacaattgacaagaaaatttgttacctctgtggcacacagtctgttaacataataattatgatgattactgataacatatactaagttatattagaataacaggagttttgcataatttcagagcatataccaataacgcatttacacaaatatagaccaaagaaagccaaacaccatttcatatttgaca

SEQ ID NO: 661307 - DNA, 390 bp, Homo sapiens
agagtgagacaccatgtcaaaaaataataaataaataaatctatagcttgtttatccacttttaattaaactgacttttaaccatagtgctctttaaaraagaaatcctttcatatttcttattacctgatgttagccatgccaagtggccaatatttttactttctgaactttaccaaaggtaacctcctaggtgcttcaaaggcatggtaaacagtttctttttttataagatttagaatttccgcaaggtagttcaaagaaaggaaaattcaagagaggaaattagaagctaagtatggggggaagaaacctcaataaatggcaaaattacacaaataaaccagaaaggaattattccagaagccaacaattgaaccccggccacca

SEQ ID NO: 661308 - DNA, 420 bp, Homo sapiens
cacagcttggtggagtgagccacagcggctcatgtggcggcactgcgggagctcagctgggtgtgtttggtgtctcctgcagctattgacctgttgtattggcgggacatcaagcagacgggcatcgtgtttgggagtttcctgctgctgctcttctccctgacccagttcagcgtggtgagcgtcgtggcctacctggccctggccgcactctcagccaccatcagtttccgcatctacaagtctgttttacaagcagtgcagaaaaccgacgaaggccaccctttcaagtgagtgcctcagctgaggagccctcacccactgaccaggggcttttaccctcacctgtatttcagcycacagatgcacttgagtcatgtttctctgagacccaacagacctcttagagtctcccctaac

SEQ ID NO: 661309 - DNA, 590 bp, Homo sapiens
gatccccaaattagcattccagcttcctactgagcattctgacttctgtctttatattccctggcctaaaagactctccacatgcagtccattttcccctttctctctttcctgccttcacccccatatgcacacatgatttgtgtgacttagtttattcatctgccaagacttagtttagacactatttattccaggaaaccttccctgaccctctttaccatatcttggttagccaccactcctctgtgcaccataactcactgagcttcctccatcatggtgcctttmacaccatttgataatgtgtgtgtgtttgtgtgtgtgtgtgtgtgtgtgtgtattcatctgcataccccactgggctgtattgttttcatgtgtgacttgcttgcccttttaagtccagcacctagaggagataggtgctggccccaatatgcattttcaacaagtatttttgaataaattgagatatcaatttcccctaattttaggtgaggagtgtacctgatacatatacactagcctcattatagtttgtatagataactttgtcttttaatctgagccatttgcagttttgagat

SEQ ID NO: 661310 - DNA, 553 bp, Homo sapiens
tgtaagtcatgtttaataggcaacagtcaaccagtatgtctagagcttaactgagtcgaaagatcaactggaaagaatgtaggaagagaggctgaggccaggtggtgaatgctctgtggagttttgattccaacccagcaggaaatggccaccccttgatgtttttaagcaggggattgatatcatcagatttatgttttttaaagatcactatggcagtctagtgagaaaagaattggagaggggagagactagagatgtggccatcagctaggaggttatcataattcaaataaaagtgacaagggcrtggcctggttaaaatggagggaaaagagagatggcagagaatataaagtatatacaatgtacttgttaaattacaattggaaatcaatgctgtgaaaaggaatggaaaggaaatgttacctatgactaatatggcttctgtaattgagcttcaggcagagttggctctgaatttcctggtagctaggacaaaaagagaaactaggcaagtcacatggttctcactatctatcagagaggagga

SEQ ID NO: 661311 - DNA, 594 bp, Homo sapiens
cacaatcttgtgccacttgtggagtacagtggctcactgtaacctctscctcccaggttcaagcaattgtctgccttagcctcctgagtagctgggattacaggcacccgccaccacacctggctaattttttgtatttttagtagagatgtggtttcaccatcttggccaggctggtcttgaactcctgacctcatgatccacccgccttggcctcccaaagtgctggcaggtgtgagccaccgcacccagctgccattgttgtttttaaattaagttttttatttttttcaataacagaagtaatatatattaattacagaatatttaaatgatgcagattctcctattcaaagaaaaccaccattggcattttgggataaagcctttttttccctagacatttaaaaataattgaattcttattatctatataatttttgaattctgcctttaaatttaaaataacaaatatatttcatatacatttttctatggtatctttcttactcaaaataatgtattagatttctcaaacacactggatgtttttaaggtatcaaaacttttaaatataggggaaacattctaaga

SEQ ID NO: 661312 - DNA, 572 bp, Homo sapiens
ggatttttactttaaatatcaaactctccttttcagccagaggctatcgacttttttagaaagttgttccttttttaaattcttaatattttatcatttaatgcttaaaccaatttttatcttatagcttcatatccactataaaaacacttcttatttattatagaaaaaaagaaaatatgtgtaagagacagaacatagaaatcatcaataatgcccttcttctcccacacatagccaaataatctacaaattaaaaaatagcactcagtactaaaaaatagtattcagcatttaaaaagaatgacaaattatttcttatctaaaaatacaatattaaacatacaacaaacaattaaaatgctcctcttattttccaatttggtatttgttaatcccttattggcaataatatctgctgtgttctatttayaacttactatgcataatatactgatatactgagataggttttttgcagacatggcactgtgtgctcttcataaggacctttaaaggaagtaccattctccaccatttttaaaaatgaggaaacaaaggcttaggaaggt

SEQ ID NO: 661313 - DNA, 572 bp, Homo sapiens
ggatttttactttaaatatcaaactctccttttcagccagaggctatcgacttttttagaaagttgttccttttttaaattcttaatattttatcatttaatgcttaaaccaatttttatcttatagcttcatatccactataaaaacacttcttatttattatagaaaaaaagaaaatatgtgtaagagacagaacatagaaatcatcaataatgcccttcttctcccacacatagccaaataatctacaaattaaaaaatagcactcagtactaaaaaatagtattcagcatttaaaaagaatgacaaattatttcttatctaaaaatacaatattaaacatacaacaaacaattaaaatgctcctcttattttccaatttggtatttgttaatcccttattggcaataatatctgctgtgttctatttacaacttactatgcataatatactgatatactgagataggttttttgcagacatggcactgtgtgctcttcataaggacctttaaaggaagtaccattctcmaccatttttaaaaatgaggaaacaaaggcttaggaaggt

SEQ ID NO: 661314 - DNA, 624 bp, Homo sapiens
aactcaaattgagtgacattctctctggccagaattcttcaaaagtgccaaggttgtgaaagataaggaaagactgagaaactgttagagagttgagaaggcatagtgacatacatatggcgaaggacaatgtgatatactggactagatcccggaagagagaagggacattaatgaaagcactggtatgaagtctgtcatttagtggcattgagccartgttaatttcttcattttgacaagtgtaccatagttacgtaaaatgttaatattaaagaaagctgggtaaagtatatatgtcgattctccatattatcaaaaataataatctgaaattattccccactaaaagtttactaaaatattaaaggtctgtgttacttagcataaactattttagactcactgcaaataaaaattgtaattcaacacttcaaattaacacacattaactaaatgattgtgacaggcaagtcttcattttaggtttctggaatacacgagtgaaaaaatacaaaaagtacagccctcttggggtgaggcagacaataaacaataagtatagtgaataaatgcattttactttgtgttggaaggtgatgaatactattgatgtagtttaga

SEQ ID NO: 661315 - DNA, 527 bp, Homo sapiens
agccaaggaaatgccccatgcttcctgtacagcctgcagaaccatgagccaattaagcctcttttctttataaattatttataaataatttttttttgcctcaaaaagtgacatttattgaaagacaaagaaatgataagatgttcatcccttggcttccttctctccccctcatgctgtacctcaacccaccccaagattcactctggatgtggctaggtagcaggacagcccccagcccctcagatgagatcagcaacattgaggggcatctcctcaatggaggcgttgtagaaggtctcgatatcttgaagagtcctcttgtcttcttctgtcaccatgytaatagccacacccttatggccaaaccggccaccttgaccacctttaaaactgcgattaacacaagaaaattgtctaaaataaaattttggatttgattcagataaaatactctaaaacccccagtcaaggagagagagaaatgtaatatttgtacatctgttcaatatttagtgtatcagatg

SEQ ID NO: 661316 - DNA, 586 bp, Homo sapiens
aatgaactcacttttcagattgaaacctcaaaattaacactgagacattatattaattatgaatataaaagttgaggctgggcgcggtggctcacgcctgtggtcccagcactttgggaggccgaggtgggcggatcatgaggtcaggagatcgagaccatcctggctgacgtggtgaaaccctgtctctattaaaaatacaaaaacaaaaaaacaaaaaacaaaaaacagccaggygtggtggcagccgcctgtagtcccagctactgggcaggctgaggcaggagagtggtgtgaacccaggaggcggagcttgcagtgaacagagttagccccactgcacgccagcctgggcgacagagcagaactccatctcaaaaaaaaaaaaaaaaaaaaaaaccaaaaaaagaaatataaaagttgaaaactatttggtagattcaaaaattagcaagaagtaaacaaatataaagttcttttctcttttttaaagtaattttggggtcagcaaaacataagttctgtagtggtttgatagaacaatttcaccttaaaatttcaatagtaacagataataccttggttg

SEQ ID NO: 661317 - DNA, 586 bp, Homo sapiens
aatgaactcacttttcagattgaaacctcaaaattaacactgagacattatattaattatgaatataaaagttgaggctgggcgcggtggctcacgcctgtggtcccagcactttgggaggccgaggtgggcggatcatgaggtcaggagatcgagaccatcctggctgacgtggtgaaaccctgtctctattaaaaatacaaaaacaaaaaaacaaaaaacaaaaaacagccaggcgtggtggcagccgcctgtagtcccagctactgggcaggctgaggcaggagagtggtgtgaacccaggaggcggagcttgcagtgaacagagttagccccactgcackccagcctgggcgacagagcagaactccatctcaaaaaaaaaaaaaaaaaaaaaaaccaaaaaaagaaatataaaagttgaaaactatttggtagattcaaaaattagcaagaagtaaacaaatataaagttcttttctcttttttaaagtaattttggggtcagcaaaacataagttctgtagtggtttgatagaacaatttcaccttaaaatttcaatagtaacagataataccttggttg

SEQ ID NO: 661318 - DNA, 617 bp, Homo sapiens
gtgtaatagattcaaactgtttttgtttttctaacatcaacaaatcttgtataaattaactcaatcggagtttttttaaaatgctaaactgaagaaagatggaaagagactccaatattataatgttcatgcctaggggcactccatatatccaataccaagtaagactaggcttttgtgaatatttatcacttgaaatcatggggaaaatacttttttcttgacagaatatgccccaggtttaaagattatactgtacatcattaaggggtaattttattttttcttaaggtagaaggagatatcagtactataataataaatctgcctctttgttataagaaaagtttaatgtgtggtcataaacattgtttgttttaaagacagattgttatagatgtattattaaaaatatccatcctgtctgtactctttatactttcttacttaaatttattaacaaaattgggtatatgtgtgccattctttctctgttgtctctgccatcctctggatatttagccaatccttaacytaaaaagcctttgtcattataagggtaaaacatcattttgttatatcttaatatagagaaaccagtcttctagctcatttat

SEQ ID NO: 661319 - DNA, 557 bp, Homo sapiens
taatccaaaagttgtctgaaaaataggaaaaagaatatatgggaaaaaggagaacaaatagtagaggtacctttatttcaaggttgactataaagctttgtcatcaagagtgtatgctgttgacattaatatagagaaatacatcaatggaactgaatagataacttagacatatacaaacatgtacaattgatttttagcaaaagtgaaaaataattctgtggagaaatgatagtcttaaagaacaagtgatttggcaacaactggatataaacattcatgcaatgcactttgattgatgycttgcggcatacgcaaaagtaagctcaaaatgtattacagacctagaaataagtctgaatgcaacaaaacttgtagaaggaatcacaggagaaaaattttgtgaccttgtataaggtgaaaatttctgagacacaacagccaaaggcacaatcacaaaaggaaaaattaacaaatttggctctatcaaaatgtaaaagcttgtgctatttggaagatactgtgaggagaatgaaaaacaagctacaattcacaat

SEQ ID NO: 661320 - DNA, 593 bp, Homo sapiens
caaccttgtaaatacactaaaaatactgaattagatattttaaattggttaattgtatatgtgaattatatttcaagctgtgaaaaagatatgaactgtttaagtaaacaaaataacaatatattattataatatgtatgtaaatataatggatgaaaataataacaaaagctagaaggagatatattactgtaaagttcttatactattagtcaacaaaggatctaaattgaattataaaaaatactaagataatccaaaagttgtctgaaaaataggaaaaagaatatatgggaaaaaggagaacaaatagtagaggtacctttatttcaaggttgactataaagctttgtcatcaagagtgtatgctgttgacattaatatagagaaatacatcaatggaactgaatagataacttagacatatacaaacatgtacaattgatttttagcaaaagtgaaaaataattctgtggagaaatgatagtcttaaagaacaagtgatttggcaacaactggatataaacattcatgcaatgcactttgattgatgtcttgcrgcatacgcaaaagtaagctcaaaatgtattaca

SEQ ID NO: 661321 - DNA, 616 bp, Homo sapiens
agactcatgtggaaagtattgaggcagtgtagaaaagggagtgttcaatgctgtcaagaaagactcacagaaaaggtaatgaatgggtgggattatgacagatgtaccagagtctactaaacaaagaaagtggatggcttgcagaaaatcctaggcaatcagaatattgtgtgaatggcacagatgtgttgtagaaagatatttgataaaatggacaatgtcttcagaggcatctatgtgtggtttgattccaggcaaagtctgagcaacacgaacatctttctacaatgactgctgacagtaaatatcatctgctacataattttgcctgaaacatgatatatttttgttttctctctgcctcataattcctagaattaaggaagtgaaagctttcccactgaatattgaccaccaggctcaaatatacaattacaaattaaagcattaaacaaagtaggtcttccaagtgatttataaatattaactaagtcactgatttaagtgtcaggttaggtagttagacattcatattaacttttataactgagaactttgaaaaaaagagtagygtgtcttcatttaaattcagaaaagcccatacatttgaaatttg

SEQ ID NO: 661322 - DNA, 553 bp, Homo sapiens
atgtttgaaagccagttgtattagttattgtgtgttctgtggcacattgcttacactaaaaatttcagtttcacaactgggaaaacaatatggatgatgatgatgacaataacaaatacttacattattgtgagaatcaaaatgttattacagcttcctaaaatttttattaaaggacttggcacacagttcaattttagcttaaaataagaagaatcagamtatgggctctcagcaactcttctagtctcatattgtgaagaaattatcttcacttaacgtaccttttaaacttatattttaagttcaggggtacaaatgcaaatattttaagcatagtttgtgagataatagacatactaaagtgaaaaggatcatagtaaaaatgattttagctcttcatggcatttaaaaatcatcccaaaacacccaaaaaattgagtcttcaatagaaaattactcactgattaagcataaagaaacagaaacttaaacagaaacagaaatgtcattttgatgaaggaaagggatgttcaaggaaggagggaagcaa

SEQ ID NO: 661323 - DNA, 553 bp, Homo sapiens
atgtttgaaagccagttgtattagttattgtgtgttctgtggcacattgcttacactaaaaatttcagtttcacaactgggaaaacaatatggatgatgatgatgacaataacaaatacttacattattgtgagaatcaaaatgttattacagcttcctaaaatttttattaaaggacttggcacacagttcaattttagcttaaaataagaagaatcagaatatgggctctcagcaacycttctagtctcatattgtgaagaaattatcttcacttaacgtaccttttaaacttatattttaagttcaggggtacaaatgcaaatattttaagcatagtttgtgagataatagacatactaaagtgaaaaggatcatagtaaaaatgattttagctcttcatggcatttaaaaatcatcccaaaacacccaaaaaattgagtcttcaatagaaaattactcactgattaagcataaagaaacagaaacttaaacagaaacagaaatgtcattttgatgaaggaaagggatgttcaaggaaggagggaagcaa

SEQ ID NO: 661324 - DNA, 593 bp, Homo sapiens
ttaaatttgggtgatgaataaatcagatggaatctagtagcagtacttggcaaagaagttatgaactgatagaagacagacacaaatttttaatgtgataacaaaatcctaaatttattccttttttttgtgatgcttaagtcctaagaccagtgacagtgaggattgtataacaaataagagataattctgcaactagtaaatttcaacattcttaactatgctctgtttcttactttttaaaaattctgtgatataagtttatttcaaattctttgaagtaaaaggaaatattgattaattttgctagtatcactcacacaggaagtttagaaggccatgttttaattaaagcagaaaacaaaaattcatggctcatgtatttggttaaattatgattatattttatttcctagtgaactgtaacccatagtacttcgccagaatctaaatcaaacttgaataccccaaagagctttctaaagcaatgttctcatccattgacaattgaaaaataaaagtgttagstgaaaaggggacttaaaaatatgctgtaacaacattcttctgtcctgaatctacagattacctga

SEQ ID NO: 661325 - DNA, 646 bp, Homo sapiens
actcaaatgtacactcgggacttcaattcaaaataatgtctaaatcttgcttcattgattataaraaatacacaacgctaattcacaatgttaatgattgggaaactatttgtgtgtaaagggggtactatagtttccacataatttttctatataactaaaagttctctaagaatggcctagtgtatgtataagaaataaatttgtaacatcaattaaataattttgtgtgagatatgtaaatgtggctccaagtgaagaaaaataacaatcatgaaaataatgaaaaaagtgttcaataattacctccaaagaagttgctagaatcaagaaactttttgatggaaataattccattgtgaatcagataacttataaactatacacaaaatgacctatattaaaggaaaagttacaaaataattgcatgaatctagaaaatctcagatttcaaaatacagtaaatacagcaaaaaagaaaaagtatattttatacacttttgtggaaaaatcttaaattactagcatctcaaatctgatggcattaaactgtattaaaatggtataaattgtcttaaaattatattacattttctaaaaagttactatgatatgaatattaccaaatacaaatttctccattaat

SEQ ID NO: 661326 - DNA, 481 bp, Homo sapiens
tatattaataataacagtcaagatttcacttggctcatgtgggatcttgtattgtttgaaaagactcatctccatctataattttctgggggctcccaatgaatgttttatatattttcattgacagatagactggatgatcacatgttatggagtgggcagtcttgtcatgtctactaaattgtactgtattttctggatcctgttgtgctctttggaacgacttttgtttcttctgagcaacgaaatgcccaccaggcrctactgttgatgattgttacatccctggataccaccaaacactccaggcaagatgtccctgtcaggccagctgctgttttccactgggcaccaaagacttctatccggcaacattatcatttttgtcttttcccactgggcaccaaaacagataaactggagtcttcatgcaaccaaaactactcagtggtctagggagaaataaaataaatattgtctc

SEQ ID NO: 661327 - DNA, 481 bp, Homo sapiens
tatattaataataacagtcaagatttcacttggctcatgtgggatcttgtattgtttgaaaagactcatctccatctataattttctgggggctcccaatgaatgttttatatattttcattgacagatagactggatgatcacatgttatggagtgggcagtcttgtcatgtctactaaattgtactgtattttctggatcctgttgtgctctttggaacgacttttgtttcttctgagcaacgaaatgcccaccaggcgctactgttgatgaytgttacatccctggataccaccaaacactccaggcaagatgtccctgtcaggccagctgctgttttccactgggcaccaaagacttctatccggcaacattatcatttttgtcttttcccactgggcaccaaaacagataaactggagtcttcatgcaaccaaaactactcagtggtctagggagaaataaaataaatattgtctc

SEQ ID NO: 661328 - DNA, 481 bp, Homo sapiens
tatattaataataacagtcaagatttcacttggctcatgtgggatcttgtattgtttgaaaagactcatctccatctataattttctgggggctcccaatgaatgttttatatattttcattgacagatagactggatgatcacatgttatggagtgggcagtcttgtcatgtctactaaattgtactgtattttctggatcctgttgtgctctttggaacgacttttgtttcttctgagcaacgaaatgcccaccaggcgctactgttgatgattgttacatccctggataccaccaaacactccaggcaagatgtccctgtcaggccagctgctgttttccactgggcaccaaagacttctatccggcaacattatcatttttgtcttttcccactgggcaccaaaayagataaactggagtcttcatgcaaccaaaactactcagtggtctagggagaaataaaataaatattgtctc

SEQ ID NO: 661329 - DNA, 524 bp, Homo sapiens
gttttcccatttgtttcccttccttcctccactcctccctttattcactttattctctctctctctctctgcaaactgttcacccgctcttttcctaagaattgaatactagtcttctgggtgtaattagatagagctggttaggtcttctttctcttgtaatataagtcatttcatagacttctatctcaagtgaaaagatcatggaggtcaaactcaattcaacagataagctatgaaatgttctatagtataataagcactcagaatgtaactgttgaatgaaagaataaaatctgttttattacttacacaaatctcagtttaaatgtagcctgaaatcactgtacagttattttggcacatcatttatttcctctaaagtccttagaaataagtgtttgcttttatttaactttgcaccaagcctcctattttaatattttgtrtgtaattgcctaaatatcttttggagtaatgaatatttcctttatagttgcactaaaatacataggtgtggtgtg

SEQ ID NO: 661330 - DNA, 609 bp, Homo sapiens
ttacatattatatatgtatacacatatatgtgtgtattatatatatatgtataatcttgaagaatatatataatcttccagatttttctaggtagacaatcttgttttttacgataaggagcaattatatttctttctagtctgtgtctcttatttatttatttttggttttgtttcattgcactgggtaagactactgataagattttgtatagagtggtgaaagcagaaatccctgtcttttacacaatcacagaggagagaaactttaagtctttttttcactaagcataattttagcagtagttttttgtttgttttttgtttttgtagatgccctttatcaacttgacaatgtttccttctattactagtttgctgagagtattatcatgaagggctgttgaaattgccaaacttcccatgtgccaaaagataataataaagctyttctttttgcttgatatgatgaattgcagtgaactctcattatacatagatctgtatttgtgaatatatctacttgctaaaatttatttgtaagcctcaagtcaaaacttgtggtgcttttgctgcatttgcagacatgcacagaggagtgaaaaattt

SEQ ID NO: 661331 - DNA, 621 bp, Homo sapiens
tgggctcttttgttgttatggtaaacccctgaccaccacagacttagaattcctctagcattaccttgtgtttaaggtggggttggtttactacaaggattctctcaatatttgctttatcctctgctctaggtctttcttttgaacttgtgcctcagccggggtctttcttcacccttctttgtccctttccaagcagaagccgtctgtcacttggtgctgctatagtggtggtataggctggaagagaaagacaccctctatggttctggtcaagcctccatcttaagtagacactgtccctggattctggtgggtgggctgtctcgggatttctgctctcctcccsctgtaggtttcagcgtggaatttatttttctcctttctcaggggtaaaaggcattttctgttttcttccttcagcagttccagtgccttgcggggaatgtcttcaccagtgctctaaaaggcaacaggattttctgccctgtatccagcagcttaaggcttttgtttcaaaagggaataagagagaaaaatctctcctatcatgcttttcttgcggtactgttgcctgtttttaactttttgtataaatggaatcattcagtatgtacattt

SEQ ID NO: 661332 - DNA, 487 bp, Homo sapiens
acaaatatctctctttcttttccttatctccagaacctggccaccrctattccacctattctgttaccaggaattcaatgtttcttttagattccacatatgagtgagatcatatagtatttgtctttgtgtgtcttgtttatttcacttagtataatgtccacattgttgcaaatgataggattcttttcttttcaaagactgaaaaaaaaatttacttttattgcttctgtaccatggctattgtgaatagtgctgcaataaacatggagtgcaggtatctttttgatataatgattttatttcatatggattttattttctttatacccagaagtggtattgctgcattgtatcttagttctatttgtaatgttttgtggaacttctaaactctttttcataatggctctaccaacttacatccctacctagtaaggaggtcgaattcccgatagctttgactgacacagctattccccctgcc

SEQ ID NO: 661333 - DNA, 509 bp, Homo sapiens
cttgcagtctgcaactatgtagggagtttagaaatagaaaaattaacaataccttaaaggaacatataaataccacagttgcaccatggtgctcccctggcataaataacacttattttagaagctgtttttgtaagcatggatttctgagaaaaagattccagttttgttttacataggtcatggcttttaaaagtttgctttaggtttcagtgatttgctgggtgcacctgtatatgcagatgcagaaattgtttcatcttggaaaataactatagtttagcacttttgtgycaaaataagtctgtggaagttaatgaaaacattatttcaggctatgcctaaacacaaagaatagttaggaattctgaaaaacaaacacatatcagaaaggttgaaatactcaaacaatttccttttccaatgttttgtttatgtctgctgctagttatagtatgctaactgctttcctttcactgacattctaactcctatatttccaggctaac

SEQ ID NO: 661334 - DNA, 627 bp, Homo sapiens
gatttattttatatttgtattactgatatttctaatgttgaatcttaaagttttcattcaaaagtcacttcctcctggaagtttttctgattctcactccttccctgaattagggaaatatgaattaggttcccctcttatgagcccacactacatcttatatttttcctatcatagctcatcatggagcttaataattttttaggtttctttggtaagaatcccacagtgcactatataaaggcaggacctgtttctgtctcctgactgtctcttagtacccaataaagttcctaytatataccaaatgttctataaatacttctaaagcatattaaatgttgaatgatttatatgacattattctatacatttgagccattttaaatgtgtatgataactaacctagattaaacaaagaataaatgtctatgaaaaaagactttaaaataaataaataaataataaataaataaataaatagcttgacttttatcaatgtagatattcaatcttgatgattcaacacattggaatcttgctttttcccatctggagtattttgataattacttaacacattttataatagagataccatctgcaaatttcagtcttgccatcttt

SEQ ID NO: 661335 - DNA, 627 bp, Homo sapiens
gatttattttatatttgtattactgatatttctaatgttgaatcttaaagttttcattcaaaagtcacttcctcctggaagtttttctgattctcactccttccctgaattagggaaatatgaattaggttcccctcttatgagcccacactacatcttatatttttcctatcatagctcatcatggagcttaataattttttaggtttctttggtaagaatcccacagtgcactatataaaggcaggacctgtttctgtctcctgactgtctcttagtacccaataaagttcctactatataccaaatgttctataaatacttctaaagcatattaaatgwtgaatgatttatatgacattattctatacatttgagccattttaaatgtgtatgataactaacctagattaaacaaagaataaatgtctatgaaaaaagactttaaaataaataaataaataataaataaataaataaatagcttgacttttatcaatgtagatattcaatcttgatgattcaacacattggaatcttgctttttcccatctggagtattttgataattacttaacacattttataatagagataccatctgcaaatttcagtcttgccatcttt

SEQ ID NO: 661336 - DNA, 615 bp, Homo sapiens
actttgaacctgacttaaagttaaatttaccctccttctcctcctcctccttctcctttcttcttcttcttcttctttgcttgtggcttcttagtgtacctgtggcacactaaagatgatctcaagttctttatagctcccctcatcaaaaggtagaatccacttcattaagctatgcatctggattggctttgtggcttgcttaaatatgatagaatgtgttggaaacgacattatgtgaatacttctgtcattatgcaaggaagcctgagatgaaaaacaacttrgatagacagcgggactggctcagccatcccagttcttctagtctctccaattaatgctcctgaaatgtcggtgaggatgttttacaccaacctctctcccccatccaagctgccaactgactgacggagccctcctgtgctggctcaggtgatattggcaggtgagctgcctagttaattcacaactgggagaaaataagaaattgctgttttaagctacagttttgggtgatttcaagagagatcacgaatacactccaccaggtgattttactggttaaaagctagaagaacctcatggccacttgtggcccatgagaactaatca

SEQ ID NO: 661337 - DNA, 613 bp, Homo sapiens
tatggtatactatcttttcttttttattttttttagatggagtatcactctgttgctcagggtggagtgcagtggcatgatcgcaactcacttcaacctctgcctccccttcaagcggttctcctgcctcagyctcctgtactatctttctaaaattataaaaattgaattattaaatagatctttccccaaggatttcagaagaagagactccacagctccacaggagctcttttcttttctttgaataattgtatcctgattgagtacctgattttggtatcttatatctattatccatttttttattgaaccaaaatacacatttcaacaactgttaaactaggttaaaattcaccaagtcattagacttggatttatgtttcttttagaagagctaccatccatatggcaggctgcaaaaggccagtcttagcagacattgtgaagatgtgacttacgttctcaaataaactatcttctcaatggatcaataaagttatttgtacttcccttaaattatagcctaattttttttctcttagatattaaaaatagtcgatgagattaaccagttctatttcagaatgggtctaagtcagtgggcttaaac

SEQ ID NO: 661338 - DNA, 621 bp, Homo sapiens
aacaaggtctagacttttcacatatctgaaaagtggtggtctgcatgcacaggtaaaaagcaagagggcctgatggaaagtaaaacctggagtgtccctgaaaacttctgaacttttaatgtgctctctaaccagcactcatatacttggaaagaaggttgaaggctttcttggataaaagtgtttgagcacagcttatgacatataactgcctgaccattaatctatggaaacatggggctagtgcagaagaagtgaatcttaaaaattaaaacagaattaaaaaaattaaatataagcataagtagtaacacactgcaagtgagacatatttccyagatttagtccaggaaagttgctaaacaaataaacagcaataactacaaccccaaggagggaagtatttgaatctggagtgtttatgatacatttttgattgaaatgttcactttcaacaaaattatgagaaagggaaagaaatggaaaaatacagccataatcagtaaaaaggaaaaattagagagtgtttgtgagtttacctggatgatgcatttaaaagacaaaggtttcaaaggagctattatattatgttcaaagaattaaagaaaaacaagtttaaac

SEQ ID NO: 661339 - DNA, 602 bp, Homo sapiens
caggtgcctatagtcccaactactttggaggctgaggcaggagaatggcgtgaacctgggaggcaaagcttgcagtgagccgagatcacgccactgcactccagcctgggtgacagagggagactctgtctcaaaaaaaataaataaataaataaaaaagaaagaaagaaacaccaaaccttccagttgagaaagaatcagtgcaataactttggcaatataaaaaagccagmgtgcacccttacctccaaacaagtctattaatactagctgtccagcaatggttcttaaccagtctgaaatgactaaaatgatagacatagaattcagattctaggtggcagggcaactcattgagattcaggagaaagttagaacccaatccaaggaatccaaggaatccgagaactaaaagagaaaacagccactttaagaaagaaccaaacgaacttttagagctgaaaaattcagtacaagaatttcataatacaactggaatagaacaaactgaggaaaggctctcagagctcaaagaccaatccttcaaatcaagtcagtcagacaaacaaaaataaagaaaaatgggaatattggattatgta

SEQ ID NO: 661340 - DNA, 594 bp, Homo sapiens
attcagattctaggtggcagggcaactcattgagattcaggagaaagttagaacccaatccaaggaatccaaggaatccgagaactaaaagagaaaacagccactttaagaaagaaccaaacgaacttttagagctgaaaaattcagtacaagaatttcataatacaactggaatagaacaaactgaggaaaggctctcagagctcaaagaccaatccttcaaatcaagtcagtcagacaaacaaaaataaagaaaaatgggaatattggattatgtaaagagactaaatctatgactcattggcattcctgagagagaaggagagagtatgagcaacttgaaaaatatatttgagcatacagtccttgaaagttttcttaatctcactagagtggatgatattcaaattcaagaaatacagagawccctggctaaatactatagaagacagccatcctatggtgcacaatcatcagattcaccaaagtcaacccagaagaaataatctttaatgcagctacagagaagagtaaagtaatgcacacagggaaagcatcaggctagcagcagaccttttagcagaaattttacaa

SEQ ID NO: 661341 - DNA, 594 bp, Homo sapiens
attcagattctaggtggcagggcaactcattgagattcaggagaaagttagaacccaatccaaggaatccaaggaatccgagaactaaaagagaaaacagccactttaagaaagaaccaaacgaacttttagagctgaaaaattcagtacaagaatttcataatacaactggaatagaacaaactgaggaaaggctctcagagctcaaagaccaatccttcaaatcaagtcagtcagacaaacaaaaataaagaaaaatgggaatattggattatgtaaagagactaaatctatgactcattggcattcctgagagagaaggagagagtatgagcaacttgaaaaatatatttgagcatacagtccttgaaagttttcttaatctcactagagtggatgatattcaaattcaagaaatacagagatccctggctaaatactrtagaagacagccatcctatggtgcacaatcatcagattcaccaaagtcaacccagaagaaataatctttaatgcagctacagagaagagtaaagtaatgcacacagggaaagcatcaggctagcagcagaccttttagcagaaattttacaa

SEQ ID NO: 661342 - DNA, 323 bp, Homo sapiens
aatgacatccacaggctcaaagtcaaggaatggagaaagatctaccatgcaaacagaaaacaataaaagataagagtcgctattyttctatgagataaaacagatgttaacccaataaaattaggaaggatgaaggatattacatagtgattaagggtataatccaacaagaaggcttaggcactcaacattggaacacctaaattcataaaacaacttcttggcctatgaaaggatttagacaaccacataataatagtgggagacttcaacgctccactggcaacatcagacagatcatcaaggaagaaaactcacaaaga

SEQ ID NO: 661343 - DNA, 426 bp, Homo sapiens
aacctagtacaatacaactagaaataaatatcaggaagatctctgaaaactacacaaatatgtggaaataaagyaacttgctcatgaatagctcctgggcaaagacagaaattaaggcagaaatttaaaaatgctttcaaattaatgaaaataaggatacaacttatcaaaatctctgggatgcagtcaaagcagtgttaagcggaaagcttgtagcactaaatgccttcatcaagaagttagaaagatctcaaattagcaatctaatttagcacataaaggaacttgaaaaaaaaaaaaaaacaaagctagcctaagaaaagaaataactaaaagcagagcagaacttagtgaaattgagaccaaaatatccatacaaaacatcaacaaaaccatgacttggttattcaaaaaaaaaacaaaacc

SEQ ID NO: 661344 - DNA, 612 bp, Homo sapiens
aaatctgcccatatcaatattgaccttgaacgcaaatgggctaaatgcccaaataaaagacacagagtgggcagttggataaaggagcaagactcaacttgctcaaagtaaagggatggtggaaaatctaccaagtaaatagaaaaagataatgagacaggtgttgctattataatttcagaaaaaaaaaacagaccttaaaccaacaaagataaaaaaaaaaaaaaaggacaaaaaaatggcattacatgatggtaaagggctcaattcaacaagaggaccaaacctaaatatatatgcaccaaacatagaagcacccagattcatgaaaaagttcctagagacctaagaagatacttagataaccacaaaatagtagtgggagacaccccactgayggaattagacagatcatcgaggcagaaaactaacaaagatattcaggctctgaagtcaacacttatccaaatggacctcgcagatatctacaaaactcattacccaaatataagagaatatagattcttctcacctacacatggcatatactcaaaattgataatcacctataaaacaatcctcagcaaatgcaaaagaattgaaatcatacca

SEQ ID NO: 661345 - DNA, 635 bp, Homo sapiens
taataaacatttgaaatgtaattttaagaggttagcattttacaatagcaactaaaatgtaaaacagtaggaataaatttaacaaaagatgtgcaagccttttatgaagaaaattatgaaactattgaaagtcattaaagaagaactaaataaaaggagagatatattgtatgcaatagaaaaagtcaaaatatgaaagatatacattatcttaaaatttatgtataaattcaaagcaatattccaatacaaattttaccggtatttatatagaacttgacaagatgagtctaacattcatatagaagagcaaaggggaaaaaagctgagacagctttttcagaaaagcttttktaaaaaagaacaactcaaagagataccccttttatatatcaagaaattttaaagtaatagtaattaagaaaaggaagtattggtattaacatagattaatgaaccaattaaaacaaatagaaagccaaatatatatttttatatatattatacatatagatacacataacatacatagatatgtgcgcacacatatgcacaaacaaacacacacatacaactatatacatgtgagatgaggcctttaaaatcagtggggaaggatggacttttattaatta

SEQ ID NO: 661346 - DNA, 494 bp, Homo sapiens
cttattcttttgtaatttgtatactaagaatgattttgactaagccatccttttcaggtttcttatgaatcaacccaggtaaaggaaaacaaaaagctcastgaggaggcaagaggtgaccttgcctctgtatttttcctttcacgactgtgtaggacataggacatctctttgcagaatttgccagttttcccattggcgctatgtgtggaaatcatgtgtgcatgtccagatcagattgttcagtgcctgcatggatctttgtcccaagagccttaatataaacacatggaaacatctctctttttgctcaaaactatatactgaaagtcggtctaataggcaagccttaaaagttaatatttgacataatcaatgataagacactttgctgaaacacctataattttggtccaaagttattttccaggactctggggctgggcatgttttcgagaccaggtttcttagagaagggtctgcattcctgcatt

SEQ ID NO: 661347 - DNA, 494 bp, Homo sapiens
cttattcttttgtaatttgtatactaagaatgattttgactaagccatccttttcaggtttcttatgaatcaacccaggtaaaggaaaacaaaaagctcagtgaggaggcaagaggtgaccttgcctctgtatttttcctttcacgactgtgtaggacataggacatctctttgcagaatttgccagttttcccattggcgctatgtgtggaaatcatgtgtgcatgtccaratcagattgttcagtgcctgcatggatctttgtcccaagagccttaatataaacacatggaaacatctctctttttgctcaaaactatatactgaaagtcggtctaataggcaagccttaaaagttaatatttgacataatcaatgataagacactttgctgaaacacctataattttggtccaaagttattttccaggactctggggctgggcatgttttcgagaccaggtttcttagagaagggtctgcattcctgcatt

SEQ ID NO: 661348 - DNA, 494 bp, Homo sapiens
cttattcttttgtaatttgtatactaagaatgattttgactaagccatccttttcaggtttcttatgaatcaacccaggtaaaggaaaacaaaaagctcagtgaggaggcaagaggtgaccttgcctctgtatttttcctttcacgactgtgtaggacataggacatctctttgcagaatttgccagttttcccattggcgctatgtgtggaaatcatgtgtgcatgtccagatcagattgttcagtgcctgcatggatctttgtcccaagagccttaatataaacacatgkaaacatctctctttttgctcaaaactatatactgaaagtcggtctaataggcaagccttaaaagttaatatttgacataatcaatgataagacactttgctgaaacacctataattttggtccaaagttattttccaggactctggggctgggcatgttttcgagaccaggtttcttagagaagggtctgcattcctgcatt

SEQ ID NO: 661349 - DNA, 515 bp, Homo sapiens
ttgcttatggtgatttccctccacgagtctctgtccttcaagaagaaaaccagttaaagtgtttaggagctcatgactttcttaacaggaaagaatgatgtgagaggggcttgggggttctgtttggaaatgtgggagattctcagaatggatgataaaatgtttttaaaattaggttccacatggaattatcatgctttttttagcttatgaaaaaatatygtagctaatatttatgcttgtgtcattgtttgaaggttagcagggaacctactatcactgttgatatctaaggtaaaactgagtaaacaaaattatcttagttaattcaggttaattgatagcaccatgcttttagataattctgtcattatctctgtatctgtctcaattgatttcaatctttatctgctatagtcgcttcaagcaaatatttaattgttaattttaaatacaaatattaatacctctgggatcaggtttgtatcttcttagagtatactgcaggagataaa

SEQ ID NO: 661350 - DNA, 564 bp, Homo sapiens
cagtgtgaaacattgtgtcaataaaggtaaaatggaaggtggccatcagagagcatgttaggacactgtaaaaatgtcatatcctgtccctttgttcaaatgagaatcacgttatcactgacattggagttttttgatgccaaattaatacatagttttcttatttgtagaaattctaaatgagaagagcctcacttcttttgatcctgtggcatgtgggccaagcctactggatgcctgtttttgtaaaaaaaaaaaaaaagttattgtaacatagatgcatgtgtttgttagtgtactgcccatggatgctttcatgctagaaaagcaaagttgggttgttgcaacagagagtatatggccrtgtaacctaaattttctaatatctgctttttagggaaaaatttttgcttgcctctgctcaagcacaatggctttcacatattttgattatcctaagggaataatatattttacatcgtcaccagtgcatgagcacccacatacaagaatatatctgggaagacatttcatgcaatagttgctactcaacaagcccttttt

SEQ ID NO: 661351 - DNA, 564 bp, Homo sapiens
cagtgtgaaacattgtgtcaataaaggtaaaatggaaggtggccatcagagagcatgttaggacactgtaaaaatgtcatatcctgtccctttgttcaaatgagaatcacgttatcactgacattggagttttttgatgccaaattaatacatagttttcttatttgtagaaattctaaatgagaagagcctcacttcttttgatcctgtggcatgtgggccaagcctactggatgcctgtttttgtaaaaaaaaaaaaaaagttattgtaacatagatgcatgtgtttgttagtgtactgcccatggatgctttcatgctagaaaagcaaagttgggttgttgcaacagagagtatatggccgtgtaacctaaattttctaatatctgctttttagggaaaaatttttgctwgcctctgctcaagcacaatggctttcacatattttgattatcctaagggaataatatattttacatcgtcaccagtgcatgagcacccacatacaagaatatatctgggaagacatttcatgcaatagttgctactcaacaagcccttttt

SEQ ID NO: 661352 - DNA, 580 bp, Homo sapiens
agaaatatttataaatatatgtgtgtatactggttagtatacacacatatattcttttactcygagagggccaagaaacaaagatattccagcagcaacaggcatatttgggatctagaccttgtttctaaaaccgtcgtccaatgaaaagaaccatggcttcctgaagaaatgactggttgttgggcaggaaatatataatataatcctggagcatcttgtggtgtcaaaatttaaagaagtatccaaagacccatatacatacacgatcactcacccaataatgagggtatggggtatgtcaaagggacatttgaaccttccgaaagctcttaaaatggcaaaatccagtacatgtcgaagaatcatgaacatatttaatcatatcccagagtatcaaataaatacttataagctcatcctgatataaacaaatgactggataaataggttcatggagaagaatacacaaatatactcttgcataggaaattccagataatttatgaagatattctgctctcaaggaggtggaacataagcttacattcctttcttatggattggattaaatggcttc

SEQ ID NO: 661353 - DNA, 580 bp, Homo sapiens
agaaatatttataaatatatgtgtgtatactggttagtatacacacatatattcttttactctgagagggccaagaaacaaagatattccagcagcaacaggcatatttgggatctagaccttgtttctaaaaccgtcgtccaatgaaaagaaccatggcttcctgaagaaatgactggttgttgggcaggaaatatataatataatcctggagcatcttgtggtgtcaaaatttaaagaagtatccaaagacccatatacatacacgatcactcacccaataatgagggtatggggtatgtcaaagggacatttgaaccttccgaaagctcttaaaatggcaaaatccagwacatgtcgaagaatcatgaacatatttaatcatatcccagagtatcaaataaatacttataagctcatcctgatataaacaaatgactggataaataggttcatggagaagaatacacaaatatactcttgcataggaaattccagataatttatgaagatattctgctctcaaggaggtggaacataagcttacattcctttcttatggattggattaaatggcttc

SEQ ID NO: 661354 - DNA, 580 bp, Homo sapiens
agaaatatttataaatatatgtgtgtatactggttagtatacacacatatattcttttactctgagagggccaagaaacaaagatattccagcagcaacaggcatatttgggatctagaccttgtttctaaaaccgtcgtccaatgaaaagaaccatggcttcctgaagaaatgactggttgttgggcaggaaatatataatataatcctggagcatcttgtggtgtcaaaatttaaagaagtatccaaagacccatatacatacacgatcactcacccaataatgagggtatggggtatgtcaaagggacatttgaaccttccgaaagctcttaaaatggcaaaatccagtacatgtcgaagaatcatgaacatatttaatcatatcccagagtatcaaataaatacttataagctcatcctgatataaacaaatgactggrtaaataggttcatggagaagaatacacaaatatactcttgcataggaaattccagataatttatgaagatattctgctctcaaggaggtggaacataagcttacattcctttcttatggattggattaaatggcttc

SEQ ID NO: 661355 - DNA, 393 bp, Homo sapiens
taaagaatctacaaagaggtagacagatttgactatggagacatttttaaaaagtcaaagaagatcataaagtgataatgcaaagggaaaattaggagcacatatgagaacatgtgagatatgagaacaatcaagttaatttatggagctgtcaaaacattaatatgaaaatatgaaggttctgttagaatatgaaagaatatgatcaaccaatttataagataataaacagtccaaaacttaattatrtatttaatttttccaggaatttaataaatatggatgcaaaaaccacagatacaattatatgtattcaaataaataattaaagattaatactcagtagtaataaatacacattaccatgtgtaaattcttactgttttgggatct

SEQ ID NO: 661356 - DNA, 507 bp, Homo sapiens
agaaaatgaatcatcagtaaacctgcactacaagatatgatcatgaaagttttctcatgcagaagtaaaatgataccaaatagaaacaacttacacatatgagagtgtccaagtggttaaatatgtaagatttttctcattaaaaaagttttaacaactatttacggcaaaataacagttattatggggttttcaaaatatgtagaagtattaataaataaatgacgatagcaccataaacagaagaaaggaaacagcagaatatactttttcatattctttccaaatatacatgaaatatcatgaagatcacaaaaatytggattacaaagtgtcaataaattttaaaaaattaaaatacagagtatgttctctgacaaaaacagaattagagtaacagaatgttatccagaaaatctcccaaatatttggaaattaacaacatacttctaagtaactgaaaggtcacagaagaaataacaagaaaaatgtgaggaaaaacccaca

SEQ ID NO: 661357 - DNA, 602 bp, Homo sapiens
ttctagctttttatcattttttactttatcatttcttttaacccagacttggtaggtgagaaagagaataaagttttcaagcaaaagtaatgcttaatccattaattggaagagagagtcagagacagtttgtagaaaagtaatagtacatttcagaacaaaggacctcaagattagagagatcatggtgctttcaagagagtgccagtaattcaatccaggggagggaaggagtgytaactggaaagcggcaagagacaaggctggagaggtagggcagaagtcaagaggaagagtttttttttgtttgttggtttttttttgatagtgttcgaataaagagagaattcagttttaaatgtagaaaatggaatatctacagaacattcaagtgtgatatttagagttgagaagccagagccactgttagctgatatggaagttaaagtcatgggcctatatactcacccagagaatgtaagttaagtgaaaagaaaaggctacagactcctgaagaacactgatatttaagaagcagacaaggaaagactcctttaaagataaaaataatcagagagggagaaagaaaaccagataaagaa

SEQ ID NO: 661358 - DNA, 602 bp, Homo sapiens
ttctagctttttatcattttttactttatcatttcttttaacccagacttggtaggtgagaaagagaataaagttttcaagcaaaagtaatgcttaatccattaattggaagagagagtcagagacagtttgtagaaaagtaatagtacatttcagaacaaaggacctcaagattagagagatcatggtgctttcaagagagtgccagtaattcaatccaggggagggaaggagtgctaactggaaagcggcaagagacaaggctggagaggtagggcagaagtcaagaggaagagtttttttttgtttgttggtttttttttgatagtgttcgaataaagagagaattcagttttaaatgtagaaaatggaatatctacagaacattcaagtgtgatatttagagttgagaagccagagccactgttagctgatatggaagttaaagtcatgggcctatatactcacccagagaatgtaagtwaagtgaaaagaaaaggctacagactcctgaagaacactgatatttaagaagcagacaaggaaagactcctttaaagataaaaataatcagagagggagaaagaaaaccagataaagaa

SEQ ID NO: 661359 - DNA, 634 bp, Homo sapiens
agaatatgtgataaacagttaatgataagctaattatacccttcataatccctgcaatatattgtgtgtaaacttctcaagaaaagaactctcacaagagagcaattggatcacagcaacaaattggtagccttttcctcatttagtattcacctgtttccaagccttctttcccattttactattcctttcactggataaagttagacaaaatcttaatgtctaaatacagcatttagtagcactcctactataacactaattcttaaattataaattccattttaagaaacagaaaggtcacccataattcgcaaaaaaaaatctatgagtctctaaaaacaagacaaagacctagcagttggtaatagtttatgtacatcagcagaaggcggggaaaatataaatttctatttgataattttttctatatgtcaatttacaatatcakatttgcccttgagatgaacaagaaaatcacacctggcatcacggtggagaatcactaaaaggggaaaattaggaggatattaaaacagaatcaaggctgggtgtagcggctcatgcctataatatcagtgctttgagaggccaaggctggaggatcacctgaggtcaggagttcaagatcacc

SEQ ID NO: 661360 - DNA, 593 bp, Homo sapiens
tacaaagaggagctggtaccattccttccagaacacttccaaacaatagaaaaagagggaattctccctaacccattttatgaggccggcatcatcctgataccaaaacatggcagagacaaaacaaaaaaaggaaatttcaggccagtatccctgatgaacatcgatgcaaaaatactcaataaaatagcaggatgtttaattagaagtgacaagaatagacactctggtctttttcctgcttttacaaggaaaacattcagtctctcaccatcaggaataaacttagctgtaggtttttacagatgcttttatagccgggttaaagaagtggacttctagtcctagtttgctaagcattttaaaaatatgaataagtattaaattctgtcaaatgcttttcctgtaactactgagatagtcacctggcttttcttctttagcrattatatagcgaattacactgattaatttttaaatgttgaaccagccttgtattcctggaatgaatcctacctggaatgaaacctggttatgatatattatcctactgacggattttatttgcttattagcttattttgttgagaatt

SEQ ID NO: 661361 - DNA, 634 bp, Homo sapiens
tttgccctaggttaagctcttcaagcagtggttctgaccattcagctctggcctgctgcctctggcaagcttctccttcaccaagtgactactctcactgttccactgagggctgcaccctctggcaagctttttygccacaagctcactgaatgttctggtggcagccacaccatttccaaacaggtctgaatcacctttaacttgttcactctcccttagtactagggttgctgctttctatggtggctacctctaaggctttttcagtaggtaatcactttttgctagttagcaattctttttattaaattcccactgttcaaataagccttgtagtctcatcttctgactggacagtgaccgactgaatctaaagtgtgagtgtacatatgaaaagaaaagtccggggagaagcgctggagcagtcctaaatgcagagtgcaggaagaagagatagcactagcaaaggaaacagaaaaagggagtcagtgaagtagagagaagaaacagacacgcacgggttccagagacaagtgaataaagtatttcagaaaaaaaaaagggaatgataaattgtgtcacaaactgctgtgaggtgaatacactgagaaccaggaagtgatcaacagat

SEQ ID NO: 661362 - DNA, 620 bp, Homo sapiens
cttatccatctcctgcccctcttatttacaayattcttattagtaattttaattcaattcaagatatatagtcagccctcagtatccttgggggattgattccaggacaaccacagataccaaagtctatggatgctcaagtccctcatataaaatggtgtagtatttgcatataacccacatacatcattccatatattttttttttcagtagggtggggttgtgccattttgcccagactgatctcaaactcctgggctcaggagttccacccacctgggcctcccaaagtgttgggattacagatgtgggccaccacagccggcccccatgtgctttaaataacttttagattgcttatatctagtagaatgtaaatgctatgtaaatagctgttatactgtatttttaatttatattatttttattgttctattgttactttttatttttctctagcatattttctatttgcagttggttgaatctgaggatatggaacccacagatacagagggccaactatatttatttatgtctacttgtcctagggaggcttcagcaacatattagtaaagatgatagactcaactcatacccttacagagcatacagtgag

SEQ ID NO: 661363 - DNA, 609 bp, Homo sapiens
gcagaaaccccgtctctactaaaaatacaaaattagtcaggtgtggtggggcatgtttgtaatcccagctacttgggaggctgaggcaggagaatcgcttgaaccctggaggcagaggttgtgatgagctgagatcatgcattgcactctggcctgggcaacaagagtgaaactccgtctaaaaaaaaaaaaaaaaaaggctacaatggyaaattttatggtatgtgtattttatcacaataaaaaaaaatcaatcttgttcattttatattccaagttttcttgtagatgtacaaagagaagtggtcaacttaatgtgttggtttcattggccgaacaactttgcacacagataaatgacgctaatttgtcattaatgttatccgatgttccaagtataagctaactctcataagggtttgatatttttcagccaactcacagaaccaaaataaagctttgggaagttcactttgtcaaagatgaaacgttcaaaataaatgtaaacactattttaaatttagttaaaatgttcagccttgaagataagattgtttttgtggtcttaatacaaatacatattttgccaaatcacagcttcatgataaa

SEQ ID NO: 661364 - DNA, 609 bp, Homo sapiens
gcagaaaccccgtctctactaaaaatacaaaattagtcaggtgtggtggggcatgtttgtaatcccagctacttgggaggctgaggcaggagaatcgcttgaaccctggaggcagaggttgtgatgagctgagatcatgcattgcactctggcctgggcaacaagagtgaaactccgtctaaaaaaaaaaaaaaaaaaggctacaatggtaaattttatggtatgtgtattttatcacaataaaaaaaaatcaatcttgttcattttatattccaagttttcttgtagatgtacaaagagaagtggtcaacttaatgtgttggtttcattggccgaacaactttgcacacagataaatgacgctaatttgtcattratgttatccgatgttccaagtataagctaactctcataagggtttgatatttttcagccaactcacagaaccaaaataaagctttgggaagttcactttgtcaaagatgaaacgttcaaaataaatgtaaacactattttaaatttagttaaaatgttcagccttgaagataagattgtttttgtggtcttaatacaaatacatattttgccaaatcacagcttcatgataaa

SEQ ID NO: 661365 - DNA, 609 bp, Homo sapiens
gcagaaaccccgtctctactaaaaatacaaaattagtcaggtgtggtggggcatgtttgtaatcccagctacttgggaggctgaggcaggagaatcgcttgaaccctggaggcagaggttgtgatgagctgagatcatgcattgcactctggcctgggcaacaagagtgaaactccgtctaaaaaaaaaaaaaaaaaaggctacaatggtaaattttatggtatgtgtattttatcacaataaaaaaaaatcaatcttgttcattttatattccaagttttcttgtagatgtacaaagagaagtggtcaacttaatgtgttggtttcattggccgaacaactttgcacacagataaatgacgctaatttgtcattaatgttatccgatgttccaagtataagctaactytcataagggtttgatatttttcagccaactcacagaaccaaaataaagctttgggaagttcactttgtcaaagatgaaacgttcaaaataaatgtaaacactattttaaatttagttaaaatgttcagccttgaagataagattgtttttgtggtcttaatacaaatacatattttgccaaatcacagcttcatgataaa

SEQ ID NO: 661366 - DNA, 623 bp, Homo sapiens
attaacaggaatgaagtactgatccatgctacaatgtgaatggaccttaataataatattgtcctaagtgaaagaggccagacacaaggccacatagtgtatgggttcattgatatgaaacatcggaagaagttaattcatagggacagaaagcagactcatggttgccagggcctgggggacggggtaaggggaccactagtgggtacatggtttccttccaggatgatgtaaatgtcttggaactagacagagctggtggttgtatatcactgggaatgtcctaactgtccctgcattgtacccttgcaatcgtcaatgtttaattttatgtcatgtaaattttttctgaattaaaaaaacaaaaccaaaggctgccccaaatgttcatccaagtataggagaagatgctccctataggcaagattaaaggacagtgccagacaaaaagttgtaaggagagtaccccatacactctgcatctagcatacattactacatagagctacatgcataaaaccacatcaacwgtactctctggagatttaaagaatttccaagggcaaatctggactctactggaatttcacctaatatgctgacttcagaaaaataactttata

SEQ ID NO: 661367 - DNA, 605 bp, Homo sapiens
ggcacagtggctcacgcctgtaatcacagcacttcgagaggcygaggtgggagaatcacctgagtccaggagttcgagaccagcctgggcaacacagcgagaccccgtctctcccaaaaacattacctggccctggcgatatgcacctgtagtcccagctactctggaggcagaggcgggaggatcgcttgtgcctaggagatcaaggctgcagtgagccatgatctctccattgcacacctgcctgggtgacagaatgagaccccatctttaaaataaaaattaaaaaaaatttatgctacagatttacatttggtaaatgtattcttttgtctttgctttatttgttgtgtgtgtgtgaattttaaatgtctgggataaatgatcatttataagtatttaataaaacaaaaaccctttgctcctcctattaaataacagccttaccagcaactctttccaaacacgaaactattatgaaacatgataccatgtgccaaagctgtcctggggaaggcttcactcacacacaaatggctggataatagtatgagagaaacgaggagtttctttacatatcacaaacagtatcttcaagtgcatgg

SEQ ID NO: 661368 - DNA, 605 bp, Homo sapiens
ggcacagtggctcacgcctgtaatcacagcacttcgagaggccgaggtgggagaatcacctgagtccaggagttcgagaccagcctgggcaacacagcgagaccccgtctctcccaaaaacattacctggccctggcgatatgcacctgtagtcccagctactctggaggcagaggcgggaggatcgcttgtgcctaggagatcaaggctgcagtgagccatgatctctccattgcacacctgcctgggtgacagaatgagaccccatctttaaaataaaaattaaaaaaaatttatgctacagatttacatttggtaaatgtattcttttgtctttgctttatttgttgtgtgtgtgtgaattttaaatgtctgggataaatgatcatttataagtatttaataaaacaaaaaccctttgctcctcctattaaataacagccttaccagcaactctttccaaacacgaaactattatgaaacatgatacyatgtgccaaagctgtcctggggaaggcttcactcacacacaaatggctggataatagtatgagagaaacgaggagtttctttacatatcacaaacagtatcttcaagtgcatgg

SEQ ID NO: 661369 - DNA, 605 bp, Homo sapiens
ggcacagtggctcacgcctgtaatcacagcacttcgagaggccgaggtgggagaatcacctgagtccaggagttcgagaccagcctgggcaacacagcgagaccccgtctctcccaaaaacattacctggccctggcgatatgcacctgtagtcccagctactctggaggcagaggcgggaggatcgcttgtgcctaggagatcaaggctgcagtgagccatgatctctccattgcacacctgcctgggtgacagaatgagaccccatctttaaaataaaaattaaaaaaaatttatgctacagatttacatttggtaaatgtattcttttgtctttgctttatttgttgtgtgtgtgtgaattttaaatgtctgggataaatgatcatttataagtatttaataaaacaaaaaccctttgctcctcctattaaataacagccttaccagcaactctttccaaacacgaaactattatgaaacatgataccatgtgccaaagctgtcctggggaaggcttcactcacacacaaatggctggataatagtatgagagaaacgaggagtttcttyacatatcacaaacagtatcttcaagtgcatgg

SEQ ID NO: 661370 - DNA, 394 bp, Homo sapiens
gcctaacagtattttgtctcttagaggagtctagattgcaaytgcatttcaacctagtaagaaaagcatgtataagatctgctttctttctgatctcctctgggtatttgttttcttatgaaagtctgagaaagtcgcaaagttcagccccaaagaatgaacaagtggttcatttctgccccctagaggaggtaaggaaggtcatggttaaaatgagtgttcagaatcgcaatagatccagccctgcaatagagccaaacctaaaaacaaactactttcagttcatgaaagggaggtgataatgggttagggattatctggatcaagagtgagaacagtgtatcagggtcctgcctggatatatactggatatatatatatatatagtgtgtgt

SEQ ID NO: 661371 - DNA, 394 bp, Homo sapiens
gcctaacagtattttgtctcttagaggagtctagattgcaactgcatttcaacctagtaagaaaagcatgtataagatctgctttctttctgatctcctctgggtatttgttttcttatgaaagtctgagaaagtcgcaaagttcagccccaaagaatgaacaagtggttcatttctgccccctagaggaggtaaggaaggtcatggttaaaatgagtgttcagaatcgcaayagatccagccctgcaatagagccaaacctaaaaacaaactactttcagttcatgaaagggaggtgataatgggttagggattatctggatcaagagtgagaacagtgtatcagggtcctgcctggatatatactggatatatatatatatatagtgtgtgt

SEQ ID NO: 661372 - DNA, 472 bp, Homo sapiens
agtgaaccatgatcgcgctactgcactccagcctgggtgacagagtgagattctgtctcaaaacaaacaaacaaacaaacacacaaacaaaaaacaccaccgctctcaccatcttttggtggggggtgttggcatttcttcatattttaatatactaggaacctcaaaaaaatggaagtaactgtgggtcactcttgtcttctgagaggccctggcacagacctggggatgggagtgaagaatcagggcagccctggatgtaactgtctctcctgcagaagtggttgctccctagtccaaacaggtttttatcagaatctctttacttctccataagaggtaaagatcagtcctcaccttctcattcacccayggaagagacgcattgcaaggacaaaccctgaaaatgttgctggtccaaccaaactgacagggcccctgagtatatccacaagaggagtgcctggcacca

SEQ ID NO: 661373 - DNA, 589 bp, Homo sapiens
agatcctaggtgatgccgatgctgctggttcaggactgcactttggggaccactgttcccagggctattcattgcaattagaacaaattccacaaggtagtacatgaagggctctcacccctggctgtacactcacatcacctagggaacttttagacagatgaatgcccaggtctcacctcagatcaattaggatctctgggggtaggcccctagctgcatctgtttccctggattattcagtgggcaatcaggattaagaaccactcttgcctgacctgacccctgcctgcttctgaaactcagctcttctcactttgccctccttcacagtattccagctcttctggccctctctgtggcctcagacggtcccagctcatgtccaccccagagcctttgcacttgttcagtcctcttgccaggaacactcamccccagatctctgtgtggttgcctccctcccgtcattcatgtcatggtcaagtttcgtatcctcagagaggccctccctgactcccttagctaaagtggctcctgccacatcgcagcagacattctccatcccactgttgtcttttcctcgtag

SEQ ID NO: 661374 - DNA, 449 bp, Homo sapiens
ttcctgttttataactgaagaaactgcttctcatggatataagtaacttgttcaaaccaagtttgtaatgttgttacaaagcctctcctgattccatagtttgactgttccaccctggagattaacacttgaagtaggcattctgcaatggctgtggcccagagaatggtcatgtagacccatattaaattaagaatttgttaacatacatgagggatccactttgttgagtctatacaaaaagggtttgytgagcaaatgaaataacacaaatatagagaaaaattattatctcactgtgtagaaagtttgccaaacttttcatctgtgttggcttacaatcagtgtgccaattacaaatatgctattgattcataaatcaggatgcatatacttagaaacattttgttagtatttggtttgaatccatgataattagtatttatgag

SEQ ID NO: 661375 - DNA, 645 bp, Homo sapiens
gggttccagctgcattcagcctgtttcaccctagcatcagctctgaacgcttttcccaggcatcccagtgaatgctgattaaggccgctcttcctccctagggtcttcctgggtttgcattgscccttccttgagtctctggatctttgctagcagctgcaccaggcccaggaatgagagagaaatgggaagtggaggaaagaagggcagggggaaaatgactttggaagagtaacctgtgtctctaaagtaatgaggtggactttcttttgtgacccacaacatttctatgatgctcatagacaagaaccaaatacactttggcaacaaatagcatcgttagaatctgcaatcagcttttcagtgttgtgccattgaaaaacaatatgcatttggacgaaaagctctggttttattcatttctgtgcatatagatagatgaatttgaagtacctaggaattttgggcttttttgaattatttgtacatacttctttatcatcatggccaatccacatgacatgatgtataaatgaatgtatctctttttgtcatactgaaacataattgctagatgataaaacatttagcacaaacatttcataaaatcaaatttcagttctgttttttttccttcagctttga

SEQ ID NO: 661376 - DNA, 537 bp, Homo sapiens
aaatctactctcgtagcgattttgaaaatacaatacattgttatttactatagttaccatgctgaacaatagatctggactatttcagaacatcatattatacatgatacatatatatgaattttatgtgtcaattaaaaatataattccaattaaatatatattattwcttatatatatatatgtatgtatgtgttttccttataaagaaaataatggaaacctaagttggggtcagatcagcaaggacgttgggaagtcaagctagagatttcaggccttcctctgtagttagtaaggagaaatggaaagtctttagcagacgaggattatgctaaggaggacttctctaggatggggggaggataaagacaacaaaggtggagaggccagttgggaggtcctgatgagagggagagaattccgtaaaagggtgtggagaagaaacatgaggcagaaattacaaaggacaatcagagacattttttactggggatgatgcatcaagattgactttcaggtttcagctgagtgact

SEQ ID NO: 661377 - DNA, 537 bp, Homo sapiens
aaatctactctcgtagcgattttgaaaatacaatacattgttatttactatagttaccatgctgaacaatagatctggactatttcagaacatcatattatacatgatacatatatatgaattttatgtgtcaattaaaaatataattccaattaaatatatattatttcttatatatatatatgtatgtatgtgttttccttataaagaaaataatggaaacctaagttggggtcagatcagcaaggacsttgggaagtcaagctagagatttcaggccttcctctgtagttagtaaggagaaatggaaagtctttagcagacgaggattatgctaaggaggacttctctaggatggggggaggataaagacaacaaaggtggagaggccagttgggaggtcctgatgagagggagagaattccgtaaaagggtgtggagaagaaacatgaggcagaaattacaaaggacaatcagagacattttttactggggatgatgcatcaagattgactttcaggtttcagctgagtgact

SEQ ID NO: 661378 - DNA, 537 bp, Homo sapiens
aaatctactctcgtagcgattttgaaaatacaatacattgttatttactatagttaccatgctgaacaatagatctggactatttcagaacatcatattatacatgatacatatatatgaattttatgtgtcaattaaaaatataattccaattaaatatatattatttcttatatatatatatgtatgtatgtgttttccttataaagaaaataatggaaacctaagttggggtcagatcagcaaggacgttgggaagtcaagctagagatttcaggccttcctctgtagttagtaaggagaaatggaaartctttagcagacgaggattatgctaaggaggacttctctaggatggggggaggataaagacaacaaaggtggagaggccagttgggaggtcctgatgagagggagagaattccgtaaaagggtgtggagaagaaacatgaggcagaaattacaaaggacaatcagagacattttttactggggatgatgcatcaagattgactttcaggtttcagctgagtgact

SEQ ID NO: 661379 - DNA, 537 bp, Homo sapiens
aaatctactctcgtagcgattttgaaaatacaatacattgttatttactatagttaccatgctgaacaatagatctggactatttcagaacatcatattatacatgatacatatatatgaattttatgtgtcaattaaaaatataattccaattaaatatatattatttcttatatatatatatgtatgtatgtgttttccttataaagaaaataatggaaacctaagttggggtcagatcagcaaggacgttgggaagtcaagctagagatttcaggccttcctctgtagttagtaaggagaaatggaaagtctttagcagacgaggattatgctaaggaggasttctctaggatggggggaggataaagacaacaaaggtggagaggccagttgggaggtcctgatgagagggagagaattccgtaaaagggtgtggagaagaaacatgaggcagaaattacaaaggacaatcagagacattttttactggggatgatgcatcaagattgactttcaggtttcagctgagtgact

SEQ ID NO: 661380 - DNA, 558 bp, Homo sapiens
aagcaggaaatagaatttacatataaatttctatttgtttctatttcctgcttaaatatctacattgccaaaaaccaaaggaaagaagacaatcatttatttattctactctgattctttcttttttctttctttcttttctttttgagatggaatcttgctctattgcccaggctggagtgcagtggcgcaatctcggctcactgcacctccacctcctaggctcaggtgattctcctgcctcagcctgtgagtagctgggattacaggcacgcaccaccatgcccagttaattttgtatttttagtagagatggggtttcatcatgttggccaggctggtcttgaacttctgacctaagtgatctgccctccttggcctcccaragtgctgggattacaggcatgagccactgcaccctgcctgattctcttttattggcccaagtttactctgctttcattgtacctgaagcaagactacctgaagcatgggcaaaaatgaagtcattgcaggagtcctctacttgtagtatatgtaaccagcgaatcattttgt

SEQ ID NO: 661381 - DNA, 584 bp, Homo sapiens
gaattgttttggtggcaagagtagggggagcatacgaagtttaagaatgtgtttcacagtatttaatctgcaagtgtcaatatagttaaatacccaaactactgtggrattcagagttataagtaatttcttccaaatgtactgagtgtcctcgtccaaacactctttcacatactaattttagtgagtttcatcaccagtgttgtcctctctgctttcttttacctgcactcttggctttgctatttggcatcttaagatgtcactccatcttaagaagttcctttttagtgtcccacccacctctctgatttatctttcttcttcttcttcctaaggtctttttcctctgttgtctctcaaatgtctttgtttaaatgtatcattttttttcttttattcttaatgtttcttgtgacctgtctaaagaattgttgcctagtccaaggtcaaattttgataatgttgtgttttcattgtcatccagctaaaaatattttctgatttccactatgatttattctttggacatgactaattttaaactgtgttccgtgatttccaaatattagggattttccaga

SEQ ID NO: 661382 - DNA, 565 bp, Homo sapiens
gatgttactacaggttcatttcattttatttgcctattcaaaattcactgggattcataaatttgcgattgttatattttagtagttctaaaaaatggttagttcttcaaattttgcccctcctgcttccccattatttttcttctcttcttctggaactctagttaaatatatgttactccttagcccattaagcctaatctctctttcgtatttacatttttttccccactgtactgtattctggataatttcttctgccccattttttagagtgctagtattttccctcatctatgtctagattgttgttgaatccattcattcaggtcttttgttttctttttatctgaaaataattttaaacatttaaaacttctagataagttgaaaaagtaaaacagtacaaagaatacttctaaacttattattcaggtacatctattatcaatattttaygcctttatctttattgtttgttctctgtccttctctctctctccatgtgtatataattttaaatgtaaatatacatacttatatatacatgtatatacacacatat

SEQ ID NO: 661383 - DNA, 707 bp, Homo sapiens
ggattacaggtgtgagccacctcacctggacccaaatctcatcttgaattgtagttcccataatccccacgtgttgtgagagggacccggtggaggtaattgaatcatgggggcggtttctccatcctgttttcttgatagtgagttagttctcatgagatacgatggttttataaggggcttccccctttgctgggcactcattctctctcctgctgccctgtgaagaagtactttctaccatgattttaagtttccttaggcctccccagccatgtggaatggtgagtcaattaaaactctttcctttataaattacccggtcttgggtatttcttcatagcagcgtgagaatgcactaatacaccagggttcaaggtaccgtgtgttcaagggtacccagagtcaaggcctaaataatgtttcacttctgctaagatagcctctctattacaccagcscacttatcaaacccctataacttatctaaaccttcagtattttaaactgattgttatgcttcttatttcccaagggtcactcccctgtcccgatcttgatggttggctccttgactttagtgttcaccctgacaagctgttgatctatttatgttcctggttatacactgaagtgtatagccacctgcaaatacttgttgacctggagtgcaaacagcgagcatctgaatacctctcaagtcttct

SEQ ID NO: 661384 - DNA, 707 bp, Homo sapiens
ggattacaggtgtgagccacctcacctggacccaaatctcatcttgaattgtagttcccataatccccacgtgttgtgagagggacccggtggaggtaattgaatcatgggggcggtttctccatcctgttttcttgatagtgagttagttctcatgagatacgatggttttataaggggcttccccctttgctgggcactcattctctctcctgctgccctgtgaagaagtactttctaccatgattttaagtttccttaggcctccccagccatgtggaatggtgagtcaattaaaactctttcctttataaattacccggtcttgggtatttcttcatagcagcgtgagaatgcactaatacaccagggttcaaggtaccgtgtgttcaagggtacccagagtcaaggcctaaataatgtttcacttctgctaagatagcctctctattacaccagcccacttatcaaacccctataacttatctaaaccttcagtattttaaactgattgttatgcttcttatttcccaagggtcactcccctgtccygatcttgatggttggctccttgactttagtgttcaccctgacaagctgttgatctatttatgttcctggttatacactgaagtgtatagccacctgcaaatacttgttgacctggagtgcaaacagcgagcatctgaatacctctcaagtcttct

SEQ ID NO: 661385 - DNA, 532 bp, Homo sapiens
gccaaactgtcctggagatgtgttcagcytgttggtaatcacagaaatcagaggcaaaatttgagagttgtgttgtgttgacggcctgcagaaggcaatggaccctatacgaaattacctgaaatggacggtcatgtctgcatcaagagttttcttaggttatctcctaaaacctccttcagttaaataattatatgctattgtttttatactaaaagggaaatgttgactcacaattcagtgtgcttgcttgaagacgattgtgtggtagaaatgatttgtcctaattcattcattctctcactcctttactaacaacaatattagttttcaggacatttgggcatagtcaaaggttgttccctgagaccacaggactgagtaaatgcaaatattttacattccagacttcattaattaatggttagggtaatattttaggaggattaatctgcacataggccgaagagctgggaaaaactcaaagcaaaactcgtagacaaaataaaatatggtgatctaggattgaact

SEQ ID NO: 661386 - DNA, 532 bp, Homo sapiens
gccaaactgtcctggagatgtgttcagcttgttggtaatcacagaaatcagaggcaaaatttgagagttgtgttgtgttgacggcctgcagaaggcaatggaccctatasgaaattacctgaaatggacggtcatgtctgcatcaagagttttcttaggttatctcctaaaacctccttcagttaaataattatatgctattgtttttatactaaaagggaaatgttgactcacaattcagtgtgcttgcttgaagacgattgtgtggtagaaatgatttgtcctaattcattcattctctcactcctttactaacaacaatattagttttcaggacatttgggcatagtcaaaggttgttccctgagaccacaggactgagtaaatgcaaatattttacattccagacttcattaattaatggttagggtaatattttaggaggattaatctgcacataggccgaagagctgggaaaaactcaaagcaaaactcgtagacaaaataaaatatggtgatctaggattgaact

SEQ ID NO: 661387 - DNA, 532 bp, Homo sapiens
gccaaactgtcctggagatgtgttcagcttgttggtaatcacagaaatcagaggcaaaatttgagagttgtgttgtgttgacggcctgcagaaggcaatggaccctatacgaaattacctgaaatggacggtcatgtctgcatcaagagttttcttaggttatctcctaaaacctccttcagttaaataattatatgctattgtttttatactaaaagggaaatgttgactcacaattcagtgtgcttgcttgaagacgattgtgtggtagaaatgatttgtcctaattcattcattctctcactcctttactaacaacaatattagttttcaggacatttgggcatagtcaaaggttgttccctgagaccacaggactgagtaaatgcaaatattttacattccagacttcattaattaatggttagggtaatattttaggaggattaatctgcacataggccgaagagctgggaaaaactyaaagcaaaactcgtagacaaaataaaatatggtgatctaggattgaact

SEQ ID NO: 661388 - DNA, 590 bp, Homo sapiens
ttgaaattatgcgggtggtgtaagccaagaagtgtagatttcctctaagtgcaaagggaagccacgcacttagagtgcatgaagggatgtgctccaaattgtgttttaaaaacagatgtgaaaactagatgagaaatctgcaagagtagacaagaaatcagataggaaattattgtaataggtaaaatgtggtggagacttagacaagggtaatgacaatggagacagtgaagagtagacacatttgcaacatgtttagsattggattggagatagggaatacgaaagaggagatgttcctgatttctttccccaacactagctttattgaggtataactgacaaataaaaattgtgtatgtatatggaatacaatgtagtgctttgatgtatgtgtgcattgtgaaatgattctcataatcaagataattaacagatctgtcacctcatgtcactggtttattgaatgagcaggtgagaggagagaggtgccaatttgtaagataggtaacagtgttgagggaaagatcagtagctcaattttggaggtattaaatttgagacatttgtctgtaaatagaaatttttat

SEQ ID NO: 661389 - DNA, 609 bp, Homo sapiens
gttttagttttccatggtcaactgtggtctaaaaatattaagtggaaaattccagaaataaacaattcataagttttaaatgctatattacaatgcctgtagcgttcacctcacttcatctcatcatgtaggcattttatcatctcactttgtcacaagaagaaagcttagtgctgtacaaaaggatgctttgagagtggaattggattcacatagcttttattacagtatattcttatgtatgttctattttattgttctcaatttcttactgtgcctaatttataaattaaacttagtcataggtatgtatgtataggaaaaagatgtagtrtgtatagggtttggtattttccgtggtttcaggcatccgctggggggtctcggaacatattctcaatagataaggggagactactgtattcttagaaatgtcttttggtgaacacatgactgtttctgttgggtataccctaagaagaggaattactgataaccttagaaatattcagctgtagcagataatgccagacagtcttaaattatacctgttaccttttacaaatgtaaataatcactgaagtgctgttgctacaccatcatttctga

SEQ ID NO: 661390 - DNA, 549 bp, Homo sapiens
tgggttgaggcccaacagtgtttttagaaaacttccaggtaattccaatatgtagccagggttataagttttacaagctttaaagtgtgtgacttacatttttaacttgggcaatgacaagtggaaagtttttaacattagactttcccatcgtaggtgggctttgtgttgaataactttgakttgtaaaatcttaatagattgatgaaaagcaggtagtttcatttatcatcagcaacacatgacctacagtcaaagactcaaaggcatcacagaataatttgcatttttagaataaaagaagttactttttttgtcatgttctctctgccaaagcctttactattataaaaaacagaaaagcattaacattataggtcttataagcaaaacgaccaacagactgaccagatattaaaattgcacaaaatggaaaaatgattcacaaatgaataatttaggataaccatgtatgtagaatccgcatttgtaattaagaaattgtggaatatttattttttgtagcgtgacattttgatgatcctaaga

SEQ ID NO: 661391 - DNA, 558 bp, Homo sapiens
tagacctatacttaaacattgtgtcttctgatagaatttcttgatgattctagcattgataacacagcccctataaatgtcttgcctgtaacaaattactgccttaaatctatggcaaaacaagttcctggaaaaaaaaagttatgattttctcatactacaaaaactaacattctagaattgcagtcctcttctccaagccacctgcatgctaacaaataatcagaaaagccatttggggctagtttgcatggttaatagtttctccttagcatacctagagtatatgtttccagttgctgactcagggcttgagccagatgtaaaaaggcgcctttcttagaattagtgtccaagaaacagtgctattctttaaaaaaaatttttttattatttatttatttttttatagagatagggtcttgctctgtctcccagscgggggagtgcagtggcacaatcatagctcactgcagctgtgacctggactcaaacagtcctcccacctcagcctccagagtagctgagactacacaggtgcataccactaccagggca

SEQ ID NO: 661392 - DNA, 569 bp, Homo sapiens
gaccacttttcctttccagcctggaatctcaggtggcagattccacttttgtggcaagacttaggtgtcgtgtgtaccctaaaaaatagaaaatgcttgtcttttttcattcagctctttcttatgtggttgtgcattcagcgcagcatcctttctctagaaacccctcgtacttagagttctactttatgacagcagcttgacttgctgccagagaagctggaaatgaaggaggtttaagataaatatcaatgatgatttttttcttggtctctctttcttgctctctttctctctccctttttttttgaaaaggaaagtcatatgctcatatcctaacttgtcccagtagagagtcaattacaaccagttggccataaatccartccaagaaaaatactgagggaaggaactgtagcagtagatacggagggtctctagaatcactataaatgttaagaacttgtcagctgcgaacccagggccgttaagcgatattttaggactcagtgtttcccaacatggccccaaatgagtaaaaaccagccaggcatttttgtatgggtagg

SEQ ID NO: 661393 - DNA, 543 bp, Homo sapiens
gtgtttcaaggacattaatagttttgtaatttagggaaaaatcagtacagataagcatgtagacacataaagacaaaatatggttgattagatactctgaaggactctactgcttagtacaacttaacttggataaatcataaacccaatattcaaagccttcttgggattccaagacccagggggaagtcgttaagsgcaaaaaacaaagaaataaagaaacaaagaacacctaaacataaaaaaaatgaacaccccaccttcaaaaacaattcctcccctaaactccagagaactgagatcagaaaagtcagcagtaaatagtgagatcaggagattccactaaggcttgctgtaacaggagattgctaacctgagactcctggattaactaagatcctctgtaggaggagctaacatggtctcacattggaagtgttctaggctctgggtagaaggaaatacaaattctttctaaaggaaagcaaccgcattgtgggaagtcttcaggattcccacagattaattcctattaaatatgaa

SEQ ID NO: 661394 - DNA, 530 bp, Homo sapiens
tacttatatagtggattggaaaaagaatagggaactgtgaaaaagtgactaaggaaggattaaaagctaagagttattctaacaaggtctrtacaatattctcttggtctcagctactcaccattgaagataaggatgttgcttttcattcttaggataggaggagtgtctgtcacatggaaatgtcatcttctgtttttgagaaacagcgtgaaggtcaaagtgatctatttgcactagctgttttttcaagtgttcttaacttaaatagtcaatatgccagaatagaatattttagccctttcaactggatgaatctaggaaccaagataaagagtgacacgttgtcccaggacctatgtgtcacataaatgtgtatagcttttattattgttgatttttagaatttaaagatgatatatctgatggtgactatgttatctacacatgtatatgtggctgaaaggactacttcataaccagcggttcttttaagcctgctagattgtttcctgattccttgttttaag

SEQ ID NO: 661395 - DNA, 357 bp, Homo sapiens
agcactgcagtgagaaagagtcttcaggtatgggagcacagtggtaccaaaggtccagaaagacaaggtcagatcaaggtagaaaagcctgggaaatttggtcagggaaacagagtgggtcagggaatatgagtgaaaggatatgtacaactctgaggtatatcatttagaagggagctgtttgccctctaattcctcccctcttcgcactacaggcaggaacagaaggtgaaggtgatgttgagtcasttttgactatgcagaaaagggagcaacaagatggaggaagctgggttcctgaatgaccctgtggagcagagttgtttgcctgtcctggactgaccatttacctcttag

SEQ ID NO: 661396 - DNA, 531 bp, Homo sapiens
tcaaataatacaacagagctrtagcaattaaaacagcatgatactgccaaaaaatatacctattgaccaatgcaacagaatagagagcccagaaatgaacgctcatatatatcatcaattgatttttgacaaatgtgccaagaatacacaatgggaaaaggatagtcttttcaataaataatgcttagaaaacttgatatttacatgcagaaaaatgcagttggacccttacctctcaccacacacaaaagtcaactcaaaatggttaaggacttaaatgaaaggccagaaactataaaactactagaagaaaacataggaggggaaactatattatgttggtttattggatctgaccccaaaaagcataggcaacaaaagaaaaaaatagacagatgagattacatgaaactaaaaagcttctgtacatcaaagaaaacaattaacagtatgatgagacagcctatggattgggagaaaatacttggaaaccatacatctgataaagggttaatatccaaaatatgtaag

SEQ ID NO: 661397 - DNA, 606 bp, Homo sapiens
gatttagctctcatctatattcacaatctcctaaaggtcttgctttttctgtgtttctctatttttcttttttcttttcctttgtgtgtgtgtgtgtgtgtgtgtgtgtttcttttgagtcagggtctctcttgtcacccaggctgaagtgcagtggtatgatcatagcttactgcagcctccaactcctggctcggtgatcctcctgcctcaacctctgagtagctgggactaggcacatgccaccatgcccagctaattgtataaaaaattttatagaggcagggtctcactttgttttccaggctggtcttgaactcctggcctccagcaatcctcccacttcagcctcccaaagtgctgggattaarggtgtaagccaccaccatgcctggcctatagttctcaaagaataagtcctaacatatgaaacatgacccgtgttgaccagtgcattcttgctttccccatttcatgtatgcagcctaagatgacattatcttttctaagggaggaaaagcatgccagttattcctatataatttctaattttacctctgtgaaaactctggcctcaagaggttagaacttaactgcactcactgg

SEQ ID NO: 661398 - DNA, 400 bp, Homo sapiens
cttgaacctcctaccctttaggtccttctgaaccagactggggtagcagaacacattgtcccttcctccccctaggcgagagagggaggatgcctccccaagagtctgcctgtgcctttcctgggctcctgagagtattgtcggagcccgcctgaatttactagctgaacttgtaggcgttgggtgtctgggcatgcctctctcagagaccccgatcatcgccctggctatgtgtacctcaggcaaacacggggttgtggtttggatctaggaggcacccgggwaggagaggggagatgaggaagaggaagaaaatgaaatctgggcttctgagaagccagtccatcctcagcacctgaacttggggagaactgagatgagaaagcaagactcttgattt

SEQ ID NO: 661399 - DNA, 584 bp, Homo sapiens
aaggtctagtcagtcatggagctaggtaaagaaagaaagcctaytgattcccagatatgatgagctcttcgtgtagcagggtcttcagttaaacgcaatacgactatatttgggggataaacaggagattttcttcatactatcaaacatcatgataaatgaataattacaattataaagataattatttcatgaattgatatgagtccaactaagaaatgtagataagtgataaaaatgcaaagtaaaataaaaatatattttccacatttaagttttaagtccatatggatttatttgggtacatgtcatgaaatacaccaaaaaattgcaccaaatagttgtccagttgtctcagcacaatttattgaaaaattcttttatcatcaatttaatgctgcctttataatataactaatattatatttaatcctttttctcactttctcagtgtagctattgattttagcagcagtttttcagttctaattcttttatctgtaaaccttttatttatctggttgctcttcattgagggacaagtgctcccttgtcatttatgttttccatttttttttttggct

SEQ ID NO: 661400 - DNA, 561 bp, Homo sapiens
aaatgttcctagtggcttttttcataataacccctaactgtcaacaacccagatgtccttcaaggggtaaatggatatataacttaggaagaaaaggaaatgaagtattgatacctgcaacaacttggatgaatctgcagataattatgctgaggcaataaaagccaatctccaaaagttagatactttatgattacatttatataatgttctttcttttcttttttatttttatttttttgagatggattcttgctctgccgcccaggctggaatgcagtggtgtggttttggctcattgcaacctctgcctcctgggttcacgaggttttcctgcctcagcctcccaagtatctgggactacagggacccaccaccatgcccggctaatttttatatttttagtagaraggggatttcaccatgttggctaggctggtcttgaactcctgacctcaggtgatctacccgccttggcctcccaaagtgctgggattacaggcgtgaaccactgcccccggcctatataatattcttcaaatgacaaaattacaggaatgg

SEQ ID NO: 661401 - DNA, 539 bp, Homo sapiens
atgttaggtttcctaatctatttatgtttatctgaagattatactttcctgtttatcaatttgttccttcccttatttctaaattgatactaagtgcatgattttagtaccctgggaatgggtttggaaatactgcgagggagttattttggctgctcttcgcatgtgcattatagttactgccattgacagctctcattaccccagctgtcaaactacttgcttgtccagtgtagcaggcccagacattttgacacaaagactggaaaagcaagaatcatggccaaataccacccttgaattatcatactctaaagataaatatttacgataaaacataaattgataaatatatttatctaaatagagaagctgatctagaagagcaaaaacaaaaaaccrtaaaattctaggaaaaaaatggatagtttctcatattattctatttttagtttaactttctgcattttatttccagcagtttgagaataaaacttcgtgttttaatttctgtattgctactttgctaccatgctatt

SEQ ID NO: 661402 - DNA, 492 bp, Homo sapiens
gatgtttaagtctgctgaagctgtgcccacagccaccccttccccaggtgctctgtcccagggagatgggggttttatctataagcccctgactggtgctgctgcctttttttccagagatgccctgcccagagaggaagactctagagaggcagtctggccacagtggccttgctgagctgcastgggctccacccagttcgaacttccctgtggctttgtttacactgtgagagtaaaactgcctactcaagcctcggcaatggtgaacccccctccccataccaagctggtgcatccgaggtcgacctcatactcctgtactggcaatgagaatttcaagccagtggatcttaacttgctgggctccgtgggggtgtgacctgccagccagaccacttggctccctggcttcagccccctttccaggggagtgaacggtctgtcttgctgacattccaggtgccaccggggtatagaaaaaaaactcct

SEQ ID NO: 661403 - DNA, 604 bp, Homo sapiens
agggctttatagaccacagcaagtatagaagaggtttccagtgcagacataaagactgtaggttcaaattctggctctgctacatgtattaaattacttatctctgtttccatttgtatcagtaaaaaaaggaatattaataagacttctcatgcaagttgtgacatttagtgagttaacatatagcatttattatttttaaagactgttttctgaatgcaaggacatgctattgcaggtttttaagtgacattgtctacttccatctttttaaaaagatcatgtccattgcttgggaaagccttgatggtaattaacaggtttccaaggtattttgaatgctaagcagcttttgaacttgcgggtacaatccaaacatgtccatctgagagaaaaatcaaaatcaggtataaatttgccccctaaaaattaaatgatagaagactagaaagtgaggagtgattaggaaattaaatcaggatgctcataattttmataatggtgagacttttaaaacttaatcattgattctttttttttctaggtaatttttcttttttttttttttaatattttttttattatactttaagttttagggtac

SEQ ID NO: 661404 - DNA, 460 bp, Homo sapiens
cacaagttaataggcaaagttattagcaaggggaagaggcagtcaagttaccacctgaactaatttagctttacaataatcctgcttgagttgagatcatctgtgacattgcaacctgagacttgtaggtgcataaaaaccagtagggtgaaattaattttcttgtgttgttcttctgaagtattcaatactgcttttcacagtgcataattatatatgtttattttgaatgatctttgcatttttattaraatttaaataaagctgcataatctgtcagtccttttgacagctagcaaaatgttaacaaacagcttaccaggcaaagaagtcacttgttaatttaatggacttgaacattgtagcagaattttctgagacacctttaatgtaatagaaccactgtaatagaatacatagaacacatgtaatagaatatattttaaccttctttatgtat

SEQ ID NO: 661405 - DNA, 571 bp, Homo sapiens
cctggcttggtgggtcccacgcccatggagcatggctcactgctagcatggcagtctgagatccacctgtgaggctgcagcctggcagggggaggggcgyctgccattgctgaggcttgaaggtaaacagagtggctgggcagctcaaactgggtggagcccaccgcagctcagcaaggcctactgcctctatggactccatctctgagggcaggacatagctgaacaaaaggcagcagacaacttctgcagacttaaacgtccctgtctgacagctctgaagagggaagtggttatctcagcatggcatttgagctctgagaagggacagactgcctcctcaagtgggtccctgacacccctgtagtctaactgggagacacctcccagtaggggccgacagacacctcatacaagcgagtgcccctctaggacgaagcttccagaggaaggatcaggcagcaatatttgctcttctgcaatatgtgcagttctacagcctctgctggtgatacccaggcaaacagggtttgggtggacctccagcaaactccaacagacctgcagctga

SEQ ID NO: 661406 - DNA, 571 bp, Homo sapiens
cctggcttggtgggtcccacgcccatggagcatggctcactgctagcatggcagtctgagatccacctgtgaggctgcagcctggcagggggaggggcgtctgccattgctgaggcttgaaggtaaacagagtggctgggcagctcaaactgggtggagcccaccgcagctcagcaaggcctactgcctctatggactccatctctgagggcaggacatagctgaacaaaaggcagcagacaacttctgcagacttaaacgtccctgtctgacagctctgaagagrgaagtggttatctcagcatggcatttgagctctgagaagggacagactgcctcctcaagtgggtccctgacacccctgtagtctaactgggagacacctcccagtaggggccgacagacacctcatacaagcgagtgcccctctaggacgaagcttccagaggaaggatcaggcagcaatatttgctcttctgcaatatgtgcagttctacagcctctgctggtgatacccaggcaaacagggtttgggtggacctccagcaaactccaacagacctgcagctga

SEQ ID NO: 661407 - DNA, 571 bp, Homo sapiens
cctggcttggtgggtcccacgcccatggagcatggctcactgctagcatggcagtctgagatccacctgtgaggctgcagcctggcagggggaggggcgtctgccattgctgaggcttgaaggtaaacagagtggctgggcagctcaaactgggtggagcccaccgcagctcagcaaggcctactgcctctatggactccatctctgagggcaggacatagctgaacaaaaggcagcagacaacttctgcagacttaaacgtccctgtctgacagctctgaagagggaagtggttatctcagcatggcatttgagctctgagaagggacagactgcctcctcaagtgggtccctgacacccctgtagtctaactgggagacacctcccagtaggggccgacagacacctcatacargcgagtgcccctctaggacgaagcttccagaggaaggatcaggcagcaatatttgctcttctgcaatatgtgcagttctacagcctctgctggtgatacccaggcaaacagggtttgggtggacctccagcaaactccaacagacctgcagctga

SEQ ID NO: 661408 - DNA, 605 bp, Homo sapiens
aacagtatactgtgtatatgtaaaagcatatgttatatctctttctgttaccatgtgccatataacaagctatataatggtaaaaataacataaaacatttttagtatcttgaaaaatctttcttaagttaaactaatctgccttcttagctaagttatgtgtatttcacataacgtccaagaagttctctagtaccgactctcagagggcctaaatctttcccagaatgatgggagtagcacagttcaagaacaagaatgaatctctgtataatcacaccacaatgtgaggtgaccctaagacagagaactgatcagatacacatatgggttttaggaagactttctgatgctcttttttaacacagctgtgagaagaatgtggctaagacccagtagtcattcttgagkagagctggtaaaggaaaccatgaggagaagagaatttaacacatgggtgtaagagagtccggcttcattgatgcgatctgaggggaatgcctaatgactggaagaatcaaacttggcaatgaaaacacaaagctcttttcatcaattcaaacgcagactctaaagctgcagatggtcacctccagccttgtcta

SEQ ID NO: 661409 - DNA, 599 bp, Homo sapiens
tcaatttccttgaagccttccttctctctgtattacctgcactgaacaactaaaaggttacttagtaccatcctattctatgaaataataaatgaacaaaaaatatatatattaatatattactagcatgatatatacttataagctaataagcaaatatttacagcaactattcattcatattatctaggtgatttactcaaaataggtatttctaccaaagttgggaaacaaaacacataccagaagaggcagataactgcgtgtcacccaaacctaaactgatctaaggaaaaataacaaattacaactttcacatgtcatgttttgtagagtttytgaaaatccttgaggattttgtcaggagacaggtttgtggctattctcttagcacacagatgagaattgttctactaattaagatgaaacaataattttcattggccttacagagctggcactgtaggtgactatatggtacattgaggggagagaaggggacctatatgcctcctctgctctataagctgtcatcttggtggacagagaaggtggtgggccagtccttgtgtcctttccacctcccatgcccgccgtac

SEQ ID NO: 661410 - DNA, 601 bp, Homo sapiens
aatccgggccagcttacttgagagtgagatcgcacatcaagagagagtcctagccacaaggcaggaccaactgttagcacatgccacccagccccagtggactacagctacttgagtgattccaggcaaggcttatagaactgcccagctgacgcggtggctcacacctgtaatcccagcactttgggaggccgaggcaggcggatcacgaggtcaggagatcgagactgtcctrgctaacatggtgaaaccccgtctctactaaaaatacaaaaaattagccgggtgtggtggtgggcgcctgtagtcccagctactcgggaggctgaggcaggagaatggcgtgaacccaggaggcggagcttgcagtgagccgagatcgtgccactgcactccagcctgggtgacagagggagactccgtctcaaaaaaaataaaataaaaaaagaactgcccagctgagccaagcccaaattgacatgattaaataaaatagagttgttttaagctactgacttttgggtgatttattctgatatggaaatattaattgtagatgtcaaaaaaagagaagtttgccttggttttgctggcaaagcag

SEQ ID NO: 661411 - DNA, 527 bp, Homo sapiens
acatttgtagcacttgatgatttacaaagtccttttacatctgttttttcatttgatcctatcgacaatcataataataataaattatatatataacccatataataaygatggtgatgataattttagtattactgtcattataattattattatattcattctacagatgaggaaacagactcagtaagccttggaatttgccaaggactggctaggacctagaactaagatcttataaccacactccatgcaactatgagtctctaaatctctctgtaagaaaaaaatttcaaagtaaagattttactcttgcaatttctgttgtgatagtaccatctctttcacatactacatacaaattccctaataatcaaaagattgtacacatttttttcaatgaagtacaataatgtgaactgcatgtgtaaacagcatcacattattaccacctctctatggtattatagtggcagtatgctttgcctcagccttcactaattaggaatattgtgacaattcattgc

SEQ ID NO: 661412 - DNA, 638 bp, Homo sapiens
attattattatattcattctacagatgaggaaacagactcagtaagccttggaatttgccaaggactggctaggacctagaactaagatcttataaccacactccatgcaactatgagtctctaaatctctctgtaagaaaaaaatttcaaagtaaagattttactcttgcaatttctgttgtgatagtaccatctctttcacatactacatacaaattccctaataatcaaaagattgtacacatttttttcaatgaagtacaataatgtgaactgcatgtgtaaacagcatcacattattaccacctctctatggtattatagtggcagtatgctttgcctcagccttcactaattaggaatattgtgacaattcattgctaataaaacataacatgagtctctttgtactgtttttaatttggcctgatgctaaaacctatcagyttagttttttaacatggtagtctaaacttcaaggcttgctctatctcctagagcaatttagagctaaaaccagtaataagcaaagttattggttataagcaaggtataagcagttaaagcaaagttattaattattaatatatgagaatttaaaattttataaataagttagaaattattaatgtatttt

SEQ ID NO: 661413 - DNA, 638 bp, Homo sapiens
attattattatattcattctacagatgaggaaacagactcagtaagccttggaatttgccaaggactggctaggacctagaactaagatcttataaccacactccatgcaactatgagtctctaaatctctctgtaagaaaaaaatttcaaagtaaagattttactcttgcaatttctgttgtgatagtaccatctctttcacatactacatacaaattccctaataatcaaaagattgtacacatttttttcaatgaagtacaataatgtgaactgcatgtgtaaacagcatcacattattaccacctctctatggtattatagtggcagtatgctttgcctcagccttcactaattaggaatattgtgacaattcattgctaataaaacataacatgagtctctttgtactgtttttaatttggcctgatgctaaaacctatcagcttagttttttaacatggtagtctaaacttcaagkcttgctctatctcctagagcaatttagagctaaaaccagtaataagcaaagttattggttataagcaaggtataagcagttaaagcaaagttattaattattaatatatgagaatttaaaattttataaataagttagaaattattaatgtatttt

SEQ ID NO: 661414 - DNA, 538 bp, Homo sapiens
gttcagaccttgcaactctgtttttgttgtttgaactttcttctccgttgtagctagggatccggcatggaatttaagcacttgtgtggtaactccattccttcaagccattgtgttgttaagctctagctaacgaacttttaacactggctccatgtaaagcaagacttagaaaacagcagcgatcaacatttttggttttataataagattatataatttatatgtcttcatgcaactaagatgctcttgcctccctagaccaactgctccctaaaaggtagcctttaaaatatatatatgaaaagtaaagaaataaaccaaagtgcactaacaaaaattaagaagtaactttcatttcaaaaatcatacatactgtggcagaaacttcaaaaagcatacytgttttaaaacttaggaactttgcctaaaatagaggaaccataactgtataatatttttaaaaggtgagaactgccaaatgcaccagtcatgtatactttatctcatgtggcccttttcttccatgccaatgttt

SEQ ID NO: 661415 - DNA, 619 bp, Homo sapiens
aaaacagcagcgatcaacatttttggttttataataagattatataatttatatgtcttcatgcaactaagatgctcttgcctccctagaccaactgctccctaaaaggtagcctttaaaatatatatatgaaaagtaaagaaataaaccaaagtgcactaacaaaaattaagaagtaactttcatttcaaaaatcatacatactgtggcagaaacttcaaaaagcatacctgttttaaaacttaggaactttgcctaaaatagaggaaccataactgtataatatttttaaaaggtgagaactgccaaatgcaccagtcatgtatactttatctcatgtggcccttttcttccatgccaatgttttttgttgcttagggagatcttcctgataatgtcacaaagaatgtctctcagacccatatagattaggtacactttggcttgctaagaacaaatttttctttaaaatagctaagcttcatattgcttctaactrtactatcttgagactaaaagccaagtgactgaaagacaagagactgaatttcttctctaactcataaaccagttctgaagatacttctgtgggagaaaattcaaatatattttgaacaat

SEQ ID NO: 661416 - DNA, 408 bp, Homo sapiens
ttaagttttctcttggtttcagtattcctttactatttcccattagaatgcaagctcctgaagatgagagattcagttttgttccgatttctttgcacaggtaaatacttgatgrataatcatccttgtttaatgatgaaaccctaaattttcaaactatttcaactttctaaacatttgtatgatgtgccgttctaaaaatatgacattaaaagtttaaaatttaaatatttttcctatatcagtgatattaaaatatataattatgtcaaattatctagcacctggcacattaccaggtaaaacattgtatttacctgaatactatagctgtttaaccataattaattaatcaatttaaagtgaagggctgttgtggggttgtttgatgttgttgtttaatttttt

SEQ ID NO: 661417 - DNA, 600 bp, Homo sapiens
cactgccctggcagaaccagaactctactgacccatttatttttcatatggatacaattcaaagacccagcagagtcctgcaggagagccagccatgtgcttcacccagattccataccctactctgaaaaacatatataggctttctgtattctggttttaaaatatgatgtaatagcaagcaagtcattaaaagcaaggaaatcctttatcartgacaaagattggaacattaagttttattttacttttttctaggtgcaaacctttaatttggagggtagaggagaactacgtaatcatttattcctatacaattctttctttgtggctaaggaaataacattctctatacatatgcatattgcctgaaaggtggtgtaaaagtgccttttgtttccttgtgagtcattttgttgggtttcagaactgtcacttttagttatttaccttaccataatatctctgactataatataaatacaatatataattatgcttttgaaaagggttttttacttcttggcccacagtggttattttggagctattacaacctatctgttaaacataaggactaacagcgtggaacccaaattt

SEQ ID NO: 661418 - DNA, 527 bp, Homo sapiens
ctccttcctacctcatttctgctaatctattgacctgatattgagagaattcctagctttgaacaaacagaccacattgctgcttctagttgcagagggacttattcagccacgttttgattctggttaaaaaagcaattatgctttggagggctttgatttgataggaaagctttcttaaagtccacagaattttatcttttggttgtcttagaaattcttacctggaaattttacagcttcaattatttgaaagaaatgagacagtttgtgctgattgaagacatctattctctaattaaccacaaaaggcctgaatcttaatccctaatacttcaatcaggaaagattttcacaacttgcacagctagagccatgtaatttgggcaaatcgtttagcctctatggatctgtttccttatctataatatgagagaaattgcactgtgacctctaatgtttcttcaaggtctaaaaytgtacgattctatgatttcttattccatatgcagattgtcgtttgttga

SEQ ID NO: 661419 - DNA, 457 bp, Homo sapiens
cctaggaatcaatggtactgagtctccccttctcactggtagaagttagtgctgttctatcaacttagctactctacagcaattaactaattaattcaaataattaccgaatagcttccatgtgcagttgagctccttacctcttgcaaaccacacctgtctccgtgggtttcatggatttgcagggatgagctctttcctcaattatcccactaaaagggccctgagtcctggatagcatagactygggtcacctatattacgtttgccagattttatgatctaaaaacttattatttgacttttaagttctgaattttattggctatttataatgatttatgttctacttatttacctaaccatttggagttataagagttgttttataagcatcataacttactgtcctggattaaatatccatttttaaaagttcctagtatttgctgcaaat

SEQ ID NO: 661420 - DNA, 610 bp, Homo sapiens
gtccctcctgcttcttaatttttttttttcttttcatgtcttatttgcaaagagttgactatttccagataaaatatcctaatcataggcaatcaattgccagtttaatttttaatgaagcagctttaaggatgtgctttttactactatttctattcatatttttctaagatacagattgctttattatcttcatcatgattaatggatgaatatttaaagataaataatgaatgagagaggatagtacaattatagcctgctgttcttcatatagtactctgtgttgtactctaacgttgatatggtttggctttctgtccccacccagatctcaccttgaattgtaataacacccatatatcaagggtgggttcatctggatggagataattgaatcatgggggccatttcccctatgctgttcttgtgatagtgggtgagttctcatgagacccattggttttataagcagcttcctcctgtgctgggcactcattctttctcctgtcgccctgtgaagaggtaacttctgccacggttgtwagtttcctgaaagcctccccagccatgcaaaactgtgagttagttaaacctccttataaattac

SEQ ID NO: 661421 - DNA, 500 bp, Homo sapiens
tggactaaagcaaactttgtctcactttttgggtgaggatattcaacatgaagtagaaayggcactccccagacaagggagaagtctcagggacacagaccccttttctgtatcccatttcctagaatcacttatccttgtagttaactcccaaaatgcttcctttagccttgagaagataatatgaaatatctttctattaattatgccctgataagctcgcaacatcattttacttttttttgtttttgattttatgttagtatatcctcatatttgtaaaacattttagttcaattttgtacatttattgagcattcatgctgtgcatgacaatgctcactggtactaaggggatctctttcctcacaaagctctgttgatattggccatgggcctccagacaatttccagagccacctttcaaagtacaactatgtgtgagaacagtcttcctaacagcctcaattctagatcagcttggagtcagatcaagccac

SEQ ID NO: 661422 - DNA, 569 bp, Homo sapiens
aatgctcactggtactaaggggatctctttcctcacaaagctctgttgatattggccatgggcctccagacaatttccagagccacctttcaaagtacaactatgtgtgagaayagtcttcctaacagcctcaattctagatcagcttggagtcagatcaagccacactctgggtgcttccatcttgagcatatctaaattgaggcaaggatggagagtattcagagaacaagagagtccttttgttttccaggagtctgtgaggaagtaaaatttggtgaaaaattttggaagactgaatgtttatatgacacttttattggtatatatcaatttatgcacctaacattagccccaagtcttatcaagttcccctgatgtttatattgttggtgtttaaccaatagctcctctcatccttttcatgtgattttagtgtatttggataacatacatagattttgattctgcatattataaaattttttcgatgtcaccaatcaccataccacagaaacaatatgacaaatgcctactccttgtctaggccccatataatgaagacccag

SEQ ID NO: 661423 - DNA, 547 bp, Homo sapiens
tggggagtgtgatgataaattttaaacaacaggagagacaatatctaaactcaggtaattttaagaagaataaagattacataggcaaatagatgttattacagtaatagttaagaagaatatggccaatttaacattttgaggcagtatatctctatgtaaccctatattaacatatctacatctatatctttttatatagctgcatcctttgttcaatagtatgcttttggaggtaacatacaagcgccatcagcattttgcttatttggtgagaaatcaccaaatctgttattgttacaataaaacaatataataattmtttttaccaccagtaatttttcagaaggctctagtatggaatataccattattgtttaaaattgttcttgaagtgttcaagaaaaaaattgacattggaaatgaagaggtgtatttaatattatttccagattattttatcaacctggaaatcttccaaatcaataaatgttttcaaaataataataattaattattgtgcctggtgataatataaccatataga

SEQ ID NO: 661424 - DNA, 532 bp, Homo sapiens
cattatacctgcttagtttcaagatgacatcactyctgccatgcaacaggctgtttccctatagttccttgattgctatacattattttatttattcacaatcatttagcaagagtcaggtatatgcccagtgatatatgggaagttatttgtatgttataatatactacttgaaaaaactattcaatgtatgcagaacaagtcaatcttcaattggaaactgtggtaggccagtgaaataaaataaaaccatctccctgttattaaatatataatttcacgtaagtatgaaattaagtattataaaattcctgttcagatccatatttgctaccaaaatagatgagtccatttctaaatacttttcagaaaaatatagtgtaattatataataatgggaaatttgaaaatattttcctggaaaattatttaaaactaactgaacataatagaaaactggacagattttcttaaaaacattttcaaaatccagttagaaaactattattcaagaaagaaaacttgctgtgct

SEQ ID NO: 661425 - DNA, 526 bp, Homo sapiens
tctgcttcattgcagttgtgagaaaawagcctaattagagaagtttcaacactgaatgggaggaattataaatagaaaatctaacaaatcttttaataaattttgctttaaaattagcagggagatggggtggtatctggagatatatgtgtgttcaaggtttttgttaattaacatggatagtattacatcatgtttgaatgatcatgagaataactcaattggagtggaaaatttgatgttacggaatacagaaggggtctattgcttaagtgtaatacttgagtggatgagagctagtgtgactgaatgaagggttgttcttaaatataaatgctcttaaataaaactaacagaaaggagggcagagaggaaatatgactagattgagtaatgaggtatgggaatgtgtataaataatttcctttcttctattttgtcagtgaaacagaaagcaaaataactacagggagtgatcatgaggaaggaggaagcacgaggaaggacttaggagagaggaggcaaa

SEQ ID NO: 661426 - DNA, 566 bp, Homo sapiens
ttagtgaaaatatttgtggaaaatgttttatatttgataagaaaatgatttattgaaaatagtactaatgccttattctcctgctatttctgttaataagaaattataaaataagtctttaagagaaaagtcatatggtagatttgtttccaatgggaaataacttctagggcagaattgttaagaatagacaagaacaactttagaaaacatgtcaatagaattagctttgcctaaacatcttttttgcttctgtatttttaagtttttttcttttcctcattttttcttttcataaaaraccatgtggataagaacagtgttgccaatttccctgtgcttttgctagatggcattatctttgtcagtctttattgttcaccagtcctctcccttatatcatttttacataatttcccttaatcttcctgctttgtattgttactatattgttcttattagatggtaatatgaataaatacataattttttcctatattaaacatatcaagataaagtagacatgttgatcatgatcaggaaaccaggggaataaaatgaacaaa

SEQ ID NO: 661427 - DNA, 566 bp, Homo sapiens
ttagtgaaaatatttgtggaaaatgttttatatttgataagaaaatgatttattgaaaatagtactaatgccttattctcctgctatttctgttaataagaaattataaaataagtctttaagagaaaagtcatatggtagatttgtttccaatgggaaataacttctagggcagaattgttaagaatagacaagaacaactttagaaaacatgtcaatagaattagctttgcctaaacatcttttttgcttctgtatttttaagtttttttcttttcctcattttttcttttcataaaagaccatgtggataagaacagtgttgccaatttccctgtgcttttgctagatggcattatctttgtcagtctttattgttcaccagtcctctcccttatrtcatttttacataatttcccttaatcttcctgctttgtattgttactatattgttcttattagatggtaatatgaataaatacataattttttcctatattaaacatatcaagataaagtagacatgttgatcatgatcaggaaaccaggggaataaaatgaacaaa

SEQ ID NO: 661428 - DNA, 637 bp, Homo sapiens
tgcttttgctagatggcattatctttgtcagtctttattgttcaccagtcctctcccttatatcatttttacataatttcccttaatcttcctgctttgtattgttactatattgttcttattagatggtaatatgaataaatacataattttttcctatattaaacatatcaagataaagtagacatgttgatcatgatcaggaaaccaggggaataaaatgaacaaaatgaaggacatcatttggtttgtttgctagagtrtcaagagaaaggaaagaaagtgagagattagttcttatgtcaataaatagccctgtaggttcctgaagactagacaaagagccagaggactcagagggccaaatctatggtctgaccccaatgataatggtaatgattatatttattttattatgttatgtgatactataatggtaaattacatacaggagacaaggaggacaaggaggatgttcatatttattggtcctgtaaaaaaataaaaaggaccaatatttaggaagactttcagagtgttaaaaggactaattttcttgtcttgtaccatagactgctctctctcttttttaaaaaagtttgtagaacacaaataaatctaccgcatgtatcacttg

SEQ ID NO: 661429 - DNA, 519 bp, Homo sapiens
gcaactcctttgcgcgtttttttgttgttgttgtttgtttgtttgttttatccctgtataatagatattttgaattttttttttccggtgccttgatttacaaggagcaggttggatttgcgactgcctaattaacatattgggtctggtatgttaaaatgagatttccatggccggctgaagcagaacaaatttagttaacttccaaagccctttaccctggcgcctttttttcccctgaattccctttcgtcttatctcagcgcccgcccccatcggaaaatttcactcctttctcgaagacattagaattaacaagataaagcacttccaaagtagtctcatcaatgttttattccatagtgaagacggtctgaataatttaactaaggagtgttcgtttgtctcccscctttgggagctgcttgctggctacattcagcggaggatttggcccagccaagctcagggtgccctgcttcaggaggcagtgactggggctgctggggggcggggggt

SEQ ID NO: 661430 - DNA, 587 bp, Homo sapiens
gtattattgccaattttgaggctgggaaaaggaagctacttgaaacttcctaaaggcttaactggctaacctattagcttatttcagtgatttttattttctgtttacttaaaaatgtaacatattggcgttatcttcagggttttgtatgtagtataatgaattttatgttttatgtattattgaagagtaaaactggaaatttggaccttataggtgtgagagcccctagaatacataactagcagataattttgctaaatcattccaatgacacacatgtgcataactctgtcttgttcaacaagccttgagagtgagacttcttattctggttgcagagcccacatttttattcccatggcatccttcaatcaytgaggactatttagaacctaaggctgtataatttgttcattacatggtatgtgcatggtgaaattaagaagtattatgttcataattattgaagctattccagttagaggtgaaccatttttagtatgctctaccaacataaattgtatgttattatgaaaattccagtttcatataacagaagacagaaatataagaatttaattcaa

SEQ ID NO: 661431 - DNA, 592 bp, Homo sapiens
gggcatggttgtgcacacctatagtcccagctactcagggggctgagacaggagaattgcttgaattcaggaagtggaggttgcagtgagcttagatggcactactgccctccagcctgcgtgacagagtgagactctgtctcaaaaaaaaaaaaagaaaagaaaaaaccttaaacacacgtaagtgaacttacccccagggctcaatgaataagggagtgggagaaaggtgaatccagctgctcaggtgctaagtggtcatctgggatggcagaataggtgacagtgcaarccagtggttcctccatgtccaccctgcgaaaggctctgtaccaggtacgggaagatgcaaagctggctgggcccaagtccctgctctcaagtggggaagccacagctacagctcctcagatgtcacctcttctaggacccttctatcccattcaggtgcctcactgggaccccacaggctcacctgttgatactgagcacgctgcttgctgcactggatggtcatttgctgacttctgtcttcctatgctccttctattgcatcactgctgggacctatgttttacacaattgactgtcc

SEQ ID NO: 661432 - DNA, 351 bp, Homo sapiens
acctgttgatactgagcacgytgcttgctgcactggatggtcatttgctgacttctgtcttcctatgctccttctattgcatcactgctgggacctatgttttacacaattgactgtccggtgaaataggggaagtgaatttaaatctaggtgagagggcgaatgaaaaattttgaggtgcacttgaaaaaagccaaactcatacaaatggagagtagaagaatggttaccaggggtcaaggggttggagaaatagggaaatgttagtcaaagcgtacaaacttgtagttagttccaagatgagtaagttctggagacttaatatacagcacagtgactatagttcatgta

SEQ ID NO: 661433 - DNA, 599 bp, Homo sapiens
tttccttccagcatttgtcggcaaggccaacccacttcccagcctagtcaccagggcaaccatcacccccaccttgacagacaagtgcaaatgcagcttcttgcacccacatccagggccacgggacccagccctataatcagtctcccgctgcctctgcaggcagccagcagcgacagtcacacacactccctgcactccgagcccatcaccccatcacggttctacaggcaccccctccccacgctcacacagcgcrttctgcttccctcgcccactgcctcccaggagacaaatgtgcaatctgctcctggcgcgtatcatcacctctggagggaggaatctgccctcgagtcgaggcacagcccaacacacacagcccacacatgagaaaaaaacaccccttcccggagaagtggagtggtggcagcgaaccccctctccccttccagagacagctgagggggcggcggagtttaggaagagtttgcaaagtgacgagcacatgagcggctggctgaggcagctgatggggaggctagtggcggggcgggttgggagtgggggaaggtgggcggccacagcctgttgctaatgaa

SEQ ID NO: 661434 - DNA, 599 bp, Homo sapiens
tttccttccagcatttgtcggcaaggccaacccacttcccagcctagtcaccagggcaaccatcacccccaccttgacagacaagtgcaaatgcagcttcttgcacccacatccagggccacgggacccagccctataatcagtctcccgctgcctctgcaggcagccagcagcgacagtcacacacactccctgcactccgagcccatcaccccatcacggttctacaggcaccccctccccacgctcacacagcgcgttctgcttccctcgcccactgcctcccaggagacaaatgtgcaatctgctcctggcgcgtatcatcacctctggagggaggaatctgccctcgagtcgaggcacagcccaacacacacagcccacacatgagaaaaaaacaccccttcccggagaagtggagtggtggcagcgaaccccctctccccttccagagacagctgagggggcggcggagtttargaagagtttgcaaagtgacgagcacatgagcggctggctgaggcagctgatggggaggctagtggcggggcgggttgggagtgggggaaggtgggcggccacagcctgttgctaatgaa

SEQ ID NO: 661435 - DNA, 571 bp, Homo sapiens
tcaagctcgggtccttctgccctcgaggtagcccggcctcccctcgcttcccagccagcactctttctcagtgtcgtcctggtccctgtctacaagccctcgcgaccctttgccgccatcctgagtcaccgctcatcctttcctcccatcccctccaggactgtagctgggacccagctccccaatccccttgagggggtcaagcttcagcttgctccccccacccctactggctctcccaccccgcagagtcatcttcctcccggcggctccaacctttagcgccagcaaacctagtttacggaccggacccctttcccctggccattgcttaattagctgccttagckcctctcactcccacctgccgcaatatctcaaatctctggtttttttccagccccggagtttatttccttccctcccccactccagatcttgtccttttcatgcctactcggctgcagtcttcatccatctcccttttagcatttcttggggtggaaaatgctggagaaatagccttgaagtattagagataaaaagtgtgtgtattcgttttataacatgc

SEQ ID NO: 661436 - DNA, 601 bp, Homo sapiens
aaatacctaatttatagaatgttgcttggaggagcaagagcagatggttggagttgaacctcatcctttttttcttttctggctttggtttttctcgcgtaagattcagtaagtttacatgagacttgagtatacagtgattagttttaagttcattgtagagtaggaacattatacgggatctactatacggaaaaaaatccacaaatatggtagttcattttgctgttcaggatatcctgtttgtattacttttgccgtgcaagctttatgattttgtctgaggggttttagaaatttggtygagcctactgtcatttcaatttcaaaccatctcacaggctctacagaattgcttaaggcaaatggttattgcaaatatttacaagatttttctgaactatttaaaacattgtcttgtagattgagcatcttaaaaactaatacagtgaacatgaatgatgttttaattaattgattaaaatcctttagaaacaaatttcctacagcattttgcgtttatttaaaattgttcattagcttacacaacatatttttcccttttggcaaattagtcactctttttttttccagaatcagg

SEQ ID NO: 661437 - DNA, 603 bp, Homo sapiens
agtatataatggattccagctgtataccttccattattgctaaggccaaattactgaagtctttggcaaaccttgaattccctgttttggaaaagtackaggtctgtgaatataaagggtttggagattgtttcccatctctgtttccttgtcttttgttatgagaacaaccatgggaggcatctgtgtcttttttcctacttaccaaacactcagaaaggtttctttgtgacatctgtagaaagcagaatgctctcatgggatctataggaaaagcttgaaaataaaaagtgaaatattttcatcaatgtaaaagtgacccatataatgtcattgaaaagacctctgaaagcgtaataacataatgtgatgtgagagaattgagcaaagttttcatcttgtaagcatagtgttttattactttaaaaaagcctatacaattctgtagtacaaaataatttcataatatagaataataaaatacattaaaattaatctataaaataagataatatataaagcaatataaaataaatgagtatacatatttgaataatgtgtcaagttatgtaactatcaatgtaatcatattataacatatgt

SEQ ID NO: 661438 - DNA, 606 bp, Homo sapiens
tattttttcgtttaagttgacatgtartaattgtatgtatttatgggatacagagcatatttcaatacatgtatgcagtgtgtaatgatcaaatcagagtagttagcattcatcaccttgaacatttatcattcctttgtgttgtgaacattcagaattctctcttctagctatttgaaaatatacactaaattgttgttaatcgtattcaccttacactggtacagaacagcagaacttattcctcctatcttgctgtataaattgttgaagagccactcaaaaggcagtgttctctatatcattgatgataaaggtttaagctaaagaggagtttatctcttcgcaaggaacatgaaactttcgtatactgttttgacatggcattgataataaaggatacatagtggactttattagtaaaataccttattgtaacataaatattaaatcatgaacataactcttacaaaattatcaacttagaaatccttttaggctgtcatttcagccagttcttatgatgggactatgacctgagatggtatgatggctataggctatggactgagaaatcataggttggaatactagctctaatcttta

SEQ ID NO: 661439 - DNA, 656 bp, Homo sapiens
aatttatttcctctggttgttgtaacaaattaccgcaaaccaggtggcttaaaaataatagaaatttattctgtcacagttctagaaaacagaagtctgaagtcaagatgtcagcagggatctagaggagaatccattcttgcctattccaacttttggtggttgtcaccattccctgacttgtggctgtattgctcaaatttctgcatctgtggtcaaatggccatctattgtgttttattctctgagtttttcttttaaggacacttgctattggatttagggcctagatagtttggataacccaggataatctctttatctcaagagccctttaaaaattaagacaataatcgcaggttctaggattaagatgtagacatatcttttagggggccaccattcagttcactacaaatagtatttttctgtgcaactttgatttctctttttttgatcctctctccatttggcatgggttctctatttcacaccctttgctattccttctgaattttgtytattaaaggattctcctagagagtgatgagaacagtggaatgattatgatgtcctgtatttcatagcttaccgtatagcaacagaaaaagcctttcttcatgacagggcagcttcatttagaatcagaatatgtt

SEQ ID NO: 661440 - DNA, 656 bp, Homo sapiens
aatttatttcctctggttgttgtaacaaattaccgcaaaccaggtggcttaaaaataatagaaatttattctgtcacagttctagaaaacagaagtctgaagtcaagatgtcagcagggatctagaggagaatccattcttgcctattccaacttttggtggttgtcaccattccctgacttgtggctgtattgctcaaatttctgcatctgtggtcaaatggccatctattgtgttttattctctgagtttttcttttaaggacacttgctattggatttagggcctagatagtttggataacccaggataatctctttatctcaagagccctttaaaaattaagacaataatcgcaggttctaggattaagatgtagacatatcttttagggggccaccattcagttcactacaaatagtatttttctgtgcaactttgatttctctttttttgatcctctctccatttggcatgggttctctatttcacaccctttgctattccttctgaattttgtctattaaaggattctcctagagagtgatgagaacagtggaatgattatgatgtcctgtatttcatagcttaccgtatagcaacagaaaaagcctttcttcatgrcagggcagcttcatttagaatcagaatatgtt

SEQ ID NO: 661441 - DNA, 595 bp, Homo sapiens
cagttctcaaacctggactatgcctcagaattgccagatcccatgccccaccccaacaattcctgaatgaaaatatgcagaggtggggctcagaagatatattttttagggtgctctgcaaatactctcatgtagtcatgtgggaggctttgagaactaatatctaaggcttacgcaaagcccacctttaataataaaatgtatcacagctctggcctgtgacattaataccaagggacaaggtggcctgtggtttggaaattcaagatccatcagtatgaagaaagaaaaaaagtcaatactccctggtggcatacagctttcttcacagacaagacatacagattttgctgggaattcatattcctccctgccctacctcatcctttttaggttgcggataacatagtttgactcawgtacctttccaagtaagctgcacttcagaggcaaagaattaggagtgagtggcagtagccctacacagagaagcctatattttgaaatgggactcttccattatagaactcaaactttcccacagctgttctctggaattcttactatgtgtcaagccctgttctgaggttttata

SEQ ID NO: 661442 - DNA, 621 bp, Homo sapiens
catgaacatttatggccttttccatttagttgcctgtcctagaacaggttctgcaaagatagccctgcatctttgagtacagtaaggcaaccaagtcaccattagtacctgttacataatggctaccatttagtagttacactaaaggcatataaaatgcttctcaaacattatctaatctaattctcactatagccctgtgttagacattcttatttctatgtaaaaaatgaagcacccagggtttagagtttaaataacttacttaaagccttcctgatgaaagtggaagtgtggagytttgaaatacaggcctctgtggctccaaagtctctgtccttcaaactgtactggtttttaccacacagaataagtactttgaaattcatttcattttgcctccttttaaggtaatagccattttatttcttctggctgactttctgcaattactttccagtgcaatgactcattgataaatctctgctttggaattctttctttgtagatgttgtatctctgggtagtggcctcctgcccgcaccccccccgctttttttttttattcaagagcagacacagagtctcttcccttatgtctccacctccctcagcactttc

SEQ ID NO: 661443 - DNA, 594 bp, Homo sapiens
tattgcttaattggaacatactaaatagatgaggaggctctgggagagacgtttctctacacattcttttagctgatatgcattgaattggcacactccgtctcctctgcttatgatgtggacattagcttctctctcttctaaatctcycattcatggcttcctgtttggccccactcttgctgccccggtctctcggtctctcattatcgcagtctcagcagtcacttaactctacccttgcctcaagtcaggctcatcttcaacccatcttccctaagatttctagagtgagggtgtaatatcactctcactttaaaaagggcagtggcaatctaaagtctactatataaaatttaaaatctatatcagaacatacaaagtactttataatcaagccccagtttaattttcaagtgttatctcctgaatactccaccatcttctcactacattatatatcctatattttagccaaaacaggccactggacattttctgaatgtgccacatttcttcactgctattggttttggtacttgctattcttcacgtaatgacattttcctccattgtcaggttggggagatgttc

SEQ ID NO: 661444 - DNA, 507 bp, Homo sapiens
caaatatggttattgggttatccttatatacagttcatacaggaaaggcaaaacttattgccaaatttcagagtaaagaattggtaccctagttactttcaatggtgttcagcaatatattaatatatgtgcttttgagtttattcstgttatttagtatcatgcattgtccttctggattaggatttataaaacattgtcctttgtccttcaagattcctaaaacattgtttgaaaagtcatagcctaaaaatgtcattatttcacaatcaaaaagagaattggagtctaactggctcttctctggtctcggaaccaagttttgtttcagagttgacttatataaacataggaatgagattatttatgctcatcgagcatgaggaaagaaaagaaagtaccactatccatccattctggccataaaaaatgctctgtctctgattcatgtcacccctttaatatcaaggaattgtgtaataatcttcaacacaagtctatgattga

SEQ ID NO: 661445 - DNA, 513 bp, Homo sapiens
gcttccgctttggtaatggcttccttagttgttcctttgcttcttagctctgagttcagtcatctatctccacttggaacttgatgctacctttcctgccaggcctctggatcatgccaattttcatttggaaaaatggcttctatctcacagtgcatggagtctcagagtttaggctcagggttttatgctcttyacaggatgcctctcaaaagatggaccagttaactgccttgattcctacccacgctgctggctgatctgactattccaggagcagcgagtttgaagttctcttttgtgttcatcttattcccacttttaagtcttttgcaagcatgtgcttcatgtctgaaatttcctttcactctttctcttttcccaagtaatctgtaaaaattattaaaataatgaaggttaatattttctgtaatacatttgaaaagatcatttatgtagaacatattatcactgtattagctatctattgctacgtaacaaatttgtgaagaa

SEQ ID NO: 661446 - DNA, 597 bp, Homo sapiens
cctacacataatctcaaaatatttcaaaaaacagaaatagttcaggctatgtcctctaatcacaatgccataaaattagaaattaacaacagaagaatagagaaaagaatctctaataattgaaaacaataatcacttttgaagaggggagtagaatttattgggtaagagggaggtaaaatgagattttcatttttaaaaaatgcataactctctatgcaatattacccttgtaattaaaatatagaaacctataaaagaaaaatacattagcaacttattccttcgtgaaccaatagaacttcaaatgttctctttgtcttctatccccataatattcctgtgaatatcgtagaggtgggtattattccaatttgacacaataagaaactgaggtacagctacaaagctggttaaaagactgtgtctgaatcaaccttcccttccrggggtttataggataggcctacttttcctatagatattgttttacaaaaatacataaacaagaacataaatatttgtttatgcaaataagtcagaatcatgctataaggacaatgatataaccaaatgtttttctacttaaaatgtaac

SEQ ID NO: 661447 - DNA, 508 bp, Homo sapiens
ttttcagtgtctgaaccttcatgttattcaggcaaatagagttgatcattaattctcaatacactttctaaggttaaaacagtcatgttatccagggagactggaaaattcctccaggctaatacaatttttgcagtaactattttggtgtgcacgaaatttggactatggctgcattagctttctaaagaggacacaggacagagagacattctaatccctgtaggtacattttcctggccctcaaagctgctccttgaattgtattgtgagaagctgggaaatgctgccttttctatcttcctattcattatttacactgcactttaatatactaaaagttctaaaaagttctgcaatgaagtaatttgtttaactttatttaactcaagtttcccacgcttaaatgatcacggtgctgtttttatatgccacatttattaacattctgcagttccgcaggaagartgttattttctgcataaagagctttccaagaaagatttcc

SEQ ID NO: 661448 - DNA, 535 bp, Homo sapiens
agagcaaagaggagcagtgcattctgggtggaaggttaaatggaacaaacagtagaagaagaaattggcctggtctcatcatgtggttagctagcatcagggagccgaaayagctcaggttgccttgcatcaaatggttaccagttctcagttggatggtggctcgcttggaggagcatggcctctatcggcatcctgggtccttctttttgcctattcccaggttagaaaagtttaaggacaagaattttgtttatgtctttgaggaaacaatcatttatgaaactggactgacatgggggaaaactcaacaagaaatctgaaacctgttcctctgatgtatttgaggacaactttatgcaagatgattgataaaagcactttccagtggggtcatggttatgttaatgcaaagtctttttcaaatggtatttgtgtgctctaaaggcggatcatactcccatatgttgaaggaaggaaaatataacagaccatggctagaaacctggatagacctagaaaccaggttcctgct

SEQ ID NO: 661449 - DNA, 487 bp, Homo sapiens
tgagttttggctcagtgatctgtttctgtaaaaggaatagccattgtctgcagatacaatcaaaatgagccagaaccacaagaggcatttaagtaataataattcaagtccgtatgttatttgtcctagaatgagatgaccataattccaaacacatttcaacagacctaaggtcaccttttaaagttatagtttaaaatgatccagtaaccaatttatatcaatgtctttactctctaggtgagtgaaacacacagtttgcttttcctatcatggttcatgacagcactgccktcccagtcaccaggcctagttctctccatctctcctcatggtacaggcaatggccaaggcttgctgtgtcctgctccagagatcctctcatttccatcccggtcttcccactgcattgctaaggcccagctcatactctatccatcattttcttcattactctgtccttcagcctccaatttctcaggctctg

SEQ ID NO: 661450 - DNA, 602 bp, Homo sapiens
gaacatcacacactggggcctgttgtgtagtggaggaagtggggagggatagcattaggagatatacctaatgtaaatgacaagttaatgggtgcagcacaccaacatggcacatstatacatatgtaactaacctgcacgttgtgcacatgtaccctaaaacttaaagtataataaaaaaaagaaaaaaaaaacactcactggcatttaagagtctcctaaaggaatggccagattcctgcctgtttacctatggtaatgagcactggtcaaaaaaactgtccaggctaaaagagttcctaaccatcatttcagtgccctactcttaaatataaatgcacaatccaggaccttagacttctgaaggaaggctctaatatacaagacaagtataaaaaggaataaaagaaaagatttcagagaaaaagatccaatacaaagaaaacattacccttcatatttaataacctcaaagacaaaagaaattcttctacataaataggactctatgaaaaggtaatattaagaaataatacataggtcttagaaattgaaaatatgatagcatattagttttctattactgctgtaacaaattacca

SEQ ID NO: 661451 - DNA, 558 bp, Homo sapiens
cctgcctgtttacctatggtaatgagcactggtcaaaaaaactgtccaggctaaaagagttcctaaccatcatttcagtgccctactcttaaatataaatgcacaatccaggaccttagacttctgaaggaaggctctaatatacaagacaagtataaaaaggaataaaagaaaagatttcagagaaaaagatccaatacaaagaaaacattacccttcatatttaataacctcaaagacaaaagaaattcttctacataaataggactctatgaaaaggtaatattaagaaataatacataggtcttagaaattgaaaatatgatagcatattagttttctattactgctgtaacaaattaccacacatttagtggcttaaaacaacacaaatttatatccagaagtccaaaatgggtcttagtaggctaaaatcaaggtatcagcaggaccaaatttgttttcttgccttttccagcttctagatactgactgcattccttggcttttgacycccttctgtcttcacttccagcaatgacatattgaatcttcatc

SEQ ID NO: 661452 - DNA, 553 bp, Homo sapiens
tcctcccttttggaatggcaatgtttatgcaatgttcataccttcattgtatcttggaagtaaataacttgtttttattttataggcacataggtagaagagacttgccttgtctcagatgagattttggacgtttgaattaacactggaatgagttaagactttcggggactgtcaggaaggcatgattgtattttgcaatgtgagaagaatatgtaatttgagagggactagggacagaatgatatagtttggatctgtatccccacccaaatcatatgttgaattgtaatccccaatattggaggyagggcctggtggaaggtgttttgatcatgggagtggatgcctcatggcttggtgttgtctttacaatagggagttagttctcatgcgatctggttgtttaaaagtgtgtggcatctgcccctccacctctctccttcttcctcctgctttcaccatgtgatgtgccttctccctcttcaccttctgcagtgattgtaagctttatgagacatccccagaagttgagcagatgccagcaccatac

SEQ ID NO: 661453 - DNA, 665 bp, Homo sapiens
ctcctgttttaatcttccatttaattgatatttgagtgcctactttaggtaaggcactgtgctaggcacacaaaccttgtgaagatgaatggaatggttcttgccttaaaatagctttcaattaaccaaggaaactgtaacatatgctcaaccatctataatatttggcttgctgtgacacacgcattggaaaagttggaagtaaagctctgaggatgtccagagaagccagaggacattttcattgagaggtgagaaaatgttttcttaagactgtagcttttatggctgggccttgagagacatatagaatagaattttacagttagaaaggaggaacgaggtcattatagtaacagcagtgagctacggccatgactgggttcaggaaacagacactggtccaagtgtaggatacataatrtagtaatcattaggttatctttaaaatgatttgtggttttcacacttttggcccatatgttatctgtttgatctttataacaacttcatatggttggcctatgattattgaggataaagtaaataaatatattcctacttagcaggcagcagggagccacacaaagtattattcagggagtggtgaatctgagttgggtataatgagggcaactcagcagcaaggatcttttgtaggctgg

SEQ ID NO: 661454 - DNA, 621 bp, Homo sapiens
agtgagctacggccatgactgggttcaggaaacagacactggtccaagtgtaggatacataatatagtaatcattaggttatctttaaaatgatttgtggttttcacacttttggcccatatgttatctgtttgatctttataacaacttcatatggttggcctatgattattgaggataaagtaaataaatatattcctacttagcaggcagcagggagccacacaaagtattattcagggagtggtgaatctgagttgggtataatgagggcaactcagcagcaaggatcttttgtaggctggactgaagtgggaaaagttggaggtgggaagatcagyttcgaaggtgcagtgatagtgtaggctgggagtgagagaacacaaaggaagagatgggagaagacacattcccaaggttgaattgcaggtcaatagaaagtggtttgaatgactcaaaagctattttatgaaattctctgctctgaccgtcccttagttcgagttattttctctttatttgtatcctcagaggattctggtaactttatttagcacttcttcctgtctcattttattgttgtttacatatctgatacccggattaggttattaggttgta

SEQ ID NO: 661455 - DNA, 504 bp, Homo sapiens
gaacttgctgttttgtttttctcatggaagaatcctccatacagttttgaggaatatgttagaataaaaacatgtctaggtcacaaagcaaagaaaataaaggaagtaaagttgactttcgattccatcaaaccattctagtctgcatatattcaagaaggaaaagatcaaagtaaatattttaacatattagaaactcatctgagtttcctgaagggaaccacaagattagacataagagacacattgcaaatgaaaaagacaggaawgctgtttaaaactgggaacattcagaagctaaggcaagacagcatcacaaagggcctgtgtcatgggtattggtctgccctagagtcttaagggttcaagcttttaaaaacttcagtagcagctacagttcaagaatcatcttaggtctttctccaaatgcaactatagtgtgagggaatcaggggcacaacttctctgtgaaacctatttaattatcttaattcaagccttctc

SEQ ID NO: 661456 - DNA, 591 bp, Homo sapiens
tgagtgaggcactggggacacagaagttactctaaaatacctctcaatgtgattatcacattgtgaatagtgaaaggattgtttttagactcagctttcaacaggatccagtatatctttctgaagctggagtggccttcagataaaacttttaaaaaatgttgatagtgagttaaaacagtcaaaaccatgtgtttattttgctcagtctttgattcttcacagctgggcactgctttgactctccttccatamagggaaaagactcatgggggcctgtaataggcctttacctagaccggtgtttctcaagttgttaaaatgaagattctaattcagtgtgtaaggatcggggcccaagatactgcatttccagcaagctcccacgtgatgctgaagttgttaggttacggacctcactttgaataacaaggcaatgctatgacaagagatagggaagttagctgtctttctaagaaggtcgtaaaaggagaaagaaaaagggaaactactcttttactcaaaacatacattggaattaatgagtttccagtagggaaaaacagtgctgtgtttacagcctagcacctc

SEQ ID NO: 661457 - DNA, 638 bp, Homo sapiens
tgaattatgaatctctgatttaatacacctttctagagctacagagttttatttccatttgacaaagatctgtggagctcttaccaagttgtgacaagcagccatttttccccacttcgatgagctcatactgttgctaggctgtgtcttgtaaatcaggagaaatcatcatataaattcttctggagggggagttggatatgtcagctaatctctgccacattaatttccagtggatcattttatacaaattatattacttcctccctggggtgggaggtgggggcagaatcratggggaggaagagaggtggagagaagaaaggctaatagaaagctatactatgttttcttgactttcacatatacagaaggaatggaaggaaacatcttactacgacatggggcatagaaatatttaaattgaagacactcaagacttttatctaaaattcaagagacccaaccttgatttctagaccttattgggaatgcagcaaacacaagcataatcctcctatttccaaacagagagaaatctagtcactgtttttctggtgatggacaaacaccattgagtagaaagcactattagaagtgctaaggggcagatggctgattgcacaatcatctagaac

SEQ ID NO: 661458 - DNA, 554 bp, Homo sapiens
tgattaagatttcatctgaagaaagggttgtactactaaaaaattattttttaaaaactctgaactatacacattatatgggagagaatgaggtaaaatataatcctccaaaaatctttgaattaaggattactgtttcagttgattattccagagggaataatcctgtgaaagacattaagtcctttgaaggagttcatcatccttgtgatgttctcatgaaagttcctcaatcctgcaaggcatatgactgctagttaatatttaccaaaaccctcttggccttaaaggcctgaataggcactacctacatactacaagtgtattttttttggtgtttgtgagttgctgttgttgttgatgattataggagtgaggcatgaaaattgcagaaatttgggaacatagtttgttgcctttgtactgcactgacatacctaatgtggaactataatttccaaagtattcctccctgtrtggttcaagttcagggtgagctacaaggtaaatttgagcaggatttggactatgaatgtgcaatggtactcattgta

SEQ ID NO: 661459 - DNA, 414 bp, Homo sapiens
gacaagtaaagtctattatttcattcccttgattctggattggcctgtgactgctttaaataatagaatatgccaaaagtaatattattccaatttcaarcctaccctttaagaagactggcaatttctattgtatttttcttataacaattactctggaagaagctagcttcctagaacaagcttggctattctgtgatttccatactgtaaggaagcctaagcaatccatgaggatgggccactttgggagacagcaatgtcagcaaaccctttgcttccccagccattctagcttaggtgctagacatgtgagcccgagagccatcttagatattccatttccaatagatgccatctggaaaagtaggcatcacaaggcctgtgtagtccattcaggctgctatgacaaaa

SEQ ID NO: 661460 - DNA, 414 bp, Homo sapiens
gacaagtaaagtctattatttcattcccttgattctggattggcctgtgactgctttaaataatagaatatgccaaaagtaatattattccaatttcaaacctaccctttaagaagactggcaatttctattgtatttttcttataacaattactctggaagaagctagcttcctagaacaagcttggctattctgtgatttccatactgtaaggaagcctaagcaatccatgaggatgggccactttgggagacagcaatgtcagcaaaccctttgcttccccagccattcyagcttaggtgctagacatgtgagcccgagagccatcttagatattccatttccaatagatgccatctggaaaagtaggcatcacaaggcctgtgtagtccattcaggctgctatgacaaaa

SEQ ID NO: 661461 - DNA, 617 bp, Homo sapiens
gggagtatgcctgagagaaaactgtaagagagtggagaaagcaagttggaaagggtttaaaagttaagtaagaatggttccaattgaagtctaacttcatcctgatcccctgagaggttttggagtgtaacttgaactaaggaatctgacctggtcctggtcttttatacaccacaacayactaggtgtatccccaggggagctggcaaaactacagtcacctttgtgtgtgacagatccaatagcctaaatccagtttttcaggaaaggttgaaagtttaagctggagcaggagtaccttgagcaactgggaaatcgtacaccagaatgatagcaatgataccggagtgggatttctccgggtggtttgaaaaacaatttacttaataaaaacatgttatttgctaaaatataatgggtctgttattgttaagtgaattaataagcattttaaaaataaaaattcgtttagtcatacttgtcacattttaagtgctccatgaaaacacatgcctaatagccaccatagcacatagtatatggcacatagtaggcactcaaaaggttttttgtacagatactgattaaaataactccatctaggctgttgaaacatt

SEQ ID NO: 661462 - DNA, 577 bp, Homo sapiens
ataataaaactaaaccttagagccatttggtcattatatggataaaaagtaaggmgttttatttttatatccctgaattagtccattgtcacacttctataaagaactatctgggactaagtaatttatgaagaagaaaggtttaattgacttgaggttccacaggctgtacaggaagcatagttgggaggcctcaggaaacttacaatcgtagcaaaaggcaaaggcgaagcaagcatgtcttaccatggtggagcaggagagagagagagcaaagggaggggtgctatcaccttcagacaaccagatcttgtgagaactctatcatgaggtggcactagggggatggtgccaaaccattagaaaccactcccatgatccaatcacctcccaccaggccccacctccaacacttgggatcacatttcaacctgagatttgggtggggaaacagagccaaatttctgttttgcaatttctgcatttctgttttgctagttgacttcttgctggacttggcttgaagagacagagagtaggacagacagtaggaaaaagagtagacagagagtaggag

SEQ ID NO: 661463 - DNA, 577 bp, Homo sapiens
ataataaaactaaaccttagagccatttggtcattatatggataaaaagtaaggcgttttatttttatatccctgaattagtccattgtcacacttctataaagaactatctgggactaagtaatttatgaagaagaaaggtttaattgacttgaggttccacaggctgtacaggargcatagttgggaggcctcaggaaacttacaatcgtagcaaaaggcaaaggcgaagcaagcatgtcttaccatggtggagcaggagagagagagagcaaagggaggggtgctatcaccttcagacaaccagatcttgtgagaactctatcatgaggtggcactagggggatggtgccaaaccattagaaaccactcccatgatccaatcacctcccaccaggccccacctccaacacttgggatcacatttcaacctgagatttgggtggggaaacagagccaaatttctgttttgcaatttctgcatttctgttttgctagttgacttcttgctggacttggcttgaagagacagagagtaggacagacagtaggaaaaagagtagacagagagtaggag

SEQ ID NO: 661464 - DNA, 577 bp, Homo sapiens
ataataaaactaaaccttagagccatttggtcattatatggataaaaagtaaggcgttttatttttatatccctgaattagtccattgtcacacttctataaagaactatctgggactaagtaatttatgaagaagaaaggtttaattgacttgaggttccacaggctgtacaggaagcatagttgggaggcctcaggaaacttacaatcrtagcaaaaggcaaaggcgaagcaagcatgtcttaccatggtggagcaggagagagagagagcaaagggaggggtgctatcaccttcagacaaccagatcttgtgagaactctatcatgaggtggcactagggggatggtgccaaaccattagaaaccactcccatgatccaatcacctcccaccaggccccacctccaacacttgggatcacatttcaacctgagatttgggtggggaaacagagccaaatttctgttttgcaatttctgcatttctgttttgctagttgacttcttgctggacttggcttgaagagacagagagtaggacagacagtaggaaaaagagtagacagagagtaggag

SEQ ID NO: 661465 - DNA, 577 bp, Homo sapiens
ataataaaactaaaccttagagccatttggtcattatatggataaaaagtaaggcgttttatttttatatccctgaattagtccattgtcacacttctataaagaactatctgggactaagtaatttatgaagaagaaaggtttaattgacttgaggttccacaggctgtacaggaagcatagttgggaggcctcaggaaacttacaatcgtagcaaaaggcaaaggcgaagcaagcatgtcttaccatggtggagcaggagagagagagagcaaagggagrggtgctatcaccttcagacaaccagatcttgtgagaactctatcatgaggtggcactagggggatggtgccaaaccattagaaaccactcccatgatccaatcacctcccaccaggccccacctccaacacttgggatcacatttcaacctgagatttgggtggggaaacagagccaaatttctgttttgcaatttctgcatttctgttttgctagttgacttcttgctggacttggcttgaagagacagagagtaggacagacagtaggaaaaagagtagacagagagtaggag

SEQ ID NO: 661466 - DNA, 496 bp, Homo sapiens
aagtctctctcttcagtactctttttggctaatatcagattagattatgccaaatataaaccccaaaacactagccaagaaaaatagagaaaaatcacatctctggcaactaacagaaagcttctcttaaaaagcttctttaaagtctaatagcatctgcaaatccggtgtctgtaaccttgctagtctggctattctcacagccgtacgtgctctttccaaatcattgcttcaaattcctggttattgttaccttataagtaactggggtgggagagtggaatatcataaaaagcacatgtaatttccctggyttgcaaaatgcaccccagtcggcttcagtgggagcactattatagaatatatgcacccaggctaagtatccgaaaggaactcaccactaatgtgagtaatatgttttcaatttttaatgaagtgttagttgtccacaacagtatctcttttaggttccaggctgtgtgccagtgataaactg

SEQ ID NO: 661467 - DNA, 496 bp, Homo sapiens
aagtctctctcttcagtactctttttggctaatatcagattagattatgccaaatataaaccccaaaacactagccaagaaaaatagagaaaaatcacatctctggcaactaacagaaagcttctcttaaaaagcttctttaaagtctaatagcatctgcaaatccggtgtctgtaaccttgctagtctggctattctcacagccgtacgtgctctttccaaatcattgcttcaaattcctggttattgttaccttataagtaactggggtgggagagtggaatatcataaaaagcacatgtaatttccctggtttgcaraatgcaccccagtcggcttcagtgggagcactattatagaatatatgcacccaggctaagtatccgaaaggaactcaccactaatgtgagtaatatgttttcaatttttaatgaagtgttagttgtccacaacagtatctcttttaggttccaggctgtgtgccagtgataaactg

SEQ ID NO: 661468 - DNA, 496 bp, Homo sapiens
aagtctctctcttcagtactctttttggctaatatcagattagattatgccaaatataaaccccaaaacactagccaagaaaaatagagaaaaatcacatctctggcaactaacagaaagcttctcttaaaaagcttctttaaagtctaatagcatctgcaaatccggtgtctgtaaccttgctagtctggctattctcacagccgtacgtgctctttccaaatcattgcttcaaattcctggttattgttaccttataagtaactggggtgggagagtggaatatcataaaaagcacatgtaatttccctggtttgcaaaatgcaccccagtcggcttcagtgggakcactattatagaatatatgcacccaggctaagtatccgaaaggaactcaccactaatgtgagtaatatgttttcaatttttaatgaagtgttagttgtccacaacagtatctcttttaggttccaggctgtgtgccagtgataaactg

SEQ ID NO: 661469 - DNA, 529 bp, Homo sapiens
cctggctacttctctcctcttttccctaaaggcagagatatgatctctgtagctggatcctgttctgcctcacctttttactgtggtctggactactgaacatttcaaagggaaggcatagaagaagcaagatgagtattataatccttctggttccttgtgtcaccctgctcrggacgtgtccttgttctaccttgtcgaaatatggatggtagccagaagctctgacctacttctctttgcttgctacccctctgattttcagggaaccctaataaggaaatgctttggggaggataggaaagtttacaagttccacaactatgtaaataatttagcaacctccaaaatgaatttgcattaatatagtcagggctcccagagcatctataatagtaattttactttcttactttctactggctccaaatcacccctgttcattactgcatagggactctcttataaacgtagtagaaatcacagtaattttctaaaatcttctgcttgcatctacaaaaacctggtt

SEQ ID NO: 661470 - DNA, 529 bp, Homo sapiens
catattttagttagaattttaattttaaaagactatcacattttacttagttaattttagttagttttattttatgaatgttgacataaagaccattcaaaaggtttgttgatttcctctttcagtgtcccctcagaaggtggctttactaaaagctgttttatgcccccactttggggagctyattctgattgttcaggcagggggtagaatgaggtagggcatggagggtggtattaagtgattttttcaatacaaactttcaagaaagtgtgctgcttcttttttaaaaagcaagaagagaaaagagaaagaaatttcttcccttggaaaagttaatattctcaagtaatgagagagaactgatctcgagttccctcaaacagtggtctccttctactagcatgttggggagtggtgtcccattggactttgggtgcatactatgtatcttgtacctagtccatacagtatagtcctggcataaaacactgctggacactgaccatgtcccaaaatatcacgttgc

SEQ ID NO: 661471 - DNA, 529 bp, Homo sapiens
catattttagttagaattttaattttaaaagactatcacattttacttagttaattttagttagttttattttatgaatgttgacataaagaccattcaaaaggtttgttgatttcctctttcagtgtcccctcagaaggtggctttactaaaagctgttttatgcccccactttggggagctcattctgattgttcaggcagggggtagaatgaggtagggcatggagggtggtattaagtgattttttcaatacaaactttcaagaaagtgtgctgcttcttttttaaaaagcaagaagagaaaagagaaagaaatttcttcccttggaaaagttaatattctcaagtaatgagagagaactgatctcragttccctcaaacagtggtctccttctactagcatgttggggagtggtgtcccattggactttgggtgcatactatgtatcttgtacctagtccatacagtatagtcctggcataaaacactgctggacactgaccatgtcccaaaatatcacgttgc

SEQ ID NO: 661472 - DNA, 630 bp, Homo sapiens
gatgggacaagaatggagtgattgcattatttacagcttaattgtagacaagtaattacttatgtaagctgatggtgtgaggtcacagaggacctgcaaaagaatgtagatgatctgaaattcaacttctcaagccagtcactgcgcctcccccatcccttttgagcttgataaagagaaccaactatgcatttcttgaatgaaatgcttaggaatgttaaatgtcttgttcagtctaagcaaaggatcagcagagatattttaaaaatctcagcttccaaagtaataaatcacaaatgccacctagtggcttttagtatccagtggctgcattatctgtagactgtagctatagcccagttaaggrgaggacttttctagtcggggagtgggttgttcagttaggaaaattgagatgaatggaccaggactcaaagtccttcagcctgcctctcccttcactcagctctactagaacatcagagctgaaaactccccccaccttacaccattgtaacttccagtagtgcagtagaaatttgactgcaaatcactgtgcagtttttattttcccctgagccactaacataataaatgaggaagtcaacagctttcatgatttgggagtag

SEQ ID NO: 661473 - DNA, 630 bp, Homo sapiens
gatgggacaagaatggagtgattgcattatttacagcttaattgtagacaagtaattacttatgtaagctgatggtgtgaggtcacagaggacctgcaaaagaatgtagatgatctgaaattcaacttctcaagccagtcactgcgcctcccccatcccttttgagcttgataaagagaaccaactatgcatttcttgaatgaaatgcttaggaatgttaaatgtcttgttcagtctaagcaaaggatcagcagagatattttaaaaatctcagcttccaaagtaataaatcacaaatgccacctagtggcttttagtatccagtggctgcattatctgtagactgtagctatagcccagttaaggagaggacttttctagtcggggagtgggttgttcagttaggaaaattgagatgaatggaccaggactcaaagtccttcagcctgcctctcccttcactcagctctactagaacatcagagctgaaaactccccccamcttacaccattgtaacttccagtagtgcagtagaaatttgactgcaaatcactgtgcagtttttattttcccctgagccactaacataataaatgaggaagtcaacagctttcatgatttgggagtag

SEQ ID NO: 661474 - DNA, 540 bp, Homo sapiens
actctgattactcatgagaaatcatgtatctatccttacaataatctttcctctaactcttacatccacacatatctgctgcattctcatttgagctacttttgagttgggcttccatttcttgcaacacattttctttgaccataacagaagagtttccataaacctgcatagaatgtgtaggatgttgattatcagatttttatgaacaagaccccattccatattccaggaagggaagctagcaatccatgctatacatgaccttgaggcaggagggcatctttctgcaatcagcatgctgaagctgcttaaatataagactagaaaatgatcttggaaagtgtcaaattgyaacaccaatttgcagttttcttgtagtgccaggtttctgtgataaaggtataaacacagtctaacagaaattctgacaaaatgagaagatttgagaaagatcagatataccagaggaattgacaatattgttgtttggttatgcagcatttggtctcttgttgttttgttaatagcattttagtt

SEQ ID NO: 661475 - DNA, 457 bp, Homo sapiens
ttcctctaacagctcaacactggacaagtaaaattctttgactaagatgcagaaaatattgctgtaaacccaacagcacaagctgagaggtaaacaggcctgctgtgctctccgtgtagatgctgcctttcccaaccaattgaaaccactgtttctctggttgtaacmccagacaaaaaaaaaaaaaaaaaaaaaaaaaaaaaggaatggtgatcctccagttgtttcaggccacagattcaagaatattatttgtaggaggaggctactttccatttgaaagagctatgatttcatctgtcatgccatttatcatttcctattttgggtcaatttccctctgcatttggagccctcagcagagtgtccatgccacttctttgtgggacattctcctgcagatgaccactcctaccctacccaggacaacatcttcactcccaggattgtcctcact

SEQ ID NO: 661476 - DNA, 457 bp, Homo sapiens
ttcctctaacagctcaacactggacaagtaaaattctttgactaagatgcagaaaatattgctgtaaacccaacagcacaagctgagaggtaaacaggcctgctgtgctctccgtgtagatgctgcctttcccaaccaattgaaaccactgtttctctggttgtaacaccagmcaaaaaaaaaaaaaaaaaaaaaaaaaaaaaggaatggtgatcctccagttgtttcaggccacagattcaagaatattatttgtaggaggaggctactttccatttgaaagagctatgatttcatctgtcatgccatttatcatttcctattttgggtcaatttccctctgcatttggagccctcagcagagtgtccatgccacttctttgtgggacattctcctgcagatgaccactcctaccctacccaggacaacatcttcactcccaggattgtcctcact

SEQ ID NO: 661477 - DNA, 612 bp, Homo sapiens
gaggatttatttaggtttctagcctgattaactgagattgaacccggccttccctgtgggagcaagaatggactgggtactttgagtagagaagctgacccatgagaaagaaggagagcttcaggcagaactgctggaatggggagactgttgggggtggagagtgagtgggtgaccgagatttgcatcccactttcattccagagccttaagggtccctgcctagagactgcrtgactctctcttatccagtgcctttaaaatctgattttaccgtctatcacttttcccctctttcactcccttcagctgcacccgcctcccaagtacttgacagccaggcttaccccctcttcatgaccttagagctctatgcttcttctatgtaggctgcacttcccctagagccacatggctaattccctggcttccttcagtcttatttacctgctgcatgaggccttccccggccattctttctaaaatgtcaacctctcactctgactctgtgtgtcttccttgcttcactacttccccttagcattgattattctttacttaatttctagaggtgcagggttggggtggggggaacagagggaaatagagaat

SEQ ID NO: 661478 - DNA, 533 bp, Homo sapiens
tggctgctttcttctcttcccccaattcttaatctcctgctaattcagaaataacccttttggaactatttattacctctttcacttcacctttcargttactttgtgatcatgtttgttttgaaatatctaaaatgggctgtgtattttgataaaaagagattggctttcagccaaagagtaaagggctgaaatggaaatgtcagtgaaatgggaagctcactggaagttcagcttggagtctgaccttagcactaccaaggacaaaatgagttactgtggccaagtcacaactaatcaatacattatgttttcaaatgtaaactgagaaaacaagtcagaggacatatcaagagtcattaatagaagggacactgtgcaccctttgggagcagcccctcctaggatacccactttaggataattctgaaagggtaaaaaagatgcatctttctgccatgagtaaaaagtctctttccaacatgctctttgccttctatgtagtgatgtcttctggctttcaagttttaaaa

SEQ ID NO: 661479 - DNA, 533 bp, Homo sapiens
tggctgctttcttctcttcccccaattcttaatctcctgctaattcagaaataacccttttggaactatttattacctctttcacttcacctttcaggttactttgtgatcatgtttgttttgaaatatctaaaatgggctgtgtattttgataaaaagagattggctttcagccaaagagtaaagggctgaaatggaaatgtcagtgaaatgggaagctcactggaagttcagcttggagtctgaccttagcactaccaargacaaaatgagttactgtggccaagtcacaactaatcaatacattatgttttcaaatgtaaactgagaaaacaagtcagaggacatatcaagagtcattaatagaagggacactgtgcaccctttgggagcagcccctcctaggatacccactttaggataattctgaaagggtaaaaaagatgcatctttctgccatgagtaaaaagtctctttccaacatgctctttgccttctatgtagtgatgtcttctggctttcaagttttaaaa

SEQ ID NO: 661480 - DNA, 533 bp, Homo sapiens
tggctgctttcttctcttcccccaattcttaatctcctgctaattcagaaataacccttttggaactatttattacctctttcacttcacctttcaggttactttgtgatcatgtttgttttgaaatatctaaaatgggctgtgtattttgataaaaagagattggctttcagccaaagagtaaagggctgaaatggaaatgtcagtgaaatgggaagctcactggaagttcagcttggagtctgaccttagcactaccaaggacaaaatgagttactgtggccaagtcacaactaatcaatacattatgttttcaaatgtaaactgagaaaacaagtcagaggacatatcaagagtcattaatagaagggacactgtgcaccctttgggagcagcccctcctaggatacccactttargataattctgaaagggtaaaaaagatgcatctttctgccatgagtaaaaagtctctttccaacatgctctttgccttctatgtagtgatgtcttctggctttcaagttttaaaa

SEQ ID NO: 661481 - DNA, 444 bp, Homo sapiens
caccacacccggccccatcatcctttttaacattcatgtttcctgataaatgacttgaagtggagaagggtgggatatgcatcctcagctgacaaggaagaacacagagtttactayttatattatactgcaggccaagaaacccaaagccaaacatggaaattagaaatacctctttggtttttctcaagatcccaggaatttataaataagtatgataaacaaaacattcccctttggtctctgtgattgactggtgtctacatgtcgcatgaaggcattgttttctttctgtatgtcttcatggttaaatgacttaactctctaacagctctcactagagtccttgcttgattgacccatgatccatgatccatccattttgcaataacacatgcttctcttttctctacctactgattagcacccagctaacttctctac

SEQ ID NO: 661482 - DNA, 444 bp, Homo sapiens
caccacacccggccccatcatcctttttaacattcatgtttcctgataaatgacttgaagtggagaagggtgggatatgcatcctcagctgacaaggaagaacacagagtttactacttatattatactgcaggccaagaaacccaaagccaaacatggaaattagaaatacctctttggtttttctcaagatcccaggaatttataaataagtatgataaacaaaacattcccctttggtctctgtgattgactggtgtctacatgtcgcatgaaggcattgttttctytctgtatgtcttcatggttaaatgacttaactctctaacagctctcactagagtccttgcttgattgacccatgatccatgatccatccattttgcaataacacatgcttctcttttctctacctactgattagcacccagctaacttctctac

SEQ ID NO: 661483 - DNA, 591 bp, Homo sapiens
tgccaactgttagcatcttctgtgtcctgctttattattgaattaccccaggtgtttcttaagccagatttacttatattgtaacacggagttaaaaatagtgacacaggcagaatgtttcatatcttatcttagggtctataaaggggaagaagttgaaagctaagggttgttattgtaactatttcagtacttgccacattagggctgtgataaattcaagtccttggtctctgtgtttccaaatttccctcctgtcccctctctttctcataggtccatttggagaagccagtctctcccagaaccaccygccttctgaaattagctttagtaagtcattgcaaacatctaacattaagtaaatgaacccaatttaaaaaggatttacacaaattagatagaaaagctcaggggaaaccaaagcaatcctcataggtcaaaaagcctaaggaaattcttacaaacatttccttgttttctcagtgggcgtattgctaaatacaaactgaggcgaagtttgagagcttagggcagatggaaattttgagacataaaaaaaaatcttcaaaagtaaagaaaaatttatta

SEQ ID NO: 661484 - DNA, 607 bp, Homo sapiens
tcgagattagcaggtcatatgctctgcgaaggctacagtgaaagattctttccccttgtctgtgctgtgagaattcacagagggcaaagggcatcggcttcacaggcagaccaacttgagtctgagtccttgctctgcctcatctgggttaatggatctcagaacttcaactgtaaaaaggaaaaataatgcctagttcatagggttgtcatgaaatttagagatgatacatgtaaattccctaacacagatctagaacatgatgggagctcaatgaagaatagtccttactcccagtgctatccctgagatatctctcaagttctcatgagagttagtagggaaatgggctctggaggataacattttcattacagaacacatatactstgtaatataagaatttgtgtttacagacatgacagataacttttggaaacttgaaatacagggaaattgtatgatctcaatttcccacaccattgctcttaaaactatctcagtgttctcccaaatataatggatggatttctgaaaattttgaaattttgaaacatttatgcttgacaatactgcaaattatgttttccccaaatcatggtcaaat

SEQ ID NO: 661485 - DNA, 603 bp, Homo sapiens
ataaatagctactgatgaatagctactggcagggaggcgggcgtaccaaaatctctagaggactaagaatagctagaaaaatgcccccaatatccccaggcaattccaacatgccaccttcttcttcccttatttaagaatcactgaccttgagaaacatattttctagttttacccactgagtcttagtccttcagtaacaaaacccacttgaatagagccatagttctctgtgcctccttagawgtcatgattaaacgactgtagaaactttccctctcccactaaaccaagtttattcctgttacagcccatttcttctaggtgctttcaaggcatcacaagtctgtaagggagcttttgtagttgttggcaatagttgagaaatcatttaaaaagtcatcatttataaagaaacacactaaaatctatacaaatgctgcactaaaaatatcattaagtaataaacaattattttgaattgataagattcttgctatccttgatctcgctcttattactgtattatcatatataacgagcagcagccactctgaaaatcagtttagtgtcttccttcttttcaatgtatacttcttaatc

SEQ ID NO: 661486 - DNA, 603 bp, Homo sapiens
ataaatagctactgatgaatagctactggcagggaggcgggcgtaccaaaatctctagaggactaagaatagctagaaaaatgcccccaatatccccaggcaattccaacatgccaccttcttcttcccttatttaagaatcactgaccttgagaaacatattttctagttttacccactgagtcttagtccttcagtaacaaaacccacttgaatagagccatagttctctgtgcctccttagatgtcatgaytaaacgactgtagaaactttccctctcccactaaaccaagtttattcctgttacagcccatttcttctaggtgctttcaaggcatcacaagtctgtaagggagcttttgtagttgttggcaatagttgagaaatcatttaaaaagtcatcatttataaagaaacacactaaaatctatacaaatgctgcactaaaaatatcattaagtaataaacaattattttgaattgataagattcttgctatccttgatctcgctcttattactgtattatcatatataacgagcagcagccactctgaaaatcagtttagtgtcttccttcttttcaatgtatacttcttaatc

SEQ ID NO: 661487 - DNA, 603 bp, Homo sapiens
ataaatagctactgatgaatagctactggcagggaggcgggcgtaccaaaatctctagaggactaagaatagctagaaaaatgcccccaatatccccaggcaattccaacatgccaccttcttcttcccttatttaagaatcactgaccttgagaaacatattttctagttttacccactgagtcttagtccttcagtaacaaaacccacttgaatagagccatagttctctgtgcctccttagatgtcatgattaaacgactgyagaaactttccctctcccactaaaccaagtttattcctgttacagcccatttcttctaggtgctttcaaggcatcacaagtctgtaagggagcttttgtagttgttggcaatagttgagaaatcatttaaaaagtcatcatttataaagaaacacactaaaatctatacaaatgctgcactaaaaatatcattaagtaataaacaattattttgaattgataagattcttgctatccttgatctcgctcttattactgtattatcatatataacgagcagcagccactctgaaaatcagtttagtgtcttccttcttttcaatgtatacttcttaatc

SEQ ID NO: 661488 - DNA, 587 bp, Homo sapiens
attttctagttttacccactgagtcttagtccttcagtaacaaaacccacttgaatagagccatagttctctgtgcctccttagatgtcatgattaaacgactgtagaaactttccctctcccactaaaccaagtttattcctgttacagcccatttcttctaggtgctttcaaggcatcacaagtctgtaagggagcttttgtagttgttggcaatagttgagaaatcatttaaaaagtcatcatttataaagaarcacactaaaatctatacaaatgctgcactaaaaatatcattaagtaataaacaattattttgaattgataagattcttgctatccttgatctcgctcttattactgtattatcatatataacgagcagcagccactctgaaaatcagtttagtgtcttccttcttttcaatgtatacttcttaatcatatgttttcctatgtttctgcagtatcaaagcaagtctaacaaatccaatcattaaaacccagatacaatattttgatacatttgagcagtcttgagtacatttacaccaaagcaacacagaaaaacactccgttattgagca

SEQ ID NO: 661489 - DNA, 408 bp, Homo sapiens
tagctccttgcttttaaatatttgatactgattgaacatttgctcccagtaaagtaagtgataagtgcagattttttctctgcatataaagaaccactttargagtaattgtagattcccattaacttatgattaacccatataaagttaacatactttctctgtgttaaaaataatggcttaaagtttattccaaaatcccaacttcctgccacataaacaaacaaacaaaaaaaacttgttgaaattgtaatcatcattttaaaaatttcattttttagttattgacaagagaactagagaaaggaacattcttttgaaaattattgtattaatagagaaaaatacagacagccaaatagtaggggtgaggcttgttagtgatatccctatctatatggttgtata

SEQ ID NO: 661490 - DNA, 547 bp, Homo sapiens
ggagggtcttgagttcattaaagaaccttagtccggtgctggctagcacagctgctggtgggtggaggatcctggtattcaaagcaaaggtgggacagcacgaacatgctgatgtctatagctgtgatttcccagggccactcttgccattgagcctttattttctttttttgagasaggagtttgctgttgcccaggctgaagcgcagtggtgtgatcttcgctcactgcaacctccatccacttcccaggctcgaacaatcctcccacctccgcctcccgagcagctgggactacaggcgcatgccgccactcctggctaattttaatattgttttgtagagacgggatttctcaccatgttgcccagactggtcttgaactcctggattctagcaatccacccacctcggtctcccaaattgctgggaatacaggagtgagccaccgagccaggccttagccttttctcgacaccctccctaccttgagggaacctggagtcctttccactcagcttctcactccatgtactgactacactctg

SEQ ID NO: 661491 - DNA, 594 bp, Homo sapiens
cttttaaacaacctactcttttgtgaactaatagagcaataactcacgttgtcatcaaggggatggcgctaagccattcatgggggaaccactaccatgagccaacagctcacagtagacctcacctccaatacttaggatcacaatttcaacatgagattttgaggggacaaatatccaaaccacatcagatggtaacaaacattatatgctttgcttatgccttctgaaatttaggtgactcttggtgctaggtgtgcagttgacaacttggggagagctccttctaaaagacaaaggaccctgtagaactttggcaacaatctggcgctgaaaaaacaaaacttggatttcagggctgtcaaagcaaccaagatctgagagtctaattactagagtgaagagaagcactggaaagtaagcttgaccctctgtgtttttccacatgataaaattcttaaactgctcaaggttagagcttaaacaaaaacatactgggaaacawagtgggattattggcagtgtctcataatctgatgaagagaaaaaataaagttcaggatatgtcaaagagaaggaacctagtaaatatcc

SEQ ID NO: 661492 - DNA, 585 bp, Homo sapiens
ttctccaaaactctactttcctcagcaaaattatctaggaaaccgctgattaataggtcatttatgatacaatccttgcttccttcacagctgatggttgggagtgcggtgaagaattggcagggaawggagagagcaggaaaggggagtggagatagagtggaaagagggggaaaactagaaggtcaagggagaaaatctctataaaaggactttctgtataatgtttggcagttgaagctaatgtctgaaaaactctcctttggaaggagaagagacttcttgacttttaaaaatagtgttaattcactgctctgttttttagaatgctcctggctatgtgagttgcacttccaattagatctggttgaaaactttgtacagaaatctaaagcccttcgattgcaatttattacattaggctgttcaacaaaagattggcctctcttagctcaaaccagagtatggctttggtaagtttgcttagtagatctttttgatacagattcttaatcctgaaaacaaaattaccctttctttcctctctcactctgtctcagtctttccctctcatgcacacagagg

SEQ ID NO: 661493 - DNA, 585 bp, Homo sapiens
ttctccaaaactctactttcctcagcaaaattatctaggaaaccgctgattaataggtcatttatgatacaatccttgcttccttcacagctgatggttgggagtgcggtgaagaattggcagggaaaggagagagcaggaaaggggagtggagatagagtggaaagagggggaaaactagaaggtcaagggagaaaatctctataaaaggactttctgtataatgtttggcagttgaagctaatgtctgaaaaactctcctttggaaggagaagagacttcttgacttttaaaaatagtgttaattcactgctctgttttttagaatgctcctggctatgtgagttgcacttccaattagatctggttgaaaactttgtacagaaatctaaagcccttygattgcaatttattacattaggctgttcaacaaaagattggcctctcttagctcaaaccagagtatggctttggtaagtttgcttagtagatctttttgatacagattcttaatcctgaaaacaaaattaccctttctttcctctctcactctgtctcagtctttccctctcatgcacacagagg

SEQ ID NO: 661494 - DNA, 585 bp, Homo sapiens
ttctccaaaactctactttcctcagcaaaattatctaggaaaccgctgattaataggtcatttatgatacaatccttgcttccttcacagctgatggttgggagtgcggtgaagaattggcagggaaaggagagagcaggaaaggggagtggagatagagtggaaagagggggaaaactagaaggtcaagggagaaaatctctataaaaggactttctgtataatgtttggcagttgaagctaatgtctgaaaaactctcctttggaaggagaagagacttcttgacttttaaaaatagtgttaattcactgctctgttttttagaatgctcctggctatgtgagttgcacttccaattagatctggttgaaaactttgtacagaaatctaaagcccttcgattgcaatttattacattaggctgttcaacaaaagattgkcctctcttagctcaaaccagagtatggctttggtaagtttgcttagtagatctttttgatacagattcttaatcctgaaaacaaaattaccctttctttcctctctcactctgtctcagtctttccctctcatgcacacagagg

SEQ ID NO: 661495 - DNA, 581 bp, Homo sapiens
atggtggaagataaaaggctccagtcttcctgcccacaccctatagttccaagaaattgtgagaaatgatcttctaagctgtagtacctaatctctctataagtcctaggttatccaggaaacttagtcatttaaagcacatatttacactgcacacacgtcaacacacatcctgctaaatgctgcttaagaaaggtaaggaaaaaaaatcagacgtggaaagtgtatgtctaaatatagaatttaaattgagaagctttacctgacagcccacttgagcaattcataagcaaaaaagctgcaaaaatctacaattataacttaaagaggagtgtggggaagagaaaagtaaagttctgtggataaacaaaataggactacaaaaagtttacagaaaaaaatcccacagaaaatagytcctattcttactcaatttatgaaattttttgaagaatgtttcaggcatctttggatatttcagaatgataggaagctcatttatggtaagaaatgctggtgacaggtacatacatgtatatatatgctatgtatgtatagttaatcgtcaggtatccccaagc

SEQ ID NO: 661496 - DNA, 581 bp, Homo sapiens
atggtggaagataaaaggctccagtcttcctgcccacaccctatagttccaagaaattgtgagaaatgatcttctaagctgtagtacctaatctctctataagtcctaggttatccaggaaacttagtcatttaaagcacatatttacactgcacacacgtcaacacacatcctgctaaatgctgcttaagaaaggtaaggaaaaaaaatcagacgtggaaagtgtatgtctaaatatagaatttaaattgagaagctttacctgacagcccacttgagcaattcataagcaaaaaagctgcaaaaatctacaattataacttaaagaggagtgtggggaagagaaaagtaaagttctgtggataaacaaaataggactacaaaaagtttacagaaaaaaatcccacagaaaatagttcctattcttactcaatttatgaaattttttgaagaatgtttcaggcatctttggatatttcagaatgataggaagctcatttatggtaagaaatkctggtgacaggtacatacatgtatatatatgctatgtatgtatagttaatcgtcaggtatccccaagc

SEQ ID NO: 661497 - DNA, 569 bp, Homo sapiens
ttgtgttgagaaacaaggaggtaagttaggaagctattatatactccacgtgagagatgatggtgatgtggatcagggtggtagtggttggaaggttagacatggccatattatggatctaatctaaatcttgggccaacagaatctcctaatggactggatatggcctgagagagagggaaagtaaaagaaaatgactccaaagtttggggctgaacaaatggaagtttggtatttccatgaacttaacctttatttactagatacttagagagataygggggaagcaacagtggcttattgcctttgatggcttttcctcatcactggcatcagggaagttggtgatggtcacccagttatgtctttctctagatggaatttataatgagccctgatgagaagggaaactaataaaaatggccatttaaaagctcattcattaatgcaatgtttatttatttgttctacccatgctttcctttattgtctgttaattgagttattaagtaactttcattctttagcaatttcactttctttcataggtgctacagatggctaaatat

SEQ ID NO: 661498 - DNA, 531 bp, Homo sapiens
atagtagtatagtgccaagaaggtaatagctttagtggatactgcaatggtgagaacacagctgatatattggatggagttcttggcaccatgtcttaggatgagcattttcaaattgccgtatacccaaagggatacatccagatggtaaagttctataaagaacggaacttgcataaagaatggctaaaggaacttgcatagatagatcaaaaaagagaaaactatgggacacagtacagctgtgttcaaacattgatgaactctcaagtagaaagtgttttagagctgatctgaggattttcttgggaccaaactatcatcatagtttctcaggaaatgtcagggcactgtattaattttactaccattttggctgtgagggtgtagcagttttatttgtaagcggggtaagtgtctgattcttcccttactatataaaatgtcttatctggtggaagatgaagattttcctagaaacagttgatgtaaacagaaacatagtctstttgtttaaaattctttctgata

SEQ ID NO: 661499 - DNA, 574 bp, Homo sapiens
ttttttcatttagcacagtgcttttgagattaattgttgttgtatatatcagtttctttttattgttgttattagactgtttggttatatcacaatttgtttatatattcactagttgatggacatttggtttctttccagttttgcggtattatgcataacattattatactgtgaacattcatacaagtttttttttttttcctttggtaaatacctaggaatgagatcactgggtcatatggaaagtgtaaaactttataagaaactgccaaactgttttccaaagattatacccttttgcattcccactagcaatgcatgtaagttccatttcctctgcagtcctcaacagcaattgggattgtcagtcatataattttagtcattttagtaggtgtgtagtgatatgtcatggtggttttaatttgcatttccctaaaagctattaatgttgaacatcttttcrtgtgcttatttgcatccatacatcatttttggtgaagtgcatgttaaatattttgcccagtttttattgtgttgcatatttatcattgtattataggaattctta

SEQ ID NO: 661500 - DNA, 396 bp, Homo sapiens
tggcttctcactatccttgggtgggtcaattgattaattttgcagagattatttgtctctttctttaaaaatttttgtgttattgctaggacagcatcttagagtcatttaaaactaaatcagatagaatttccaagccacctttaggaacaacttattctcattattaacgacttcaaaaaaatctgagaacaacaggaatatttatttaattcgcctattaatttcatcagttattttcactcagtttaaactctttcatgtacttctcctatttctattacagtgaaagtgcccataaaattatactagttattgatataactagtaacaggacagacagctaggaaaactktttaatatctcatttcaaagtctagaccactagctgttgtc

SEQ ID NO: 661501 - DNA, 507 bp, Homo sapiens
ggcagggttcatgggatttatcttaaatcacaaattgcttcaaagcgctatcttacataaatgttcctagtcggttcctttgaatagttattttatttagtataattttactaattttaaaagaaattaagttaattaaaacttgtattacacagrtatgcctttatttcatcttacaaatttcattttaaagagtgctgaagtgaccatttttttcctagctttactgtagaaacgcttctgaaatattttaagtcaaagagttgataagattgataatgtaacatatagaaccatttatgtttttctttgtttttgtcattgtagacattttggaaaatggaaagctgaggttggtagatgggctgggtgatgacatctacaaaataaacccaagtttttttttatatgtatattttttaaagacagagtctcactctgtcatccttgctggagtgcagtggtatgatcatggcccactgtaaccatgaattactgggctcaagc

SEQ ID NO: 661502 - DNA, 547 bp, Homo sapiens
ggacttttaagtaaatcgtggtgattgtctttcttattccttctagctatggaaggtacattctactgagtttcaaaagtattatgaatccttaataacagtatttgaaatgattgtaatagtattttaggaagtctattttcttccaatacaatgttcagaatatcactggaactttaattttcaaaatggtatgcttatagttagtatatttgatagactatagtatataattaataatattmatttaggataaaatctattttcgtctgtattgaaattccagttgcaataaaaatctccagattagtggcatcacagagtatttttatgtgtcttttccttttggcaagtatggatttaagattgcatttaaaaaattttccatgtgccattgggggttaaaagaagaacatgtctgagatctgattaaatttactacttatctccataggacctagcttaatagagtgctagtagcttctcacacatgaccatctagaatatttgagagagtggttttaggaatactggcagctggccagca

SEQ ID NO: 661503 - DNA, 557 bp, Homo sapiens
agttcacaacctgaccttttgaaaaattggcttggctaagctgcagaatttgggtgtaatggttattgttaactccagctttaggatttattaatttgtgtgatcaagacttacctatacttcaaagtttcaaaagaccaaacacaatcatccatccattagaactaacattgtgtttcagtgattcccgcttagtatctgactggtgattcttctattttgttttccaaatctaaatatattcttaaacaaaatgagtggcacatataaagaaagtttgttttttcctctttattattggaaaatttatcttttatagattatttatgaaaktgttgaattcacaattggtatgtcttcattcttaacaaacaaaaaatacataattattaaacctattttattgcagttgtagaaatttccaggacttttccagttcactcgtgtttttaattaacttatacaaattattctaataataagaaattttgagaaaggctgaaaaggttacaaatatattacaaatagccaaatagctcatatcactggggaacaac

SEQ ID NO: 661504 - DNA, 575 bp, Homo sapiens
atttcaaaatgaaaaggtacaaatgaaggattatctaatgtcagtttttgtcggctttctcatttagcttgcttctgcagtcattgaaatctttgatgtttggctctcatttcttctctccattttctgccatttttctggatgacttcaatgccttcaaaggtggtactttcagcactttgactttttgattttctccactccaagtatgttcacttttaatttatttcatcaactcatttccagatgagccataccttggactttgtccttaatactgattttagaaattttcttcygactataacatcttgtcatttcaatacaagaaatgtctcttcatttttcctaaatttatttcttctcctctatatctattcctattcttcctatttttatagtctattaactttttatttcatctaactctggctatcctttggcagtttgctacttcgcatatccctacttgaccttttttggagcaaatgcctttgtgaagtcttcctagagtcttccaggtgagcattagtatgtctagcatattgtatgtatttggcctccatagcccaagc

SEQ ID NO: 661505 - DNA, 629 bp, Homo sapiens
atttaacagtagctttatgtttttgccataccttgccatcagggtatggttgagttaaggggttgaaaatgaaagcatttttttgatttcataccttgctggtccacattagcacttcctttttcataagcccctggttccttgtatacatatctttaaaaaaaaagattcaagttttagtaaaactctgcttcagtattatagagaatgggagatagaatgcactggtttcatgttactatcttaatttttttttctttattagtatccatgccctatatttgacctcaataatacatgtaattaaacatttcagtagcaagscttggcaatattgtcatttaccttgtgttaatcttatactgctgcattttgtccagtccaatttgtcacgttatgttttatcttctgttctgactcttattctagttatagtcatgtgatcattaaataattttattaaataatgtgcattttctgtgtcttcttttttttttaacctctacatactgctctgattttaatattctagttgtgtaacctaatcaaactgaagcatgatgttaggaatgttgatcatgtttggaggaaaacaactaaaatgacaaaaacctagggaggaattaaaa

SEQ ID NO: 661506 - DNA, 605 bp, Homo sapiens
aaaacctagggaggaattaaaaaaacatgtggagggattctgtatgagatgttttctgtactttcatttagcagttatttattacatgccacttatgagtcaggtgtcagtgtcaatttaaatggaatatgatggggtagtattctcaaagggagatttgtatcagatattaagattattgtcttaattttgtttcagaatattggatttactaagataaactgtaaagcagtgctatctgttattttattaggcaaatcccttccaaatattttgcattaagaaaaaaggatgaatgagactgcttttgcagtagtcattattattattattttttttgagatggagttkcactcttgttgcccaggctggagttcaatggcgcgatctcagcccactgcaatctccgcctcctgggttcaagcaattctcctgcctcagcctctcgagtagctgggattacaggtgcccgccaccacacctagctaattttttgtatttttagtagagacggggtttcatcatgttggccaggctggtctcaaactcctgacctcaggtgatctgcccacctcggcctcccaaagggctgggattacaggcgt

SEQ ID NO: 661507 - DNA, 588 bp, Homo sapiens
aatgagactgcttttgcagtagtcattattattattattttttttgagatggagtttcactcttgttgcccaggctggagttcaatggcgcgatctcagcccactgcaatctcygcctcctgggttcaagcaattctcctgcctcagcctctcgagtagctgggattacaggtgcccgccaccacacctagctaattttttgtatttttagtagagacggggtttcatcatgttggccaggctggtctcaaactcctgacctcaggtgatctgcccacctcggcctcccaaagggctgggattacaggcgtgagcaaccacatctgaactgcagtagttatttttaagaataatgttggtcctctgaatttaatttgcctgttcatgcacatatacacataaattaagtgtatattgggatgtttttacaatttctgtataactacaggtaattattactttataaataacttaaattttaaatttttttctggagttatctatctaggaagttaaatataatataagaattaagaaaaaaccaaaaactttgaaattaattatatttttgcaagacatttgtcaaat

SEQ ID NO: 661508 - DNA, 572 bp, Homo sapiens
tcagcttttccttgtatttatttttatatatttatgtttattatgtatctatatatatattagtccatcttgtcttccaaggtgattgtataatttagaagaatctggtacagtcaagaccacataaaacaaaagatgtccagttctctgtaggcagtttggagcaattgggaagaccaaaatccttagagtcacattgatccaggttcaaattacagcttggatacttgatattgattctctaccgttgggcacgttwtttagcctctttgggtttatcttctccgatgtaaaatgtgaatattaaccaacttaccagattattttaaggattagtgttaatatatgtaaggacatggtatataactagtactcagtaagttgtgtctcaaattaatattattttattgcttttacgtttatgaaattcttaaatctttgatgtcatcatttccagcagttatgaaaagacattttattgtttggcttttaattaaaaattaatgggttactgttaatagattttgaaagggcactaaactgaaaaatggacaagcaaaagaagaaacaaa

SEQ ID NO: 661509 - DNA, 631 bp, Homo sapiens
gcttgttttagattctccagacttgtgatgtggaccagaagggagcagcaaaagtattgcttaggatccccccaaaagaggtctgagctccagttctgctacctggaatctgaatgacaatcaacaagttatgtaagctccctgggtttcaggttccttagctgtaaaactgagaatgaaaacatgtcaggaaattcttaaggtgctagatgatgatagtgtagaccagctctgatagatataacttttgttaatggtagaaatattctgtatcttcacagccactcaccatatgtggccatcgggcacttgaaatgtggctagtgcaactaaggaattgaatttttaattttagtgaattttgacgtatttaaatggccacgtgtaactagtggctaacatcttggactgcacaggtctagactacattcctycccatccccatgagtttgctctaccaatgccccagaacttagacacataactgtgaattgactgaagaagcatgaattgacgagaattgtttcttccagccaacagcataaaaacttgctataaaaattaatttctattggaaaataacatttctttcacacttggtttgggaatcctctctagtgccttaaaatag

SEQ ID NO: 661510 - DNA, 600 bp, Homo sapiens
ttattaccatgtcagagacatgtatatgtcgggtggcagctgatgtgcatagtttgacacttcctgttctacaaagtaaccttgtataacgcctttcaagaatattgaattgttgctttygcttgtctaaatgtaatgtttttattttatcttccttttgcttagttctaaataggaaataatattatttggtttgagagattttaataataattttgttagaaaaaaattgatttgcatgaactgtgtaatttaaatgttacctagaggcggatggacattaggaggttgttaccgagatcattattaggtctaattttgtttattgcctctaatgaagaaagaggaatgatgagtagcattttaattaaatttgtcaataaaactaatttgggagataatacaaatacctgtaaaaattgaagtagcaatacagagaaattctcaaatcattttacaggatttagagactcaaagagaattaaggtaacactgccaatcaaataatctagaatatcgcttaacaatatatattattttgagactgcagaagtgatgtgtccaaactgttttagttgaatccaattctcaagtacagaa

SEQ ID NO: 661511 - DNA, 600 bp, Homo sapiens
ttattaccatgtcagagacatgtatatgtcgggtggcagctgatgtgcatagtttgacacttcctgttctacaaagtaaccttgtataacgcctttcaagaatattgaattgttgctttcgcttgtctaaatgtaatgtttttattttatcttccttttgcttagttctaaataggaaataatattatttggtttgagagattttaataataattttgttagaaaaaaattgatttgcatgaactgtgtaatttaaatgttacctagaggcggatggacattaggaggttgwtaccgagatcattattaggtctaattttgtttattgcctctaatgaagaaagaggaatgatgagtagcattttaattaaatttgtcaataaaactaatttgggagataatacaaatacctgtaaaaattgaagtagcaatacagagaaattctcaaatcattttacaggatttagagactcaaagagaattaaggtaacactgccaatcaaataatctagaatatcgcttaacaatatatattattttgagactgcagaagtgatgtgtccaaactgttttagttgaatccaattctcaagtacagaa

SEQ ID NO: 661512 - DNA, 600 bp, Homo sapiens
ttattaccatgtcagagacatgtatatgtcgggtggcagctgatgtgcatagtttgacacttcctgttctacaaagtaaccttgtataacgcctttcaagaatattgaattgttgctttcgcttgtctaaatgtaatgtttttattttatcttccttttgcttagttctaaataggaaataatattatttggtttgagagattttaataataattttgttagaaaaaaattgatttgcatgaactgtgtaatttaaatgttacctagaggcggatggacattaggaggttgttaccgagatcattattaggtctaattttgtttattgcctctaatgargaaagaggaatgatgagtagcattttaattaaatttgtcaataaaactaatttgggagataatacaaatacctgtaaaaattgaagtagcaatacagagaaattctcaaatcattttacaggatttagagactcaaagagaattaaggtaacactgccaatcaaataatctagaatatcgcttaacaatatatattattttgagactgcagaagtgatgtgtccaaactgttttagttgaatccaattctcaagtacagaa

SEQ ID NO: 661513 - DNA, 600 bp, Homo sapiens
ttattaccatgtcagagacatgtatatgtcgggtggcagctgatgtgcatagtttgacacttcctgttctacaaagtaaccttgtataacgcctttcaagaatattgaattgttgctttcgcttgtctaaatgtaatgtttttattttatcttccttttgcttagttctaaataggaaataatattatttggtttgagagattttaataataattttgttagaaaaaaattgatttgcatgaactgtgtaatttaaatgttacctagaggcggatggacattaggaggttgttaccgagatcattattaggtctaattttgtttattgcctctaatgaagaaagaggaatgatgagtagcattttaattaaatttgtcaataaaactaatttgggagataatacaaayacctgtaaaaattgaagtagcaatacagagaaattctcaaatcattttacaggatttagagactcaaagagaattaaggtaacactgccaatcaaataatctagaatatcgcttaacaatatatattattttgagactgcagaagtgatgtgtccaaactgttttagttgaatccaattctcaagtacagaa

SEQ ID NO: 661514 - DNA, 578 bp, Homo sapiens
taggaatcaaaagctttgagttcccactgcactgctgacttgctttctgatcctaacaagtttctaactcctccaagcctccattcatcaaatgatatacagaaatgctctttcagggggttgcaaggatctaattagaggctattgaagactctttgtacactgtaaaatgctattcagatattatttattttaataaacagtgattgctttatgtcaggctctttaacaaaaattcttacaattcagacctcctatcaacactgcaaagcaggcattattatcgccattagtcaataaggcaactggcatacagaaagtaactaagtaacttgctcacatgctacttttaagtgatgattcccaatttaagttccagctgcttttttgctatgttgtcgtgctgttaataaaggataaatggtagaggtttgaactttaacaacaacttggattatgcttctaaaaaaatggaagtggcgctctagactaggagtcaggaggttcagactgttactayatttttctattattttggggtaagttacttaaattaatttcattaaatatgtttaaaa

SEQ ID NO: 661515 - DNA, 615 bp, Homo sapiens
aatctgttttttctttaggttaaaaatattttctccctttcaaaaagaaaaaaaattacatcttttgtctttttaatttatttgtttatttatcttatttacttagagatrgggtctcactttgttgcccagactggtctcaaactcctgggctcaagtgatcctcccacctcagcctgacaaagtgctgggactacaggtgcaagctactgtgcccagcttttcttctatttaaagaacatataaactattaaataaaaatacttatgatgctggcatttgtcacaaggtgggagtttagaggaagtgcaatcagtatctttgctgcagtatttgctgcctgttttctaactgctttgctgttttttgctgaccttcatgtccaatattacctcaaaatccatcatcaccctcttctaaagcctacccactgggcattgctggaggctgctaatatcaatcacaccagagtaaagagagaaactcttcaggggttcttgttggcttccatatcttagctctatttttaactccctgcaatcaacactgatgccattagacatttgcttaatctcagtgtactctttccttggctcattcctctcacaccttaga

SEQ ID NO: 661516 - DNA, 564 bp, Homo sapiens
aacaaaacaaaacaaaacaaataaaaatttctaacctaggcaataagcaagtggttcttaattcaggttgagcatcaaaatgtcctgaagaggttttaaaaacwcaaatacccctgctctgtccccagggattctgattcagctggtctgggatatagcctaggcaagggaaaattttaaaaacctccacctgagaattatggcccatggaatggcaataggtagacagcagaaagctagacagcaaaggaaaaaggacatttcagatcaaaataaccatgccaatagggaagaaagaaccacaggatgcaagagtacagccacttccacaaagctgcatgctacaatggctaattttagcatctactttcacacagaaaaactgtggtcaactttagacatctgtcctgaaaagagatttaaggttctgagggggtatttcaggtttaattcatgtatcaataaactatccactgcagctttaaatctgaatcattttggtacctgaaagcatcaaatcttttaaaaattatttagctggacaattacaggttgcgatgggct

SEQ ID NO: 661517 - DNA, 433 bp, Homo sapiens
ttatatgctcttaccacaaaatggtaactatgtgatcaatacatttgtttaattagctagatttaaccattctacaatgtatgtgtactttaaaacatcatgttgtatatgattataaygtacaatgttatctattaattttaaaaagaaaaaattggtgttcatccttctggcctttttaaaacataaaaataaatatagcctttgttgtacataattttacctgtgaagcaaaggtatctctaaggctcacagctagaagtgtagctgctgggctgcagtgcttgtgcctgttcacatcagactagaggctgccagatagttcttcaaagtggctttaccagtttcgtcttccattagcagtttgagttcctgttttcttatatgctcaccaacatttagggtttttgttttgttttgccaaactgatggc

SEQ ID NO: 661518 - DNA, 559 bp, Homo sapiens
caagagtgggatctcatttttgtattaatttttatttccttaatgacttgtaaagttgaatgcccaggtttcttctaaaaatcaccagtttatatccctcgtctatttttctatttttctttattgatttgtaggcattctttacatatgatgatatgattaaggctagaaggtcctaggttacaggagtcccgggatggccccaactgggtcaaggggayaccactctgctgagtggctctgtagcagagcagtatatgcagaggcagaaagggtgagagcattctattcatggaccagctaacagtcctcagctgggtgggtgggttgtggacagggtcctctggttctctttcatctacctatccattttcctggtccctccactatgatacacctctatttcccagtcagtaggaaggagaattataaatcagtcatttcagcatcactgatggaatcacagaatgaaggagaaaaagtctggactctctaaaaacaggtttcacatagatgagatgatttaaagatgtttcttctccgctcacaaaatattaaa

SEQ ID NO: 661519 - DNA, 559 bp, Homo sapiens
caagagtgggatctcatttttgtattaatttttatttccttaatgacttgtaaagttgaatgcccaggtttcttctaaaaatcaccagtttatatccctcgtctatttttctatttttctttattgatttgtaggcattctttacatatgatgatatgattaaggctagaaggtcctaggttacaggagtcccgggatggccccaactgggtcaaggggacaccactctgctgagtggctctgtagcagagcagtatatgcagaggcagaaagggtgagagcattctattcakggaccagctaacagtcctcagctgggtgggtgggttgtggacagggtcctctggttctctttcatctacctatccattttcctggtccctccactatgatacacctctatttcccagtcagtaggaaggagaattataaatcagtcatttcagcatcactgatggaatcacagaatgaaggagaaaaagtctggactctctaaaaacaggtttcacatagatgagatgatttaaagatgtttcttctccgctcacaaaatattaaa

SEQ ID NO: 661520 - DNA, 501 bp, Homo sapiens
tcaaaacacatggatagagtaccacttatgcacaaggcatgggaatgatacacaaccatcagaaatgcaggcctcactcctcaaaagaagcttatgaatgagagaaaggctttttaaataaaaacctagtattacagggccatacatcctgacagtcaatatgaagcaaaggcagcaaaagcaactgaaacatgtggaagggatggggarggaaatttggatggcagttggaatgggaaataattggtcagtttggccaaaatacaggtgagaagagatccatcaagctggactaattgtcaaaatccttgagtgaaattatgtaatatgctctcttataggccttcaaactgccagtcagatttattttggaccccttcaagataccatacagaagtcgaacatagttcttcatgcatgaattaaaagaaaaacactattattatttcttccttcattttatacatttatttaatctagtgcttactacatgctaagcac

SEQ ID NO: 661521 - DNA, 501 bp, Homo sapiens
tcaaaacacatggatagagtaccacttatgcacaaggcatgggaatgatacacaaccatcagaaatgcaggcctcactcctcaaaagaagcttatgaatgagagaaaggctttttaaataaaaacctagtattacagggccatacatcctgacagtcaatatgaagcaaaggcagcaaaagcaactgaaacatgtggaagggatggggaaggaaatttggatggcagttggaatgggaaataattggtcagtttggccaaaatacaggtgagaagagatccatcaagctggactaattgtcaaaatccttgagtgaaattatgtaatatgctctcttataggccttcaaactgccrgtcagatttattttggaccccttcaagataccatacagaagtcgaacatagttcttcatgcatgaattaaaagaaaaacactattattatttcttccttcattttatacatttatttaatctagtgcttactacatgctaagcac

SEQ ID NO: 661522 - DNA, 501 bp, Homo sapiens
tcaaaacacatggatagagtaccacttatgcacaaggcatgggaatgatacacaaccatcagaaatgcaggcctcactcctcaaaagaagcttatgaatgagagaaaggctttttaaataaaaacctagtattacagggccatacatcctgacagtcaatatgaagcaaaggcagcaaaagcaactgaaacatgtggaagggatggggaaggaaatttggatggcagttggaatgggaaataattggtcagtttggccaaaatacaggtgagaagagatccatcaagctggactaattgtcaaaatccttgagtgaaattatgtaatatgctctcttataggccttcaaactgccagtcagatttattttggaccccttcaagataccatacagaagtcraacatagttcttcatgcatgaattaaaagaaaaacactattattatttcttccttcattttatacatttatttaatctagtgcttactacatgctaagcac

SEQ ID NO: 661523 - DNA, 501 bp, Homo sapiens
tcaaaacacatggatagagtaccacttatgcacaaggcatgggaatgatacacaaccatcagaaatgcaggcctcactcctcaaaagaagcttatgaatgagagaaaggctttttaaataaaaacctagtattacagggccatacatcctgacagtcaatatgaagcaaaggcagcaaaagcaactgaaacatgtggaagggatggggaaggaaatttggatggcagttggaatgggaaataattggtcagtttggccaaaatacaggtgagaagagatccatcaagctggactaattgtcaaaatccttgagtgaaattatgtaatatgctctcttataggccttcaaactgccagtcagatttattttggaccccttcaagataccatacagaagtcgaacatagttcttcatgcatgaattaaaagaaaaacactattattatttcttccttcattttayacatttatttaatctagtgcttactacatgctaagcac

SEQ ID NO: 661524 - DNA, 548 bp, Homo sapiens
tttgggtccatagcccacagtgtaagaaatgctattgggatacttggtagaccacacccacagagctatttcacagtcaacaactgtggccacagcagatgatgggatggaagggctaacttcataaactttcccagtttgaccaagtaaaactttttatttaatgagatcaaaatgctgacaaatcattttatagagggagtgagccagaaggaatatgtgttggttctaaaagaaagtgggtgttgggcagtatatttttgttacttcttaacaaagaggaaagcagggaggaggaagagaggggcaaggccccttgcctttggcaggcagtaggctgaatactacggtagctctgcagaattagaacagccatcttggaacaatcatttgactcctatgtmagctcatctcaaagctgttagctatttacagtctaaggcttgagagtctcctcaggctctttaaagatattaaaatgataacacattttaatatgtcaaatttaatactacaaaaatgttgtaataaagtttcagggctttctt

SEQ ID NO: 661525 - DNA, 583 bp, Homo sapiens
tatacttacaatgggtgaattttatagtatgtaaattatacctcaataaatctgtaaagaaaattaacttcgactagtcatcaacagaggatcctcttatttttcattttaacctccaaggtctaccatagtaaaagacagcatggctgttcctcattagccaagaggtgcgtccactctggcgggagtgttcaggcaggtcaccaaatgtaaacagccctgtaaaggtcatcacaaaggcgctgttgttctgtctcacagccgagaaggaaaggagagtcgccacagaatatctactctttcttgcatcctaattagaracatgtggaagagggcccacccacaggtcaaaccagtcagaaaggccccatttcttctacctaatgttgcatgttggctaaagtaagacctctccctggcctgccatgggaatggtttcaaattataaaagtatctccaaaggccaccatcaaagcaccagtagattttcactagtggctcccatgatttgaaaaacacttccttgaccagcacataattcgtgccaggttggtaaactggaaccaattccatttgtttgtcc

SEQ ID NO: 661526 - DNA, 535 bp, Homo sapiens
ttgttgaaagccttgtgggctaactcttcagcctgcaagcagagtgtgaatgtgggaagacatcctgtagttctagtttgctgttggcattgggttccataatgaaggtctctggacctcataaacagtgccatgagaggaaaaatttgccaaagttcagttgcatatcaaagaaagccacagagccagagagctccccgaggacccacacagctgctttgtctactgccaagccatggctctaatgcacggatatgcctgtgggccaagagccaaagccacaaagttccaccagttcatttagccttggcatttcagtgtactgagggatctgttatttgggttgctgtctcattrttaaggggtaaaaacagaaatatgcccccccatcaccagaaaactggtttactaaaatcaccaccaccacctccaccccatccctgctcctactgtgagaacagttctactgtcctgtgtgacaaaatacagcaaatgccagtttttctcactggtgacccctgatcactttgtggtc

SEQ ID NO: 661527 - DNA, 589 bp, Homo sapiens
atacattattccatcccaatagctgcaaagtgttaactcattctagcatcaacttaaaagtccaaagtccagagtctcatctaaatcatatatgagtgagactcaaggcatgattcatcctaaagcaaattccctgttagttgtgagcctataaaattaaacaagttatgtgcctccaaaatacaatgataggaaaggcataggatagacattcccattccaaaagggagaaataaaaaagaaaggagtaactgatcccaagttagtccaaaactcaacagggaaaacaacctcaaataaggctccagaataacctccttttactccatttccaccttctgttcacactaaggcaggggttgtacccagaagaccttgggaagctccaaccccatggctttgctagtctcaccctcacagcagctcttacgggttagycttgctgcttcagctgtccgaggctggggctgcacattggttgctctgcagttctggagtctcaagtgaccctgccatgacacctatactaggtgtagaggggactccctgtggcagctgcaaccccacagttccagtaagcattgcccta

SEQ ID NO: 661528 - DNA, 589 bp, Homo sapiens
atacattattccatcccaatagctgcaaagtgttaactcattctagcatcaacttaaaagtccaaagtccagagtctcatctaaatcatatatgagtgagactcaaggcatgattcatcctaaagcaaattccctgttagttgtgagcctataaaattaaacaagttatgtgcctccaaaatacaatgataggaaaggcataggatagacattcccattccaaaagggagaaataaaaaagaaaggagtaactgatcccaagttagtccaaaactcaacagggaaaacaacctcaaataaggctccagaataacctccttttactccatttccaccttctgttcacactaaggcaggggttgtacccagaagaccttgggaagctccaaccccatggctttgctagtctcaccctcacagcagctcttacgggttagtcttgctgcttcagctgtccgaggctggggctgcacattggttgctctgcagttctggagtctcaagtgaccctgccatgacacctatactaggtgtagaggggactccctrtggcagctgcaaccccacagttccagtaagcattgcccta

SEQ ID NO: 661529 - DNA, 598 bp, Homo sapiens
ttgtcttccacttttaaccacaagaactgcaagtctacatcataaattttagcactgcaaattcagtatcatcaaagcaagctcatattttcccatataaatctactccatctctgttccttcctttgaccctccagttaatctggtttaaaacctcagctccattttcaaaatgtttccttctctcatgcttctcacttgcaataaattgagaggtcttactgatttaactgtaaaatcctacctatatccatccattcatttctcctacctcacccttagatccattcctgactctccattcctcctaaatcaaccttagacccacattagctttcacctggtgtaactgctttagttgcctgttgtctgtgctgctgtsgctttctccctactaaagccaccctctgttttactacctgattaacctcctccaagaacacacctaagcacaccaccctcccatttacaaccagcaggctcaaaacctttcagtggctcccaagtgtcttcagagaattctaaattcctaacactggcattcaaggactttctaccctgcgcccacctgcccttccagacttcttccccctgctcc

SEQ ID NO: 661530 - DNA, 598 bp, Homo sapiens
ttgtcttccacttttaaccacaagaactgcaagtctacatcataaattttagcactgcaaattcagtatcatcaaagcaagctcatattttcccatataaatctactccatctctgttccttcctttgaccctccagttaatctggtttaaaacctcagctccattttcaaaatgtttccttctctcatgcttctcacttgcaataaattgagaggtcttactgatttaactgtaaaatcctacctatatccatccattcatttctcctacctcacccttagatccattcctgactctccattcctcctaaatcaaccttagacccacattagctttcacctggtgtaactgctttagttgcctgttgtctgtgctgctgtggctttctccctactaaagccaycctctgttttactacctgattaacctcctccaagaacacacctaagcacaccaccctcccatttacaaccagcaggctcaaaacctttcagtggctcccaagtgtcttcagagaattctaaattcctaacactggcattcaaggactttctaccctgcgcccacctgcccttccagacttcttccccctgctcc

SEQ ID NO: 661531 - DNA, 588 bp, Homo sapiens
aagccccacgttttgcactgtagatgcatctgagtcactgagaaaattcccatggagcggctcaataaaaaaagatcaaccatgataaagaccttgccttttatttccctgcttcaaccaaattgctccccaggcgctttagatttagaagctctactaatcaaccttataaacagcagcccagccactgcatagaaattactttgtatagctcctaagcgaaattaccccaggggatagaagatgcccaaggctttaacaatcacaccataacacagcctcagtatgagaatagaggacaagcacactttgacatcccaattgaaactccgggctgaatccgacatagaagaatgtaattacctttcctagtttgacggtgcactgaagaaactggagaagcggaatacctattaggttcccactaatcctcctcctaaattcaaagcagggctagtccctggaattcatttctgagtatccttactctctgctattgttaaatagctcaattgataagtscttccagctaataatgttttccacggagctcaccccctcctctttcccagcagctcaaagcacttt

SEQ ID NO: 661532 - DNA, 594 bp, Homo sapiens
cagaatgatcaatagtcaaactaacagatttgcagtgggagggccaggatccttttgcatccagtctttagaaggattaaagattagacagatattacacctttcaacagcaacattctatatctgaggaaaatttaacaacrtatttccctaagagaaaaattcctcaagaaaccaaggtattacagaagaattgacatgaggtgtagtggtgagcattaagcacatgtgtgtaaaactgataataagggtaaaggttatttttaaaaatctataaatgtcatatgttcttattatttagatataatgcaattaacaatgtagaataagctcactgattaccttaaatattgtagttgggagtaaaggatgtcactttgaattaaacaccatgggagaatgagagaatggaaaagaaaaggtgatcaactaaactcattatagcttatagaagagaaccataagatgatatctaatttgtttaattaaagagattaattttgaaagtaaatattttaacaaaaatagaagccctgctaaataacagatgacatatcataaagagcaaaagaccacattataaaagtaaacaca

SEQ ID NO: 661533 - DNA, 532 bp, Homo sapiens
tgtgtgtgtttgtgtgtgtacctgtgagcacacctcctaagaaggatatgctgtctctggcaggaaaacagcaattcaggaaagcactcagaagggaccaactgtggctcccagccaagagactttcctaaatcatagatgctctggattgacagggacctcacaggggatccaggccggcgtccctgtccctctgcttccccccagcacttggtggtttccattggcatcttctcctcccctctacacccctgcacagggccttgtcctcctattgagctaagtctrtctgacacctgtgggagcccagcctttatagaggcaagaacacaagaccagccatcggggctgcccttgccaaggctttgctttgtgtctcttgaatctcttttcttgagtctcttttcagccttggaaattgagacccttggacgttgtcttatcacctttgaaggctataccatggggctgggttgtcagaaacttaccattataataaaggctttctggtactttcagttataaacacccc

SEQ ID NO: 661534 - DNA, 554 bp, Homo sapiens
atactctggggaattagttttttaaatattaaatccctgatatcaacttgcacagtattcttgcttttcatataagcagaaggcagactatgaaatgatctatctctttgtgttgtttttggtggttttaattttgcgcaagtgagcacttaaagcatatttgggaaggtaatgcttccaaatctgcgatttgcttttgagtagctttggaactattctggcaaatggtgaatttgttcattttatttatattctcttccaatgaaaatgtcaagaggttataacagttcacactagagagaggctacttattgattattttcaattgcataaacaacattggtgctaactggaaagaaaatgaatattgagaacctaggctggagggccattgaaagttattagaaccrtattccttatttcagaaagtttagtaaagacgtggatggtaaaaatagacctacatcaaatttctagagatgaaaactaccatgtctgatatgaaaagtacactggatgtgattaatggcagattagacattgcaaaagaaaag

SEQ ID NO: 661535 - DNA, 464 bp, Homo sapiens
gcaatggcacgatctcggctcactgcaacctccacctacctggttcaagtgattcttctgcctcagcctcccgagtagctgggactacaggtgcatgccaccatrcccggctaatttttgtatttttagtagagctggggcttcaccatgttagccaggttggtctcgaactcccagcctcccaaagtgctgggattacaggtgtgagccactgcgcccagccatgcagatattcttgaggaaacattttaaaatgaaaactagcagaaaggatattacctttcaacatttcctttctcatcaattcttggcagcacttttgctgcccagtactcttctgttggagctgtgaagtgtgataggccattactttatagatccattcattattgatacgttttgtagggaagaactccactgctgtttggaaactgaagtagtcaatctcatagactggaaaatat

SEQ ID NO: 661536 - DNA, 464 bp, Homo sapiens
gcaatggcacgatctcggctcactgcaacctccacctacctggttcaagtgattcttctgcctcagcctcccgagtagctgggactacaggtgcatgccaccatgcccggctaatttttgtatttttagtagagctggggcttcaccatgttrgccaggttggtctcgaactcccagcctcccaaagtgctgggattacaggtgtgagccactgcgcccagccatgcagatattcttgaggaaacattttaaaatgaaaactagcagaaaggatattacctttcaacatttcctttctcatcaattcttggcagcacttttgctgcccagtactcttctgttggagctgtgaagtgtgataggccattactttatagatccattcattattgatacgttttgtagggaagaactccactgctgtttggaaactgaagtagtcaatctcatagactggaaaatat

SEQ ID NO: 661537 - DNA, 528 bp, Homo sapiens
ttgtacagtgttaacactagagatagggtccttgttctatttaatttagaaaacacaattttctctctcactctttctttcttttaattgaaaaataatgtattgtaagttgagcaccatttagctggctaaattttaactccagagtggaggatctttatagagtcatacagttagagaattccaaagaagcccttaatacaatgtaagtaagaataatgaggtgcagaaataattgtttttccagttacttagtggtaaattcatttgttgcatgtggtcgcaaggtttataagaaaactcagagcccagcaattcttccagttcttcctgagcaattttccactagttaggagtcaggaaagaggaaccgtgagagctgaggagctgtgtatttcattaattgtgaaatacacaaatattggcctgttyccttgcgatcataaaatttgcaacgtaatattgcagacatttttgcatattactaaagttctttgaaaagtgtattctttgatggtttctattgga

SEQ ID NO: 661538 - DNA, 553 bp, Homo sapiens
gtagcatgctttgaggtaaattatattgtgttaaacttaatatatgatacatagtataatgcaatacttaatatatatttcatatatttgtaacatacaaaatacaatatccaagagcagtatggaacaccaaaaggtgttcagacttttttttttgagacagtctcgctctgtcaccaggctggagtgtggtrgtgcaatctcagctcactgcaacctctgcctccctggttcaagcaattctcctgcctcagcctcctgagtagctgggactacaggtgcccaccaccatgcctggctaatttttttttgtatttttggtagagacggggtttcaccatgttggccaggatggtctcgatctcttgacctcgtgatccacctgccttggcctcccaaagtactgggattacaggcgtgagcaccttccttcaaatggaattttatatctgtgtttacattttctgcttaaagtttgaattttgtttaattcaattgaatttccacttaaaatgtaaacttttgaaacccacacctctgacatattccacat

SEQ ID NO: 661539 - DNA, 599 bp, Homo sapiens
gaactggtggtcttctaaagaagaaaaaaaaatcacaggggcaaaccgtatatttatatgtatctatatcctatacayatatacacatatagctatgtgtgtgtgtatgtgttatattgctaaaactttagacagttggaatttaagagtttatttgagcaaagaacagttcatgaattgagcagcacttggaaccagaagaggttcagagagctccaaccagcagcatgagcagttagctattatagaaagcagagaaatcatctggttggctccagctaggtttttgccttgtttgggtatagtgtgataaattcggtttttgtgattggctgaatctcagctatttgttacaaaaaatatactcctaggttggaattcagtttgtttgtatacaaagttaggttgcctcaggtcaatcaatggctttttgcttaatttaattatatataaaaatatataaaatatataaaatatatattatatgttatatatattatagctttctctcatgcactcacctatgtacatatatgcaaggatgcaaatgacaagagttctccttttccctttgagggatcagtgaaggagtagacaga

SEQ ID NO: 661540 - DNA, 585 bp, Homo sapiens
tccaatggcagctctgtaccagatgcggtttcattgcttgagcaaattaacacatttcctggtacctggtatgcagccattgacttggcaaatgcctttttctccattcctgtccatgaggcccaccagaagcaatttgccttcactacctcaggggtatatcaactttccagctttgtgtcataatcttattcggagagaacttgatttctttttgcttctacaagatatcacactggtccattacattgatgacattctgctgattggatccagtgagcaagaagtagtaaacacactggacttattggtgagacatttgtgttccagagaataaatttgactgaaattcagggaacttctacctcagtaaaatttttaggggtccagtggtgtggggcctgtcaagatattccttgtaaggtgaagggtaagttgctgcatttggcctcttctacaaccaagaaaraggcacaggctgggtgcggcagctcatgcctgtaatcccagcactttgggaggccaaggcaggtggatcacttgaggtcaggagttcaagaccagcttggtcaacatggtgaaacc

SEQ ID NO: 661541 - DNA, 599 bp, Homo sapiens
gaactggtggtcttctaaagaagaaaaaaaaatcacaggggcaaacygtatatttatatgtatctatatcctatacacatatacacatatagctatgtgtgtgtgtatgtgttatattgctaaaactttagacagttggaatttaagagtttatttgagcaaagaacagttcatgaattgagcagcacttggaaccagaagaggttcagagagctccaaccagcagcatgagcagttagctattatagaaagcagagaaatcatctggttggctccagctaggtttttgccttgtttgggtatagtgtgataaattcggtttttgtgattggctgaatctcagctatttgttacaaaaaatatactcctaggttggaattcagtttgtttgtatacaaagttaggttgcctcaggtcaatcaatggctttttgcttaatttaattatatataaaaatatataaaatatataaaatatatattatatgttatatatattatagctttctctcatgcactcacctatgtacatatatgcaaggatgcaaatgacaagagttctccttttccctttgagggatcagtgaaggagtagacaga

SEQ ID NO: 661542 - DNA, 614 bp, Homo sapiens
tagtaatataatgtcattataataataaccctaaaacacattgtctcatattgtgttgtacctaaacaagtgaaattaagaagaaaattgaaggaaatgtttctggtaaattgcagatagtgaatcttttgtcttatactatcaaataggtattgactattccagctttcttatttgttgaggaagatggcagaaatcccrttttacagagggatagactttgaaggataatacccaaagctgcatagctgtggctggtataggccccaaacctgatgtttcttctctaaatctactgcctttgccatctcaacagcctggtttttgacagttatctatgtatgagttgcataaatcgttcattcatggagcaaataattattgagtggccactatgccaacagcactgctatagatgctagagataccctagtgaaccagcaaagtttctgctctcagctcatattctggtggaggagacaacgatcaagttaaagaaatacataggctaattttagagattatgacatgctatattttaaaaataggcaagctaagaggataggcagtgatgctgggaggtgggaaagttttgtctcagaaatgtggtaaga

SEQ ID NO: 661543 - DNA, 497 bp, Homo sapiens
gggtctgctggtgagaacaggcagacccctaattctaacactgagaattagtctcactattggaggattacctaaccatagatctggccgctagagctgactagggctccaatgaacagctctaggtcccttgcagccctctggatcatcagaggggaaggtagaaagaatggggaaggtaagggttctccacttggagggaagaacctgccaagagcttgtaatgagaaaagcctcacaaggacctggccttcctgcttttcaaaaagactgaacaaaaccttaggtagaaaaggttaggtctaaaaggctgcttaytaaggagggactggtatttgggcacctaaacccaaagatcacttataatgttaagtcattcattgcagtcaagattaagttcctgacaggctctggcaaaacctttcacagaaatgctcccttatctcctgggacctctcaagcaccagataccaagcagtacgtctcccgtccaggct

SEQ ID NO: 661544 - DNA, 557 bp, Homo sapiens
catttctatttctgttactgagaaataagaaattatcaaaatgttaaaaatctattattaaacactgaatactggtaagcatcataagcaacagcatagaggtgagaattagcatagtagggaaatgtaggaagtagttattgaagtgacaatcctatscagaaaggattgtatgaggtggagactaatgttaaataaagttaaataaggcataacttacttattcttcacaagaaaactatgaaataggtactattactatcctttccattttattttatggaaggttgtttcatataaaggttttattatttgtttaatagatttattatttctaaagttggcaggtgaatgcagaaatcacgattcaaagtccaagctcttaaccttgacactatactgtcttcaagattttgaatgccagttacaagattttagtgttgatgagaagccagccattacagtgatgtataaggaagttaaattataatatgatttgggaaaaataattagacaagacagtttataccagtggttaaaagcatggattctagagc

SEQ ID NO: 661545 - DNA, 557 bp, Homo sapiens
catttctatttctgttactgagaaataagaaattatcaaaatgttaaaaatctattattaaacactgaatactggtaagcatcataagcaacagcatagaggtgagaattagcatagtagggaaatgtaggaagtagttattgaagtgacaatcctatgsagaaaggattgtatgaggtggagactaatgttaaataaagttaaataaggcataacttacttattcttcacaagaaaactatgaaataggtactattactatcctttccattttattttatggaaggttgtttcatataaaggttttattatttgtttaatagatttattatttctaaagttggcaggtgaatgcagaaatcacgattcaaagtccaagctcttaaccttgacactatactgtcttcaagattttgaatgccagttacaagattttagtgttgatgagaagccagccattacagtgatgtataaggaagttaaattataatatgatttgggaaaaataattagacaagacagtttataccagtggttaaaagcatggattctagagc

SEQ ID NO: 661546 - DNA, 592 bp, Homo sapiens
tggtcagttaaccagagatgcaaataatcgaaacaatttatttgactaatgtaaaaacctgatataatttgttaccccgacttcttagaagaaaaatataaacggcaaatacctttatcccctttttccgaccactgattggaatttgattgtttctgtggggttaacaatctaaaatggaataaatataatttttgtattttttctgagttgatatctataaattatttcagagattaaarcattttcttattttaaaaagttacctgacttgcataaacttttgtgaacttgtgatagtcgtaatatgtgaacattttgaatggttatccacagcagagtcattaaatatctgaaagaaagaaattaagcatctgacttggctacacaaagcaataaaaattttttgcttgtcgttagcaactcagaactctcatttcattagtatttcatcctttccatcattaccatcattatcaacatcaacaactacacacattaactgaaaccactacatacaaaacattaagttgaatattgagaaacaaaaaagtttaagaaattaatgtttttgacaagtatagtaatgatt

SEQ ID NO: 661547 - DNA, 547 bp, Homo sapiens
atctgatacttagatttatctcatcatataaactttagtcactaagatcttggtgaaaattcatataataataaacacatttgaaaattatgtttatcattgagcaaactgtactaagcaagtggtgcaacttaaaagaatatatgcagcattaagggacctcacacagctttataacaaatagaatatgcctatttgttttactgccttcagtacataatgctggcatctaatcaaatcaaaagtttaatagcccttgccaaatatgtttcttttagaaagttattttaaaaagaaataattatgcttatttttcttatgtttgtgtgattttatagctattatatagctaagagacattaacttttcaaaaagtattacacttcgaactctcagaaaaccttgcatgctgatcattagatccaaataaaattatacattttacctttaatttttttgtttactcctcagagtgctgtgttaagtgttttggataaagtgtagtaataatgaggcatctattgygatataagacagattgtgatcc

SEQ ID NO: 661548 - DNA, 462 bp, Homo sapiens
tgctttgaatttcttcatgttctcttttcttctcataatattcacgtgaaaagggtgtttctgagtattttagttggyactgcttcaaaacttctttatactgacatatataatcatgatacatttctctgttaaaattaaaagaaatgatgtttatataacaacaacagatctaaaaactttgtgaatacactgttaaagtctactaaacataaaaggcaaatcaaatgtcttcttattcttgcttccctcaatattgtctgccctttagactttccttaactccaccacacttctcaacttgactctttttcttcattacctgagtgattcacttcttaattctattcattttaactcctactcccactattttaatgacgctattcttcccaaggtcaccaatgatcaaatttgtccaactgaatgatctctttttagcactcatcctaattgacactg

SEQ ID NO: 661549 - DNA, 378 bp, Homo sapiens
ttcaaaaaaattcgtagaaaaatttttgaaaatatatagtccttacattcctcaagattttctcatttcttggatcaaggtatactctatgggggagtttcttaaaagataccctgaggattatctcaccttagcagattagaraagagcaagtttcaaaaactgcacacatgagaagaaaagtaaggataacagccctgtgctagtcagcgggtctgaatcttaagaaagttttaatttctgaatattactaaactgtcccctttagcaaggaaaagcagttgagccccaaacaagctcctattcctctaaacgcatatttgctaattaagacccacttactatttaatcgcttgggaaaaatggtccagggaagaa

SEQ ID NO: 661550 - DNA, 611 bp, Homo sapiens
aacatgtgggcagagccagaactggaagacgagaggcccccttgagcccatggcgacattcccagccccttcccgggccaagcccaacgagcgcttcagaaatcgttgttgagtcggggcacgacttgaagttttggggatggggtgggaagcacccgcataaccgcttatgcgtgggattgcaacaagcatccggatcttccagggttcacggacacccagatttctccacaggatatgccctttaaagtaaacgctctgaatatgtcccttggtggcgtgtgtacaaccacgtgtagcaaaattctaacgaaagcccttccccaacacccgggtaaacctagagaaacagtgcgatttcgcatttacgaatttaccacgaagaataaaaaaawtggaggttttcacagaacagccaattcgcattacggcatacgcctgaggcggggttcctgtctaccgtgcccctcagagcccaggaaccacagcccgtgcgcctcccgcagtgggagttcgccggccgactcccaccctcacagcctcctgtcctggcttcccctcgcccgaggctgcaacaccgcatcccccccatcccccgccgcgccctcagc

SEQ ID NO: 661551 - DNA, 600 bp, Homo sapiens
ctccgagtcagctctgcaactactgctcaccctggcccttctccaaggtgatgtgctgtggtttcacctgcttgttcaacaacatggtgcaagcactgggtgctggggggagctgcagttatttggcctccagcacaagttattggagctgggaaagttagcttccttcagctggaaagcacatgtccaagtcaaggacaaaattcttatcatggcctacagggacctttacggtcctgtccctacctatctctccrtcttcatattatactaactctaccttcctctgcaatccatctttatgaacttctgtcagttcttaacatgctctttccatcagggggatattgtacttgctggctcctctgcctggaatgctctatccttctttatttaataacctccttctcattcttcaactttaaactcaagtatcacagactcagcaatgtctgttataaactctcatagttcatgcacttatccttcatagcaattaacacagttttaattctctattatttgtgtaattatcgtataaatatctatctcatccactatactgtagtctccatgagtacaggcccaatgcacacacac

SEQ ID NO: 661552 - DNA, 636 bp, Homo sapiens
catcaaaagattatgagacccaggacaagatggaaagtgagacatcattaagacaatatggcctaattgatatattaagtggatagttgcccacaagaggggaactaacacttgttgagaatttactatgtgtcaggcactgtgcaaggaacagtcattcataatctcatttaatccctacatctatcccataggataagaattatgctatcagataaggaaacgggggcccaaaatcatgtggttattgcaatgatttaaacctaaaatattggaagtccttgctctactgctttatctgcttctrtaaagtttagtttgagaaacatcattgccctaaaataccattatagtgacactatttcccttttctatgaaaaccactccccatcctcccatctaccttcagaaattgagtattgtatctttatctatctcacagttttaacaaggcttagtctagtgaggaggtcctcagcaatggggaataggaaggagtaatggagtcagaagaaacacaaaggagaaaagggaacataaatatgaattattacaacacagagaaatacaatcattgggaaataagaaatctttcagagaccacaaaaaggataaaaaggtaaagaaacagaaagg

SEQ ID NO: 661553 - DNA, 607 bp, Homo sapiens
tgcaagttagctgtctacttgctctctaattcactgcagtcagcagttgaagaatggagcttatttagaatatctcaaatcatgtaataacactattcctttttaaatgaattcaaaggaactaaacggtakaagaatccaccagtaatagaacaagtgtgttgacggtaattgtagaagtcattttgcctttccttgaaattgcaaattccatttcataaccaggttaaactcccttctgtgccaatttccccatcaacaagtacacacacatatttttcatagaccctgaaccatcccctccaggattatttatttccttatttttttaagaacaatgtcatacccacataaaatttgctttaaaaatgtgcacttttgtttgctttttccaacattacatgtttattttacagattgggttgagagctggaagacttttttttcctgtttcatcctaaaagcgtaaggatcaatgccaattgtatacttagatatcaaggcaacttttccagctgtgccctaactgttctctattgtgctccttaccatgtccttggtgtcatttttctgatttgagtgaaacctatgcaagacattaattgtg

SEQ ID NO: 661554 - DNA, 467 bp, Homo sapiens
gtggttaagtatttaaaaagtgttattattgttaaagttttagttccagccagacaggtgaacaaaagtgtgaaaatgcttaaaaagaagtgaggaagttatgttagcagtggaaaaaaatttaaatggagtcatttgttcatttgctyaaaaattttttgagcacgaattagtaccaggtactgtcataaatgctgaggataaaaagagaacaaaataagcattcctgccactgtggaatttatcttctatcaggaagaggtgtaccataaaagaaggtagctataaatgggccaggaccgagagagaccagccgcctgtgagctgagttggcttgaactctgaccagcaggatgcttgtattgaatagtagcaaataaagcatataaaatcctctctttggaaaaatataaatgccaaaataaagctgtgatagttatattaaattgaaaaaactaacttttaaa

SEQ ID NO: 661555 - DNA, 547 bp, Homo sapiens
gtgagaaaaaaacaaaaacacaacattttaaaaaagacatttgacttaggaaaagtcaaagaaaagataagattggaacccagaggtaggaaagtattgacttctaagcactgctctcctctggcaaatgtgagcagggtgtraccaggattccacctgtcctctactctagagaggaaaatcagtaggggcagagcgaggagtgagatccccatatgtgcagaagtcccacactgaactccagatatttccggcatgagcctcagaattccctgggggcactttgcctaaatccagcacgaaacagttagctacaaaaccagcccttggacatcatcttctacatgatttttttctccatatttgccccacaaaatgcaactctagagaaagctgagtagacgtctatggattcccggcaagacccgagcctttgtccaagacctcatgtcccaatctactagctgcaaaccaccagtagcaagctgcaaaaccacccagacaggcccaaggccaagggctgccactgtactttctcgatttcccg

SEQ ID NO: 661556 - DNA, 630 bp, Homo sapiens
ccaaagtgaattcctgaattcctgtggcatcactgcctatttggtgggaaaaagggagggaggggtagagcggggtgggggagggaggagtagtgaacgctgccgcactcgcctctctttttctcccagacactcgcatgtcttttcaacctccaggttctgcaaaatactgaagaaaagtccaggagctaacggcgggcgctgtcgagcacggggaggtgctgaaatagtcctggcgtgctgattcaagctttgattggcagagccacccggtgactgacagggggtctccatggcgcccgcgccgccaatccgcccaccccaatagcggagccagctcgcctgccggcgtgcctgagccgagccgagcccgaaccccaagccgcggagccagcacctcctccagtcggggtcgyccgctcccggccgttgagccaccgccgccacccggtagtgtgtcccgctgccccaatccgcctcatcaacaagcgcctggcacactcagccaggcccgcgggcatctgctgcgtgtcccgctccgggctcagtgccctcgccgccgccggcactgcctcgatgttccagctgcccatcttgaatttcagcccccagcaagtggccggggtatgt

SEQ ID NO: 661557 - DNA, 582 bp, Homo sapiens
gttagcagtaatgtcatgaagaacacattttgggcgacaatgatagagcatacagaaacaaaaacctatttgacttagtttaagcacaatcttaattagactgcagaataaaacattttcaaataagtactggaaataagaggcatcatcgcttttcaacaaataaacacaacacatactttttaaaaataaataccatgggaacaatcgctgactgatgtcctttaccgtatatgcaaattctaagatatcctcttcgaacacaaagggttcagtgcttagcatatggccccccttgcatacagttggcataaatattttttagtcctgagtgaactacatgagttaataagaaacaaattttaaccttcaaatattccaccaagtcagtctttcataacttggaagcctaaagctttctttaggtgtccctcaaaggagctataacatgccttctaaattccaaaattctcawatccagtttaaatgtgagacttgaaaattatgtaagggtctttggtagtcatcaaaactatgattccactattgaatcctctttattttattttattttattttatt

SEQ ID NO: 661558 - DNA, 550 bp, Homo sapiens
aaacagaaaacatggaaatagacccacacaaatatgccctaatgatttttttgcaaaggtgcaaaagcaatacaaaggagtaaggacagcctttccaaaaaaaggcaaaaaatgacctaaacctcatgccttatacaaaaattaactcaaaatgtatcatagacttaaatgtaaaacataaaactatataacttttagraaaaaaggagaaaatcttcagaatctagaattagagaaagttattagacttgacaacataatccataaaagaaaaaaagcataatccataacagaaaaaatagatacattgactcttatccaaattaaaaactttttctctgtgaaagccctcgttaagaggatgaaaaaaaggctactgactaaaagaaaatatcttcaaagtacatatgcaaaaagtactattatataaaatatataaagtactctcaaaactcaacattaaaaacaatctaattagaaaatgcacaaaagattgaacatgggcattttattgaagaggatatacagatggcaaataaatacatgaaaa

SEQ ID NO: 661559 - DNA, 608 bp, Homo sapiens
gccctttctttctctggtctgattgctctagctggaacttccagtactatattgaataacagtggtgasagtgggcatccttgtgatgttccagatcttagaggaaaggctttcagtttttctccattcagtatgatactagctgtgggtctgtagctttcttttgtgtacaatttttatcaaatgttggtatcagagttattaaaatgatctgaaattctctcatatatttttgtttctcagcacagcacattttttctatacttctcataatttaaaaagcatataaattatttcttgagaatttgatgtgacaatcattaaaatatctaaggcctggtacattccatagaggcaatttttaataaacttttcaatttgttacacggttgttctcttcttgagtcaattttttataatgtacattttcccagaaaagcattccttctatcaaaatagctctatcagatcttctcagtttcaagagaagccagaaattttcattacagtagtactgcttttattaaaaataattttagattatattaatgttaacgtcttatgtaaccacagcacaattaccaaagccaaaaattaacattaagaga

SEQ ID NO: 661560 - DNA, 541 bp, Homo sapiens
tgaataaatgagtaaattctgacaaaaaagaaatgttggccatttgggaaaagtttctactagcaagaatgtatgtgtgctatatttttgtgcacacgtgatgtttttgtttattcatcatctattttcctttcttttggaatagtaacccaattttccttttggaaacgacttttcccaacactatgcagtcttgctgaaaccatcagtcaaggtgccaagaaatgagcaaatgactcwgattagaccaataaagttttcctggaatttcaagccttgagcagaatgatattctgctcaatgaacggctggagctgattcattccattggcagaacactgaatggacctagattcttggaatttttctgattcctatccttcccatagcttaatttgttcagctttttcttctattttataagctacttccatccttccaatgaatgctcaccttaccgccacttggtttggctgtatttagtcagtgtcagtttctattgcttataaagaatgaaatttaagtatatatgaaaggggaa

SEQ ID NO: 661561 - DNA, 541 bp, Homo sapiens
tgaataaatgagtaaattctgacaaaaaagaaatgttggccatttgggaaaagtttctactagcaagaatgtatgtgtgctatatttttgtgcacacgtgatgtttttgtttattcatcatctattttcctttcttttggaatagtaacccaattttccttttggaaacgacttttcccaacactatgcagtcttgctgaaaccatcagtcaaggtgccaagaaatgagcaaatgactctgattagaccaataaagttttcctggaatttcaagccttgagcagaatgatattctgctcaatgaayggctggagctgattcattccattggcagaacactgaatggacctagattcttggaatttttctgattcctatccttcccatagcttaatttgttcagctttttcttctattttataagctacttccatccttccaatgaatgctcaccttaccgccacttggtttggctgtatttagtcagtgtcagtttctattgcttataaagaatgaaatttaagtatatatgaaaggggaa

SEQ ID NO: 661562 - DNA, 594 bp, Homo sapiens
aattaacctatcaacccatcacctaggtattatgcccagtacacattagctattttttctgatgctctccttctcctcacacccccaacaggcctcagtgtgtgttgttcccstccctctgtctacgtgttcacattgttcagcatacactaataagtaggggcatgcggtgtttggttttctgttcctgcattagtttgcgtaggataatggcttccagttccatccatgcccctgcaaaggacatgatctcatttctttttatggctgcaacgtattccatggaaaatatgtaccttttctttatccagtgtattatcaatgggcatatgagcatttgggttgattccatgtctttgctatcgtgaagagtgcttcaatgaacatatgtgtgcatgtatctttataatagaatgatttatattcctttgggtatatacccagtaatgggattgctgggtcaatgttatttctgtttctaggtctttgaggaatctccacactgtcttccacaatggttgaactaatttacattcccacgacagtgtaaaagcaatcctatttctccacagcctcaccagcgcctgttgtttc

SEQ ID NO: 661563 - DNA, 509 bp, Homo sapiens
taactacacatcctttagggattagctttggtgtcatctcctccagaaagttttacctgcaagcttaataacccttcccctacattctgggccatatatcatgctaagtgttcccttaggaccctgtgccaaactctatcccagtaccctttatatgtgctataactgtatgataatcctctgttctcttgaaggccagggctgtatawtttttttatctctggatctccaacttctagaacagtgtctggcacatatgggtgtcctgtgaatatttgttgaatgcatgtttcagtgagagtatgttgttaatatgtgggaaaccatttattttttgtgaaaatcattttgtattataaaatccttgaagtgtagaaactcacacatatagtaatgcttactaatctatttaaaaatattttaagtattatttaaaaattaataaatccaatgatctggttttaaaacaagtgtgaccatgttggatgcttcttaacaaagacgccagc

SEQ ID NO: 661564 - DNA, 601 bp, Homo sapiens
tggaaaagattccatttctcctttgcttatgaagcttagtttggcaggatgtgaaattcttggttggaatttcttttctaagaatgcagaaaatagggccccaagatccctggcttgtaaagtttctgcttagaagtgcactgtgaacctgataagattccctttgtatgttatctgccctttttctctagtggcctttaagattttttctttagcattgaccttggacagtctggtgactatatgcctggtgaggatcattttgtataatatctcgcaagtgttctctggatttcttgtatcttgatatctacctctctagcaaaattggggaagatttcttgggttgttctcttaaatatattttccagattatttgctttytctcctctctcagaatgccaataattcatatgtttggttgctttaaataattccatatttctcaaagactgctcatttacaaaaattctttattctttatttttgccaaatgtagttcaaaagatggtcttcaagctctaaaattgtttcttctgcttggtccagtctattgataaagctttcagttgtattttgaaattcctcaagtgagtttttc

SEQ ID NO: 661565 - DNA, 291 bp, Homo sapiens
acttccatactgttttccggaatgactgtactaatttacattcccaccaacagtgtataagagttaacttttctccacaacctcactgtaattttctgtctttttagtaatagccattctaactggagtaagatgatacrtcattgtggttttgatttgcatttccctgatgataatttatgttgaacatttttttcatgtatctgttggccttttgtatgtcttcttctgagaaatggaaatagacatttgtgtgtgtccttagctcaccttttaatgggatttttttcc

SEQ ID NO: 661566 - DNA, 546 bp, Homo sapiens
ggctgcctgcaaatctatacttgcatgatgatggaggtgagattacattgttggagaaagtgggcctagtccattgctccctatcacaccaaacacaacagggcagctagaagacttttatttctggtattctgagagtgtgctaaaatccccagtttcttatgaagagcacctgaacctatgtaataaattgagctagacttgatttcaggatattgcttccttatctttcctattgaccagcaataataaactaacataaaataacactcaaagcagatggctcaactgagaactagtgtatgatctcacttttcttaaaagtcttcatagattataaagaattcccattttataagtgaagaaagtaagccccattgttgtcttagctgcccaagatgattcagtgattctatagcaggaatgcaatggagcacagatacatttttctttaggccacgttcacatggcctctatgctargtcttcttgctgattaaagcataccacagtcaataataaggggtttctcttcttgtttttgaga

SEQ ID NO: 661567 - DNA, 628 bp, Homo sapiens
gtgggatggcaagttactaactcatagtcttctgacagcaggaagaggggcttaagaatgtggaccacatagatgtcaataatccaacattaattttattcaataaactttttaaataaaatgcaaacatcagattactttctccctactaccaaaacttttattaaagagagaccaagagtaattttggagtttggagaaatttgtgggtgaacaggtcatggtaggatgtaggaagggcacctttgagaggactctgggtaactaaaaaaagtgagatcagccagrtgcggtgactcacgcctgtaatcccagcactttgggagtctgaggcaggtggatcacctgaggtcaggagtttgagaccagactgatcaacatggtgaaaccctgtctctactaaaatacaaaaattagccgggtatggtggcacatgcctgtaatcccagctacttgggaggctgaggcaagagaatcactcgaacccaggaggcagagattgcagtgaactgagatcatggtattgcacaccagcctgggcaacaagagcgaaacttggtctcaaaaaacagacaaacaaagtaggatcaatgcaaaggagtgggatgtcaacagagatcacctgccc

SEQ ID NO: 661568 - DNA, 592 bp, Homo sapiens
atatttattttgttttgtgatgagaacatttaaaatctattctcttagcaattttcaagtatacaatacattgttactaattctagtaaccrtgttgtacagatgtcctgaatttatgtttcctgtctaactgaaattgtgtatcatttgaagaacattttccaacccctctccctggctccccctaccatcaccctgccctagccttgccctagcccctgataaccactatcccactagttgagtttgactgttttagattctacaaagaggtgagatcatgctgtatttggctttctgtgcctggcttataccacttagcataatgtcttccaggttcatccatgtcattgaaagtgacaggatttccttcttctctttaaaggctgaataatattcctatgtatgtatgtatgtatgtgtgtatatatatatatatatatatatgtcacattttctcatccattgatggacacctaggttgattacatatcttggctattgtggataatgcttcatttgctcatttccttccttccttctttcctttcttccttcttcttttcctcttttcagacagggtctcactatg

SEQ ID NO: 661569 - DNA, 592 bp, Homo sapiens
atatttattttgttttgtgatgagaacatttaaaatctattctcttagcaattttcaagtatacaatacattgttactaattctagtaaccgtgttgtacagatgtcctgaatttatgtttcctgtctaactgaaattgtgtatcatttgaagaacattttccaacccctctccctggctccccctaccatcaccctgccctagccttgccctagcccctgataaccactatcccactagttgagtttgactgttttagattctacaaagaggtgagatcatgctgtatttggctttctgtgcctggcttataccacttagcataatgtcttccaggttcatccatgtcattgaaagtgacaggatttccttcttctctttaaaggctgaataatattcctatgtatgtatgtatgtatgtgtgtatatatatatatatatatatatgtcacattttctcatccattgatggacacctaggttgattacatatcttggctattgtgrataatgcttcatttgctcatttccttccttccttctttcctttcttccttcttcttttcctcttttcagacagggtctcactatg

SEQ ID NO: 661570 - DNA, 525 bp, Homo sapiens
catattacagtcagtctgctttctggagaagatgtcctgcagataatttgatattagatatcccctgggggacccttttcatctaataatcctactaaatgtccattttaatatgaaatatgaatccaaaatgtttacaaacatactgggaaaagtattcaaatgccagctgtctcatattgtgaagtattttcatttttaacataaaacgtttatttctcaaagccacacctgagaaaatgattaggtgctgtggtgctgttaagttttatactacaaaggacatcagcaaaggcatctgttttcctgcctctcttctggtcttctcccctcccccactctccatcctgtaggtcctggtagttaaaatttctacaatagtctcataatgctctaaattctaaaaaaaaayttctcatcctttaacactgctgaacctaaattcatgcactgctctaagaaggaaacccaaaagtcacaagcctttttaatgacagatgtattacggaaaattttccccacaaa

SEQ ID NO: 661571 - DNA, 340 bp, Homo sapiens
gactcagtactaggtcaggaattatataaaatggagagtcagccgtaatctctatgcattagactcctgtraaaacaccagtgtgttgctcagactctgagctaatagcctcaggaaaaataatttatgccattcaggacaactcatacaagtgtaatgtggaacctgttttatccagctttttttaaaggcaatttttctggaaatcaaaccactctaagaaataaatccttgtaaacatctctgagtaattgccaaagcctctctagcagagcagttccctaccatcagcctgccccaccccagaaaaaaacccagactcctcgaagcccagcaaaaa

SEQ ID NO: 661572 - DNA, 340 bp, Homo sapiens
gactcagtactaggtcaggaattatataaaatggagagtcagccgtaatctctatgcattagactcctgtaaaaacaccagtgtgttgctcagactctgagctaatagcctcaggaaaaataatttatsccattcaggacaactcatacaagtgtaatgtggaacctgttttatccagctttttttaaaggcaatttttctggaaatcaaaccactctaagaaataaatccttgtaaacatctctgagtaattgccaaagcctctctagcagagcagttccctaccatcagcctgccccaccccagaaaaaaacccagactcctcgaagcccagcaaaaa

SEQ ID NO: 661573 - DNA, 606 bp, Homo sapiens
aatgggggcaccagttgcactagaagtgggggcctaatatatacacagagtccagccatggggaattgaagcagcagatatactgacgttcagggaggcagccagtaggcatcaaaaggtgatggatggagaatagaggtcctgccactgggcaaagggactagttagagatagtcaggtctgagtggtagaaggggactgagttatgtcctggagttagcattcagacacagggatgaaggcagaactacgatcttggtaacgggaactggagtggggcaatacaactgccttggtatttagaaccaagaagcaggaggtccattagcagaactgaaccatttaagaaaggggctgaatgagaggggaatgtgtgatgtggttctacttccatcctgtagcacaatctaggaaaagaggcataacaagkttctaggatgggggtggggacaccatcatggttgaacaagagggtagggacttgggatgtatgtgaaaactctcctactggttgatgaaagagaaaacaagtttaaaacacacacaaaaagcaatacccacaaccaccttctcaatctattttgcatcgcatattgcttcctttct

SEQ ID NO: 661574 - DNA, 587 bp, Homo sapiens
tgtctctcttctgtgtggggaatatctgtttttcatttagtgacttttatctagtaatagccactggggagtaggctagaaagcagtgggactacttagagagacttggggcagggctgtaggtgaatgaaatggctttaccaagcagccctacaagcttcactctgggttataggcctcttggcgggggcggggagcgaaagaaagaagagccagacactgcctcaggtggaccctgagcagagacgaaaggaagaaagacagagcagggcatgcatcccaaaaggttgaagataacagaaagaaacaattaagtggataaaactacatcacacgcattgttgctgcaaaggcctatgggaaaagaaaactaaagaaggcggtagagacggacccttcaggtgttagccttggaggtataattccccagggacaggtaratttccaagctctggatgtagagaccaattaccaggcattttttatggctctggtcaacgcgtgatttaataagtttatgtattcagatttcacataaggtttacaaagaaaataacacaaactgcttgtggtacaccagtgataaa

SEQ ID NO: 661575 - DNA, 552 bp, Homo sapiens
tgccaccaccacatgagaaagtctagcctcctgaaggatgaaagagcagatggacagagagaggcccagctgtcccagctragcccaggcccctgttgatcttccagctgaaggcagccacgtgcataagcccaggtaataccagtagcaattaagctagacaggcaacccatggaatcatgagaaataacaaattattgttttaagtcactaagcgtcggaatcacttgttactctgcaatgaaaacaaaaattggtgagtggagtgctgccacaaaacaaaaattaaaatatgtggcattggctttgggaccacatggtgggcagaggctgaaagagcagagaggaaattatttctggagtctggaaaaagggaaacccatatttttgaaacaatcagcaaaataatttcctgtggtaacttgtaaagcaaaaactgtacctgatacgcttatgggtctggctaatgctatttctacacaaaatgctaaaatagttttttgtttttatttttaacactgcctgataaggtatagaagaaagacggatgaa

SEQ ID NO: 661576 - DNA, 583 bp, Homo sapiens
gctggctcagtgtcagtcctcagttagaaggctcagtgatagggagaaagacactctaatatcaatgcccccaaagcttttggagaggagaactataaatgaattcaacttaataaagaacagggcagcctaggactgtcgggaracaatgcttgtatttgttgctggtttctgaggaaatcaatctggcaatttgccagaagagctataaaatttgtcattctatttgactcagtgatttcttctttggaggccatactcccctgctatggtctgaacttttgtgtcctcctaagatagacccttaaaagtgattctggtgaggactcggaaagaaaagagaagagctgtagagaatgccttaatattcttagagaatatataagtggttgttgtgaacagaatattggtgaaatatggatatgaaggccattctgatgagatctcagagggaaacaagaaacatgttattaaacaatggaagaaaggtgatccttgtcacaaagtggcaaataccttagttgaattgtgtctttgtcttattgttttgtggaaggaaaaacttgtgagcagtgaaattgga

SEQ ID NO: 661577 - DNA, 544 bp, Homo sapiens
atatgccctaatctctgttactgatctactggcaaaatagccactccaggaagcatttggaggggcccgtgtgccagaaagcactctcatgctttccaattgtcagtcaagtgacagagtattcctatgtcagtccacacatgatgttccaacaaagctggccccttttcagggcctgggatataagttgcttgcagtgtaagaacgataataatagccagcttgggtgatcgaaggaaacctggaacccaagtgatattcacttaggtgaggtgtctgtgtcctttacaccgtatacttttgcaaatagtaggcagtttgatatggcttggctgtgtctccacctaactctcatcttgaactgtagctcctattattcccatgtgttgyggaagggacccagtgggggataattgaatcatgggggcggttcccccatactgttctcgtggtagtgaataagtctcacgagagttgatggttttataaggggtttcccctttcacttggctctcatcttcttttgtctgcccccatataagac

SEQ ID NO: 661578 - DNA, 580 bp, Homo sapiens
acctccttaaaactgcaaatgctctctcaggcctatctgccagttgaataatttggagttagaattacatagatttcttttttccctgaagcttattgtactttacaaattatagctaataattattgagtacttgtgatgttccagacaccttatttaatcttcacaatgactctgaagtaggtacaatagttatctctattttgtagatgagaaaagacgtaaagaggtctctgttcaaagtggcagttgataagtagcacagccaggattcaagcccaggtctttcagactccaaacccagtgtcctcaatccctactccatgggtctaactagacctcatgataataaatattcttcaaaaatgctcacccttagttaaatagcaacttctgtttattgagagcctgctatatagaaggcactgtatttgggayttcacatttattatttttaaccctgataacgtggcaaagtaggtattcttattcctatttacaagaaaaaagagcagaaaacaaaaaacataactggggccaagggaaactagaaaattctgtctgactcaaaatccacgtg

SEQ ID NO: 661579 - DNA, 604 bp, Homo sapiens
ccaggcttattttcccagccaaagtcacatgcaatgtcaaggtatcattaaaaaaaaaaattraagtttaaaaggcagcttcctctgagtgctgatttgggcacataaacagtggcgtggttaaatgccactctgtgtttaaggtaattatacatcagccctggaatgtagtgatgtgaaagccccactgcagcaaacaaagttgattctatcagcaaactctggcaaatcagctggcctggatgcttctccctgaatttactacttcctacttgagaactgtctctgggaacatcagaacttgaagacaagtgtggtgcactgcctagcactctaaggctggtgccagcttgtaaccaatgatatgtctgcagcagggcttggggaccttggcccatagcagcttgcagtgagagcccttggaaacagctgaggcccataggagtgtcagtggtttgggtctgtgcattgtcatgtcttaccaggtcctgctggggctggactgccactgctcaacaagccaaagacatccatccagagaaaggctggtggagtggacaagacttcttgggaaaggtgacattcctaggggtcaagagatgat

SEQ ID NO: 661580 - DNA, 682 bp, Homo sapiens
ttactgaatcaagaccaggacatttttgtataaaacttatgtcatgaaacacttctgttatgtgcaaagcaattatttgaagtagtgccaaaatcacagttaagggaattctaaatcacccaatgattgattatattttttgtcttacaacaaattatttgaaattctttaaacatatagaaaccaagaatcatctggacttctttattattacrtatataatatatgtaattatatatgccctaatatatcatatataataatatatattcatcatcagatgaaactgtcaattcttcatagaaatacatttataattgtattataataatttactgaatgcaatggattaaaataatttccatttcaattgaatgattctgaaagcaaatcacaagtaatcatcttcccacccaaacctgtttctcctatagattcctcattttagccaggggctactccatctacccaacccctgaggctggaaaactgggagtcattcttgatacctctcagccctcagccttcacattcaacctatcagcaagtcctgttatttcacttcaaaaatatattttgactctgcctatttccctcctaactccatttactccaggcttcccaagccaccatcatttctttgctggaccactcatcagtagtctcgcaacaggtctcgctc

SEQ ID NO: 661581 - DNA, 516 bp, Homo sapiens
aatagaagctttgtatgacaaacgggaaagctatacccatcttaaaccatatactggctttttgtttcatgggcatatgaggtgagtttcaaaaagggaagtgtataaaatgcagttcttgacatgtaatgtcacaygtattcatagtaagcatgcacacaaagtcacctctaggttactcagctaattacataggtggtggaatatctggttcctttgcttctccaagtggcttgtttactagtttgttttttggctcatgttcctgttcattagaacttccattagcagaaatataggattatggtggaactggatgggctgcttcttgtcttgttttcttccaggctcagcctagaatgcataaaaatggctggagccctctctcatgcctcagttcccttgagcctgtgttctttaccaccccaggccagtaaaccccaccttaggatcagccccaaaaccagcttccttcaccagcataacactgctgctgaggaggaaaaaaggagcatc

SEQ ID NO: 661582 - DNA, 629 bp, Homo sapiens
caattcttgggacattatttggggttttatattatgccacagaataatgtcatgtttasttgcttaggatgaatttataaacaaatctaatacatgaatcttctcattagcatctccatactttctaaggccataactccgacaataatgattagtaatagaagaaataaggatcaacaatgtggcttgtctcttaatatacagttttagaaattaaaattcatatcctaacacagtcaatgctttattttagaatccaacaccatttctttgcagctaggcagtgctgacctacctctgcagagcagctagaacaggctggactactatactgagcttttagtggcagcagctgctaaaagtttttgtttccttttattttcctcttaaactctcctttaaaaatacagtacaggttactcctcagtcatactctaaatgcttagccccttcagtggagtagtcaaatccctactctgcctgattaattagctgagtaaatctaagaaactcctcaaccttatggcctctctttctgccaagttttgtataactcatagactgcatgtattcataagcacaagaaaacacctgtgagcaattaaccacagacccttgatttagaggca

SEQ ID NO: 661583 - DNA, 405 bp, Homo sapiens
atatgccccaaggcttggtccataagcctgtttctctgactacacatattccccaagtgatctcacccaaattctgttggcaacttccaaatttgtatctccaacttagacctcttccctaaattccagattcctacagcaaccagtgattctaytaaaatgcaaatcaaatcctctcactcctctgcacaaaacctggctccccattccactcacagtcaagtcctgaatacagtccacacaagccaaacatgtgctctccaaacatctctaaccttatctactactccttctctccctgctctcagtgctccaccactgtggccttctccctgctcctggaacacatcaggcatgcttccgcctgatgccttcactagtccctctgctgcaacacttttcccc

SEQ ID NO: 661584 - DNA, 629 bp, Homo sapiens
caattcttgggacattatttggggttttatattatgccacagaataatgtcatgtttacttgcttaggatgaatttataaacaaatctaatacatgaatcttctcattagcatctccatactttctaaggccataactccgacaataatgattagtaatagaagaaataaggatcaacaatgtggcttgtctcttaatatacagttttrgaaattaaaattcatatcctaacacagtcaatgctttattttagaatccaacaccatttctttgcagctaggcagtgctgacctacctctgcagagcagctagaacaggctggactactatactgagcttttagtggcagcagctgctaaaagtttttgtttccttttattttcctcttaaactctcctttaaaaatacagtacaggttactcctcagtcatactctaaatgcttagccccttcagtggagtagtcaaatccctactctgcctgattaattagctgagtaaatctaagaaactcctcaaccttatggcctctctttctgccaagttttgtataactcatagactgcatgtattcataagcacaagaaaacacctgtgagcaattaaccacagacccttgatttagaggca

SEQ ID NO: 661585 - DNA, 551 bp, Homo sapiens
gtgggacccatgcatcagtcttttttaaagcagccctggttatttcaatgtgttcaagagccatggaagaaggaacagaatccctacctcaaactgattagatgatgtttatgcagccactctccttagtgccagaattctttctactagggagaactctgaatttctatgggaagttctggtaaaataagaccccataatacytttaaggaaatttaagttaagaaatttccttatatttcccattcgtgttttcctttctgctcctccctagcctccttctccatttttcccctctccaaagagattcctggcttgacactctctggagatcctgctcagagaccacaaagcctggttttcctgtatcacagagccaagaagcaatagaaagattactcgatttcttctcaataattgtatttgttctggcacattctcctgcttgcaagacccacatccaatttctcttatgcctgtatttaagcaagccaggggatttggaaactctgcctctgtctacacaatgccacaaccatgggttgaaagaa

SEQ ID NO: 661586 - DNA, 551 bp, Homo sapiens
gtgggacccatgcatcagtcttttttaaagcagccctggttatttcaatgtgttcaagagccatggaagaaggaacagaatccctacctcaaactgattagatgatgtttatgcagccactctccttagtgccagaattctttctactagggagaactctgaatttctatgggaagttctggtaaaataagaccccataatacctttaaggaaatttaagttaagaaatttccttatatttcccattcgtgttttcctttctgctcctccctagcctccttctccatttttcccctctccaaagagattcctggcttgacactctctggagatcctgctcagagaccacaaagcctggttttcctgtatcacagagccaagaagcaatagaaagattactcgatttcttctcaawaattgtatttgttctggcacattctcctgcttgcaagacccacatccaatttctcttatgcctgtatttaagcaagccaggggatttggaaactctgcctctgtctacacaatgccacaaccatgggttgaaagaa

SEQ ID NO: 661587 - DNA, 595 bp, Homo sapiens
ataattttcatcacattttcaaaagggtatatgttaagtgtttaagaaccacaaacacaaaaccctaatccttaacatgacaggtgaggccctacacaatccagactaaccaaccgctcttgagccgcatctcctgccagtcggctctcccccatctccccttactcagtgaacattaaattccagccacagaacttctcatcccatctcaaacatgctataagctctttaatctctctctgattgaacgcatgcctttctctctgccaggaatgttgctcctcctttgccacttcctctgccccttctctgcctggtgaatttgcttttatcctttaagactcagcaaaaacatcacctctgtggccctctccctccttcctagtgttctccccaaccgtttcctgagcaatccatacaccgatgtctgtggagttcaccctttggtagagtcattgtttgtttatgtgctgctctcttctacttgtctgtgaattcttgaaagcacagaccatggccctcaccactccaaaccataacttggaacataacagacaacrataatattgatgcaaccagtgagaaatgaatgact

SEQ ID NO: 661588 - DNA, 516 bp, Homo sapiens
atagaaagagtcatattccagatccaatagaaagctaatcctgtatagtcttgatctgctgggtgccatttctgcagatgggggcatgacacctccctgaagtgccttttaaggtatatattctctctcagcattttcacgagggacattcaagtagagcatacatcttttggggtaagacataagcaacataattatagggactccaaatacttcacgtgtggagacattaagaaagaatgatttctttcccttatttgatgtagcaaattcaaacccatcctcttcaaacccatcctaaaattggaataaataatgtaatgcaaatatatgtaaagtgctttgttaaacagatgcttgaaggcagcatgctcgttaagagtcatcaccactccctaatctcaagtacccagggacacaaacactgcggaaggcccyagggtcctctgcctaggaaaaccagacctttgttcacttgtttatctgctgaccttccctccactattgtcctatgac

SEQ ID NO: 661589 - DNA, 424 bp, Homo sapiens
ttttaaacttctctctctgctagttttgttaggatgtaataaaaattaatcttttaacaagttaatgggtgcagcacaccaagatggcacatgtatacatatgtaacaaacctgcacatkgtgcacatgtaccctaaaacttaaagtataataataataaaattaaaaaaaccaaaaaacaaagattaacagaaaacagaacaacaaaaaaactcccagcatatacattgagtcatttgcaggtttgggagggggggaaatgcttttttgtattaggagaaaagtaagttttcattttaaatgtctatattacttaaagtttgcaataaatatttattactttcaacagtgaaaaaaattacaagagagaatatgaaatagcacagtaatacagactatagtaatgctagagaacataatgaaa

SEQ ID NO: 661590 - DNA, 424 bp, Homo sapiens
ttttaaacttctctctctgctagttttgttaggatgtaataaaaattaatcttttaacaagttaatgggtgcagcacaccaagatggcacatgtatacatatgtaacaaacctgcacatggtgcacatgtaccctaaaacttaaagtataataataataaaattaaaaaaaccaaaaaacaaagattaacagaaaacaraacaacaaaaaaactcccagcatatacattgagtcatttgcaggtttgggagggggggaaatgcttttttgtattaggagaaaagtaagttttcattttaaatgtctatattacttaaagtttgcaataaatatttattactttcaacagtgaaaaaaattacaagagagaatatgaaatagcacagtaatacagactatagtaatgctagagaacataatgaaa

SEQ ID NO: 661591 - DNA, 523 bp, Homo sapiens
atcttatgttttacaataagtacttcctggagactgccacagattttagcgtcagaatttcactgctgctctcagtagacaaagattggatgtttccagggatctttaagaaacgataactggatgggggtggaaggaagacacaaaaagggagaaaagagggagaagcataaaggcaggagaagtccaaaaactgaatttttgaaacattttcttaaggatgaattattccaaaaatattgacaaagcagtcctttgaaattagggtccatcctagatcatttatggatcaacaagagtgaatcaagagggacctcaagagatctcctacttgatacttacaacccaaagtctcattaggaagccctagaagtgagagagagagagaraaaagggaaaaggcaagccccaacagagctctgtatggagggcagaggtacagcaggctgaaagaagaaaaattctgcctcattgggctacagatccatttcctctgggcagatctgagtctatctgaacagag

SEQ ID NO: 661592 - DNA, 586 bp, Homo sapiens
caacttagctcctttattattgatatmctatcatgttttctcaatcctctctggaaaattctactgttttcactgagcccagtgtacctcttgtacttcacttggattttgcaataatgcctcacaggtcaccttgcctcttgtctctcccttccaggctcaaccaaatgcctctgccaggagaatctttcagagtgtcctggaacattggaaataggcttaaagcttaaatgatgaatcagaagagttatgctgtattctaatgctgccactaggtgagtgacactgggagtcatttcaaccctctagatctttagattctacaaatataaaaggaggagttgacattgatgctctctaaggtccttctagtgttataagtatatgaatgcactaatgaatgaattccttgcttgtatacctgcctatggatttctgtttcaaactttaaacctggtgctcaaggctctatataaaagttttctcacaccattttataagatggctattcctcctatcatgccttattcatttctaaaccccagcttctctttctgctattcttgcttcctaaaacctccaattc

SEQ ID NO: 661593 - DNA, 586 bp, Homo sapiens
caacttagctcctttattattgatatcctatcatgytttctcaatcctctctggaaaattctactgttttcactgagcccagtgtacctcttgtacttcacttggattttgcaataatgcctcacaggtcaccttgcctcttgtctctcccttccaggctcaaccaaatgcctctgccaggagaatctttcagagtgtcctggaacattggaaataggcttaaagcttaaatgatgaatcagaagagttatgctgtattctaatgctgccactaggtgagtgacactgggagtcatttcaaccctctagatctttagattctacaaatataaaaggaggagttgacattgatgctctctaaggtccttctagtgttataagtatatgaatgcactaatgaatgaattccttgcttgtatacctgcctatggatttctgtttcaaactttaaacctggtgctcaaggctctatataaaagttttctcacaccattttataagatggctattcctcctatcatgccttattcatttctaaaccccagcttctctttctgctattcttgcttcctaaaacctccaattc

SEQ ID NO: 661594 - DNA, 527 bp, Homo sapiens
gttctgcaccagaaccaagttgtccactaacagctttcctgagtgacttcgggctgcaccattgtaattcttcagaaagtgtatacacatggtagccaaagagcctgggccctggagccagaccacctggagtcaaatcctagctctgctacttaggagctgctggttagttaacctttctgtggctcagattcaccatgtgtaaaatggattgtaagagtggctacttggtaagattgttgtgaagtttaatatatgtgttaatatatgaaaacacatggaagagctccaggtacatagtaagtgctctgtaaatatcatctattattattattgcaactacatttcacacgttttaaataaatcttaagaattaaattgtttcgtgcatgtagataatgtctccccaagtaaacagcaaggatcttcgctattttctatgactttrtgtcctggcaagggaattcaaagcattacagcagctattcctaaacaaacaaacaaacaaacctattctaaacaaacac

SEQ ID NO: 661595 - DNA, 352 bp, Homo sapiens
agatgaccattatgtttctcagagcaagcatggcttcataagccagttcctgtttgcaagttgatctcatgggtgatccagataagtgcatactgcagcagcagtgtgggctagtgggaaggcttgtagcttcctaatgattctgcatagcctttggaagccatggtgggtctggagccayaaaatggtgtggttacaatacttgaggtgaaaatacagcaaaactccaaagtaatgtggactaaagctgagtccacaattattttcttgagtgatgatcacaaggaagataatatcatccaatgtcttccctcattaagtgggacgacggactatcctgacggacaaggtc

SEQ ID NO: 661596 - DNA, 599 bp, Homo sapiens
aggttgtcttgcaaaatagttcattttttaaatgtctgcctgtaaaatggaacccagatttttaaaaataataattcgcttttcatttgaatttttttattattttaattttttaaaagacatatcccttctaagcaaaaactagaagtttggtataaaatgatcttgaaaacacaatgcctttgactgcttaaagagtcctaaattttattagtaggcttttaatcatttaaaatgataaagagagtrtcttctattcattttcaataggacaaggcaatattaaaacgagaccattccatcagagaagcttgattattttctcagtgttttaaattatgcatatgattggtgacacaaatgcatgtttaagtggttgcaaatttaaaaaatcaatattcccaaagaactaaaattatgcccaatcataaataacaaattaattcacctgcatattttgatttacaacttaccctatgaacatgaacattttatgaaagagaaatatcttttcacatcaacttgtattcattatatttcatataaatatagctcaaatcaaacacaagacttttcaaagagaaaaaaattagaactgt

SEQ ID NO: 661597 - DNA, 520 bp, Homo sapiens
ccttgtgaatttgatcatctgtttcattgcctgtataagattcaatctcctattatatcctaaagttacagctgtaaactaaggctggtaagaattcataagctattgcagaagcctgcggcaaaactaattgttttattcaacagtcacttgtttatttattatttatttcatactcccctcctataatccttttccactctccttcctcaaagtcaagattatcttggttcgttgyctgaatgcacagagcaaatacagaaacggggagccctattccaggagttctcaaaaaagttcctacggatcagtgttttgtggaaatacccattctaaatgttttataaaaatattcttactctcctttgattggcataaaaattccttgctaaaaagcaatatttgcacaaatattataacctttgttttctgtgtcatcatgtgacattaagctttatttgctagtggttgctatgtgtctgacacatgatttgccatgtggtacatgtaaatcacagca

SEQ ID NO: 661598 - DNA, 526 bp, Homo sapiens
gaacccacaaaaacaagagaacatcatggtatgtaatgaagaaatgtccattatttgctctgtggctaagactaatagttattattcaaacatctgttctcttcttttcctgtagcaatagaagctgtagctgggcataggttaacctatcygcaaacttcattgtgttacctcttttgcgtttaagcgtcacaacaggagtaaattcttatctatgaaatgagaggaaagatatgtacaatttgtggcatatacttctaaaggaataaatacgccttcctcttctcttttctttccatcacactggcctacagacactttgggaaggcatttctgtagcatgtatgataacaaactatagcaatggcagagcaacaagatggaaaggtactacttgatggaaagatactacttgatactacccaagtgtcatagggttcctgagtggtgaccaagagagataagtttatttctattgtgattaaatcatactctttttggaatcactttttaaagcaggcaaatc

SEQ ID NO: 661599 - DNA, 526 bp, Homo sapiens
gaacccacaaaaacaagagaacatcatggtatgtaatgaagaaatgtccattatttgctctgtggctaagactaatagttattattcaaacatctgttctcttcttttcctgtagcaatagaagctgtagctgggcataggttaacctatccgcaaacttcattgtgttacctcttttgcgtttaagcgtcacaacaggagtaaattcttatctatgaartgagaggaaagatatgtacaatttgtggcatatacttctaaaggaataaatacgccttcctcttctcttttctttccatcacactggcctacagacactttgggaaggcatttctgtagcatgtatgataacaaactatagcaatggcagagcaacaagatggaaaggtactacttgatggaaagatactacttgatactacccaagtgtcatagggttcctgagtggtgaccaagagagataagtttatttctattgtgattaaatcatactctttttggaatcactttttaaagcaggcaaatc

SEQ ID NO: 661600 - DNA, 592 bp, Homo sapiens
aaatgtcaatttaccagttgttcaggcccaaatctttaaagtcagccctgattcctgtctttcttgtacactctgtatccaggtcatcaacaaatcctattagcataccagtcgtaataatttctgaatattatgactcctaagcaggcccaccattatcactctagtgcaagctatcaccacttccaggctccaggctcttagctggacttccagtttatacccttgctccctgtattagtttcctgtggctgttgtagtaaattaccataaaattggtggcttagagcaacataaacatattcctttataattctgaaaatcagaaatccaaacttattctcctgggmgaaagttaggtactggcagggctggttccttcagtaagcacagaagagaattaatttcttttccttttacagtttctagaggctgcctgcattccttggctaatgactttgcatcactctgacgtcttgctcccatggtcgtatcacctactactggccctgatctcactacttgttgtaaggattggtgtgattacatcagcgcttttgcacttgctctcacctctgcctggaatattcta

SEQ ID NO: 661601 - DNA, 630 bp, Homo sapiens
aaggcactgctgtttgaaagtggaaattacctgtaattttaggattttaaatgaagaactctataacagagagtgcaaatttggaaaactatccacataaactgaaatgtcttttctttattttaacctattctgcrtgagagagcaccaaagtcagattatgcatctacaaatttggaggccttccacttctgagatctgagaaggaattgcttctctatgacttggcctctggatttaaaagtataaagagtatttaaatgccatgaagctaaacaagggttgctagagtagtccatctctatggaaaaaaatggctccaccaaccttgataatgatgatagcctggttcgtggacctagaaacacgggctccagaaataaactatcttgaacaatatcttgtggtccaagaaataggcagtgtagactttgaagtctgagaccagatatcaaataatggctttgagaataagtattgggagagttacccaacctttcagtgcttcagtttccttatctataaatatttggataatagcagaatgtatttcattagtgtttttgaggggttcagatcagatgaacatggaaagatcttggcaatgtagattatttaaatattattaaa

SEQ ID NO: 661602 - DNA, 600 bp, Homo sapiens
aaaaaacccattgtgtaaaaattaaacacctctcatttttctgttagcaattatcraactttggagtatgaaagaatcactaatttccaatcccagaaattctgatactcatggatctgtgggtacagcccagccactgcatttttaccaataggtcatggaatgccagtgcaaatgaataatgttcaacacatagacaaatatcctgaaactccagaacataaaatatttttaatagaataaatacatcttatgaggatatgcaaattaatcataattttttcatctctttctgagtttaagctacacactgatcacattgctcaagaatcagaccagactattagaaagagctacagaggccggacgcagtggcttatgcctgtaatcccagcactttgggaggccgaggcgggcagatgacgaggtcaggagattgagaccatcctggctaacacggtgaagccccgtctctactaaaaatacaaaaattagccaggtgtggtggcacacacctgtaatcccagctactcgggaggctgagggaggagaatcacttgaacctgggaggtggaggttgtagtgagcagagattacgcc

SEQ ID NO: 661603 - DNA, 513 bp, Homo sapiens
aatgaaacaacaacaacaacaacaamaaaaaatccacaaccattataactgaaagagtagtttcatcaacccacaaaaacttctgtaaactaaatacaggaactaaatcaaacatcttgcttttcatttaaaattaacgagaagtcttctttttagatttgattgactatctcagtttctcattgttaatagctaatttttaaaccctgctataattttactacctctgtcttcaagatatgattgaggaagtaagtgctcaccactaagagactttttgttacagatatcacattgttaattgttggctagatcatcatcttgctattttttaatttttttccagatatcataaaaatatgtcatttttacattattatcccatgaaacatacagcatgtgccttttcttctaaaaccatctccaaagataggagaataggtaagtttattatgtgtacaataaggaaactaacataattagaacaagtttcttcagctagtagaacctagt

SEQ ID NO: 661604 - DNA, 549 bp, Homo sapiens
gcccacagtcacacagctagtaagtggtaaggctggaatttgaatgccagatatcttctccaaagtgcaaggatagagaagtcccaggatgaaactaacaaacagttgagaaatcaaagtcaccaaacacttaaaaagtggtggaggagctagcaaaaaataatgataaagggtgaaaaaaaggaaaatcagaacaaagtagtgtcacagagggatgactttttttgtttcaaagtataggttatccacattaaattctgctgaaagataaagtacagactatgaagtgacccctgaatctaacaacacagagaacattgggctgcaatttcagtggagaagtggcaacagagagttcctaaaagtcgagtatttgaagacaaggctattgcatagacagttactttrtgatgctaatgcatttgacacatgtagaagaaataaaagaataaataaatgtaagaatgtagtttgataatatggaagcacagaaagagggaacatttaaaaaatgaaattagagagatactaggtaccatatcacaaagg

SEQ ID NO: 661605 - DNA, 503 bp, Homo sapiens
cctgctgcactctgaggcctgactgcccctggctccctgctcagaatggctgagggctcaggtttgggtggaccaggcctgctttcccccgaggcatcagcacgtaggtgctgcacacactcagctcccagcacatgcagctggagggcccaggttgcatacctgaatgtgaagcctggagccacacaccccgcaggcagccaatagagtccctccagcccagcttctgctgcccccagctcagtcacactccagctaccctgaagtctccccaggcagacaacccaggcctgggagtgagtatagggagggtgrgtgtgatggggaacgcagtgtagactcagctgaggctatccatctatgtccaacaagatcatgaagattggcccagtgccatgtcctccagttcatcccagcccaggccagctcaatccagttcatcccagcccaggccagctcaatccagcccagcccaccccaccccagctcagcaaagccaagct

SEQ ID NO: 661606 - DNA, 579 bp, Homo sapiens
gtggggcctggtaggaggtgattagatcaagggggaagatccctcatgaatgatttagaatcatccccttggtgatgagtgaattctgccccagtcagctcacacacagtctagttgtttaagtctggggccccccctcagcctcttgctcccattcttgccatgtggcatacctgctctcccttcaccttctgctatgactgtaagtttcctgaggtcctcgccagaagcagatgctggtgccatacttcctatacagcctgcagaactgtgagccaattgaacctctttccttcataagttactcagcctcaggtatttctttacagtaatgcaaatggacaaacacaggtggctcctgacacaccsctcatcttctcctttgtcatcatatggcttacctccatgtatgtctttgtcctctcctcttatgaggacaccagtgtttggacttgggatccatccaaaatttagtatgatatcatctcaagtccttaacctaatttgtaaagaccccatttccaaataaggtcacattctgaggttccaggtgggcatacatttggccagggagatgcc

SEQ ID NO: 661607 - DNA, 579 bp, Homo sapiens
gtggggcctggtaggaggtgattagatcaagggggaagatccctcatgaatgatttagaatcatccccttggtgatgagtgaattctgccccagtcagctcacacacagtctagttgtttaagtctggggccccccctcagcctcttgctcccattcttgccatgtggcatacctgctctcccttcaccttctgctatgactgtaagtttcctgaggtcctcgccagaagcagatgctggtgccatacttcctatacagcctgcagaactgtgagccaattgaacctctttccttcataagttactcagcctcaggtatttctttacagtaatgcaaatggacaaacacaggtggctcctgacacaccgctcatcttctcctttgtcatcatatggcttacctccatgtrtgtctttgtcctctcctcttatgaggacaccagtgtttggacttgggatccatccaaaatttagtatgatatcatctcaagtccttaacctaatttgtaaagaccccatttccaaataaggtcacattctgaggttccaggtgggcatacatttggccagggagatgcc

SEQ ID NO: 661608 - DNA, 579 bp, Homo sapiens
gtggggcctggtaggaggtgattagatcaagggggaagatccctcatgaatgatttagaatcatccccttggtgatgagtgaattctgccccagtcagctcacacacagtctagttgtttaagtctggggccccccctcagcctcttgctcccattcttgccatgtggcatacctgctctcccttcaccttctgctatgactgtaagtttcctgaggtcctcgccagaagcagatgctggtgccatacttcctatacagcctgcagaactgtgagccaattgaacctctttccttcataagttactcagcctcaggtatttctttacagtaatgcaaatggacaaacacaggtggctcctgacacaccgctcatcttctcctttgtcatcatatggcttacctccatgtatgtctktgtcctctcctcttatgaggacaccagtgtttggacttgggatccatccaaaatttagtatgatatcatctcaagtccttaacctaatttgtaaagaccccatttccaaataaggtcacattctgaggttccaggtgggcatacatttggccagggagatgcc

SEQ ID NO: 661609 - DNA, 561 bp, Homo sapiens
actgtgaagccacaataatcaggagtgtggaattggtgaaaggatagacaaataaatccatagaacaaaattttctgataatagacgcccataaacatagtcaactgatcttcaacaaaggagcaaaggcagttcaatggagaaagcgtcatcttttcactacatggcaccaaagcaaaaaaaaaaaaaaaaaaaaaaaaaagaatctagacrcaggccttatgcttttcacaaaaatcaactcaaagtggatcataggcccaaatgtaaagcctaaaactatgaaattttagaagataacaggagaaaatccagatgatcttgggcttggcaatgagtttttagatataacacaaaaatcacaatttgtataaaaagaaaaattagttaactgaggtttattaaaatgaaaaaatgtctacatgtgaaagacattgtcaagagaatgaaaaaggcaggccacagactgggaggagaaaatatatatctgataaaagacttgtatctaaaacacttaaagaaccattattaaatttaaacaataagaaaacaagcaaccca

SEQ ID NO: 661610 - DNA, 524 bp, Homo sapiens
tgaaaggatagacaaataaatccatagaacaaaattttctgataatagacgcccataaacatagtcaactgatcttcaacaaaggagcaaaggcagttcaatggagaaagcgtcatcttttcactacatggcaccaaagcaaaaaaaaaaaaaaaaaaaaaaaaaagaatctagacgcaggccttatgcttttcacaaaaatcaactcaaagtggatcataggcccaaatgtaaagcctaaaactatgaaattttagaagataacaggagaaaatccagatgatcttgggcttggcaatgagtttttagatataacacaaaaatcacaatttgtataaaaagaaaaattagttaactgagstttattaaaatgaaaaaatgtctacatgtgaaagacattgtcaagagaatgaaaaaggcaggccacagactgggaggagaaaatatatatctgataaaagacttgtatctaaaacacttaaagaaccattattaaatttaaacaataagaaaacaagcaaccc

SEQ ID NO: 661611 - DNA, 589 bp, Homo sapiens
tacagtagcttacagggcatggactcttcttcagatccctggaagagtttgtctaagagtgttgatatttccctaaatattgatcagaaatcccctatgaaatcatgtctggttcacagttttctctggggtaaggttataaattgtagattaaactttttaaatacttacatttatccagttagatttcatccaattgttcacacttagtagcttaaagctttcccaaatattcttttttacattttaaacatcygcaggatgtgtgtgtcgtccctttttatttctgacattagttatttgcattttctcttttcttccccaacaagtgttatcagagatttatcaattttgttaattcacttggttgatcatttctttgctttattatcctcagttcaatcattttcttatattattttaatgatctctttccttctattttcagttggttttacattcttttttaacttcttcgggtgaatttttagttcatcaactttcaggattttatctttcataatacatgcttctaaggctataagttttcctctaagcactgtttaggctgcatctcaccatgttttga

SEQ ID NO: 661612 - DNA, 569 bp, Homo sapiens
tatcttattttccaagcatatgtgtattttaacttacctctttgttatttatttctgacttagcactgtgatcacatcataactaaatacttttagcctttcaaaatgtgttaaatcttcctttgtggtcataaatggtataatgtgtgaatattccacctggctcaaaatgaaggtgcattctgtagctgctctttctaaggtctgtatatgcctagtagatcaaatttattgatcatattgttcaaattaagctcattttccttatcttttttctgctctttagttgggagaattttaattggcctaccttcaagttcactgattcttctacctgctcaagtttcctcttgaacctgtagtgagtttttcactttagttacagtactttgcatttcaagaattctatttggcgctattttataatttctatctctttactgataatcactagttctgaggcattgttctcctggtttcctttagctctttgagaatatttaagacmgttgatttaaggcctttttctagtaagttcacagcctgggcttcctcaggggaagtttccg

SEQ ID NO: 661613 - DNA, 560 bp, Homo sapiens
aaacaggatacaaaaatgagttcaacatcattgatcagagaaatgcaagtcaaaagtacaatgagatatcatctcaccccagttaaaatggcttttatccagagacaggcaataatggatgctggtgagatatacagaggaacactgttagtgggaatgtaaattattatagtcacaatgaagaatagtatggagttttctcgaaaaacttaaaatagagctactgtatgatccagcaatcttactgctaggtacatacccaaaacaaaggaaattagcatatcaaagagatacctgcactcccatgttttttccagtactattcacaatagccaagatttggaatcaacctaactattcatcaacagatgaatggataaagaaaatgtggtacatatactcaacgaaatagtattcagccataaaaagaataagattctgtcttttacaacaacatggatggaattgaaggacatcatgttaagtgacataagccacggtcaraaagacaaacttcatatgttctcactcatttgtgggagctaaaaattaaaacgatt

SEQ ID NO: 661614 - DNA, 535 bp, Homo sapiens
aaacttcatatgttctcactcatttgtgggagctaaaaattaaaacgattaaacttatggagacagtagaatgacagttatcagaggcttggaggggtagtgaagggagggaaagagtggggatagctaaagggttaaaaaatatagtttgaacaaataagtctagtatttgacagcacaagagggtgactacaatttattttacattttaaaataactaaatactataattggaatatttgtaacacaaagaaatgataaatgcttgaagtgatggataccccatttaccctgatgtgattacacatggtttgcttgtatcaaaaactcatgtaccccataaatataaacatctactgtgcacccataaaaattaaaaatraaaactacttagatgaagaactttgctgttaagattgcttctacttaactttttcatatttggtaaacttaaatccaagtccttaacactaatctgtggaggaaaataaaattcttctcaaacctattgtgtaaactagcattcatatcaact

SEQ ID NO: 661615 - DNA, 526 bp, Homo sapiens
gggagggcagtgaatttcacaaggaaagcaatcccttactctacattacaaaggagaaagtagaaaagcctccctttttaatgtgagtagccacactgtttcatagtttcagttccaaaaaaaaaaaaaaaaaaaactcaawacatcttttagcgattgcttttcccagtcctcttggatttatttaaaaagtaatcaaacctaattaaaacaatctgctttactgccagagtggcccttcaatgccctagaaaaaaccgagattgctcagaaaggggctagaaaacagaaggaaacatggagctttgcagctcttcatatgcgagaaattaagaaggaagaaaggttaatgttattgaagaaacttagagactaaggacaggtgttaggaccggaggcaagagtcgagactgtggaagattgtgtccctggtattagggggtctgctggtctcggaagatccagcctgcagccctgacctatttgctccatgggagtgaccatgttattacttgcagtttagcgt

SEQ ID NO: 661616 - DNA, 526 bp, Homo sapiens
gggagggcagtgaatttcacaaggaaagcaatcccttactctacattacaaaggagaaagtagaaaagcctccctttttaatgtgagtagccacactgtttcatagtttcagttccaaaaaaaaaaaaaaaaaaaactcaaaacatcttttagcgattgcttttcccagtcctcttggatttatttaaaaagtaatcaaacctaattaaaacaatctgctttactgccagagtggcccttcaatgccctaraaaaaaccgagattgctcagaaaggggctagaaaacagaaggaaacatggagctttgcagctcttcatatgcgagaaattaagaaggaagaaaggttaatgttattgaagaaacttagagactaaggacaggtgttaggaccggaggcaagagtcgagactgtggaagattgtgtccctggtattagggggtctgctggtctcggaagatccagcctgcagccctgacctatttgctccatgggagtgaccatgttattacttgcagtttagcgt

SEQ ID NO: 661617 - DNA, 526 bp, Homo sapiens
gggagggcagtgaatttcacaaggaaagcaatcccttactctacattacaaaggagaaagtagaaaagcctccctttttaatgtgagtagccacactgtttcatagtttcagttccaaaaaaaaaaaaaaaaaaaactcaaaacatcttttagcgattgcttttcccagtcctcttggatttatttaaaaagtaatcaaacctaattaaaacaatctgctttactgccagagtggcccttcaatgccctagaaaaaaccgagattgctcaraaaggggctagaaaacagaaggaaacatggagctttgcagctcttcatatgcgagaaattaagaaggaagaaaggttaatgttattgaagaaacttagagactaaggacaggtgttaggaccggaggcaagagtcgagactgtggaagattgtgtccctggtattagggggtctgctggtctcggaagatccagcctgcagccctgacctatttgctccatgggagtgaccatgttattacttgcagtttagcgt

SEQ ID NO: 661618 - DNA, 526 bp, Homo sapiens
gggagggcagtgaatttcacaaggaaagcaatcccttactctacattacaaaggagaaagtagaaaagcctccctttttaatgtgagtagccacactgtttcatagtttcagttccaaaaaaaaaaaaaaaaaaaactcaaaacatcttttagcgattgcttttcccagtcctcttggatttatttaaaaagtaatcaaacctaattaaaacaatctgctttactgccagagtggcccttcaatgccctagaaaaaaccgagattgctcagaaaggggctagaaaacagaaggaaacatggagctttgcagctcttcatrtgcgagaaattaagaaggaagaaaggttaatgttattgaagaaacttagagactaaggacaggtgttaggaccggaggcaagagtcgagactgtggaagattgtgtccctggtattagggggtctgctggtctcggaagatccagcctgcagccctgacctatttgctccatgggagtgaccatgttattacttgcagtttagcgt

SEQ ID NO: 661619 - DNA, 563 bp, Homo sapiens
ttattccacacagtatgcctatatcaaagtatctaatgtacccataaagacatacacctcctatgtagccataaaaattaaaaattaaattaaaaagagggaaacagcaaaggacacagtgtgtgtatgtgtgtgttgctgttggggatgcagggaatataggagaggcaaagggaaggggaatatggtaaagggaaagaaagaagtgtgttggaaaacatcccacccaggaaaattgcctttgagtaatagcagtagtcataaacatactcaggaaaggatatcacaagttagatttcctcaagttcatttgtctttagaagggaacatctttaaattagagaaaataaaagtattctaaatgagactgcacaattggaaagtaaaacaggacttttaaaaatggtaaaaaaaaaactgtaaaaaaaattaatgtgtcagcccttttaaaatcccagatacgtggttgaattgctktcattcacagaaactttcagcataaaatgttcagtaagatgtactttagaatttcagaactctggatttctctggctattatgtgc

SEQ ID NO: 661620 - DNA, 501 bp, Homo sapiens
acaaggcctgactgaagccccacatttcagggaagggaagtacccacagagctgaattcacagcagactagagatgggtgttctgagaggcctcagcaccacgccgttgcttaaaggctgcctctttgtctcagtggtaagggaaatgagttttgttcccaccaaacttcttcaaattggctagattcctcagagaaaagacccaagcaaataatcctaaggagatraaggtatcacctcctcacctccagactaagatttaagatttatttcctgtctcaaaatctacttcatcccaggaaggcagacactggtgagctctactctcatatgaacagattcttacctcacaatttcaacagagcagtcacaggagaacaccatcatcctgctttacaagtgaggcacacagacagcagagagtggtgagactggggaagctggagaagttgctttttgatatcccttgcttccaaattaccaagaaaaattgattgcccc

SEQ ID NO: 661621 - DNA, 633 bp, Homo sapiens
cagcctacagaaatgctattctgcctactacacaaatgaccttttccatgatcacacagaacagtttagctccttatagctacagcttctcaaacacctccttttctaattacgacctgtgatttagatttgcataactgaaaggcacacgcaatgatttgccttagaatttagaaatagtctgcatcaacactgtgttcaattcccaacttctagaaaaacagaaaaactgcttgcagttttgaaatgacctttttcgtaggttccgtcactcccaccaatgtttccaatagcttgggaccaagcctctgccaaatacaagctcatgtgcttttgaacactgccttcagcagtctacgcaaaaagctagccccmaaacgggaactcaaccctgaggtgacagcagcggagtcacttttatttatatctttcttcagaaattgctgccttttccttatatagtcagaaagtaacctttcaagaaggtacccaatctcatgtcagttcaataatcataataacaaacacctaataacaattactatgtgccatgccctgttgcaggtgcccccatatattgacttgttgacttagtcttcaacacaatagcatgacatatgtactaaacacaca

SEQ ID NO: 661622 - DNA, 514 bp, Homo sapiens
agtctcatcttgccagagactggggacacacacacatacaaaaacgaggcagacatggccgctccactcaggaacttgcatttttgttgtagaaataagaaaacaggcaaatacagcgacaaataaacaaattaaaaattgtgcaagaaataaaccagagactagctttctgtagaatggtcagggacagcctttctgaagaactgacaggctgaaatctacaaaacaaacatgcaaagactgatgggaaaagggaagcaggggatatattttaggcagagaaaaagtttctacaaaacgtcctgtgaaaatgaccttagttttcgggcrtgagtgtacaatgattacgtgactggcgcatatggggcaaggggaagttctagatgagatgagcttcaagaggtagacagcccagcttgtgcaaggctttaagagctatggggaagagttcacatttcattttaagaataagtcaagatgttaaaggaatttaagcaatagtgtgataggacat

SEQ ID NO: 661623 - DNA, 515 bp, Homo sapiens
ttaaacactagctttttattagcatttgtttaaaaagcattttacaaatcttaatttcattgaagttcaactttatcattatgtttcatatatatttctaaaaagcaatgtacagctaaataactttaatctgaaagtttttttaaattttgacatctttaaaaattataattagtgtgactgttggtattgttggatttatattgccggtattcttattgtgcttttttcatcatcacggtttttggggtttttttgtttgtttgtttgtttttagcttgctttcttcttttcttgccttctgtaggactgattattttcattcacttctttctactgattgcaaaattacatttatatccayatgtgtggtgattattcttaaaccattatcacagaatctccattttaagtgtaaaattaattaacaattctggttgccatttgtaaaataaatatccataaaacactttaattatagccctcctatcttaccttattttgtctattatttt

SEQ ID NO: 661624 - DNA, 515 bp, Homo sapiens
ttaaacactagctttttattagcatttgtttaaaaagcattttacaaatcttaatttcattgaagttcaactttatcattatgtttcatatatatttctaaaaagcaatgtacagctaaataactttaatctgaaagtttttttaaattttgacatctttaaaaattataattagtgtgactgttggtattgttggatttatattgccggtattcttattgtgcttttttcatcatcacggtttttggggtttttttgtttgtttgtttgtttttagcttgctttcttcttttcttgccttctgtaggactgattattttcattcacttctttctactgattgcaaaattacatttatatccatatgtgtggtgattattcttaaacmattatcacagaatctccattttaagtgtaaaattaattaacaattctggttgccatttgtaaaataaatatccataaaacactttaattatagccctcctatcttaccttattttgtctattatttt

SEQ ID NO: 661625 - DNA, 597 bp, Homo sapiens
ttttgccagttattgtgattttgaaagaaactgaaataatcaaataggagatatatgtttatattcaaaggtataaaacattaagagaaaaattaggacccaaatgataaatcattatagcaaatgatgataataaacaacacttttagtataataagcccctggaattgacaagctgaaatgttaactttgttttataggtattttgactgtttgcttacaaaataactgcaatactcacaattgaaaaaaaaagggaacatgatctagtgtttcaacttattggggaaacatttctgtgtagaaccaatgcatttatcatgcttaattggaaattaatggaaaaatatttatattacttgtgtttttacttttttaaaaatttaggcatgccattttaaaaatggattacatttatttagaatgctgatggaaatcatagatatagaattatgaaatgtcaaatgtaaaattaaaaagggaaagataattttttaaaactacatacagtagttctcaattataccatggtactctstaattcctcaaaattctgaagcgatttgtaggaaataggaatatctatggttcaaatat

SEQ ID NO: 661626 - DNA, 559 bp, Homo sapiens
caatttctaaaggaccatttaattggtcatttayaaatccactttcaccaatggccaaagtgaggaattacaagcatgctaacataataatatctacagtaataaaaataaccaacattgattgaagacacatttgcatagcactatgaaacatccttaaatgcaatagccttttcatcttcatattttaccaatgagggttgtgggattcaaagtgacttgcccaaggtcacagggcaatgagactgaatgaaggtctgattccaaagctcatgctcataattatgatatcttgtttcataaaccaaggttaaatttcaataggagacctgaggataaagaataggtgtagagtatgttcttagcaccatagaaataagagggagaaactctaagttgctaaataaatagtattcacttgcatcttctgcaaagtaagtaagaccagagtgaattgagaattcagacattaacattaggaaagaaaaggcatggatttaggacacttgactgagaacaggcctttctgaaatgtggattactcaacagagagaattaa

SEQ ID NO: 661627 - DNA, 539 bp, Homo sapiens
atgtttggaatgaccatggtaaggtagcgaaagatcccaatgccacttgacttctggtttacatgtgaggctaaagggcacagacaggaaaaagtgttttattgatcagtgtgtacaatacgcatagttaattctggataaggttatatttgtttacttatgatctcattaaaaaacatttcaatatctgagtctagcaaaartaacttccacgatgtataaatatgccccaaattactttgtacctttagccttatccccactggtattcttgtcaccctttcaccagtaattgtcatctgcttttaagagaccaataatgcctacatgtttaaaaacttatttttaggagaaaacatattacagtccccaaactcctttcatatccaacagtcaggttacttctgatatctactttttgagaaagtagataagttcataacaactttacaggttggaaaccactgacttgtccacaagccagtaagatgtcataaccttggagtctgtgctgtgattggtagcttaagcatttgtta

SEQ ID NO: 661628 - DNA, 572 bp, Homo sapiens
acttctttttctacccagtccaggtatatctttgtcagcagcatgaaaatggactaatacagtcacaaacacatagaacttagcaattgatgaaacttacacatacaggtaggtgtccatttttcttttaaattaattaagatgtaaaacttaaaaagaaaaccaagccgatagaaaaattataagtctcaatgttgaaggaaagaagtcagataaaagagggtaaaacaaatcttaaagaaacagrgaaatgatgcagtggaggagaggaaagttgagtaaactcaccaaaaataccatcattcttcttagcaaaggaaggagagtagctggcatgacacagaataactgagatttaaagagcaagagactaaccagttagaacagtgataaaagcatattatgaagtaaaaaagggagaaacaatagatggtggtagaggacttagggttatgtcataactagctcaaaatatgaatattattttataattctgccttttgtaataatccattttgacagtccagccactattgttagagaaagattatcagaatattgcaatgaagaat

SEQ ID NO: 661629 - DNA, 624 bp, Homo sapiens
cctttgtttataattttacatatcaagtgactggaactctccacctattaatttctggttctgcacattttagatcttgtttctcccctactacccaacacacctaccacattctgattgtgtcaggtccacatcatagctagatgtgacctctaggctcatacctttgtgtcccaaccayaggcgagtttacacaatatatgggaggaatattcctgaaacatatacctaccgtgggatggcttgctataacttaactacatatggctatgatggcaaaccacagaaatatatgccactaacccaaactgtctcccagtcaacattctcctaatcatataccacaaaagcctgtggcctctccaagccacctgagccaggcagagtatatgggaggagatgttggagtagaaagagaaagtgatcttaaatagcaatggttaacatacccacttttgtaaatagtagaaaaacatatgaccataggaacacattggaagagacccatgcaagtgcagagtcctaaagttaagtttcactgggaaacccactttggggtttatctcttagatgctgtcttaaatgttcccattgagtctcttatcctccaaatcaagctcctta

SEQ ID NO: 661630 - DNA, 572 bp, Homo sapiens
ggctattttgcctacaatgaaaatcttttgttacatcttgcatttttattttacggagacagcttctttcctgaaacctcatgaacctctgctaacttcaaaatttcttttgcagcttcctgactgacctctctcagccttcatagaactgaagagttagggctttgacctggttatgcatgggcagttggaaatgttgtggctggtttgattttctatctggaccactaaaactttttccactgaaagttatttctccgctgaaacttatttcagcaataaggtggtttcactttcttatcatttatgtgttcactggaatagcactttatttcaaggaattttcctttgcattcattacttargtatttttttagagcaagaggcctagcttttggtctatctcagctttcaacatgccttccttccttactatgcttaatcatttctagcttttgatttaaatgaaagaaatacgagtcttcctttcacttgaatatttagaagccattgcaggattattaattggcctaatttcaatatcatatgtcagggaatatgcaggcccaaag

SEQ ID NO: 661631 - DNA, 593 bp, Homo sapiens
aaatggcacaggcattctaggtaaggaaaactcatttgtgatggcttgggcataaagagaacacaatgttcctacagacagggtaaagagttgcagcaatggcaggtccatggtgagccacagtgtgaactatattcaacaggtaggtgtgcctaagtctagtaagccttaaatatgtgtgtgtgtgtgtatgtaaaagtttggagctactgaaagttgaagtaaagcagtgatacaccatgggtagtaatagtgaataaataacatacaacacatatacacacacatatacacacattaacttgtatccttttatcaacatcactattgaagtagacactgatgcttttacttaatagatgcctacaaatatgaacaaaaatgtgatacccatacaacttacaagataccatgatctagtaaaagtacttttgaaaactcaataaatgttttggtttctgcagaagcctmgtttctctcagtccttcaacaaatactaagtatcaggtactgttctaagtaagctaagagcatgaaacaaacagaaaaagacatatatatcttctctcaacaagctcaactttaatagcaaa

SEQ ID NO: 661632 - DNA, 624 bp, Homo sapiens
cctttgtttataattttacatatcaagtgactggaactctccacctattaatttctggttctgcacattttagatcttgtttctcccctactacccaacacacctaccacattctgattgtgtcaggtccacatcatagctagatgtgacctctaggctcatacctttgtgtcccaaccataggcgagtttacacaatatatgggaggaatattcctgaaacatatacctaccgtgggatggcttgctataacttaactacatatggctatgatggcaaaccacagaaatatatgccactaacccaaactgtctcccagtcaacattctcctaatcatataccacaaaagcctgkggcctctccaagccacctgagccaggcagagtatatgggaggagatgttggagtagaaagagaaagtgatcttaaatagcaatggttaacatacccacttttgtaaatagtagaaaaacatatgaccataggaacacattggaagagacccatgcaagtgcagagtcctaaagttaagtttcactgggaaacccactttggggtttatctcttagatgctgtcttaaatgttcccattgagtctcttatcctccaaatcaagctcctta

SEQ ID NO: 661633 - DNA, 582 bp, Homo sapiens
taaatttatcaccagcagcacctgcttatttgttattwaaaaaaaaacaacctccaagcattcggataaaaatacttgataaaaataaaaagtcagtagaattcattataattatcaactaaagaaaaaccatattatcatctcaatagatgtggaaaatgtatttggcaaaagttcaacatccacttatgattaaaaatctcttagcaatgtagaaatagaaaaaattgcttcagcctgttaaaagtcctctacaaaaaaaaaaaaggcaccatagttaataaatatggtttgaatgtttgctcttgttattgggactaggacaagaaggtctattcttaccacttctacttggtattgtgctgaaagtcctaaccagttcaatacagcaagaaaaaaaaaaagacattataagtgaaggaataaagccacctttattcacagactacatgatcttttatgtgaatgatcctaagggatcttcaaaaatttttcagatctgatccattgggttagcaaggtggcaggactcaaggacaatataaaaaagtcaattgtattcctatacattgacaataaaca

SEQ ID NO: 661634 - DNA, 582 bp, Homo sapiens
taaatttatcaccagcagcacctgcttatttgttatttaaaaaaaaacaacctccaagcattcggataaaaatacttgataaaaataaaaagtcagtagaattcattataattatcaactaaagaaaaaccatattatcatctcaatagatgtggaaaatgtatttggcaaaagttcaacatccacttatgattaaaaatctcttagcaatgtagaaatagaaaaaattgcttcagcctgttaaaagtcctctacaaaaaaaaaaaaggcaccatagttaataaatatggtttgaatgtttgctcttgttattgggactaggacaagaaggtctattcttaccacttctacttggtattgtgctgaaagtcctaaccagttcaatacagcaagaaaaaaaaaaagacattataagtgaaggaataaagccacctttattcacagactacatgatcttttatgtgaaygatcctaagggatcttcaaaaatttttcagatctgatccattgggttagcaaggtggcaggactcaaggacaatataaaaaagtcaattgtattcctatacattgacaataaaca

SEQ ID NO: 661635 - DNA, 657 bp, Homo sapiens
tctgcacactctttttgggaatggctctgtgttttggattaggttgggtttttaaaatctttatcttttcctcccaagttctacycagttcatgaacatcattaaaactcagacagagtactcttctgggcctcattcatgcaaattctggactattcaaaaggaagaacataaagattacacagaaagcccaggaaaatgcactctgagggtggttattaatgacatcaatgaatttggggagcaggattaaaccactgagccactttcacaaacgtaattccaaagtgtggtttattgcagaatatatgacagtcactaagaaaatgaagattaaaatgcttttaaagacaaaaaacaaacaacaacaacaaaacaaaaaacaccacaccaccaacaatctttaaaatgggtgtacctgtctactaattgattatcttaatggagtttgtcatgcttaccattttgttcctattcatagtcaattggttaggcttccaggaaatcaaataaaactagcctggcatcctttacataattatattcaccagctggttcaaatgtgtttttaacatctcagtaacacatcaatagtaccgccttaacttgtaaagttccatcttaacatttgcatctattacataacattagtggaaa

SEQ ID NO: 661636 - DNA, 462 bp, Homo sapiens
tttatttaatatagccttgctcatttgtttctgtatcatctatggctgattttgtgctacaacagctgagttgtgacagagaacatacagcttgcacagactgatatatttactctctggtcctttacagcagtggcccccaacctctttggcactagggattggtttcgtggaagacaggtttttccagaccgtggggtgtggggatgggggatggttttgggatgaaactattccacctcagatcatcaggcattagattctcacaaggattgagcaacctagacctctcacatgygcagttcacagtagggtttgagctcctatgagaatctaatgccatggctgatctgacaggaagcagagctcaggcagtaaggcttacctgcggctcacctcctactgtgtgacctggttcctaactggtggagaaccagtaccagcccacagcccgagtgttgg

SEQ ID NO: 661637 - DNA, 460 bp, Homo sapiens
ggacaacaactgattgtgaaggaagaagtgaatctggtcagttacargtctctgatgtgatttgggccactgggtaatggctcctggagcccgatttatcccaaatgttctgtaaccaaacaaggatgccatacaataacccatcccaatatggccactgaagagactcctgtcatcttgaagtcaagatctctccttaagggtgcacattaggctgaagtcaaacaagttcctggtgagctcagggaaatagctcactcagcttgaaaaaagtacagcccagcaggcttcctcccttcaaatgtttttctcttgactaaagcaacatgaaatggaaagagaatagcaacaaaaaaaacaaatagttcaagcaaatgccttttgcagataaattacccagaaagccaggctgcttttcatggctactctcctctcagccctgttatttcttggcctcacc

SEQ ID NO: 661638 - DNA, 587 bp, Homo sapiens
cttgtttttattgactttggccttgcagtattttaaaagtcatttttgtttccaattatcaacgctactgacttactgaattctacttcctcctgattttcccacttcctcttcttcccttgagcagttttttgtgcttcaggaataaagttctgactttttctctcacctcttcactccagttagcttccccctgctggtcccaactgctaatcggaccatttctccacactaaattacagaattatcctgaggcaacaaaacttttacatgaatgtttccttgcagttcaaaagtattttaggcactaggtgaatgcctagtgagagtctgtcccgaaatgtacacatcagtattctgtgggacttaatttaagctatgaaagcaaaagataaagaaacattccatcaccaacatggtttcccctgctttgcttsctgtttatcagtgcttcaaggtcacctttcgatatgggcagtgttcagcttattctaagtctccctctattaataatggctcttatgactcctaccccttagcttggcagggtccccctctcaccttctgtgagtgaaaaaacaactagg

SEQ ID NO: 661639 - DNA, 617 bp, Homo sapiens
gaaatgttgattgacgatcttacaaacggcaacagaaagcaaggtaggatgacatcatgatagattatcttctctgccctatgaatacctcttcttacttgttgacgggtagaagttatatgactatgaaacatacttagaaacagatagtcccttactgtggttccacgagtttctaactatacaatggtgcaaagtgatacacattcagtggaaattgtagttcaaattttaaaatttgatctttccctggcttagcgatatgcagtatgatattgctcaccagtcagccatgcaatcaggagggcagacaaccagtgctttatgctataccatggtgccagatgattttgccccactgtaggctaatgtaagtgttctaaccatgtttaaggtaacctgacctttgatgttcagtaggttaggcttgttaactgcatttttgacttaaaatattttccacttacaatgggtttatcagaatgtaaccccatcataagttgagragcacctctacttgatgtccctgcattattaaatcttcattgctttttcctgatttacccacaatacatcagatactagtaatgcttaaaataagattctgccattattgt

SEQ ID NO: 661640 - DNA, 621 bp, Homo sapiens
aaaattaggaattactgcctgttggagaaactctgttccaaacatatggtggtatctgagaggttggtacaagatattgaaaggggtcttgggtttaggactaaatctacaaaaacgcctcagcttgaagcaggtaattccctggggtggcaaatgagtagccacaggtaggtaaagaagtagatgagtttcaagagaaaaaaagatgagggagtattgtactaraaacaacagtagccttccctccaggaagaactgattaagttctttctgtatttgccattttcaatgccagaattcttccttggtaaaaaagcacaacagaacaataccttttgactattccaaataattctcaggcagggtaatttccacatataatctgagaagaaccaatgttctggaaaaataaaatgtggcctggagcagcaaagtgaaaaaagaattttgtctcctgttgagggtgaatttgatcccagattcaccacttgcaagtcctttttttgaaccatcctacagaagatcctgtggagtcatggggagtaaaacaccatttgacagaagagatactagcatactgagaatacaactggctgggatgccaaaacaatgcatatataa

SEQ ID NO: 661641 - DNA, 621 bp, Homo sapiens
aaaattaggaattactgcctgttggagaaactctgttccaaacatatggtggtatctgagaggttggtacaagatattgaaaggggtcttgggtttaggactaaatctacaaaaacgcctcagcttgaagcaggtaattccctggggtggcaaatgagtagccacaggtaggtaaagaagtagatgagtttcaagagaaaaaaagatgagggagtattgtactaaaaacaacagtagccttccctccaggaagaactgattaagttctttctgtatttgccattttcaatgccagaattcttccttggtaaaaaagcacaacagaacaataccttttgactattccaaataattctcaggcagggtaatttccacatataatcygagaagaaccaatgttctggaaaaataaaatgtggcctggagcagcaaagtgaaaaaagaattttgtctcctgttgagggtgaatttgatcccagattcaccacttgcaagtcctttttttgaaccatcctacagaagatcctgtggagtcatggggagtaaaacaccatttgacagaagagatactagcatactgagaatacaactggctgggatgccaaaacaatgcatatataa

SEQ ID NO: 661642 - DNA, 431 bp, Homo sapiens
tttccacatataatctgagaagaaccaatgttctggaaaaataaaatgtggcctggagcagcaaagtgaaaaaagaattttgtctcctgttgagggtgaatttgatcccagattcaccacttgcaagtcctttttttgaaccatcctacagaagatcctgtggagtcayggggagtaaaacaccatttgacagaagagatactagcatactgagaatacaactggctgggatgccaaaacaatgcatatataaaatatactaatgagattaaaaaaaaaatcagaaacagagaggaactaggctgttaacaactagaaaactacagagacacttaggtaagtagagaaaacaatgaggggtaaaaagaagcgagggaaacaaacagaaaaagaaagatgtatacagttttgatgacagaagataaaacaca

SEQ ID NO: 661643 - DNA, 567 bp, Homo sapiens
tcagcagagacagaaattctaagaagtattttttaaatgatcaaaaagacattgtaacagaattaagctattgtaacagaaatgaagaatacatttgatggattcattagtagaatggacacaactgaggaaaagaccctctaagcttcaggatataacaacagaaacttmcaaaactgaaaagcaaagagaacaaagactgaaaaaaataaaacaagaccagaatacaatatccaagaactggggacatctatgaaaggtataacatacacataatagaaatagtagaaggagaaagagagaaaggggcaaaagcaatatttgaaataataatgactgaagattttcctgaaattaatgccagacagcaaagcacaggtccaagaaagctcagagaacaccaagcagaaaaaatgccccccaaaacacttatgcgtaggaatatcatattcaaatttcaggaaagaaaaaatagaaagagagagaagaagccagaggaaaaaaaacaccctacctataaaggagaaaaataaggactaaagccaacttctctgaagccatgcaagc

SEQ ID NO: 661644 - DNA, 530 bp, Homo sapiens
acaaatgcaaaaaaaattttaccagacatgttttctccaccacgacaatgttattgctcattcctctcatcaaatgaggacattttgtgacagtctcagtgggaattcattacgcgttcaccatacagttctgacttggctccttctgactttttgttctctaatcttaaaaaatctttaaatgttttcccattttattcttcagttaataaggtacaaaggattgcattgatctggttaaattcccaggatgctcagttctttctggatgaactaaatggctggtatcatcagttaggaaagtgtcttgagcttgatggagtttttgytgagaaacagtattttttaatcttttaattcaattttccacgaagtttttaaagtccccttgtctgtgtgtgtttgtatgcttatgtacaagtgaaatgaataacagcaatgatacaaagaacaagaaggagaagttaattttgtattacaaggtacttgcactgattgtaaagtgggatgatagtgttagttgaaaatga

SEQ ID NO: 661645 - DNA, 591 bp, Homo sapiens
gtattaaagcaaactcctcagtgaccagtgaatcactagtctaagaaccctacttattatatgtggtagtagaacctaagcactactatttttagtagttcagtaaagaaagtatagtcaaagagattgtggcagaaggacgttatagttatgaagtgattatcatactttcctaccattgcttcagcctcaagattgcctagtatttgattgaaatccttcagcagtgaaaaagttctaggttactcatttcttgctattcttgattcagtattagagtttcttacatcctatcgactttcaagtaataaraaatatttacagttatgaaagccaaaatcattcaccttcccctaggttaatttgtgaacaaaatgaactttttaaaaaaaagcctgtataagaaactatagtggaactataagaaatgcaaatattttggcttagtatggggaaagcattaccatttagatttctacatgaggttgggtcaacctaatattgaaaaatgcatatttttgttttcccaatgaccttgaaatagcagaaaatactaccagcttggaaacattactgtttacaactcaccac

SEQ ID NO: 661646 - DNA, 591 bp, Homo sapiens
gtattaaagcaaactcctcagtgaccagtgaatcactagtctaagaaccctacttattatatgtggtagtagaacctaagcactactatttttagtagttcagtaaagaaagtatagtcaaagagattgtggcagaaggacgttatagttatgaagtgattatcatactttcctaccattgcttcagcctcaagattgcctagtatttgattgaaatccttcagcagtgaaaaagttctaggttactcatttcttgctattcttgattcagtattagagtttcttacatcctatcgactttcaagtaataagaaatatttacagttatgaaagccaaaatcattcaccttcccctaggttaatttgtgaacaaaatgaactttttaaaaaaargcctgtataagaaactatagtggaactataagaaatgcaaatattttggcttagtatggggaaagcattaccatttagatttctacatgaggttgggtcaacctaatattgaaaaatgcatatttttgttttcccaatgaccttgaaatagcagaaaatactaccagcttggaaacattactgtttacaactcaccac

SEQ ID NO: 661647 - DNA, 566 bp, Homo sapiens
cattttgcttcttttataatcttgttgatttttccaagggctacttagtatactgacatttcaagaattctgcggattattgatttttaaagcactaagtctggaacttctggaattgaaggagaaaactgttatcttctctcacagcggtggtcattcatggaagttcttaaaaagacagcgagaagttaagtgtttataaatacctgtacttagttgctacttttactaatgaaaacactttcagagccctttttcttatgacaatcagtctgaattcctttcttggctttaggacattaataacctctttccgartatattttccctgtcccaaatctttcttccacttgtacccacacaactatgctcaaagtgtccgctcctttcagaacaccttatgttaccatttatccaccaattttcaagaactagcttaagacacacctccataaagcctcccatatctataaaattttccacaaatttatatagtatttaatctgatcaaataacctagcctcataattatagtggttaacaatataggctctacaaatatggaa

SEQ ID NO: 661648 - DNA, 562 bp, Homo sapiens
ttgaggttatagtgagctttgatggcaccactgcactccrtactggtgacagactgtctaaaaaaaaaattggcagagatgtctaaggggctattaaggaaacatcttttaagataccaaggtttgggtaaccaccaaaataaagatagtttgaacttcaatgagctgtatttccaatctagggtccttctacacactatctgtagaatgataacaatttacatgattactcaggtaatttgggcaaagcaaaagccaccataccaataatgtattgacataaattcaaaaggaaagagagtagtgattacatgggccaatgctattagagtcagtcaagatgtgggtttaaagtacataaacaagaatttcttttatggctaatattgtgtaagaatttttttatgactagtcaaactttaaaatatcttctgaaatccaacgacaaatccaacccattttccctttttgaggttaaaatgaatgttattaaatcacatagcccagaaaatgtagctatgtatttgattcaataccactactctagtaagccagtggggta

SEQ ID NO: 661649 - DNA, 623 bp, Homo sapiens
aaacaactagcaaaagataattcagcaaaattgagataatattagtgaaagaaatgtaaaaatgttttgagatctgcagattggattatgccaactattattattatactcatatacagagttttaacgcctctaggaaacagcctcttcagtattttgtattctatgtcagcttaattttacttattgcacaattaaatctctcttaaacaattcaaggaaaatctttattctttcaataaggtttaaaagtgtaataaattggcagctctttttagaaattcttttctaataaaacattataagtggttagatcattaagcctggtttgaaaagcctacatatacgggagaaaacctaccatagctgacacaatggaaacatctgctaaaccttctaacacagactcgcagagagargaatatattcttttttggttttttagacggagttttactcttgttgcccaggctggaatgcaatggtgtgatcttggctcactgcagcctccacctcctgggttcaagctattctcctgcctctgcctcccgagtagctgggataacaggggcccgccaccatgcctatctaaatttttttgtatttttagtagagacgggatt

SEQ ID NO: 661650 - DNA, 583 bp, Homo sapiens
catcaactaacagcctcaaggacattaacactgggagcaaaccaagtactcagggatgggcctagaaactattattatgcatccagatcgtaaattttccatttcctgaactgtgtcctctgcaaggagagaacaggcccccatcagccaaccctttgcccccaggccttgctctcttgcaggcatattttactcatgagtggctcttttgtaattatataagaagatgatgtggttctgaagaaagctcctaataagattacatggggcaaactgtcactgttcatataccttaataggagaaaagtcccatctagaccacaatgtgttgatcggctatgacaagttcaattttgaatgaaaacaaactctcagggctttctttgaccttcttgggaatcccacaaaataacagcatgtagcagatttgttctgttccgtgtatcaacagcagcttacacctatcagtgaatgcactctatttttgtttcaatcagtatacatattggtaaaattacaaccacctaagccataatgattttctamatttaaatttttaaatttaaattttctttgcatttcc

SEQ ID NO: 661651 - DNA, 561 bp, Homo sapiens
atttaccaggttcactgcagttaggtcccaaaagggctatgaattcttactggcatcttctctgtgacctgtgatgattctgaactctctgtgtcaaagaatcaygtcggcactaacaggagtgacagccagactaggctgggaggaccaaatgtcttcctattttccttcctaacccccacccacttcacccctctgccaacacacacagcaggaaagactaatttcttccccattttctaagcactctttgaaggtatttctttagcactgctctgaactacagctatttagagcaatttagtttatctggatccttttattccctctaccattagtccaatttcaaaaacaataagaacaacaacaaaaaaaaatcttctcagttttaaaaacagtcctaggcttatttattttaaatgcttctgattttttttttctttcttggtggagttttccaactctctctcaatttcttcacccagagcaatttatgaaaacaaatgcagcccacagcaatcattaatccttaaagtgaacaatactactgtgaattatgat

SEQ ID NO: 661652 - DNA, 592 bp, Homo sapiens
aatcatagttccctgtgctgagcatagaactccattcagctactctggctttgaaagctcacacttggctttgaacaaacccggaggaagacaaagagagcacataacgtaatcaatcctgatttctccaatttgttctttgagctccagcgtgctttaataaaatcggaagtgccatctcgccttccaattgagaagctgggcagggagcaaagccagtagtgtaccaggaataattctgcagtgacaactccaagtcggagcaaagggactattctaaggttgtggtagcaaaatggtyactttgagaaacggaatttgaatagattgctttgtcaggagacagtaaagaaaatcaagtaggtacatgtgtatttttgtgtaatatacacgcatatttatgcatgcatttacagggtgtacgtatgtataagagtgcatatgtaaatacatatgtgcaaatgcatttataagtcactatatatctaagcagacactttactacccttcattataaataaataataacaaattgtattcacaggcttagatatggttaaaaagcaattctctattgtgaaaatggctgctc

SEQ ID NO: 661653 - DNA, 592 bp, Homo sapiens
aatcatagttccctgtgctgagcatagaactccattcagctactctggctttgaaagctcacacttggctttgaacaaacccggaggaagacaaagagagcacataacgtaatcaatcctgatttctccaatttgttctttgagctccagcgtgctttaataaaatcggaagtgccatctcgccttccaattgagaagctgggcagggagcaaagccagtagtgtaccaggaataattctgcagtgacaactccaagtcggagcaaagggactattctaaggttgtggtagcaaaatggtcactttgagaaackgaatttgaatagattgctttgtcaggagacagtaaagaaaatcaagtaggtacatgtgtatttttgtgtaatatacacgcatatttatgcatgcatttacagggtgtacgtatgtataagagtgcatatgtaaatacatatgtgcaaatgcatttataagtcactatatatctaagcagacactttactacccttcattataaataaataataacaaattgtattcacaggcttagatatggttaaaaagcaattctctattgtgaaaatggctgctc

SEQ ID NO: 661654 - DNA, 592 bp, Homo sapiens
aatcatagttccctgtgctgagcatagaactccattcagctactctggctttgaaagctcacacttggctttgaacaaacccggaggaagacaaagagagcacataacgtaatcaatcctgatttctccaatttgttctttgagctccagcgtgctttaataaaatcggaagtgccatctcgccttccaattgagaagctgggcagggagcaaagccagtagtgtaccaggaataattctgcagtgacaactccaagtcggagcaaagggactattctaaggttgtggtagcaaaatggtcactttgagaaacggaatttgaatagattgctttgtcaggagacagtaaagaaaatcaagtaggtacatgtgtatttttgtgtaatatacaygcatatttatgcatgcatttacagggtgtacgtatgtataagagtgcatatgtaaatacatatgtgcaaatgcatttataagtcactatatatctaagcagacactttactacccttcattataaataaataataacaaattgtattcacaggcttagatatggttaaaaagcaattctctattgtgaaaatggctgctc

SEQ ID NO: 661655 - DNA, 482 bp, Homo sapiens
ttaaaaaacaaaacaggaaaacgtaacttttaggaaatagaaaagttaaaataatttgaattccagcgagcctagatgtggacttcaggagataataatttcaaagtggttatttaagatatgatgaaaaaattaaaggaaaacatagtgccaacgaattaacaaatagggaatcccaacaggcaaatgycaaatatcaaaaatggaaattagctagttaaaagtgaaatggctgaaattaaaaatgtattagattagcacaaacacagattagaaatgacagaaaaaaagacttagaaaattttaatataaacaaagagaaataacccaattcaaagcatagaaaagtctttctactcttttaaaaaactttgtttaaaaacgtttttataaaaagtttaaaaaaacatttttaaaaaaagatgagaagacttcaagattcataggacaatatcaggcaacctgatctgtggaaaataaat

SEQ ID NO: 661656 - DNA, 563 bp, Homo sapiens
atggatggctcctcagtcccatggagacactatgagaaagaactttgctgagatgggtagatagatggaacaacatatttatattgtaggaatgtaacttaatatcaggaaaagcataaattcaaaagacaaaaagatacaggagaaggacacatagatattttggtggttggatttccagtagattrtatctttcttggtcagcactacttttaaagaaaagcccagctttcctagatgaacaatgacttaaaaaaaaaaaaaaaaagactgcttggtaccactgggaacatatatgacaatatttcgggatcaaagaaattcctatctttactctgaaacctttcactccaaatcagtctgtagaaatctgtgattctgttcctattatgataatattaggctcaacaaaccttttccatgttaaaataataggcttcttgggaagagaatgattacccactccttgtagaaaaaataatgattatacttttcttgagagaatatttttattgagtaggagaaagaaagcagaaacaaagaaggaatatatttctaatatt

SEQ ID NO: 661657 - DNA, 563 bp, Homo sapiens
atggatggctcctcagtcccatggagacactatgagaaagaactttgctgagatgggtagatagatggaacaacatatttatattgtaggaatgtaacttaatatcaggaaaagcataaattcaaaagacaaaaagatacaggagaaggacacatagatattttggtggttggatttccagtagattgtatctttcttggtcagcactacttttaaagaaaagcccagctttcctagatgaacaatgacttaaaaaaaaaaaaaaaaagactgcttggtaccactgggaacatatatgacaatatttcgggatcaaagaaattcctmtctttactctgaaacctttcactccaaatcagtctgtagaaatctgtgattctgttcctattatgataatattaggctcaacaaaccttttccatgttaaaataataggcttcttgggaagagaatgattacccactccttgtagaaaaaataatgattatacttttcttgagagaatatttttattgagtaggagaaagaaagcagaaacaaagaaggaatatatttctaatatt

SEQ ID NO: 661658 - DNA, 563 bp, Homo sapiens
atggatggctcctcagtcccatggagacactatgagaaagaactttgctgagatgggtagatagatggaacaacatatttatattgtaggaatgtaacttaatatcaggaaaagcataaattcaaaagacaaaaagatacaggagaaggacacatagatattttggtggttggatttccagtagattgtatctttcttggtcagcactacttttaaagaaaagcccagctttcctagatgaacaatgacttaaaaaaaaaaaaaaaaagactgcttggtaccactgggaacatatatgacaatatttcgggatcaaagaaattcctatctttactctgaaacctttcactccaaatcagtctgtagaaatctgtgattctgttcctattatgataatattaggctcaacaaaccttttccatgttaaaatartaggcttcttgggaagagaatgattacccactccttgtagaaaaaataatgattatacttttcttgagagaatatttttattgagtaggagaaagaaagcagaaacaaagaaggaatatatttctaatatt

SEQ ID NO: 661659 - DNA, 544 bp, Homo sapiens
tagggaaatatattagtctgcagctaaatagcaaaataaagacatgctgtctcatgtaatcttataaatatgctttaaaagccaccggtaccccctgagaggcttaccatctgcttctcatggtggcaaaaaggaagtgaggctgagtgtggaagagaggctgaattgcattcagcgggcagaggtagacttgtgcacagtctacaacacctgaagtagaattttcagactatctttgcaatggagaaactaatatcacatgaattccaggtgaagagtaccataaatggcaaaaagagaacaaagtgtcaatattcctaagcaacatatggtcaacagatttagtatcaagtgcttacaacctgtaatagtcaacatccaagatggcccccaataagacttgcttcctgccatctakgcacctgtggtagctagtctatttcatattgaatcaggactcaatcataaaaggtatagcagcttccaccttggtctcttgaattattctctgggaagccggccaacatgccatagaaacactcaa

SEQ ID NO: 661660 - DNA, 612 bp, Homo sapiens
ttttcggtctgttgtgcttgttttctgtagccggtcttcatttttctcaggacaaacgctcgaaggtatgtaactatatataccagcattgcctggtcgaacttgtatggatgagagacaacaccaccacagctcagtaccagcattatgtgttgaatcattgctatgattaaaaatgaaatgaggcagtaatattctattagtggtgattctgaggtgaaggtgtagggattgtgtggaaggtttaacagcatcatctgcagtacttttgtttgcactctccctttcccattcygatatgttgtcaatatttgcaacaattatacaaaggctgcaaaattgaacactgatgagaacctctggacataggctgctctaagcagaacacccaagattgggatataaatatgaaataatgtccaattaaagaacagcctacaatagaaatatatattataaaaaactgaactctcagctgcttttggaagacagatagagtcacagaaactaagagtttaaattaggagagtttttcacattgacttcaatctaaaaaagagtccttttttgcaaaatatcagggaaagctctagcagctctctgtgcatgcaa

SEQ ID NO: 661661 - DNA, 584 bp, Homo sapiens
ggaactactactttctccacaaattcatgctctgtgctaagcaccgaggttacaaagattaatagaatatagactttgctttcaaggttcttcctggctggcagataaaacaatctagacttagcaacaactcagattattctggcttttcttttctcatatgaaatgaagaagcattaccaacaacrtattttacctgatttgacacatactatgggctgtgccagtattggaagagagtgctgccttattttctcatcacctgcaaactagacagatctttgtaactgccttcgtcaaaagactgtggcaaaaatcaccctgagggatttctgagacaaggtcataagaggccacagccatacaacctggctctctctttctcaggatatacctatgttttatactttattttacttttttttaagcaaacttccatggaactaatttctaataatgttaatatcttccttttaactagtcaatatcgaacttgagtttttgacgtgccagtatgctactaccatattgtcactaattttcttaacaaattttaagtgacaactcaaagagggccaaaatct

SEQ ID NO: 661662 - DNA, 310 bp, Homo sapiens
tgctcagcaaatacattcatttattgatagataccaattgaacactgttatgggctgagttgtgttccttcaaaatttgtttgttgaagttgtaaactcttcatctcagaatttgactatattttgagacagtgtctttaaaggggtaagtaaattaaaatgaggtatactagagtataccttaatctactacgattggtawcataataagaagagggaattggaatatagacatacacagaaaaagaccatgtgaagacagagagaaggtggccttccacaagtcgaaaatagagaccccagaggaaaa

SEQ ID NO: 661663 - DNA, 310 bp, Homo sapiens
tgctcagcaaatacattcatttattgatagataccaattgaacactgttatgggctgagttgtgttccttcaaaatttgtttgttgaagttgtaaactcttcatctcagaatttgactatattttgagacagtgtctttaaaggggtaagtaaattaaaatgaggtatactagagtataccttaatctactacgattggtatcataataagaagagggaattggaatatagwcatacacagaaaaagaccatgtgaagacagagagaaggtggccttccacaagtcgaaaatagagaccccagaggaaaa

SEQ ID NO: 661664 - DNA, 549 bp, Homo sapiens
ttacacaactggtggaaggagaaggtccttctcaggtaaagtatttcatttcaagggtctaacattgaccacgccccaccagaaactgtcagaagcatattcacatcctctctgaaggaactcacccaaatattcctcacagttaaacttctaagcaatatgagccacagataaaataagtcaccagctcacaaaggaaaaaggtaccatgagaagaagccagcgaaaataacaacagaatcagaagtgcaaaaatgttagagactgggatttattataaagaaagacacacacacacacacacacacacacagattcagtaggtttgaaaaatgtaagagaagactgaatacatgtcaaaaagtaaaatatgawtaattaacaaaaggacagctttaaaaggaaataaattaacatttccaaaattaaaaatctaaccattaaaagtaaaatttcatgaacaaatttaggtcagattagaatcattgaaaagtaataaactgtatgtcagttataaaaaaaaattagaatagaatcaaatagttggaa

SEQ ID NO: 661665 - DNA, 673 bp, Homo sapiens
caagcttggcttgagacctgcccgacaatcttgtttactttttctgggaactgcacttcagactaagatgctttcattctatctcctcctttactaatggtgacacgtccatcatggtctgacagccttccttccctgccctggctccctctttttatttacttacaggtgatatccttaacaaatgtcttgagtgtttattctagtcttggcatctatttgttataagaccttgactaacacattggctaacatcatatacactgtgtggcattctrtttacgaagtgtccaatagaagccttggggctatttaaatatatttcagaattatatattcaacatatcaatctaatcaacatcttcaatcagaaattgatatccaagaaatagaccgtcctcctccacacttgcacatcttttacctctgttcttaggactataataaaatattgagagatttgggggcttttgtttatttattattttagcagaaaagcagaatggaattttactttagagagttcatattaggaataaaatgaaaatagaagaagagaagactgtggtaattttccagcagcaacatataggggttgtcaagtggattagaaagtagatatgagagatgctataaatataaattcagtggggctgggcaactggatggctaa

SEQ ID NO: 661666 - DNA, 673 bp, Homo sapiens
caagcttggcttgagacctgcccgacaatcttgtttactttttctgggaactgcacttcagactaagatgctttcattctatctcctcctttactaatggtgacacgtccatcatggtctgacagccttccttccctgccctggctccctctttttatttacttacaggtgatatccttaacaaatgtcttgagtgtttattctagtcttggcatctatttgttataagaccttgactaacacattggctaacatcatatacactgtgtggcattctatttacgaagtgtccaatagaagccttggggctatttaaatatatttcagaattatrtattcaacatatcaatctaatcaacatcttcaatcagaaattgatatccaagaaatagaccgtcctcctccacacttgcacatcttttacctctgttcttaggactataataaaatattgagagatttgggggcttttgtttatttattattttagcagaaaagcagaatggaattttactttagagagttcatattaggaataaaatgaaaatagaagaagagaagactgtggtaattttccagcagcaacatataggggttgtcaagtggattagaaagtagatatgagagatgctataaatataaattcagtggggctgggcaactggatggctaa

SEQ ID NO: 661667 - DNA, 609 bp, Homo sapiens
tttacatgtcagtacacttttcataataccacactctctgaacactgatagtatcataaatatatcatatttagagttatgtgtagtgtatatatacatacaaatatacaaacaattttattgcgaacatcctagacctactgtgaaccccaaatgataatagtttcagatttcttagacactataagttatgacacacaccagataaatagggccacactgcaaaagaattcatrtacttatcttttgcagagacagctggaaatccatgagaattatagatagggaagattttggaggtcaggaatcttgttaatcttgtcaactctgctgctgttacaattccgtatctctctagtttcagagtggtaaaggaaaatacttacacttcctttggaataccatcttttcttataatctttactgtcccatttctaagctatggtctgaccttcatcttgtctaggctttcttgttatgtacagttctctttcagcagtgaatgccagcaccactcgctggacacttaaacaacaattcagtgcagcatgtactatatcacttaacagattttcatgtcttcttaaccagctgaagagatgcttgatg

SEQ ID NO: 661668 - DNA, 634 bp, Homo sapiens
catgagtaatgtggaatatttctttcaatttcactacaaaatgtatggattttaataagactgttatatagcatctatcttagaagcaaaatctgaatcaaccatgtgtatcaagcaatctgactatgtattaggcaaatacagtcagaaacttgcattctggttacaaaaaaaatatgagtctcaacagaaattctttttccatgtttcagcaaaatatttaaggagttttttgtagtatgccaaataggagtgctgagataaagttaggttcgtcctataaaatgctatctctaatttatatggcctatgtagacacagtgttccttggcagaaggacataattttattcaggaaaatataaggaacaactctgtaacaaactatactttcagccccaaagaataggactgattctgggttagagttttgctttggaaatattttgttatatgttgggaattaaggtttattaagatagagtagatagatagctggctagatagataaatatacatgcatacatatgtataactacatatgctcactatctctttacataaatataactatatatayacacacacacacacacacacagatatgtaataagagagacagaatgaaaacaagt

SEQ ID NO: 661669 - DNA, 609 bp, Homo sapiens
tttacatgtcagtacacttttcataataccacactctctgaacactgatagtatcataaatatatcatatttagagttatgtgtagtgtatatatacatacaaatatacaaacaattttattgcgaacatcctagacctactgtgaaccccaaatgataatagtttcagatttcttagacactataagttatgacacacaccagataaatagggccacactgcaaaagaattcatgtacttatcttttgcagagacagctggaaatccatgagaattatagatagggaagattttggaggtcaggaatcttgttaatcttgtcaactctgctgctgttacaattccstatctctctagtttcagagtggtaaaggaaaatacttacacttcctttggaataccatcttttcttataatctttactgtcccatttctaagctatggtctgaccttcatcttgtctaggctttcttgttatgtacagttctctttcagcagtgaatgccagcaccactcgctggacacttaaacaacaattcagtgcagcatgtactatatcacttaacagattttcatgtcttcttaaccagctgaagagatgcttgatg

SEQ ID NO: 661670 - DNA, 639 bp, Homo sapiens
accactcgctggacacttaaacaacaattcagtgcagcatgtactatatcacttaacagattttcatgtcttcttaaccagctgaagagatgcttgatgcacaatattatattcatttttttctayatgatacctaacaatgtgctgagtgtatatttacagatcacgtctacacatactgttaaattgaatttattttttgaagattgacagtattctttgaaagggtatatgttctttacatttcatataggctacatagtgtcctgaaaattgctttttcacaaattgttctatttatgctaggtactcaactcacccatctctcctacagttcttattagaagtctgtgcaattgtttgcatatctgccccaccctgcaagtatcagagcaacttacaggatgtaggtggattaaaaaatctttccagtaagagagaacaaatacagcagggctcactctgccacctgtaataaacccactcctctatacagctcataccagaagtctttgctaagttacacaaccagagaggcagtgaaagatgggactaagttcaaagacaccactaggatctacaccaacactggagagaaaaaaatgcaaataaactggtcctgtgctataatttcagata

SEQ ID NO: 661671 - DNA, 557 bp, Homo sapiens
aacaatgtgtccattatcttcaacagcaatgtataactgcttttaaccacagcttatgatgataatttgtattcatccctacctcattgacatatcctttgctaactttccctgaatactatattgaaattaaatctagactggacgcagtggctcatgcccgtaatcccaacattttgggctctttaaaacttgcacatctttgtggccacccttgtcttactgaatcagaattttgggaaaatgaggactgggaatagttgtgagttatcattcaaatgtctaatagtcactgatctggaatctgtttgctgctcttcattttcttgaaccactaggaccccaaattttacttccatgcctcatttgaattaatttcatgattctcttgctttggtctttccaccattaaaacaataacaagaaataaacttgactttggccttcctaatattaatacctatagtaactgccrtactttttacattcaatcaaagttcagatcttactgtggcttggtctagaaattttcctcagaaatcttccttaaagaaaaa

SEQ ID NO: 661672 - DNA, 639 bp, Homo sapiens
accactcgctggacacttaaacaacaattcagtgcagcatgtactatatcacttaacagattttcatgtcttcttaaccagctgaagagatgcttgatgcacaatattatattcatttttttctatatgatacctaacaatgtgctgagtgtatatttacagatcacgtctacacatactgttaaattgaatttattttttgaagattgacagtattctttgaaagggtatatgttctttacatttcatataggctacatagtgtcctraaaattgctttttcacaaattgttctatttatgctaggtactcaactcacccatctctcctacagttcttattagaagtctgtgcaattgtttgcatatctgccccaccctgcaagtatcagagcaacttacaggatgtaggtggattaaaaaatctttccagtaagagagaacaaatacagcagggctcactctgccacctgtaataaacccactcctctatacagctcataccagaagtctttgctaagttacacaaccagagaggcagtgaaagatgggactaagttcaaagacaccactaggatctacaccaacactggagagaaaaaaatgcaaataaactggtcctgtgctataatttcagata

SEQ ID NO: 661673 - DNA, 590 bp, Homo sapiens
ttctggcattgaacccttggggtatagatttagtaaccggcagaaaaaaataataggaaataccatgctcccacaagttactcttatttgtcatgatctgaaacagtgttgatttgttttaaaaatmaaaatccccaaactcactgatgacccatgaactaagagtattttccatggagatttaagaaatgctcacctttactcacataatgagatctttgaggcaacatcaagcacatcagaatcctttaaatactagtattagcagagccatgtggcactccagttaggtcagtgtgggaatgtttggtcccataagtcgtccagagcatacctcttctatttgtgtccctgttgtctgtcttggaaaccagtgcccgaataatgaaagattaatgagatcatcttcagccctgctttcggcaatcacatttgtccctcatcattctgcttccccggccccgacatttagcctctcctcacactgctgtctgatattacaaattgtgctgggtaatttaccccagccaaaataggagatttagaagcatcggggagttctggaaatctatcctgcgcgtcacaaaatg

SEQ ID NO: 661674 - DNA, 590 bp, Homo sapiens
ttctggcattgaacccttggggtatagatttagtaaccggcagaaaaaaataataggaaataccatgctcccacaagttactcttatttgtcatgatctgaaacagtgttgatttgttttaaaaatcaaaatccccaaactcactgatgacccatgaactaagagtattttccatggagatttaagaaatgctcacytttactcacataatgagatctttgaggcaacatcaagcacatcagaatcctttaaatactagtattagcagagccatgtggcactccagttaggtcagtgtgggaatgtttggtcccataagtcgtccagagcatacctcttctatttgtgtccctgttgtctgtcttggaaaccagtgcccgaataatgaaagattaatgagatcatcttcagccctgctttcggcaatcacatttgtccctcatcattctgcttccccggccccgacatttagcctctcctcacactgctgtctgatattacaaattgtgctgggtaatttaccccagccaaaataggagatttagaagcatcggggagttctggaaatctatcctgcgcgtcacaaaatg

SEQ ID NO: 661675 - DNA, 590 bp, Homo sapiens
ttctggcattgaacccttggggtatagatttagtaaccggcagaaaaaaataataggaaataccatgctcccacaagttactcttatttgtcatgatctgaaacagtgttgatttgttttaaaaatcaaaatccccaaactcactgatgacccatgaactaagagtattttccatggagatttaagaaatgctcacctktactcacataatgagatctttgaggcaacatcaagcacatcagaatcctttaaatactagtattagcagagccatgtggcactccagttaggtcagtgtgggaatgtttggtcccataagtcgtccagagcatacctcttctatttgtgtccctgttgtctgtcttggaaaccagtgcccgaataatgaaagattaatgagatcatcttcagccctgctttcggcaatcacatttgtccctcatcattctgcttccccggccccgacatttagcctctcctcacactgctgtctgatattacaaattgtgctgggtaatttaccccagccaaaataggagatttagaagcatcggggagttctggaaatctatcctgcgcgtcacaaaatg

SEQ ID NO: 661676 - DNA, 617 bp, Homo sapiens
actctgttcatgtagaggagaatttgtcaaagagccatagaagtacttcatagacctctaagaaaggaatattttgcaactatatgaagaatcaggagaaaaaaatcaaagttcccatcatccgaattttttttttttttttttgagacagagttttgctcttattgcccaggctggagtacaatggcatgatctcagctcaccgcaacctcatgcctcccgagttcaagcgattctcccgcctcagcctcccaagtagctgggattacaggcatgcgccacccacgcctggctaattttgtatttttagtagagatagggtttctccatgttggtcaagctggtctctaactcccaacctcaggtgatccgccagcctyggcctcccaaggtgctgggattacaggcgtaagccaccacgcccagcccatcatctgatttaacagcagtaagaacttagacttaaaaatgctctattatacacatctggctgtaactatctagtttaatcctgattaacaattctgtgaggcagatattattattagtccattttacagataagaaaattgagttgaggagaggtcaagtaatttgctaacaccaggaagtggtag

SEQ ID NO: 661677 - DNA, 572 bp, Homo sapiens
atctcttcatttgctgacttctgatggggcttcttaaaagtatgctgaatttcactatccaggtcaaaatccatcaggaaatatctatcttgatgctgacaccaccactacattaagttgttggacattagaaagagacaactcatctactggaaatgaatcccagattctcttttgctttcctaattccttaaccttcagaaaatatgtccagattttccaggctctcaaaattattcaaatagagcaaaaaggatcggagagcgaaatcaggagaaacaatgttgtttgggtattttgactttaaaactataaaggctttcaaatcactttctggacttgtgagcttgaaattctttctcaataacactacaggtaataaaataaaaccagcatcaccttcagaagagtttrttatttctccttcctttgtgtgctaggaaggagcttgcttccccgatgccagctgtttcagaggcctggggcctgcttcacctctggggacattagctctaacctttccatctactggatttaatcatataaccatgtaattaaattccaatagtcaa

SEQ ID NO: 661678 - DNA, 500 bp, Homo sapiens
aaaattggggtttccatacactgcaggtaaatctgtaagttagtagtacaaatttcactgaaagaatatgacagtgtaaaataaaagcttacaaattcctttgctcaatttttccacctaattgaaatgcacaagcaaagcaatgtacatattgccttatatatgatactgaaaaaagacatctaatacccttcattggacccccaattaaataaatgttgttacattaataagataaaatattatgtttcaaaagcatattttataaaaataaattgctcaagtaggatgcaaatctgcttaaatgtattataccattttttattaagagtatgcacagagatatgaaaatggtaaaattagttagatctggctgataagaatatgggtaacttttattttktactttatgtactttcttcaagttgtcaataataagtatacactacaattacatagacaaagttatttacagaatgataccatggcattttcataac

SEQ ID NO: 661679 - DNA, 512 bp, Homo sapiens
aatattttcacatcatcttgaaatttagctacggtcactacaaagagctgtagatatgaaagaggtggcttaacaaactttaacaatgtcttcaaaactctctcttctccacaarctgttctgtaattctgatcgtaagtacatatactaacaggtgtttaaatgagagaccaaaatccaaccccaaccttgtgagttatttattttgtctaaaataaatgacacaaatataaattggcataaggttttatattatttagggataatttaaacatagtcttaaacgtacatcatatattatgatgctaaagttacgttggtatttctctccccaagaatagttttgaaaacatccccagccatgatcatgcatcatataaatatgtaaagtttgtgtagatgccaggaaaataagtgaaaaccaagaattattttcacctgtatcaaataatatggttattagtgagaaatcataatgatgattattattttcagaatgtttatcaaaactt

SEQ ID NO: 661680 - DNA, 512 bp, Homo sapiens
aatattttcacatcatcttgaaatttagctacggtcactacaaagagctgtagatatgaaagaggtggcttaacaaactttaacaatgtcttcaaaactctctcttctccacaaactgttctgtaattctgatcgtaagtacatatactaacaggtgtttaaatgagagaccaaaatccaaccccaaccttgtgagttatttattttgtctaaaataaatgacacaaatataarttggcataaggttttatattatttagggataatttaaacatagtcttaaacgtacatcatatattatgatgctaaagttacgttggtatttctctccccaagaatagttttgaaaacatccccagccatgatcatgcatcatataaatatgtaaagtttgtgtagatgccaggaaaataagtgaaaaccaagaattattttcacctgtatcaaataatatggttattagtgagaaatcataatgatgattattattttcagaatgtttatcaaaactt

SEQ ID NO: 661681 - DNA, 512 bp, Homo sapiens
aatattttcacatcatcttgaaatttagctacggtcactacaaagagctgtagatatgaaagaggtggcttaacaaactttaacaatgtcttcaaaactctctcttctccacaaactgttctgtaattctgatcgtaagtacatatactaacaggtgtttaaatgagagaccaaaatccaaccccaaccttgtgagttatttattttgtctaaaataaatgacacaaatataaattggcataaggttttatattatttagggataatttaaacatagtcttaaacgtacatcatatattatgatgctaaagttacgttggtatttctctccccaagaatagttttgaaaacatccccagccatgatcatgcatcatataaatatgtaaagtttgtgtagatgcmaggaaaataagtgaaaaccaagaattattttcacctgtatcaaataatatggttattagtgagaaatcataatgatgattattattttcagaatgtttatcaaaactt

SEQ ID NO: 661682 - DNA, 623 bp, Homo sapiens
aaacaactagcaaaagataattcagcaaaattgagataatattagtgaaagaaatgtaaaaatgttttgagatctgcagattggattatgccaactattattattatactcatatacagagttttaacgcctctaggaaacagcctcttcagtattttgtattctatgtcagcttaattttacttattgcacaattaaatctctcttaaacaattcaaggaaaatctttattctttcaataaggtttaaaagtgtaataaattggcagctctttttagaaattcttttctaataaaacattataagtggttagatcattaagcctggtttgaaaagcctrcatatacgggagaaaacctaccatagctgacacaatggaaacatctgctaaaccttctaacacagactcgcagagagaagaatatattcttttttggttttttagacggagttttactcttgttgcccaggctggaatgcaatggtgtgatcttggctcactgcagcctccacctcctgggttcaagctattctcctgcctctgcctcccgagtagctgggataacaggggcccgccaccatgcctatctaaatttttttgtatttttagtagagacgggatt

SEQ ID NO: 661683 - DNA, 623 bp, Homo sapiens
aaacaactagcaaaagataattcagcaaaattgagataatattagtgaaagaaatgtaaaaatgttttgagatctgcagattggattatgccaactattattattatactcatatacagagttttaacgcctctaggaaacagcctcttcagtattttgtattctatgtcagcttaattttacttattgcacaattaaatctctcttaaacaattcaaggaaaatctttattctttcaataaggtttaaaagtgtaataaattggcagctctttttagaaattcttttctaataaaacattataagtggttagatcattaagcctggtttgaaaagcctacrtatacgggagaaaacctaccatagctgacacaatggaaacatctgctaaaccttctaacacagactcgcagagagaagaatatattcttttttggttttttagacggagttttactcttgttgcccaggctggaatgcaatggtgtgatcttggctcactgcagcctccacctcctgggttcaagctattctcctgcctctgcctcccgagtagctgggataacaggggcccgccaccatgcctatctaaatttttttgtatttttagtagagacgggatt

SEQ ID NO: 661684 - DNA, 623 bp, Homo sapiens
aaacaactagcaaaagataattcagcaaaattgagataatattagtgaaagaaatgtaaaaatgttttgagatctgcagattggattatgccaactattattattatactcatatacagagttttaacgcctctaggaaacagcctcttcagtattttgtattctatgtcagcttaattttacttattgcacaattaaatctctcttaaacaattcaaggaaaatctttattctttcaataaggtttaaaagtgtaataaattggcagctctttttagaaattcttttctaataaaacattataagtggttagatcattaagcctggtttgaaaagcctacatatacrggagaaaacctaccatagctgacacaatggaaacatctgctaaaccttctaacacagactcgcagagagaagaatatattcttttttggttttttagacggagttttactcttgttgcccaggctggaatgcaatggtgtgatcttggctcactgcagcctccacctcctgggttcaagctattctcctgcctctgcctcccgagtagctgggataacaggggcccgccaccatgcctatctaaatttttttgtatttttagtagagacgggatt

SEQ ID NO: 661685 - DNA, 620 bp, Homo sapiens
ataagggaaaactgacacacagtgtgtggttaagagtatgagctcttgcattagaaaaacctggggtaaaataccagctctactacttagcagctcaagaacatggacagattgcttaacttctttgtgtctcagtttccttgtggcaagtaatactcaactcatgagtaattgttgtgataattaaatggaataattcatgtaaagtgtttaaccctaatcctggcatatattaggtgctgcacaagtgatcaataacattgttacttataatattattcattgcttatgatattatagtattattaattccctcatatgctaattatgggatttgattgcttatgaatttcataattaatttacacactcaatgatatttgttgagtatctastgcatatcctatcctgtgccaagctctgtgctcttttggagattagaatcttattgtgcagatgagacacatacactagaaatagctcaatagtaatgataaccacaagaataactataataataatgatagctaatgtttattgagagcttattatatgccaggtattgttacaaatattttacatagatgaaccgatttcacgttcataacaattttgagaca

SEQ ID NO: 661686 - DNA, 620 bp, Homo sapiens
ataagggaaaactgacacacagtgtgtggttaagagtatgagctcttgcattagaaaaacctggggtaaaataccagctctactacttagcagctcaagaacatggacagattgcttaacttctttgtgtctcagtttccttgtggcaagtaatactcaactcatgagtaattgttgtgataattaaatggaataattcatgtaaagtgtttaaccctaatcctggcatatattaggtgctgcacaagtgatcaataacattgttacttataatattattcattgcttatgatattatagtattattaattccctcatatgctaattatgggatttgattgcttatgaatttcataattaatttacacactcaatgatatttgttgagtatctactgcatatcctatcctgtgccaasctctgtgctcttttggagattagaatcttattgtgcagatgagacacatacactagaaatagctcaatagtaatgataaccacaagaataactataataataatgatagctaatgtttattgagagcttattatatgccaggtattgttacaaatattttacatagatgaaccgatttcacgttcataacaattttgagaca

SEQ ID NO: 661687 - DNA, 620 bp, Homo sapiens
ataagggaaaactgacacacagtgtgtggttaagagtatgagctcttgcattagaaaaacctggggtaaaataccagctctactacttagcagctcaagaacatggacagattgcttaacttctttgtgtctcagtttccttgtggcaagtaatactcaactcatgagtaattgttgtgataattaaatggaataattcatgtaaagtgtttaaccctaatcctggcatatattaggtgctgcacaagtgatcaataacattgttacttataatattattcattgcttatgatattatagtattattaattccctcatatgctaattatgggatttgattgcttatgaatttcataattaatttacacactcaatgatatttgttgagtatctactgcatatcctatcctgtgccaagctstgtgctcttttggagattagaatcttattgtgcagatgagacacatacactagaaatagctcaatagtaatgataaccacaagaataactataataataatgatagctaatgtttattgagagcttattatatgccaggtattgttacaaatattttacatagatgaaccgatttcacgttcataacaattttgagaca

SEQ ID NO: 661688 - DNA, 583 bp, Homo sapiens
actgggaaccaggggtccaggagtccttgaatggcgtccgcagagaccagagaacagcgtggagggtcggggtgggtctagggggaaaatggaaactgcctgtgagcacggagccaggatcctggtgtgctgcctctgtgcacctaaccgtagtactgtgcacttaggtcctcggggaagggcagttgaccaggtagacagggcatcctgagctccatgcctatttgagaaagccactagttctccacaatcagtggactcatgtgccccaatcccattcacgtggccaggtccagcctttggcagctgttcccgcctctccccytctctcctaagcacgtgatttataatgtggaaccctgtgtggggagaaatgaagtgtctgctacagccaaaacttggctccaggaaggcagatatcaactcacacacccgatgatggacagcgggacctcgtggtgcagcgtgtttacagcttacaagggtgagttgtgcgtatttcgaacttggcccggacgcctacttgcccaatcagcttgttgggcggtgtctcttctgatttagagctctggatctgccaatt

SEQ ID NO: 661689 - DNA, 583 bp, Homo sapiens
actgggaaccaggggtccaggagtccttgaatggcgtccgcagagaccagagaacagcgtggagggtcggggtgggtctagggggaaaatggaaactgcctgtgagcacggagccaggatcctggtgtgctgcctctgtgcacctaaccgtagtactgtgcacttaggtcctcggggaagggcagttgaccaggtagacagggcatcctgagctccatgcctatttgagaaagccactagttctccacaatcagtggactcatgtgccccaatcccattcacgtggccaggtccagcctttggcagctgttcccgcctctccccctctctcctaagcaygtgatttataatgtggaaccctgtgtggggagaaatgaagtgtctgctacagccaaaacttggctccaggaaggcagatatcaactcacacacccgatgatggacagcgggacctcgtggtgcagcgtgtttacagcttacaagggtgagttgtgcgtatttcgaacttggcccggacgcctacttgcccaatcagcttgttgggcggtgtctcttctgatttagagctctggatctgccaatt

SEQ ID NO: 661690 - DNA, 583 bp, Homo sapiens
actgggaaccaggggtccaggagtccttgaatggcgtccgcagagaccagagaacagcgtggagggtcggggtgggtctagggggaaaatggaaactgcctgtgagcacggagccaggatcctggtgtgctgcctctgtgcacctaaccgtagtactgtgcacttaggtcctcggggaagggcagttgaccaggtagacagggcatcctgagctccatgcctatttgagaaagccactagttctccacaatcagtggactcatgtgccccaatcccattcacgtggccaggtccagcctttggcagctgttcccgcctctccccctctctcctaagcacgtgatttataatgtggaaccctgtgtggggagaaatgaagtgtctgctacagccaaaacttggctccaggaaggcagatatcaactcacacacccgatgatggacagcgggacctcgtggtgcrgcgtgtttacagcttacaagggtgagttgtgcgtatttcgaacttggcccggacgcctacttgcccaatcagcttgttgggcggtgtctcttctgatttagagctctggatctgccaatt

SEQ ID NO: 661691 - DNA, 583 bp, Homo sapiens
actgggaaccaggggtccaggagtccttgaatggcgtccgcagagaccagagaacagcgtggagggtcggggtgggtctagggggaaaatggaaactgcctgtgagcacggagccaggatcctggtgtgctgcctctgtgcacctaaccgtagtactgtgcacttaggtcctcggggaagggcagttgaccaggtagacagggcatcctgagctccatgcctatttgagaaagccactagttctccacaatcagtggactcatgtgccccaatcccattcacgtggccaggtccagcctttggcagctgttcccgcctctccccctctctcctaagcacgtgatttataatgtggaaccctgtgtggggagaaatgaagtgtctgctacagccaaaacttggctccaggaaggcagatatcaactcacacacccgatgatggacagcgggacctcgtggtgcagcgtgtttacagcttacaagggtgagttgtgcgtatttcgaacttggccyggacgcctacttgcccaatcagcttgttgggcggtgtctcttctgatttagagctctggatctgccaatt

SEQ ID NO: 661692 - DNA, 512 bp, Homo sapiens
atggatgatacgtatattttggttttcatccatgattcctggctgtaagctcttgtaagccttgttatttcctaagtgactacagcagtaaaaatattttttgttaagatatttggtctttgtccttggttcctgaagtacctcctgaatgataaaggtgaaagataatcttttgytattttctattttttttcaaaaacgtctgttcttatgttaatgacatgatttttggaaaacccctagaaaccacaagacgggggaactggttgcaagagaaatggccatgtgcctagagaagtgtaatttttagttccatcccccaacctctggggagcagagagggggctgaaaattaagttgatcaccagtggtcaatgattcaatcaatcatgcctatgtaatgaagtctccataaaacccaaaaggacagggatcggagaggttgcaaatagccaaatgcatgggggcttacacattcatgtgccaggagggtggtgcaccccaactccatg

SEQ ID NO: 661693 - DNA, 512 bp, Homo sapiens
atggatgatacgtatattttggttttcatccatgattcctggctgtaagctcttgtaagccttgttatttcctaagtgactacagcagtaaaaatattttttgttaagatatttggtctttgtccttggttcctgaagtacctcctgaatgataaaggtgaaagataatcttttgctattttctattttttttcaaaaacgtctgttcttatgttaatgacatgatttttggaaaacccctagaaaccacaagacgggggaactggttgcaagagaaatggccatgtgcctagagaagtgtaatttttagttccatcccccaacctctggggagcagagagggggctgaaaattaagttgatcaccagtggtcaatgattcaatcaatcatgcctatgtaatgaagtctccataaaacccaaaaggacagggatyggagaggttgcaaatagccaaatgcatgggggcttacacattcatgtgccaggagggtggtgcaccccaactccatg

SEQ ID NO: 661694 - DNA, 457 bp, Homo sapiens
agtgattggatcatggggacattttctaacggcttagcaccatctccctagtgctgtgttgtgatagagttatcctgagatctgcttgtctaaaagtgtgtagcacctacctctgcgccccttttccttcttctccggccatgtgaagatatgtctgcttcccctttcccttccwccatgattgtaagtttcctgaggcctccccagaagcagaagtctatacagcctgcagcaccatgagccaattaagcctctcttctttataaattatccagcttcaggtatttctttttaatagtgtgagaatggactagtacaccacctgatgcacacacatactcagctgttacccaggacagccaagccaagttgactggatccttaacccgttccttggcttccaaccctcttggcctggccccatttctggcccccagcttgcttcttggacatgagg

SEQ ID NO: 661695 - DNA, 457 bp, Homo sapiens
agtgattggatcatggggacattttctaacggcttagcaccatctccctagtgctgtgttgtgatagagttatcctgagatctgcttgtctaaaagtgtgtagcacctacctctgcgccccttttccttcttctccggccatgtgaagatatgtctgcttcccctttcccttccaccatgattgtaagtttcctgaggcctccccagaagcagaagtctatacagcctgcagcaccatgagccaattaagcctctcttctttataaattatccagcttcaggtatttctttttaatagtgtgagaatggactagtacaccacctgatgcacacacatactcagctgttacccaggacagccaagccaarttgactggatccttaacccgttccttggcttccaaccctcttggcctggccccatttctggcccccagcttgcttcttggacatgagg

SEQ ID NO: 661696 - DNA, 506 bp, Homo sapiens
aaatacagcctttgacgtcactcagttgatcttgcatcttgaaagctcctataaaaccagaaaattaatggcaaatcatctaaaaacagctcagtagctctcagagctttgtgtcagccttgtcctccggaagccaagctgtagctgtggtagtgaccactgatgcatgggctcagctttccagaagcagggagcggtgcaggaacattgctccttcagtggccyctgctccgctgcgtggttgatgtatttctcaggtcttcctcataggggcgactgaatgtgtttgtgccgcagattaagtgtcttcctccagggagtttgtcctctggcactggcagacgcatcgcctgctgagagaggaagtgtgtttgggccaacttcaggaggagctttggaatctgctgggctcctcatttcataacaagcccgagcttctctgggtttcagttgggggggcactgccaatagggaaaaacagacagacagagagagacccaagaagg

SEQ ID NO: 661697 - DNA, 506 bp, Homo sapiens
aaatacagcctttgacgtcactcagttgatcttgcatcttgaaagctcctataaaaccagaaaattaatggcaaatcatctaaaaacagctcagtagctctcagagctttgtgtcagccttgtcctccggaagccaagctgtagctgtggtagtgaccactgatgcatgggctcagctttccagaagcagggagcggtgcaggaacattgctccttcagtggcctctgctccgctgcgtggttgatgtatttctcaggtcttcctcataggggcgactgaatgtgtttgtgccgcagattaagtgtcttyctccagggagtttgtcctctggcactggcagacgcatcgcctgctgagagaggaagtgtgtttgggccaacttcaggaggagctttggaatctgctgggctcctcatttcataacaagcccgagcttctctgggtttcagttgggggggcactgccaatagggaaaaacagacagacagagagagacccaagaagg

SEQ ID NO: 661698 - DNA, 579 bp, Homo sapiens
gctcattttttttttctgtgctgaataacatatcattgtctggatgtatcacagtttatttattcattcacctactgaagaacatcttggatgcttccaagttttgcaaaattatgaataaagctgctataaacattcatgtgcaggtttatatgtggacataagttttaaacatatttgggtaaataccaagaaacatgattgctgaatcatatggtaagactatgtttasttttgtaagaaactttcaaactgtctgttttccaaagtggcagcaccattatgtattcccatcagcgatgaatgagaatttctgttgttccacatccttgccaacacttggcggtgttagtattttggagtttgactattctaacaggtgtgtagtggtatctgtttaaatgtatctcttttgatgttttaaaattttcaattgacaaatggcatatattgctgaacaccttttcatatgcttaattctcataggaatatcttctttggtaagatgtgtgttcagatcttttgtgcatttttttaattgttgttttaagagttctttttagtttttagatgatagta

SEQ ID NO: 661699 - DNA, 579 bp, Homo sapiens
gctcattttttttttctgtgctgaataacatatcattgtctggatgtatcacagtttatttattcattcacctactgaagaacatcttggatgcttccaagttttgcaaaattatgaataaagctgctataaacattcatgtgcaggtttatatgtggacataagttttaaacatatttgggtaaataccaagaaacatgattgctgaatcatatggtaagactatgtttacttttgtaagaaactttcaaactgtctgttttccaaagtggcagcaccattatgtattcccatcagcgatgaatgagaatttctgttgttccacatccttgccaacacttggcggtgttagtattttggagtttgactattctaayaggtgtgtagtggtatctgtttaaatgtatctcttttgatgttttaaaattttcaattgacaaatggcatatattgctgaacaccttttcatatgcttaattctcataggaatatcttctttggtaagatgtgtgttcagatcttttgtgcatttttttaattgttgttttaagagttctttttagtttttagatgatagta

SEQ ID NO: 661700 - DNA, 535 bp, Homo sapiens
acagaggattatactagtgacaccataatgatgcaaacatcagaattcagaatttaggaaactctataagacaaacaatctgtttttttatataaataaatttgacttcaacagattaaaaaaaggagagggaaatgtgtagattaagagacacattaacaaarcacaaagtgtggaccttctttggtcctaattctaagaaaccagctggagagagggtgggcattgagtggactggatatttgctgattttgagaaatcatgttaggttttatcaggtgtgataatgggtgatagttttgttgaattaaaaaatatgttgtcttttagagacataccctgaaatatttatggacaaaattatacattttggatttgcttcaaaataatccagtggggccaggagtttgctgttaaaagagagatgtagaagaaacaagggtggtgataagttaataattactctagccgagttgtgggtaaatgggggaattattatgctatttacctgtttttttgtatgtttgagtttttc

SEQ ID NO: 661701 - DNA, 535 bp, Homo sapiens
acagaggattatactagtgacaccataatgatgcaaacatcagaattcagaatttaggaaactctataagacaaacaatctgtttttttatataaataaatttgacttcaacagattaaaaaaaggagagggaaatgtgtagattaagagacacattaacaaagcacaaagtgtggaccttctttggtcctaattctaagaaaccagctggagagagggtgggcattgagtggactggatatttgctgattttgagaaatcatgttaggttttatcaggtgtgataatgggtgatagttttgttgaattaaaaaatatgttgtcttttagagacataccctgaaatatttatggacaaaattatacattttggatttgcttcaaaataatccagtggggccaggagtttgctgttaaaagagagatgtagaagaaacaagggtggtgataagttaataattactctagccragttgtgggtaaatgggggaattattatgctatttacctgtttttttgtatgtttgagtttttc

SEQ ID NO: 661702 - DNA, 589 bp, Homo sapiens
ggcatggatgtggtgaaatggaaacacttttacactcttggtgggaatgtaaactagtacaaccactatggaaaacagtgtggagagtccttaaggaactaaaaatagatctaccatttgatccaggaatcccacccctgggcatctacccagcagaaaagaagtcatttaatgcaagtgtgtatatacacacaccatggaatactactcagccataaaaaggaatgaaataatggcatttgcagcaacctggatggaattggagcccattattctaagtgaagtaactgrggaatggaaaaccaaatattgtaattttcacttattagtgggatctaagctatgaggactcaaaggcataaaatgatacaatggactttggggacttgggggaaagggtgggagggggtgagggataaaagactacacattacagtgtacactgcttgggtgatgggtgcactaaaatctcagaaatcaccgcttaagaacttattcacataaacaaacaccacctgttccccaaaacctactgaaaaaaaaaaaaaacacccaaatcagtaaagccaggcatggtggtgcatgcctg

SEQ ID NO: 661703 - DNA, 541 bp, Homo sapiens
tttactatgtacccataaaaattaaaaacgaaaacaacaaattgtattcaaaatctaaaaataaataaataaatactaagcaaatgaaagctcaaaagaaaaaacccaccatgttgttaaagggttaactggagactactgcaggaaattcatattccaaaaatattgaacattakttttgacttatttcttgagctaaggttttctcatataattactttccaaaactacattgtcttaattttaaaatatgcacaagtgacatttattagtcacataacttactttcactatgtctgaaaatttaaatctcaccaagataaacactgttaaatattggtggctgaaattacaatactatctttcaacagtggaggcagcaagcagagtgaataataattttattttctgtaaattcactattgtcactgtatatattaggaaagtgcatcattgagcttagcatactaaagagaagagattcactatgtaagcggcggcaaaacacaggaagcactgtgctagttctttctaccctgca

SEQ ID NO: 661704 - DNA, 577 bp, Homo sapiens
ttgtgcagggagactcctgtttttcaaaaccatcagatttcgtgagacttattcactgtcatgagaacagcatgagaaagacctgccccatgattcaattacctcccatcaggtccctcccaaaatacatgggaattcaagatgagatttgggtggggacacagccaaaccatatcaggctctaatcctgtctgactgatgccctcctaaaaagaggagattaggacatagacatgtatagagtaaaggccatgagaagccacaagacaaagtggccatctgcaagacaaggacagagggctcggaagaaacaaaccctgctgagaccttgatcttggacttccagcttccagctatgagggaatacatttttgttgtttaagccacccagtctgtggtattttgctatggcagctcagcaaacgaatacartcttctataactgtgtttaaagccaggttatttccttgtgagtttatagaggcctaggactaagattggattcatctatgcttcctcatcatctaagcagagcctggcccagagtaggtgtatgggaaatgtttgttgaatttaa

SEQ ID NO: 661705 - DNA, 583 bp, Homo sapiens
attgacagtactgtactgtatttatcaatgacataagtttaagccatctgtttacaagaggaatggctatctgaaatggtgggttatcgcagctgcagacctcaatctacagtatatatcaagcaatttgactttttcttgtaatatcatgacttttctctgcttattgggagcacttccagcaccactagtggcactttrtgtgggttttcttgttatcaaggtttatggtattgaatcaaatatgatgaaagatatgtgagaaccatgagatcacttttcactgagatctgcaatttactggagagaggaactgcttacgtggagatgattagcgtcacatggcattttaaatagcaacaggaggtggctaagaaatgattacagtcatcagtatgtactacagttaattttatgcagttatgatttaatattgcatctttacatttgtttacatttctcttgactgtgaatggcaccatgtaaggcctgtaagtgtttgcgtgtgtaaattttgataaattttaacttcttatggtagatttatgtatattttatggtggtaaatgataaaataggctag

SEQ ID NO: 661706 - DNA, 517 bp, Homo sapiens
catttgttcacttttggaagtaagtgagatgcatgccatggtttttttttttttttttttttctttttttccccaaagaaccctatagtcataaccagagaagatgctgacctgatttctccaaagatggtatagagggtgaacagcattcattaaattcacatgcagaggatgttcttacaatagaggacttttytgaccaattttaaagctgtatgtaacagtgctttatactacaaatagaatgcaacagaatggccctttgtgataagaatcttatttgcaacgactgtttaaatgccctatttatttgttttcaaggttacaattagaactacatgaccacacaacttttctggaaggcataaaactgctgttggagcccagcccctccaacactttggcatgcacaatttgaagaatgcctgggatcccatatgtttcttcattcctcctagacagcgttgacatttggggatttattcttagagtttgcttctttgaacatgtttggttc

SEQ ID NO: 661707 - DNA, 508 bp, Homo sapiens
tcacttttggaagtaagtgagatgcatgccatggtttttttttttttttttttttctttttttccccaaagaaccctatagtcataaccagagaagatgctgacctgatttctccaaagatggtatagagggtgaacagcattcattaaattcacatgcagaggatgttcttacaatagaggacttttttgaccaattttaaagctgtatgtaacagtgctttatactacaaatagaatgcaacagaatggccctttgtgataaraatcttatttgcaacgactgtttaaatgccctatttatttgttttcaaggttacaattagaactacatgaccacacaacttttctggaaggcataaaactgctgttggagcccagcccctccaacactttggcatgcacaatttgaagaatgcctgggatcccatatgtttcttcattcctcctagacagcgttgacatttggggatttattcttagagtttgcttctttgaacatgtttggt

SEQ ID NO: 661708 - DNA, 517 bp, Homo sapiens
catttgttcacttttggaagtaagtgagatgcatgccatggtttttttttttttttttttttctttttttccccaaagaaccctatagtcataaccagagaagatgctgacctgatttctccaaagatggtatagagggtgaacagcattcattaaattcacatgcagaggatgttcttacaatagaggacttttttgaccaattttaaagctgtatgtaacagtgctttatactacaaatagaatgcaacagaatggccctttgtgataagaatcttatttgcaacgactgtttaaatgccctatttatttgttttcaaggttacaattagaactacatgaccacacaacttttctggaaggcataaaactgctgttggagcccagcccctccaacactttggcatgcayaatttgaagaatgcctgggatcccatatgtttcttcattcctcctagacagcgttgacatttggggatttattcttagagtttgcttctttgaacatgtttggttc

SEQ ID NO: 661709 - DNA, 503 bp, Homo sapiens
tggactgtttgtaacggtgccgctgctgtccgttctcaacgcctggaaattggggggtttgttagaggtgattcgtgccctgcyccaccctggcgcatcttcgcccccacagcctttaccgtttttccatcgctaacactgccctcctcactccccctctctcgggtgtgaattattcaccctcttcccctactcttcacatcaagtgcaacctttcccgcaactttgcagcggtggcgggctcgcggatcgcctcctgcgctcagcggtcctgggggaaactcccctgggcggccgcacgctcccccagacgccaagcccggcccgggtcgcaggggccattccgggcgccggctgtgcgctcggacttcagggctcgcgctcccgctccggggtggggtaagggcggtgcggaaagcgccagtgttcaggaaggtttcaggcgccggagcccggaggggggcggtagcagcgtcaggtggctgctctgcgtccccgcgcgc

SEQ ID NO: 661710 - DNA, 567 bp, Homo sapiens
gcacccagcactcccaatctatttaacaattgaagaaacagaggctggccttgtctttttacctgaaccccaagaaaagctctttctgatacaataycattttcttcttatgaaaaggtcagatcttacagtgagagtcagccaaacatagacatagatatagagagatacccagataatacacagtcacataggtaaacactcagctggtcaggcatccacccagaaaactgaaaagaggaatatcctacttcttcttttttaggatttgtctgtaaagtgtgtccaccaccctacagacagagaggaagcaatctaactctttttctctgtcttgcacacaaggagcaaaacagagatgtaggaaacaaaacaaaacaaaacacacagagcagagagaaaggggtggggtgggagagagagagagagagattatgggacatgcaagggaaatggacacaaagagaaaatgtcagacatttatttgtccatgggtatcaccaatgaactgaaatctcagccagttacaaatttaccagaacatttttttgatgatgtgaaacaaaa

SEQ ID NO: 661711 - DNA, 591 bp, Homo sapiens
tgcattagattcccacactgtgttatataatgaatgcagcacattgctgatagagggatgcttattctaagatactgttatcttcactagaaattgccctctttgtttatcttttgcttgattccagaagtaggatgtgtaagacatccatctacctaggcaccttgtractgacttactaaaaggatcatataaacattatttttaatagaagggcgtagttatgattattttaattgatagcgactgagtagatttcctaaagaagccctttagtttagtcagtgtttatctttttctttccttgtgagtcacagccgagtttcttagcttggaggaacaatgcttctgcattctccagagtgtagcctaggaaaaggttgtgctgttcaccaaagtactgtagttagtatttaccacaagaggtcactctgggttctgtcacaggtgaaccaagtagttaatatttttctctttttctgttctcccacctcccccttcccccaccttgcttgccaccccccaatttgactgggagggagtcaatgtagttagttggtgctcttggaagaaaatatctaaaatgtaaga

SEQ ID NO: 661712 - DNA, 525 bp, Homo sapiens
tggtctgctggcatttatttttattttttaaatttgggggaaaattaaagcacaatgaktttatttttatacatttacaagcattgaaaaaatagaggagttcctcaatgggggttaaagagtctcagaataaagactccgaaatacaacgctgatccttttgcttggctctcatgccctttctagttaattatccattaatgcaacaccattttattgagtacctactatgtgctaggcagggatctagcactagggattcataatgaacacagtgacaaaaacaatgtttctcctgtttttctgtggagggcatgtgcatatttataagtttctagaggcctgtattagagtcctggctctgacacttactagctcggtgacttaacttacttgtacctagtttccttatctataaaatacaagtaataatagtacctagtttatggggttagagtgaggattaagttaggcagtacatgtaagtacggagaacggtgcctggcacataaataagcattatat

SEQ ID NO: 661713 - DNA, 490 bp, Homo sapiens
tcaatgggggttaaagagtctcagaataaagactccgaaatacaacgctgatccttttgcttggctctcatgccctttctagttaattatccattaatgcaacaccattttattgagtacctactatgtgctaggcagggatctagcactagggattcataatgaacacagtgacaaaaacaatgtttctcctgtttttctgtggagggcatgtgcatatttataagtttctagaggcctgtattagagtcctggctctgayacttactagctcggtgacttaacttacttgtacctagtttccttatctataaaatacaagtaataatagtacctagtttatggggttagagtgaggattaagttaggcagtacatgtaagtacggagaacggtgcctggcacataaataagcattatatcatgccagtagttattattatcatttagttgtttaaatatttgaatgcactttctatagttgatgtttt

SEQ ID NO: 661714 - DNA, 668 bp, Homo sapiens
gcaggtatcttttttgtgtaaagatttattttcttttggtacatatccagtagcaggactgccagatcaaatggtagttctatttttagttgtttgagaaatctccatattgttttccattgaggttgtactaacctacattcccaccaacagtgtacaagagttcccttttctccacatccttaccaacatctgctattttttgtctttttaatggccattctgattgttgtgagatggtatctcaytgtagttttaatttgcatttctctgatgattagtgatgtcaagtattttttcatatactgttggccatttgtatgtattcttttgaaaaatatctattcatgtcctttgcccactttttaatggagttattttgttgttgttgaattgggtgccttataaattctagatattagtcctctgttgaataaatagtttgcagatactttcttcccttcttcaggtcatctgttcactctgttggttctttcttttgctgtatagaagcttttagtttaattaagttccatatgtctgttttcatttttgttgcctcagcttttgaggtctttgtcatgaattctttgcctacaccaatgtccagaagagtttttcctagattttctcctagtatttttataacttcaagtcttatgtttaag

SEQ ID NO: 661715 - DNA, 564 bp, Homo sapiens
gtaatttgtgtctttacccttttttctcagttagcctggctagaggtttactaactttaatgacctgttcaaagaaccagctttgggtttttgtgattttctctaatgttgtcctgttgcccagttcattgatttctgttgtaaggtttattattccttgtcttcagtttgctttggtttaaattgtttttctttatctagttttctaaggtagaatcttagattattgattttatgtctttcttcttttctaatatatgcatttaatgttacatatttccctctaagcactgcttttgctgcatctcacaaatttgataaattgtattttcatttttctttagttaaaaatatttttctaacttatcttaaggctgcttctttgatttgtttagaaacatgtttcatttccaaatatttcrggatcttccagatatctttctattactcatttctagtttaattccactttggtctgataacatactttttaagatttatatttttttaaatttattaaggtagttttatggcccagaatgttatctctctggtgaatgctcc

SEQ ID NO: 661716 - DNA, 564 bp, Homo sapiens
gtaatttgtgtctttacccttttttctcagttagcctggctagaggtttactaactttaatgacctgttcaaagaaccagctttgggtttttgtgattttctctaatgttgtcctgttgcccagttcattgatttctgttgtaaggtttattattccttgtcttcagtttgctttggtttaaattgtttttctttatctagttttctaaggtagaatcttagattattgattttatgtctttcttcttttctaatatatgcatttaatgttacatatttccctctaagcactgcttttgctgcatctcacaaatttgataaattgtattttcatttttctttagttaaaaatatttttctaacttatcttaaggctgcttctttgatttgtttagaaacatgtttcatttccaaatatttcaggatcttccagatatctttctrttactcatttctagtttaattccactttggtctgataacatactttttaagatttatatttttttaaatttattaaggtagttttatggcccagaatgttatctctctggtgaatgctcc

SEQ ID NO: 661717 - DNA, 612 bp, Homo sapiens
aaagccaaagaattgtttaaatgactcataagttttttaagaagaaataaaacacttcctccattctcaacgtttctaatgttcaaaatcacagtacactaaataaatatgagttttactatkatatcatctccctgcattgataaccaacagtaagagagtttttattgttttgacaaacatttttaaagatgctaaaaccatcataatttttattgagtattaagatagtattatgtggtttcagcttgcatggaccttatgttcccatactatcattaaaaaagtgaggattgcatatgatacatataatgcattgacattctcatcatttcagggaattttcttaagataggtacaagtgtggctaatggaagggaagtaaagatggcatcttgaaggaatcatacattattacagtggttagaggaacatacaaaacatagattaaggagtgaatgtccatattccacaaaaactttctaatgtttgacattctctatttttctaagagaaccttggcaaaagtctgatcatctaaataacaaaacttgcccaagaactacatgtctctaaaactccattctcaatgctttcaaatcatcagttgta

SEQ ID NO: 661718 - DNA, 467 bp, Homo sapiens
cctgttgttttttaaagttgagtgaccaggatctacactggaaaarttgtagccaaatatagtaggctaattttcccaataaaatatatctcttcacagtggcagagagaaatggcacagaccttggtgacagacctaggtgtgaattttggctttattccgtactaaatgtaacacttaactgtttactggctttgtcccatattaactgtaagatctcaatggaatagatgatgctatttgcctcattcataagatgggttcagtaataacttccttgtagagttggtgagttatgtatatgtgtacagtacatctgcatagcacatacctcaacaaaaactagtcagtgcatttgcaaattatgcctttgacaaaggactaatgtccagaatcaacaaggaactcaactcagcaagaataaaaacaaataaccccattaaaagctgggcaaaagacatgaatga

SEQ ID NO: 661719 - DNA, 467 bp, Homo sapiens
cctgttgttttttaaagttgagtgaccaggatctacactggaaaagttgtagccaaatatagtaggctaattttcccaataaaatatatctcttcacagtggcagagagaaatggcacagaccttggtgacagacctaggtgtgaattttggctttattccgtactaaatgtaacacttaactgtttactggctttgtcccatattaactgtaagatctcaatggaatagatgatgctatttgcctcattcataagatrggttcagtaataacttccttgtagagttggtgagttatgtatatgtgtacagtacatctgcatagcacatacctcaacaaaaactagtcagtgcatttgcaaattatgcctttgacaaaggactaatgtccagaatcaacaaggaactcaactcagcaagaataaaaacaaataaccccattaaaagctgggcaaaagacatgaatga

SEQ ID NO: 661720 - DNA, 596 bp, Homo sapiens
gattttctgtctagtacttctatcagttagtgagaggtgagtgtcaaaatccccaactctaactgtggatttttcagtttcttctttcaggtccatctgtttgktttatatatattgaggctctgttgtttggtgagcacatatttagaatcatatgtcttcctgatggattgatccttctattattaagtaatgtgcctctttttctcattcactttattagatattagtgtatacactcctttttgtagaattcgaagtgaatttcttgtaaacagcatatagatgggctgtgttttattatataatctatcactctctgtcttttgatttgtatatttgggctatttacatttaaggtaattattgatatattaaagcttaagtggagaaggcaatatttgtttttatttttatgttttattgaacacttttaattctgcttgaatttcttgttagactagagcttctgtgaaggagagaagctatagcttagtattttgacttggcactagcctatgactataaaataaatttgaatttcattttaagtacccaatgtatagtgctcaagcctcaggcacctgactgtcata

SEQ ID NO: 661721 - DNA, 584 bp, Homo sapiens
gtaaacagtttcccctgccaagagaacgcttgcagatatgtacatcaagattgatcagaaaagatgcctgcttctgaccaagatgaggtcatggagaccagctttatccttctacctaaaacaattaaaaattggataaaatatatgcaaccgctgttttcaagacattgaatttcaggcaatgaaggccaataatctctgaatgatgggaaacagatggtccaagtctcacagtcaccccagcttattcctggagagagagtttcctgtgtgcagcacaagcagaggggactcacacagagtctgattccctgaggtgaagagatagagctaagaatgtagaaaaaccaatgtggttagatgtcagtgggtagagtgccggagaggagagaactatacagagagagagagaaayggagagatcttctgagcacctgtcttgagtattcaaaaagtattgatgattataaacatgtgaggaaactacccagcgccctggaaagagccttcttacatgattattggtatctgagactcacacagtactggaaataatgcttattcacaccagcaggacagaaaaa

SEQ ID NO: 661722 - DNA, 491 bp, Homo sapiens
ccagggaaatgcaaatcaaaaccttatacctattagggtagcactgaccgaaacaaaagataagtgttggcaagagtttggagacattggaaaccttgtacactgctactgagaatgtaaaatgtctctatgtaaccactatgtaaaagagtatacagttccctamaaaagaattttttttttctttttttgctctgtcacccaggctggagtgcagtggcacaaacatagctcatggcagcctcaatttcttgggctcaggtgatcctcccacctcagtcttcctagtagctgggatcacaggcatgcaccactatgcctagctaatttttgtattttgtgtagggatggggtttcaccatgttgtccaggctggtcttgcactcctaggttcaagcaatccactcacatcaccctcccaaagtgctgggattacagatgtgagccaccatgcccagcccctcaaaagatcaaaaatagaactaccatat

SEQ ID NO: 661723 - DNA, 536 bp, Homo sapiens
tacatgtcactcttgaaattataagatgcctttttttttcaattaacgtatacattttacaataaatcttgtttcctctgtgtcttctaagctgaaaaaaaaagctttttctggctatatctaaatttattggttgattaaatatctttctacttaactttgtgtatataagctgattttagaagtatggccagtttttggtttgctgggattttttttttttttttttaaagaaaattgactctccttgtagcagacatgtatctttaaaaatccattcttagacaaggcagcaagagataaaaggaaaaaatccatagtcgaatttctgtcctgacttatgaatatgaaactttcattttcaaagtacrtactttccaaatcagtaggccggagagctagtgtttctgacattgcctacacaaacctataatatggcagttggaccagtgcccaagctaaacagtagcaaaggcaaagcagcacagctcctcatgttagcaatttctggtgataaattatctgtgttctaggaa

SEQ ID NO: 661724 - DNA, 595 bp, Homo sapiens
atctggaggctggtttttttttcatatttacacatttatacatgaatcactgcccttcctgtcacctttaattctgaagctcaattcatatccttttcttcaaaaactttagcactttttacataaacaacagatggtttgttttcaaaaggcagtgtgaattttgaagtcaagtcttttattttgcatgyagtctttgaaaatggtttcaaagtgttagaaattcatgttggcttctatctgcttgtatgaacagtttgatgtatgatattctggatgactctttttgtggatagatcttccttccaactataataagatttcttattgcattcccataactcagtttagctctgtctgagttttcctcatccctccttgtagaatctttcacagcaggtcctgcctgttgcttcaactaaagctctttaactctatttgtagtgccatctgcccagttactacaattgaagggctcaacttctggttgcaaagagttgttggctcaacatattgatttataaatcttatgatgataaattgacatatagagcaatatgattgaacatttagcttgtcttaattaccatcaacc

SEQ ID NO: 661725 - DNA, 567 bp, Homo sapiens
cttaggagagacaggtacaaagtctcaggagtaggaactgactacctgacaatcttgcctggatctgctgctcgaaccagtgaagacaaccatatgtctgccactggatgctgtagaatgaaagaaaaaggctctggcaaaagaaactccagtctgctttagcttccacagtggaaagggcaggtgtctggatgaccctcccatgaagaaccctytcagtaggagagaggtgattccacaaaagcaatcagagaattttagaaaataatgtttggggatcaataatggcaggtgtttgtcaaaatcatgtagtgttaagtgtaaactcctgctgcatattattttcaaacatgaaggcacaacttggtacccacttattaaagaagattctggggaagtagagacactgaccccacctttagtgtgtcttgttttcagggtcgcatcggggctctgctgtgggtttttgagtaaataaaaaaactctaggttgtcatcctttcctcaataagatgaggttttatcaaatgatcccttttgtcttgtcaaggtccccttttctaggaa

SEQ ID NO: 661726 - DNA, 432 bp, Homo sapiens
gacacaggactgaaattcctaggcaacggctagtgctaggctgggcttagagtcagtgaactagcatagcaagtgacctagggagacagcagctggcatggctaagggagtgcttgtgcatccctcccccagtcccaggcagtgcagctctccttaaggagaatgaagagtaaagaggactttgtcttkccccttggataccagctcagctacagcagaataaggcactgagcagagtcatgaggcccccatcccaagccctagctcctggacatttctagatacatcctgggctaactggcaacccactgccttgaagggaaggactcagtcttggcaggattcatcacctgctgactaaagagcccttggttcctgaatagctaacagcaatacccgaggagtatgccacaggccttgggctctgagaca

SEQ ID NO: 661727 - DNA, 573 bp, Homo sapiens
tgttgaaacaaatgataatggaaacaccacataccaaaacctatgggacacagtgaaagcagtactaggaggaaagtgtatagctataagtgcctatgttaaaaaagaaaaaaaaaaagctaaaaataacctaatgatgcatcttaactagaaaaacaagagtaaactgaacccaaaattagtagaagaaataaaaatcagagmaaaaataagtgaatttgaaatgaagaaaacataaaagatcaacaaaacataaactggttttttgaaaagataaaattgacaaaactttagccagactaacaaaaaatagagaatatccaaataaaatcagagatgaaaaaggagacattacaacttataccacagaaattcaaaagatcattagtggctactatataccaataaattggaaagtctatgtattagggttctctagagggacataactaatagaatacatatatatatatgtacatatatacatatatatatgagcttattaagtattaactcacacgatcacaaggtcccacaataggccatctgcaagctgagcagcaaggagagcca

SEQ ID NO: 661728 - DNA, 541 bp, Homo sapiens
gagacattacaacttataccacagaaattcaaaagatcattagtggctactatataccaataaattggaaagtctatgtattagggttctctagagggacataactaatagaatacatatatatatatgtacatatatacatatatatatgagcttattaagtattaactcacacgatcacaaggtcccacaataggccatctgcaagctgagcagcaaggagagccagtccaagtccccaaactgaagaacttggagtccgatgtttgagggcaggaagcrtccagcacgggagaaagatgtaggctgggaagctaggccagtctagcctttttgtgtttttctacctgctttatattctagctgtgctggcagctgattagatgctgcccacccagattaagggtgggcctgcctttcccagcccactaattcaaatgctaacttcctttggcaacaccatcacagacacacccaagatgaataatttgcatccttcagtccaatcaagttgacactcagtattaaccatcacaggtcc

SEQ ID NO: 661729 - DNA, 541 bp, Homo sapiens
gagacattacaacttataccacagaaattcaaaagatcattagtggctactatataccaataaattggaaagtctatgtattagggttctctagagggacataactaatagaatacatatatatatatgtacatatatacatatatatatgagcttattaagtattaactcacacgatcacaaggtcccacaataggccatctgcaagctgagcagcaaggagagccagtccaagtccccaaactgaagaacttggagtccgatgtttgagggcaggaagcgtccagcacgggagaaagatgtaggctgggaagctaggccagtctagcctttttgtgtttttctacctgctttatattctagctgtgctggcagctgattagatgctgcccacccarattaagggtgggcctgcctttcccagcccactaattcaaatgctaacttcctttggcaacaccatcacagacacacccaagatgaataatttgcatccttcagtccaatcaagttgacactcagtattaaccatcacaggtcc

SEQ ID NO: 661730 - DNA, 571 bp, Homo sapiens
gggacatagtgagaagtgaccagaagacaagagtgcgagccttctgttatgcctggacagtgccaccagagggctccttggtctagcggtaatgccagcatctgggaagacacccattgccaagtggaccatggtctagcggtagcatcagtgtcaaggaaaaacacctgctacttagcagaccrggaaagggagtctccctttccctgggggagtctagagaagactctactcctccacctcttgtggagggcctgccatcagttgggcctgcccgcagttatctggaggcctaaccatctccctgtgatgctgtgcttcagtggtcacgctcctagtccgctttcatgttccatcctatacacctggctctgccttttagataacagtggcaaattagtgaaagtactaaaagtctctgatatgcagaaataatggtgtaagctgtctctctctctctccctctctctctctgcctcagctgccaggcagggaagggccccctgtccagtggacacatgacccacatgaccttacctatcattggagatggctcacactctttacccta

SEQ ID NO: 661731 - DNA, 571 bp, Homo sapiens
gggacatagtgagaagtgaccagaagacaagagtgcgagccttctgttatgcctggacagtgccaccagagggctccttggtctagcggtaatgccagcatctgggaagacacccattgccaagtggaccatggtctagcggtagcatcagtgtcaaggaaaaacacctgctacttagcagaccgggaaagggagtctccctttccctgggggagtctagagaagactctactcctccacctcttgtggagggcctgccatcagttgggcctgcccgcagttatctggaggcctaaccatctccctgtgatgctgtgcttcagtggtcacgctcctagtccgctttcatgttccatcctatacacctggctctgccttttagataacagtggcaaattagtgaaagtactaaaagtctctgatatgcagaaataatggtgtaagctgtctctctctctctccctctctctctctgcctcagctgccaggcagggaagggccccctgtccagtggacacrtgacccacatgaccttacctatcattggagatggctcacactctttacccta

SEQ ID NO: 661732 - DNA, 443 bp, Homo sapiens
aagccttgttgaaaatatcaaataggcttcttttttccaagataatatttttctttggaatgtttttaaatttttcagaaaagttgcaatgataatacagagagttcccgtaacccctcactcagcttcctcactcagttaacacttttcattagcatggtacatttgccagaaatgaagaaaccaacactggtgcrttataattaattaaactctagattttatttggatttcaccagtttttcaattaaggttctcattctgttctaagacccaatccagagtaccagattgcatttacttgtcatgtctctcaggtaggcttttagtgcattaaacttgaaaagttcaattttataggaacttcctggcacacattttagggcttggatcagattacatttgaaaatttaactgctagttttcaaggtgactaaggatta

SEQ ID NO: 661733 - DNA, 556 bp, Homo sapiens
ataatgtctgtgatctgcttaaagtaattcaggaagggtgtgcttgtgtgtgtgctgatggaggtggaggtagcggtggtgcttaggggagtacaaaggaaacaagattggtcatgggctgatatttgctgtgctgagtacatgtagattaattayactattgtctctattgtgtatatttcaaagttttcataaggaaatgtttgagttaaaataaaatttcaggccggcgcagtggctcacacctgtaatcccagcactttgggaggctgaggcaggcggatcacgagcttaggagatcgagaccctcttggtcaacatggtgaaacccgtttctactaaaaatacaaaaattagctggatgtgatggcgcatgcctgtagtcccagctactcgggaggctgaggcaggagaatcacttgaaccagggagtcggaggttgcagtgagctgagatcgcgccactgcactccagcctggtgacagcgagactccatctcaaatcaatcaatcaatcaatcaataaaataaaaaataaaatttcaatgttaaataag

SEQ ID NO: 661734 - DNA, 593 bp, Homo sapiens
attctagtttggttatttttgttttgttttgttttgtttttgagacagagtctccctctgttacccaggctggagtgcagtggtgcgatctcggcccactgcaatctctgccttctgggttcaagcaattctcctgcctcagcctcctgagtagctgagattacaggcatgcaccaccatacctagttaatttttgtagttttagtagagatggggtttcgccatgctggccatgctggccatgctggtctcgaactcctgacctcaggtgatcygcctacctcggcctcctaaagtgttaggattacaggcatgagccactgtgcccggcctattttggttctctgagaagcaatttttatactgacatgctggataggaaggatttgatctaaaaataacattgttctttcatcatactgggacttccattaagtgaatgacggtttagttataccattgtcctttctaacacctgtcctaatatctcccctcccttcactggcaacagaaattaggtaccagttctactgagatgttttgcaattgtcatcattttactttgtaagcaaaaagcatgtttttctttgtat

SEQ ID NO: 661735 - DNA, 567 bp, Homo sapiens
gatcctccttcctcagcctcttgactagctggcacygcagttttgcaccaccacacccagaaaatggttttttaatttaattttttatagaaatgggatcttgccatattgcccaagctggagaaagaattttcaggagtatatttttataaattgactggctattactctgtgtatttcattttaatttttaagttttaaattttgttatcaaataatcattaacagctatttttggcacaaagaaaaatagaatttccaggtgtgagtttttgttaatcaattagtattatgctttgcattttattttcatttttataatgtgataacattcatgtcttttgactgcctttgtcatgatcactttctatatttgtggtaggtcagaggtgaccatggagccagcacaggtggagcggattccagttgctgtctgactttgagccaaattactgatctttccatgcatcagttttctcatcctaaaattatagcaataataatacctacctcataggattgttgtgagaattaaaagagttaatatttataaagcatttataattg

SEQ ID NO: 661736 - DNA, 567 bp, Homo sapiens
gatcctccttcctcagcctcttgactagctggcaccgcagttttgcaccaccacacccagaaaatggttttttaatttaattttttatagaaatgggatcttgccatattgcccaagctggagaaagaattttcaggagtatatttttataaattgactggctattactctgtgtatttcattttaatttttaagttttaaattttgttatcaaataatcaytaacagctatttttggcacaaagaaaaatagaatttccaggtgtgagtttttgttaatcaattagtattatgctttgcattttattttcatttttataatgtgataacattcatgtcttttgactgcctttgtcatgatcactttctatatttgtggtaggtcagaggtgaccatggagccagcacaggtggagcggattccagttgctgtctgactttgagccaaattactgatctttccatgcatcagttttctcatcctaaaattatagcaataataatacctacctcataggattgttgtgagaattaaaagagttaatatttataaagcatttataattg

SEQ ID NO: 661737 - DNA, 358 bp, Homo sapiens
ctcattctgtgcctcatgaataatcccaatgctacttcccaggaggaatccagctggcctggctacattggaaatgctaaaaacagaatcataaattacctggggcagagggaacatgaatgaatcctgcccgcaaattgcccagcaggcagcaagtgtccatcctctgctagcagaggtgayggaacatgggactgctagactatggataagattcacagatcttctgaatgtcaaggttactgagggtgccttttaaaaatggttttatgaatcctggaagttgccaagaggttatagcaaaagattttgtgtgcattttggggcatgcttctgaaagctgttctgtgtaggaagg

SEQ ID NO: 661738 - DNA, 564 bp, Homo sapiens
tacaaagatatagaatcaacaatatgaacggataaagaaaatttggtatacatataccatgaaatatgactcagccataaaaaataattaaataatgtcttttgcagcaatttggatggaactggaggccattatcctgagtaactcaggaacagaaaaccaaataccaaatgttcttacctataagtgagagctaagctatgggtatgcaaaagcatacaggacagtttgatggacattggaggctcagaaggtagaagggtaagagtgtggtgagggataaaaaattacctatttggtacaacattcaggtgatgggtgcactaaaagcccagtcttcaccactgtacagtttcatccatgtaaccaaaaaccacttgtacccctaaagcaattgaaamaaaaaaaataaaagtttttaaaaaatgagcataaaaaaggtggagcaggtgttatttttctcagattcacccctttactattaattcttttgcattctgttactcagaggagcctgggcacattttcaggatttggtaagttttgtgataagacgaggttagg

SEQ ID NO: 661739 - DNA, 565 bp, Homo sapiens
ccttgctcgtactttgagaaagtgatcctaggcttctgatgaaaacttttgtttgttacaatgatttcttcaacctttaatgtgttttgattgcctggtatgtgacaggtactctgagaagcactggtcataccttggtgaacaaaatgcagtcaccacctttgaggaacttaagtatgcactgtcgagaagattacacagcagggaaagagctattatggagcaaatacctggctcctccaggaaggaggatggggttagcagagaagccttcccagagaagaaaatccttttgaaacagctgagggaggagtagtagtagtcagatgaagatgcatttgtagggactgtccaagcatggatgttcttatcacttggctccactgcayagaagcaagtaatactgatgtccaaataactgtacttagagcactttattagcttaagaatgtaaacattttagggctactttgagattttacaaaactttttatgtgcttgttgtcatggagccctgttttattatttatgagaacatggaaagacagaagaattagagaccttt

SEQ ID NO: 661740 - DNA, 429 bp, Homo sapiens
gctgcctctgctgagtcatgcaggttgtcagggaagtgaaggaaatccagcactcatagccctcacccagctcccacgcaaactgaaggccagtctcactcccactgtgccctacccccaacagccctgagtttatttccaggcagagggtgaggggggcttgaaaacttgccccaggttasccgtcttccagctgccaaagaaaaggccttggttcttcccctgcctgtggagtctgcacactggatttgcgccctcccccaggttctggccaggaggcttcttgccccattcaaattgttaccaagttcagctagagaattccttctccctgcagagtcttacccctgcttctctggccaccctcccaatggatccctgtggtactaggcaggaattgcctgccaggggacccagaaagctcccagg

SEQ ID NO: 661741 - DNA, 591 bp, Homo sapiens
tgtaatgcactcccaggatggaaacaactgctttagaaataggttattcccattttgcaattaaagaaccagaagyccaaagtcacatatacaatttctggaggcattagattgttcactcactttctccaggatgcaaaatccttgatatacttctcttgctctcagttttctcctagagaacacctacttatccttcaaaacccagcttaagagtgccccatctatgacacagtccagagcaccccagctaggatcaggtgcctcttgtgtgttctcacctcccagagttacctctaccttggcccttacctagtgtgacttgtatctctgtgttctgtgttcccatcagaccagagctcttggagttagggtgtggcatggtcactaacatgtttcttccatctgggagatccaaagagtgaggatgaggaccagaaattcctagctcccctctcacccctacacatggcaataatgtaaaaaatattcaggccacccctcagcctccgaccagtgccttaggcccattaacttataacaataatcttcccaggctggacaatctccttcatccttctagcccctgat

SEQ ID NO: 661742 - DNA, 610 bp, Homo sapiens
ggctaacaatctttgggtgatggaacagttaattgatggactgatattctcaaaggaaaaaactagataaatatttataaatgtcaagctctccaatcaaattggtaaagatcttgagctcagagcaataatataaggtatctcaataatataaggcataaaaattgctttgtctgccatgcatgcaccagaaaaagccaggaaaaaaacaccctgcaaatagctttttctgaaatgcttcccctcccacattgactagtcaagcaaaccaggccaacaaataaaagataaatttgttactaaaattcaaggttgcttggagattttgggattttctacacaattcagcagccatagctaaaatgtaaacatttaactccwagactcatgtaaaactactgtttaaaaaagagttaaagagatttgtttttaccaaatgactttattcacaattttggtacgccttcattagattaccaatctgggcaaacagccatgtgaataggtcccgttttgtcagaaatataatttggatccaactgtgtttcataaaccaatgagtttgtatcaatcagttttgctgtctcatgactaaaattctaaaatgaaa

SEQ ID NO: 661743 - DNA, 549 bp, Homo sapiens
atatttgtctttgctagatgctttaaagtcataaaactataaactcagcctaaaatcaaaatgatctttgtgaaactctttgataagtagactaatttaatattgtttgtttaataaaaacagctgtatcttctgagttattggcaaatacccaagtatttagggttcttawgtaggtgaatatctgatattcacaagttataaaaattgttattaaggaaataacttgaaatgctgactaactttgtctaatagtttagtttttaaaagtaatctaggtataattgttaaataaataaataaatgaaaaaggtgaatgtaaatggaataaatgattataaatgaactttttatgtaatttaaaatcttgaagttatattatatttaattaagcaatagatacttatcagatgttcaggtcatttccaaataaaataaaatactgaaacataaattagtgaacatcaatgtaagtttgttcttggcttcttaaattttatataaagactaaaatatatttgggtcttttagtacacataaaaattatgt

SEQ ID NO: 661744 - DNA, 547 bp, Homo sapiens
ttgggtcttttagtacacataaaaattatgttatggggaaacatgtttctaaaattataaaatggttcttatctgtaaaatactgatacatcacagttaaaaatttcttgcttctcatattttcactagaaatttaggctactgagagttaacaattctaattaatacatataattctgtataacgagtgtactaaaagatgtatttatgatgaaaatataagaaagacattaaaataaactctttattgagaaaaagaataattgtgtctaagttcagaggctatttaaggttttttaaaaaaataaatttggaaaagaaagacaagatagaaaaaarcagtaagtaggaaagaaagatgtgaaggaagttataagtcatacatatgtatttttggtaaggaagtttaaaaaaattatttttcaaataataataaaaaggaaagtacatttttgtcctaaagtaacatgactgtttaagaaaggaagaaacaaaggtctaagtatataatgaaaggtctgagtaagttgtaaaaggtttatgaaaa

SEQ ID NO: 661745 - DNA, 546 bp, Homo sapiens
attgtcatgctctccaacctttctcctttcttaactctcggcaatgtcaatattcacaaaaacaggactttctcattcctgtatctccccctgtcctctcataatgtttcccttcactcaaactaagacactcactcccatgatcacagccttgatcttgtaattgccaatgctgtgtgacccagcattataatcagtcaactaccatgctcttctttcccttatcatactagcaaaaccaaagcctgattaaatcctcctgtgcrtatactccatgtgtgcttctgtacagctgaaagacatgggagggcagcacatccactgtgactggtcacgctatcactgtacaatcaccacaatcaccaaggactcctaatgctacctagcaatcatactgtatttcttgaatccattctctgcaataatccattctaataaattctctaattcattctttcccactctcctaggtgactatttcatgatttcctctctttcctcagatttccaaaacctccttctccattcttattctaagccaatgac

SEQ ID NO: 661746 - DNA, 517 bp, Homo sapiens
ctctacttaagcatcttcctctgctaacaaacacagtttatttctgccagaccatgtgggaggtgccctaagatgcacaaaagttgwtaaacaagttccaaaatttaccttttccccgtatgtactgataatgtaatttctgatatgagacaagtgagcccactgttcttttcatgggatgatgggaggtggggtttgagagctcagtgcagtcacaagttgaaacaagcaagaggcagcaggaaagtcttgagcaattcaatctctgacctctcctgaccattgttccctcctcaaggtcttcaacatggctcagctgaagttcccccacagggaaagtgagcctgcttagctatttaggggaccagtctcaccactgggcatccagagcgtgggcacacagtgatccctgagtgcaaactcaagtaatagtgaccaggaagaggtggggctaaagttggtaatatgccaggggagtggtaccacatcttgtccctgaactcagtttacatgtaaa

SEQ ID NO: 661747 - DNA, 547 bp, Homo sapiens
aagggaaaacaacacccatggctcttccgaggcctccgaggtgtttcgatcagatackacctactgtgaaacaccactcaatggggaagaaatatgtgaatgttttttctgctcactggagctcattagattaagcagaattgaagataggcatgttgagcttattgctcttccatcccagcatcagtgggtttggaatgttcccagacatcttcaatgcttctctctccaagtggtaaaactgaagataagaattttattttattttattttaagcctttgaaaaattaatcctaaagtaatatctgttttttaaagacaatttggaaaatatagaaaagtaagggggaggcagagacaacagagttcagccatagtctcatcaccccagcacaagagaacccaaccatagtctcaccactccagcacaacaaatgtgcaataggaaaacaatttgtaatttccatgatcatgaactttgaggtgaatttttaattcctgttcttcctaacggaatctacgcatttagttgtctatttgtctgtcc

SEQ ID NO: 661748 - DNA, 600 bp, Homo sapiens
gatcagctgacaccacccagaccagtaatctggctcaaccagttctgccaaaccacccaggaacagacgacaacaagaaaaactcacttcgacccccctatgattctacttccaacctgaccaatcagcactccccacttcccaagcccctacctgccaaattatctttaaaaactccaatccctgaatgcctggggagactgatttgagaaacaataaaactccagtctcccgcacagcaggctctgtgtgaattactctttcttcattgcaattgccccatcttgataaatcggctctgtctaggcagagggcaaggtgaacccattgggcagttacaaaactgctgctcctcaaggagcttctatatgcttggaccgtatattgttactacatcagccatctccaaaacacaccaaagtaggtacgttcccagtttyattcctgggctcaatgagagattaaataacttcctaaattcccacagctaataagcaacagattaggatttgagccccatgttgtccgacttcatcacagaagcttttccactccatcagaccgccttccgagggttagggcatttggaggaaagccaaa

SEQ ID NO: 661749 - DNA, 628 bp, Homo sapiens
ctgttgtcctcccacggactgtttcccttttctcatggggcagacagaggaggcgggtggaaaagcagcttgggtggtggtggaagcccaggcttggcactgggttctaggtcctggctgggaggctttggcagcctgctaacctctccctcctcagtgttagactccagcttgaatagtaaagcaactgggtttgttttgttttgttttacctaagaagttgcacgcctcacacaaatttttagcatatgcgaggttttcacactttcaccctggcaagacacctcagccatctgattaaagaaatgctccatttccatgacccttgattaactcagttcatgaagcaacctttgatcacctattctgtgctcagtacaaagccacagagatggaaaaaacacagtccctgccctccrgttacttgcagcctggtgatgccaccgagctttggggtcatgcgcctcacagcctggttagaatctgccctccaccacttgccagctctgtgacccagggctaggtgctcgacgtctatgaacctcagtttcctcatctgtaaaatgggataacagaaatatcgacttcataggcttgatgtgaggacgaggagttaatctgtaaccaa

SEQ ID NO: 661750 - DNA, 628 bp, Homo sapiens
ctgttgtcctcccacggactgtttcccttttctcatggggcagacagaggaggcgggtggaaaagcagcttgggtggtggtggaagcccaggcttggcactgggttctaggtcctggctgggaggctttggcagcctgctaacctctccctcctcagtgttagactccagcttgaatagtaaagcaactgggtttgttttgttttgttttacctaagaagttgcacgcctcacacaaatttttagcatatgcgaggttttcacactttcaccctggcaagacacctcagccatctgattaaagaaatgctccatttccatgacccttgattaactcagttcatgaagcaacctttgatcacctattctgtgctcagtacaaagccacagagatggaaaaaacacagtccctgccctccggttacttgcagcctggtgatgccaccgagctttggggtcatgcgcctcacagcctggttagaatctgccctccaccacttgccagctctgtgacccagggctaggtgctcgacgtctatgaacctcagtttcctcatctgtaaaatgggatracagaaatatcgacttcataggcttgatgtgaggacgaggagttaatctgtaaccaa

SEQ ID NO: 661751 - DNA, 513 bp, Homo sapiens
tcaaatgctctgtccagtgtgggcctggaaggcaggtcttctccactgttaggcctggctgtccccaacagcacatacttcctcagtccatatgggatcacgataaacaactccatcctccaggaccacactgcatcaacctgctgtgccctaacatcagctgaaggccaagctgcggggcaccctgggtgttccaagtcactttccctctgcaggcaggaacctcatcctgctctgaaacagatgagagggaaacgcagaaaacagcttccagctcagccaggaaccttagagtcctgaccttttacctcgcctaggagtttgcaggggagagaacacacgaatttyggattttaagcctaaataaaggaagccttagtttgaagtgcaagctctgccggacagggggcaccctgtgagccccatttgttaagaggacaatagtcagagagcttccaggctctcacaccagaaacaggaaatacagatttcacactgatctccttcccagga

SEQ ID NO: 661752 - DNA, 616 bp, Homo sapiens
agccaacaaacaattgctcaactcaggagagcaacctatcaattgattgggaaataaccagttgctcagctattttaattgatggaattaaaaaattagcctactcaggcatctaacccaactgacaaatttgggtcagtttaaagcccgtgatgacagatggaaaggcccggaatggggctggtgttggctgtttgggggagaaaggccagatgttcgcactcagggagccagggcaggaggcccggtggagactgctgtgacacaggcatgctgaggtgggagggtgctgagaccccaccaggccagggtgtgggctgtgtcccttggggcgggggtgggggggcggggaggtggtggcagtgccacctgatcagcagyatctcatgggggaagaaaccaaattatcaccacctccccctcatttaatagatgaagatactgaaagcctgaagggtgaagagacttgcatcaaaacacctaacaaacacacaagttggggaggaccgctatccagacctggaattccataatccgttcttgtttctgaaacttgacaatgtttagggatcagtgactgaacatcactgtaaagctgtgcgtgccacagagtgtt

SEQ ID NO: 661753 - DNA, 591 bp, Homo sapiens
catcttcatccttcctgatgagggcaagctgaagcacttggagaagggattgcaggtggacactttctccagatggaaaacattactgtcacgcaggtaaagtgggtgcctagccctcgcagctttttccttctcttgtcttccctcttatttctgctgtctgagctcttacctcatggccaagtcctcttctgggctctataataaacttatatcatggtgagaattagactggggaacaaatcataggaatagagtgaagtgcctggctctttgagggagattcatcaagactgtgagggcgcagtagatggagtcttactggagggcsgtggtcagggaggacttcatagaggagatagcatttgagccaagtcttcaagggtgagtggcagtctgtatgaaagggtgaggagcaaaggaaactgcaaggacaaacacgggctgtaaaagagagctgtgagttgtgagtagaatgatgttgtcaactgtggtgtcacaacaaaacccatgaagtatccaaagtaagttatacaaataatagttgaagaataaaagagagtaaatatttttctttttaaaacataaact

SEQ ID NO: 661754 - DNA, 582 bp, Homo sapiens
gaagcccttgacacccaagctggataaagaggcaaacgaagataggggatggggtggaattgaggaatgcaaacagctgggtcctcaaagatgcagctggggaggtgagtcagggcccaataaataaagctcttgaatgtcaggggcttgagcattttttctgagctcaatggggagccattgaggaattcgaggygaggtgagtgatacaccagatcagcatctggaaaggtcaccctgtctgcagggtggaggagcgcttggagatgggagtgagtgagagacaatggaaggtggaatgcaggctgtggtagctgggagggagaggtccagaagaggcaagccctggggacggcagagtgtccctgtcaccccaacgagcagtgccccctggccgaacgctcacataaacccgggccacagccaaaagaggggcaagggccttggcagggctgggagagagaaggggtggccacaggaggacaggagttcagggtggggagaagcaaagtggggagtgtggtggattttaagagctgactgaatgagctttggccacggttttcccccaagagagcaatg

SEQ ID NO: 661755 - DNA, 635 bp, Homo sapiens
cagggctggggagacctgtgagcagtacttgatagagttgctccaatcaaattctctctgacttcaacaaaacaacagtaaaagtaatgtattcagcgctcaccatgtgctgggtcccgtgctgcacaatttgtgccttatcacactcagtcctctgaacaactctgtaaggtaactatctctgttttacaaaggcaaaacagagaagtccagagaggttacttgtccaccacgaatgtcagggttagattcaagcccagccctgttggggtttgaaattgctatcaggtcatttagtctgaagtctccttggggccaaagccatgtcagctgaggcttgaaggggaagcagacagatgtgactagaactgcagctcatcagcaactgactgccagtgctcagggcacctgamggagcacagcaaaaaggacagccttttgctccaggtttccactttttgagagatatgaacacattagtaaaatgcctgtgtctgggaacaggcagccagggtgagaaaataatcagatctacacaaaatggataaagaatgtgtggagggacctccaaagggtgagaaaccacttctggctgctaatgcaatctgggttcacatactcaattcttaaaaaat

SEQ ID NO: 661756 - DNA, 596 bp, Homo sapiens
gctacttacaaagtgcttagaagaattcctagaagatagtaagtgttcagtaaatgctagctaataatgttattattagttctgtaattagtatggtgagtayaaaaaatatggagaatagcaaaaagattaatcatgagataaaaaaggaatgtccacgttttatgttctgtctcttagcaatatatttttggcatcttagaatgattttagcagcgttccctggtgctcatagtctgggaagagagaaggaaggctgcagtgtaactggaattcaagaaagagattgggcaatgccccacgggagggcaggaaaggtgctgaggagtttctgagcagagagagatcactttcagctgggactgagggacagcttcaaggaggcggtggggtttagctgcacatgtgggtagcatatgagcacacagaggcttggcaagggcagctttggtagaggacacagcactggcaaaaactcaaagttaaggatgaagagatgctgcagggtgtgtcagcgatttcttctcttctcaggctgcatctggggctggggataggaagaggaggtggcacagaatttcagggagggagggaca

SEQ ID NO: 661757 - DNA, 596 bp, Homo sapiens
gctacttacaaagtgcttagaagaattcctagaagatagtaagtgttcagtaaatgctagctaataatgttattattagttctgtaattagtatggtgagtacaaaaaatatggagaatagcaaaaagattaatcatgagataaaaaaggaatgtccacgttttatgttctgtctcttagcaatatatttttggcatcttagaatgattttagcagcgttccctggtgctcatagtctgggaagagagaaggaaggctgcagtgtaactggaattcaagaaagagattgrgcaatgccccacgggagggcaggaaaggtgctgaggagtttctgagcagagagagatcactttcagctgggactgagggacagcttcaaggaggcggtggggtttagctgcacatgtgggtagcatatgagcacacagaggcttggcaagggcagctttggtagaggacacagcactggcaaaaactcaaagttaaggatgaagagatgctgcagggtgtgtcagcgatttcttctcttctcaggctgcatctggggctggggataggaagaggaggtggcacagaatttcagggagggagggaca

SEQ ID NO: 661758 - DNA, 612 bp, Homo sapiens
tcaaaacaacaaaaacaaacaaacaaacaaaaaacaaaaacagaagagctgacactcaaagagtaaaaacaactaacctaagccacagggccttcctgtgctgrcttagaacaaggaccaatggccagttatgaagggctcccgcaacgctgcctgaagcaaggtttgttttatacacaatgctcttccctcaggctctccattataaaggccacagtggagaagccaggcatccttcccaggaaggaacatacctgctcagacatggctccagcctcctgcagagtaggcaagaagatgtcctacagtagcacaaaggagatagtaggtgtgaagaagtgactaatgacacttgctgttcacaactagttttttccagaaactatgaggaaccccaagtagtcagcagtgggtgacggctgtcagcatccctccgacagccttgcttccagtggcactttacagtgaaagcaagcttaggtggcaacctggtgcccactcagacttgcattggcaagcagatacaaaaacagccgtgggacattttctatcaacttgctgaggtcccagctctgttttttgaaatgccaatccttcgcatttgtttttaaa

SEQ ID NO: 661759 - DNA, 612 bp, Homo sapiens
tcaaaacaacaaaaacaaacaaacaaacaaaaaacaaaaacagaagagctgacactcaaagagtaaaaacaactaacctaagccacagggccttcctgtgctggcttagaacaaggaccaatggccagttatgaagggctcccgcaacgctgcctgaagcaaggtttgttttatacacaatgctcttccctcaggctctccattataaaggccacagtggagaagccaggcatccttcccaggaaggaacatacctgctcagacatggctccagcctcctgcagagtaggcaagaagatgtcctacagtagcacaaaggagatagtaggtgtgaagaagtgactaatgacacttgytgttcacaactagttttttccagaaactatgaggaaccccaagtagtcagcagtgggtgacggctgtcagcatccctccgacagccttgcttccagtggcactttacagtgaaagcaagcttaggtggcaacctggtgcccactcagacttgcattggcaagcagatacaaaaacagccgtgggacattttctatcaacttgctgaggtcccagctctgttttttgaaatgccaatccttcgcatttgtttttaaa

SEQ ID NO: 661760 - DNA, 554 bp, Homo sapiens
ctgtgtggacctttgaaaaaaatttcaaaggttcaacactcgcatcttcaccctttgcttcagaactaatgcaggaataaaccaggaaagccgagagaacccacaaaccctctgaaggaaggaggttgctcctgcagaacccaagagacagtccaaatattgtgagtgcccaagctgtgaaagtgggaaaggtggattktctgtcactgaacacacaccctcactggggcacctgaaggtctagatcatgggagaaggatctgaccttatctggagctgagtcaatttagagagccaagcaaaatataggggtagaggaagcagcaggaaaagcctgtgggttttccaccctcagaaagctatttcagagttgtctcatgggtgttcttggggagggctgccagaaatactgggaaaagaccacagggagaaggaaacccccagctgaaccttgtaacaattccaactgaacaggaagtctcctggccagaactcaagggagggcctgaatctggtgtgcagactccacaggccgataggcgtgaaagccctac

SEQ ID NO: 661761 - DNA, 594 bp, Homo sapiens
ctacccagaggaaagaagtcattgtatgaaaaagatacttgcacacacatgtttacagcagcacaatttgcagttgcaagattgtggaaccaacccaaatacccatcaatcaatgagtggataaaaaaactgtggtgtatatatatatatgatggaatactactcagccataaaaaggaacgaattarttgcattcacatcagcctgggtggaccttgagactattattctaagtgaagtaactcaggaatggaaaaccaaacatcgtatgttctcactcataagtggagctaagctatgaggatgggaagacatgagaatgatacaatggacttcggggactcgagagaaagagtgggagcggggtaagggatgaaagactacatattgggttcagtgtatactgcttgggtgatgagtgcatcaaaatcttgcaaattaccactaaggaacttactcatgtaaccaaataccacctgttcccccaaaacctatggaaataaaaaagttagaaaaaaaaagaatacagcctggatcatacaaccacagacacaggcaacagccacaaccacaccaccacctgctgccagcatc

SEQ ID NO: 661762 - DNA, 594 bp, Homo sapiens
ctacccagaggaaagaagtcattgtatgaaaaagatacttgcacacacatgtttacagcagcacaatttgcagttgcaagattgtggaaccaacccaaatacccatcaatcaatgagtggataaaaaaactgtggtgtatatatatatatgatggaatactactcagccataaaaaggaacgaattaattgcattcacakcagcctgggtggaccttgagactattattctaagtgaagtaactcaggaatggaaaaccaaacatcgtatgttctcactcataagtggagctaagctatgaggatgggaagacatgagaatgatacaatggacttcggggactcgagagaaagagtgggagcggggtaagggatgaaagactacatattgggttcagtgtatactgcttgggtgatgagtgcatcaaaatcttgcaaattaccactaaggaacttactcatgtaaccaaataccacctgttcccccaaaacctatggaaataaaaaagttagaaaaaaaaagaatacagcctggatcatacaaccacagacacaggcaacagccacaaccacaccaccacctgctgccagcatc

SEQ ID NO: 661763 - DNA, 594 bp, Homo sapiens
ctacccagaggaaagaagtcattgtatgaaaaagatacttgcacacacatgtttacagcagcacaatttgcagttgcaagattgtggaaccaacccaaatacccatcaatcaatgagtggataaaaaaactgtggtgtatatatatatatgatggaatactactcagccataaaaaggaacgaattaattgcattcacatcagcctgggtggaccttgagactattattctaagtgaagtaactcaggaatggaaaaccaaacatcrtatgttctcactcataagtggagctaagctatgaggatgggaagacatgagaatgatacaatggacttcggggactcgagagaaagagtgggagcggggtaagggatgaaagactacatattgggttcagtgtatactgcttgggtgatgagtgcatcaaaatcttgcaaattaccactaaggaacttactcatgtaaccaaataccacctgttcccccaaaacctatggaaataaaaaagttagaaaaaaaaagaatacagcctggatcatacaaccacagacacaggcaacagccacaaccacaccaccacctgctgccagcatc

SEQ ID NO: 661764 - DNA, 471 bp, Homo sapiens
aagtcacaatccaccatttgtttgtgggacaggcagtcagggcagatactttgaaaaaaaagagcccttcctgtttgctgtgcattgtcttcataccagttcccagaattgacctgacaaatattgaccaggttgctgtsatcttcaaacaccattttcctgtgggtagaggtgatgcagtgctgaagacctgggcccctgctcagtgcctttgctctgtaagtactttgcctgtgcccaaaatgagggcaggggcagaaactgcctcactcccttctctctctctctctctgtctctgtgtgtgtgtgtgtgtgtgtgtgtgtgtgtgtgtgtgtgtgtgtgtgtgttcctggctttgatggtaaggatgggagaagtaagtccctgaagaagaaatgcaaccatgtactccctctgagtcttaaaggagagacttcaggttttcaatctccttttatggaaaacttcaa

SEQ ID NO: 661765 - DNA, 583 bp, Homo sapiens
gggcaggtacaattcagcacgtaacagacatcatccccacagccctgaggcaataaaaaaaatagagaggtttcagcctctgcttgtgacaagaggcatcccagatatcagaggctggacagagacatggagacagagttgctctctctcatcgctcctctaggctccatcagycctgctactttgctccccactcctgggctgtcttcatccacacatccagatggccgatcctcacatcgccactccagctaatgaacgactggaaagggggagggcactcttctttctcttggggcctgaccgaggctttgcacatcatcctttcctttccaatgggcaggatcatagtcaatagccatgctggatgtgagggaggcctaatatcactggcagtgtggccaggacatttgctccaagcatgttcttctcaatttgtcatcacatatatagctattgagtgtcacctaagctagtgtcaattaaacccttaactctaggaaatctgaaattttgtttacttctttccccactaaatactgaggacctagctacctcttggaccaggcagatacttgaaagt

SEQ ID NO: 661766 - DNA, 532 bp, Homo sapiens
ctcatagccctttgggataaattggcagctcatagcagacaatgtgatgtgggttctggcatgagtacggaggagtgagaaagggcaggtgtgaacagaggactgtggaaaggaagctaggggagagggcagggggctgtgaagataggagagggggtgacatttgtgtcaggcccagcacaggtgagtaaccagtgggagggatgggaaaactaaattaattgtaagttgctgaatgctctgaggttgttttgcctcattatccaaggaattctgtggacagaggggcagtgacaacctaactcctctctcctagatcagcttccaggcaccaagcaaacctcagagtctagtccgaagccttctgtgctgacgttgctgcccaaccccagcrttcagaggtctccctgccaccaacacagcctaagctcctcttataaggggctggagctcacccagatggaaaacggccgatctggaagagtcagaataggggtcccaataccccaaactaagaagggggagtctactt

SEQ ID NO: 661767 - DNA, 622 bp, Homo sapiens
tttcattctaccttccatttactctgtcagttggtatttattgatttgttaatatttgcttatttcccccttaataaaataaatattgaacttacaattgacccagttgacctgagaattgacctaaaaatcacatagcctttgataactaataatcagtgctattgctctatcagtggctctatgattcttagccagagagttaaaaaccactggcccatttattatccattccaaattaattaatagtatttctttccttgccacatatgttaacaattagaatatgcctctctctctcttcatgtttaatcattcaaatctttgtttgattctttcattaattcatttatattaacacaatcacaatccatgaactgtaaaattggaagcaaacagccttgatatcactaacatctatctaaaggatttttttcaacagaggaatagattagatttctawtatattgaacctcagagttccaggcacttagtattcatcctccatgactcacacaccaccggctgtcatcgcttgctcaagcttggacctccttttcttaattcgtgtctacgtgtttttattgattaatttatcagttcactaacaataaaataatta

SEQ ID NO: 661768 - DNA, 584 bp, Homo sapiens
atatctataacatctacagagtcaccttcaacatagactagatctctttcatttattgacctcaatgttgcacatgagaaattaaacaacatactgtttcagtcatactcattattgagcagtggttaactgtgtattaatttaatactttaaaattttttgattgacagataaaattgcttgtatttatcatgcacaacatgatgttctgaagtatatatacattgtggaataactaaatctatctaactgatatatgtattacatctcagagttatcattttgtgatgagaacacttaacatctactctctagcatttttcaagaatatgatgtataaaatgaactataggcaccatgttgtataatatttctcttgaacttatttctcctctctaactgaataatttaacacattttatagtaataccaagaacatcttcaaacaaattactgaaaccaagataagaactttgactataactcaccttggtctctttccaaacagagggaacacaacaatcttgatcccaacagaatgattcmaagagcttgttgcatccattctgaagagtagaaagcac

SEQ ID NO: 661769 - DNA, 584 bp, Homo sapiens
atatctataacatctacagagtcaccttcaacatagactagatctctttcatttattgacctcaatgttgcacatgagaaattaaacaacatactgtttcagtcatactcattattgagcagtggttaactgtgtattaatttaatactttaaaattttttgattgacagataaaattgcttgtatttatcatgcacaacatgatgttctgaagtatatatacattgtggaataactaaatctatctaactgatatatgtattacatctcagagttatcattttgtgatgagaacacttaacatctactctctagcatttttcaagaatatgatgtataaaatgaactataggcaccatgttgtataatatttctcttgaacttatttctcctctctaactgaataatttaacacattttatagtaataccaagaacatcttcaaacaaattactgaaaccaagataagaactttgactataactcaccttggtctctttccaaacagagggaacacaacaatcttgatcccaacagaatgattcaaasagcttgttgcatccattctgaagagtagaaagcac

SEQ ID NO: 661770 - DNA, 568 bp, Homo sapiens
aaaatggggaatagattacatcccatttgtgttggacctcagagttccagacacgtggtgttcattatgcgtgactcacaccagtagtcataattggtccaggatatctttgatttmacactaatacaaatttatccactgattaatttattaataagaaatccacatcagtcagaaaatacaagaataatattcataaagatttctaacattcatctacagattcatttccacagactaaatctcttcattactgtcttctgtggtaatgaccttctttggtccatatattgaccaatcactataatacatctatcaatctgatagtaaaattggcatgtttgggtctctttggttatatttaacacattttaataatataggaaatatcttttttaaaaagctacaccaacaaagacaagagcattgactattgctcacattggccttcatattctaacacgagatgcagccaacgtgctggtgagcagggatgagagattgaatcacctctaaagcatctgttctgaggagtacagaacaaaacagatgacttaaaaaatgagaa

SEQ ID NO: 661771 - DNA, 568 bp, Homo sapiens
aaaatggggaatagattacatcccatttgtgttggacctcagagttccagacacgtggtgttcattatgcgtgactcacaccagtagtcataattggtccaggatatctttgatttaacactaatacaaatttatccactgattaatttattaataagaaatmcacatcagtcagaaaatacaagaataatattcataaagatttctaacattcatctacagattcatttccacagactaaatctcttcattactgtcttctgtggtaatgaccttctttggtccatatattgaccaatcactataatacatctatcaatctgatagtaaaattggcatgtttgggtctctttggttatatttaacacattttaataatataggaaatatcttttttaaaaagctacaccaacaaagacaagagcattgactattgctcacattggccttcatattctaacacgagatgcagccaacgtgctggtgagcagggatgagagattgaatcacctctaaagcatctgttctgaggagtacagaacaaaacagatgacttaaaaaatgagaa

SEQ ID NO: 661772 - DNA, 409 bp, Homo sapiens
tttaataaaatgaaaaactatgaattcactctataacctgaacaagaacactgactattacaaaaattgcctatattctcctcatccaaagggaaaaaatgcttcatcaagtcctagtgaaagtcagtgtttcagaaatattttttggaatagcaaattcatgctgggcttaatamctaagtgatggattgacaggtgcagcaaaccaccatggcacacatttacctaggtaacaaacctgcatatcctgcacatataccccagaacttaaaataaaattaagatgtaaagaagaaacaaaaaattattatttcattctatatgcccacagtagattcttttcttcttttattctacattagtgcactgattcaatcatcgatatatttataataatataatcaatacc

SEQ ID NO: 661773 - DNA, 495 bp, Homo sapiens
atttattaacttacataaattgtttttgtcaagatgaaatatctctcaccatgaaattttttgttttagataatataataaacgctgtgaatctagtaccaaacttgtctgtttgcttaagtaaaattccataaaagactgaattaatcatgagtgtcgttgtatatagatctcatcatcattccatgctctccctctctcaattacagttactcagtcaactatttatttatgtaaatgtatttctttttccttaataaaatgatcaaccagtaacctgcctcaacacagaacaaaaacattcagtcttgtgcacagatgaccatatgctccttaccaaaatgawtagagccttagccactaatttattgggactaagaacctcaaaattgtttcaataataatccatgttgcattacatgccttagtaggtaagtgcatgcatacctttcttattcttcattcattgataaaattctatattcatggactaag

SEQ ID NO: 661774 - DNA, 495 bp, Homo sapiens
atttattaacttacataaattgtttttgtcaagatgaaatatctctcaccatgaaattttttgttttagataatataataaacgctgtgaatctagtaccaaacttgtctgtttgcttaagtaaaattccataaaagactgaattaatcatgagtgtcgttgtatatagatctcatcatcattccatgctctccctctctcaattacagttactcagtcaactatttatttatgtaaatgtatttctttttccttaataaaatgatcaaccagtaacctgcctcaacacagaacaaaaacattcagtcttgtgcacagatgaccatatgctccttaccaaaatgaawagagccttagccactaatttattgggactaagaacctcaaaattgtttcaataataatccatgttgcattacatgccttagtaggtaagtgcatgcatacctttcttattcttcattcattgataaaattctatattcatggactaag

SEQ ID NO: 661775 - DNA, 399 bp, Homo sapiens
ttacatctgtctagagttattgccctcaggaagaatagactgtgtttcttttattatttgtttaataaaaatccattaaaaaatagattaatacactcatcattggtctctgcttggtctcaattaagtggttatttaaccaactatttatatgattaaagatgcttcattttcttcataaaatagtcagcaacccaccaccaacacagaacaaaaactgactcttgcatacaaatgaccatatgctccttaccagaatggtagaagccttgggtattaatttattgggagtctcagataagttttaataataatccatgtttcattacaktcactgataataagtacatgacttatgctttatgttttactcattgataaatttttaattcatgggct

SEQ ID NO: 661776 - DNA, 399 bp, Homo sapiens
ttacatctgtctagagttattgccctcaggaagaatagactgtgtttcttttattatttgtttaataaaaatccattaaaaaatagattaatacactcatcattggtctctgcttggtctcaattaagtggttatttaaccaactatttatatgattaaagatgcttcattttcttcataaaatagtcagcaacccaccaccaacacagaacaaaaactgactcttgcatacaaatgaccatatgctccttaccagaatggtagaagccttgggtattaatttattgggagtctcagataagttttaataataatccatgtttcattacagtcrctgataataagtacatgacttatgctttatgttttactcattgataaatttttaattcatgggct

SEQ ID NO: 661777 - DNA, 467 bp, Homo sapiens
ttgaactttcaaaatttctgctccataaagaaactgtcaagaaaatgaaaagacaagcaacaaattaggagaagatatttgcaaaagacatattggataaagcactattatacaaaatacacaaaatactcttaaaactcaacaataggctgggcatggtggctcccagccctttgggaggccaaggtgggcagatcacgaggtcaagagatcaagaccatcctggccaacatggtgaaaccccgtctctactaaaaatacaaaaattagctgggcatggtgacgagcacttgtagtttcagctacttgggaggctgagggaggagaatcgcttgaacccgggaaatggcggttgcagtgagccaagatcagcctggygacggagtgagactctgtctcaaaaacaagcaaacaaacaaaaacactcaacaataagaaagtgatcagattttaaaatgggccaaaga

SEQ ID NO: 661778 - DNA, 446 bp, Homo sapiens
cttaacagacacctcaccaacaaagatataagggtggcaaataatcacatgaaaacgtgctccacatcawatattattgggaaaatgcaaattaaaacaacgagataccaccgcacacctattagaatgaccaaaatgcagaacactaacaacaccaaatgatggcaaaaacgtggagtcacaagaactctcattcattgctggtaggaatacaaaatcaacacaatcacattggaagacagtttggcagtttcttctacaactaaacatagttttaccatacaatccagcaatcatgcaccttggtatttacccatagttgaaaaattatatccacacaaaaacctgcacacacacgtttataccagcttttttcataattgccaaaacttggaagaaaccaagatatccttcagtaggtgaatggataaatcaactgtggtaaa

SEQ ID NO: 661779 - DNA, 446 bp, Homo sapiens
cttaacagacacctcaccaacaaagatataagggtggcaaataatcacatgaaaacgtgctccacatcatatattattgggaaaatgcaaattaaaacaacgagataccaccrcacacctattagaatgaccaaaatgcagaacactaacaacaccaaatgatggcaaaaacgtggagtcacaagaactctcattcattgctggtaggaatacaaaatcaacacaatcacattggaagacagtttggcagtttcttctacaactaaacatagttttaccatacaatccagcaatcatgcaccttggtatttacccatagttgaaaaattatatccacacaaaaacctgcacacacacgtttataccagcttttttcataattgccaaaacttggaagaaaccaagatatccttcagtaggtgaatggataaatcaactgtggtaaa

SEQ ID NO: 661780 - DNA, 576 bp, Homo sapiens
gatttcagttgtaccaaaataaattcatctttgtaagggacttcagctgtactaaaatgaattcatcttaacctatggttcattacatattcccaatatttgcccatgcatggcattgtttaattggttttgattttattattttatttttaattgacagataaaattatgtgtatttatcgcatacgacatgatgttttgaaktatatatacattgtcggatgactaactctagctaattgatataaccattacttctcgtagttgccatttttgtggtgagaacacttcacatccactctctcagcattttttaattctatttatgtttgtggtagccattcattcccttgaattaattccatggacaacatgaatagcccccttcaaagcaagaacaagaactctgttacttaacgtgcctctctgcttcttatccacataagtgacagccatgatctccatcattggataacaaataagtcagatctggcatacagaatgtggagtaaaaactagattttagaaaattcaagaagcagcacagatttagattttttttaagggacctaagtc

SEQ ID NO: 661781 - DNA, 541 bp, Homo sapiens
tattggcctaggcaaagagtttatgatcaagaatgcaaaaacaagtgcaacaaaaacaaaaataratagatgggacctaatgaaactaaaaagcttctgcacagcaaaagaaataatcagcagagtaaacagacacctctcagagtgggagaaaatatttgcaaactatgatctgacaaaggactaatattcagaatctacaaggaacccaaacaaatcagcaaaaaaacaaaacacacaaaaaaaaaatctatcaaaaagtgggcaaaggacatgaatagataattcccaaaagaagataaacaaatgcccaaaaaacatatgaaaaatgttcaacatcactaattaccggggaaatgcaaattaaaaccacagtgggatgccaccttagtcttgcaagaatggccataattaaactatcaaaagttaatcaatgtttgcatggatgtggtgaaaagggaacacttttacactgctggtgggaatgcaaactagtacaagcagtatggaaaaaagtatggcgattccttaaagaattaaa

SEQ ID NO: 661782 - DNA, 609 bp, Homo sapiens
taaaatataagtatgtgaggtgatggatttgttaattagcttgatttaattatttcatgtgtatgcgtgtatgaaaacattgcagttttctaaaaagtaaactgaggcacataaaattttgaagagtttatttgagcaagcaatgattcatggattgggcasctccaaaccagaaggagttcgggacctcctccaagggaatgcaagagtgaggcttttacagaacaaacatagaagaaaagcaaagaaaatatttgatttaaacacagctatgccgttgcattttttggtctatcctgttggaaagtcactagttatataattataagtttgttggatacttctaattggttgagcttaagctctttttttaaaaaaaaaaaagtaggtatttaaaagaaatagcttaagttttgcttatgtttgcaaataaagcaaggttgaggtcacttatgagacctaactggttttgtcctctcaggaattcatcaggcccaatctccatcttcacttactttaacaaccccacacctcactcccctttgttcaccctctcagcatgctgagggtgtgaccagacagcatagcttactctcagctgccactatt

SEQ ID NO: 661783 - DNA, 583 bp, Homo sapiens
gttaaaaggataaatggttacaggaaagtaaacagttccaggtgcaggggctttaagactattacaaggtgatagacgcggggggctttgggcgttatcaatcggatgaattcctgggaactgcggrtattgctcgccacagtatcttatcactcttggatgtgctgggagtcagcttgcaaaggttaagtccttgaggaaggggctgccagtgaaagagccaagatggagtctgtctggctctcttagctgagagtcaattcaggtggaaacaaggctaggtgattaaagggaagggagagtctaagaacagggttagtaaaaacaaggttgggcattacaccagggcctgaactcgtttttaaggtttctttgtgttccccttggccaacgggggcatccattcagtgggtcgggggactgagaatttcattttcctttacatattcaaggaactttattgattttctatcagtcaactttagtttttttaaaactatctggtgaggagaaatgtcatattagacctctacaaacctctctaagctaagaagccaagccaaagactttcccaattatggcc

SEQ ID NO: 661784 - DNA, 583 bp, Homo sapiens
gttaaaaggataaatggttacaggaaagtaaacagttccaggtgcaggggctttaagactattacaaggtgatagacgcggggggctttgggcgttatcaatcggatgaattcctgggaactgcggatattgctcgccacagtatcttatcactcttggatgtgctgggagtcagcttgcaaaggttaagtccttgaggaaggggctgccagtgaaagagccaagatggagtctgtctggctctcttagctgagagtcaattcaggtggaaacaaggctaggtgattaaagggaagggagagtctaagaacagggttagtaaaaacaaggttgggcattacaccakggcctgaactcgtttttaaggtttctttgtgttccccttggccaacgggggcatccattcagtgggtcgggggactgagaatttcattttcctttacatattcaaggaactttattgattttctatcagtcaactttagtttttttaaaactatctggtgaggagaaatgtcatattagacctctacaaacctctctaagctaagaagccaagccaaagactttcccaattatggcc

SEQ ID NO: 661785 - DNA, 560 bp, Homo sapiens
gtgcctgcaatcccagcactttcggaggctgaggcgggcagatcacaaggtcaggagagcaagaccatcctggctaacacagtgaaaccccatctctactaaaaatacaaaaaattagccgggtgtggtggcgggcacctgtagtcccacctactcaggaggctgaggcaggagaatgggatgaacccgggaggcggagcttgcagtgagtcgagattgcgccactgcactccagcctgggcaacagtgtgagactccgtctcaaaaaaaaaaaaatcagtttgcctcccatgtagtcayaaacattcccatcctcctcacgtatttgccatttttttttccagtgtatacctatgtcctccctattctttagagtttaagctttggcaatcaagagacaagctagtgtatattttgccattcttctaaaactctgaaaactgtgttacacatggttttgttcatatttcttggtccatttcttaacaagaaattggtggtgtaggacctaactttttatgtatagatttaccttaggaaacaggattatatggtgattc

SEQ ID NO: 661786 - DNA, 457 bp, Homo sapiens
aaatatgagaagtcagttagtaggacacatatgctacctatacaaaaacctaaatatcaatagcaactcattgctaaaaaaataaggatttgagtaattaaaatttactattataaagttgtcaattatccccaacattaatttataaaagtttaatgctatctatttgcattaggtccttagacaatagaattctgaagtttatctgaacaaataagataaagagaacaagcaaggaaaaaaagtaaccaaggggcaacttgcaccattggatwttaaaacagagaactaaaaaaaaaattgtgtgtctcaggactgatacagagttaatattggttttctaggaatgaggggataaatgaaggaatgcaagagtgatagcttttgaagtcatctagatcctctgcttcaactacttatttacaaatgtggaaactgaaaccaaaagaatgaccag

SEQ ID NO: 661787 - DNA, 591 bp, Homo sapiens
gggcctcttttcctggggacaagttgcgagaggagcattgctgggatgaaccgactgccccgaccacagcagctgatctttaggccgtgactgatgctcattgtctcccacctccaccacccattccaggtttttctcatcccaktgtagtacctgtaatgatctaggcggctcatagggttgagtgactcagaccctcatttctgaggggtctgaaaccttcgtcaccatgcactggctttggtcatgactgtggcacttgcccacttatgatcaaattgggccaaactgtgccaagaaatgcccagaaaataacctgggtgccaaatgtgttccttcctggctccataatgtaatagaaaccctatctctttctgatgatcagggttgatttctcctgccagaatggtgacccctttccttgcctactggtctcttgataggaggagcctgaagtgactggcagtagtggagcttaaagttaaatggggagaaaggtggaaggaggaccacagcaaatcctgtccctataagaacaatgataaaattggacaaaattgccaaaaacaaccatttcggaactctggacat

SEQ ID NO: 661788 - DNA, 570 bp, Homo sapiens
tatttgtgacagtatctaacatatggtttagataggaggggaatgagataatatatgtaaagtgcctggtacaaagttaatgctaaataaacactgtttacccttcatcacctcctgagaccaaatatcttagataattttaagtaaagaactggttgttcattaggtgttcttactgggaaaacttccaacaccaactttatcgagcaaatatataaggtttatgactgtggcaacgatataagaagcaaccatttattacttactcctgtatctctagctatagaaggggaagtatctttagttgtagaaggtgaatgaccactaaaacttataagttctggtggacaaaacttcaaccttttttctcttccctccrctgactccccttgcatctgacttccctttcttgctcttattcatcccaccccatgaaggaaatcatctctcctcaggtactgtggctcacttatttctcctgatatccatgtatattagtcagggtcttccagagaaactgagccaatagaaagtgtgtgtgtgtgtgtgtgtgtgtgtaaaaaatgagat

SEQ ID NO: 661789 - DNA, 486 bp, Homo sapiens
gtgtggttgtgagtgtgtcctgcaatgggatgacatccgctccagggttgattcccaccttgtgccctgagctgctgagaagggccctgaccacctgccatcctgaacttggaataagcattttgaatgaatgaatgaatgaatacaaattgtcgtaaaatgaaaatttgtaacgtayataatcaaatgcatcacagtaagtgattcggtaggaaagtgctcaacaagcccctataagattgttttgaacatgttttgatatggtggtaggagatgcactttacccctttactttctcttttcaaacattcatttcttgaattaacccaccaccatgactgttgtaactcactgatgcaccaaaaattgggcagataatttttattaatctttcttaaatgtaggcatagttcatttatttcagcatttaatagaattgttgtaggtctttatttagaagtttggtaatgtttttgttaccagaaa

SEQ ID NO: 661790 - DNA, 588 bp, Homo sapiens
gactatttcaaaaggggatttattacaaagggattatttatagaggtatcagtttaggggaaccacatatttgacacagcaacctagggtttaatgagtcaacatcagatgttaggccctctgggtccaaaggcgtgtggaagttaccagaacctggaagaagttatggagagttggcagccttgaaaaggaacagtgacatttaatccagggacacatagccagctagagacgatactattgggaaggaatgagagataccttsatctcactctcctccctccatccaatcacttttggggactctccattgactcaatcaactaaaagtcaaagagattggaaacttattcatgtggcccatataggtcaccctcccatggcagataagagtgtagaagggcacagaggtgtatgtggaggggcaaatggaagacttccaacacgacatttttacatagaactttgaaaagatgaaaggtttgggatgaagccataggcatgtgagccaccctgagtatattctagcctcttcttgtttgagaatatagtcaataggacatataaatagtaattgattgaccaaag

SEQ ID NO: 661791 - DNA, 573 bp, Homo sapiens
aaaaaaaaaaaaaaaaaaaaaagtttttgttattatcagccattcatctatacaarttttaaaattctttacttttaagttcagcagtacatgtgcagttttgttatataggtaaattatgtgtcactggagatttctgtacattcttattgagattggttgaaagtgcattcaatctttagatcatattgacaagaacttaggacatccttaggatattttgtctgcttatccattcacatagcatgtttcttcttcatatattcttttatttctttcaataaagcattatatctttctcttttttgtatatttttttttgttatttgtttgttttttgagacagggtcttgctctgttgtccaggctggagtgcagtgatacaatcatggctcactgcagcctcaacctcctgagctcaagggatcctcccatccccatcctccttagtagctagcaccacaggtatgcaccaccacaccctgctaacttttgtggattttttgttgttgttgtttgttttttttggtagagatgggtttttgccacattgcccaggttggtctcaaactc

SEQ ID NO: 661792 - DNA, 591 bp, Homo sapiens
gcaattgactttttcctcccttttttggtcttttatttagcaaatttgctaatcttattagtgtagttattttgtttgtaaactatttgaygtttttgatgtaggtaaaacatctgttaatggtgcttttgttttatttcattccaatgaataaagttttgtttcttttattccaatccctatgtctttattgctttttcttaccttatgatgctatctaggagcttcagtatgttgtatagatgaggcagtcatggacatcctcatctttctcctgaagttaaatggaccatttctcaaattgttcaccatcaggtagaatgtgtgctgtcaataaggaataatactttgaagctagaattttgttactaaccagatcattttaatgtcggttcaggaatcacttttgttgagaacattgacagttaatgttacagaaattgatgctacacaggcctaaaattaagcttatgatgacctaatagtcaaacagatttagaagtaaactgggagaacagaatatcttttttccttttctctcttcaacttcccccttcttcgtctcctaggaccctgacccaccacacccca

SEQ ID NO: 661793 - DNA, 574 bp, Homo sapiens
tctctgttactaaaagaatcaaatgggttaaagatggagtgtttggttcttataacaaaaacaaagataccaccacactagtgaagaaagagagaggaaaaatcatgtatggttggaagggtgcagggaataggagctgcatgtgctgctggtgggaacatcaattggtgcctctctggagggtaattcagcaataagtttttagagccttaaaatgttccaytccttgtaatttatcctggggagatatttggaagaattctcaaagatttatgtattgtggtatttattacagtgttatttataagaataaagagttgaaaacaatatataaaagtccaccaataggcacttggtaaaataaattaagatatatatatatgtgatttattactatgcagcactttataatcatatttccaaagacgatttgatggcatgagggaaatattcacaatataatgctaaattgaaactgtcagatacaaacaaacagcattaaatagcaaccacttattgaacattaattttgcactaggatgtatatttagggctttataaacacttcatttaa

SEQ ID NO: 661794 - DNA, 574 bp, Homo sapiens
tctctgttactaaaagaatcaaatgggttaaagatggagtgtttggttcttataacaaaaacaaagataccaccacactagtgaagaaagagagaggaaaaatcatgtatggttggaagggtgcagggaataggagctgcatgtgctgctggtgggaacatcaattggtgcctctctggagggtaattcagcaataagtttttagagccttaaaatgttccattccttgtaatttatcctggggagatatttggaagaattctcaaagatttatgtattgtggtatttattacagtgttatttataagaataaagagttgaaaacaatatataaaagtccaccaataggcacttggtaaaataaattaagatatatatatatgtgatttattactatgcagcastttataatcatatttccaaagacgatttgatggcatgagggaaatattcacaatataatgctaaattgaaactgtcagatacaaacaaacagcattaaatagcaaccacttattgaacattaattttgcactaggatgtatatttagggctttataaacacttcatttaa

SEQ ID NO: 661795 - DNA, 595 bp, Homo sapiens
aaatataaatttattaaataaatgagtaatttatggatgcgattagaattcttgaagcaataccacctgaatgaagtgttgaggttaagctaactctgatcatgtacttaactggtgatgggacaaatcaggagagatttcctttgtaggagcaataaggcctgaaagcacttattacttagtatgcctgaacttgcatgtggtttgcatttcaatgtcatatttataattaggtattgaatctttgaatttattttccctcaggaatagttttccaggcaaactaaaaagagccagattcatccccagtatgtcctaaatagtgtgcrtttttaaggaaaactagtaccaaatcatatttaggtaatattgctataataattaaacaaaacaaaccatgaaaagcaaacgggatagactgaattatataagaagtattcctgagttaagaagatgaaggctagagaaaaatgagtcataatggatgagctactaaacaaaagagatgagagtgaggttaaataactcctcaagtggtccactaggtaaatatttcagcccagaacatcttaggtgctctccagagaggtgtcag

SEQ ID NO: 661796 - DNA, 572 bp, Homo sapiens
atgtattttatatatatatatatatgtatatatacacacacacatatatatacacacatatatatacacgtatatatatatatatatatacacacacacatacacacacacacagtcgttatgtccctccagtctttagtaattggatttttttagtcaaaaaaagtatgcataggaggcaagtcatttcagacccaggctgcccagtgcttttgaaagctataacaattctatgtatttcatgaccatatttattttcccaaggagctaatcacttaaaatatcccagatcctcaatgtgagatagctgccatttggtttcaaagtagtcaaatgggtgttgaaattggtcttattgtaccagttagcatagttggacagtagtttaaagaaaacctgtggtcagctgtatagcttaaatgtacaagagraatttgcaatgcatttgtagtgttgatgccttatttatttcatgataaatcactccataataacattctagagagcatgaaggatgttcattaaatattagtatgtgcaaaatccatggtttatatttagctaacttaaaa

SEQ ID NO: 661797 - DNA, 572 bp, Homo sapiens
atgtattttatatatatatatatatgtatatatacacacacacatatatatacacacatatatatacacgtatatatatatatatatatacacacacacatacacacacacacagtcgttatgtccctccagtctttagtaattggatttttttagtcaaaaaaagtatgcataggaggcaagtcatttcagacccaggctgcccagtgcttttgaaagctataacaattctatgtatttcatgaccatatttattttcccaaggagctaatcacttaaaatatcccagatcctcaatgtgagatagctgccatttggtttcaaagtagtcaaatgggtgttgaaattggtcttattgtaccagttagcatagttggacagtagtttaaagaaaacctgtggtcagctgtatagcttaaatgtacaagagaaatttgcaatgcatttgtagtgttgatgccttatttatttcatgataaatcactccataataacattctagagagcatgaaggatgttcattaaatawtagtatgtgcaaaatccatggtttatatttagctaacttaaaa

SEQ ID NO: 661798 - DNA, 588 bp, Homo sapiens
tgagtaagtgaatgaaaattctccaaatttgatgaaaaacaataccacacagattcaagaagttcaatgaactccaagaaccataagtcagataaacaacatctaagtacatcatagtcagttaaaaagggatattaacaactttgtgccaatagaagacactttgacaagttagatgaaatagacaaaattttagaacaacagaaactcccccaaactgacataagaataaatagaaaatccgaataatcctatgcctattaaataaatataattcataaataaaaactttcctataagaaaaaccttaaggtccagatagcttcactggtgaattctatcatatatttaataatgattaatatcaaktttacacaaactattttagaaacaggaagaggtggcaacatttcctatattttttcatatggccagcataaccatgtaactataataaataagggcatgaataaaaaataaaattatagaacaacatgtattatgaaatacttataaaaatgttaaatgttagcaaatccaacattatataaaaagaacatataatcaaatggaatttatctcaaaatt

SEQ ID NO: 661799 - DNA, 588 bp, Homo sapiens
tgagtaagtgaatgaaaattctccaaatttgatgaaaaacaataccacacagattcaagaagttcaatgaactccaagaaccataagtcagataaacaacatctaagtacatcatagtcagttaaaaagggatattaacaactttgtgccaatagaagacactttgacaagttagatgaaatagacaaaattttagaacaacagaaactcccccaaactgacataagaataaatagaaaatccgaataatcctatgcctattaaataaatataattcataaataaaaactttcctataagaaaaaccttaaggtccagatagcttcactggtgaattctatcatatatttaataatgattaatatcaagtttacacaaactattttagaaayaggaagaggtggcaacatttcctatattttttcatatggccagcataaccatgtaactataataaataagggcatgaataaaaaataaaattatagaacaacatgtattatgaaatacttataaaaatgttaaatgttagcaaatccaacattatataaaaagaacatataatcaaatggaatttatctcaaaatt

SEQ ID NO: 661800 - DNA, 479 bp, Homo sapiens
actgtcaagtgacaataattgagacatcgtggcacttgaatatgaattagcaaatagatcaacagaactaaatagttcacgcagaaataagcacctccctatatggtcagatgatgctaatgcagtttattgggggaaaagaaaatcttttcaacaaatagtattgcartaactagaaaaactaaggaaaacagtgaactttgttccctacctcacaacatatacaaaaattaaaagctaaaactataaagtttctaccacaagaggtagaagagttaatatggtaatttagggctaggtgaatattttttagccaggttacaatgagctctaaatattgaactaaaaaagataaattgtggccaggagcagtggctcactgttgtaatcccaggtctttgggaggccaaggtgggaagccgagagtttgagaccagcttgggccacatagcgaaacctcttctctgtaaaattttcaa

SEQ ID NO: 661801 - DNA, 479 bp, Homo sapiens
actgtcaagtgacaataattgagacatcgtggcacttgaatatgaattagcaaatagatcaacagaactaaatagttcacgcagaaataagcacctccctatatggtcagatgatgctaatgcagtttattgggggaaaagaaaatcttttcaacaaatagtattgcagtaactagawaaactaaggaaaacagtgaactttgttccctacctcacaacatatacaaaaattaaaagctaaaactataaagtttctaccacaagaggtagaagagttaatatggtaatttagggctaggtgaatattttttagccaggttacaatgagctctaaatattgaactaaaaaagataaattgtggccaggagcagtggctcactgttgtaatcccaggtctttgggaggccaaggtgggaagccgagagtttgagaccagcttgggccacatagcgaaacctcttctctgtaaaattttcaa

SEQ ID NO: 661802 - DNA, 598 bp, Homo sapiens
cagtggctcactgttgtaatcccaggtctttgggaggccaagrtgggaagccgagagtttgagaccagcttgggccacatagcgaaacctcttctctgtaaaattttcaacattaattgggcatgatgttgtgtacctatagtcctagctgcttgagaggttaaggcagaaggattgcttcagcctagaagttcaaggcgtcagtaagctctgattgtaccactgcactctagccaggataaaaaaaaattgaacttaaattaaaaatctttactcaacagatattataaagaaaatggaaaataagagatagatggaggaatatattcacaatccctgtatttcataaaaagttatctccagaatatattaactactcttaacaacgaataaaaagcaaacaacaaaattaaaaataggcaaaggtcttgaacatttctcaaaataagacgtataaattgacaaaagtactgcatgaaaatgtgcccaatgtccttagtcactggacacatttaaaccataatattatactattttactccaaacaaaatgtctcaaaacaaaaataatgacaatatattatatgttggcaaggttg

SEQ ID NO: 661803 - DNA, 628 bp, Homo sapiens
ctcacaacatatacaaaaattaaaagctaaaactataaagtttctaccacaagaggtagaagagttaatatggtaatttagggctaggtgaatattttttagccaggttacaatgagctctaaatattgaactaaaaaagataaattgtggccaggagcagtggctcactgttgtaatcccaggtctttgggaggccaaggtgggaagccgagagtttgagaccagcttgggccacatagcgaaacctcttctctgtaaaattttcaacattaattgggcatgatgttgtgtacctatagtcctagctgcttgagaggttaaggcagaaggattgcttcagcctagaagttcaaggcgtcagtaagctctgattgtaccactgcactstagccaggataaaaaaaaattgaacttaaattaaaaatctttactcaacagatattataaagaaaatggaaaataagagatagatggaggaatatattcacaatccctgtatttcataaaaagttatctccagaatatattaactactcttaacaacgaataaaaagcaaacaacaaaattaaaaataggcaaaggtcttgaacatttctcaaaataagacgtataaattgacaaaagta

SEQ ID NO: 661804 - DNA, 587 bp, Homo sapiens
aatgagggaaattgctgaggtaagtaatggaaatattttatttttggttgaagttgtggttacaggtagggtgtgtgtgtgtttgtgtgtgtgtgtgtgtatatatatgtaaaaaacatgtatataaaatctgcatctgtgtgaattttactctattcaaaaaatgtaaacattggagtaatatatgtaataaatgaacaatccacgtgtatttctgtaattaagcaatcaaaacaaaaagaartggtaatggtcaaaacatgactgttgcttgtttctatgaacttacaagtttaatttttaaaaatagacctttcgtgttcaaatttaatgtctaaacattgggagtaaatttgaacatgaaaattctacctttttatcttgttagagatactttagagcttttaaaaatataaatcagatataatttttgaaaatttgaggggaaaaaatctttatgaaatattccatgcaacaatgaggttacatttgtatgtataaaatgaggtcagggaccttagtggtcatgactacatagattaggaaggttctccaaagactcctgtgctgccactttgcagttagtg

SEQ ID NO: 661805 - DNA, 524 bp, Homo sapiens
tggccattagcaccaccaccatttgctgcatattagaaaggctggcagagaagaaatgctgatayacagggatttatgtatttttttaggaatttactttacctttctaccaatcttagatataatcatccttcaaaagtttgctcaagttatttttctttgagaagtcttttctagctatgactccagctagtttgttagcttgtttttttatttgctcttactgaatgtgggacacagtgatatccaaatccttcccctagaccagaggaagctacacttctaaacctcaccttgttacctggaggcctgcaatgcagtggaggaggaacaaggctgacctatgaatgcagatcacagaaatgagaagtcattatggaacaaaaagaaaaacagtatgccttgcaggcagccatgaaatccccggtggggaagtgccttcagtgcaaataaaattcaggtataagagtaacaggccattgcaaaggttcagagcaagtgagtaggagtcaagattagcaatt

SEQ ID NO: 661806 - DNA, 591 bp, Homo sapiens
gaggaggcaggaaaattggaaaaaagaaaactgtctctatttatagataacaggacaatcccagtgaatttacaaatcttctcaaactagaaagtgagttaacaagattgcaagataaaaagctcaataggctgggctcagtggctcatgcctgtaatcccagcactttggaaggccaaggtgggtggatcgtttgaggtcagaagttcaaggccagcttagtcaacatggtgaaatcccctctctactaaaattagctggacatgatggcacacgcctgtagtcccagctactggggaggctgaggcaggagaatcacttgaactgggaggtggaggttgcagtgagccgagattgtgccattgtactccagcctgggtgacagagcaagactccatctctctctccctctctctctctctctctcacacacacacctcaatataaaactatcaattttttatatattggtaatgaaggattgaaattcaaaatttttaaaaatacacatttaaacaaccccaccaccaatggagtacttagctataaatctaacaacatatwtgtagaatttgtatattgaaaaataaa

SEQ ID NO: 661807 - DNA, 639 bp, Homo sapiens
tacaattcaagatgagatttgggtggggataccatcaaaccatatcattcagcacccgacccctcccaaatatcatgtcctcacctttcaaaaccartcacaccttcccaacagtcccccaaagtcttaactcattttagcatcaactgcaaagttcacaatctaaagtcttagatgaagcaagtcccttatacctatgttcctgtaaaatcaaaagttactttttttctggatacaatgggaatacaggcattgggtaaatacagccattccaaatgggagaaattggccaaaacaaagggactacaggccccaagcaagttcagaatccagaggggcgctcaaatcttaaagctccaaaatcatctcctttgactctatgtctcacatccaggtcacagtgatgcaaaaggtgggttcctatggtctctggcagctccacccctgtggctttgctgggtatagtctccctcccagctgcttccatgggctggtgttgagtgtctgttccttttccaggcatacagtgtaagctgtcggtggatctaccatgctgggatctggaggatggtagccctcttctcacagctctatcaggtggtgccccagtagggattctgtgtgggagctccaacctca

SEQ ID NO: 661808 - DNA, 590 bp, Homo sapiens
agggaagcctcacaatcatggcagaaggtgaaagacacttcttatgtggcaaccatgagagagagcttgtgcagggaaattcctgttttaaaaaccatcaggtttcctgagacttatttactatcaagagaaagcatgggaaagacccacccccatgattcaattacctcccactcaccaggtttctcacacaatacatgggaattgtgggaattacaattcaagatgagatttgggtggggrcatagccaaaccatctcactatagatctgacaaacgtctaatatccagtatctataaggaagttaaatttggaagagaaaaacaacctcattaaaacttgggcaaaggacacaaacagacacttttcaaaagaagacatacatgtggccaagaagcatatgaagaaaaaaagctcaacatcactgatagagaaatgcaaatcaaaaatacaatgagataccatcttataccagtcagaacagctattatttaaaagtcaaaaaataacagatgctggagaggttgcagagaaaaaagaatgcttatacacttggtaggagtgtacattatttgttcaaccattgtgg

SEQ ID NO: 661809 - DNA, 590 bp, Homo sapiens
agggaagcctcacaatcatggcagaaggtgaaagacacttcttatgtggcaaccatgagagagagcttgtgcagggaaattcctgttttaaaaaccatcaggtttcctgagacttatttactatcaagagaaagcatgggaaagacccacccccatgattcaattacctcccactcaccaggtttctcacacaatacatgggaattgtgggaattacaattcaagatgagatttgggtgggggcatagccaaaccatctcactatagatctgacaaacgtctaatatccagtatctmtaaggaagttaaatttggaagagaaaaacaacctcattaaaacttgggcaaaggacacaaacagacacttttcaaaagaagacatacatgtggccaagaagcatatgaagaaaaaaagctcaacatcactgatagagaaatgcaaatcaaaaatacaatgagataccatcttataccagtcagaacagctattatttaaaagtcaaaaaataacagatgctggagaggttgcagagaaaaaagaatgcttatacacttggtaggagtgtacattatttgttcaaccattgtgg

SEQ ID NO: 661810 - DNA, 609 bp, Homo sapiens
tgttgttatatcactggtacagtttggctgtgtccccacccaaatctcatcttgaattgtagcttgcataatccccacaagtcgtaggagggaccttgtgggaggtaattgaatcatggtggcaggtttttttttccatgttgttctggtggtagagaataagtctcctgagatctgatgattttataaaggggagttcccctacacactctctcacctgctgcyatgtaagacttgccttggttcctccttcactttccgccatgattgtgaggctttcctagccatatggaactgtgagtccattaaatctcttttactttataaattacccagcttcgggtatttattcgtacatagtagtataaaaatagactaataaaatcactgttggattctttcaaattcttccaaatcactaggttgtaacagtctaggctattgcttaccacatgtttgctataggtctttgctttctttcttttctccttttaatcctaagacttttttctaggaagcatccttattctctgtgataactttttcctatatgtgttttgagttgcagtcagtaacaactcatctgctttctagtttctatacattacc

SEQ ID NO: 661811 - DNA, 581 bp, Homo sapiens
gaatgtgcttggctatgcatttccaaccatgtgtgataacctaaattcctattattcctgaaatactgattcaaacactcatccattcttttgaaaaaacttttggaccctggagtatggaataaggaaaatctttccaggaaactcacttctaacattatttatgagaaagaaatagacaaatttacaaactcggcacaaaactmgtgcatatgctcctggaatgcaaactccaggaaagtacatctgcctctgctggatgtatggtccacttatgacagtacactctacacaacagaaattctatccttctactttgagtgaaagaagcaatgctgagttcttggcttaaaacacaattgcatttggcagcacatatatcattaaatcattttttttaaaatttggccattttactttattagtctttattacttcaggcagcacttttagaatgatgattcatctcttccctatataagaaaaagtagagatcaaatccagtaaataaaatatctgaaccatcaacaaaaaagaaagaatatgtgtcactacaaccaccattggctttgatgtattct

SEQ ID NO: 661812 - DNA, 581 bp, Homo sapiens
gaatgtgcttggctatgcatttccaaccatgtgtgataacctaaattcctattattcctgaaatactgattcaaacactcatccattcttttgaaaaaacttttggaccctggagtatggaataaggaaaatctttccaggaaactcacttctaacattatttatgagaaagaaatagacaaatttacaaactcggcacaaaactagtgcatatgctcctggaatgcaaactccaggaaagtacatctgcctctgctggatgtatggtccacttatgacagtacactctacacaacagaaattctatccttctactttgagtgaaagaagcaatgctgagttcttggcttaaaacacaattgcatttggcagcacatatatcattaaatcatttttttwaaaatttggccattttactttattagtctttattacttcaggcagcacttttagaatgatgattcatctcttccctatataagaaaaagtagagatcaaatccagtaaataaaatatctgaaccatcaacaaaaaagaaagaatatgtgtcactacaaccaccattggctttgatgtattct

SEQ ID NO: 661813 - DNA, 581 bp, Homo sapiens
gaatgtgcttggctatgcatttccaaccatgtgtgataacctaaattcctattattcctgaaatactgattcaaacactcatccattcttttgaaaaaacttttggaccctggagtatggaataaggaaaatctttccaggaaactcacttctaacattatttatgagaaagaaatagacaaatttacaaactcggcacaaaactagtgcatatgctcctggaatgcaaactccaggaaagtacatctgcctctgctggatgtatggtccacttatgacagtacactctacacaacagaaattctatccttctactttgagtgaaagaagcaatgctgagttcttggcttaaaacacaattgcatttggcagcacatatatcattaaatcattttttttaaaatttggccattttactttattagtctytattacttcaggcagcacttttagaatgatgattcatctcttccctatataagaaaaagtagagatcaaatccagtaaataaaatatctgaaccatcaacaaaaaagaaagaatatgtgtcactacaaccaccattggctttgatgtattct

SEQ ID NO: 661814 - DNA, 618 bp, Homo sapiens
aaacacaaatgtaataatattgttaataatagcaataaacatatacactatagcttgagcaacaggggggttggcttttgcarcaatatttgattaatcggtttttttttcttccaactggaaaagaaagtgatagaggaagtgtgtaagacaattttttcttttttcataatgagccaatctaagaaacaaaagccacctttttccaaagtatgcaattacgagtatttaaagttgccatactgtgtgtcaatatcttttcctctgtctcacctgggagtcagacaatttgcagtaactcatatctaggacctatgtacatggcataaatctgtttataaatctgtttattggtttgttgatttgtgccttgttccagaaaggattaaaaaaaaaacttaaaaagacacacataagatgcaattagatggtatacattaggaataagacagtaaagaaaaacataaaatagagccaggcattaggttaaaaattcatgacaaaatcacacagttcatgttagtgggtttatggcaattattgaggatcctccataggagattctgaaatgaaagatctatttttttatttatgtacttattttttacatattgaagg

SEQ ID NO: 661815 - DNA, 576 bp, Homo sapiens
acagctggattggtcacagctcagcgtttgtcttatttggacatggtttcaacatttgcctgcctttgattggccgaaactcagtgattggtaaaagagtatattacagcatgtttacacatccagttaggttacagagcactatatatggggaaaccttcaggccaaacttaaaatatgtaagaaggcagcttttggctaaagttaacaccacccaaggaaatggaggaagttgtaaagcagtcaagaaagcgtagttttctatgtctcttttaaatagcttatgttttgaaaacctgagacacatattttaattgaaatgaatattttaaacacatcaattcaaagggtaaaattatgagggtgatgcccaaaaagtaaaaatccttcaaaaataaagttcaagaataatatactttgaaatgttaacagtttttactttgggtgaagtgtatctyctacaatgaagatgcattaatttgtaacaagagaaagctaatatttttttgaaaatgaaaaagtaaacatagatttggcatccagatgatatagaatacataataaacacaaatacat

SEQ ID NO: 661816 - DNA, 583 bp, Homo sapiens
tactttcctaataggtacccttgctcctatctttgcctgcacaatgtaatctcgacagagcaatcagaatgatcctttcaaaatgcaagtcagattatgtcactcctttactcgggatgtgtgaaaaacttgcagtttctcctgttttactgaatggagtcctacaatgaactaaaaaccttccaagctcttycttctgtcctctttatttctctgacctcattttctctttcttccttgctcattctattccagacacacctgactctttgctctttattgaacagcacaggcctcagggcctttgcataggatgagatttcctttgctgaggttgcgtgttgcccaggtagatatgtggcaaactcctttatctcctttaggtcttttcttaaatactgcctttgtaaagaggcctaacaaccaaagttagaattgcaacctgtcctgactccctcatcccctttactctattttttaaaatcacacttgccaacatatagtatgttatataatttacttattatttactttgtatattttgaaatgtctaggtgtctgtttcctccctctagattgtaag

SEQ ID NO: 661817 - DNA, 511 bp, Homo sapiens
aggacactcaattcattaaaaagattcacacgaaacatgactaatattatgagtatctttataaatgtacgtatttgacagcaattattcagtgataccagtatgacacaggtacatacttatcagcacktcctggccccaaggttgcatcacttgtgtggcatttgttgcatggctgacttgtgtccctcatttctacttttccttatgcctctttcacttaggactagagcaagaacaactgccccttcattggttttattcttagtcttgggacatacagagcagtgattttcaatgctttgccatttgtttgccaatcaattattgagtttccaatattaacagactctcattatttctcataagtaatctttgtctaccaatatgtccaaccaaaacaaggaggaaattctaagagcaaacctgttttctgtaccatgtaatctaaacaatttggggaaagaaacaatttttagttgtcttttaggcttaaattgtgtgagattaa

SEQ ID NO: 661818 - DNA, 618 bp, Homo sapiens
tcctttgtaaacatgggcctgtcgccctctttcacatttctcaaggaaaaaatgcttaatttggattctctatttattttattaatattttttctttcacagaacctgatacaaattcttgacacaatggaagtactaaaaaaaataatggtctcatttggtaaattaattcatgcctggagmttaatcttcatgctgcattttgagtctacttactctctttctgccattgggggtcagcgtagggtgaggtaaaacagagagaaagaatttttgaggagctccctttctgttgaacgacgtcttttaaggttttataggaaaaaataaacagcactttgaaggcagaaagcagaaggcagaggtagagactgttgttaggcatggcttgggcatttaatgcattgtgtggataatgacaatggtcagttgttagcagcatcagtggttcttgcattggaccattgttaggcttatttgctgtaagtgatccctgctgtgttaaaaaggcaaataaatatcccagtttcattttaatattatttttgctagggaagagagaatcattttttgagatacccagcttttgcacagcctgccacagttactattaccatc

SEQ ID NO: 661819 - DNA, 591 bp, Homo sapiens
ccttcatttctgttttcttttggaataattgagtattttaaaatataattttatctgctttgttgagttattaactatgacaatattttttattttgttatcgtagtgattgctttagggttcctggtatacatctttaacttaacacagcttaccttcaagtggtgttatacaatttcatgtacagtatacgatctttacactagyacactttcattttccttctcccagccactgtgctactgttctcatttattttacttttatgtaggttatacatacaatactacattgtgactattatctaaacagggaattatcttttaaagatctatctatctatctatctatcatctatcatctatctgtctatatttatttatttatttatttattcttcccaacttttattttaggttcagggggtatatgtgcaagtttcttacctgggtaaattacatgttgtgggggtttggtatacagattattttatcactcaggtaacaagcgtaatagccaataggtagttttttaatcctcacccttctcccaccctccaccctcaaataggccccagtggctattgttgcc

SEQ ID NO: 661820 - DNA, 666 bp, Homo sapiens
atgctgtaaaaagcacttatttggggcagtgtcagctgggtccacacacatgagtgtgcattaggacagcaaggactgaacatgtacatgcatgccagtggcagtaatgtggcaaagtgtgtgtgtgtgtgtgtttgtgcatgtgtgcatgtgtttgtgcatgtgtgtgtggaccggtggtgggatactgcacgtaggcctgcaggagcaaggcagtggcatctatatgtgtgcactcatcctgatgcttttaaagatatttaaagagaaaaatcttgtagatttatagaagaaaatcacatggaactatcatttccagtcccttcatttctttgtgtaggtttatatttctataggttatkatgtaccttttgcatgaacacttcctttaaaatttcttatagtgcaaatctgatggtgataaattctttcagattttatatttctggaaaactttttactttatttttattttaggatatttttgctggatataaaattatagattggtagaatttttttctttaatttcagtaccttaaaaatttaaagtactgacatttcctccactgtctctttacttgtattgtttccaacaggaaatctgctgtcatggtcattcatgactctatctttctttgtgtaatatacctaccttcttcccct

SEQ ID NO: 661821 - DNA, 607 bp, Homo sapiens
actttaaaactattttctgatatggaatgattactgatactttagatgatcaggaaaaaggctctgatgtcacttcctaccccttgtgtcacttacattcacttatttatattgggtggaaagatctctttgaataaaataaatgtcttaaacctgatcactaatgaatttcaagtgtatgctcacatatcaaatagactgctataactctaatgaaggccttttcaggagagaaaataggacccttgagatagatttcattataaagargagtcaaatagtgagccagaaaaagtgggttgaagggagaaaggcagtagtgattctgatatagctagatggcaggtaccagaaatcatttaaattcagccatacatgggatgagaaatgaggcggtggtggggcatacctgggagaaaatagttatacatatgtacaagttgaaaaaactgaattgaactcagaacactcagatatctttgttggaaacacattgtaaagaaatataaaagagagcttccagacggtccctcaccatatcatctttgctcaggtgaatgagtggacagctgtattacaatagctcagtaagcagcttgatcaagta

SEQ ID NO: 661822 - DNA, 569 bp, Homo sapiens
tcatttaaattcagccatacatgggatgagaaatgaggcggtggtggggcatacctgggagaaaatagttatacatatgtacaagttgaaaaaactgaattgaactcagaacactcagatatctttgttggaaacacattgtaaagaaatataaaagagagcttccagayggtccctcaccatatcatctttgctcaggtgaatgagtggacagctgtattacaatagctcagtaagcagcttgatcaagtagcactttttcatgtcaaatgggcctaagaactgcaaagtgacccaacaagactagtgacaatgctggtgatgcctttggccaccatcttggtacagtagtggggagcagtggtgacagcagcagtggtgctaaagtttaaggcagtctatcagctgaaagcagcagcaagaccagacagctagatgtgagtggctgtgggactaacagagcctaggatgcaaagttttactagctgtaatagtgaataaaagttattgatggccgctacaaggctttgtagttctgtggcctaattaaagagctcactcccaccccc

SEQ ID NO: 661823 - DNA, 524 bp, Homo sapiens
aataagggtctgaactatggcaccatccaaaagaagaaaaagatgggaagaaatagcaagtaatgagagtgrcacatagaagacgctgttgctgagttaataaaaagaaatgagaagtatgtggagggagggtgattcagggtttggtaacaaagtgtaggggatggtgagggagaagttacaagtgacttggagttctatacttgggcaactagaagaggagtgatgtgatcaatcagaccaagttctactcattcagagatatgtagctcagaaaagaaatgaattttgagagtcatgtaatggggcttggcttgaaccactctcggctcaaataagtgagaaactaaagggtgtacaatggaacatattgggcttgataataaaattgtttaagcaaaagaaaagcctgaaggaatatgggactacatctgtgaagatgacaggtagcatatataataatttgggaatctcagatttttatgttatagctaaagccaatgtgatcctattgggtaccatgt

SEQ ID NO: 661824 - DNA, 549 bp, Homo sapiens
taagtactcattctctaaagaaatgtatgggcctggggatttggactacaagggctgasagacaatttttttccatctaccaccctgaatttaaatatacctaccatgatgtgtttccttagatggaggagagaaaaagtggcattttatttctggccaattatctgaaagaaaaggcaggatttctacagaggaaaataatgtctgctttgtacattacgaagaatggagatttaagcagtttagctatactgcttgttgtcttggggcaaaggaaagtagatagctaaagttttgttggaaaggaaggtggcccttatatttttctattccttctctgactcactcattcctctaaaatgcacacatacatgctaccaggccacttgtatgtttctctcagccaggtgggaggattcagtgcctgttatggagtaaatatttgtgtcttccctaaatttcatatgttgaaatttcatatggggatgtagatttcaacatccccaatttgatagtattgtgaggagagacctttgagaggtaattaag

SEQ ID NO: 661825 - DNA, 603 bp, Homo sapiens
gtcctctcttctctatatggacattattaatgtcagagctaaactttaatcttaaaatgaagtggacatttcaggttgctcatataatcctaatatttatggcttctctcctgtcttgaaattttctcttttaaacagaatgtggtatttctgtgtgtgtatgtgtgtgttggagaagggagagrcaatagctggggaaagtagtccctttctttgtttcaggatgttggtagtcactggttatttatctctgaatactgtggttcatgaggaagatttttaaaataagaaaaaaaaaatagcacttgaagatgctatagaaaattcctagtctgcataaagctgaacaaaccaaggaaaccagaggttaggattcttgcctagtatcttgcctattgttcattgctgagccactatgaaacagcagcctgttttctcccagaaatctcaacgatttttttttaactctagtatgctacctgaataatggtaagaaaaatgagagctggctgcactactgtggattaaatgatctcaggcaaaacacttagcttctctgagcttacatttgcatccataagatggaaatcatagcaactatct

SEQ ID NO: 661826 - DNA, 613 bp, Homo sapiens
tttgttgtaaaaagtagcttctgccaaattaaatgaatctgcacaactggaggtatgaccctacttaggggagatatattagattcattcagcttgtgtcacagccatcaagcaatagcaacctggcaacatctctgctggtgccttactttggcatacatccttctggaacccctagaggtcctctcttctctatatggacattattaatgtcagagctaaactttaatcttaaaatgaagtggacatttcaggttgctcatataatcctaatatttatggcttctctcctgtcttgaaattttctcttttaaacagaatgtggtatttctgtgtgtgtatgtgtgtgttggagaagggagaggcaatagctggggaaagtagtccctttctttgtttcargatgttggtagtcactggttatttatctctgaatactgtggttcatgaggaagatttttaaaataagaaaaaaaaaatagcacttgaagatgctatagaaaattcctagtctgcataaagctgaacaaaccaaggaaaccagaggttaggattcttgcctagtatcttgcctattgttcattgctgagccactatgaaacagcagcctgtt

SEQ ID NO: 661827 - DNA, 581 bp, Homo sapiens
cttctctgcactgtaaaacaaaatggggattctgtgctgtataaactgcctcagcgcttcctttccttcctctgctatcggcctccccatctcatttattttccacacattaatggtagcagtcaccttgagctggtgatgcagagtaattttcacagaaaccttgatcagaaaccataaatcagcctgatgtgcttttatggtctaataacattcaggttgctcctacaggcctgtatgtaaaactgcattgcagtgaatcctttgagttttttttctttttctctctggctgtgctcttactctccttctcatgcacactctctctctctccttccctctcttctcttctcaccatctctctaggcacatatgtatgcatgttcacctacgtcacatggatacagttcattttaacaaaaccacactaaaatggcattatacatgctccctcacggtggcaggggtgtcacattctttcaggaggataaaatgatgcatttgttagagtctcagtggtttgtcgtaacaaatgaactgtctctgaccraaaactaaaatgatataactgttttaggcac

SEQ ID NO: 661828 - DNA, 583 bp, Homo sapiens
cctgacaggcattaaaaaaaaaawaaatcaggcacatatgtagtttatatgtatggctacataaagaattcaggccattaaaaagcgggaagggaaaatgtgaaatgatcatttggtgattctaaagctctctccattcttggcagttatgagaacacagtcaatcagaaagactttcttaaatcctctggcctagatcagattaataataggctggatttatttcaaattgttataaaataaactaaacagaaattatccttttttattattcttatgattcagcaatatgtttgtgttattgttaattgtaaatgttgactatgacatttattgagagacaggaattttttaaaatcatttgtctcttcacatattttccttgttttattgaaatatttctttagatattttaaaccaaatatttttaagtcccaaagattataatctttaaatattgctgctatttcttattataaaaatcaatacatttttaaataaaatactaaatggctaaatatagaatttgtctgaaaaatttgctctgtcagaccctatgattgtcaaaaataagtgattaact

SEQ ID NO: 661829 - DNA, 552 bp, Homo sapiens
tgcacttcctacagtggccccagaaagtggataaactgaaggggaagagagagaggggggtgggggtaaagtgactgattcatccaagatcacatggtcagaaactggtggtcagacctcacacccaagctgtttcatatcattatgctatccagcttggcactgaaagaaaaccaggactgactctttctcttatagggttttgttacatgagctaaatactaatgtatagacatgaagtaacaggcttacttgtgcataatgactctttgctgtctatggtcagtagatcattagtagactgagtcaccacatctagctcaatcagaaagacacacagtgcacttgtttggtgaggggtgtgacatagtttggatgtttgtcccctccaaatctcatgttgaaatatgatccccaatattggaggtggagtctgatgggaggtrtttaggtcatggggacagatccctcacgaatggcttggtgccatccccttggtgatgagtaaattctcgctctattggttcatacagagtaggttgtttaaaagag

SEQ ID NO: 661830 - DNA, 576 bp, Homo sapiens
aatagcagagttcagcatattaacattcagaggaatgaatccatatttatttcatgaaatttaattatatactagaagaaaaaagaaccaagagggacataaaagagataataccaatgtattgagaaaataagcaaaagaacattttctgggagacagaaagaaagaggataaaacagaagctaagcttaaatatacccatgaccagttgctttgaatattactgggaagcactgggaagaccaaatgaatttaagaaaatgtgttctatacattttcctttcattttactaaaacattgaaaatcattgaaacacatgtttgccttatgccatctaagaaattacctgtcaagaaaaacacacatggaacacatttacacaaacatatcctcaaaatctagattaaaaagtaaatacatctgcatttgtctgttttaccctggaaagtcactggttctaatttttctcttcrtgtgtgtgtgtgtgtgtgtgtgtgtgtatacatatataatttccaactcatttatgtgaaaactttttttttgagcagtggagttgggaaataggatatgga

SEQ ID NO: 661831 - DNA, 576 bp, Homo sapiens
aatagcagagttcagcatattaacattcagaggaatgaatccatatttatttcatgaaatttaattatatactagaagaaaaaagaaccaagagggacataaaagagataataccaatgtattgagaaaataagcaaaagaacattttctgggagacagaaagaaagaggataaaacagaagctaagcttaaatatacccatgaccagttgctttgaatattactgggaagcactgggaagaccaaatgaatttaagaaaatgtgttctatacattttcctttcattttactaaaacattgaaaatcattgaaacacatgtttgccttatgccatctaagaaattacctgtcaagaaaaacacacatggaacacatttacacaaacatatcctcaaaatctagattaaaaagtaaatacatctgcatttgtctgttttaccctggaaagtcactggttctaatttttctcttcgwgtgtgtgtgtgtgtgtgtgtgtgtgtatacatatataatttccaactcatttatgtgaaaactttttttttgagcagtggagttgggaaataggatatgga

SEQ ID NO: 661832 - DNA, 664 bp, Homo sapiens
gcaagttatttaacctttgagcatctcagtttcatcatctgtattgtgtctgatatacagatgatgaaacaagagtgttatgatgcataaataagttaatccatgtgaagtgcttattgcagtgcctgggaaatgtaaatgctccaagtatctgccaatatgattattataaaagtcacaacaaatattaaatatatacacatagataacatatatatatatatatatatatatatatatatatatactatttacaagaacacttatgataatatacctgttttccagttagttaaatctaattagaaaagagatgctataaagttattggcattaaagtggagaaatctaaatttaaaaatgaaatactactaacagttaaacatggtggactgaactcttgcatttatctttgcatctttccaaaaccccattaaaatgagtataaactatttttaaaaaattgttaaccaatgaaaacagagaaatggaaggtgtctctataagtgaaccagcaacagcattcttgcttgtgctgtagaacctcaggaaaactccagaactaggagcactatggacataggaaaagagtaaaactggycaaaaatattgttacccgaaaggtgtcccaatccagatcccaagagggattcttggaccttgc

SEQ ID NO: 661833 - DNA, 650 bp, Homo sapiens
tattacacacaacacatataaatacaccgacagaaagaagaccctgtagttgtaaggcttatcacttgcaaatttttatgtttctctttaaagcatgcacttcctagggtctaataagcaggcacagctggaactgaccagttcgctgggccattctgaacaacaagcttacgaggtcctaggctcacattttatcttaaggtatccctctttatgacagagcaatacagaaagacacacaaagtacactagattcactacagctcaagaygagtctcatgaatccttcttcccattaatcaaaactttacagaggtgataaacaatgatttttgccattcattcaaccagtttgcagagagagagagagagacagacagagagagagagagacaccagaagtttggtaagaaatttttactatgccaggcttctgggttccccttccctgagcaaacctggtaacccagcaagctgtatcacagccctgggtgccaagccacaacacaaaggaaaattatgtttttctttttggccagagcaaaatatgtgtgacaaaacatagacattagccactctgcttagccctcaatatcacattggcaaggctcaaacttgtccccagttgggctcagtcattggtaatccaa

SEQ ID NO: 661834 - DNA, 591 bp, Homo sapiens
tgccaagccacaacacaaaggaaaattatgtttttctttttggccagagcaaaatatgtgtgacaaaacatagacattagccactctgcttagccctcaatatcacattggcaaggctcaaacttgtccccagttgggctcagtcattggtaatccaacctctgaccaggagtctcagcttgtgttctctgggcaagatggtcaccctgagtaatagaaaagataagaaagggaaatgatcaagagaaaggcaatgcctgttgctgggtggggaaggcgaagagctcagggaggccagagaaagacccacccattgcagtgacactgaaaagttcgggcagccacttttaggtagccacttttaggtagtgacactgwaaagttcaggcagccatcagcttcaagtttccccctctgaggaggaaaaactccccatgtcccatggtcctgtatatgcttaatcctgtcactcacagctgtcaaaaaagagtgcaaagggagattattccaaagagcagagcagttaacatcctgtagtgccaaacctgttcttagctgagagggactttactgagagagacctctaacctt

SEQ ID NO: 661835 - DNA, 573 bp, Homo sapiens
accagaaaggggtcctaatacagatcccaagagagggttctcagatctcacacaataaatcatttgaggcaaatccatatagtaaagtgaaaggaagttaattaaggaagcaaaggtatagcagcccttagggttgctgattgcccatttttatggttatgtctttttagagataagatcttgctatgtttacccggctggtcttcaacttctggcctaaagtgatcctcctgcctctgcctcacaaagcactgggattataggcatgagccatgtgcccagcattttatggttatttcrtgattatattctaaatagggtggattattcattcctcccctttttagaccatatagtgtaacatcctgatatttgtaaactgtcatggcactggagggagtgtaacagtggggatgcacagatgtcactctcattgccctcttggttttggtgagttttagctggcttctttactgcagcaagatctttatgacctgtatcttgtgccaagctcctatctcatcctgtgacttagaatgccttaacctcctgggaatgcatcccagcaggtct

SEQ ID NO: 661836 - DNA, 566 bp, Homo sapiens
gacactgaatcataccctcagcacccagagtcctgctccctggcttacacccataggtaggaagctgtaggatttctcattgataaagtgcaattgaagataatactgttcggaagtccactaattaaatgaccacattcagttggtggaaacctctaaaggaacacacggaaatttccatctgcctttagtgccttacttttaaatatgaagggggagccaggctttcattgtagaataaagcctctatgacatacaagagaaaagaacacagacaagcatcaagaaaacttggataaaatagacataagaagttgaaaaaagtataaatattctgagaataataaaaaattcatttataaaagagttaattgtgaaatttggataccaagaagacaaaacaataaattaaacagaaaacaaggcaattatggagttggaatctgaggattagtagtaaatatattcatctggcatctctcttcctgggataccaaaaatcattgttttctgctggaaaacacacacsctttctttcccctcaccctccatgcatatggccaaaa

SEQ ID NO: 661837 - DNA, 551 bp, Homo sapiens
atggagttggaatctgaggattagtagtaaatatattcatctggcatctctcttcctgggataccaaaaatcattgttttctgctggaaaacacacaccctttctttcccctcaccctccatgcatatggccaaaaaagtgagaatgtagaaatctgaagacagacatctgccctaaagtttctggagagtcaaagacactcttacatgtacctccaaacgaataacttacatcctaaggcagtagtagaaagacattttaaaatgatgagaactttagtagaatttctttttgcaaatgacagaaacctaagtcatgaagcaaagacgggaatgctttagggattaagtgarggactaacgtggggctcccaataacccatgtgcatagcaattcctagaaaatgagtggcaggaaatgttagatgttcattgatacggcaaaacagggaggtacaattttctgtttaaaacaagatcatagctttgccgaagtgagagctttcaagtaacgtgagtaattcaggtgtcattaaaataacaatagctaaa

SEQ ID NO: 661838 - DNA, 551 bp, Homo sapiens
atggagttggaatctgaggattagtagtaaatatattcatctggcatctctcttcctgggataccaaaaatcattgttttctgctggaaaacacacaccctttctttcccctcaccctccatgcatatggccaaaaaagtgagaatgtagaaatctgaagacagacatctgccctaaagtttctggagagtcaaagacactcttacatgtacctccaaacgaataacttacatcctaaggcagtagtagaaagacattttaaaatgatgagaactttagtagaatttctttttgcaaatgacagaaacctaagtcatgaagcaaagacgggaatgctttagggattaagtgagggactaacgtggggctcccaataacccatgtgcatagcaattcctagaaaatgagtggcaggaaatgttagatgttcattgatacggcaaaacagggaggtacaattttctgtttaaaacaagatcatagctwtgccgaagtgagagctttcaagtaacgtgagtaattcaggtgtcattaaaataacaatagctaaa

SEQ ID NO: 661839 - DNA, 514 bp, Homo sapiens
aagtaacgtgagtaattcaggtgtcattaaaataacaatagctaaaactgatgtatttgacattgcttactttattcttgttgaggaacattgactttaatcaattttttttcatataaattgtaaaggaaatattgcaccagaraagttaaacaggtagagaagacattattggaagactattccaatagggaaaagggactattgtaattgggaagagaggtggaactcaactccactgaaacaaaaggcaggagcatttttaagtgctggagggtgttagtggggaggcaagacaatgtgataaaaccatctgagttcgctaattgacacttattgaagttaggctcttatcctcccacagagactgagacatagggactctttctttatgattgcatttcaaagggatggctcccaggtccacaacatttctggatggtaaaactggcaagagactgggacaagatttacatctaaaaggttcaaagaaagactttataattacaagttt

SEQ ID NO: 661840 - DNA, 381 bp, Homo sapiens
gctttcaagtaacgtgagtaattcaggtgtcattaaaataacaatagctaaaactgatgtatttgacattgcttactttattcttgttgaggaacattgactttaatcaattttttttcatataaattgtaaaggaaatattgcaccagagaagttaaacaggtagagaagacattattggaagactattccaatagggaaaagggactattgtaattgggaagagaggtggaactcaactccactgaaacaaaaggcaggagcatttttaagtgctggagggtgttagtggggaggcaagacaatgtgataaaaccatctgagttygctaattgacacttattgaagttaggctcttatcctcccacagagactgagaca

SEQ ID NO: 661841 - DNA, 514 bp, Homo sapiens
aagtaacgtgagtaattcaggtgtcattaaaataacaatagctaaaactgatgtatttgacattgcttactttattcttgttgaggaacattgactttaatcaattttttttcatataaattgtaaaggaaatattgcaccagagaagttaaacaggtagagaagacattattggaagactattccaatagggaaaagggactattgtaattgggaagagaggtggaactcaactccactgaaacaaaaggcaggagcatttttaagtgctggagggtgttagtggggaggcaagacaatgtgataaaaccatctgagttcgctaattgacacttattgaagttaggctcttatcctcccacagagactgagacatagggactctttcttkatgattgcatttcaaagggatggctcccaggtccacaacatttctggatggtaaaactggcaagagactgggacaagatttacatctaaaaggttcaaagaaagactttataattacaagttt

SEQ ID NO: 661842 - DNA, 514 bp, Homo sapiens
aagtaacgtgagtaattcaggtgtcattaaaataacaatagctaaaactgatgtatttgacattgcttactttattcttgttgaggaacattgactttaatcaattttttttcatataaattgtaaaggaaatattgcaccagagaagttaaacaggtagagaagacattattggaagactattccaatagggaaaagggactattgtaattgggaagagaggtggaactcaactccactgaaacaaaaggcaggagcatttttaagtgctggagggtgttagtggggaggcaagacaatgtgataaaaccatctgagttcgctaattgacacttattgaagttaggctcttatcctcccacagagactgagacatagggactctttctttatgaytgcatttcaaagggatggctcccaggtccacaacatttctggatggtaaaactggcaagagactgggacaagatttacatctaaaaggttcaaagaaagactttataattacaagttt

SEQ ID NO: 661843 - DNA, 567 bp, Homo sapiens
acaagttttctaaagtaaatgctttaagaaagaggaggtcaggggcctatagtcaggaagaaaccaatctgtagtgtagtcaagctgaggtgaatgtgaaggccattttagtgaaacttacatgtagagacgtaataattctctttattataaataaaatagaaaaagcatggcattttgagtcaaaatgatgaggaattcaaattctggatcttatttcaccagtcgtgtgaattcccatatagtagtcatgaacacaaatgtgctaaattaaataatatacgtagagtgtttggcacagttccagamacaaagtaagaattcaataaatgttacggtttgctattatgaaagagaccctgaaaattaaattcagataacgtttctggggtcttctgatatgatgcactggaaagaacacaattttccctttgcagcatttccacaataaatgcataacctgattctgattatgagaaaatatcccacaaacccagattgaggggcattttacacaataactgacttttactctcagaagttatccatgtcattagaaaaaggaga

SEQ ID NO: 661844 - DNA, 575 bp, Homo sapiens
agagaatatatcacttacacacacatacaatatgatgaacatactyaaaaaaaattctaaataagtaacacatgactcaaatctgactcctcaaaattggaaaagatgaaatacaaaaaacaaagacatatagaatcagtctctccctttctttccctctctctcactctttagccctctctgtaaatggataacaataagtaatgggatatagttaagtcaaaaaatgattcttaaaatataaagacatagtacaggggaataaagttgaactaaaagtacaaaactatcttagcataacctaggatatgagataaagtgggtttaaaaaaatgctttaaagttctcatccttttggcatgagagaggaaaatgggagaaaatttagcaactttgtgagaagaaatagttaatagtatattattattaatagaaaatcatgtatttgaatgtgagaatttgaaaataagttaaatgctagagaaaagaaaatgtatagcacttacatattgtaaaggtgagagaggaatagttataattttaaaaacctagacaaaaaagaaagaaaaacaaaa

SEQ ID NO: 661845 - DNA, 515 bp, Homo sapiens
atccattcatgggggctctgccttgatgacccaatcacctatttattaggcctcacctcccaacactgttgcattgggtattaagtttccagcataccggccgggcacagtggctcatgcctgtaatcccagcactttgggaggccgagatgggcagatcacgawgtcaggagatcaagaccatcctggctaacatggtgaaacactgtctctattaaaaatataaacaaaaaatacaaaaaaaaaaaaaaattagccaggcatggtggcaggcgcctgtagtcccagctacttgggaggctgaggcaggagaatggcgtgaacccgggaggcagagcttgcagtgagccgggatcgcgccactgcactccagcctgggcgacagagcgagactccatctcaaaaaaagttgccagcataccaacttcaggggatgcgttcagaccatagcaggctctcaacagtgccagagacctccgaaaataaccctgtccctgaagagcaagtttgaaaag

SEQ ID NO: 661846 - DNA, 344 bp, Homo sapiens
gacccaactcttgatctttgtttgtcatcttgaaaagcaagcttttgttacagtaggtagctagttgggtgtgagccgggcaggggagggctaccctctacacacaccagaaggtgatgatcaggctgttaacactctctgtaaagtaatgattggtcacagctggtaccagcgaactgcagtctcctactagatagaaaacacctgaaactgttgataagcmgcttctcaataagatctcaggagtttggagaagtaatgcaagactccagaagtatgccaatgtatgaaaaccccaagtctagaggtcaaactaggcacttgtctttcaagttgcttgcttg

SEQ ID NO: 661847 - DNA, 610 bp, Homo sapiens
gggtttgatttttagctctgtcaatacaaagaaaccttagagaacaaaactttacctagaaatattttcttcttgtaacttataggaactacaccarcttggcttttatcctttcctgctacaataagaataagccatggcataaatataagatatgagggttctaagtgatgcttgtgagacatcgcctatatcagggatcagcaaacttttcctttaaaagaccagagagtaagtatttcagctttgcaggctgagtaatctctatagcaactttacagtagaagagtgaacgtagccattgacaataaggaagagattaggcatggcagaatttggctcatggcctatagtttgttgacctctaatgcacacaacagggctgttttgttcattaaacttttccattttatgctccagtgaatacacagctggcaccaatattttatagaggaacatgcctcataaatccataaatttctgacttgcttaccatgagcaagcttagatatgccaggtacgtgctgcctaaaacacaccataagtaaggattcaccattagtaaatactaccaggaaatttgattagcatatttgcaaaaatatttgac

SEQ ID NO: 661848 - DNA, 610 bp, Homo sapiens
gggtttgatttttagctctgtcaatacaaagaaaccttagagaacaaaactttacctagaaatattttcttcttgtaacttataggaactacaccaacttggcttttatcctttcctgctacaataagaataagccatggcataaatataagatatgagggttctaagtgatgcttgtgagacatcgcctatatcagggatcagcaaacttttcctttaaaagaccagagagtaagtatttcagctttgcaggctgagtaatctctatagcaactttacagtagaagagtgaacgtagccattgacaataaggaagagattaggcatggcagaatttggctcatggcctatagtttgttgacctctaatgcacacaacagggctgttttgttcattaaacttttccattttatgctccagtgaatacacagctggcaccaatattttatagaggaacatgcctcataaatccataaatttctgacttgcttaccatgagcaagcttagatatgccaggtacgtgctgcctaaaacacaccataagtaaggattcaccattagtaaatacyaccaggaaatttgattagcatatttgcaaaaatatttgac

SEQ ID NO: 661849 - DNA, 642 bp, Homo sapiens
atgtgctctgcctcttaaatgcatgaaataatgtaaaaaagtaagtctatcacatgtacaggccggataggctgcagaatattggaagtttgtaatcatttttcattactaaaatttacattaaaaatcttattagataacattagcaatatttcagtacagaatcttagagaaaatcatttgagtctttgagtttattttcatggatctatacataaatattcctcaatgaattgctatctgaccacttctgcttctccaaaaatggytgggccataggacaggagaatctgaacatcgaaatgtattctttattcaattctgggcacatttttacaatctttgaatgcattttttaaaaattctagttattttcttaagtggtgggatattaacatacactgaaagctacttgatgggagactggaggttcgtttcacaatatccttcacagacaatattacattgccttgagcatagtagatgttcaataaataataaattcgtatagattcaagtttaattatatttcacaatgttctgtaggagatttttgacatttggatccgctgcaaagctgatccttctattcatgcagtgctattattcttatccctgtggatgcacagaaaatatgacaac

SEQ ID NO: 661850 - DNA, 611 bp, Homo sapiens
gagtttttcttaagttttatgctctgtactttgaaagaccatgtgtaattaagagtaaattaaaacatgacaatttttaaaagaacatagcttattaaggtcatgtattaaaaatagcatttcagagaacttagacattcacactgaattctctagaataggttgcctaagaaaaaaggtctaaattatctggattttcttaaaaattattttgcttataaacatagccattcttttgccatgacgtggccacctcattttctcatcttctccttactagatcatatccagtatagatttagaaatatccatttttagaatagacttagaaatatctattaatgtaagaaacgtgtacttttaatgtgcaagtctaacacattaactgtcactgactatgacacaaaacctgaaatacagttatcttagaaaatatactgtaactttccacataaaacagattattccagcaaagtgtccagaggtccttggttccatctctgaggcaattctttaatatasttctaagaagagcattaattactcattaggtatttactaagcatttattctaaactagggaccattcatagaagtggataagacagatg

SEQ ID NO: 661851 - DNA, 597 bp, Homo sapiens
attgaagatggtgactaggtggaacgagatgataaacatgacccttgtaggttgagatattatataaactaaaacaagatagtgtgttagagtaaaaagatgttcgtcttcgattgctgcccagccaatcaacccacacttagtgggttaaaacagccacagtcatttattttactcactaattgcaatgtggtcaagacttgactggsacatcacattcccactctaaatgatgtcagttgaggtgcctttacttgcatggattgcagtttgatactggctgttggtagttcctctccatgtgagcctctttacagcattactttggcttcctcattgcatggcagctgggtctaggagcacgtgttccaagaggtaagatggggaatccatgagtctctgatagccagaggctgtaacctagaaaggcattgaatagcagtttcaactggctaagcactcgggagtctgccctgattcaacggaaggggttagacccacctcttgatggaaagaatggcaaatgatttaagttaatctttagtttattacagacagcaactgaaggaagtggtcagaagagaattctttgagaag

SEQ ID NO: 661852 - DNA, 575 bp, Homo sapiens
tatattgcatagcgaacaagtgcttcagaagaaagtggcactattcaagcctgctgggtcttgaagtgctgacatyagctttctagggaacacattttgtattgataaatgtcaaaccccaaagaacaaatttaatttcaggcaagtccaaatttgactttcccagacagtggcacagcacctaacatcaccaaagagtgtgcagatggagcctaattatgacagtataggtgtttaataatactggaaagatttaaaggcactatacttattgcttatcattagtcattttgaaaatttgtgttgttgtttttagttaaatctcccttcgtgtttgtttgtttgaatttgagatgtttgttcaagcagaactggcacatttatttaatgcaaagcaaactgactcgtcatatttattatttagatcaataaaaggacaccctatatactttttgccaaagggcacaagtacaaatcttgaaacactggagtcagcagcattacaaaaatcctatttcaaaaccaattccctcaaaatagccccctctcaaagatcaccagtttggaaagttatg

SEQ ID NO: 661853 - DNA, 583 bp, Homo sapiens
ttaatacaaccttgtaaagactccctagagtatccccataaactagatcattttatgcaggaaccacaatatgtatatcaagatagacaagaatgagaaaagctgattaagagaaactggaaaaattaaacccacagactcacattatgtttttcaggctttatccacccttacaaatgaaagccatatacatggtctattgaaatgttttgtaaaatccaggaaacttagatttttatagatctgaattttcattgtttaaaatatgacaattttatttaggtatatctctaagtttttcttttatttctgcttctaattcctgtaatctaattctgtcttctagaagtattaatgatattcttttactattattttaatttcaaaactactagaaaattggtctgtgtgtcagaatctttaaagcagtataaactccttatgactttttaaatatttgtagtttcacaaatttgtccttcagaatgtattttaaaacattttacaaaktaccttgaaattttgaaacagtagcaccaaaaggaaatatgttaggtaattgaaaatatttccattaattcaa

SEQ ID NO: 661854 - DNA, 600 bp, Homo sapiens
gaacaactatcacacctgttccattaatttaataatcttttacaagtattactttagtatatttacatttagctgtttatgagaacactttttctcctagtatttaaaaaacaatcaactgaaaggaaactttcgagggtatttttattgttataaattgaatttataaagcaggggtctttttgtgcttaaaagtatttatatgaataatagctgcaaaacttgtcacatctttatttcattacattttcattattttaataatttaaactaagaaaatatagagacaacttactgtaacatttcaacastcttacaacttgaaacccaaacttacataatttttacttgtttattaaatatattaaaatgtaacctcttaacagattatgatgtttaccaaccaaaagtttaattatcttaggcacattgatattgtctagaaatttaaaatcattgattttattcctgtaggaaagaaacagcatcacaattattagggataattttgatgaatgtaagttctatcaattattaatacatgtccaatattttatatatatgccaagcaaaaagaaaggcaataaaaatcgacagatt

SEQ ID NO: 661855 - DNA, 480 bp, Homo sapiens
gctttattgtacgcaaattacaacttttgaaatgtcaaatgcaaaaatatgacttcaagtaatttcatctgcttttcctgacactgctgaacctttaaagttatgcttttgctcatatctgagtaattttgacaaatagatattaatataatataaaacataatgtccatatacaagtgtatcttcaatataaaaacctatcccatttcacctgtttagaaatattatctattgaggacgtaacataagcaatgctattttgcttagtgagcatatgacacttaaaaaaattcyaaacatcttacacttttaaggtatttctgttagacataagaacttttttaaaaatcttaatgaattgttcaacatgtgtagatggccttatacaacatattatatatatatagtaagtgtatatgtttagaagtgaacaataaatatgattcctaatatttttgtgtttatttttaacacagctga

SEQ ID NO: 661856 - DNA, 614 bp, Homo sapiens
ttatctgtttaatatatttttcatatagttgactaacaaattattaactttgaactatatttgctaaatatattaaatgtggcttttgcgtattatctaatataagactatcagaactattttgctgatttttttatcctaatacttttgcaacctgaagaaagatttaaatataataactggaagcaaaactaacatttaggatgatattttatactacaggtttgattttcattttatgcaatagcgttcccttcaaacaaaagcattttataatgcaaacatttttaggcccagtaaagtggttagtaaatacacatctgcagtgttgtaaaacccaacacttctctttgaaggaaatggtactacataaagtgacaaccaagcttgtattacaaatgcatgaagtttaaaagtatacttacatttttactctacataccttgtcttttactgagttttaattatatggtataaaaaccttttaggaaaacaactgattttgtgtttttaatatttcttttgtactttattgttcagtcttttccaaatgtaaacgtgacaaacacaaycacaatacaaataaaacgaatgatttttctcaaggtaaaaaa

SEQ ID NO: 661857 - DNA, 552 bp, Homo sapiens
gagggagtggaaatgtccaatacagatataaaaacatgtttaactcaccagtcatcagggaaattggaatcaacatcacacagttgcactactttatatcagatagacaaaactttatgtttgtgtataatacacatatcagaaattcaagacgtgtgtgtgtttataaatctaaagtgctggcaaagatacaagaaataaacatgctcatacaatgttgatacaagaaatgctacattacagcttttgagatctatcctgtaaaacttactgcaccaatacttagaaacaaataaaagaacgtatgtatgataaaagttggaaascaatttcacccttaatcacaggagagtgattaaataaattctgatattgcagaatagtatctggtgaagctatttaaaatgctgagttagatctgcataaactagcctagaatattgtcatacaatatgaagaaaattaagttgctaagaaacatttggccctatctttaatagtcaaagaactttgttcatgtattattagagtgatgacaaggaatatgaaaat

SEQ ID NO: 661858 - DNA, 589 bp, Homo sapiens
cacactgctttccacagtggctgaactaatttacattcccaccagtaatatataaatgttcccttttctctgtaacctctccaatatctgtaattttctggctttttaataaccattctgagtggtgtcagatgatatctcattgtggatttgatttgcatttctctaacgattagtgatgttgaacattttttcatatgtatgttggccacatgtatgtcttcttttgaggcatgtctgttcatgtcctttgcccatttttaatggggttgtttgttgctttttttctatttagtttcttttcattttgttttarttttaaaactttttaattaaaagctaagacacaaaaactaagacacacattagcctactcctatacagggatggtatcatcagtgccactgtcttccctgtccacatcttgtcctactgaaagatctttgggggcactaatacacatggagctatcctctcctgtgatgacaatgtgttcttctggattacttcctgaaggacctgcctgaggctgtgttatctttaacttttcttttttaataagtaaatggagtacagtctagaataatga

SEQ ID NO: 661859 - DNA, 507 bp, Homo sapiens
tccctgggatatagtgttgtatatctttaaattttgaataatgtttcaggagcaaagtgaaataatgtgttaaatggaaaaataagtaagttaaattttgtctttagaaaattgtctgggtaattcagtggggagttgaaggaagggttcattgaagaattttgaacagaattttctcataatgctaaaataaagactccttatcctcagtctcactaagttgcctgattttatagatgatgaaactaaagtcatttgagaaaggtcayatagcagagccagggtaagaccacgtatctattaatggccaattctatatttgtattatactacactatgctttagataggataaagtagtaagactggagaacagcacataatagaacatatagatgtagggagcaggagaagtcacagatagctcctaggtttaaaatctgagtgagcaatgggtgaaaggtaaaaatacatgagacaaggtggcatggtattttatgagagatat

SEQ ID NO: 661860 - DNA, 603 bp, Homo sapiens
ttttatttatttgaagtctgtaatcgaaaggataccatttttcaatttgctttgttcaacaattcaatgtagattccccaaaatggcacatgtatctccactggatgctactaagtggagcctcagtatcctaaattgtaatacattgggaaaataaaaggcatttttctggttagattatatagtgtatatcatggtaaaaagtaaattaatctacatgtctttccttaccagaactatgatatcttgactattaagtttaagagataaaatgaaatgtcagtattttgataggcaaataatgcatgatataaaaagaatgtaaaaatattttcaaaggtactttttggtcagttacaaattatagaagccctcaaaattatagaaattatcataattcaattcaaatttctttaagcaaaaaagggakttgtatttcctctgtgatggctttagacagggttagattcagatgccaaaaaatgcagtctcatttttatctgagttaacttcattttcagtcaggttcttcctcttctcataatagtggtaagatagccactagcaatgccaggctggtgttctactagatttgaaacacaa

SEQ ID NO: 661861 - DNA, 614 bp, Homo sapiens
attttcttaaagttacaataggtgaagaatcatcaacagcatgtgatttttggagctatataaaaatgttacctttggtgtatagttatgrtcccctcttgttaagatactgatttcttataaattctgttgcaaaattcacagtgactcaaggaaaaattttatttaataattttgacctgaaaattgagtttttcctttgaaaattctaattttacaagatagttatattaaagtgtgataaaagtcactttaaagttgtgatatttctgtttcataaattatgtttaattttcagtttattattttacttttctaggatagcaaagtaatataatgtatatgcacaaaacagaagtattatttatacgtattttttttaattacaggtaaagattatagttcccaacagcacagcaggtctgataatagggaagggaggtgctactgtgaaggctgtaatggagcagtcaggggcttgggtgcagctttcccagaaacctgatgggatcaacttgcaagagagggttgtcactgtgagtggagaacctgaacaaaaccgaaaagctgttgaacttatcatccagaagatacaagaggatccacaaagtggc

SEQ ID NO: 661862 - DNA, 531 bp, Homo sapiens
tttattattattattattatttttgctgtctagttttctgtccagaaatgatgtgaacgttcattaggaacaatgttagacacatgtaagactgaaacatgggcaaggcctattgagagaaacagcagctctacactgttagggcagtaagaaagctgaaaaattgttctgcgggatacatagaacaaagatgaagatgacaatatcaacttacatttgccttttgctgtagtacaaatttcaaaacactctcaagtagttgtctcatttaatttctcataacacccctttattgcacttaaaatgcacttaaattcagyattaaaatttaaaatatatatcatagatttctatgcattaaacaaaaaatatcaatattatacttttaaataaatttatcctataagtttgtttctctaaaatatgcattgctataagtattaaactttttatagaagcctaaagagaaaaaaaaaaaaacctgaaattaaagaagagtaaagttttcttttgtttaataatatgactgaa

SEQ ID NO: 661863 - DNA, 610 bp, Homo sapiens
gcacaaagattaatttgcccacattgtgtgtgtgtattcctttttatatgtaaatgtgtgtgtatggtatgtatatatgtttatgtgtgtaaatatatatatttctaatatctatgcaattagagtcagggatgagatttccttacattccatccccaaagtctgtccttacaactaccacgttaggctaatagaattttatacaaaatctgatagattctattatagtataggcaactggtgggagttatcacatattgaaaattagataaaaatctcaaaacgaggcaattttatcccttaagctaattcttctattaattgaggaagwctgctgttacttgatttttatccccaaaagcctcaggaaattatagaacaccactttgacagtttctttatgtgacatagacagaaagtaaatttatattttcttattcaataaaggcttcattttactaaatttatacaattactgatttcagtaacacatttccacaactttgtggtagatcaactataatctttttcctttgagaaaattatttaaagacatgtattattaaatatgacaaatcatagacatttttttaaagagtgctaaaaaatt

SEQ ID NO: 661864 - DNA, 617 bp, Homo sapiens
catgcaatatttgttttttctgtgcttggcttatttcacttaccataatgactaccagttctatccatgttgctgcaaatgacaggatttcattctttgttattgttgaataaacttccatgtgtatgtggtatagaatctatcttgaatatcattcattgatatttgtatttgtaaatgtcaacagcaattaataataagaggatctcatataaaaaaacctgtctacatcattttagaatggcattaacctttacagttatcccatttttataaatggtggttaaataacattctcagaattatactaaccagtattcaataaaygatgacggtaagaataaattccacatttgttggattcccaaacggactttaacgagactctttaatgtggctaccagtatattttatatttttctaaacttgattactatttctctttttaggaaagatgcattatagccatagaagtgacaaaggaaaattaaataggaacattatatacagtagtgatcgtaccaggagtatggatgaatctacatgcttcagagaaataatcgcaactttttttttaactttaaagggtagaaaactactactttcttgttgaaaat

SEQ ID NO: 661865 - DNA, 573 bp, Homo sapiens
aaggtaaagatgtttaagttatggaggtggagttggctctcatttgtttaagtctgtcttccaaatataaaatacttgatagatgcctttgttcttagccttcggttctaattgccagcccctgggcgattggaaaagtgctacctgatatctcattatgttcttttacctgtcttgcctagtagttttattcttcctagctacagtgaagttcattccactacagctgctgttgtaacccttttaaacaggttatatcattccctcagtcaaaatactgtaatggctttctaaaacagtaaaaacaaaaaacaaacccaaagtccttattatggcttggaaggccccaggtgatctgactgcaggttaagtttttgatcgcatgttcctatctcagagctttgctatcattctaccatctgccatctgtatgtggtattctaaaaccccagagagtagagtcacttcattcattcwtcatttaagtaatgctgcttccttagtattctctgaatacatttaaaatagtatatttgttctcttcccatcacttgctttatttttggtttatac

SEQ ID NO: 661866 - DNA, 573 bp, Homo sapiens
aaggtaaagatgtttaagttatggaggtggagttggctctcatttgtttaagtctgtcttccaaatataaaatacttgatagatgcctttgttcttagccttcggttctaattgccagcccctgggcgattggaaaagtgctacctgatatctcattatgttcttttacctgtcttgcctagtagttttattcttcctagctacagtgaagttcattccactacagctgctgttgtaacccttttaaacaggttatatcattccctcagtcaaaatactgtaatggctttctaaaacagtaaaaacaaaaaacaaacccaaagtccttattatggcttggaaggccccaggtgatctgactgcaggttaagtttttgatcgcatgttcctatctcagagctttgctatcattctaccatctgccatctgtatgtggtattctaaaaccccagagagtagagtcacttcattcattcttyatttaagtaatgctgcttccttagtattctctgaatacatttaaaatagtatatttgttctcttcccatcacttgctttatttttggtttatac

SEQ ID NO: 661867 - DNA, 411 bp, Homo sapiens
tactcttttaaattaggtacatatttttatatccctctcaaatagataattttttaaaaattatttttcttatcagatttatctgaacaaattttatttgttagagagacgaaacaccttcagatgttttactgtaagcaatagggagaygatttttcaatgtaggattaggtggacaattctttttatcctaagtggtcaatatttgagttacttcatttgataatcaagctttagtattttatacaccatttcttattatccaaaatataatttatattcctagactaatatatggaatttgaatttaaatgttttagaattaaaaatgaaaaatgtttttttctaaatggtttccaatagattaatggagatataatactcatatctttgcttttcttattttatata

SEQ ID NO: 661868 - DNA, 563 bp, Homo sapiens
agtacagatggtatactaagaaaagagaaagcatattttcccttcaaatcacattgttaaaggctgaaagatgataaatcaacttgccatataatagcccagtgatcttttttcttccttattttcatgttgttggaaatatgaagtttttaatagatatgtttaccttacctaatgacttgcaccaatatgactggtgacattttaatatttaattttgataattttatctgttagcacttattggcttaggaatcttagtgaatggatattctgacctttacattaggttaaatgatatagatggcagatctcagaatcagctcaataaggtgccagatattataatatataatatatatgattacttgtgtgcagtcatacttcttatagcaataacattttgtgtattttcataagaagaaacaaactacaaaatatggccaagtgagtctcagttttaggtatcaagaaacactrtttatccctgtgattttccctgctcctcaacccttgcaataattcaaacattctatttacaacatcagtaaaatacatttttc

SEQ ID NO: 661869 - DNA, 549 bp, Homo sapiens
cactggtagcttctatactttttattcagtggtcagttctcagtcctcctttttatataaccatcagcagcatttgacacagtgatcactgtctcctttttgaaacatttcattttgcttctggtacacctttatctcattggttgcagccgtatatttcttttgctgtttttttttttctcatttccttggacttctttttttctgtccgtggttactcccttggtgatccaatccagtatcatggatttaaataaccatctgttctttgatgactaccaaatgtttgtgtccattgtggacctttcatctgaactctacactgatgatgcagctgcctgctttatrtcacttctatgtctaatatgtatgttagaattaaatatgattttaaatattctgatctttctcttgaccccctcagatcaacttctctcagtcttctccatcttaattgcagcttcatcttttcagggtctgaggacagaaatatttgagtcatctttaccttctctctttctgttgaacttcagatccaatctgtcacaa

SEQ ID NO: 661870 - DNA, 542 bp, Homo sapiens
ttttgagaaagggctatttattctggtccactgttayattaatccttatttgatgtattgttttttagtctctctgtattgtaaagtatctactagaataataattccctggccctattgtcctttattttaaaaactattctggtatattgctacatttctttttctctacaaacttaaaattattttgccactttatccttcctaaataaaccatatccgtttttattttagtgaagtcacattgaaagtattaactgtttgcataagatattcttgtaatatccaggatttcttataagaactgagattttttaaaaattattttctgtctcagtaaagcttttttctacacagatatctaaatatgtcacttaaggcaattactagttgtttatttcatgtaatattattcctggttgctcttttagtatttcttaatttacatatttagctgattattatgcttctgtagtctattagtttcctgtgatcactataacaattaacattaattttgtgtcctaaaataatgcagattt

SEQ ID NO: 661871 - DNA, 629 bp, Homo sapiens
acacatggaactagttgcagttaattacattttgggccgtagtatttctgataaggagataattacaaaactgctacccagattgtaataccctgttccacattgtaaaatattgatacctttaaaaaattttatgttgttttaatacttcctccatattcaaatttttaccttttatgaagtgattacttgagttatgcccttgggggctcttcttgactctaccrtatatggaaaaccacattaaagagaaaatcttcacatcattgactccttcacattttgcatgggaagaaaagagttccaaatacaacttgaagaacttactgaatattctgacattctttgttattaatcctggaagatgacctaatatagactgctaggtcatgttggctacttttgataaggtgattgaagaaagccctctgtatctccctatgatgtgacagatctaaaatatgcggacattttaatgttgagtagaattcatattattactatataattatttataataatattaaagcattagtggaacatatcatttgagccatttgtcttgtggattacattgttctatgtgaacttacaagaaaactcttttgcctgcatccacaaatacaagt

SEQ ID NO: 661872 - DNA, 603 bp, Homo sapiens
gtctaatttataataataatggcaatacttttaaaatgcttttaccataattattgtatttatatataagtgtactaaactacagaaaacttagataacatagaaaactatggaaaagaaacattactcattatcccaacacagtgtttgtgaaaatgaaatactttttcagaagtagagtaagcaatttatatttaaaatactttcttcatcttgaacagggacatttaaggataatataatatccttaaatattttattacaaaataactctatgatttatcttccctttgaaatgaattatwtggcataaataaagtattggacctgtacttatatcatgtttatgatagagattaaaatttggaagtccaattaactgtagtctcatttgtagtttgcatttcatcagaatagttggtgtttttccaattctgcttccagcccagattttgtatacttcttccaacaagtatatttcttcagaatttaaaacaatttcatattatctttattctgaaattcaggaagaggaaactgatagtttgtaaacctcttgtggttcaaaggatgtccttgttggaaatggtgatttacatatga

SEQ ID NO: 661873 - DNA, 564 bp, Homo sapiens
atgctatgtgtgcttaagtgtgtataatgtttacattgtctagtgtgaagtatgcttaagtgtatgsggataaatggtgtgtgtgtgtgtgtgtgtgtatgtacatgtgaaaaatttctcttggtttaatgttggtatttatcaaatcgtaggatatagggttgttctattcctacataaaatcatcaattagagccttcctaattataaacattattattcaatatcatgaatatttatagaaatttgtgacctcaatcccagttccttttctttcttcaagaagctactgaaagcaagaacatacttactctttcacttttcaagaaataccaaactattttttacaacacttaggaaaattatatcctaattctataagaacattttactttatgctcaatctaaaaaatcaaaaatgttataaagaagttaatacaagaatggtgtattcatctttgagggagaaatcaataaccttatctcttgcaatcagtgccatattagttattaataaactaatgtgttagtaatgaaagtagtatgaacaacagcagttgctat

SEQ ID NO: 661874 - DNA, 586 bp, Homo sapiens
gctatgtgtgcttaagtgtgtataatgtttacattgtctagtgtgaagtatgcttaagtgtatgcggataaatggtgtgtgtgtgtgtgtgtgtgtatgtacatgtgaaaaatttctcttggtttaatgttggtatttatcaaatcgtargatatagggttgttctattcctacataaaatcatcaattagagccttcctaattataaacattattattcaatatcatgaatatttatagaaatttgtgacctcaatcccagttccttttctttcttcaagaagctactgaaagcaagaacatacttactctttcacttttcaagaaataccaaactattttttacaacacttaggaaaattatatcctaattctataagaacattttactttatgctcaatctaaaaaatcaaaaatgttataaagaagttaatacaagaatggtgtattcatctttgagggagaaatcaataaccttatctcttgcaatcagtgccatattagttattaataaactaatgtgttagtaatgaaagtagtatgaacaacagcagttgctatgtctattcaaaaagtgcagaactc

SEQ ID NO: 661875 - DNA, 564 bp, Homo sapiens
atgctatgtgtgcttaagtgtgtataatgtttacattgtctagtgtgaagtatgcttaagtgtatgcggataaatggtgtgtgtgtgtgtgtgtgtgtatgtacatgtgaaaaatttctcttggtttaatgttggtatttatcaaatcgtaggatatagggttgttctattcytacataaaatcatcaattagagccttcctaattataaacattattattcaatatcatgaatatttatagaaatttgtgacctcaatcccagttccttttctttcttcaagaagctactgaaagcaagaacatacttactctttcacttttcaagaaataccaaactattttttacaacacttaggaaaattatatcctaattctataagaacattttactttatgctcaatctaaaaaatcaaaaatgttataaagaagttaatacaagaatggtgtattcatctttgagggagaaatcaataaccttatctcttgcaatcagtgccatattagttattaataaactaatgtgttagtaatgaaagtagtatgaacaacagcagttgctat

SEQ ID NO: 661876 - DNA, 586 bp, Homo sapiens
gctatgtgtgcttaagtgtgtataatgtttacattgtctagtgtgaagtatgcttaagtgtatgcggataaatggtgtgtgtgtgtgtgtgtgtgtatgtacatgtgaaaaatttctcttggtttaatgttggtatttatcaaatcgtaggatatagggttgttctattcctacataaaatcatcaattagagccttcctaattataaacattattattcaatatcatgaatatttatagaaatttgtgacctcaatcccagttccttttctttcttcaagaagctactgaaagcaagaacatacttactctttcacttttcaagaaataccaaactattttttacaacacttargaaaattatatcctaattctataagaacattttactttatgctcaatctaaaaaatcaaaaatgttataaagaagttaatacaagaatggtgtattcatctttgagggagaaatcaataaccttatctcttgcaatcagtgccatattagttattaataaactaatgtgttagtaatgaaagtagtatgaacaacagcagttgctatgtctattcaaaaagtgcagaactc

SEQ ID NO: 661877 - DNA, 568 bp, Homo sapiens
gctatgtctattcaaaaagtgcagaactctcaaatataatacatggtttctttgtaagtaatagaaaaactttagagatcactttttttactagaagcttttgctttttttcctcttctattgatataactcttatggtcttgtttaggacagaatttgtttattcttttcagcagcctgtttttttgttttgttttgtttttgtttttgttgtatgtttttgttttggtgaaaggagtggatatttatcaaggatgttttgagtggttttttaagatgaatttataattaaagtcatacacatttatgttttgattttgtttatggattttctggtgtaaaggttaacatgatgaacacatggctatagtaaggtggaaaaacagtaggaaacttgtactcttgctcagtctgttgcatgattatttagatacttacttgatctaacaaactaaagaacacagtgattttatatgaagtaaactaaggctatttgaaaatatstgtttccaaagggtagaattcatgaaacacaataaaaataatgaaatatactgattaatcaaaa

SEQ ID NO: 661878 - DNA, 547 bp, Homo sapiens
tcatctgttttacctgagtatggctagctagctcaagacaaaatttctgccgtcactgccaccacctgagatcaaaggcccatgccctctgcttacttagcacaagttaaggaagagagagtgcaaaaaattaattcccttttccctttgtacacacatttcaaagaaccaccctatctcttcctctagaaaccctctctcagttatattttgtaagagcatgaactagcttgttttctgtgagtttggtgccattttttttttttaacttactgtcgtttgttcattcagcagttacgtattggacacctactgtgtattgggcatacttcaaagcactgaagatatcacagtaaaaagtcatacaaggtcactgacctgaagggaagtgaaataattcaataaataatgtatagcataggtaagattttacaaaagcataatataggtgytctctagatcaaaagggaggctcatataacagaggactacctgctttagcagaacacccatctttcttatttaggaatgtttttataggttttgt

SEQ ID NO: 661879 - DNA, 631 bp, Homo sapiens
aaaggtttttaaacagtgaaatggttactataatagagcaaattaacatatctgtcatttctcatagttactcatttcgccccctgtggcaagagcagctgtaatctcatttagcaaaagtcctgaaaacaatacactattattagctatagttttatgtagcacattagatagttcatcctacatatttgctactttgtatcatttgccctcatgtactcccaccctggaaactactgttttattctctatctctatatatttgacctttctttttttggtagattctacatatctaagtaagaatatgcagtatttgccttcctgtggctggcttatttcacttagcataatattctccaattccacccaagttgtggcaaatggcaggatgccttccttttaaatctgctttaaaatgtttataaggagactggaggtaaattttcaaaatgttaattcctttccaatcaatcaaagaaaatgttctttaatattctcagaaccaatgcttcagtacacttttgtaggtctycctcagaaataagtctctttgtgaagtagtcagacaaattcacttttaatgtcaaattgggttgtgtttgtttgtttctgtgataggtaagttagg

SEQ ID NO: 661880 - DNA, 651 bp, Homo sapiens
gtagaatttttattcaacatcatgtatttcagaatttctacattaaaaagtcatgatcaatatagtaacagttctagtataaggtagtataatttggtctgataatttaattgataaagatatttatttcttttcttaacagtatatagttactagcattctagtagatgccattcctggtatgtctgggtttgatatgcagcagtattctaagaaagcctcagtttgtggtcagatttaatatttttttattacggtgactaagtttaattaggaagtttgatttgtactccttacttgactagttcaggaaatcagttcatttgaatctttttccatgcataattattctctggatttgggtatgtgatagaaaatatagtcagaagataattgaataaggaggcattgagctratcctcagtccttgggtgtttctaaaaggatggatagacagaatcttttggaatagaaatgtatggtaggtatattcattaatacatttcagtaagggagcattatgtgataatccttagtaaatagaaaggtctaatcatgatctttgctttacctcaggccattgatatttcatatacattttccctcttcttttgacatttacgttggattttaatgcagtaattctggatt

SEQ ID NO: 661881 - DNA, 523 bp, Homo sapiens
atgtcactattagcccctataactcttaagatattctgatattctttaatttataattctataataattaatgttgaaaaaataggtaataagatactccattgtgtttcacatcagggcatacaaaaataatttttagcaaatgagttgagttgcagaatttctgagcagaatttctgagctttgccttcatacccaaagtcacattttttttctaaatatgttgtggtatgctgaagctatttacttatttttaattttaattttaattttttttttgagacagagcctcactctgtagcccaggctggagtgcagtggcacaatcccagctcactgaaacctccacctctcgagtaactgggattacaggtgcacacccccatgcctggctaatttttatgtttagtagagatggggtttcaccatgttggccaggctggtcttgaactcctgacttcaagtgatcygcctacctcggcctcccaagtgttgggattacaggcgtgaaccaccgtgccca

SEQ ID NO: 661882 - DNA, 520 bp, Homo sapiens
tttgagatgcacacgcagaaacaggggagaagtcamtgtgaaaaaggaggaagagattggactgatgcatcctcaagccaacaaatgccaagaattgctagcagccaccagaaactgaaagagacaaggacacttccctagagtgtccctctttggagggaccatgaccctgccaagccccttggttttagatttctggcctccagatctgtgataggataaatttctgtttttttaagccaccgagtttgtggtcatttatcatgtcaatcctaggaaactaatacactgttgtaccaatagattcccaaatctaatgagttaacaaaatatatgtttattgcttattcacatcataatctgacgtcttgacaggtaggactctgctccgtgcagtcattcaccgacccaggttatgtccacaaggtggtcctgccattctcaagaactggcttctaacatctctgcaaaagggaaaaaagagaatagatgatcatacagatgtttttttgatcatgtg

SEQ ID NO: 661883 - DNA, 570 bp, Homo sapiens
aaattgtttaagacaatttcttaccttaactgatttcttagagtaaatgatcaacttctagtgccaatcatgttggataaggttttgttcaaaggctttgtgggattcagatggtcaaaatgactaaatactctggttctgaattcttatcccagccctgctattcttaggaaatataattttggacaaattatttatcctttctggacccaatttatatttgtaaaatggaaaataagtaatgattggctctagttattagtttgtgttatcatgaaggttaaattggctaatgcatgcaaaaatactagtactatttagtttgtaaattgcagagagtagattgytagttttgacttttgaagatgccttgagcctcccaaaatgcatattgacttacatataccagatggatctttcagagcctgtgtacatgtcatagcattttaggacagcaatcagctttaaattctagggagacatttgattaaaaacacccgatgaaatgaatgtctgtgggcaattaattatattctctttttgaaatctaacaggatattgtgggatggc

SEQ ID NO: 661884 - DNA, 584 bp, Homo sapiens
catagcattttaggacagcaatcagctttaaattctagggagacatttgattaaaaacacccgatgaaatgaatgtctgtgggcaattaattatattctctttttgaaatctaacaggatattgtgggatggcccctgataggcctaaaattcattcttctttcctttttttcccctcttttttaaaccctctcattctatattttattttctggtcagtgtgagagtcaatatatttgacttccttctcarcttctaggttttataatttactgacatagaatttgataagtgtatttgttgtagttttgttttttaaaactatgcataaacaacatgagacattcatttcgtttggctagtgaatctctgctgttggtttaaaccaagtataatcaccagcacacccaatttagctccaagtctctgcaaacttttggatattgtgctgagcagatttagtgcaaattctatagcgtgctgttttttatgtcatatgaacattttctatgggatcctcagacttatttcaaaatgatgatgtccttgatctcaaggtatctcaaatgaagagaacttttatg

SEQ ID NO: 661885 - DNA, 584 bp, Homo sapiens
catagcattttaggacagcaatcagctttaaattctagggagacatttgattaaaaacacccgatgaaatgaatgtctgtgggcaattaattatattctctttttgaaatctaacaggatattgtgggatggcccctgataggcctaaaattcattcttctttcctttttttcccctcttttttaaaccctctcattctatattttattttctggtcagtgtgagagtcaatatatttgacttccttctcaacttctaggttttrtaatttactgacatagaatttgataagtgtatttgttgtagttttgttttttaaaactatgcataaacaacatgagacattcatttcgtttggctagtgaatctctgctgttggtttaaaccaagtataatcaccagcacacccaatttagctccaagtctctgcaaacttttggatattgtgctgagcagatttagtgcaaattctatagcgtgctgttttttatgtcatatgaacattttctatgggatcctcagacttatttcaaaatgatgatgtccttgatctcaaggtatctcaaatgaagagaacttttatg

SEQ ID NO: 661886 - DNA, 627 bp, Homo sapiens
ggcataaaatgaccctcttttcttatctagcctcattctctgaaggtatacaagaatgtttcaggtacctgcaaaacygaaagagccgactatactttccttatctattacatgttgatttttacacaaaaataagaaaagaaagccttcaaattatcacaacatttcagttagtagattttgatagtccttgggtgggatatttgggaacagaaagtagacagtttttcttcaggacgattacagcccagagcagctaagttcttttcaaaatttcaaaatgctggattgctttaggtaagttatctaagctaccaattatgttttaaatgtaataaaagccaatccttctactcttggaggcagagatgctatagcttgtttaaaagttcttgccttattaacgaatgctaattatgagtaatggaagtcaaattagttttcatttcttgaatagctgtactgtatttgcaaagaattttagagaaattgaattaatttgtttgttttaattataatttgttttcataacagccaactgacaggtgatacttgcacttgcttgaattacatccacagttaatgttttcatgtttgtagctgtataaattattttagctcaatgac

SEQ ID NO: 661887 - DNA, 603 bp, Homo sapiens
tttaacttcatactcctaaataagagattaccagcaggtcagttgattttattattttttgctaaatgtttatttacttatatattttttgttagttttccctgacaagtaggaaaggagctcaaatggagctcctgctacaggagttttctctttygcttattggatctttcttttgaaaacatttcatttcgatccctaaatacatttcaaaataatactacataaaagaaattgtaaaccattaactggataggcatgtaatatataaattcattacctatagacctggtatagtgtataatactttgactccagatgtatacaatattgcttagtaattggacataaacaatttttggaatacttacaatagccaaataaaagacatttcttatttctaatattgtttcattattttaaacagatggtatatgatagcatgaaattctttttctaggagtgctactttccgatctcaaatggctgttaacaaaatatttcttattattccttagaagatagttttagtctcactctccctgaagtttgcttctggcacctgcagtgaacatcaagaatatgtgttttttgaagacaaga

SEQ ID NO: 661888 - DNA, 611 bp, Homo sapiens
caaaagttccttgaagcctgtctcaggtttataaaatttgctttagaggaaactcagctgtaggctattctctaatttttttgtttttttacctgaaatagtttatctgtaattccacacaattttatttctacacccatatcaattctttgagccttttctcatagatcctctttcccaatsatttccattgctctactctgggcacattccaaggtttccacaactctcttagtagtacaggcacaagcaccaataaggatctttttaggagccaagctgaatggaatcccacttgtttttccctctgttgcaacaactctgtgggactgccaaggagaaaataaatatttgttacttttggtaatgaaaaaagtatgtgtgactcagcagcacatggggagcagatgtgttgagtaagaggccactcctgtgcaacagacctgtcactaagtgaggctataaatagagaaaaattaggagagaataaactgcatctctgattcggctcaatcgcgtttaaactagaattactaaagtttttgtttctgatgtaagaacaattctgctctgtatagatgtctggtcaacatgtgcttaaatgagccagg

SEQ ID NO: 661889 - DNA, 594 bp, Homo sapiens
gcaattttacagttatagttagaaaatcattaaacgctgatgtttaataggtagctgaaatgaagaaggtaagcagaatgtcaaggtccttttaaagagcttaaagattacaaaacaaataaaaggttctggcagcttctcagacacttgcaggctggagaattcacagagcaacaaggtrtatgggttttcctcttttcctttccttgaactcaaacaaaatgtgaacaaaaagggtgcaagtgtgtgcagcaacagtgtgtcaaatgtgcctgatgagatcttttaaattgacacattttctggactcaaaatgaagtattttagcttattactttctgtgaatttcaatacaaacaattcagttagatgtgttttgtcgaagaagtaaaaaagagttaaggtcaatcaaagtcataaggtagttctaaaattcaacaagattttctccaagaggctaagttaatatcttttacttatgtgctaaacattatgaaatacatactctcctacttatatattattgattaatgatatataacaaatttttagagtaggaaagaagttacaaaactaataatcgaactaaaatta

SEQ ID NO: 661890 - DNA, 594 bp, Homo sapiens
gcaattttacagttatagttagaaaatcattaaacgctgatgtttaataggtagctgaaatgaagaaggtaagcagaatgtcaaggtccttttaaagagcttaaagattacaaaacaaataaaaggttctggcagcttctcagacacttgcaggctggagaattcacagagcaacaaggtgtatgggttttcctcttttcctttccttgaactcaaacaaaatgtgaayaaaaagggtgcaagtgtgtgcagcaacagtgtgtcaaatgtgcctgatgagatcttttaaattgacacattttctggactcaaaatgaagtattttagcttattactttctgtgaatttcaatacaaacaattcagttagatgtgttttgtcgaagaagtaaaaaagagttaaggtcaatcaaagtcataaggtagttctaaaattcaacaagattttctccaagaggctaagttaatatcttttacttatgtgctaaacattatgaaatacatactctcctacttatatattattgattaatgatatataacaaatttttagagtaggaaagaagttacaaaactaataatcgaactaaaatta

SEQ ID NO: 661891 - DNA, 429 bp, Homo sapiens
acaacactgtgcactgctagctgagaggacttggcagtcgattctcatttcagagatccagagttcttgtttgttgtgactatctcctcttgggcttgtctgccttttccttctcctaagcatgacagtgatatcagctgaatttcattccagctcttctgaaattggacagctttgtatttcccccttggttccaaggatcaaatttaaatgctattttagcctcttgctgcatagggagcctacaggatatattctgcctttgccatagagaacaggcctttcaaacatgtggtagaaaacctaagggggttggttgtacactggaattggccagcgtacccagcagcttgcctagccsttgtagcaaacatgttaattcaagcttagttatgctaaacctcaaggcttgttctttgaaaattaaat

SEQ ID NO: 661892 - DNA, 211 bp, Homo sapiens
ggactactgtcttttgggaatgttctacctgcaaactggcttatcaactttggtcagagaaattgtgtgggtcaaaacttgtattttacatgatccagagttgttgctatgtttgrattctcattattttggtctcctcctatgtttggattgatgttaacaacctaatatgttaggttgaaccacactaaattgtcattattcaaccggt

SEQ ID NO: 661893 - DNA, 594 bp, Homo sapiens
tcttggcagtgctattccttggtgccttgataaccataaactgctgttgtgtttaaaacaattattgcattctgcaaaattcttagtcgtattggacaatatttcagtcttacttttctgctcctctcttatcacaccctcaattctaggtgtgctgacaaggcactgagcaagggaatgggaaaatactggaaatgtagcaagaaatgcaaggagctgttctgatctcctaatttctgtgcacctgcatttgataggatwactctctctggctctgaaatcaatcgtcttctgtctcatccccttcagccattgtgacctcaccatatgcccctgactggagagaagcccaggttggctgcctacaatcagagtccacatatgttcgggggagggaccccagaaggcggctgacagtattcctttagccagaaatcccttcagggaagagaaaggtgctcccctttgcctgcttttatactacagactgtttccaactccagctagaagtgactattgccgattatggtaacttacctttaccctccagctgtagagctcagccaatggatcttatctatcttggcaaaaaaa

SEQ ID NO: 661894 - DNA, 670 bp, Homo sapiens
acgaccttcctcagggaacacttgactggtaagggaaaaataccttaagcgagcatgtgcacaatttcaataaacataccgagcatgtggccactgctcatgtggacagcctgctccaagggaagaatcaagggagaagaaatgcaaacctgggacgatgccartgtgtaaaaccccaagtcaaaggccagacgaggcgcttggatctctcaagtcacctgcttggccctcttccaagtgtactttacttcctttcattcctgctctaaaactttttagtaaacattcacttttgctctgaaacttgccctggtctctccttttgctttaaacctacttctgtgcctcagccaaattatttcctctgaggagggaagtataaagttgctacagaccagacccatatgaattcaccactggtaacaatatagtgcccttctttatccttgataatttctttgctccaaagatgattatattttaataaagccaaatatattctttaattattttttccagctacttttgattagtgtttaatagtatgtctttttccattcttttaattttaacctacctacattatatttgaagtttttttttaaataaacaatatgtagttggggtcatgtttgtttttacattctgataatctgtgtcttaaattata

SEQ ID NO: 661895 - DNA, 592 bp, Homo sapiens
ctattgcaagagcaaatacactacttcaatatatacatgtttcctcatttttttctttttttttttgagatggagtctcactgtgttgcccagactggagtgcagtggcgtgatctcgactcacttgcaacctccacctccctggttcaaacaattytcctgcctcagcctcctgagtagcttggattacaggtgtgaaccaccatgcctggctaatttttttttttttttttttttttttagtagagatgggatttcaccatgttagctaggctggtctcgaattcttgacttcaggtgatccgcctgcctcagcctcccaaagtgctgagattacagttgtgaaccaccgttcccatcccttttcctattttttaattaacaagggcaaaaaaaaaaaagaaccaaaaatatgcccccataaatcaacaatatattcctgttaaaaacaaataaagcctcatttccacagcattaatgaaacaaagactttgagaatataattgctatttcttcaaagttaagagaatatttgttaaaagaacaattttgatgcattaaaatgttataattcagactttcttattagtta

SEQ ID NO: 661896 - DNA, 557 bp, Homo sapiens
tccttaattaaatcacatctgcaacattcctttagccatgtaagaaaacatccaaacattccagagattaggatataaatattttgaggggctattgtgtagctgaccrtactggtccatcgaaaattagtgtctataaatagttacctgaatgtgtaacctaagagagtttttgtaaatgatatgaacaaatattttatactcatttttgggaaagaagttcaaaatttctttataaggtactaaacctttatggtttagtaaaggtataaaatcatattttataatattgtgaacttttgtatgtaactcaagaaagctaggctacattcacgtaactattagaagggcagtgatagcatgtggacaggatcaaaactttgagatttctacctgtctcatacagcagttgcagccccccttgaccatctcaacttgagtcccatgtgcacagatatcatttcacaaaaagaaaaagaataattactgatttggctctgaaatgcttatgtatccagccctccagagaacaaaccggtacttcatatgtatcatga

SEQ ID NO: 661897 - DNA, 557 bp, Homo sapiens
tccttaattaaatcacatctgcaacattcctttagccatgtaagaaaacatccaaacattccagagattaggatataaatattttgaggggctattgtgtagctgaccgtactggtccatcgaaaattagtgtctataaatagttacctgaatgtgtaacctaagagagtttttgtaaatgatatgaacaaatattttatactcatttttgggaaagaagttcaaaatttctttataaggtactaaacctttatggtttagtaaaggtataaaatcatattttataatattgtgaacttttgtatgtaactcaagaaagctaggctacattcacgtaactattagaagggcagtgatagcatgtggacaggatcaaaactttgagatttctacctgtctcatacagcagttgcagccccccttgaccatctcaacttgagtcccatgtscacagatatcatttcacaaaaagaaaaagaataattactgatttggctctgaaatgcttatgtatccagccctccagagaacaaaccggtacttcatatgtatcatga

SEQ ID NO: 661898 - DNA, 457 bp, Homo sapiens
tctttggataaactgctttcgaggtggacatgycaatgaaataaattcctagcgggctccacccatcggctctctagggagttactgcagcatctgaatctttgagcacagtttacagctaagctgggaacaagcttctcctttccctcctaatatctactttgtgtgtcataccactgatttactggactagatctaatagttttgtgccagtttcacttaactatgttattgttatcaagaaatggagttaggtcatgtcgaaaatgggatatttgtgtgcatctttttaaaatttattgtgtgcgtgttatttagaagccccacgtgttggctcggacatttctaccatctgtagtttaggcagagtagccatacccaaacgacttctggaaagtgccggatatggaatgcatggagcagagtgtggttgtctgagagttaacactgtaacaag

SEQ ID NO: 661899 - DNA, 457 bp, Homo sapiens
tctttggataaactgctttcgaggtggacatgtcaatgaaataaattcctagcgggctcmacccatcggctctctagggagttactgcagcatctgaatctttgagcacagtttacagctaagctgggaacaagcttctcctttccctcctaatatctactttgtgtgtcataccactgatttactggactagatctaatagttttgtgccagtttcacttaactatgttattgttatcaagaaatggagttaggtcatgtcgaaaatgggatatttgtgtgcatctttttaaaatttattgtgtgcgtgttatttagaagccccacgtgttggctcggacatttctaccatctgtagtttaggcagagtagccatacccaaacgacttctggaaagtgccggatatggaatgcatggagcagagtgtggttgtctgagagttaacactgtaacaag

SEQ ID NO: 661900 - DNA, 609 bp, Homo sapiens
aagtgtttagccagtatttcatttgattctttaggacactgaaataggcaggatggatatcatgctcccctatccaccctattcctttgatatgaatgaggaaagtaaggcttaaacagtttaaataatgtgtaaaaagtctcaggactaacaactaaaaaagtagggaccagaattctgatattatttctggtccagtcctctttctattataccttgatgactgttgagattaaatctgagaatttgcaaaatattacaggarctcttcttctttctcttcagaacctaggttgtattatcaagtgctatgactaggatctgtgtccgcacccaaatttcatggtgaaaggtaatccccaatgttggagttgggagcctggtgagaggcaattggatcatgagggtggatttctcatgaatggtttagtaccatccccttggtgctgtcctggaaatagtgagtgaggagggatcttgtcctttaaaagtgtgtggtgcctctcccatctctctctcttttgcttctgcttttgccatgtgatgtgcctgctccctctttgcattccgccatgattgtaagcttccagaggcctctccagaagcaga

SEQ ID NO: 661901 - DNA, 515 bp, Homo sapiens
ttttaaactctgtcagtgtgggatagactggagaaagacaacagtggtccaggtgaaagcccgatgagcagtgacattcatcgtatgctttctcagctagtatctctggttgttatttttcatttagaagtaagtgaaaaggaaaaagaatatcaaaaagacaaaatctgtttcttaaaattctgttgtcatttttgttaaataatgtcgtggggtattttttccccagctttttttgtagaaagccgggatctagtgtcttcttgacaaccagcggtaataacaagaagatgaacatttcggggagaaaaaaaggagaatatttagatcatagtgattaaaaaaattataactcaggatatcttgcctaaagattttacattgctataagcgaaaamtgggcaaaatactttttctttgttgagcttgaaactttcttttcaccttacctttccatttcttttccactataaacacaaggttataaatcttatagtaaggcaaaataaattggc

SEQ ID NO: 661902 - DNA, 610 bp, Homo sapiens
tattgcttgcaatttatttggaaggcaggaacatctatatgctttgactttaagggttgtcaagttatgttcatytttacttcaacagctggaaattcctagcgcaaggaaggtaaagactggcaaatatccccctcagaactagcataaatgcaaacatggttattttgtaaggccctcctgacaccagggctgttaagtaatacttggcgttcaactttggggctactaatattgaaaacatttaaagaacatgaaagtctctgaaagccttataattgtaaatgctgaaggagggacagtttccatcattcaaaatcaggagtgttaacatcacagtcaataaaattataaatatgagatttgtggagatcttatttatgagaacaaggtcacaaaatcaaagattgaaaattctgctgtgaaaagttgagagtcatctgaattccctttatccaagcaatagctaaaatacatactccaaaagactcccttacatttttattaacatttaaaattggcaatgtagataaaacattgagagattatgatgtgaattataaaaattagctgcattgtgtcaagtcataatatcttgaggataaagaag

SEQ ID NO: 661903 - DNA, 610 bp, Homo sapiens
tattgcttgcaatttatttggaaggcaggaacatctatatgctttgactttaagggttgtcaagttatgttcatctttacttcaacagctggaaattcctagcgcaaggaaggtaaagactggcaaatatccccctcagaactagcataaatgcaaacatggttattttgtaaggccctcctgacaccagggctgttaagtaatacttggcgttcaactttggggctactaataytgaaaacatttaaagaacatgaaagtctctgaaagccttataattgtaaatgctgaaggagggacagtttccatcattcaaaatcaggagtgttaacatcacagtcaataaaattataaatatgagatttgtggagatcttatttatgagaacaaggtcacaaaatcaaagattgaaaattctgctgtgaaaagttgagagtcatctgaattccctttatccaagcaatagctaaaatacatactccaaaagactcccttacatttttattaacatttaaaattggcaatgtagataaaacattgagagattatgatgtgaattataaaaattagctgcattgtgtcaagtcataatatcttgaggataaagaag

SEQ ID NO: 661904 - DNA, 502 bp, Homo sapiens
aaagtcactttcctgaccaaagacatgatgcctaacttcyagaagaaatgattactggtatcatagataacaaattaaaagtaatatgaactgtcttttacttggaagactttccaaagatatacacatcagctaaacagagtggtgcaatagctaatcttacttctaattaatgaatgaaatgatcaatagaagtgaatgtgcaggtcaaggacagaaggtggggacaagagaaaacagccaaagttcccctgggagtgaaggccagacagtttccaagatggagccaggacttggcaaggcttcatggaagaagcttgtgggcagatggcatgagaccgttcacaaatcactgctggtggtgcctttaatattgtagatatttttaaatcttagatgtacccattatgtggtagatacgcatgtgttttcgaaaaaatacagtgacatctttatttgtctgtatgtgtgatgatccccttctctttacctaaatgacatt

SEQ ID NO: 661905 - DNA, 581 bp, Homo sapiens
gtcatgaattgtatttcttagcacttaactgaaactggggacaagagccatcattcgttgtgtttagtatgacaacatactagaaggtttttttttttctgttaggtatttgaaaagcttaaaatttggcacaggactrtaacatcaggaatcccttcattcccacctctctctcgtctttcttcttctgcccccttttctccttaccagtgggaaacgaatttagatgaaacaatttgatgaatggattttgagcaatttcagtgaagaaatatgtacttacaggttcaattgggtttctagtgtgttaatacattatcagagtcatttataacctgcattcttatggctgtaaattaatttcattatataatttatataaaaaagataatagattgatgcatgttattatttccttaccttcactaattaggttattactaaatgagatcagctaaattctgaagcttttaatggaaaattgatgtagctattgtgagctctggaaatcttatttctttgttctatcactataatatgtgtataaggattcatcaccaaaacttgatatttaagtcaaa

SEQ ID NO: 661906 - DNA, 579 bp, Homo sapiens
cttttggggactaaaaaaaatgcgtatcttttcaatacataaaaagacaatagcactatatgctagtcagttctacttgattctctatgcttataaggtcaaggtcattctcctttctgaaataatgataggagaatgttcctaaaagtaaaaagtygaatactggaatcagttagatctcaagcatataatgattcatggaagcatatgtatattgtcacagagtttttttttaagataataaaccagagaccttataataaataagagcaacatatatcccgaatttattattttcaacatgatatatattattttcagacatctttaaaatatttttagagaattgaaaacatatcctctaaatatatcaaactaggatgtgattgataaaatggggttgaagtggatcttaagtcagtcttaactacttgtgtgtttcattgtgtgcttgtgtaaggccctatgctagccgcaatgaagggtataaaaatgcatttgacacagtgtttatcctcaaagagattatcctctaatactgtgtgcagttaacacaatctctgtggaatttttttttta

SEQ ID NO: 661907 - DNA, 436 bp, Homo sapiens
acaatttttcataattaagtttgaaattattgtagcagatacactggtcttcctatcatgatgattgtgttctcttcctaacatggcattcaccttagtaactcactgttaatatgtaaaacacaaaacagaaagataaggaaactggtaaattccatcagcctaacaagtttcctccatgttttcctttgacttatgctgaagttaactgcaggggatgtcctggttctttctagcttctctagttttaatgtcaagagcaatttattttctttctgtcttcttatccacttgaagtggtakaaagaaactttattcataaataaaatctccctaggtaataaatttttggtttaaaatacctttaactattggcaactcctaaatttctctcaacaaggagcttaggggcagtaatccggctggaagtggtgat

SEQ ID NO: 661908 - DNA, 581 bp, Homo sapiens
tgaatcagtataaaatttggcaccaagacatacaactcagagaccttattaaatacaaggatgatgctacattacatttaagcagtacctgttgaaaattaacacctaatagggtgcaattgcttcacagtttcctcaagaggaaatctgccttatctctttaattcaattcattttgctttgaataatttcatgtatattattcagcttctggctctaaacagtggcaaaagtatttattcgttagaaagtaagtgccttggttgttgagcaatcctcttayacaccagacacattttcccctgctatagactttttcttcaaatacctacttgcattttattttgtggatatttcacataattaattatttagcatcaaattgatcagcttggaataaaggactaaatataagcaaatatatttatattttaaattaattttagtttttatttggcattgatatggtttgtgtctcttgtccatttgtaatccccagtgttagagatgggaggtgattggatcatggggacagattgctcaagaatggtttagtatcatcaccttagtgccatcctcac

SEQ ID NO: 661909 - DNA, 431 bp, Homo sapiens
gtaagaaacttacaaaatgttttctcaatgtatgagcactctagttgttccacatctttaccaacatttggcattgtctcttttacatttcagccattctagtgtgtgtgctgtggtatccccttgtagttttaatttgcatttttctgatgattaacgttgttgagcttcttytcatgtgcatgttagatctctatatattttattttatgaaatatctgttcaaaacttgtacccatttatgaagcaagttgtttgttttatcataatttagttgtaggtgttctttatattgtctgcatactagtcctttctcagatatatgtattgtaaatgttttctctcagagtgtgccttacctttttattttcttaatgatttctttcaaacagcagggtcttaaaattattactttttaaattttattgcct

SEQ ID NO: 661910 - DNA, 704 bp, Homo sapiens
tttgcccattatgcatagcatctgcatctcctgcaggcctgaagctcccatgaagacagagaatgtgagtgccttgcttactgctatgagcctgatacactacttatgacacagtaagattacattggttactaatgtcattgtctataggtaataagcagtggtttmagccagaaataatttatcctttatttattagaaaatttgcaggtaggttgttcctatattggtttgccagctcagtgagatcaccagaaacctgctatgtttcatccctatctctgccatgttcagcatgatgggtttttcatggctagccttgttgcctcatggttctaagatggctacaacagctctaaggatcatatcttcacacaagcagagtcaaagatagaaagaaagagatgaccagggtggtgaagaagagctcccctcacgaacctctttacttttatcaaggcagaattctctttcctgggagccattcaataggcttccccttatattttattctttataactggttgaccagctccttctagcagcaaaagtggatggaaatgtgattataaggcttttcagcctctatagttggatgtaggtgaggcaaaaggtttaggaagaaatgtggggtagtatctgacatgtggtgctcaggaaatacatctttagtgggtaagcaaaacatttgtctagaacacact

SEQ ID NO: 661911 - DNA, 599 bp, Homo sapiens
gacttgaagaccatgtctgtagcccgtgtcatgatctggcgttgggtaggtctagaatttgaaccctgaaccgttgacatcttttgtcaagttccttaaacccacatccagcattttcacctagcatgttatttgcaagtgacttgacacaaggccatctgtaggggttygaatgacagggtctttattaggatgaaggaatatcttatttgtgagttaggtggctattggtgtagcctgacactgagcttttgcagcaacagtgtggccaggttttacctgctttgctgctccttgatcgtggctggactctctgcttgcagtctcagaagccatctcttttctcagaaatcaaaatcaaagcaaaacacaaacaataaactttcatctctcacttgaccatcttttctccctgctgtcctacctacatagatcaagctgcctctttgccaggtactgagaagaaaggattctatttcgttggcctacattgtacctacatagctgaaatgttcccaaacatttcagagcagtctcaatcaaatagactttcacagtttttgcaaacatcccagactggtgagtgcaaacgcatatag

SEQ ID NO: 661912 - DNA, 599 bp, Homo sapiens
gacttgaagaccatgtctgtagcccgtgtcatgatctggcgttgggtaggtctagaatttgaaccctgaaccgttgacatcttttgtcaagttccttaaacccacatccagcattttcacctagcatgttatttgcaagtgacttgacacaaggccatctgtaggggtttgaatgacagggtctttattaggatgaaggaatatcttatttgtgagttaggtggctattggtgtagcctgacactgagcttttgcagcaacagtgtggccaggttttacctgctttgctgctccttgatcgtggctggactctctgcttgcagtctcagaagccatctcttttctcagaaatcaaaatcaaagcaaaacacaaacaataaactttcatctctcacttgaccatcttttctccctgctgtcctacctacatagatcaagctgcctctttsccaggtactgagaagaaaggattctatttcgttggcctacattgtacctacatagctgaaatgttcccaaacatttcagagcagtctcaatcaaatagactttcacagtttttgcaaacatcccagactggtgagtgcaaacgcatatag
